United States Patent Application Publication US 2013/0267429 A1 - sequence listing, part 15

SEQ ID NO: 334826 - DNA, 59 bp, Artificial
  Synthetic oligonucleotide
atggccagtaaaagttatacacactgataatggacccaatttcactagtgccactgtaa

SEQ ID NO: 334827 - DNA, 57 bp, Artificial
  Synthetic oligonucleotide
atggccagttgccgctccattgactggttcgaccaggggtggggtcccatcacttac

SEQ ID NO: 334828 - DNA, 55 bp, Artificial
  Synthetic oligonucleotide
atggccattactattaagccggaggcaaccactaatcaggattcttatggtggtg

SEQ ID NO: 334829 - DNA, 53 bp, Artificial
  Synthetic oligonucleotide
atggcccagatggcctgtgtacatcaaagtggccgacggacccgaattcgaat

SEQ ID NO: 334830 - DNA, 60 bp, Artificial
  Synthetic oligonucleotide
atggcccagcattaagcatcaatgaattgagcaatcttgcgaaaggagagaaggctaatg

SEQ ID NO: 334831 - DNA, 55 bp, Artificial
  Synthetic oligonucleotide
atggcccatgattcgtttgggcctatagaacatggagtgtacctcatggatctcg

SEQ ID NO: 334832 - DNA, 52 bp, Artificial
  Synthetic oligonucleotide
atggcccccactaacgtggatacacgcaacatgatagacggatctatttctc

SEQ ID NO: 334833 - DNA, 55 bp, Artificial
  Synthetic oligonucleotide
atggcccctggatccccacacactaatgaaggcgcattcaggcctaccaaaggaa

SEQ ID NO: 334834 - DNA, 60 bp, Artificial
  Synthetic oligonucleotide
atggcccgagagaagcatccggagtactacaaagactgctgacaccgagattctacaggg

SEQ ID NO: 334835 - DNA, 60 bp, Artificial
  Synthetic oligonucleotide
atggcccgtcgatctcttgtatcgagatctgctctctcgggtacaatttgttggacccat

SEQ ID NO: 334836 - DNA, 53 bp, Artificial
  Synthetic oligonucleotide
atggccctccctcaaatctctcttcgaaccagaccaatgatacaatgcataat

SEQ ID NO: 334837 - DNA, 54 bp, Artificial
  Synthetic oligonucleotide
atggccgagatgggcaatttacattaaagtgtccaacgaagaaaaattccgatt

SEQ ID NO: 334838 - DNA, 55 bp, Artificial
  Synthetic oligonucleotide
atggccgagggtgtaacacctagtttacttagcaagtgcacagtgcagcaagcgc

SEQ ID NO: 334839 - DNA, 58 bp, Artificial
  Synthetic oligonucleotide
atggccgagtttatgctgccggggtcggacagcgccgaaggcgcgcgtgcgaggcccg

SEQ ID NO: 334840 - DNA, 60 bp, Artificial
  Synthetic oligonucleotide
atggccgatctctcgtccaggtttggccttcgcaagccgagctgagctaggatcggaatc

SEQ ID NO: 334841 - DNA, 57 bp, Artificial
  Synthetic oligonucleotide
atggccgcacaaataattgtgaggcccaagacttctggcccatacggtcttccctgt

SEQ ID NO: 334842 - DNA, 55 bp, Artificial
  Synthetic oligonucleotide
atggccgccaattacttccggggtcaaaggttgctgctacgtcatcgagacacgt

SEQ ID NO: 334843 - DNA, 55 bp, Artificial
  Synthetic oligonucleotide
atggccgcgcctacggtgctctgatgacgcagccctgccgcaccgaccccgccat

SEQ ID NO: 334844 - DNA, 59 bp, Artificial
  Synthetic oligonucleotide
atggccgctccttgcctaaaataaccaatgagcagctggatcgtctttggaggggagga

SEQ ID NO: 334845 - DNA, 57 bp, Artificial
  Synthetic oligonucleotide
atggccgctttctcactccacggttactccccaggcgaactcaatagagtggcgtcg

SEQ ID NO: 334846 - DNA, 59 bp, Artificial
  Synthetic oligonucleotide
atggccggtccagcactggtgggtctgttatgcgctatgattttcggcgggataactta

SEQ ID NO: 334847 - DNA, 54 bp, Artificial
  Synthetic oligonucleotide
atggccgtatcctctagtgttggcggtttcgcaaacggtggtgtatttaaacca

SEQ ID NO: 334848 - DNA, 58 bp, Artificial
  Synthetic oligonucleotide
atggcctaaattcttgctaattgtctctgttgaattggagacaggcctaactgggaat

SEQ ID NO: 334849 - DNA, 59 bp, Artificial
  Synthetic oligonucleotide
atggcctaggacaatatatctatgaaacctatggggatacttggacaggagtggaagcc

SEQ ID NO: 334850 - DNA, 50 bp, Artificial
  Synthetic oligonucleotide
atggcctataacggagagtactgactttaactagttgggagtccggctcc

SEQ ID NO: 334851 - DNA, 60 bp, Artificial
  Synthetic oligonucleotide
atggcctatctagccacacctgtgctaggagtcggttctcgcattaccgccttagatcgc

SEQ ID NO: 334852 - DNA, 52 bp, Artificial
  Synthetic oligonucleotide
atggcctctcagtaatgttgccccattatgtatatttccaccggacctttat

SEQ ID NO: 334853 - DNA, 50 bp, Artificial
  Synthetic oligonucleotide
atggcctgagggttgactgccgtcgcaatgtagtgcaggtagggctgcag

SEQ ID NO: 334854 - DNA, 57 bp, Artificial
  Synthetic oligonucleotide
atggcctggacagtagtaaacagtatttgcaacactacaggggctgagaaaccgaag

SEQ ID NO: 334855 - DNA, 57 bp, Artificial
  Synthetic oligonucleotide
atggcctggagatactactggagacgaaaaagacccttcagaagacgctggaaaaga

SEQ ID NO: 334856 - DNA, 57 bp, Artificial
  Synthetic oligonucleotide
atggcctgtaaactgcacttcgggttggttccaatgaacacgcgggccaacctcagc

SEQ ID NO: 334857 - DNA, 58 bp, Artificial
  Synthetic oligonucleotide
atggcctgtactcacgcatcgaaccctgtatacgcgactttgaaaatccgaatctatt

SEQ ID NO: 334858 - DNA, 60 bp, Artificial
  Synthetic oligonucleotide
atggcctgtactcatgcatcaaatcctgtatatgctactttgaaaatccggatctacttt

SEQ ID NO: 334859 - DNA, 60 bp, Artificial
  Synthetic oligonucleotide
atggcctttcaggaacgtatgtctaatacggcctatcagagaagtatggccgatatgcgt

SEQ ID NO: 334860 - DNA, 60 bp, Artificial
  Synthetic oligonucleotide
atggcgaaaggattcagagactaggcagagtcgggcgaaacaagcctggagccgcattgc

SEQ ID NO: 334861 - DNA, 60 bp, Artificial
  Synthetic oligonucleotide
atggcgaacgtttggggagtgagacttgcagattcactgtcgtcacccactattgagacg

SEQ ID NO: 334862 - DNA, 54 bp, Artificial
  Synthetic oligonucleotide
atggcgaatctcgaagataaaaacaacacgtggttccgtagttctgttatttta

SEQ ID NO: 334863 - DNA, 56 bp, Artificial
  Synthetic oligonucleotide
atggcgaatgccaaggcgaagaagtggctacccgccaccctccacggggtgacgta

SEQ ID NO: 334864 - DNA, 56 bp, Artificial
  Synthetic oligonucleotide
atggcgagactaggaaaggggtacatgtttgagagcaagagtatgaaacttagaac

SEQ ID NO: 334865 - DNA, 59 bp, Artificial
  Synthetic oligonucleotide
atggcgagttcaccatgttgggcatctatgacaggtgggctgtcttaccacgccacgct

SEQ ID NO: 334866 - DNA, 60 bp, Artificial
  Synthetic oligonucleotide
atggcgatacaacaatatttgagagttggttatgctgaagagatcaggtatgtgcaacag

SEQ ID NO: 334867 - DNA, 60 bp, Artificial
  Synthetic oligonucleotide
atggcgatacagcaatatttgagagttggttatgctgaagaggttagatatgtacagcag

SEQ ID NO: 334868 - DNA, 57 bp, Artificial
  Synthetic oligonucleotide
atggcgatataaagaccacccacactctttcgggtgagtccctaagccatggttgta

SEQ ID NO: 334869 - DNA, 58 bp, Artificial
  Synthetic oligonucleotide
atggcgatctccacttccacgaacaatttactaatgacgtagatttagacttattatg

SEQ ID NO: 334870 - DNA, 60 bp, Artificial
  Synthetic oligonucleotide
atggcgcacacactaataatgattgggtccaacgcatctgacaggatgggaatgggcgtc

SEQ ID NO: 334871 - DNA, 51 bp, Artificial
  Synthetic oligonucleotide
atggcgcactttcgtgcaaaagcctgtggctgccgaccccaatttccagcg

SEQ ID NO: 334872 - DNA, 59 bp, Artificial
  Synthetic oligonucleotide
atggcgcatgatgaccatgaggcctggcggcgttcgcaattagcatggatgggccacat

SEQ ID NO: 334873 - DNA, 60 bp, Artificial
  Synthetic oligonucleotide
atggcgcatggaaaaatgagggcctagcgtggtaccggatgggcatggacctatcccatg

SEQ ID NO: 334874 - DNA, 60 bp, Artificial
  Synthetic oligonucleotide
atggcgccgtgcagtaactgcagaagcgattgctcgtcatggagcatctattgcgattga

SEQ ID NO: 334875 - DNA, 56 bp, Artificial
  Synthetic oligonucleotide
atggcgcctcccaggaaaagagctcgttgtgtgtcaactccaaccaaagttaaatg

SEQ ID NO: 334876 - DNA, 54 bp, Artificial
  Synthetic oligonucleotide
atggcgcctcttcctatgcctaggtccggagcctcgatggttgtgtacaaggga

SEQ ID NO: 334877 - DNA, 60 bp, Artificial
  Synthetic oligonucleotide
atggcgcgatatgtggtatgctggatgttcaccatcaacaatcccgcttcactaccagtg

SEQ ID NO: 334878 - DNA, 55 bp, Artificial
  Synthetic oligonucleotide
atggcgcggagcctcgacgagatagggaggcagatgcacaccgccaatcagctca

SEQ ID NO: 334879 - DNA, 60 bp, Artificial
  Synthetic oligonucleotide
atggcgctatttcacaaccctgaggaacggccatacaaattgccagacctgtgcaggaca

SEQ ID NO: 334880 - DNA, 60 bp, Artificial
  Synthetic oligonucleotide
atggcgctcatgggaatcgttccacaaacgtccctgaccgacggtgaagtcatcctcatg

SEQ ID NO: 334881 - DNA, 60 bp, Artificial
  Synthetic oligonucleotide
atggcgcttcaaggcaccaaacgatcctatgagcagatggaaactgatggagaacgccag

SEQ ID NO: 334882 - DNA, 56 bp, Artificial
  Synthetic oligonucleotide
atggcggaaccaccagatgcggctacacctaaaacgagtccatatttaaagggaga

SEQ ID NO: 334883 - DNA, 47 bp, Artificial
  Synthetic oligonucleotide
atggcggagggactaaggggggggcaagcccccccccgggggttgag

SEQ ID NO: 334884 - DNA, 59 bp, Artificial
  Synthetic oligonucleotide
atggcggcaacattttacctgctatttataggtgaggacaatattaccgactccagcta

SEQ ID NO: 334885 - DNA, 60 bp, Artificial
  Synthetic oligonucleotide
atggcggcacctagtcagcgtaaggcagtcctgtcgactcttgtcggtaggtatggccgc

SEQ ID NO: 334886 - DNA, 60 bp, Artificial
  Synthetic oligonucleotide
atggcggcattcactggaaacactgaaggcagaacttcagacatgagaactgagatcata

SEQ ID NO: 334887 - DNA, 60 bp, Artificial
  Synthetic oligonucleotide
atggcgggcaggccgctatctgccaccgcactggcagaggagctaggaataggtataaaa

SEQ ID NO: 334888 - DNA, 55 bp, Artificial
  Synthetic oligonucleotide
atggcggggacctcaaaggtgtcccgtgctgccaattattcccctggagcgggaa

SEQ ID NO: 334889 - DNA, 57 bp, Artificial
  Synthetic oligonucleotide
atggcggggacctccaaagtcagtcgtaatgtcaattattcgcctcgtggtggtcca

SEQ ID NO: 334890 - DNA, 56 bp, Artificial
  Synthetic oligonucleotide
atggcgtacagaaaacgtggagcgcgtcgcgagacgaatttaaagcaagatgatcg

SEQ ID NO: 334891 - DNA, 55 bp, Artificial
  Synthetic oligonucleotide
atggcgtacagaaagcgcggagctaaacgtgaaaacttaccacaacaaaatgaac

SEQ ID NO: 334892 - DNA, 54 bp, Artificial
  Synthetic oligonucleotide
atggcgtacaggaagcgcggaactaaacgcgaaagtttatcacagcaaaatgaa

SEQ ID NO: 334893 - DNA, 55 bp, Artificial
  Synthetic oligonucleotide
atggcgtacgatcccgggaacccctgcgctaatcagagatacacattgctggagt

SEQ ID NO: 334894 - DNA, 59 bp, Artificial
  Synthetic oligonucleotide
atggcgtattataggcgctcgtatagaaggtcctacaaccgcaggcctgcccgcaggtc

SEQ ID NO: 334895 - DNA, 60 bp, Artificial
  Synthetic oligonucleotide
atggcgtcaagcgaacaatggggaagacgcaacagctggtcttacccatctgatgatctg

SEQ ID NO: 334896 - DNA, 60 bp, Artificial
  Synthetic oligonucleotide
atggcgtctcaaggcaccaaacgatcttacgaacagatggagactgatggggaacgccag

SEQ ID NO: 334897 - DNA, 60 bp, Artificial
  Synthetic oligonucleotide
atggcgtctcagggcaccaaacgatcatatgaacaaatggagacaggtggggaacgccag

SEQ ID NO: 334898 - DNA, 60 bp, Artificial
  Synthetic oligonucleotide
atggcgtgcaaacacggatacccgtttttgtgccctctttgcactgctatcgacaccaca

SEQ ID NO: 334899 - DNA, 60 bp, Artificial
  Synthetic oligonucleotide
atggcgtgtactcacgcctctaatcctgtgtatgctaccttaaagatacggatctatttc

SEQ ID NO: 334900 - DNA, 60 bp, Artificial
  Synthetic oligonucleotide
atggcgtgtgacataacagtggtgcaaccagacagagaggcggaggcactcaagactggc

SEQ ID NO: 334901 - DNA, 60 bp, Artificial
  Synthetic oligonucleotide
atggcgtgttcggcacccatctcgctgtctcctctttactccgtctggctcaacagctag

SEQ ID NO: 334902 - DNA, 55 bp, Artificial
  Synthetic oligonucleotide
atggcgtgttcggcctcatgctcactgtcaacgaccccacactgcgtcggtggct

SEQ ID NO: 334903 - DNA, 54 bp, Artificial
  Synthetic oligonucleotide
atggcgtttacatttccatgacaaaagttaaaagtctttcgatgattaaaggtc

SEQ ID NO: 334904 - DNA, 60 bp, Artificial
  Synthetic oligonucleotide
atggcgtttggttaattgacaggctatctaagaaggatcactgccgcatgtcatgggttt

SEQ ID NO: 334905 - DNA, 57 bp, Artificial
  Synthetic oligonucleotide
atggctaacaaacggaaaatattcatcagatgtatacgcgtatgggaaaattaataa

SEQ ID NO: 334906 - DNA, 55 bp, Artificial
  Synthetic oligonucleotide
atggctaagtcttcgtacaagcctgggcggtttggtgggaaacgcgtgcaacagg

SEQ ID NO: 334907 - DNA, 60 bp, Artificial
  Synthetic oligonucleotide
atggctaattccaagtcacaggtcaatagacaagtcatagttgacaataataactggtct

SEQ ID NO: 334908 - DNA, 60 bp, Artificial
  Synthetic oligonucleotide
atggctaccaatgggattagtatcaatcgatagtgctacaggctcacttaagcctgcggt

SEQ ID NO: 334909 - DNA, 56 bp, Artificial
  Synthetic oligonucleotide
atggctacgaaggctctaccgagagggacccgtacgaaatactcaagatgggtgtc

SEQ ID NO: 334910 - DNA, 60 bp, Artificial
  Synthetic oligonucleotide
atggctacggtggcattcctgggatgggtgaggataccactcgtgcattccttgacgagc

SEQ ID NO: 334911 - DNA, 58 bp, Artificial
  Synthetic oligonucleotide
atggctactaaacgcgcgcacgctagcaatgaccacgaagaggacgttaaacgagccc

SEQ ID NO: 334912 - DNA, 55 bp, Artificial
  Synthetic oligonucleotide
atggctactgaggcttcgaattacgctcagtaccgtgttgtccgcgctaccatcc

SEQ ID NO: 334913 - DNA, 57 bp, Artificial
  Synthetic oligonucleotide
atggctactttcaaagatacttgttattattataagagaattaacaagttgaatcac

SEQ ID NO: 334914 - DNA, 54 bp, Artificial
  Synthetic oligonucleotide
atggctagagacactgacatgcatatccaaaatgatgctatcacacaaaatcca

SEQ ID NO: 334915 - DNA, 60 bp, Artificial
  Synthetic oligonucleotide
atggctagatacgaggacctggcggcgacacggcataatttattcgccgttatcatgcca

SEQ ID NO: 334916 - DNA, 60 bp, Artificial
  Synthetic oligonucleotide
atggctaggcctgctgtccaagccgctttaagcgatccgcagataatgaatctagttgaa

SEQ ID NO: 334917 - DNA, 55 bp, Artificial
  Synthetic oligonucleotide
atggctatctcgccgcgcgctttgttctgccgcttaccgtcgtcccctcactgct

SEQ ID NO: 334918 - DNA, 55 bp, Artificial
  Synthetic oligonucleotide
atggctatgagagtgacaacactgaatacttggatgctcctgactctgctgacca

SEQ ID NO: 334919 - DNA, 60 bp, Artificial
  Synthetic oligonucleotide
atggctcacgaaaggaaaaccatgactacccctgagcgtgcagctctggttgagcgggcc

SEQ ID NO: 334920 - DNA, 54 bp, Artificial
  Synthetic oligonucleotide
atggctcacgacttgattaagaagtatcgcaagtaaccgtaaccccggttcgcc

SEQ ID NO: 334921 - DNA, 60 bp, Artificial
  Synthetic oligonucleotide
atggctcagaaactgtccctcactgcaattgcacatcaggagtttacttttccaggtact

SEQ ID NO: 334922 - DNA, 60 bp, Artificial
  Synthetic oligonucleotide
atggctcagattcgaggccttcggttgtctacgacactctcagctccaccaccaagaaag

SEQ ID NO: 334923 - DNA, 60 bp, Artificial
  Synthetic oligonucleotide
atggctcataggttaagttgtaaggctgatatgctttgcatcttacttgcaatcgtcagc

SEQ ID NO: 334924 - DNA, 55 bp, Artificial
  Synthetic oligonucleotide
atggctcatgagtttacgtgtagggagaaggtcgagaaatttaccggtcctcctc

SEQ ID NO: 334925 - DNA, 55 bp, Artificial
  Synthetic oligonucleotide
atggctccaaacatacaatttggaaccataactagtgacgtgctagttaacggag

SEQ ID NO: 334926 - DNA, 59 bp, Artificial
  Synthetic oligonucleotide
atggctccatagcttaggacaacatatctataacacctatggggatacttgggaaggag

SEQ ID NO: 334927 - DNA, 60 bp, Artificial
  Synthetic oligonucleotide
atggctccatagcttaggacaatatatctatgaaacctatggagatacttggacaggagt

SEQ ID NO: 334928 - DNA, 55 bp, Artificial
  Synthetic oligonucleotide
atggctccatctacgtggggagccacgcccatagccgctggcatggcaaggaggt

SEQ ID NO: 334929 - DNA, 60 bp, Artificial
  Synthetic oligonucleotide
atggctccatggattagggcaatacatctacaatacctatggagatacttgggaaggagt

SEQ ID NO: 334930 - DNA, 54 bp, Artificial
  Synthetic oligonucleotide
atggctcccaatacattatggttaggaaaccctccgttgtaacttccaaagatg

SEQ ID NO: 334931 - DNA, 60 bp, Artificial
  Synthetic oligonucleotide
atggctccgtaaaatatctaggcgtgggcacagtgctgaataaggatgatccgatcagcc

SEQ ID NO: 334932 - DNA, 59 bp, Artificial
  Synthetic oligonucleotide
atggctcctatccaacacagacaatggggtattcccacaaatgacaaaatcctacaaga

SEQ ID NO: 334933 - DNA, 60 bp, Artificial
  Synthetic oligonucleotide
atggctccttggcaatccagaatgtgaccttctactcactgcaaactcatggtcctacat

SEQ ID NO: 334934 - DNA, 50 bp, Artificial
  Synthetic oligonucleotide
atggctcctttggaaggttctagctgcggcgtcttagggtgaatctccta

SEQ ID NO: 334935 - DNA, 58 bp, Artificial
  Synthetic oligonucleotide
atggctcgagcgattggaatctactacgcaagttgtggagacccaaaaattcgcccga

SEQ ID NO: 334936 - DNA, 60 bp, Artificial
  Synthetic oligonucleotide
atggctctaaatgtcattacaatcctgacacttataagcgtgtgtgtgcgggcagacaga

SEQ ID NO: 334937 - DNA, 58 bp, Artificial
  Synthetic oligonucleotide
atggctctccctttcaggatcacgaacacacttgcttcccaaggttttgcaaagtcca

SEQ ID NO: 334938 - DNA, 55 bp, Artificial
  Synthetic oligonucleotide
atggctctgtacagtcttttgcacgacagggagtacacggggaaaatccttaaag

SEQ ID NO: 334939 - DNA, 56 bp, Artificial
  Synthetic oligonucleotide
atggctctgtgtctagaaagttactagggttttttacctgggacatttcagattca

SEQ ID NO: 334940 - DNA, 55 bp, Artificial
  Synthetic oligonucleotide
atggctcttcgactggcccagtttatgtttctgactctgtgaccttggttaatgt

SEQ ID NO: 334941 - DNA, 60 bp, Artificial
  Synthetic oligonucleotide
atggctcttctttcaagaacagctgcagaggaagtaatcgcatctttcacttccgaggaa

SEQ ID NO: 334942 - DNA, 55 bp, Artificial
  Synthetic oligonucleotide
atggctctttcgaaatggttttaccgaaggaacgtgaagacagcaaacaccacac

SEQ ID NO: 334943 - DNA, 56 bp, Artificial
  Synthetic oligonucleotide
atggctcttttaactttagcgctctttccttgtggtcgaattacttgcaagaagtg

SEQ ID NO: 334944 - DNA, 60 bp, Artificial
  Synthetic oligonucleotide
atggctgaaattgcgtgactcctacacccaggtgtgtgaccaccggctaatgtcagctgc

SEQ ID NO: 334945 - DNA, 60 bp, Artificial
  Synthetic oligonucleotide
atggctgacataagactcgatatagcgcccgatcttatccataatggtgtaccccagaga

SEQ ID NO: 334946 - DNA, 52 bp, Artificial
  Synthetic oligonucleotide
atggctgaggacattagctagcagatttcccctactacgtctggattcttat

SEQ ID NO: 334947 - DNA, 60 bp, Artificial
  Synthetic oligonucleotide
atggctgagtggaatagacggcctaagcgtgcatcaattcaaggtagtggctacccacgt

SEQ ID NO: 334948 - DNA, 60 bp, Artificial
  Synthetic oligonucleotide
atggctgcatcatgcggaggcgcggttttcgtaggtctgatactcttgaccttgtcacca

SEQ ID NO: 334949 - DNA, 60 bp, Artificial
  Synthetic oligonucleotide
atggctgcgggggcggtgtcttcttctgcggtaacgcctccttggatacgtcatatctga

SEQ ID NO: 334950 - DNA, 60 bp, Artificial
  Synthetic oligonucleotide
atggctgctaggctgtgctgccaactggatcttgcgcgggacgtcctttgtttacgtccc

SEQ ID NO: 334951 - DNA, 60 bp, Artificial
  Synthetic oligonucleotide
atggctgctggcccgcacagccttagctacactctaacatctgcaggccttgaagtgcat

SEQ ID NO: 334952 - DNA, 58 bp, Artificial
  Synthetic oligonucleotide
atggctgcttgtgggcgtttcgcactaagaaagtgcactcgttctatcgcccacctgg

SEQ ID NO: 334953 - DNA, 55 bp, Artificial
  Synthetic oligonucleotide
atggctggcaaggtctaatcgatggttggtatggatttaggcatcagaatgcaga

SEQ ID NO: 334954 - DNA, 53 bp, Artificial
  Synthetic oligonucleotide
atggctggcaatacattccagaagacatcaaaccgagtctaacaatgttgata

SEQ ID NO: 334955 - DNA, 59 bp, Artificial
  Synthetic oligonucleotide
atggctggcggagtggaagcgttgggtggcgtgccttctgccatcgaacgaggttcgtg

SEQ ID NO: 334956 - DNA, 59 bp, Artificial
  Synthetic oligonucleotide
atggctggcgttcactgactacataacggggacgggacttgacatcaagtttgaacaca

SEQ ID NO: 334957 - DNA, 54 bp, Artificial
  Synthetic oligonucleotide
atggctggtcaaaaaaggaaattcatacccaaagctcagtaaatcctatattaa

SEQ ID NO: 334958 - DNA, 55 bp, Artificial
  Synthetic oligonucleotide
atggctgtattcgctctcggttatttatatacctatgccgtttatatcggcaaaa

SEQ ID NO: 334959 - DNA, 59 bp, Artificial
  Synthetic oligonucleotide
atggcttacacacaacaagctaccaacgccgcattagcaagtactctccgagggaacaa

SEQ ID NO: 334960 - DNA, 54 bp, Artificial
  Synthetic oligonucleotide
atggcttcactcatttatagacaacttctcactaattcatactcagtagattta

SEQ ID NO: 334961 - DNA, 60 bp, Artificial
  Synthetic oligonucleotide
atggcttcgctcatttatagacaactacttactaattcatacacagtcaatctttctgac

SEQ ID NO: 334962 - DNA, 60 bp, Artificial
  Synthetic oligonucleotide
atggcttcgctcatttatagacaattacttacgaattcatatactgtagatttatcggac

SEQ ID NO: 334963 - DNA, 55 bp, Artificial
  Synthetic oligonucleotide
atggcttcgctcatttatagacagctcctcactaattcatatgccctagacttac

SEQ ID NO: 334964 - DNA, 51 bp, Artificial
  Synthetic oligonucleotide
atggcttcgcttatttatagacagctacttgctaattcatatgcagtagat

SEQ ID NO: 334965 - DNA, 50 bp, Artificial
  Synthetic oligonucleotide
atggcttcgtatggcggatcgtggaacattgctgattccctcgaggactc

SEQ ID NO: 334966 - DNA, 55 bp, Artificial
  Synthetic oligonucleotide
atggcttcgtctgaggaggtcgtagactctgcagcgcaagaattcaatgaaccct

SEQ ID NO: 334967 - DNA, 50 bp, Artificial
  Synthetic oligonucleotide
atggcttgcgcctagcaacatctctgcagggcctaccagtgatgaatgtg

SEQ ID NO: 334968 - DNA, 60 bp, Artificial
  Synthetic oligonucleotide
atggctttaaactaaccaatgctgccgagagatttgcagccatctacccaaggcataaga

SEQ ID NO: 334969 - DNA, 59 bp, Artificial
  Synthetic oligonucleotide
atggctttaacaacacctgtgtggaggcctggaccgatgtgaaggtccgtggctgtgcc

SEQ ID NO: 334970 - DNA, 59 bp, Artificial
  Synthetic oligonucleotide
atggctttacgcttagcagccctgtgttggaccttgattggaacctgagtagagcggtc

SEQ ID NO: 334971 - DNA, 55 bp, Artificial
  Synthetic oligonucleotide
atggctttccaaggtcccagtaggacgttaactcaacagtcctcggcggcgttgc

SEQ ID NO: 334972 - DNA, 58 bp, Artificial
  Synthetic oligonucleotide
atggctttggagcccgttgttggtgccgctattgcggcacctgtagcgggccaacaaa

SEQ ID NO: 334973 - DNA, 55 bp, Artificial
  Synthetic oligonucleotide
atgggaaaagtactgtgttcttgagataggggacatgctcctgcgaactgcagta

SEQ ID NO: 334974 - DNA, 57 bp, Artificial
  Synthetic oligonucleotide
atgggaaagatcattagatcgctaagtcgtttcggaaagaaggtgggaagtgcgcta

SEQ ID NO: 334975 - DNA, 58 bp, Artificial
  Synthetic oligonucleotide
atgggaaatccggggcatgcaaaagggcaaatgtgaatgactttttcaatagactgaa

SEQ ID NO: 334976 - DNA, 51 bp, Artificial
  Synthetic oligonucleotide
atgggaaattccccctcctataacccccccgctggtatctccccctcagac

SEQ ID NO: 334977 - DNA, 60 bp, Artificial
  Synthetic oligonucleotide
atgggaaattgaacagagtgattgagaagacaaatgagaaattccatcagatcgaaaaag

SEQ ID NO: 334978 - DNA, 57 bp, Artificial
  Synthetic oligonucleotide
atgggaaccaccatgtagatggtcgtaatgagcaattgcgggacggaaccgactact

SEQ ID NO: 334979 - DNA, 60 bp, Artificial
  Synthetic oligonucleotide
atgggaactgagagcatgaattttgccaagggcccggaaattgcagcaagacccgctgtg

SEQ ID NO: 334980 - DNA, 59 bp, Artificial
  Synthetic oligonucleotide
atgggaactgcttctatcacagtatagctgaattaaccatgcccaacaaaacggaccac

SEQ ID NO: 334981 - DNA, 60 bp, Artificial
  Synthetic oligonucleotide
atgggaacttgacgcttcggagaccaattctagattgcttaaattcatacaacgtgatga

SEQ ID NO: 334982 - DNA, 50 bp, Artificial
  Synthetic oligonucleotide
atgggaaggaggcgatttgcttcgctggtgatgatatgtgtgcaaattca

SEQ ID NO: 334983 - DNA, 60 bp, Artificial
  Synthetic oligonucleotide
atgggaatacaactggatcaacgtatcatactgctttacatgatccaatgggggaatgaa

SEQ ID NO: 334984 - DNA, 54 bp, Artificial
  Synthetic oligonucleotide
atgggaatacttactgacgaagttagacttttaatgcgtactggtaaactaaga

SEQ ID NO: 334985 - DNA, 55 bp, Artificial
  Synthetic oligonucleotide
atgggaatccaaagtgaagtgccagttgacaccaattgtgaaggggaatgctacc

SEQ ID NO: 334986 - DNA, 55 bp, Artificial
  Synthetic oligonucleotide
atgggaatccctgcgtccctctcacgtccagcccctccccgtgtcgatggaaggg

SEQ ID NO: 334987 - DNA, 52 bp, Artificial
  Synthetic oligonucleotide
atgggaatccctggtttcccctcaggtccagtccctccccggtccgagcaaa

SEQ ID NO: 334988 - DNA, 60 bp, Artificial
  Synthetic oligonucleotide
atgggaatggttggagtgttaccagatatgactccaagcacagagatgtcaatgagagga

SEQ ID NO: 334989 - DNA, 55 bp, Artificial
  Synthetic oligonucleotide
atgggaatgtggcgactacttcaccaacaaaacaaaacatcatccaatcaggggc

SEQ ID NO: 334990 - DNA, 60 bp, Artificial
  Synthetic oligonucleotide
atgggaatgttctggatgtgaactctatagatcttgaagagcctagtggtcagactgcag

SEQ ID NO: 334991 - DNA, 53 bp, Artificial
  Synthetic oligonucleotide
atgggaattcccctttggattttggtcaagttttcaacatgtttgacaacgaa

SEQ ID NO: 334992 - DNA, 60 bp, Artificial
  Synthetic oligonucleotide
atgggaattgacaaaggcgcaacgcagcgctttgctcaggctattctgttttgtatgtta

SEQ ID NO: 334993 - DNA, 60 bp, Artificial
  Synthetic oligonucleotide
atgggaattgtgcaaccatatatgcggaatgatttcgatcggaacgagatgcccgattta

SEQ ID NO: 334994 - DNA, 60 bp, Artificial
  Synthetic oligonucleotide
atgggacaactatcaagaatggctggtttaagacaaaggtctctatagatctggataaca

SEQ ID NO: 334995 - DNA, 56 bp, Artificial
  Synthetic oligonucleotide
atgggacaatggtgaagaccctaaccgacgataaagtagaagtggttactgcacaa

SEQ ID NO: 334996 - DNA, 55 bp, Artificial
  Synthetic oligonucleotide
atgggacagcaactaagtgctgctacaactaatgaattttgacaacactagtgcc

SEQ ID NO: 334997 - DNA, 53 bp, Artificial
  Synthetic oligonucleotide
atgggacatataattacccaaaataccaagaagagagcagacttaataggcag

SEQ ID NO: 334998 - DNA, 50 bp, Artificial
  Synthetic oligonucleotide
atgggacatcataagacgcgattctgacaagaagggttttcttgacactt

SEQ ID NO: 334999 - DNA, 50 bp, Artificial
  Synthetic oligonucleotide
atgggaccaggcaaagcattctatacaacaggacagatagtaggagatat

SEQ ID NO: 335000 - DNA, 60 bp, Artificial
  Synthetic oligonucleotide
atgggaccatacatgataggagcccattcagagctctcataagctgggaaatgggtcagg

SEQ ID NO: 335001 - DNA, 55 bp, Artificial
  Synthetic oligonucleotide
atgggaccattaaggacagaagcccttttagggccttaatgagctgtcctctggg

SEQ ID NO: 335002 - DNA, 58 bp, Artificial
  Synthetic oligonucleotide
atgggacccaagcccgatcaatcctgagttcaacgcacccgtgggatatactggctcc

SEQ ID NO: 335003 - DNA, 54 bp, Artificial
  Synthetic oligonucleotide
atgggaccttcgacaaaattgttacgagttgtatacctggctctagacttaaac

SEQ ID NO: 335004 - DNA, 54 bp, Artificial
  Synthetic oligonucleotide
atgggacgaaactgacgaaaccggaatcgttggcaatcacacagttgatagttt

SEQ ID NO: 335005 - DNA, 60 bp, Artificial
  Synthetic oligonucleotide
atgggacgcctcgttggccaattcaatgctctcaatgtttgagacttccacacacatacc

SEQ ID NO: 335006 - DNA, 56 bp, Artificial
  Synthetic oligonucleotide
atgggacgtttgggatggttgatggagtgacgggagatgtcattccggacccaccg

SEQ ID NO: 335007 - DNA, 60 bp, Artificial
  Synthetic oligonucleotide
atgggactatccatgatagaacagctttccgaggtcttatatccactcaattgggcactc

SEQ ID NO: 335008 - DNA, 55 bp, Artificial
  Synthetic oligonucleotide
atgggactgtacgcgtcagcagatttggacaaaggggaactattagaacccggag

SEQ ID NO: 335009 - DNA, 59 bp, Artificial
  Synthetic oligonucleotide
atgggacttatgactacccaaaatactcagaggaagcaaaactaagcagagagaagata

SEQ ID NO: 335010 - DNA, 50 bp, Artificial
  Synthetic oligonucleotide
atgggagaaacaaatccgctacctagaggcaaatatcagtgtaagtttag

SEQ ID NO: 335011 - DNA, 55 bp, Artificial
  Synthetic oligonucleotide
atgggagaattgactgaccttggacagagtttgctgtatactgaatcagcacaca

SEQ ID NO: 335012 - DNA, 60 bp, Artificial
  Synthetic oligonucleotide
atgggagaggaatgggagatcacaaacgctagttcagatgcggcacactatcgctggaaa

SEQ ID NO: 335013 - DNA, 58 bp, Artificial
  Synthetic oligonucleotide
atgggagcaaacccattcaaaggcgggactactgatttcagatggagggccaaatctg

SEQ ID NO: 335014 - DNA, 55 bp, Artificial
  Synthetic oligonucleotide
atgggagcaaacttccgagccgacagggtaatagacccaagacggtgcctgaaac

SEQ ID NO: 335015 - DNA, 55 bp, Artificial
  Synthetic oligonucleotide
atgggagccctacaacctgggttgcccactccttctgctatacctgataagtcct

SEQ ID NO: 335016 - DNA, 56 bp, Artificial
  Synthetic oligonucleotide
atgggagctcaagtatccacccaacaatctggaacccacgaaaacaccaacgtggc

SEQ ID NO: 335017 - DNA, 53 bp, Artificial
  Synthetic oligonucleotide
atgggaggacatagcctttagtataaaccaggaccctggttggtatagcacta

SEQ ID NO: 335018 - DNA, 58 bp, Artificial
  Synthetic oligonucleotide
atgggaggcttgtagacagtattggttcatggtccaaaaatatcctcaggacccaaga

SEQ ID NO: 335019 - DNA, 57 bp, Artificial
  Synthetic oligonucleotide
atgggagggacgagcttcagggtagataggaaacacaaggatagcgcggagcagcct

SEQ ID NO: 335020 - DNA, 55 bp, Artificial
  Synthetic oligonucleotide
atgggagtgatactagaggacattataacttctcattcacatgccagaatgctgc

SEQ ID NO: 335021 - DNA, 55 bp, Artificial
  Synthetic oligonucleotide
atgggagtgccataaggcataagatttctcagggcccggccggtaacggtgccgt

SEQ ID NO: 335022 - DNA, 56 bp, Artificial
  Synthetic oligonucleotide
atgggagtggcagacccggtggaagaataagactattaggaatagggggaatgata

SEQ ID NO: 335023 - DNA, 55 bp, Artificial
  Synthetic oligonucleotide
atgggatatacgggaatttatgatagggaaacatagatgggacttatgtaaatcc

SEQ ID NO: 335024 - DNA, 58 bp, Artificial
  Synthetic oligonucleotide
atgggatcaaagcctaaagccatgtgtaaggttgaccccactctgtgtcactttagag

SEQ ID NO: 335025 - DNA, 60 bp, Artificial
  Synthetic oligonucleotide
atgggatcccctgtgcgtaaatccatcgtctctgcagtggatgctcacatatatggagca

SEQ ID NO: 335026 - DNA, 58 bp, Artificial
  Synthetic oligonucleotide
atgggatctacttgtgccggattgttcaggaatgggggtcatttgcttggctataagg

SEQ ID NO: 335027 - DNA, 58 bp, Artificial
  Synthetic oligonucleotide
atgggatcttcctgtacaattaaagtatgtccacttaatacacagactcttggaattg

SEQ ID NO: 335028 - DNA, 55 bp, Artificial
  Synthetic oligonucleotide
atgggatgctcctcccgattccgtccatccctccccccaagagggtcgcccagga

SEQ ID NO: 335029 - DNA, 60 bp, Artificial
  Synthetic oligonucleotide
atgggatgggtccggcaacagcacaaacagccatacaattattcatagctgattatagat

SEQ ID NO: 335030 - DNA, 51 bp, Artificial
  Synthetic oligonucleotide
atgggatgtagataaagcaattcttcaacccttgtcaatgactttcttctt

SEQ ID NO: 335031 - DNA, 55 bp, Artificial
  Synthetic oligonucleotide
atgggatgttgtcagacattttggggttgtttgcacttcctccgagtcagtgaag

SEQ ID NO: 335032 - DNA, 53 bp, Artificial
  Synthetic oligonucleotide
atgggattataagtcggacccactatggaatagagttatgcaattgtcctact

SEQ ID NO: 335033 - DNA, 55 bp, Artificial
  Synthetic oligonucleotide
atgggattctgtgagaggggatccctccattgactgctggacttttctttggggc

SEQ ID NO: 335034 - DNA, 56 bp, Artificial
  Synthetic oligonucleotide
atgggattgcgcccccccctcatttcaagaagcgttataacactaatgacaactct

SEQ ID NO: 335035 - DNA, 59 bp, Artificial
  Synthetic oligonucleotide
atgggattgggtctgtaccgtgctgagtgacttcaagacgtggcttaaagccaagctac

SEQ ID NO: 335036 - DNA, 55 bp, Artificial
  Synthetic oligonucleotide
atgggcaaaccgctagctccaaagagccttgcgcatacgccggagtgcagggagc

SEQ ID NO: 335037 - DNA, 60 bp, Artificial
  Synthetic oligonucleotide
atgggcaaaccgctagtcgcagagcagcctgacgctacgccggaggtgcacgacgttata

SEQ ID NO: 335038 - DNA, 60 bp, Artificial
  Synthetic oligonucleotide
atgggcaaatccatgcggcccgtctatacagctgccctcaaggatgagttggttaagcca

SEQ ID NO: 335039 - DNA, 53 bp, Artificial
  Synthetic oligonucleotide
atgggcaacttaccaatattcccacaccagtttattaacctccggaccaacaa

SEQ ID NO: 335040 - DNA, 55 bp, Artificial
  Synthetic oligonucleotide
atgggcaacttctcactgaaagagtgtatctggagtgcagtgtcggcagccatgg

SEQ ID NO: 335041 - DNA, 58 bp, Artificial
  Synthetic oligonucleotide
atgggcaagcagagagttagaaagattcgcacttaaccctggccttttagaaacagca

SEQ ID NO: 335042 - DNA, 60 bp, Artificial
  Synthetic oligonucleotide
atgggcaagcagggagctagagcgatttgcagttaatcctggtcttttagagacagcgga

SEQ ID NO: 335043 - DNA, 60 bp, Artificial
  Synthetic oligonucleotide
atgggcaagctctcatggaagaggacgtgcttgaagcccaggttgatatgtttcccttgc

SEQ ID NO: 335044 - DNA, 55 bp, Artificial
  Synthetic oligonucleotide
atgggcacattctcagtgcggaccgtgggaacctcgaaatccaagtaccctttgg

SEQ ID NO: 335045 - DNA, 60 bp, Artificial
  Synthetic oligonucleotide
atgggcaccacccaactcttacctagtcaaatctgtgctttcatgggcgtgctcaccagg

SEQ ID NO: 335046 - DNA, 59 bp, Artificial
  Synthetic oligonucleotide
atgggcacgccaagacgtaacacatcaaggcagatcaaagagaagtaaacagaaactac

SEQ ID NO: 335047 - DNA, 50 bp, Artificial
  Synthetic oligonucleotide
atgggcactcaattaatagggagcacatccaaagcctgggatctgtgtac

SEQ ID NO: 335048 - DNA, 52 bp, Artificial
  Synthetic oligonucleotide
atgggcagatacttttccttgtaagggggaggttaaagggcatactgtttgg

SEQ ID NO: 335049 - DNA, 55 bp, Artificial
  Synthetic oligonucleotide
atgggcaggaaccatggacattaacagatacaagccatgaactatttaccacagc

SEQ ID NO: 335050 - DNA, 60 bp, Artificial
  Synthetic oligonucleotide
atgggcataagagatttgacaacacaggcgacttgggaatagctcccaattctgatttcg

SEQ ID NO: 335051 - DNA, 58 bp, Artificial
  Synthetic oligonucleotide
atgggcatcgatcccattatgatccaccttgacccccgtggtgtggcctttggaacat

SEQ ID NO: 335052 - DNA, 57 bp, Artificial
  Synthetic oligonucleotide
atgggcatgctctacaccccacttcgcgccaattctggtgcggacccattcgttgtg

SEQ ID NO: 335053 - DNA, 60 bp, Artificial
  Synthetic oligonucleotide
atgggcatgcttctgacaggatccaacgccaaaagcatggatctaggcaccacaccaggt

SEQ ID NO: 335054 - DNA, 60 bp, Artificial
  Synthetic oligonucleotide
atgggcatgttgcttactggctcaaatgctaagggtatggatctggggacaactcctggt

SEQ ID NO: 335055 - DNA, 60 bp, Artificial
  Synthetic oligonucleotide
atgggcatgtttgccatcactatagaagccatggtttgttcttagaattcacacgaagta

SEQ ID NO: 335056 - DNA, 53 bp, Artificial
  Synthetic oligonucleotide
atgggccaaattttgttagtcaggaggtacaaactatttgttggtggggacaa

SEQ ID NO: 335057 - DNA, 54 bp, Artificial
  Synthetic oligonucleotide
atgggccaagttccgaacaaggatccgcggggaggacggatcacctcccgagag

SEQ ID NO: 335058 - DNA, 56 bp, Artificial
  Synthetic oligonucleotide
atgggccaattccgagcgaagggaacgcgggaggaaggatcagcgcccgagaggga

SEQ ID NO: 335059 - DNA, 54 bp, Artificial
  Synthetic oligonucleotide
atgggccacagctccgaacgaagggtccgacgggggaggaatccatcccgagag

SEQ ID NO: 335060 - DNA, 55 bp, Artificial
  Synthetic oligonucleotide
atgggccagactgttaccactcccttaagtttgaccttaggtcactggaaagatg

SEQ ID NO: 335061 - DNA, 56 bp, Artificial
  Synthetic oligonucleotide
atgggcccaaagtttgataagggcgctgcttgggttaacaggcccatgtacaggaa

SEQ ID NO: 335062 - DNA, 56 bp, Artificial
  Synthetic oligonucleotide
atgggcccaagttccgagcgaagagatcgcgggggaaggatcagctcccgagaggg

SEQ ID NO: 335063 - DNA, 60 bp, Artificial
  Synthetic oligonucleotide
atgggcccggatctagtgatgctgggtccagtctgttgagagccctgtatgggtaatccg

SEQ ID NO: 335064 - DNA, 55 bp, Artificial
  Synthetic oligonucleotide
atgggccgccaaataagcgtacagttcagtatcttcgttttgggcctcggcccaa

SEQ ID NO: 335065 - DNA, 58 bp, Artificial
  Synthetic oligonucleotide
atgggccggaaatatcctcagaacccaagagtcagagtgtgtatgccataaaggaatt

SEQ ID NO: 335066 - DNA, 58 bp, Artificial
  Synthetic oligonucleotide
atgggccggagtggacactagcagcggagttacgatggcttgcccttacattagtggg

SEQ ID NO: 335067 - DNA, 60 bp, Artificial
  Synthetic oligonucleotide
atgggccgtgtgttcttgatggtttaaatgatcattatgtgcgtactacgcgtcgattag

SEQ ID NO: 335068 - DNA, 55 bp, Artificial
  Synthetic oligonucleotide
atgggcctagaacgaaccgtgcggagcctagcggctccaaacggatgcaaggtag

SEQ ID NO: 335069 - DNA, 58 bp, Artificial
  Synthetic oligonucleotide
atgggcctattatttatagcccaggattgtttcccaagttgaaccaatcttcatgtga

SEQ ID NO: 335070 - DNA, 59 bp, Artificial
  Synthetic oligonucleotide
atgggcctcagtgccgacaaggagcccgcaggtgggaggatcagctaccggagagggac

SEQ ID NO: 335071 - DNA, 56 bp, Artificial
  Synthetic oligonucleotide
atgggcctccgtgccgacgaagaatcggatcgataggaagtgggaggcccgagagg

SEQ ID NO: 335072 - DNA, 53 bp, Artificial
  Synthetic oligonucleotide
atgggcctcgtgccgaggaaggtccggagaaggaggagtcaggaccccgaagg

SEQ ID NO: 335073 - DNA, 57 bp, Artificial
  Synthetic oligonucleotide
atgggcgagaacctgattactgcccgtcatgtcctcgatcttacgcacaacctttgg

SEQ ID NO: 335074 - DNA, 60 bp, Artificial
  Synthetic oligonucleotide
atgggcgcactggagctagtgtgtcccctgtgtgcaacaaggcggtaaacggcaatggcg

SEQ ID NO: 335075 - DNA, 55 bp, Artificial
  Synthetic oligonucleotide
atgggcgcggccggactataatcccccgctaatagagacgtggaaaaagcctgac

SEQ ID NO: 335076 - DNA, 54 bp, Artificial
  Synthetic oligonucleotide
atgggcgctcaagtatctagacaaagtgttgggagccatgagacaatgatccat

SEQ ID NO: 335077 - DNA, 50 bp, Artificial
  Synthetic oligonucleotide
atgggcggaaggtgctttctgaaacctccccttccgcaactcccccccgg

SEQ ID NO: 335078 - DNA, 60 bp, Artificial
  Synthetic oligonucleotide
atgggcggcgcaagcctctctatatattgagcgcacataccggtcggcagtaggtatacg

SEQ ID NO: 335079 - DNA, 60 bp, Artificial
  Synthetic oligonucleotide
atgggcgtggcttgcgcgacctgaagctgctgattggtcagcagcctcgtgacttcaaaa

SEQ ID NO: 335080 - DNA, 58 bp, Artificial
  Synthetic oligonucleotide
atgggcgtggtctgagggatttggccctgatgattggacagaaaccccgtgacttcaa

SEQ ID NO: 335081 - DNA, 57 bp, Artificial
  Synthetic oligonucleotide
atgggctaactttgagatcagtaaccatgcggccgacatcacaggaacaacgaaatg

SEQ ID NO: 335082 - DNA, 60 bp, Artificial
  Synthetic oligonucleotide
atgggctatgcccatggtagggggtaggctctagcgttgctaggagaggcttatagacgc

SEQ ID NO: 335083 - DNA, 55 bp, Artificial
  Synthetic oligonucleotide
atgggctccagatcctctaccaggatcccagtacctctcatgctgaccgtccgag

SEQ ID NO: 335084 - DNA, 57 bp, Artificial
  Synthetic oligonucleotide
atgggctcttcgcactcgcagacgtaggagacggtccacgcggctcggtaggcgttt

SEQ ID NO: 335085 - DNA, 54 bp, Artificial
  Synthetic oligonucleotide
atgggctgcgtatttataatgggccggcgggggagcgaaaccaataatattacc

SEQ ID NO: 335086 - DNA, 50 bp, Artificial
  Synthetic oligonucleotide
atgggctgctaaatgccataggagatctacaaggggcaatgcaaattata

SEQ ID NO: 335087 - DNA, 57 bp, Artificial
  Synthetic oligonucleotide
atgggctggacccaatggatatggacaaatcacctggtcttccatacgttaagaaag

SEQ ID NO: 335088 - DNA, 60 bp, Artificial
  Synthetic oligonucleotide
atgggctgtaagggtgatcaagttcataacaagtctgtcgtcgacacctatcatcgaact

SEQ ID NO: 335089 - DNA, 53 bp, Artificial
  Synthetic oligonucleotide
atgggctgtgctccgtatggttaaatttcctatcgactaaaacgacgaggttt

SEQ ID NO: 335090 - DNA, 57 bp, Artificial
  Synthetic oligonucleotide
atgggcttaaggattagttcatctttcagctttggtggattcactttcaaaagaaca

SEQ ID NO: 335091 - DNA, 55 bp, Artificial
  Synthetic oligonucleotide
atgggcttaataacgcagattgaattggggacactcaaaactctatggaatgggg

SEQ ID NO: 335092 - DNA, 55 bp, Artificial
  Synthetic oligonucleotide
atgggcttaggttttccaacggaccagaagtcgacacagtcaggcccatagtctt

SEQ ID NO: 335093 - DNA, 56 bp, Artificial
  Synthetic oligonucleotide
atgggcttcccgtactttgtgttgctttgccagtccctctgggcccccatgaattc

SEQ ID NO: 335094 - DNA, 60 bp, Artificial
  Synthetic oligonucleotide
atgggcttgaacgcagtggcatattacagagggctggacgtctccataattccaactcag

SEQ ID NO: 335095 - DNA, 59 bp, Artificial
  Synthetic oligonucleotide
atgggcttgaacgctgtggcatattacagagggttagacgtctccgtaataccaactca

SEQ ID NO: 335096 - DNA, 55 bp, Artificial
  Synthetic oligonucleotide
atggggaactttgtggtcacgccatgtggtttagtgccactacttttgaaagccc

SEQ ID NO: 335097 - DNA, 59 bp, Artificial
  Synthetic oligonucleotide
atggggaatcaaggatatggagttaagggctttggattcagacaaggcaacgatgtatg

SEQ ID NO: 335098 - DNA, 59 bp, Artificial
  Synthetic oligonucleotide
atggggaatccaccattctggatcaactaccgagcagaccaaactatatgggagtggga

SEQ ID NO: 335099 - DNA, 58 bp, Artificial
  Synthetic oligonucleotide
atggggacctctcctgcaacttcgacccgacgcaacatcaaccctacaatccagcata

SEQ ID NO: 335100 - DNA, 55 bp, Artificial
  Synthetic oligonucleotide
atggggacctgtacacggaagccgatctgcatcgttctgtgctttgcgcgcctgc

SEQ ID NO: 335101 - DNA, 55 bp, Artificial
  Synthetic oligonucleotide
atggggacctttacctggaccttgtctgattctgccgggaatgatctgcctggag

SEQ ID NO: 335102 - DNA, 60 bp, Artificial
  Synthetic oligonucleotide
atggggactgtcaccactgaggtggcatttggcctagtatgcgcaacctgtgaacagatt

SEQ ID NO: 335103 - DNA, 57 bp, Artificial
  Synthetic oligonucleotide
atggggagagacccgtccactggccgaagcgtatatagtatgttatggttgcctcta

SEQ ID NO: 335104 - DNA, 56 bp, Artificial
  Synthetic oligonucleotide
atggggagcgatttggataatgagaagtattgcagtaaagagggggacgttatact

SEQ ID NO: 335105 - DNA, 57 bp, Artificial
  Synthetic oligonucleotide
atggggaggaaatcctatctcccaacagatcgtccgacacccctgcaacggacagac

SEQ ID NO: 335106 - DNA, 51 bp, Artificial
  Synthetic oligonucleotide
atggggaggtaacactgtccactctcaggtcatcagaaacccgtgcaaaga

SEQ ID NO: 335107 - DNA, 53 bp, Artificial
  Synthetic oligonucleotide
atggggagtaagtgtgttagggatggtaaaggcggatttttgtatataaagga

SEQ ID NO: 335108 - DNA, 58 bp, Artificial
  Synthetic oligonucleotide
atggggagttcatcatccttcaactgacgcagaacaaaccaaattatataagaacaac

SEQ ID NO: 335109 - DNA, 55 bp, Artificial
  Synthetic oligonucleotide
atggggagttgaggacattgaacttttggcccaggaagactataatttcacaggc

SEQ ID NO: 335110 - DNA, 60 bp, Artificial
  Synthetic oligonucleotide
atggggatgcctcatatgggaaatgggcaagaaacatagttgtaacgcagaagaggtcat

SEQ ID NO: 335111 - DNA, 55 bp, Artificial
  Synthetic oligonucleotide
atggggcaagatgccaggttcttttgtccaactggttctgtagtaactttccaaa

SEQ ID NO: 335112 - DNA, 54 bp, Artificial
  Synthetic oligonucleotide
atggggcaaggcgagttcggacggacaggtcgaggtactcccgatttaggtcga

SEQ ID NO: 335113 - DNA, 56 bp, Artificial
  Synthetic oligonucleotide
atggggcaatcagctgtttttaacagtagtggacaacacacgaggaactcccttaa

SEQ ID NO: 335114 - DNA, 55 bp, Artificial
  Synthetic oligonucleotide
atggggcaccatgctccttggaatgttgatgatctgtaaggctgcagaagacttg

SEQ ID NO: 335115 - DNA, 55 bp, Artificial
  Synthetic oligonucleotide
atggggcatggaaatgagacgctgccttctacaatcccttcaacagattgaaagc

SEQ ID NO: 335116 - DNA, 58 bp, Artificial
  Synthetic oligonucleotide
atggggcatggaaatgaggcgctgccttctccagtctcttcagcagattgagagtatg

SEQ ID NO: 335117 - DNA, 59 bp, Artificial
  Synthetic oligonucleotide
atggggcattcatagctcctgacagggcaagtttctttaggggagaatcactgggagtc

SEQ ID NO: 335118 - DNA, 58 bp, Artificial
  Synthetic oligonucleotide
atggggccatggactttactgctttacaattaaataagtctgacgtgcctatagatat

SEQ ID NO: 335119 - DNA, 55 bp, Artificial
  Synthetic oligonucleotide
atggggcctcatgcatcatcaatatatcaatagcctctaccatatcctcttgtcg

SEQ ID NO: 335120 - DNA, 54 bp, Artificial
  Synthetic oligonucleotide
atggggcctttgtggctccagaccgtgtgagcttctttaaagggaaatctacgg

SEQ ID NO: 335121 - DNA, 57 bp, Artificial
  Synthetic oligonucleotide
atggggcgactttgcgcgatgcgacgacgaagggtgtagaaaactcagacgtgaact

SEQ ID NO: 335122 - DNA, 58 bp, Artificial
  Synthetic oligonucleotide
atggggcgagagaggttatcatgcgaagcggttctttagtaactacttcgagataatc

SEQ ID NO: 335123 - DNA, 55 bp, Artificial
  Synthetic oligonucleotide
atggggctaaacgcagtggcattttacaggggccttgacgtatccgtaataccaa

SEQ ID NO: 335124 - DNA, 50 bp, Artificial
  Synthetic oligonucleotide
atggggctataccaagcctggacaattggccactaacactcgaaggtata

SEQ ID NO: 335125 - DNA, 60 bp, Artificial
  Synthetic oligonucleotide
atggggctgtaagggaaggctagtctgctacacatcagtacaatggaacaggacatggac

SEQ ID NO: 335126 - DNA, 56 bp, Artificial
  Synthetic oligonucleotide
atggggcttccttaaagttgcctcaacagggggattatacgtcctatgtgacactc

SEQ ID NO: 335127 - DNA, 55 bp, Artificial
  Synthetic oligonucleotide
atgggggaacacagcagccatcgatagataagtcgtcatacgccctatcatggtt

SEQ ID NO: 335128 - DNA, 54 bp, Artificial
  Synthetic oligonucleotide
atgggggaagagataacctcccctcagaagcaggaaccgagggacaagggatta

SEQ ID NO: 335129 - DNA, 57 bp, Artificial
  Synthetic oligonucleotide
atgggggaccgaacctatacaatattcggaacctccatattccagaagtctgcctga

SEQ ID NO: 335130 - DNA, 57 bp, Artificial
  Synthetic oligonucleotide
atgggggactagagggcttaaggcaaaagggatggagtctggtcagcctactaatga

SEQ ID NO: 335131 - DNA, 53 bp, Artificial
  Synthetic oligonucleotide
atgggggcattgattttcagagcttgcacagcagagggaaagaccggtgttgg

SEQ ID NO: 335132 - DNA, 56 bp, Artificial
  Synthetic oligonucleotide
atgggggccgggtcacatagcctcacttatgagcttacgcctgctggcctgcaggt

SEQ ID NO: 335133 - DNA, 58 bp, Artificial
  Synthetic oligonucleotide
atggggggagcacagttgtgttaacccctctcctgaagcacctaatcacctcagaata

SEQ ID NO: 335134 - DNA, 60 bp, Artificial
  Synthetic oligonucleotide
atgggggtccacatcatcgatgacgttataccatgcgtcatttgagtagatcttggggct

SEQ ID NO: 335135 - DNA, 60 bp, Artificial
  Synthetic oligonucleotide
atggggtccagcttgctacatcagctctgtcaagcctatggtctacactttccaagggat

SEQ ID NO: 335136 - DNA, 53 bp, Artificial
  Synthetic oligonucleotide
atggggtccgtcctcagtaagcatagacattcatccagcaatcttctgtccac

SEQ ID NO: 335137 - DNA, 57 bp, Artificial
  Synthetic oligonucleotide
atggggtctgcttagcatgtctagaaactgctttaaccctagaaaggtccctatatc

SEQ ID NO: 335138 - DNA, 59 bp, Artificial
  Synthetic oligonucleotide
atggggtgatcataaacacgcccaggaagtgacgtatgtcaaccaatcagcatcgggca

SEQ ID NO: 335139 - DNA, 60 bp, Artificial
  Synthetic oligonucleotide
atggggtgtccatcacccgtctaacagtaataatcaacagactctctatcataatgcaaa

SEQ ID NO: 335140 - DNA, 56 bp, Artificial
  Synthetic oligonucleotide
atggggtgttaaacagctccagggcagattacttgctgtagaaaggtacctacagg

SEQ ID NO: 335141 - DNA, 54 bp, Artificial
  Synthetic oligonucleotide
atggggtgttcatcacccgtccaacataaaggatcaacagaccctctatcagaa

SEQ ID NO: 335142 - DNA, 51 bp, Artificial
  Synthetic oligonucleotide
atggggttaaaaccttagtcacaaaactgtccgatttggcccttctacctc

SEQ ID NO: 335143 - DNA, 53 bp, Artificial
  Synthetic oligonucleotide
atggggttggacatactagccaacatgaccaatgatgctaaagttattcaaac

SEQ ID NO: 335144 - DNA, 58 bp, Artificial
  Synthetic oligonucleotide
atggggtttctagtggaagtcaggcgaattgacattgaaccttgttgtggtgagacaa

SEQ ID NO: 335145 - DNA, 54 bp, Artificial
  Synthetic oligonucleotide
atgggtaaatcggcctatgaatcggaaacccagattctacaggggtcgaaggac

SEQ ID NO: 335146 - DNA, 59 bp, Artificial
  Synthetic oligonucleotide
atgggtacaatcggagtgttagcgactcctgaagttccatttaccactgagtgtgcaaa

SEQ ID NO: 335147 - DNA, 55 bp, Artificial
  Synthetic oligonucleotide
atgggtacagtgttgataggacctacacctgtcaatataattggaagagatctct

SEQ ID NO: 335148 - DNA, 55 bp, Artificial
  Synthetic oligonucleotide
atgggtatcagacagaggatcgaattgctactcagcgcaagaatggcccaaggcc

SEQ ID NO: 335149 - DNA, 53 bp, Artificial
  Synthetic oligonucleotide
atgggtatggctccttacctgggcgcacaatcggcttgtagagagcttcacgg

SEQ ID NO: 335150 - DNA, 60 bp, Artificial
  Synthetic oligonucleotide
atgggtcaggcacccagtccatataatgttagggtcgagtgcataggatggtcaagcacg

SEQ ID NO: 335151 - DNA, 58 bp, Artificial
  Synthetic oligonucleotide
atgggtcaggtcaggtctcttaatgccacggttattgccgcttgtgccccccatgaaa

SEQ ID NO: 335152 - DNA, 50 bp, Artificial
  Synthetic oligonucleotide
atgggtcatgttcaacgacattagatgcatgtattgtggtggatgcctaa

SEQ ID NO: 335153 - DNA, 51 bp, Artificial
  Synthetic oligonucleotide
atgggtcattatcaacgggataccacatcttgaagacgaacacagttgagc

SEQ ID NO: 335154 - DNA, 53 bp, Artificial
  Synthetic oligonucleotide
atgggtccacttggtttaacggacgctttactgacgattacgaactaacttca

SEQ ID NO: 335155 - DNA, 55 bp, Artificial
  Synthetic oligonucleotide
atgggtccagtccaatggacttcggacaggtttttaatatgttcgacaacgagcc

SEQ ID NO: 335156 - DNA, 56 bp, Artificial
  Synthetic oligonucleotide
atgggtccagttggatagacccctcctaagggactgtacccagcggaatgatggga

SEQ ID NO: 335157 - DNA, 55 bp, Artificial
  Synthetic oligonucleotide
atgggtcgcaccagacagcgtcccacgttagcgtgctgggaggaattgttacagc

SEQ ID NO: 335158 - DNA, 55 bp, Artificial
  Synthetic oligonucleotide
atgggtcggttgcagcaatttaggttactatgaggcactcattgctctagcagcc

SEQ ID NO: 335159 - DNA, 56 bp, Artificial
  Synthetic oligonucleotide
atgggtctaatcggccgcgcagcggaacataccacgttacttgaaacccaatcgac

SEQ ID NO: 335160 - DNA, 58 bp, Artificial
  Synthetic oligonucleotide
atgggtctaccacaaccaacctagtgagaggacagaacacagtccatatcgttgggaa

SEQ ID NO: 335161 - DNA, 56 bp, Artificial
  Synthetic oligonucleotide
atgggtctatggtggctagggttgcaaagtttccagtccacttctggttagtgtac

SEQ ID NO: 335162 - DNA, 57 bp, Artificial
  Synthetic oligonucleotide
atgggtctcaaaaggaacccccattctccgcaaacacctgcagtgcttatactccgc

SEQ ID NO: 335163 - DNA, 51 bp, Artificial
  Synthetic oligonucleotide
atgggtctcagatacgtcaaattttcggagtaaccccgagtgacaccctgt

SEQ ID NO: 335164 - DNA, 54 bp, Artificial
  Synthetic oligonucleotide
atgggtctgcctatgtccccggtgatagggcggctcccctcgggtatcccgact

SEQ ID NO: 335165 - DNA, 54 bp, Artificial
  Synthetic oligonucleotide
atgggtgacctatgggacgtgttctcaaactggcgaacaccgacgggataaacg

SEQ ID NO: 335166 - DNA, 60 bp, Artificial
  Synthetic oligonucleotide
atgggtgacgattttcggagctgcaatgcgcgaatgtctttattggatcgttgatactct

SEQ ID NO: 335167 - DNA, 60 bp, Artificial
  Synthetic oligonucleotide
atgggtgattctggtgttaagaacaaccttttaggcaaagctgcgactattgatcaggca

SEQ ID NO: 335168 - DNA, 59 bp, Artificial
  Synthetic oligonucleotide
atgggtgcacaagaacccagaaacatattcctattgtgtaggaactgtggaatatcatt

SEQ ID NO: 335169 - DNA, 55 bp, Artificial
  Synthetic oligonucleotide
atgggtgcactgggacagcatcgagggtctggagacgggatcacaatgagagagc

SEQ ID NO: 335170 - DNA, 56 bp, Artificial
  Synthetic oligonucleotide
atgggtgcgagagcgtcggtattaagcgggggacaattagatagatgggagaaaat

SEQ ID NO: 335171 - DNA, 57 bp, Artificial
  Synthetic oligonucleotide
atgggtgctataaattccagtatgcctttccacaatgttcatccccttaccattggg

SEQ ID NO: 335172 - DNA, 54 bp, Artificial
  Synthetic oligonucleotide
atgggtgctcgcataggggtatctgcgctggtcaaagcctaatccccttatcgc

SEQ ID NO: 335173 - DNA, 60 bp, Artificial
  Synthetic oligonucleotide
atgggtgcttcagcattctccataaatgtaatgactcatgtatggagaccattcgaaatg

SEQ ID NO: 335174 - DNA, 55 bp, Artificial
  Synthetic oligonucleotide
atgggtggatggtctgctgtgaggcgcagaatgagacaaactgagccagcagcag

SEQ ID NO: 335175 - DNA, 57 bp, Artificial
  Synthetic oligonucleotide
atgggtggcaacgctagagtaactttaccaggacttagtcatggccaattagcaact

SEQ ID NO: 335176 - DNA, 57 bp, Artificial
  Synthetic oligonucleotide
atgggtggcaagtggtcaaaaagtagtaaaataggatggcctgctataagggacaga

SEQ ID NO: 335177 - DNA, 55 bp, Artificial
  Synthetic oligonucleotide
atgggtggcaagtggtcaaaacctagcctgggaggatgggccgctgtaagggaaa

SEQ ID NO: 335178 - DNA, 57 bp, Artificial
  Synthetic oligonucleotide
atgggtggcgcctcctagcgcctatcacggcctattcccaacagacgcggggcctac

SEQ ID NO: 335179 - DNA, 57 bp, Artificial
  Synthetic oligonucleotide
atgggtggctgccttacgatgaccttttaaggatctgtgatcgctatcctttaaggg

SEQ ID NO: 335180 - DNA, 55 bp, Artificial
  Synthetic oligonucleotide
atgggtggctgtcacatttggtgtgccatcccttaagcgctaaggcttggaggcg

SEQ ID NO: 335181 - DNA, 58 bp, Artificial
  Synthetic oligonucleotide
atgggtgggattgtgtatggcgtgtttatagccccaggcttgctagacttaggcttcc

SEQ ID NO: 335182 - DNA, 60 bp, Artificial
  Synthetic oligonucleotide
atgggtgtatcctcatctatggatagccgacaggaatttggcaggagcatggattctcaa

SEQ ID NO: 335183 - DNA, 60 bp, Artificial
  Synthetic oligonucleotide
atgggtgtcgacagacaaggattcaaatggtgtgcaggatataatagacaacgacaattg

SEQ ID NO: 335184 - DNA, 59 bp, Artificial
  Synthetic oligonucleotide
atgggtgtgagcatcccgacttaccagaaagtcctgtcagactggtatcaccccaccac

SEQ ID NO: 335185 - DNA, 55 bp, Artificial
  Synthetic oligonucleotide
atgggtgttcgtcgtctagaaaaccaattcgtttagagcgcacccgcattacact

SEQ ID NO: 335186 - DNA, 60 bp, Artificial
  Synthetic oligonucleotide
atgggttaacaggcccatgtacaggaagcccaggatatatcggacgatcagaacgcctga

SEQ ID NO: 335187 - DNA, 55 bp, Artificial
  Synthetic oligonucleotide
atgggttacacttatgaggaggcaataaggactgttaggccgcatgctgccatgg

SEQ ID NO: 335188 - DNA, 59 bp, Artificial
  Synthetic oligonucleotide
atgggttccagcaaataaacctggaagaactaatgagaacaggcgactatgcgcaaata

SEQ ID NO: 335189 - DNA, 60 bp, Artificial
  Synthetic oligonucleotide
atgggttcccctgtgcgagaatccatatgacgcacagtcaattcctaaatagtaagagca

SEQ ID NO: 335190 - DNA, 56 bp, Artificial
  Synthetic oligonucleotide
atgggttcccctgtgcgtgaatccatggttatggcagttgatatgcaggtagtaag

SEQ ID NO: 335191 - DNA, 60 bp, Artificial
  Synthetic oligonucleotide
atgggttcgcataaacaacgaaactatattggaaactggatatgtatgcagcaaattcca

SEQ ID NO: 335192 - DNA, 60 bp, Artificial
  Synthetic oligonucleotide
atgggttcggcgaggcattcaacatgtacgacaatgagcccagtacagccactatcaaga

SEQ ID NO: 335193 - DNA, 51 bp, Artificial
  Synthetic oligonucleotide
atgggttcgtttcgacgcgtgaacaccagagcgcaattaggggagcgctcg

SEQ ID NO: 335194 - DNA, 55 bp, Artificial
  Synthetic oligonucleotide
atgggttctctctcggtattggttcacatctaaaacatgacaacggtgttctcac

SEQ ID NO: 335195 - DNA, 55 bp, Artificial
  Synthetic oligonucleotide
atgggttctctgatgaacattcgagtcgctaactctatagtacagcttccaaggg

SEQ ID NO: 335196 - DNA, 60 bp, Artificial
  Synthetic oligonucleotide
atgggttgaaatatatacccatggatgagagatactctccgtcatcacttgccagattgt

SEQ ID NO: 335197 - DNA, 53 bp, Artificial
  Synthetic oligonucleotide
atgggttgccgcatccccaacactagccgacaccccccggtcggtaaagaata

SEQ ID NO: 335198 - DNA, 57 bp, Artificial
  Synthetic oligonucleotide
atgggttgcgacggcggtttattacataccgctttcgaacagatgatacaaatggga

SEQ ID NO: 335199 - DNA, 52 bp, Artificial
  Synthetic oligonucleotide
atgggttggacgaaaattttgacaccgccggtgccgtggcacgccatcccaa

SEQ ID NO: 335200 - DNA, 60 bp, Artificial
  Synthetic oligonucleotide
atgggttggcaatatgcgggtccgcatattgctggcaggcaatgccttcacagctggtaa

SEQ ID NO: 335201 - DNA, 60 bp, Artificial
  Synthetic oligonucleotide
atgggtttcacaggtttatgtgaggccatgcattcccatggtgtgcgtatcttgcgaggt

SEQ ID NO: 335202 - DNA, 57 bp, Artificial
  Synthetic oligonucleotide
atgggtttgacggcatcagttccaaactagttggaatctctgacaaatcccctcgag

SEQ ID NO: 335203 - DNA, 59 bp, Artificial
  Synthetic oligonucleotide
atgggtttttagatgtttggacatataacgctgagttgctcattttgctcgagaacgaa

SEQ ID NO: 335204 - DNA, 60 bp, Artificial
  Synthetic oligonucleotide
atggtaaacgcatgagtggggacatgaacatatcattgggcaattgcatactggccacag

SEQ ID NO: 335205 - DNA, 50 bp, Artificial
  Synthetic oligonucleotide
atggtaaacggctggtacggtttcagacaccaaaattctgagggcatagg

SEQ ID NO: 335206 - DNA, 56 bp, Artificial
  Synthetic oligonucleotide
atggtaaactcttctctagtttccataaaaacccagggatcatcacaggttcagcg

SEQ ID NO: 335207 - DNA, 51 bp, Artificial
  Synthetic oligonucleotide
atggtaaatacaactgcttgctagcacaagaataccagcaaggtggaaaga

SEQ ID NO: 335208 - DNA, 60 bp, Artificial
  Synthetic oligonucleotide
atggtaaatttacaggtctgggtatctatgatagaacgctagtcttaccaacacatgcag

SEQ ID NO: 335209 - DNA, 54 bp, Artificial
  Synthetic oligonucleotide
atggtaacgcattaaccacgagtctaaccttagagtccgactatcctaccccag

SEQ ID NO: 335210 - DNA, 56 bp, Artificial
  Synthetic oligonucleotide
atggtaacgtggacgatcatcaagctaaatctaatccatcctccgtttttgatttt

SEQ ID NO: 335211 - DNA, 57 bp, Artificial
  Synthetic oligonucleotide
atggtaagccctgtcataagtgtagttgggtttttggcactggcaaaagactggaca

SEQ ID NO: 335212 - DNA, 51 bp, Artificial
  Synthetic oligonucleotide
atggtaaggaacccgaagataagtttatcgaaggactgtcattcaactaca

SEQ ID NO: 335213 - DNA, 54 bp, Artificial
  Synthetic oligonucleotide
atggtaagtacgtcaccgtagctgacactgaaggcgactcgttcttaggtggga

SEQ ID NO: 335214 - DNA, 59 bp, Artificial
  Synthetic oligonucleotide
atggtaatagtatgacgtacaactctaaagatggattcctatatttagcaccagccgaa

SEQ ID NO: 335215 - DNA, 59 bp, Artificial
  Synthetic oligonucleotide
atggtaatcccatgcaagaatttcctcatggcgcgtttcacgctaatgagaagttcggg

SEQ ID NO: 335216 - DNA, 51 bp, Artificial
  Synthetic oligonucleotide
atggtaatgtcctggatgtaaactccattgaccttgaagagcctagtggac

SEQ ID NO: 335217 - DNA, 59 bp, Artificial
  Synthetic oligonucleotide
atggtaatgttggattccgctctctgggcccccacaatcgaagcagactctcccggatc

SEQ ID NO: 335218 - DNA, 60 bp, Artificial
  Synthetic oligonucleotide
atggtaattaatagtgatgatgtagttagcttgtcattaaatggcggcaatatcagtgtg

SEQ ID NO: 335219 - DNA, 56 bp, Artificial
  Synthetic oligonucleotide
atggtacccgtaacgatcttgaactctgtcccattaaccttgaaccatcgacaaga

SEQ ID NO: 335220 - DNA, 60 bp, Artificial
  Synthetic oligonucleotide
atggtacgataacatactgccgggtaattcgactgtgctcaacgattatgatggcactgt

SEQ ID NO: 335221 - DNA, 55 bp, Artificial
  Synthetic oligonucleotide
atggtactagaaggtataacaaacgcaggtaaatcgctaatattagacaacttat

SEQ ID NO: 335222 - DNA, 56 bp, Artificial
  Synthetic oligonucleotide
atggtactagagcagagaatagaacatatatatattggcatggcggaagtaataga

SEQ ID NO: 335223 - DNA, 58 bp, Artificial
  Synthetic oligonucleotide
atggtactcctatggattttggccaggtgtttaacatgtttgacaacgagcccagcac

SEQ ID NO: 335224 - DNA, 58 bp, Artificial
  Synthetic oligonucleotide
atggtactggcactgatagtgtatgccccatgttggacttaggtgattctctaactat

SEQ ID NO: 335225 - DNA, 59 bp, Artificial
  Synthetic oligonucleotide
atggtactggttgtttcgaaatcttccacaagtgtgataacgattgtatggccagtata

SEQ ID NO: 335226 - DNA, 58 bp, Artificial
  Synthetic oligonucleotide
atggtacttggagtagtaacgctactgaagggtcaaatgacactatcagactccatta

SEQ ID NO: 335227 - DNA, 58 bp, Artificial
  Synthetic oligonucleotide
atggtactttatcttctacttgggaaggttgggcgtgttatgaatggtatgatcgtgc

SEQ ID NO: 335228 - DNA, 55 bp, Artificial
  Synthetic oligonucleotide
atggtagaacttgtttcagagtttaaattcccaagcgtcttgagaatctgacgtt

SEQ ID NO: 335229 - DNA, 56 bp, Artificial
  Synthetic oligonucleotide
atggtagaaggggagtcaaagggttcggatttaaggtccagaatgatgtgtggctc

SEQ ID NO: 335230 - DNA, 58 bp, Artificial
  Synthetic oligonucleotide
atggtagagatgggcttgtgtgacccggtgcggctttttgtcaaacaagagccgcacc

SEQ ID NO: 335231 - DNA, 60 bp, Artificial
  Synthetic oligonucleotide
atggtagagggctaccacgaaaaggcaagaaccctgcatgaactatgtgagcaacgcgag

SEQ ID NO: 335232 - DNA, 55 bp, Artificial
  Synthetic oligonucleotide
atggtagatgctttagtgtgttatagacacaaattaccagtgggtgcatcatacg

SEQ ID NO: 335233 - DNA, 60 bp, Artificial
  Synthetic oligonucleotide
atggtagctcttatatagtagaagttctctttaaggagattgctacacgtggcggccatc

SEQ ID NO: 335234 - DNA, 54 bp, Artificial
  Synthetic oligonucleotide
atggtaggacctggtgaatacatggcagttgttagtgatcttgctaacgcatac

SEQ ID NO: 335235 - DNA, 51 bp, Artificial
  Synthetic oligonucleotide
atggtaggctaatagccgggctagcatatagtgtaaactgtccgcagtatg

SEQ ID NO: 335236 - DNA, 58 bp, Artificial
  Synthetic oligonucleotide
atggtaggttcggctccttcatactggatctacgacgtaaggcaatattctgaatttc

SEQ ID NO: 335237 - DNA, 55 bp, Artificial
  Synthetic oligonucleotide
atggtagtcagacttacgagatgatcggcggcaatccctctggatgtgtcggcac

SEQ ID NO: 335238 - DNA, 60 bp, Artificial
  Synthetic oligonucleotide
atggtatacccatggctgagcgccagaacaacggatggctcaagaagttcacagaaatga

SEQ ID NO: 335239 - DNA, 55 bp, Artificial
  Synthetic oligonucleotide
atggtatcatagaaactatgactgacctagcaaagtacaaaacggaactttatga

SEQ ID NO: 335240 - DNA, 57 bp, Artificial
  Synthetic oligonucleotide
atggtatcatcctggtggaatacgctcccccactacccctcataaccctcccatcca

SEQ ID NO: 335241 - DNA, 55 bp, Artificial
  Synthetic oligonucleotide
atggtatcgacccaaccaaaggtcaaggagctacttattatgggcctgggccttg

SEQ ID NO: 335242 - DNA, 55 bp, Artificial
  Synthetic oligonucleotide
atggtatcgaccccaacatcagaacaggggtaaggaccatcaccacgggagcccc

SEQ ID NO: 335243 - DNA, 60 bp, Artificial
  Synthetic oligonucleotide
atggtattacgcatcgtgtgggcaagcgattctgcgtcaagtctgtgtacattctaggga

SEQ ID NO: 335244 - DNA, 57 bp, Artificial
  Synthetic oligonucleotide
atggtattactcatcgcgttggtaaacgtttctgtatcaagtctgtgtatattacgg

SEQ ID NO: 335245 - DNA, 52 bp, Artificial
  Synthetic oligonucleotide
atggtcaatctttgcgtagtgttttaaagcgtgaagggatgcctgatagcac

SEQ ID NO: 335246 - DNA, 58 bp, Artificial
  Synthetic oligonucleotide
atggtcaatgagtaccgattgaccaagatatttacacttatccctggtgtatcggtac

SEQ ID NO: 335247 - DNA, 56 bp, Artificial
  Synthetic oligonucleotide
atggtcacacaacgaacaataggaaagaagaagcagagattaaacaaaagaagtta

SEQ ID NO: 335248 - DNA, 58 bp, Artificial
  Synthetic oligonucleotide
atggtcacagacggacttggccattgttataggtgttagcccatcagccatcacgcag

SEQ ID NO: 335249 - DNA, 60 bp, Artificial
  Synthetic oligonucleotide
atggtcacattgcataaccgagacctccctgctctagtgtcattccagcccacctatgac

SEQ ID NO: 335250 - DNA, 55 bp, Artificial
  Synthetic oligonucleotide
atggtcaccagaattttaatctcctagagttggtcgattccatttgtacagacat

SEQ ID NO: 335251 - DNA, 58 bp, Artificial
  Synthetic oligonucleotide
atggtcacgaagattacacctgaaggcactgtggagtgggcagcctcgacagtgacag

SEQ ID NO: 335252 - DNA, 50 bp, Artificial
  Synthetic oligonucleotide
atggtcagaaccaaatataaaggaagctttgagttggcctcttggtgttc

SEQ ID NO: 335253 - DNA, 60 bp, Artificial
  Synthetic oligonucleotide
atggtcagacatgtcgttggagacgaactgtggctggtattgtatcggagcttcggggaa

SEQ ID NO: 335254 - DNA, 51 bp, Artificial
  Synthetic oligonucleotide
atggtcagttttgaattacttaatgattgagagagaatctaaggtgaggaa

SEQ ID NO: 335255 - DNA, 59 bp, Artificial
  Synthetic oligonucleotide
atggtcattcccgaaggaagagtcatagacttgggctgtggaagaggaggttggtcata

SEQ ID NO: 335256 - DNA, 60 bp, Artificial
  Synthetic oligonucleotide
atggtccaacatttcttgctcagagtgtgcaaggattggggcgttgttactgcccacgta

SEQ ID NO: 335257 - DNA, 60 bp, Artificial
  Synthetic oligonucleotide
atggtccaagatgtgtcaaacgatgtgagacatatatattctagaatgaatgctaaagtt

SEQ ID NO: 335258 - DNA, 55 bp, Artificial
  Synthetic oligonucleotide
atggtccacgtcgttctaatgcacgtaattatggttttaaacgcacattggccgt

SEQ ID NO: 335259 - DNA, 56 bp, Artificial
  Synthetic oligonucleotide
atggtccagtctaaccttcactccacactcgttaatctcgccgaagattgatagct

SEQ ID NO: 335260 - DNA, 60 bp, Artificial
  Synthetic oligonucleotide
atggtcccaagaccccacaatgctatacaacaagatggaatttgagccatttcagtcgct

SEQ ID NO: 335261 - DNA, 57 bp, Artificial
  Synthetic oligonucleotide
atggtcccaagaccctacaatgttatacaataagatggagtttgagcccttccaatc

SEQ ID NO: 335262 - DNA, 56 bp, Artificial
  Synthetic oligonucleotide
atggtcccccctataaacttgggctccaagtagtgcactcctaccaatgtgggatc

SEQ ID NO: 335263 - DNA, 54 bp, Artificial
  Synthetic oligonucleotide
atggtccggaaatggtcatacgttccgcactacatccaacgtggtttagggtaa

SEQ ID NO: 335264 - DNA, 54 bp, Artificial
  Synthetic oligonucleotide
atggtccggaatcagtgctagttaacacataccaatggatcattagaaactggg

SEQ ID NO: 335265 - DNA, 60 bp, Artificial
  Synthetic oligonucleotide
atggtccggccaagagcatggaatatgatgccgttgcaactacacattcatggattccca

SEQ ID NO: 335266 - DNA, 57 bp, Artificial
  Synthetic oligonucleotide
atggtccgtgtatccaaagaattacttacctgagacgataaaaaatcgatatctaga

SEQ ID NO: 335267 - DNA, 56 bp, Artificial
  Synthetic oligonucleotide
atggtcctggatggtggactggttcggtaatgttggtactttccttcaggcaagta

SEQ ID NO: 335268 - DNA, 60 bp, Artificial
  Synthetic oligonucleotide
atggtccttgttgaccggcttatgtggttggacaagcacttcaatcagtacactaatgag

SEQ ID NO: 335269 - DNA, 60 bp, Artificial
  Synthetic oligonucleotide
atggtcgacaagtttatcaaatatccgcaccagttgactaagacggagttagatgcagta

SEQ ID NO: 335270 - DNA, 60 bp, Artificial
  Synthetic oligonucleotide
atggtcgacaagtttatcaaatatccgcatcagctgacaaagacggtattagatgcgata

SEQ ID NO: 335271 - DNA, 59 bp, Artificial
  Synthetic oligonucleotide
atggtcgcaatcaccgtgcgaggcgcacagcttatcaaacgggtggtcgaacgctttta

SEQ ID NO: 335272 - DNA, 53 bp, Artificial
  Synthetic oligonucleotide
atggtcggtatcccgcctttaatttgaatgggtctaccatactttgtattgct

SEQ ID NO: 335273 - DNA, 60 bp, Artificial
  Synthetic oligonucleotide
atggtcgttctaaggagtatattaagctgatgcagttgaatgtatctggggtgcttaacg

SEQ ID NO: 335274 - DNA, 59 bp, Artificial
  Synthetic oligonucleotide
atggtctaaactcttcgacccacccagtgcctttcaagcagcgcacagccgcttatgca

SEQ ID NO: 335275 - DNA, 55 bp, Artificial
  Synthetic oligonucleotide
atggtctactgcacaccgatgtctgtccaacctcggatctacttgcccacgattc

SEQ ID NO: 335276 - DNA, 60 bp, Artificial
  Synthetic oligonucleotide
atggtctagagtggacacagcttggatacagacaccttcagtattactgggtgttccaga

SEQ ID NO: 335277 - DNA, 55 bp, Artificial
  Synthetic oligonucleotide
atggtctagtcctaacgatcatagttagctacgttgcataccgttacatacaatc

SEQ ID NO: 335278 - DNA, 60 bp, Artificial
  Synthetic oligonucleotide
atggtctataaatttgtcgttatgtgtgtggtccaaccacgcaaatattgataatgccta

SEQ ID NO: 335279 - DNA, 55 bp, Artificial
  Synthetic oligonucleotide
atggtctcaccataaccccagcagacaaatcagataagtttagtgaaaccacctg

SEQ ID NO: 335280 - DNA, 59 bp, Artificial
  Synthetic oligonucleotide
atggtctcaggtgcaaagaatatgttcggtggaatgtttagtaaagtgcaaggtgcaat

SEQ ID NO: 335281 - DNA, 55 bp, Artificial
  Synthetic oligonucleotide
atggtctccacagtggattttataccgcctatggcatctctggaagagaagggag

SEQ ID NO: 335282 - DNA, 55 bp, Artificial
  Synthetic oligonucleotide
atggtctcgaccgggaagaacacaccacgaacgctaatcgtcgaaggacacttta

SEQ ID NO: 335283 - DNA, 55 bp, Artificial
  Synthetic oligonucleotide
atggtctcgagaattttaaggagatgcgggctgtgattgacaaagggaaggtgta

SEQ ID NO: 335284 - DNA, 58 bp, Artificial
  Synthetic oligonucleotide
atggtctctaccatccgttggttgtccgcgatatggttcggatccctgactggacgcc

SEQ ID NO: 335285 - DNA, 50 bp, Artificial
  Synthetic oligonucleotide
atggtctctcgcatccgggcattctgttactggctatccatattagcgga

SEQ ID NO: 335286 - DNA, 55 bp, Artificial
  Synthetic oligonucleotide
atggtctgctggtcacggaagccagtccaatttccgatctatttgcccacgattc

SEQ ID NO: 335287 - DNA, 55 bp, Artificial
  Synthetic oligonucleotide
atggtctggcaggaccgcgacatctacctgcagggcccgatatgggccaagatcc

SEQ ID NO: 335288 - DNA, 53 bp, Artificial
  Synthetic oligonucleotide
atggtctgttagtagcagatggtgggcctaacatttacaatttgagaaacttg

SEQ ID NO: 335289 - DNA, 50 bp, Artificial
  Synthetic oligonucleotide
atggtcttgctaaagcatttcctagcaatatgatggtagttacggaacgt

SEQ ID NO: 335290 - DNA, 55 bp, Artificial
  Synthetic oligonucleotide
atggtgaaccaacaatctttcttaagcatagaaaagatcttgtaacagctgggcc

SEQ ID NO: 335291 - DNA, 55 bp, Artificial
  Synthetic oligonucleotide
atggtgaagactattgttaagccggttgaggataactcgttaaaatacgagagac

SEQ ID NO: 335292 - DNA, 60 bp, Artificial
  Synthetic oligonucleotide
atggtgaagatgcgatcctatacaaccatcttttaacggaggcggtttgcattggctcag

SEQ ID NO: 335293 - DNA, 53 bp, Artificial
  Synthetic oligonucleotide
atggtgaatcaagacaattaaaatttggtagaaagacaattttttcgactaaa

SEQ ID NO: 335294 - DNA, 60 bp, Artificial
  Synthetic oligonucleotide
atggtgaatctaacctggatatcagtgatggtctatcgacatatgttccaacataggtta

SEQ ID NO: 335295 - DNA, 60 bp, Artificial
  Synthetic oligonucleotide
atggtgaattcgtaatcaggaacacaacgcaactacatttgctgccaatcccagatagag

SEQ ID NO: 335296 - DNA, 60 bp, Artificial
  Synthetic oligonucleotide
atggtgacaaatttagggccacagacaagcgcgttgtggattctctccgcgccatttgtg

SEQ ID NO: 335297 - DNA, 60 bp, Artificial
  Synthetic oligonucleotide
atggtgacaatcgaagagttgttaccatatagctattggattggccatccggtgtgcaac

SEQ ID NO: 335298 - DNA, 60 bp, Artificial
  Synthetic oligonucleotide
atggtgacaatctcagattgttatcataaagcgagttggattggccatccggtaaagata

SEQ ID NO: 335299 - DNA, 60 bp, Artificial
  Synthetic oligonucleotide
atggtgacacacctggatccaaatatggcaccacagtagtcaaccgcatgggtgcactgt

SEQ ID NO: 335300 - DNA, 60 bp, Artificial
  Synthetic oligonucleotide
atggtgacacattcaaatgaatcaaaatatgccaacgcaatgcatgtcggggctatagaa

SEQ ID NO: 335301 - DNA, 60 bp, Artificial
  Synthetic oligonucleotide
atggtgacagtatatagcttatatattgttaccatgggcgcacaagtctccagacagaat

SEQ ID NO: 335302 - DNA, 55 bp, Artificial
  Synthetic oligonucleotide
atggtgacatccgaggctcagttgtttaacaagccctactggctgcaaaaagctc

SEQ ID NO: 335303 - DNA, 56 bp, Artificial
  Synthetic oligonucleotide
atggtgactgccccccgttggaacttattaccagtgttatacaggatggggacatg

SEQ ID NO: 335304 - DNA, 60 bp, Artificial
  Synthetic oligonucleotide
atggtgactggatcatagctcctgcgcacatacaacagggcgaaggggacataacattca

SEQ ID NO: 335305 - DNA, 55 bp, Artificial
  Synthetic oligonucleotide
atggtgacttatgtgaaggatgagcttaggtccgccgagaaggtagcaaaaggga

SEQ ID NO: 335306 - DNA, 55 bp, Artificial
  Synthetic oligonucleotide
atggtgacttgtcctgttcatatgaccactccaaatggggaccaactatgagccc

SEQ ID NO: 335307 - DNA, 60 bp, Artificial
  Synthetic oligonucleotide
atggtgagaagatcaactttgaagcaccagtctccatctggtcccgtgttgtacaattcg

SEQ ID NO: 335308 - DNA, 60 bp, Artificial
  Synthetic oligonucleotide
atggtgagatgtacaatgagtacacgatgttaattagagatgaaatagtcaaaatgctag

SEQ ID NO: 335309 - DNA, 55 bp, Artificial
  Synthetic oligonucleotide
atggtgagggatgttattataccacagttaggaaagtggccgacaatgttagatg

SEQ ID NO: 335310 - DNA, 55 bp, Artificial
  Synthetic oligonucleotide
atggtgagtggtgcggcgaccataaacccaatctccaaaccattgcacggtaagg

SEQ ID NO: 335311 - DNA, 58 bp, Artificial
  Synthetic oligonucleotide
atggtgatagcgatgctcctggtgcattaccgtttgcaagtatactccctcatagagt

SEQ ID NO: 335312 - DNA, 59 bp, Artificial
  Synthetic oligonucleotide
atggtgatatcgattattcagtggtagttgatacacttaacgaagagaccaagtggtat

SEQ ID NO: 335313 - DNA, 60 bp, Artificial
  Synthetic oligonucleotide
atggtgatggaactaattcggatgataaagcgaggaatcaatgaccggaatttctggaga

SEQ ID NO: 335314 - DNA, 56 bp, Artificial
  Synthetic oligonucleotide
atggtgatgtgggagttacaggatttttatatccccgagcttgtgttccttatcct

SEQ ID NO: 335315 - DNA, 58 bp, Artificial
  Synthetic oligonucleotide
atggtgatgttacacgctttttatccaataacgctatggtgttatatacggacgtctc

SEQ ID NO: 335316 - DNA, 60 bp, Artificial
  Synthetic oligonucleotide
atggtgcacaacatcatgtgcatttggggaccctggtgatatcatgtccactcccagtgg

SEQ ID NO: 335317 - DNA, 58 bp, Artificial
  Synthetic oligonucleotide
atggtgcagaataaattaccagatgacaatataattgaattttgcattaagatattcg

SEQ ID NO: 335318 - DNA, 60 bp, Artificial
  Synthetic oligonucleotide
atggtgcagccatttcttcacatactatggctgccaagtatttgccaagttatttaacgc

SEQ ID NO: 335319 - DNA, 53 bp, Artificial
  Synthetic oligonucleotide
atggtgcatctaaattagagttcactcaagaccctagcaaattcacagaccct

SEQ ID NO: 335320 - DNA, 56 bp, Artificial
  Synthetic oligonucleotide
atggtgccttccccgtcaagaaacaacccgctcccctcaggcgcaacgacaagcgc

SEQ ID NO: 335321 - DNA, 56 bp, Artificial
  Synthetic oligonucleotide
atggtgcgaagagcctactgagctaactgagagtcctccggcccctgaatgcggct

SEQ ID NO: 335322 - DNA, 58 bp, Artificial
  Synthetic oligonucleotide
atggtgcgagtaacatccgtacactgtgggtaggcacacttctccacgggtttgtgtc

SEQ ID NO: 335323 - DNA, 60 bp, Artificial
  Synthetic oligonucleotide
atggtgcggatcactcattggtctcacttccagagcaacctgggctcagaacatacttac

SEQ ID NO: 335324 - DNA, 60 bp, Artificial
  Synthetic oligonucleotide
atggtgctccaagctggcataaccaaaatgccgtactttgtgcgcgcccaagggctcatt

SEQ ID NO: 335325 - DNA, 60 bp, Artificial
  Synthetic oligonucleotide
atggtgctccaagctggcctaactagggtgccgtacttcgtgcgcgctcaagggctcatt

SEQ ID NO: 335326 - DNA, 60 bp, Artificial
  Synthetic oligonucleotide
atggtgctccaggctagtataacccgagtgccgtacttcgtgcgcgctcaagggctcatt

SEQ ID NO: 335327 - DNA, 60 bp, Artificial
  Synthetic oligonucleotide
atggtgctccaggctgccataactagagtgccgtacttcgtacgcgctcaagggctcatc

SEQ ID NO: 335328 - DNA, 60 bp, Artificial
  Synthetic oligonucleotide
atggtgctccaggctgccatactcaaagtgccgtacttcgtgcgcgcacacgggctcatt

SEQ ID NO: 335329 - DNA, 57 bp, Artificial
  Synthetic oligonucleotide
atggtgctgcacagacccgcctagatcccgattctctggcacgacccttggctaacc

SEQ ID NO: 335330 - DNA, 60 bp, Artificial
  Synthetic oligonucleotide
atggtgcttcaagctagtaccagttgatccagatgaggtagaaaaggccaatgagggaga

SEQ ID NO: 335331 - DNA, 57 bp, Artificial
  Synthetic oligonucleotide
atggtgcttcacgttgaacaacccgactgaagaggagattaagagtttggacacgtg

SEQ ID NO: 335332 - DNA, 57 bp, Artificial
  Synthetic oligonucleotide
atggtgcttcactttgaacaaccccactgaagaagagattaagagcctggaaacgtg

SEQ ID NO: 335333 - DNA, 60 bp, Artificial
  Synthetic oligonucleotide
atggtggaagcccaccaagagaaggcaaggaccctgcacgacctatgtgagcagcgagag

SEQ ID NO: 335334 - DNA, 54 bp, Artificial
  Synthetic oligonucleotide
atggtggagcatggagtcttgagagccggtggaggggtgagaccgttcaggtgc

SEQ ID NO: 335335 - DNA, 58 bp, Artificial
  Synthetic oligonucleotide
atggtggaggccatggtgtctagggccagaatcgatgcacgaattgacttcgaatctg

SEQ ID NO: 335336 - DNA, 60 bp, Artificial
  Synthetic oligonucleotide
atggtggatgtgtaactttgtccgctaaagacaagccaagtgttgacgtatggctgtcat

SEQ ID NO: 335337 - DNA, 51 bp, Artificial
  Synthetic oligonucleotide
atggtggcaggcgcgcaagagagagttgacccggtgatattggacataagt

SEQ ID NO: 335338 - DNA, 60 bp, Artificial
  Synthetic oligonucleotide
atggtggcattgatcttggacatcaagagaactccagggaacaaaccgaggattgctgag

SEQ ID NO: 335339 - DNA, 55 bp, Artificial
  Synthetic oligonucleotide
atggtggcccgttgcactcagccccatcacaagatgtggccggattacggcggtc

SEQ ID NO: 335340 - DNA, 56 bp, Artificial
  Synthetic oligonucleotide
atggtggctggcagagacaaccggtgaccagttttgacatccaacttgcactggca

SEQ ID NO: 335341 - DNA, 56 bp, Artificial
  Synthetic oligonucleotide
atggtgggatggtttcaaccccaactaccacgaaaggatcctcattgatgactttc

SEQ ID NO: 335342 - DNA, 60 bp, Artificial
  Synthetic oligonucleotide
atggtgggcggctggaacaatccactgctggaaaccgcagcaaaacacatgtccctcgac

SEQ ID NO: 335343 - DNA, 55 bp, Artificial
  Synthetic oligonucleotide
atggtgggtctcttttccaacaatccacatgacctacctttgttgtgtaccttaa

SEQ ID NO: 335344 - DNA, 60 bp, Artificial
  Synthetic oligonucleotide
atggtggtccccgcatgcaggtgttgtcggctatggatattgcatgtgtgtcccacatgc

SEQ ID NO: 335345 - DNA, 60 bp, Artificial
  Synthetic oligonucleotide
atggtggtgcgtttgacttgaatcttacacaacaatataatgcacctcatagtttagcag

SEQ ID NO: 335346 - DNA, 56 bp, Artificial
  Synthetic oligonucleotide
atggtgtaacgtttactgcccatgggcagacacgtctgtacttcaagagtgtgggc

SEQ ID NO: 335347 - DNA, 60 bp, Artificial
  Synthetic oligonucleotide
atggtgtaactagactgaaagaggacatacttatagtcactgataccggcaatgatatta

SEQ ID NO: 335348 - DNA, 60 bp, Artificial
  Synthetic oligonucleotide
atggtgtaagcatgaaagtattagctttaagacacagtgtgactcaggtgtatgcagata

SEQ ID NO: 335349 - DNA, 55 bp, Artificial
  Synthetic oligonucleotide
atggtgtaaggagagccaagatgggactagagccgattctaggagtccctctcag

SEQ ID NO: 335350 - DNA, 55 bp, Artificial
  Synthetic oligonucleotide
atggtgtaggcagggtagcgtcttggtttgggtggtctaagccactcgtccttga

SEQ ID NO: 335351 - DNA, 57 bp, Artificial
  Synthetic oligonucleotide
atggtgtagtggccccatgtgggcctgagttccattttagctaacttgatccggtag

SEQ ID NO: 335352 - DNA, 54 bp, Artificial
  Synthetic oligonucleotide
atggtgtataaccgtttggttggaaccaatagccattaggttctgataattttg

SEQ ID NO: 335353 - DNA, 51 bp, Artificial
  Synthetic oligonucleotide
atggtgtctcgtcttttagcgagaagaatgatgaggagaagtaatgtaaat

SEQ ID NO: 335354 - DNA, 51 bp, Artificial
  Synthetic oligonucleotide
atggtgtcttatttatatgtgacaccaaatggcaatattgtaatttagtaa

SEQ ID NO: 335355 - DNA, 55 bp, Artificial
  Synthetic oligonucleotide
atggtgtgaagacccgcatgtgcttaactgtgagtcctccggcccctgaatgcgg

SEQ ID NO: 335356 - DNA, 55 bp, Artificial
  Synthetic oligonucleotide
atggtgtgactaagccaaaacaagtgattaaattggatgctgatcctgtagagtc

SEQ ID NO: 335357 - DNA, 59 bp, Artificial
  Synthetic oligonucleotide
atggtgtgcacagaaaagccagggaacacactcacaattaaagtctgcaatactaaaat

SEQ ID NO: 335358 - DNA, 52 bp, Artificial
  Synthetic oligonucleotide
atggtgtgggttagccgtcccgtgtgtgacgccagccttttagggcgagttg

SEQ ID NO: 335359 - DNA, 58 bp, Artificial
  Synthetic oligonucleotide
atggtgtgtacactcttagtacttatgacttctaccctagtatcccagttgaatacca

SEQ ID NO: 335360 - DNA, 55 bp, Artificial
  Synthetic oligonucleotide
atggtgttacctgaaggggttggatccttttggatacattggatcacaacgcaag

SEQ ID NO: 335361 - DNA, 59 bp, Artificial
  Synthetic oligonucleotide
atggtgttatatacagacgtgtctcaatgggattcatctcaacataatacgcaaccgtt

SEQ ID NO: 335362 - DNA, 59 bp, Artificial
  Synthetic oligonucleotide
atggtgttctcacaggaggagtgtatgataaaggcagtccgtggcgatttgaactttgt

SEQ ID NO: 335363 - DNA, 55 bp, Artificial
  Synthetic oligonucleotide
atggtgttgcaccgtgggaaccgcgtgagagacatcacgagacattttcgtgatc

SEQ ID NO: 335364 - DNA, 55 bp, Artificial
  Synthetic oligonucleotide
atggttaagaaactacctaagtatatggccccgaacatattgggcgcagtggaat

SEQ ID NO: 335365 - DNA, 50 bp, Artificial
  Synthetic oligonucleotide
atggttacaggactaaggaacatcccatccattcaatccagaggtctgtt

SEQ ID NO: 335366 - DNA, 60 bp, Artificial
  Synthetic oligonucleotide
atggttacatgtttgtgtcactggggatgatagaaatgcgactgctagcatcatttatga

SEQ ID NO: 335367 - DNA, 50 bp, Artificial
  Synthetic oligonucleotide
atggttagaaggtttttcgtagttcttcaaacctaagcggttatacgtgc

SEQ ID NO: 335368 - DNA, 57 bp, Artificial
  Synthetic oligonucleotide
atggttaggaatcggcgtttgccttcagttatgagtcattctttcgcgcaagtcccg

SEQ ID NO: 335369 - DNA, 59 bp, Artificial
  Synthetic oligonucleotide
atggttagtgattttaatctgccacctatagtagcaaaggaaatagtggccagttgtga

SEQ ID NO: 335370 - DNA, 60 bp, Artificial
  Synthetic oligonucleotide
atggttatgctaactgggacatagatataacaggttatgcacaaatgcgtagaaaggtgg

SEQ ID NO: 335371 - DNA, 55 bp, Artificial
  Synthetic oligonucleotide
atggttatgtctacatcatattatctttaaacggaagtgcggatgtggtgtccac

SEQ ID NO: 335372 - DNA, 55 bp, Artificial
  Synthetic oligonucleotide
atggttattcagcacctacggtcgaagatttccgaacctgtaacccacgaagcga

SEQ ID NO: 335373 - DNA, 60 bp, Artificial
  Synthetic oligonucleotide
atggttattcgccaggggaactcaatcgcgtggcagcaggcctcagaaagcttggggctc

SEQ ID NO: 335374 - DNA, 58 bp, Artificial
  Synthetic oligonucleotide
atggttcagagtatacatacaggaacaagaagattaaaatcagaaattgggaaggtca

SEQ ID NO: 335375 - DNA, 59 bp, Artificial
  Synthetic oligonucleotide
atggttcatcttggagcggtcaaaatattgcttaaagctcaatttcgaaatgggattga

SEQ ID NO: 335376 - DNA, 60 bp, Artificial
  Synthetic oligonucleotide
atggttccactcagcggcttatattactacaatggcgcctcttcatacattgttactcca

SEQ ID NO: 335377 - DNA, 53 bp, Artificial
  Synthetic oligonucleotide
atggttccgcggcaacccctataaccaaagtttcagcggaacaatggggtcaa

SEQ ID NO: 335378 - DNA, 58 bp, Artificial
  Synthetic oligonucleotide
atggttcgacactccatcagtcgaggagtctcgagatgccatgtggacgagggcatgc

SEQ ID NO: 335379 - DNA, 60 bp, Artificial
  Synthetic oligonucleotide
atggttcgccgtgactcctcgaccggcaatgtcattgatgcgggctattcgggtcttcag

SEQ ID NO: 335380 - DNA, 56 bp, Artificial
  Synthetic oligonucleotide
atggttcgcgcgttggaaagactttcccgatggaagtctctccgaagtctcaggac

SEQ ID NO: 335381 - DNA, 52 bp, Artificial
  Synthetic oligonucleotide
atggttcgtggaccgtaaaaaccacgtttctgtatcggttggtggcgttaca

SEQ ID NO: 335382 - DNA, 55 bp, Artificial
  Synthetic oligonucleotide
atggttcgtgggctacggtagcgtcacggaagagaccgaaccttgacaatcctta

SEQ ID NO: 335383 - DNA, 60 bp, Artificial
  Synthetic oligonucleotide
atggttctaagaactgccataggtcaggtggcaaggcccatgtttctatacgtgaggaca

SEQ ID NO: 335384 - DNA, 60 bp, Artificial
  Synthetic oligonucleotide
atggttctcccctgtgtgctctcgtggacatacataattctgagatggaacggtgcagtc

SEQ ID NO: 335385 - DNA, 55 bp, Artificial
  Synthetic oligonucleotide
atggttctctgtatttggggcaatggtcgagttacggccaatgatattaagcccc

SEQ ID NO: 335386 - DNA, 57 bp, Artificial
  Synthetic oligonucleotide
atggttcttcacttatgacctatatatagtggtggtttgtgggttgcgtgtcccaat

SEQ ID NO: 335387 - DNA, 60 bp, Artificial
  Synthetic oligonucleotide
atggttgaagcgccaatatgacatgcgacgtcccgctgttacgcgtttaacgaatagtca

SEQ ID NO: 335388 - DNA, 55 bp, Artificial
  Synthetic oligonucleotide
atggttgattgagaatgcattgttgtttaagattgttgtatcactagtaacattg

SEQ ID NO: 335389 - DNA, 60 bp, Artificial
  Synthetic oligonucleotide
atggttgcacatctgcgtcactggggatgatagaaatgcgactgctagtttcatttatga

SEQ ID NO: 335390 - DNA, 60 bp, Artificial
  Synthetic oligonucleotide
atggttgcacccgcattcctacattccacctaggataccgtcattggtgttatagtcaca

SEQ ID NO: 335391 - DNA, 60 bp, Artificial
  Synthetic oligonucleotide
atggttgcacgtttgtgtcactggggatgatagaaatgcaactgctagtttcatttacaa

SEQ ID NO: 335392 - DNA, 55 bp, Artificial
  Synthetic oligonucleotide
atggttgcactgtctcctcttggggctttggttgcttgctacaagggagtgagct

SEQ ID NO: 335393 - DNA, 60 bp, Artificial
  Synthetic oligonucleotide
atggttgctaaatgagctacactttaatgtactacatgtgacacggcacattggtgcaag

SEQ ID NO: 335394 - DNA, 57 bp, Artificial
  Synthetic oligonucleotide
atggttgctgtatccattttaggatccaccgaccttagttaaatcccctggcatgga

SEQ ID NO: 335395 - DNA, 55 bp, Artificial
  Synthetic oligonucleotide
atggttggacacaaacaagtaaggagcaggttaggaaacaggtagttgttgataa

SEQ ID NO: 335396 - DNA, 60 bp, Artificial
  Synthetic oligonucleotide
atggttggcgcaatcgatgtgcaggtagaacgagcagccacagtttaggtctatcctctt

SEQ ID NO: 335397 - DNA, 54 bp, Artificial
  Synthetic oligonucleotide
atggttgggaaaacaggagagaagtactatcggacagttggctaactacaattt

SEQ ID NO: 335398 - DNA, 60 bp, Artificial
  Synthetic oligonucleotide
atggttggtggaattgggagattctatatacagatgtgtactgaactcaagctcagtgac

SEQ ID NO: 335399 - DNA, 55 bp, Artificial
  Synthetic oligonucleotide
atggttgtatgaacacagtccttagggtctagaccttcaagcgagggttctttga

SEQ ID NO: 335400 - DNA, 60 bp, Artificial
  Synthetic oligonucleotide
atggttgtcacaaaacaacatatgatggctcactacaacagtagtggggggtccaggcat

SEQ ID NO: 335401 - DNA, 60 bp, Artificial
  Synthetic oligonucleotide
atggttgtgggacaatctcatggttgaaaatgatttacattccacatatggcaaggcaac

SEQ ID NO: 335402 - DNA, 50 bp, Artificial
  Synthetic oligonucleotide
atggttgtttcacaactgagagaagagtctaccaccagaaagagagtcca

SEQ ID NO: 335403 - DNA, 56 bp, Artificial
  Synthetic oligonucleotide
atggtttaactatgacccctgccgacaagtcaccctgctttaatgaagttacatgg

SEQ ID NO: 335404 - DNA, 50 bp, Artificial
  Synthetic oligonucleotide
atggtttaatggtctggtgcattgagaacggaacctccccgaacataaac

SEQ ID NO: 335405 - DNA, 55 bp, Artificial
  Synthetic oligonucleotide
atggtttaccagcagcgaacccaaacggcgggaaggagtactatgaagtggcagg

SEQ ID NO: 335406 - DNA, 60 bp, Artificial
  Synthetic oligonucleotide
atggtttccaacaagcagaacaacatggtcaatccacgcccatcatcagtggatgactac

SEQ ID NO: 335407 - DNA, 59 bp, Artificial
  Synthetic oligonucleotide
atggtttccaacacagaaatgaagaaggtacagggattgctgcagacaaagaatcgacc

SEQ ID NO: 335408 - DNA, 56 bp, Artificial
  Synthetic oligonucleotide
atggtttggagaatgtggaattctttgatgctttggttctcggaacttctgagggt

SEQ ID NO: 335409 - DNA, 56 bp, Artificial
  Synthetic oligonucleotide
atggttttaggtgacattagggtctatcctaaacgaagtgactatgcgccttccac

SEQ ID NO: 335410 - DNA, 56 bp, Artificial
  Synthetic oligonucleotide
atgtaaaacagttaacagaggtagtgcaaaaagtagccttagaaggcatagtaata

SEQ ID NO: 335411 - DNA, 54 bp, Artificial
  Synthetic oligonucleotide
atgtaaaagaattggtattcaaatttggtttacctaggctagtagcaaaacaga

SEQ ID NO: 335412 - DNA, 57 bp, Artificial
  Synthetic oligonucleotide
atgtaaaatactttcagcgattgggcgtaagatgttaaacacacatgaggaaccaaa

SEQ ID NO: 335413 - DNA, 59 bp, Artificial
  Synthetic oligonucleotide
atgtaaacgttggcactcacggtacagttgcagtgccaaagttaaaagccatgtcctca

SEQ ID NO: 335414 - DNA, 57 bp, Artificial
  Synthetic oligonucleotide
atgtaaaggaagtacctgggctgatcttagaattcgtcaaagctggtttgtcagttg

SEQ ID NO: 335415 - DNA, 51 bp, Artificial
  Synthetic oligonucleotide
atgtaaagtcagatagattggttttggcaacagggctaagaaatgtccctc

SEQ ID NO: 335416 - DNA, 56 bp, Artificial
  Synthetic oligonucleotide
atgtaaagttggctctcagctggcctttagggtacccaacgacagattttatccaa

SEQ ID NO: 335417 - DNA, 57 bp, Artificial
  Synthetic oligonucleotide
atgtaaatattcaagtgcgggatgtcttacatttttccgggttaggacatcagcttc

SEQ ID NO: 335418 - DNA, 60 bp, Artificial
  Synthetic oligonucleotide
atgtaacacatcagggttcaactatgtttctgtgcattgtccagacgggatccatgacgt

SEQ ID NO: 335419 - DNA, 60 bp, Artificial
  Synthetic oligonucleotide
atgtaacagacggtggggtcggggcgatacagagaggtgctctgtatatggtaattgctc

SEQ ID NO: 335420 - DNA, 54 bp, Artificial
  Synthetic oligonucleotide
atgtaacagacttcgcagctatgagaacattcgcagccagtcagcttagcgtca

SEQ ID NO: 335421 - DNA, 55 bp, Artificial
  Synthetic oligonucleotide
atgtaacagtgtactatggagtaccacagtgggaggacagtacagacttcctact

SEQ ID NO: 335422 - DNA, 58 bp, Artificial
  Synthetic oligonucleotide
atgtaacattggtgcaaattcaatttggatgccagttccagatgcgaaaattaagggg

SEQ ID NO: 335423 - DNA, 57 bp, Artificial
  Synthetic oligonucleotide
atgtaaccatagtgtataatagcactcaggatcgggtgtttgccatttttccgaccc

SEQ ID NO: 335424 - DNA, 60 bp, Artificial
  Synthetic oligonucleotide
atgtaacctcgtattgtagctctaccagcttgaataattctgactgacagcaatcatctc

SEQ ID NO: 335425 - DNA, 58 bp, Artificial
  Synthetic oligonucleotide
atgtaacgacccttatccaggcaataataacaatggggtcaaaggattctcatatctg

SEQ ID NO: 335426 - DNA, 60 bp, Artificial
  Synthetic oligonucleotide
atgtaacgatgcacatgctgacttggataggctgttcgatgagagatcaagggtgttata

SEQ ID NO: 335427 - DNA, 60 bp, Artificial
  Synthetic oligonucleotide
atgtaactgcgagtagaattcactgcattgtgattcatatattccgaaatagttgttaac

SEQ ID NO: 335428 - DNA, 55 bp, Artificial
  Synthetic oligonucleotide
atgtaactggtggtcttgtacaacagacttctcagtggttgtctaatcttttggg

SEQ ID NO: 335429 - DNA, 59 bp, Artificial
  Synthetic oligonucleotide
atgtaacttagaagatgtacacagcgaccaataggtggcaactagccaagttgcttaag

SEQ ID NO: 335430 - DNA, 59 bp, Artificial
  Synthetic oligonucleotide
atgtaacttagctttatctgctaatcaacctgaaaccactataatcagtgttggagacg

SEQ ID NO: 335431 - DNA, 55 bp, Artificial
  Synthetic oligonucleotide
atgtaacttatgctgctactgctactccaaatcaagctgttcagttaccaactgg

SEQ ID NO: 335432 - DNA, 60 bp, Artificial
  Synthetic oligonucleotide
atgtaagaactgcatgctagcaatgcatccgttctcaaattgccccactacatgcatatg

SEQ ID NO: 335433 - DNA, 59 bp, Artificial
  Synthetic oligonucleotide
atgtaagaataagccggttggggcagcgtggcaccattcgtacacgtagtggcctgcaa

SEQ ID NO: 335434 - DNA, 54 bp, Artificial
  Synthetic oligonucleotide
atgtaagaattaagtaccagggtgagaaccagttaacacggcaatggaccaccc

SEQ ID NO: 335435 - DNA, 55 bp, Artificial
  Synthetic oligonucleotide
atgtaagagttaatagtctcaaactggcagtcggtctgaggaacgtgcctgctag

SEQ ID NO: 335436 - DNA, 58 bp, Artificial
  Synthetic oligonucleotide
atgtaagatcactggcggccgatttaaattcgataatttgtagcggtggtagctatag

SEQ ID NO: 335437 - DNA, 55 bp, Artificial
  Synthetic oligonucleotide
atgtaaggacggtcgattccttccttatacatatgaaggggacgcaagttaagag

SEQ ID NO: 335438 - DNA, 60 bp, Artificial
  Synthetic oligonucleotide
atgtaaggtccagtcttatgagcaacgggatgatattaagcatactggtattgttcgttg

SEQ ID NO: 335439 - DNA, 60 bp, Artificial
  Synthetic oligonucleotide
atgtaaggtgcagtcttttgatgcgaagaacgatattggtcacatgggtaaggttatctg

SEQ ID NO: 335440 - DNA, 60 bp, Artificial
  Synthetic oligonucleotide
atgtaataggcattcgagatccacacacccagagtagcacacacttccacgagaacaaga

SEQ ID NO: 335441 - DNA, 57 bp, Artificial
  Synthetic oligonucleotide
atgtaatcaaaacgcccgacagcacagtatctgtccgtgtagaggatttgctatcta

SEQ ID NO: 335442 - DNA, 53 bp, Artificial
  Synthetic oligonucleotide
atgtaatcatagccagtgcatcactcccagagacaactagactgtatcattgc

SEQ ID NO: 335443 - DNA, 60 bp, Artificial
  Synthetic oligonucleotide
atgtaatcatgtacacatttgattgggttcaactcggttgcgattgctgcaccgattggg

SEQ ID NO: 335444 - DNA, 55 bp, Artificial
  Synthetic oligonucleotide
atgtaatgggaatgattgggatactgcctgacatgactcccagcacagagttgtc

SEQ ID NO: 335445 - DNA, 55 bp, Artificial
  Synthetic oligonucleotide
atgtaatggtcccctataaagcttggtccccaagtactcattgtaaagatgaggg

SEQ ID NO: 335446 - DNA, 59 bp, Artificial
  Synthetic oligonucleotide
atgtaatgttagatttaagtgcaagagtagattacagaataggagtaggagctttaaca

SEQ ID NO: 335447 - DNA, 56 bp, Artificial
  Synthetic oligonucleotide
atgtaattgattcgtatggctcagctaccacgggatatcacattctgaaggcaaac

SEQ ID NO: 335448 - DNA, 60 bp, Artificial
  Synthetic oligonucleotide
atgtacaaccagaggaatcgcctcagagcaggggcccaccaagacaaaatcatgttctac

SEQ ID NO: 335449 - DNA, 55 bp, Artificial
  Synthetic oligonucleotide
atgtacaactcacggggccaactctgcggaatacgcaggtgtcgcgcgagtgggg

SEQ ID NO: 335450 - DNA, 60 bp, Artificial
  Synthetic oligonucleotide
atgtacacatggcattaaaccagtggtatcaactcaattactgttaaatggcagcctagc

SEQ ID NO: 335451 - DNA, 57 bp, Artificial
  Synthetic oligonucleotide
atgtacactaacgtggaccgagacctcataggctggcccgccccccagggcgcgagc

SEQ ID NO: 335452 - DNA, 57 bp, Artificial
  Synthetic oligonucleotide
atgtacagaacccctgatgtgcccaaaggttgtgaaggcccatgtaaggtacaatcg

SEQ ID NO: 335453 - DNA, 50 bp, Artificial
  Synthetic oligonucleotide
atgtacagcacaaagcgcgatcccacgtggaagcccggccgacaaggcat

SEQ ID NO: 335454 - DNA, 60 bp, Artificial
  Synthetic oligonucleotide
atgtacaggaagcccaggatatatcggacgatcagaacgcctgatgttcctagaggctgt

SEQ ID NO: 335455 - DNA, 60 bp, Artificial
  Synthetic oligonucleotide
atgtacaggaaggccaggatctatcgcacgttgactagtcccgatgtgcccagaggatgt

SEQ ID NO: 335456 - DNA, 60 bp, Artificial
  Synthetic oligonucleotide
atgtacagttcattactacgtatggcgaaaaacacatcatcaggaatgtcaacatctgta

SEQ ID NO: 335457 - DNA, 60 bp, Artificial
  Synthetic oligonucleotide
atgtacatacggttctccaagaatcatatggtcacgttggacatcgaatctgtcgtccat

SEQ ID NO: 335458 - DNA, 56 bp, Artificial
  Synthetic oligonucleotide
atgtacatgaagctatacgtattgatggtagtaactctaagttcgcaaagaagaaa

SEQ ID NO: 335459 - DNA, 53 bp, Artificial
  Synthetic oligonucleotide
atgtacatgatccacccttttacccctggactgtaccagaacctaaagtaaac

SEQ ID NO: 335460 - DNA, 60 bp, Artificial
  Synthetic oligonucleotide
atgtacatgatgcagagctacctcgtattctagtggatcacaatacacaaacatgtcatg

SEQ ID NO: 335461 - DNA, 55 bp, Artificial
  Synthetic oligonucleotide
atgtacatgcaccacagacagttgcagtagttgttaaacagctgaagccatcatg

SEQ ID NO: 335462 - DNA, 58 bp, Artificial
  Synthetic oligonucleotide
atgtaccatgaatagatacccagttaggcaacgtatcatcaaatccgtaggcgtaaaa

SEQ ID NO: 335463 - DNA, 60 bp, Artificial
  Synthetic oligonucleotide
atgtacccagagctttgaacagattggcaacactagtgacaacagttaatgggactccaa

SEQ ID NO: 335464 - DNA, 53 bp, Artificial
  Synthetic oligonucleotide
atgtaccctagtagctttgtaattaatgtaatgagtggattgtaaacgtgttc

SEQ ID NO: 335465 - DNA, 60 bp, Artificial
  Synthetic oligonucleotide
atgtaccctccaacaccaagacccatgttatcatttcttactgacattttggctgcgcag

SEQ ID NO: 335466 - DNA, 59 bp, Artificial
  Synthetic oligonucleotide
atgtaccgaacagctgatgtccctaggggatgtgaaggtccttgcaagattcaatcctt

SEQ ID NO: 335467 - DNA, 60 bp, Artificial
  Synthetic oligonucleotide
atgtaccgcgtcattatcgactgtacgatacataatgttaccgtgttgtgtacattgctc

SEQ ID NO: 335468 - DNA, 60 bp, Artificial
  Synthetic oligonucleotide
atgtacctcattttgcaaaatgtaacgtagcgtcacatatgtcgtcatgtcgtcgcaggg

SEQ ID NO: 335469 - DNA, 60 bp, Artificial
  Synthetic oligonucleotide
atgtacctgttgtgacagtgctttaattcgacatgcctaagcgggatgccccgtggcgct

SEQ ID NO: 335470 - DNA, 54 bp, Artificial
  Synthetic oligonucleotide
atgtaccttccgcaaatatgatggttcgggagacctacaaacattcaacgggtt

SEQ ID NO: 335471 - DNA, 60 bp, Artificial
  Synthetic oligonucleotide
atgtacgacccgctatgcatggacgcgcgctttctaagaaacaggaacagtcagcttatc

SEQ ID NO: 335472 - DNA, 60 bp, Artificial
  Synthetic oligonucleotide
atgtacgcatacgtccaataccgaaagcctcaatgcacggtcacctgtagaggagaatgt

SEQ ID NO: 335473 - DNA, 60 bp, Artificial
  Synthetic oligonucleotide
atgtacgctggcacgactgaccaaaatcgcacagccctccttaattcgactatcagcatc

SEQ ID NO: 335474 - DNA, 55 bp, Artificial
  Synthetic oligonucleotide
atgtacgtatgcacttggtagactattgcgcactattgagtgtacgtgatagtcg

SEQ ID NO: 335475 - DNA, 60 bp, Artificial
  Synthetic oligonucleotide
atgtacgtgtttcaataaatatcatatgaattgtagtggagttaatatgtttgatagtga

SEQ ID NO: 335476 - DNA, 60 bp, Artificial
  Synthetic oligonucleotide
atgtactaaacacccgacagcagaagtcattagctcttcaacacatacgtaatctagaag

SEQ ID NO: 335477 - DNA, 57 bp, Artificial
  Synthetic oligonucleotide
atgtactaatgccccaccaagggcactcacaataggcaccctggaggaagatttcgg

SEQ ID NO: 335478 - DNA, 58 bp, Artificial
  Synthetic oligonucleotide
atgtactaatgcgttaggtaatcagtttcaaacacaacaagcaagaactgtcgtccaa

SEQ ID NO: 335479 - DNA, 57 bp, Artificial
  Synthetic oligonucleotide
atgtactaccatccctcccagatcatggacctattcttgcaaaaaccaaacctcgaa

SEQ ID NO: 335480 - DNA, 60 bp, Artificial
  Synthetic oligonucleotide
atgtactcccctgtgcgtaaatccatgatttatgcagtctaagtgtatgtaataagagca

SEQ ID NO: 335481 - DNA, 58 bp, Artificial
  Synthetic oligonucleotide
atgtactgaacagaccgacacattggttagattagaagaagagggtaaactagctgaa

SEQ ID NO: 335482 - DNA, 60 bp, Artificial
  Synthetic oligonucleotide
atgtactgaccatcggcgatgttggtgtccccgttgaagtagatggagctggcatgatct

SEQ ID NO: 335483 - DNA, 56 bp, Artificial
  Synthetic oligonucleotide
atgtactgcaccggtaaggagcgtcacttcgaacaaacattctactccgcttaccc

SEQ ID NO: 335484 - DNA, 52 bp, Artificial
  Synthetic oligonucleotide
atgtactgcccgctcgtaggggaggaattaagcgccgccccagtggcctctt

SEQ ID NO: 335485 - DNA, 59 bp, Artificial
  Synthetic oligonucleotide
atgtactgcgttgtctaattcagagtccgcatctgaagtaccggttcctattgtacttc

SEQ ID NO: 335486 - DNA, 56 bp, Artificial
  Synthetic oligonucleotide
atgtactggcctgacgatttaccgtccgttgacgcttgttctgattaaaggtcttg

SEQ ID NO: 335487 - DNA, 50 bp, Artificial
  Synthetic oligonucleotide
atgtactgtgtcattatggtcggttctttagcgtctttcggatttgccac

SEQ ID NO: 335488 - DNA, 60 bp, Artificial
  Synthetic oligonucleotide
atgtacttacatcttattaaagtctgatctactagcaatagaagaacgattaactgagag

SEQ ID NO: 335489 - DNA, 60 bp, Artificial
  Synthetic oligonucleotide
atgtacttcaagcgtgagccagtctgcaggacacagggttggacccagtgtcttctggtg

SEQ ID NO: 335490 - DNA, 52 bp, Artificial
  Synthetic oligonucleotide
atgtacttgggccatctatcttagtcaaagcaagaggtgcacgtactaagct

SEQ ID NO: 335491 - DNA, 55 bp, Artificial
  Synthetic oligonucleotide
atgtactttactacagcattagggaacacctgaatgtatgctcgatggtagccgg

SEQ ID NO: 335492 - DNA, 53 bp, Artificial
  Synthetic oligonucleotide
atgtactttaggaataaagtgcatgggtgtcccaggaatcgcaatcgataaga

SEQ ID NO: 335493 - DNA, 52 bp, Artificial
  Synthetic oligonucleotide
atgtacttttcacaaatacggtccttcgggctccctggaaaactacgaggga

SEQ ID NO: 335494 - DNA, 59 bp, Artificial
  Synthetic oligonucleotide
atgtagaagacaccaaaatagacctatggtcctacaatgcagaattgctggtggctcta

SEQ ID NO: 335495 - DNA, 51 bp, Artificial
  Synthetic oligonucleotide
atgtagacggtgtaatgcactttgaggatttacgggctgaacaacatatct

SEQ ID NO: 335496 - DNA, 56 bp, Artificial
  Synthetic oligonucleotide
atgtagacgtaattgtggtaccaacccgcgagctacgtaattcgtggcgccgtcgc

SEQ ID NO: 335497 - DNA, 57 bp, Artificial
  Synthetic oligonucleotide
atgtagactacttagagactcaaatacagtatggtgacctcagtaaagaagggaaag

SEQ ID NO: 335498 - DNA, 60 bp, Artificial
  Synthetic oligonucleotide
atgtagacttaagatggacaaattggaactcaaggggatgagctatgcaatgtgcacgaa

SEQ ID NO: 335499 - DNA, 60 bp, Artificial
  Synthetic oligonucleotide
atgtagatcatagatgcaatgaagtcacagaacaagtgggtgaagaatggaggtcaattg

SEQ ID NO: 335500 - DNA, 57 bp, Artificial
  Synthetic oligonucleotide
atgtagatcggttctataaaactctaagagccgagcaagcttcacaggaggtaaaaa

SEQ ID NO: 335501 - DNA, 59 bp, Artificial
  Synthetic oligonucleotide
atgtagatggacttatgccgccccggtgactcctggaataatcgtccatccactctaag

SEQ ID NO: 335502 - DNA, 51 bp, Artificial
  Synthetic oligonucleotide
atgtagatggagcagctaatagggattctaagataggaaaagcagggtatg

SEQ ID NO: 335503 - DNA, 60 bp, Artificial
  Synthetic oligonucleotide
atgtagcaggatggcttcttggcaatccggagtgtgatcttctactgactgcaagctcat

SEQ ID NO: 335504 - DNA, 60 bp, Artificial
  Synthetic oligonucleotide
atgtagcagtgggttcagagagttacaataggaggttcacccctgagatcagcacgaggc

SEQ ID NO: 335505 - DNA, 60 bp, Artificial
  Synthetic oligonucleotide
atgtagcagttatacaggtgggtggtgcgaatattttagacatcactgctgatccgacga

SEQ ID NO: 335506 - DNA, 55 bp, Artificial
  Synthetic oligonucleotide
atgtagcatccccgcgaataatactgtcatagagaaagagatttgtcctaaagca

SEQ ID NO: 335507 - DNA, 51 bp, Artificial
  Synthetic oligonucleotide
atgtagccgcggtcccgaatcacacgggcttgatccgtttcaccgggtcga

SEQ ID NO: 335508 - DNA, 60 bp, Artificial
  Synthetic oligonucleotide
atgtagcctggaaatatatatattacaatggagattgtgggtggcaaaaagtgtgttctg

SEQ ID NO: 335509 - DNA, 55 bp, Artificial
  Synthetic oligonucleotide
atgtagcgaagactccaggttgaccgaacacgcgaactcgctgattcacatggtg

SEQ ID NO: 335510 - DNA, 50 bp, Artificial
  Synthetic oligonucleotide
atgtagctaagaccgagaatggggccaacgtagggtttgaccgagtagct

SEQ ID NO: 335511 - DNA, 60 bp, Artificial
  Synthetic oligonucleotide
atgtagctagagttccagatgatcaaatgtataggttaagggatagactacgattattgc

SEQ ID NO: 335512 - DNA, 60 bp, Artificial
  Synthetic oligonucleotide
atgtaggaaccatcttggtgtctcgaatccatcggaatccgattcgagattactgcaggt

SEQ ID NO: 335513 - DNA, 51 bp, Artificial
  Synthetic oligonucleotide
atgtaggaccagtgaaaacccctatagggttacctttagggtgatcccctc

SEQ ID NO: 335514 - DNA, 59 bp, Artificial
  Synthetic oligonucleotide
atgtaggatcagatttaccattggcagaacatagaaagagggtcgaattgcttagggaa

SEQ ID NO: 335515 - DNA, 55 bp, Artificial
  Synthetic oligonucleotide
atgtaggttttaccgacagcacagtagataatactactcaaggaggtagtgctag

SEQ ID NO: 335516 - DNA, 57 bp, Artificial
  Synthetic oligonucleotide
atgtagtaaagtatcctaacagtgcgagaacgaagaaggtggcttacagtagaattc

SEQ ID NO: 335517 - DNA, 55 bp, Artificial
  Synthetic oligonucleotide
atgtagtaccattatccttatcatctagatccatacagcataagagagctcaagt

SEQ ID NO: 335518 - DNA, 55 bp, Artificial
  Synthetic oligonucleotide
atgtagtaccattatcgttatcatctagatctatacagtataagaggacacaagt

SEQ ID NO: 335519 - DNA, 53 bp, Artificial
  Synthetic oligonucleotide
atgtagtagtcgtaagggtagtggtactgtggcttacccccttgcatgtagct

SEQ ID NO: 335520 - DNA, 60 bp, Artificial
  Synthetic oligonucleotide
atgtagtctccgtctttctccacgtattgtttaacatctgaggcgctcttagccgcctga

SEQ ID NO: 335521 - DNA, 60 bp, Artificial
  Synthetic oligonucleotide
atgtagtgaagggtaagtgcacactgtttgagacgtacttgctcacacacccagaggaac

SEQ ID NO: 335522 - DNA, 57 bp, Artificial
  Synthetic oligonucleotide
atgtagtgctagtccactactcctacctggaacaccatccgcccttggtctctttat

SEQ ID NO: 335523 - DNA, 60 bp, Artificial
  Synthetic oligonucleotide
atgtagtgggaacattatcaacattagtgactcagctaacgccgacctcatttggattct

SEQ ID NO: 335524 - DNA, 55 bp, Artificial
  Synthetic oligonucleotide
atgtagttcagccctatgtcgccaatctcgaccccgcagaatttgagaatacacc

SEQ ID NO: 335525 - DNA, 53 bp, Artificial
  Synthetic oligonucleotide
atgtagttggttcgtttcacttttcattcggcggggtgttgtgtaccgcccta

SEQ ID NO: 335526 - DNA, 55 bp, Artificial
  Synthetic oligonucleotide
atgtagtttgcggaatcctgttacttggtgaagtattatggttacttcgctgtcc

SEQ ID NO: 335527 - DNA, 53 bp, Artificial
  Synthetic oligonucleotide
atgtataacccttattatgtgatcatcatatactactgaattattaccaatca

SEQ ID NO: 335528 - DNA, 55 bp, Artificial
  Synthetic oligonucleotide
atgtataagacgtatgcggaattggtggacgaatcggcatttggcgtgaacatac

SEQ ID NO: 335529 - DNA, 55 bp, Artificial
  Synthetic oligonucleotide
atgtataccaatgtggaccaggatcttgtgggctggcccgctccccaaggtaccc

SEQ ID NO: 335530 - DNA, 51 bp, Artificial
  Synthetic oligonucleotide
atgtatagattgagggacagactacgactactgccagtagaagtaagacga

SEQ ID NO: 335531 - DNA, 60 bp, Artificial
  Synthetic oligonucleotide
atgtatagcgacaggaagtttgattcgaacgatgaagatggattcacgctaatacagatc

SEQ ID NO: 335532 - DNA, 58 bp, Artificial
  Synthetic oligonucleotide
atgtatagcggagtaaataagaaggatcttaggtccttatgtatgcaattattcggga

SEQ ID NO: 335533 - DNA, 60 bp, Artificial
  Synthetic oligonucleotide
atgtatagttggattagtctaatacgtcccttaatgacaagatggatggtggctaatggc

SEQ ID NO: 335534 - DNA, 56 bp, Artificial
  Synthetic oligonucleotide
atgtatatcgtaagacctctggtaaacagacgtctaaatctcgtgtaccgcgaaag

SEQ ID NO: 335535 - DNA, 60 bp, Artificial
  Synthetic oligonucleotide
atgtatcaattgctttgacaatatacactgtgagttgacaatacatagtactgtagaagc

SEQ ID NO: 335536 - DNA, 60 bp, Artificial
  Synthetic oligonucleotide
atgtatccaccgagctcgcgagccatgcagtacgcaacctggaagccagaggcgatcgct

SEQ ID NO: 335537 - DNA, 57 bp, Artificial
  Synthetic oligonucleotide
atgtatcccttcctccaaattgccgaagtcgaacggtcgtataatcccatcatggcc

SEQ ID NO: 335538 - DNA, 55 bp, Artificial
  Synthetic oligonucleotide
atgtatccttttaggaataaacgtgggtcctcattcactcaacgtcgttattatc

SEQ ID NO: 335539 - DNA, 52 bp, Artificial
  Synthetic oligonucleotide
atgtatcgacggtaaatggaatcccgtactcccaatatgtgtacgaactaac

SEQ ID NO: 335540 - DNA, 55 bp, Artificial
  Synthetic oligonucleotide
atgtatcgagatccggagactgatgaagtgtcaatgcggtcatgggtattcgtcg

SEQ ID NO: 335541 - DNA, 59 bp, Artificial
  Synthetic oligonucleotide
atgtatcgcgacagaaagtttgattcgaacgatgaggatgggtttacgttgatacagat

SEQ ID NO: 335542 - DNA, 60 bp, Artificial
  Synthetic oligonucleotide
atgtatcgctagctgggcgtacaacggtctcgttaccactgtcttatcggaggatgcatt

SEQ ID NO: 335543 - DNA, 55 bp, Artificial
  Synthetic oligonucleotide
atgtatctcagtgagtctggttgatagattgccagctcaacgggatcaaatgggg

SEQ ID NO: 335544 - DNA, 60 bp, Artificial
  Synthetic oligonucleotide
atgtatgagaaaaactgcgttgtttcatgacaatcaattggggcatgcggaagacaatca

SEQ ID NO: 335545 - DNA, 60 bp, Artificial
  Synthetic oligonucleotide
atgtatgatgatctgtttaagctgaacaactatgaagtgccagatgatgttgtgcgtagg

SEQ ID NO: 335546 - DNA, 60 bp, Artificial
  Synthetic oligonucleotide
atgtatgatttaacatctgatgagcttttagctccctgaatgtttggatggaaatgtgct

SEQ ID NO: 335547 - DNA, 60 bp, Artificial
  Synthetic oligonucleotide
atgtatgcatggatgaaatggttagagagtcacaaagaaatggaattgcaccacaatcgg

SEQ ID NO: 335548 - DNA, 60 bp, Artificial
  Synthetic oligonucleotide
atgtatgcccctcccagcgatggacaaattaggtgtacatcaaatattactgggctacta

SEQ ID NO: 335549 - DNA, 60 bp, Artificial
  Synthetic oligonucleotide
atgtatgcccctcccattgcaggactaattagatgtacatcaaatattacagggttacta

SEQ ID NO: 335550 - DNA, 52 bp, Artificial
  Synthetic oligonucleotide
atgtatgccgatgacaccgcaggatgggatacaagaatcacactagaagacc

SEQ ID NO: 335551 - DNA, 57 bp, Artificial
  Synthetic oligonucleotide
atgtatggacgaaatggttagggaatcgcaaagaaacggaattgcaccgcaatcgga

SEQ ID NO: 335552 - DNA, 60 bp, Artificial
  Synthetic oligonucleotide
atgtatgtaagagactgctctttcaaaagatgaagcgggagagtaatccattcaaaggac

SEQ ID NO: 335553 - DNA, 60 bp, Artificial
  Synthetic oligonucleotide
atgtatgtatggacgaaatggttagagaatcgcaaagaaatggaattgcaccgcaatcag

SEQ ID NO: 335554 - DNA, 60 bp, Artificial
  Synthetic oligonucleotide
atgtatgttccaccaggagccagcgctccagacggccaggactcatttcagtggcaatcc

SEQ ID NO: 335555 - DNA, 59 bp, Artificial
  Synthetic oligonucleotide
atgtatgttcctatttggcagcggcaatgcagttttttgaggggacatgtccggaagac

SEQ ID NO: 335556 - DNA, 50 bp, Artificial
  Synthetic oligonucleotide
atgtattaggacagtcagccacgcaagtaaatggacaatacccattacga

SEQ ID NO: 335557 - DNA, 50 bp, Artificial
  Synthetic oligonucleotide
atgtattcaaattcatcagggtctctgtctagcagattagtcaacttatg

SEQ ID NO: 335558 - DNA, 51 bp, Artificial
  Synthetic oligonucleotide
atgtattcaagtgccgaaggggacttggtagggtggcccagtcctcccggg

SEQ ID NO: 335559 - DNA, 60 bp, Artificial
  Synthetic oligonucleotide
atgtattccagctctcattaactgtactgctctctttcttccaatacccggtaatctgac

SEQ ID NO: 335560 - DNA, 58 bp, Artificial
  Synthetic oligonucleotide
atgtattcccaacgctttcctcaggttgtggttgaactgtatttgtactgttatgata

SEQ ID NO: 335561 - DNA, 60 bp, Artificial
  Synthetic oligonucleotide
atgtattgaactgctgccacgacttggttgtggcagggagtgctgcattcaccaaacgcg

SEQ ID NO: 335562 - DNA, 53 bp, Artificial
  Synthetic oligonucleotide
atgtattggacctgatgcaaacccctgctcacactttggtgggagcactcctt

SEQ ID NO: 335563 - DNA, 60 bp, Artificial
  Synthetic oligonucleotide
atgtattgtgacgtagttgagggtcgctggaacatggctaccgctgggagcctagacact

SEQ ID NO: 335564 - DNA, 57 bp, Artificial
  Synthetic oligonucleotide
atgtatttcgtccctacttggcgcgataagcgcctgcagtggttgatgaagcttgga

SEQ ID NO: 335565 - DNA, 60 bp, Artificial
  Synthetic oligonucleotide
atgtatttgccaccatgctacattgttcactaggggatgttcttcctgaagactctcgta

SEQ ID NO: 335566 - DNA, 57 bp, Artificial
  Synthetic oligonucleotide
atgtatttggcccctccatcgcccctgagcctgtggctctagtggaggaaactaccc

SEQ ID NO: 335567 - DNA, 58 bp, Artificial
  Synthetic oligonucleotide
atgtcaaaagaggtgaacgccagaattgagccattcctgaagacaacaccacgtcccc

SEQ ID NO: 335568 - DNA, 60 bp, Artificial
  Synthetic oligonucleotide
atgtcaaaagaggtgaatgcgcggattgagccatttctgaaaacaacaccacgccctcta

SEQ ID NO: 335569 - DNA, 55 bp, Artificial
  Synthetic oligonucleotide
atgtcaaaatgtttcaagcattgtcgccacagtggacgtgctcgcatttgcggcg

SEQ ID NO: 335570 - DNA, 60 bp, Artificial
  Synthetic oligonucleotide
atgtcaaacgagcgttgctagcgtattcattatcaggaagtactgtcgatttaatgcaat

SEQ ID NO: 335571 - DNA, 60 bp, Artificial
  Synthetic oligonucleotide
atgtcaaagcggatggagctaccagtacctcagacagaccaatagctacttcaacgtagt

SEQ ID NO: 335572 - DNA, 56 bp, Artificial
  Synthetic oligonucleotide
atgtcaacaactaatagagcagttacagtcaactctcaagacaggatcagaggaac

SEQ ID NO: 335573 - DNA, 56 bp, Artificial
  Synthetic oligonucleotide
atgtcaacagctcatggcattgacccgaatgtgcgcactggtgtaaggaccatcac

SEQ ID NO: 335574 - DNA, 58 bp, Artificial
  Synthetic oligonucleotide
atgtcaacatcgccaatctcactgaagaaaggaggtatgtccctgttttacccgagac

SEQ ID NO: 335575 - DNA, 60 bp, Artificial
  Synthetic oligonucleotide
atgtcaacgattgttgagagtaccaccaatactcagagtcctgcggctgctatcttgtcg

SEQ ID NO: 335576 - DNA, 59 bp, Artificial
  Synthetic oligonucleotide
atgtcaacggtatacccgataagctatatgagtcattgtgggatacggtatgcaactat

SEQ ID NO: 335577 - DNA, 58 bp, Artificial
  Synthetic oligonucleotide
atgtcaactctacagctaggcaaagcaagtaaaaactatctaacggcgcaaccttatg

SEQ ID NO: 335578 - DNA, 60 bp, Artificial
  Synthetic oligonucleotide
atgtcaagcatgttggtatagttcgttgtgttagtgatgtgacccgtgggtccggtctga

SEQ ID NO: 335579 - DNA, 60 bp, Artificial
  Synthetic oligonucleotide
atgtcaagttcaactctttagagagtaagattcgtgcaacagcactttcctacactcaag

SEQ ID NO: 335580 - DNA, 60 bp, Artificial
  Synthetic oligonucleotide
atgtcaatagagacatgcactctctcctgggtatgcgcaactgaatactcgcgcttgtgt

SEQ ID NO: 335581 - DNA, 60 bp, Artificial
  Synthetic oligonucleotide
atgtcaattggtgatcagtactcaatatatagtgagtaccgaatggcattattcgtaatt

SEQ ID NO: 335582 - DNA, 60 bp, Artificial
  Synthetic oligonucleotide
atgtcaatttggtgatcccggggatataatgagtactctgacagggatgaaatgtcctga

SEQ ID NO: 335583 - DNA, 60 bp, Artificial
  Synthetic oligonucleotide
atgtcacacttggatttggaaggacatcctggaccagtatgctgaagattatgccgctta

SEQ ID NO: 335584 - DNA, 60 bp, Artificial
  Synthetic oligonucleotide
atgtcacagaacctcatatttctgcaagctcacttgaatggattgaccctgacagttctt

SEQ ID NO: 335585 - DNA, 60 bp, Artificial
  Synthetic oligonucleotide
atgtcacagacgcggaagctattttccaaagcttgaatatgaatgcagcagtaggggctt

SEQ ID NO: 335586 - DNA, 60 bp, Artificial
  Synthetic oligonucleotide
atgtcacagtttctaggatttttggcagccatgtcacacataaaagtacatcccatcatt

SEQ ID NO: 335587 - DNA, 60 bp, Artificial
  Synthetic oligonucleotide
atgtcaccaatgattgccccaatgcgtccgttgtgtacgagacggagaacctgatcatgc

SEQ ID NO: 335588 - DNA, 60 bp, Artificial
  Synthetic oligonucleotide
atgtcaccgctagccctgaacaatttagcctcccgattgttgagaaagatctctctacac

SEQ ID NO: 335589 - DNA, 59 bp, Artificial
  Synthetic oligonucleotide
atgtcaccggggtcacacaagataacatcaagtgcccctgccaggtacccgcacctgag

SEQ ID NO: 335590 - DNA, 55 bp, Artificial
  Synthetic oligonucleotide
atgtcacgcaaggtaggatgttctgagtgggttggccaaactcagctggttgcgg

SEQ ID NO: 335591 - DNA, 55 bp, Artificial
  Synthetic oligonucleotide
atgtcactaccacgttcagaagaaagcacttccgcccaacacccgatgcgtgtag

SEQ ID NO: 335592 - DNA, 55 bp, Artificial
  Synthetic oligonucleotide
atgtcactcgtggtaacggtattacacaccgtgtgggtaagcgtttctgtgttaa

SEQ ID NO: 335593 - DNA, 60 bp, Artificial
  Synthetic oligonucleotide
atgtcactgagtgcggcgaagtagcagcactaatgtgtttggctatgttcccatgcggaa

SEQ ID NO: 335594 - DNA, 58 bp, Artificial
  Synthetic oligonucleotide
atgtcagaaacaaaaagacccagcgtaccaccgagtgagtggtggcgctgggctctcc

SEQ ID NO: 335595 - DNA, 55 bp, Artificial
  Synthetic oligonucleotide
atgtcagacggcccgacatgttggaatggccaagatggagggctagagggtttac

SEQ ID NO: 335596 - DNA, 60 bp, Artificial
  Synthetic oligonucleotide
atgtcagccaatcagcatcgagcatataacctatataaaccgatgcacttccgcatttcg

SEQ ID NO: 335597 - DNA, 55 bp, Artificial
  Synthetic oligonucleotide
atgtcagccagtgcatctggtggctccagtacttcctgactagggcagaagcgct

SEQ ID NO: 335598 - DNA, 59 bp, Artificial
  Synthetic oligonucleotide
atgtcagcgtttgtgacaatcaccggatgcgatataaaaatttgtttaccaatacatcg

SEQ ID NO: 335599 - DNA, 60 bp, Artificial
  Synthetic oligonucleotide
atgtcagctgctgggacgtatgggctcccctacgctctcctcttcttttgcgtagcttgg

SEQ ID NO: 335600 - DNA, 55 bp, Artificial
  Synthetic oligonucleotide
atgtcaggaggacccttctggaaagaggtatatggggactcaattctgggtcccc

SEQ ID NO: 335601 - DNA, 55 bp, Artificial
  Synthetic oligonucleotide
atgtcaggattaagctatgataagtgtgttactgctggtcatgaagcatggcctc

SEQ ID NO: 335602 - DNA, 60 bp, Artificial
  Synthetic oligonucleotide
atgtcaggcatgaataagcttgtaggtgcgttgaggtgttacgcatattgcctaatcctt

SEQ ID NO: 335603 - DNA, 55 bp, Artificial
  Synthetic oligonucleotide
atgtcaggtaggttcgaatggcggattaagtccatgtcactcccttcaggcgttc

SEQ ID NO: 335604 - DNA, 60 bp, Artificial
  Synthetic oligonucleotide
atgtcagttgtacaagtatttgatgtgtgtgcaatcgtacaacgtttatatcgtggacca

SEQ ID NO: 335605 - DNA, 60 bp, Artificial
  Synthetic oligonucleotide
atgtcatagttaccgccattgtcgtcttgatggctaatgcttatatcgtcgccatcacaa

SEQ ID NO: 335606 - DNA, 59 bp, Artificial
  Synthetic oligonucleotide
atgtcatccatgatactgactcagtttggaccgttcattgagagcatctcaggtattac

SEQ ID NO: 335607 - DNA, 60 bp, Artificial
  Synthetic oligonucleotide
atgtcatctctcgtaatactccccgcttgtgatgccgatggccctggatcgattgccgaa

SEQ ID NO: 335608 - DNA, 55 bp, Artificial
  Synthetic oligonucleotide
atgtcatcttgtgggtgagtgttacagcaacaactgtcagagctggagagatgat

SEQ ID NO: 335609 - DNA, 60 bp, Artificial
  Synthetic oligonucleotide
atgtcatgcttagatcatcggtcacaacgaaggtggtacgaaacgttgttgagtatcaaa

SEQ ID NO: 335610 - DNA, 60 bp, Artificial
  Synthetic oligonucleotide
atgtcatgggaatgattggaatattgcctgacatgacccccagcacggaaatgtcactga

SEQ ID NO: 335611 - DNA, 52 bp, Artificial
  Synthetic oligonucleotide
atgtcatgtgggatagagacctcttggtcacagaatcgagagcccagggcac

SEQ ID NO: 335612 - DNA, 57 bp, Artificial
  Synthetic oligonucleotide
atgtcatgttctacttggtccgtgatagaaggccctatggaaaaagcccaatggatt

SEQ ID NO: 335613 - DNA, 58 bp, Artificial
  Synthetic oligonucleotide
atgtcattaatttattagttcagagtgttgataaagtaccgcaaatcttgactttgga

SEQ ID NO: 335614 - DNA, 60 bp, Artificial
  Synthetic oligonucleotide
atgtcattaggggtaatgtcattataacagataatcattgtaaagtttgtgattgtacat

SEQ ID NO: 335615 - DNA, 55 bp, Artificial
  Synthetic oligonucleotide
atgtcattgtcgcctagacacaagttccatgggcgggagccgagcacttcttgga

SEQ ID NO: 335616 - DNA, 60 bp, Artificial
  Synthetic oligonucleotide
atgtccaaaagatctagatcacttaattcgtcagcgttctattacagagtataggtgcat

SEQ ID NO: 335617 - DNA, 55 bp, Artificial
  Synthetic oligonucleotide
atgtccaaagaaccaggtgttgtttctccaaccagctatttggatgtggatttgc

SEQ ID NO: 335618 - DNA, 59 bp, Artificial
  Synthetic oligonucleotide
atgtccaaagtatgtcaaaagcacgaaattgagaatggctacaggattaagaaatatcc

SEQ ID NO: 335619 - DNA, 50 bp, Artificial
  Synthetic oligonucleotide
atgtccaaggcccatggaattgatcccaacatcaggactggggtgaggac

SEQ ID NO: 335620 - DNA, 59 bp, Artificial
  Synthetic oligonucleotide
atgtccaccgctgagctagctatgttctcaggggacgattccctcgtaatttgtgggtc

SEQ ID NO: 335621 - DNA, 50 bp, Artificial
  Synthetic oligonucleotide
atgtccacctatgtgctggggtctcaactcccatgcgaacctgaaccaga

SEQ ID NO: 335622 - DNA, 56 bp, Artificial
  Synthetic oligonucleotide
atgtccaggaaattaagggcttatatagataacatgaatgggcatgagccagctgt

SEQ ID NO: 335623 - DNA, 54 bp, Artificial
  Synthetic oligonucleotide
atgtccagtactttgctcactattgcaggaagtatgctcccctctacgcatcag

SEQ ID NO: 335624 - DNA, 60 bp, Artificial
  Synthetic oligonucleotide
atgtccatgacgtatcagcgtacaggcgtcccgatttcacttagcgctcgtcctctagct

SEQ ID NO: 335625 - DNA, 60 bp, Artificial
  Synthetic oligonucleotide
atgtccatgagcttcctcttggctggaggtctggtcttggctatgacccttggagtgggg

SEQ ID NO: 335626 - DNA, 56 bp, Artificial
  Synthetic oligonucleotide
atgtccatggtcaacacaacccgtgtaacctatgtggaaaagcccgtcaggtatgg

SEQ ID NO: 335627 - DNA, 54 bp, Artificial
  Synthetic oligonucleotide
atgtcccacaatgtagagttccacaaatcggggtgttccctgtagtttgggggc

SEQ ID NO: 335628 - DNA, 56 bp, Artificial
  Synthetic oligonucleotide
atgtcccactatagaggaggtaaatccggcttctataccacatactctgctgcaag

SEQ ID NO: 335629 - DNA, 57 bp, Artificial
  Synthetic oligonucleotide
atgtcccaggacaagagggcctgtggtaccgatcagtttttacttctcatggcgctt

SEQ ID NO: 335630 - DNA, 52 bp, Artificial
  Synthetic oligonucleotide
atgtcccgagttagtgcgccacgtaagcacgggggactattattaccccccg

SEQ ID NO: 335631 - DNA, 55 bp, Artificial
  Synthetic oligonucleotide
atgtcccgagttagtgcgtttgtggggcgctggggcttattattacccccagcgc

SEQ ID NO: 335632 - DNA, 54 bp, Artificial
  Synthetic oligonucleotide
atgtcccgatcggagaggtctcttgccctatgcaatcagtggtgaaactattgg

SEQ ID NO: 335633 - DNA, 55 bp, Artificial
  Synthetic oligonucleotide
atgtcccgatgacgtaagcgctggggactattattacccccagcgcttgggacgg

SEQ ID NO: 335634 - DNA, 54 bp, Artificial
  Synthetic oligonucleotide
atgtcccgatgacgtgagcacgggggactattattaccccccgtgctcgggacg

SEQ ID NO: 335635 - DNA, 59 bp, Artificial
  Synthetic oligonucleotide
atgtcccgatttcaagaagcgcccagatgaagagaaggaggggtgatcgcattccgaag

SEQ ID NO: 335636 - DNA, 55 bp, Artificial
  Synthetic oligonucleotide
atgtcccggtttcaagaggcgtccggatgaagagaaggaggggtgaccgcatccc

SEQ ID NO: 335637 - DNA, 50 bp, Artificial
  Synthetic oligonucleotide
atgtcccgtaacggggcatggcacatagaaaacccatccgcaaaggaaac

SEQ ID NO: 335638 - DNA, 57 bp, Artificial
  Synthetic oligonucleotide
atgtcccgtaccctcggtcaacagaggtgtatgttcgctctatatttggtcctggtg

SEQ ID NO: 335639 - DNA, 58 bp, Artificial
  Synthetic oligonucleotide
atgtcccgtcaagcgtggctagatacaagttctttactcgaagctatttcggagtata

SEQ ID NO: 335640 - DNA, 56 bp, Artificial
  Synthetic oligonucleotide
atgtccctccggtggtgcacgggtgcccactgccacctatcaaggcccccccaata

SEQ ID NO: 335641 - DNA, 58 bp, Artificial
  Synthetic oligonucleotide
atgtccgaaaagacatagaattgaaactgatgcaagatttaatggtatattcagacag

SEQ ID NO: 335642 - DNA, 54 bp, Artificial
  Synthetic oligonucleotide
atgtccgaccgttagtagggttttagttgatgaggtcgtgttgctacactttgg

SEQ ID NO: 335643 - DNA, 55 bp, Artificial
  Synthetic oligonucleotide
atgtccgagttcaaggcccacgatcgcgcgtggctggtgtccggtctcgtcctgc

SEQ ID NO: 335644 - DNA, 55 bp, Artificial
  Synthetic oligonucleotide
atgtccgcaaagggaaaaatagtagtaacgatcggtcagtgccgaacaagaacta

SEQ ID NO: 335645 - DNA, 58 bp, Artificial
  Synthetic oligonucleotide
atgtccgcgacataatgcggcacgagggccaaaaggacagtattgaactatacctttc

SEQ ID NO: 335646 - DNA, 57 bp, Artificial
  Synthetic oligonucleotide
atgtccgtcatgtgttcgacgtggctctctactttgggagacgcgccgacctttccg

SEQ ID NO: 335647 - DNA, 56 bp, Artificial
  Synthetic oligonucleotide
atgtccgttagtcgcgacggcttaattttcgatgggcttgttcgcgctattaggac

SEQ ID NO: 335648 - DNA, 54 bp, Artificial
  Synthetic oligonucleotide
atgtccgtttcgggatacgtaaactcgatgggacatttggggttttcatggtga

SEQ ID NO: 335649 - DNA, 60 bp, Artificial
  Synthetic oligonucleotide
atgtcctaaacaatgcagatactgcatcgaagatcgattttttagcaggtctgatgattg

SEQ ID NO: 335650 - DNA, 59 bp, Artificial
  Synthetic oligonucleotide
atgtcctaagcattgcccctataatgttctcaaacaagatggcgagattaggaaaagga

SEQ ID NO: 335651 - DNA, 60 bp, Artificial
  Synthetic oligonucleotide
atgtcctaagtatgtcaaacagagcactctgaaactggcaacaggaatgaggaacgtacc

SEQ ID NO: 335652 - DNA, 59 bp, Artificial
  Synthetic oligonucleotide
atgtcctatgaagaattcgaggaatggatcactaacttcgatttttcgctcttagactc

SEQ ID NO: 335653 - DNA, 60 bp, Artificial
  Synthetic oligonucleotide
atgtcctccggagtgcgatctgctcatggaggctagcagccagtactcgtccttgcccta

SEQ ID NO: 335654 - DNA, 60 bp, Artificial
  Synthetic oligonucleotide
atgtcctggatgttaactcaattgatttggaagaaccgagtggacagactgctgattgga

SEQ ID NO: 335655 - DNA, 56 bp, Artificial
  Synthetic oligonucleotide
atgtcctgtaacctaagttcacctacatacttggcactactaacagttttagtggc

SEQ ID NO: 335656 - DNA, 53 bp, Artificial
  Synthetic oligonucleotide
atgtcctgtatggacccactcaagtccccagtccacccgacccccaagcccgg

SEQ ID NO: 335657 - DNA, 60 bp, Artificial
  Synthetic oligonucleotide
atgtcctgtcaatgtgcctcatggcacaggttggctcacatttgctaaggagaggacaag

SEQ ID NO: 335658 - DNA, 54 bp, Artificial
  Synthetic oligonucleotide
atgtccttcgggacatatccgagatattatacaccggattcacaccgaagtgtg

SEQ ID NO: 335659 - DNA, 59 bp, Artificial
  Synthetic oligonucleotide
atgtccttgagttcgttgagaagcaagctcaaataggtagtgtgagggtgaacgcaccc

SEQ ID NO: 335660 - DNA, 55 bp, Artificial
  Synthetic oligonucleotide
atgtccttgatccagtcttcgtcgtcattggttagaatgatggacgggattcccc

SEQ ID NO: 335661 - DNA, 60 bp, Artificial
  Synthetic oligonucleotide
atgtccttggcagcaaagcacatgtcgaacacctttcttgcaggtctcgcgcagtactac

SEQ ID NO: 335662 - DNA, 51 bp, Artificial
  Synthetic oligonucleotide
atgtcgaaacttgtgaacctatctcaaaccctacttacctacgctcaatgt

SEQ ID NO: 335663 - DNA, 58 bp, Artificial
  Synthetic oligonucleotide
atgtcgaaagaagtgaacgccagaattgagccatttctgaaaacaacaccgcgccctc

SEQ ID NO: 335664 - DNA, 58 bp, Artificial
  Synthetic oligonucleotide
atgtcgaagcgagctgccgatatcgtcatttctacccccgaatcgaaagtacgccggc

SEQ ID NO: 335665 - DNA, 55 bp, Artificial
  Synthetic oligonucleotide
atgtcgaagcgtcccgccgatatagtcatttccacacccgcttccaaggttcgtc

SEQ ID NO: 335666 - DNA, 60 bp, Artificial
  Synthetic oligonucleotide
atgtcgaagctacacatgcttgtggcactaatattggtactaacctgcctttccaagtag

SEQ ID NO: 335667 - DNA, 50 bp, Artificial
  Synthetic oligonucleotide
atgtcgaagcttgggtggataggtataagttcttacctgagactccaaaa

SEQ ID NO: 335668 - DNA, 55 bp, Artificial
  Synthetic oligonucleotide
atgtcgagaatgtagcaccgaagtttgtagctgcagttgaggcttttaagatgct

SEQ ID NO: 335669 - DNA, 59 bp, Artificial
  Synthetic oligonucleotide
atgtcgagagtctcgattactttcaggaagcatgttagaaggttgaatgggtcaccgat

SEQ ID NO: 335670 - DNA, 55 bp, Artificial
  Synthetic oligonucleotide
atgtcgagcctataaacgacatcccaatcataaagttccttttcagcccgacctt

SEQ ID NO: 335671 - DNA, 60 bp, Artificial
  Synthetic oligonucleotide
atgtcgagcttatacgagggaggcccaacaagaatgatgatgtctcttggacaagcaata

SEQ ID NO: 335672 - DNA, 60 bp, Artificial
  Synthetic oligonucleotide
atgtcgagtgccatgagtgccgcatgtggtcgcagcagggttgcctcgattgcgctatgg

SEQ ID NO: 335673 - DNA, 52 bp, Artificial
  Synthetic oligonucleotide
atgtcgagttttccaatacgccagattccctcgttttaattaacccaacgta

SEQ ID NO: 335674 - DNA, 55 bp, Artificial
  Synthetic oligonucleotide
atgtcgattgatatcacggaagacaatgtgttacgggacagcttgtttctccgcg

SEQ ID NO: 335675 - DNA, 56 bp, Artificial
  Synthetic oligonucleotide
atgtcgcactggttactagggcttaccctgagttcaatgtacaatttaccggtaca

SEQ ID NO: 335676 - DNA, 60 bp, Artificial
  Synthetic oligonucleotide
atgtcgcagtcccgcacccgcgagatactaacgaaaaccactgtggatcatatggccata

SEQ ID NO: 335677 - DNA, 60 bp, Artificial
  Synthetic oligonucleotide
atgtcgcagttccgcactcgcgagatactaacaaagacaactgtggaccatatggccata

SEQ ID NO: 335678 - DNA, 57 bp, Artificial
  Synthetic oligonucleotide
atgtcgcgcggcaagtactggtgtttcacgtcctatgtggacgaaggtggtcttccg

SEQ ID NO: 335679 - DNA, 55 bp, Artificial
  Synthetic oligonucleotide
atgtcgctcagatgtgtgtggacgtcgtttcccgtgtttatggggtttcccctgg

SEQ ID NO: 335680 - DNA, 55 bp, Artificial
  Synthetic oligonucleotide
atgtcgctcgtgtaacaccatatgtttaccgtaaaacctcgtgtaaacagacggc

SEQ ID NO: 335681 - DNA, 55 bp, Artificial
  Synthetic oligonucleotide
atgtcggacatcttcaactcaccacaaaacaaggcatccatcttgactgctctga

SEQ ID NO: 335682 - DNA, 60 bp, Artificial
  Synthetic oligonucleotide
atgtcggaccaatatcaccagattacacacagcatatggcgacgattggagtgctagcaa

SEQ ID NO: 335683 - DNA, 57 bp, Artificial
  Synthetic oligonucleotide
atgtcggatatgccgtccaaggcatcgacatatgtaacctttgatctcgattatgtc

SEQ ID NO: 335684 - DNA, 56 bp, Artificial
  Synthetic oligonucleotide
atgtcgggagctccagtagtcaatgtcgacggtcgagtcatgggtgttcacttaac

SEQ ID NO: 335685 - DNA, 55 bp, Artificial
  Synthetic oligonucleotide
atgtcgggtatcgattgtataaaatacccaacaggacaacttatcacacacggga

SEQ ID NO: 335686 - DNA, 51 bp, Artificial
  Synthetic oligonucleotide
atgtcgtaaaggtttatggtgtaagacaaaggcggacatggatgttggaaa

SEQ ID NO: 335687 - DNA, 57 bp, Artificial
  Synthetic oligonucleotide
atgtcgtcacaacagacatttccgaaatgggagcaaacttccgagccgacagggtaa

SEQ ID NO: 335688 - DNA, 56 bp, Artificial
  Synthetic oligonucleotide
atgtcgtcactgagacttttagatgtcctgaagacgtaatttccgctattaaaaag

SEQ ID NO: 335689 - DNA, 60 bp, Artificial
  Synthetic oligonucleotide
atgtcgtccagacttggaagttcaggtacgctttgtggagatgcaacgctctcctcaggt

SEQ ID NO: 335690 - DNA, 57 bp, Artificial
  Synthetic oligonucleotide
atgtcgtggaactcttaaggtggcagaacgccaccgagaaaggtttgtggtgctgaa

SEQ ID NO: 335691 - DNA, 60 bp, Artificial
  Synthetic oligonucleotide
atgtcgtgtatctctatcacgacatgaccaacagcattaatcggaacctgactgcgatat

SEQ ID NO: 335692 - DNA, 56 bp, Artificial
  Synthetic oligonucleotide
atgtcgtgtgaattagttgggcagagattagggttaaaactgcttaggtattatac

SEQ ID NO: 335693 - DNA, 55 bp, Artificial
  Synthetic oligonucleotide
atgtcgttgcaagaagttcattctgttaacgacataccccttataaaaggggctc

SEQ ID NO: 335694 - DNA, 57 bp, Artificial
  Synthetic oligonucleotide
atgtcgttggtgggtgtagtgtaactgttatgatagtgtggttatgggttagattta

SEQ ID NO: 335695 - DNA, 51 bp, Artificial
  Synthetic oligonucleotide
atgtctaaaaaaccaggaaaacccggtagaaaccgggttgtcaatatgcta

SEQ ID NO: 335696 - DNA, 60 bp, Artificial
  Synthetic oligonucleotide
atgtctaacgcacagaacgatatcgctctttcataacgtccaacactgtgaaccactatt

SEQ ID NO: 335697 - DNA, 60 bp, Artificial
  Synthetic oligonucleotide
atgtctaagccttggtatccttatatctcggctgttgctgcgaccaacctcggtgagaaa

SEQ ID NO: 335698 - DNA, 60 bp, Artificial
  Synthetic oligonucleotide
atgtctataccctatcagcatgtgaatgttccaaaagttgatcgcaaagtcgtcagtctg

SEQ ID NO: 335699 - DNA, 59 bp, Artificial
  Synthetic oligonucleotide
atgtctatgacacagtggatagcacatagggggcgcaaggtggcagattcaggtgactg

SEQ ID NO: 335700 - DNA, 54 bp, Artificial
  Synthetic oligonucleotide
atgtctatggcacagtggatagcacatagaagccaaaaggtagctgatacaggg

SEQ ID NO: 335701 - DNA, 56 bp, Artificial
  Synthetic oligonucleotide
atgtctatgggtccgtttcagtgacgtgcgtgtggggctccgtgtctcggtttgcc

SEQ ID NO: 335702 - DNA, 55 bp, Artificial
  Synthetic oligonucleotide
atgtctatgttaggtaacggaataggagctgttggtagtgccgcaactggttctg

SEQ ID NO: 335703 - DNA, 59 bp, Artificial
  Synthetic oligonucleotide
atgtctcaagcccatggcatagaccccaatatacgtactggggttaggaccatcaccac

SEQ ID NO: 335704 - DNA, 60 bp, Artificial
  Synthetic oligonucleotide
atgtctcagtcccgcactcgcgagatacttacaaaatccactgtggaccatatggccata

SEQ ID NO: 335705 - DNA, 60 bp, Artificial
  Synthetic oligonucleotide
atgtctcgatgcgaaaacatacagtcaatacaacaataacgtacgggtcatatcttgaga

SEQ ID NO: 335706 - DNA, 54 bp, Artificial
  Synthetic oligonucleotide
atgtctcgcaccagacaatagtacacgtccgcggcgcactttggaaccagcgcg

SEQ ID NO: 335707 - DNA, 58 bp, Artificial
  Synthetic oligonucleotide
atgtctcgccaacagcacgaattgcttcggtaacagttacgtcaagaataacaacgaa

SEQ ID NO: 335708 - DNA, 60 bp, Artificial
  Synthetic oligonucleotide
atgtctctagcaagttcaacatatgcaagggcgaattcttctcttccaatgagacttata

SEQ ID NO: 335709 - DNA, 60 bp, Artificial
  Synthetic oligonucleotide
atgtctctccaagtatgcatactctacttggagtcaagaacatgtgatgtagtgtctctc

SEQ ID NO: 335710 - DNA, 52 bp, Artificial
  Synthetic oligonucleotide
atgtctctcctgtttccagcagtgaggaagggactgtttatggcagcctgca

SEQ ID NO: 335711 - DNA, 57 bp, Artificial
  Synthetic oligonucleotide
atgtctctcttgaccaataggctttgccggcgagttgacaaggaccagtgggggccg

SEQ ID NO: 335712 - DNA, 54 bp, Artificial
  Synthetic oligonucleotide
atgtctctgactgcagccgaatatgaccagactacttacggctcgtcgaccaac

SEQ ID NO: 335713 - DNA, 60 bp, Artificial
  Synthetic oligonucleotide
atgtctctgatacagttacatttgttaatgtggcaactggtgcacagggggtctctcgct

SEQ ID NO: 335714 - DNA, 60 bp, Artificial
  Synthetic oligonucleotide
atgtctctgtggcggcctagcgaggctactgtctacttaccacctgtcccagtgtctaaa

SEQ ID NO: 335715 - DNA, 60 bp, Artificial
  Synthetic oligonucleotide
atgtctctgttcacaatctggcggtaccatgggaagcgctggttgaacatacacccgtaa

SEQ ID NO: 335716 - DNA, 60 bp, Artificial
  Synthetic oligonucleotide
atgtctcttgtgtagtacaaagttttggagtgataggacaggcacatgtggcattgccca

SEQ ID NO: 335717 - DNA, 60 bp, Artificial
  Synthetic oligonucleotide
atgtctgaattcaccacatcacttactgatgcatcctcaaaattgagcgtagtatccgat

SEQ ID NO: 335718 - DNA, 60 bp, Artificial
  Synthetic oligonucleotide
atgtctgaggatgtaagcgactccagatcttgaaaatcaggaaacacttgtgcaaaccca

SEQ ID NO: 335719 - DNA, 58 bp, Artificial
  Synthetic oligonucleotide
atgtctgatgaaatgctgagaaaatttctagagaaagggttaggttctacttctacag

SEQ ID NO: 335720 - DNA, 51 bp, Artificial
  Synthetic oligonucleotide
atgtctgattctgtgtccaatggtggcactatttccgctgcgttgccgctt

SEQ ID NO: 335721 - DNA, 58 bp, Artificial
  Synthetic oligonucleotide
atgtctggaaactaatccaataagccctcaaagcttcgtgtataatactctgagtgct

SEQ ID NO: 335722 - DNA, 60 bp, Artificial
  Synthetic oligonucleotide
atgtctggaccaaacaacaatgcatcagcagtggtctggtacggaggtaggccagtaacg

SEQ ID NO: 335723 - DNA, 54 bp, Artificial
  Synthetic oligonucleotide
atgtctggaggacccttctgggaacaagtataccgggactcaatttctggtccc

SEQ ID NO: 335724 - DNA, 60 bp, Artificial
  Synthetic oligonucleotide
atgtctggaggtatatcagacttagatattgtctgtcctattacaggttccacattgaag

SEQ ID NO: 335725 - DNA, 56 bp, Artificial
  Synthetic oligonucleotide
atgtctgggacgttctcccggtgcatgtgcaccccggctgcccgggtgttttggaa

SEQ ID NO: 335726 - DNA, 60 bp, Artificial
  Synthetic oligonucleotide
atgtctgtcaaagcagtgtctgatggtgcaaagtactctaatcaaggttcccacagacaa

SEQ ID NO: 335727 - DNA, 60 bp, Artificial
  Synthetic oligonucleotide
atgtctgtgggtcacattacgatggctggcataatcaatttgagtaacacacccacagcc

SEQ ID NO: 335728 - DNA, 60 bp, Artificial
  Synthetic oligonucleotide
atgtctgtggttatgaggaacactacctgggaaggtcaatgctcaaatagtcatgtgaat

SEQ ID NO: 335729 - DNA, 55 bp, Artificial
  Synthetic oligonucleotide
atgtctgtgtatggccgtatgcaattaccctataacgtcgactcgacacacgagc

SEQ ID NO: 335730 - DNA, 50 bp, Artificial
  Synthetic oligonucleotide
atgtctgtttcctcggtaagcaatctgaacctttgtatgttccactatta

SEQ ID NO: 335731 - DNA, 59 bp, Artificial
  Synthetic oligonucleotide
atgtcttaatgtttcattgctcaaacccccattccaaaagatttatgaattcacgatga

SEQ ID NO: 335732 - DNA, 60 bp, Artificial
  Synthetic oligonucleotide
atgtcttagcctctaccaactccagtcgtatcacaccacccacagtagctcacagtgacg

SEQ ID NO: 335733 - DNA, 55 bp, Artificial
  Synthetic oligonucleotide
atgtcttcatgcttagggaagacgaaccagatgactacttagtcggcaacccacc

SEQ ID NO: 335734 - DNA, 58 bp, Artificial
  Synthetic oligonucleotide
atgtcttccattaaaattgacgttacgtcagatttaggtgaatgtcaaagaactctca

SEQ ID NO: 335735 - DNA, 54 bp, Artificial
  Synthetic oligonucleotide
atgtcttgtctactacagggggccaaactgttgccctcgttggggaaagagctt

SEQ ID NO: 335736 - DNA, 60 bp, Artificial
  Synthetic oligonucleotide
atgtctttgctattgtattcccttcagcagatatcaagacaaagaaagcaacagttgttt

SEQ ID NO: 335737 - DNA, 60 bp, Artificial
  Synthetic oligonucleotide
atgtgaaaagcagcgacccagacattgtggcagccagctcaagtctcatggcaaggaaga

SEQ ID NO: 335738 - DNA, 57 bp, Artificial
  Synthetic oligonucleotide
atgtgaacaacaaagagaaagaagtccttgtactatggggtgttcatcacccgtcta

SEQ ID NO: 335739 - DNA, 58 bp, Artificial
  Synthetic oligonucleotide
atgtgaacagatagggtttggattgagattgtacgatgtgaacggtgaaaacgtggta

SEQ ID NO: 335740 - DNA, 52 bp, Artificial
  Synthetic oligonucleotide
atgtgaaccaatgataatagaaaggaacataacagaaatagtgtatgtgact

SEQ ID NO: 335741 - DNA, 59 bp, Artificial
  Synthetic oligonucleotide
atgtgaagaaagacctgaacatacacaaccaataagagacagaatgttgaacattaagt

SEQ ID NO: 335742 - DNA, 59 bp, Artificial
  Synthetic oligonucleotide
atgtgaagatggattcatcccttatgtcagcatacgtgcaccaaggttggttatagagg

SEQ ID NO: 335743 - DNA, 50 bp, Artificial
  Synthetic oligonucleotide
atgtgaaggttacgtagtcagcattccaaattaggttgccaggttgggtc

SEQ ID NO: 335744 - DNA, 53 bp, Artificial
  Synthetic oligonucleotide
atgtgaaggttgggtgtaccaagaaactaaaaaatctcgttatgacgtaacta

SEQ ID NO: 335745 - DNA, 60 bp, Artificial
  Synthetic oligonucleotide
atgtgaagtacgaggcaagacctgaaacatctcaaagcaacacagatcgaagctggcaag

SEQ ID NO: 335746 - DNA, 60 bp, Artificial
  Synthetic oligonucleotide
atgtgaagttaatagagacgactcccttgcctaacgatgaaacctcacatgtcgcatcat

SEQ ID NO: 335747 - DNA, 54 bp, Artificial
  Synthetic oligonucleotide
atgtgaatcaactgtaccagaacgtatacccagtccgattgtttctagagcacc

SEQ ID NO: 335748 - DNA, 60 bp, Artificial
  Synthetic oligonucleotide
atgtgaatcagtctcatacactgggagtttactacatcacaatatcaaatgtgagcagtg

SEQ ID NO: 335749 - DNA, 56 bp, Artificial
  Synthetic oligonucleotide
atgtgaatgggatcagacgaccgaaacatctctatgtgtcaatgccaaccgcacag

SEQ ID NO: 335750 - DNA, 60 bp, Artificial
  Synthetic oligonucleotide
atgtgacaatgagtgcatagagtctgtcaaaaatggtacctatgactatcccaaatacca

SEQ ID NO: 335751 - DNA, 52 bp, Artificial
  Synthetic oligonucleotide
atgtgacacgtggcggcctatgtctttaggccgtggcactttgcctaagtac

SEQ ID NO: 335752 - DNA, 56 bp, Artificial
  Synthetic oligonucleotide
atgtgacacgtggtaatggtatcacccaccgtgtcggtaagcgtttctgtgttaag

SEQ ID NO: 335753 - DNA, 60 bp, Artificial
  Synthetic oligonucleotide
atgtgacagcagtacgtcaagagtatgctattccagttggacccgtatttccgccaggca

SEQ ID NO: 335754 - DNA, 60 bp, Artificial
  Synthetic oligonucleotide
atgtgacagctcatagccacggccagaggacagattttatgatgtctaccactcagtcgt

SEQ ID NO: 335755 - DNA, 60 bp, Artificial
  Synthetic oligonucleotide
atgtgacagtaacacactctgtcaacctatttgaggacagtcacaatgggaaactatgta

SEQ ID NO: 335756 - DNA, 57 bp, Artificial
  Synthetic oligonucleotide
atgtgacatcagttcacaatccaatgttacacaggcataagtgcgtaagagcgttat

SEQ ID NO: 335757 - DNA, 57 bp, Artificial
  Synthetic oligonucleotide
atgtgacattatattattatcagcaaagtggtgaagctaataaatggatatcaatgg

SEQ ID NO: 335758 - DNA, 59 bp, Artificial
  Synthetic oligonucleotide
atgtgaccacaggctaatgtcggcagccgtcaaggatgagagggccgtacacgccgaca

SEQ ID NO: 335759 - DNA, 57 bp, Artificial
  Synthetic oligonucleotide
atgtgaccagtaatgggagaactaaacagaaaaggttaggacctgtcactcatcaag

SEQ ID NO: 335760 - DNA, 52 bp, Artificial
  Synthetic oligonucleotide
atgtgacccttgggcctggctccccatagactcccatgtaagcctgcctcga

SEQ ID NO: 335761 - DNA, 60 bp, Artificial
  Synthetic oligonucleotide
atgtgacgaattgtggctgggaatccggacgccccaaagctcagcttgccgatagtctta

SEQ ID NO: 335762 - DNA, 55 bp, Artificial
  Synthetic oligonucleotide
atgtgacgatcaatgcatggaaacgattagaaacgggacctatgacaggcaaaag

SEQ ID NO: 335763 - DNA, 60 bp, Artificial
  Synthetic oligonucleotide
atgtgacgctgcaatgtgttacggtgcaacaacagctaatctagtgagagggcaaaatac

SEQ ID NO: 335764 - DNA, 60 bp, Artificial
  Synthetic oligonucleotide
atgtgacgtacaagcccactacgccatttctatacatggaggatatgacatgggcttcaa

SEQ ID NO: 335765 - DNA, 57 bp, Artificial
  Synthetic oligonucleotide
atgtgactaattcgttgaatgatatttcaacacaaacgtctacaattagtaagaaac

SEQ ID NO: 335766 - DNA, 60 bp, Artificial
  Synthetic oligonucleotide
atgtgactatgccaaacaatgacaattttgacaaattgtatgtctggggagttcaccacc

SEQ ID NO: 335767 - DNA, 60 bp, Artificial
  Synthetic oligonucleotide
atgtgagaaacgcaccacaatactatggcgcgctttgaggatccaacacggcgaccctac

SEQ ID NO: 335768 - DNA, 60 bp, Artificial
  Synthetic oligonucleotide
atgtgagaactgtttggacaggattttgacggtgggtgctcggaatgggatatctacaga

SEQ ID NO: 335769 - DNA, 60 bp, Artificial
  Synthetic oligonucleotide
atgtgagacaaagttttgtgaatcagcctccatacaacgtcgataatgacgactatgcta

SEQ ID NO: 335770 - DNA, 60 bp, Artificial
  Synthetic oligonucleotide
atgtgagagccttagagggtagcatagaaaagagtgatgagcgaagcagataccataggg

SEQ ID NO: 335771 - DNA, 60 bp, Artificial
  Synthetic oligonucleotide
atgtgagtaggcggaggcgccgccgctactacaggcgcagactgagacggggcagacgca

SEQ ID NO: 335772 - DNA, 60 bp, Artificial
  Synthetic oligonucleotide
atgtgataattctgccagcatgtatgaacaagttccatttgtaacattcgaaaactatgg

SEQ ID NO: 335773 - DNA, 55 bp, Artificial
  Synthetic oligonucleotide
atgtgatactatggtttagcttcggggcatcatgtgtaatgcttctagccattgc

SEQ ID NO: 335774 - DNA, 60 bp, Artificial
  Synthetic oligonucleotide
atgtgatagtcattgtgagtggtgtgatctgtgccttggtagttatgccttgaggagtgg

SEQ ID NO: 335775 - DNA, 60 bp, Artificial
  Synthetic oligonucleotide
atgtgatagtgtttttgatggaaccaagccatacgcatcctacatgatggcagtgaaaac

SEQ ID NO: 335776 - DNA, 55 bp, Artificial
  Synthetic oligonucleotide
atgtgatatatggaggagcacagtatctgaccaatcaggtgggagacagtcctcc

SEQ ID NO: 335777 - DNA, 60 bp, Artificial
  Synthetic oligonucleotide
atgtgatattgaggaaggatgtcgttatgcgcggctttatcactgccaataccattctga

SEQ ID NO: 335778 - DNA, 60 bp, Artificial
  Synthetic oligonucleotide
atgtgatcataacatgtttatgcgctgtaccatacatttaggcttaaggcggggtatgtt

SEQ ID NO: 335779 - DNA, 60 bp, Artificial
  Synthetic oligonucleotide
atgtgatcgactcgtatggttccatgactacaggttatcatatcttaaaagcaggaacag

SEQ ID NO: 335780 - DNA, 60 bp, Artificial
  Synthetic oligonucleotide
atgtgatgaacctagctacatgggtgggtgcaaatttggaagatccagcatccagggacc

SEQ ID NO: 335781 - DNA, 58 bp, Artificial
  Synthetic oligonucleotide
atgtgatgcgccgtggctttaaagtatatcgtattgggtctttatataggcgttaata

SEQ ID NO: 335782 - DNA, 55 bp, Artificial
  Synthetic oligonucleotide
atgtgatgtctcgactgccagtacgacaggcgaccattaagctactggtggacat

SEQ ID NO: 335783 - DNA, 60 bp, Artificial
  Synthetic oligonucleotide
atgtgatgtgcctgaatttcgtgatgatgatttattgtgtgatcctaaaaatcgtgatta

SEQ ID NO: 335784 - DNA, 60 bp, Artificial
  Synthetic oligonucleotide
atgtgatgttatggcgtcatttgttgttgtgaaatagcatgagagttcctattagacgac

SEQ ID NO: 335785 - DNA, 60 bp, Artificial
  Synthetic oligonucleotide
atgtgcacatcaagtgttacacgctcggtgtcacacgaggtcatccaaggtgcagcggta

SEQ ID NO: 335786 - DNA, 51 bp, Artificial
  Synthetic oligonucleotide
atgtgcacttttatcatcgaaatgtatgatagtatcttgatccacaggtgt

SEQ ID NO: 335787 - DNA, 59 bp, Artificial
  Synthetic oligonucleotide
atgtgcagatcagtctattttactaactacctccactgtgttattttagtcagaaatgt

SEQ ID NO: 335788 - DNA, 60 bp, Artificial
  Synthetic oligonucleotide
atgtgcagggctatgttgaaatgaagagacgaagttctctgaaacaaatgagggctttaa

SEQ ID NO: 335789 - DNA, 60 bp, Artificial
  Synthetic oligonucleotide
atgtgcatataattattgggggtccgggactgaccagacaaaatgcagccatctcgaggt

SEQ ID NO: 335790 - DNA, 60 bp, Artificial
  Synthetic oligonucleotide
atgtgcatcatagtataatttacttgttgtacattccgaccattctggaaacaactagtg

SEQ ID NO: 335791 - DNA, 60 bp, Artificial
  Synthetic oligonucleotide
atgtgcatgatgcagagctgcctcgtattttggtggatcacaacacacaaacgtgtcatg

SEQ ID NO: 335792 - DNA, 56 bp, Artificial
  Synthetic oligonucleotide
atgtgccaagcctcaagaggcctccggaggcctctccctttgacttagggaacaaa

SEQ ID NO: 335793 - DNA, 60 bp, Artificial
  Synthetic oligonucleotide
atgtgccaattaatgatgagctatcgtcacatctacttcgagcaggtaattcgccatggc

SEQ ID NO: 335794 - DNA, 54 bp, Artificial
  Synthetic oligonucleotide
atgtgccaccgggaggcccaattccaactagcgcctctagcttcgcctggcaaa

SEQ ID NO: 335795 - DNA, 59 bp, Artificial
  Synthetic oligonucleotide
atgtgccagaggaggttgttgcaggctttaagcgagtgcgggagcttgagacctacccc

SEQ ID NO: 335796 - DNA, 51 bp, Artificial
  Synthetic oligonucleotide
atgtgcccacccgaactcattcgacattgtgtctggttcccctctatgaag

SEQ ID NO: 335797 - DNA, 54 bp, Artificial
  Synthetic oligonucleotide
atgtgcccactatcaggacggcaaaggtacaaggtcccggttttgattacgcgg

SEQ ID NO: 335798 - DNA, 60 bp, Artificial
  Synthetic oligonucleotide
atgtgccccaatattggttgtcgataagcgtcctgacatggctccatgcaacagcatggg

SEQ ID NO: 335799 - DNA, 56 bp, Artificial
  Synthetic oligonucleotide
atgtgcccgatacagtccaaaaaacaatacaaattgttaacccagaaaagcagtca

SEQ ID NO: 335800 - DNA, 53 bp, Artificial
  Synthetic oligonucleotide
atgtgccctatactggtatagaacagcaatgggaaatggcagcgaggtgtacg

SEQ ID NO: 335801 - DNA, 60 bp, Artificial
  Synthetic oligonucleotide
atgtgccggcagaccgtggatcagcagggtgtcggagcctgagtcgaactccaccttggt

SEQ ID NO: 335802 - DNA, 60 bp, Artificial
  Synthetic oligonucleotide
atgtgcctctcgggcacatatgatgtacttagggttccaacgaccaacgagctcccagat

SEQ ID NO: 335803 - DNA, 51 bp, Artificial
  Synthetic oligonucleotide
atgtgccttacccccgctctactgaggtctatgtccggtccatttttggcc

SEQ ID NO: 335804 - DNA, 56 bp, Artificial
  Synthetic oligonucleotide
atgtgccttccgtatcgggtaagaccattggaacgaacaacaatgaccacctgtac

SEQ ID NO: 335805 - DNA, 56 bp, Artificial
  Synthetic oligonucleotide
atgtgcgacaatcagcttgacaagaacggaaacttcatatggggtgagagaggtta

SEQ ID NO: 335806 - DNA, 60 bp, Artificial
  Synthetic oligonucleotide
atgtgcggacccgaaatgtttggtctataatccagatgacaatctcaaattctcattaat

SEQ ID NO: 335807 - DNA, 60 bp, Artificial
  Synthetic oligonucleotide
atgtgcgtatgcgactatgttggagatggttcgttgcataataacgttgcactgcgcaga

SEQ ID NO: 335808 - DNA, 58 bp, Artificial
  Synthetic oligonucleotide
atgtgctagcaagttacccatttccaattgactgtgcagaattggcaaaaaccggtag

SEQ ID NO: 335809 - DNA, 54 bp, Artificial
  Synthetic oligonucleotide
atgtgctagtgtcagggtacgggtgcccccccacttctgtggggggcctcctaa

SEQ ID NO: 335810 - DNA, 60 bp, Artificial
  Synthetic oligonucleotide
atgtgctcaggctgatagactacaacaaggctgcactcaccaagttcaaagaggatgttg

SEQ ID NO: 335811 - DNA, 53 bp, Artificial
  Synthetic oligonucleotide
atgtgctgaaagaattatatatgcacagtcctgaggagatgaacatgataaga

SEQ ID NO: 335812 - DNA, 60 bp, Artificial
  Synthetic oligonucleotide
atgtgctgaactgttaagtgaaaagttaggggcacctgttggacatgtatcatcggatgc

SEQ ID NO: 335813 - DNA, 54 bp, Artificial
  Synthetic oligonucleotide
atgtgctgaagaacagggtataactgattatatacacatgttaggagaggcctt

SEQ ID NO: 335814 - DNA, 59 bp, Artificial
  Synthetic oligonucleotide
atgtgctgacctggttggggataccaggtcgaagaatctctgattttggcacttgtact

SEQ ID NO: 335815 - DNA, 60 bp, Artificial
  Synthetic oligonucleotide
atgtgctgacctggttggggataccaggtcgaagaatctgttattcgtgcagatgagttt

SEQ ID NO: 335816 - DNA, 60 bp, Artificial
  Synthetic oligonucleotide
atgtgctgatatgccaactgccactatgtgtgcctttgaggtgaacttggcttctcagaa

SEQ ID NO: 335817 - DNA, 60 bp, Artificial
  Synthetic oligonucleotide
atgtgctgtagtgctgtggacaaattgtgggtcacaatctattacggggtacctgtgtgg

SEQ ID NO: 335818 - DNA, 59 bp, Artificial
  Synthetic oligonucleotide
atgtgctgtccattctcactcgaacgtagccaccatacaggaggcagctgtggacatca

SEQ ID NO: 335819 - DNA, 53 bp, Artificial
  Synthetic oligonucleotide
atgtgcttagtgtcaaagcaaaatcgattccggttaacagaacagcaagtaaa

SEQ ID NO: 335820 - DNA, 53 bp, Artificial
  Synthetic oligonucleotide
atgtgcttcgggcatctattcgaggctttccacgccaatccaggcactattac

SEQ ID NO: 335821 - DNA, 58 bp, Artificial
  Synthetic oligonucleotide
atgtgctttaacgaacgctcgtctctatagacctaactacagtgaggatttcaatttc

SEQ ID NO: 335822 - DNA, 60 bp, Artificial
  Synthetic oligonucleotide
atgtggaaaaataatatggtagaacagatgcaagaagatgtaatcagtctatgggatcaa

SEQ ID NO: 335823 - DNA, 60 bp, Artificial
  Synthetic oligonucleotide
atgtggaaaccattggacatcagcgctgcaacaaactttagaaaattaatcccaatggca

SEQ ID NO: 335824 - DNA, 60 bp, Artificial
  Synthetic oligonucleotide
atgtggaaactgacttatcttgatcatcaattaatgccaatactcgatcaaaattttatt

SEQ ID NO: 335825 - DNA, 51 bp, Artificial
  Synthetic oligonucleotide
atgtggaaattgacgtacttagatcataaattaatgcctattttggatcag

SEQ ID NO: 335826 - DNA, 60 bp, Artificial
  Synthetic oligonucleotide
atgtggaacagagacttgataatagttgagtcgcgggcacagggtaccgactcgattgct

SEQ ID NO: 335827 - DNA, 58 bp, Artificial
  Synthetic oligonucleotide
atgtggaagacgtgctaattccaaagcgcttccggccagccaaggatccccttgacag

SEQ ID NO: 335828 - DNA, 55 bp, Artificial
  Synthetic oligonucleotide
atgtggaaggtcctagcagtggatttcacaccgcaagtgtgttaaagctagctga

SEQ ID NO: 335829 - DNA, 51 bp, Artificial
  Synthetic oligonucleotide
atgtggaagtgtctcatacggctcaagcccgtactcacggggcctacgccc

SEQ ID NO: 335830 - DNA, 58 bp, Artificial
  Synthetic oligonucleotide
atgtggaagtttcaggaagagtcttgaactaccaagtagatgcagacgggaacattta

SEQ ID NO: 335831 - DNA, 60 bp, Artificial
  Synthetic oligonucleotide
atgtggaagtttgacagccacctggcacttaaacacagagctctagagctgcatccggag

SEQ ID NO: 335832 - DNA, 60 bp, Artificial
  Synthetic oligonucleotide
atgtggaattgatcagaggcaggccaaaagagagtagtgtattgtggacatccaatagta

SEQ ID NO: 335833 - DNA, 59 bp, Artificial
  Synthetic oligonucleotide
atgtggaattttgttagtggcattcaatatctggcagggctaactaccctgccaggtaa

SEQ ID NO: 335834 - DNA, 52 bp, Artificial
  Synthetic oligonucleotide
atgtggacaccgatgtgtattgcatatgcagagacaattggaaaggttccaa

SEQ ID NO: 335835 - DNA, 54 bp, Artificial
  Synthetic oligonucleotide
atgtggacattaccgtatctgttcaacccgtcaaacctgtctttaacggtctcc

SEQ ID NO: 335836 - DNA, 60 bp, Artificial
  Synthetic oligonucleotide
atgtggaccacatgagtgcagaatgtttgccctaagccaaggcaccacactaaggggtcg

SEQ ID NO: 335837 - DNA, 60 bp, Artificial
  Synthetic oligonucleotide
atgtggacgatgctgacataggttttacatctggaggtcgtagtgacactctgtctagag

SEQ ID NO: 335838 - DNA, 60 bp, Artificial
  Synthetic oligonucleotide
atgtggacgtatatggagcacccgcacgctagatcaatccttctacggcgagttcctctc

SEQ ID NO: 335839 - DNA, 56 bp, Artificial
  Synthetic oligonucleotide
atgtggagccctccccgcaacgatgaacattaccttaagggacaatggtactcaag

SEQ ID NO: 335840 - DNA, 60 bp, Artificial
  Synthetic oligonucleotide
atgtggaggacagattagaagagttcatcaatcaagtgcaggtcggtagattccgtaatg

SEQ ID NO: 335841 - DNA, 54 bp, Artificial
  Synthetic oligonucleotide
atgtggagtccccgacgaacgtcgtccagacggagaacaacagccgggtcaggg

SEQ ID NO: 335842 - DNA, 55 bp, Artificial
  Synthetic oligonucleotide
atgtggataactcgacagttatccacacgttatccacacgttttccccccaatta

SEQ ID NO: 335843 - DNA, 60 bp, Artificial
  Synthetic oligonucleotide
atgtggatagttgcactgggagctattctaatttagccaagaatgccctgttagtatatt

SEQ ID NO: 335844 - DNA, 55 bp, Artificial
  Synthetic oligonucleotide
atgtggatatagtatatagcaatgtcccaacaggcctcactgacaagctccagag

SEQ ID NO: 335845 - DNA, 60 bp, Artificial
  Synthetic oligonucleotide
atgtggatcatttccgggagtgcattgctcgacacactcacgtgtacgcagacggggcca

SEQ ID NO: 335846 - DNA, 60 bp, Artificial
  Synthetic oligonucleotide
atgtggatcgtacgagacatcgagatgctcaggtacacacaatagtgcagaaagatgtat

SEQ ID NO: 335847 - DNA, 55 bp, Artificial
  Synthetic oligonucleotide
atgtggatctgggtgattactccaaactagcttatagtaggagtacgcagggtgc

SEQ ID NO: 335848 - DNA, 60 bp, Artificial
  Synthetic oligonucleotide
atgtggatggattcgagccgaatggctacattgagggcaagctctcccaaatgtctagag

SEQ ID NO: 335849 - DNA, 55 bp, Artificial
  Synthetic oligonucleotide
atgtggattgttggtaggactggaagttatcttttcggcgattggaattggccga

SEQ ID NO: 335850 - DNA, 55 bp, Artificial
  Synthetic oligonucleotide
atgtggcaacaccgcacgtggtatccggacggccgcagcaattgggtcgaggaac

SEQ ID NO: 335851 - DNA, 55 bp, Artificial
  Synthetic oligonucleotide
atgtggcacaatggtcgcgacgtgtacaaggagtttgagaggaagatacgcagtg

SEQ ID NO: 335852 - DNA, 57 bp, Artificial
  Synthetic oligonucleotide
atgtggcacgtcacacgtggcgctgttctgatgcatagagggaagaggattgaacca

SEQ ID NO: 335853 - DNA, 60 bp, Artificial
  Synthetic oligonucleotide
atgtggcccataaaccaggatgtgcatattatgactatgtgggcgctttcggatcaggga

SEQ ID NO: 335854 - DNA, 60 bp, Artificial
  Synthetic oligonucleotide
atgtggctaaccttaaccctgcagctggtgtgtgcaatccagcacatggccagtcgtaat

SEQ ID NO: 335855 - DNA, 60 bp, Artificial
  Synthetic oligonucleotide
atgtggctaatcctaaccccgtagctgttgcatgcaacccagcatgtatgcagtcgtaat

SEQ ID NO: 335856 - DNA, 59 bp, Artificial
  Synthetic oligonucleotide
atgtggctaatcctaaccctgcaaccgttgcgcacaacccagtgcgtatgcggtcgtaa

SEQ ID NO: 335857 - DNA, 60 bp, Artificial
  Synthetic oligonucleotide
atgtggctactaactgtagtgccaaacgatatgtttataagagaatcattagttgcatgt

SEQ ID NO: 335858 - DNA, 60 bp, Artificial
  Synthetic oligonucleotide
atgtggctctttgggagtacagcctgatagggtgttgcagagacttgctacaccactagt

SEQ ID NO: 335859 - DNA, 59 bp, Artificial
  Synthetic oligonucleotide
atgtggctgttgacggtcgtgccaaatgatatgtttataagggaatcgttagtcgcgtg

SEQ ID NO: 335860 - DNA, 53 bp, Artificial
  Synthetic oligonucleotide
atgtggcttcttcctctaccgacggtggtggataaaactttatgcttaaccgg

SEQ ID NO: 335861 - DNA, 51 bp, Artificial
  Synthetic oligonucleotide
atgtgggaaagaaggacaccaaatgaaagattgtactaatgggaggcaggc

SEQ ID NO: 335862 - DNA, 60 bp, Artificial
  Synthetic oligonucleotide
atgtgggaacctatgtgtctgtaggcacatcaatattgaacaaaaggtcaatcccagaaa

SEQ ID NO: 335863 - DNA, 52 bp, Artificial
  Synthetic oligonucleotide
atgtgggacagagccagggccgccttaaacaccccgtccggaaaatccgcgg

SEQ ID NO: 335864 - DNA, 51 bp, Artificial
  Synthetic oligonucleotide
atgtgggaccctttagtgaacgagtttcctgaaactgttcacggttttagg

SEQ ID NO: 335865 - DNA, 60 bp, Artificial
  Synthetic oligonucleotide
atgtgggaggctgtccgttgtttcacttgcgtgcgggtcactctggtgttcacgtgtgta

SEQ ID NO: 335866 - DNA, 60 bp, Artificial
  Synthetic oligonucleotide
atgtgggaggtgcatgttggtgggaaggtaatacattctcccggctctgtgtctagctct

SEQ ID NO: 335867 - DNA, 51 bp, Artificial
  Synthetic oligonucleotide
atgtgggatccacttttaaatcagttcccagagaccgtatttggtcttagg

SEQ ID NO: 335868 - DNA, 55 bp, Artificial
  Synthetic oligonucleotide
atgtgggccaatttgttaccgcattcacgacagctagtgctactgctgttcgagc

SEQ ID NO: 335869 - DNA, 57 bp, Artificial
  Synthetic oligonucleotide
atgtgggcccgaggaggagaagttgccaatcaaccctctgagtaattcgcttatgcg

SEQ ID NO: 335870 - DNA, 60 bp, Artificial
  Synthetic oligonucleotide
atgtgggcgactcactgcagctaccatggggtatacgatgggcctcatacaagtatgcgg

SEQ ID NO: 335871 - DNA, 60 bp, Artificial
  Synthetic oligonucleotide
atgtgggctaaggcaaagctacgcaccctccagcagacgtaactgctagccgtcggataa

SEQ ID NO: 335872 - DNA, 60 bp, Artificial
  Synthetic oligonucleotide
atgtgggcttgccaaaaaggcaacattaggtgcaacatttgcatttgagtagactgatag

SEQ ID NO: 335873 - DNA, 55 bp, Artificial
  Synthetic oligonucleotide
atgtggggagaccaagtcgaagaatcttttattttggcagttgtatttgccttcg

SEQ ID NO: 335874 - DNA, 60 bp, Artificial
  Synthetic oligonucleotide
atgtggggggcatagagcacaggctaaccgccgcgtgcaattggactcgaggagagcgct

SEQ ID NO: 335875 - DNA, 56 bp, Artificial
  Synthetic oligonucleotide
atgtggggttatctcgatatacgtaagaccttttattcgaacccatggaatccaga

SEQ ID NO: 335876 - DNA, 54 bp, Artificial
  Synthetic oligonucleotide
atgtggggtttattcgaagtacacgtataactatacgtgtacgtagaatgccgt

SEQ ID NO: 335877 - DNA, 51 bp, Artificial
  Synthetic oligonucleotide
atgtgggtcctcaaccaatgaaattcacgctacatgtcttatttagtgtgt

SEQ ID NO: 335878 - DNA, 59 bp, Artificial
  Synthetic oligonucleotide
atgtgggtgacttcaagatatcaatcaacgagggtcttccctctggggtgccctgcacc

SEQ ID NO: 335879 - DNA, 55 bp, Artificial
  Synthetic oligonucleotide
atgtgggttggctgtagcaatttggagtattacgaggcactctgcaacttggtga

SEQ ID NO: 335880 - DNA, 50 bp, Artificial
  Synthetic oligonucleotide
atgtggtacattggtatgctgtaaaccacaaccagccaaccactgctgct

SEQ ID NO: 335881 - DNA, 59 bp, Artificial
  Synthetic oligonucleotide
atgtggtaggaatgcaatagcaggaatggacgggcaatttgaattaaagcacggcgcct

SEQ ID NO: 335882 - DNA, 52 bp, Artificial
  Synthetic oligonucleotide
atgtggtaggggtacgtggtgtactgggaatgctatacagggctttgcttgt

SEQ ID NO: 335883 - DNA, 59 bp, Artificial
  Synthetic oligonucleotide
atgtggtcacgaagaacgcgctgggacttttattggcctgctcttagccatttaggtga

SEQ ID NO: 335884 - DNA, 60 bp, Artificial
  Synthetic oligonucleotide
atgtggtcacgggctacgcagtggttgaataatctgcctgtaccaggctatgattggtac

SEQ ID NO: 335885 - DNA, 60 bp, Artificial
  Synthetic oligonucleotide
atgtggtcccctatttaaacttcgccaccaagtagtgcattgcgcactatgtgggatcca

SEQ ID NO: 335886 - DNA, 58 bp, Artificial
  Synthetic oligonucleotide
atgtggtcccggatgccgaggtgtctgttgaggtaccaacggaccctcgtggcatatc

SEQ ID NO: 335887 - DNA, 58 bp, Artificial
  Synthetic oligonucleotide
atgtggtctggtgaatgcctcccattcaagaacacaatgaatacctatgaaggttgtg

SEQ ID NO: 335888 - DNA, 59 bp, Artificial
  Synthetic oligonucleotide
atgtggtcttggatggatggaagaataacaggaatggttttatatctaatacaagattg

SEQ ID NO: 335889 - DNA, 60 bp, Artificial
  Synthetic oligonucleotide
atgtggtgaaagaagcgaacttagtcaatcagtatgttgtgacaatcggtagagaagctg

SEQ ID NO: 335890 - DNA, 55 bp, Artificial
  Synthetic oligonucleotide
atgtggtggacttaattgggcctcttttattgggccagtatcttcgagcctggcc

SEQ ID NO: 335891 - DNA, 55 bp, Artificial
  Synthetic oligonucleotide
atgtggtggacttaattgggcctcttttattgggccagtctcgaagctactggcc

SEQ ID NO: 335892 - DNA, 57 bp, Artificial
  Synthetic oligonucleotide
atgtggtggggttcccgtataaggctcacattgaaaggaatggtttctcgcccatga

SEQ ID NO: 335893 - DNA, 60 bp, Artificial
  Synthetic oligonucleotide
atgtggttaaacttgggaatgcatatgtgtgcactagatgctgtggcgtattgcactatg

SEQ ID NO: 335894 - DNA, 55 bp, Artificial
  Synthetic oligonucleotide
atgtggttattgaccgttataccaaacgatatgtttcttcgtgaatcgttggtcg

SEQ ID NO: 335895 - DNA, 51 bp, Artificial
  Synthetic oligonucleotide
atgtggttcactgcacttgaacgatcacacattgttgatagagaggctggt

SEQ ID NO: 335896 - DNA, 57 bp, Artificial
  Synthetic oligonucleotide
atgtggttctctgtaacagtggatgtagtttccactttctggttggaaaatggccag

SEQ ID NO: 335897 - DNA, 60 bp, Artificial
  Synthetic oligonucleotide
atgtggttggaggcgaagcaccgcatgcaagacgaatgcgaatggaaaaggcactcatac

SEQ ID NO: 335898 - DNA, 58 bp, Artificial
  Synthetic oligonucleotide
atgtggtttatacctagatcaactgaaaccagttggtagtgcttataaaattatcaca

SEQ ID NO: 335899 - DNA, 53 bp, Artificial
  Synthetic oligonucleotide
atgtgtaaccgttactatgctgcataggaatatttacttggttattctctccg

SEQ ID NO: 335900 - DNA, 57 bp, Artificial
  Synthetic oligonucleotide
atgtgtaatcccagttgtttccgtaggttgtagttgaatcggagttgtaatctgatg

SEQ ID NO: 335901 - DNA, 58 bp, Artificial
  Synthetic oligonucleotide
atgtgtaatgtacactctgcaagcatccggatgaacgggggttatggggtgggaagac

SEQ ID NO: 335902 - DNA, 51 bp, Artificial
  Synthetic oligonucleotide
atgtgtacaagacactgaagaggaactacaccaacaccaatgtagaagacc

SEQ ID NO: 335903 - DNA, 51 bp, Artificial
  Synthetic oligonucleotide
atgtgtacataatgcatggctttaatggggactatgtagggcctgcaacca

SEQ ID NO: 335904 - DNA, 60 bp, Artificial
  Synthetic oligonucleotide
atgtgtacatggcccaatcggcctgttaacagcaggcgggagcgggtatgtatgcttcgc

SEQ ID NO: 335905 - DNA, 60 bp, Artificial
  Synthetic oligonucleotide
atgtgtacgatggccgcgacaagctattcagtttcgatcatctggacttggtaaagattg

SEQ ID NO: 335906 - DNA, 60 bp, Artificial
  Synthetic oligonucleotide
atgtgtacggagttggacctgattacatataccgtgctatggatttatccagtgtcgaag

SEQ ID NO: 335907 - DNA, 60 bp, Artificial
  Synthetic oligonucleotide
atgtgtagaggaaagatctgtggaatacatgtagctggtctaccaactggtggactcggc

SEQ ID NO: 335908 - DNA, 56 bp, Artificial
  Synthetic oligonucleotide
atgtgtagttcctccgaagccttggacgagtccggtcggtggtggctattgggctg

SEQ ID NO: 335909 - DNA, 59 bp, Artificial
  Synthetic oligonucleotide
atgtgtatgacgccaacaaaattgtgtacacagtcaaagtagagccacatacgggggat

SEQ ID NO: 335910 - DNA, 60 bp, Artificial
  Synthetic oligonucleotide
atgtgtatgctagcacattcaatagaggaagacttaggatggggttctttcctaatgcca

SEQ ID NO: 335911 - DNA, 60 bp, Artificial
  Synthetic oligonucleotide
atgtgtcactatcacagctgaagggaaaccgtcaatggacgtgtggcttgactccatcta

SEQ ID NO: 335912 - DNA, 59 bp, Artificial
  Synthetic oligonucleotide
atgtgtcactttaaattgcactgaggtggggatgaatggaactacctcgaatgccactg

SEQ ID NO: 335913 - DNA, 53 bp, Artificial
  Synthetic oligonucleotide
atgtgtcatgaaatttgtgcaccacacccggtcgggttgctacaagtaggtat

SEQ ID NO: 335914 - DNA, 60 bp, Artificial
  Synthetic oligonucleotide
atgtgtcatgatctctctcatgatttcatccttgctaggcttcttctcagagttttcctt

SEQ ID NO: 335915 - DNA, 58 bp, Artificial
  Synthetic oligonucleotide
atgtgtcctccaccagacgctaacaaagagccagacgatccttataatggtttacagt

SEQ ID NO: 335916 - DNA, 58 bp, Artificial
  Synthetic oligonucleotide
atgtgtcctggccaaaattcgcagtccccaacctccaatcactcaccaacctcctgtc

SEQ ID NO: 335917 - DNA, 60 bp, Artificial
  Synthetic oligonucleotide
atgtgtcgcacctttcgccgcagctgttgaaattatcacgcacccccgtatcgctccacg

SEQ ID NO: 335918 - DNA, 60 bp, Artificial
  Synthetic oligonucleotide
atgtgtcgggagtatcccccaccgcagtttgcatcacacgtgtcggtccctgccgacgca

SEQ ID NO: 335919 - DNA, 60 bp, Artificial
  Synthetic oligonucleotide
atgtgtcgtatcttgcccatttctgccgcaaatttcaaccattatatgcgacagaagcta

SEQ ID NO: 335920 - DNA, 60 bp, Artificial
  Synthetic oligonucleotide
atgtgtcgtgttatggttatgagacacgtcgacctaggtgtgacgtgcgtatgggcgtgc

SEQ ID NO: 335921 - DNA, 54 bp, Artificial
  Synthetic oligonucleotide
atgtgtctatggtgcaaggctggtacttgctgctacgaactcgctagagtttac

SEQ ID NO: 335922 - DNA, 58 bp, Artificial
  Synthetic oligonucleotide
atgtgtctggaaggtgcgtggtaatgcgctgaaaaaggtgaccttctctctcctaaaa

SEQ ID NO: 335923 - DNA, 55 bp, Artificial
  Synthetic oligonucleotide
atgtgtctttccaggggcggggagtcttcgagctctcggacgaaaaggcaacgaa

SEQ ID NO: 335924 - DNA, 60 bp, Artificial
  Synthetic oligonucleotide
atgtgtgaggggcacccggagcgtgcattgaccctatacgacctatgcgagcagcgagaa

SEQ ID NO: 335925 - DNA, 60 bp, Artificial
  Synthetic oligonucleotide
atgtgtgatataggttttggtgctatgaactttgataagctacaacaggataggtcaggt

SEQ ID NO: 335926 - DNA, 60 bp, Artificial
  Synthetic oligonucleotide
atgtgtgatgatttgattgggaaaacatcatggtcctacatagtggagagaccaaatccc

SEQ ID NO: 335927 - DNA, 60 bp, Artificial
  Synthetic oligonucleotide
atgtgtgatgtgcgcactttggaacccattcaactccctcttcttgacgtgcgtcgagtt

SEQ ID NO: 335928 - DNA, 60 bp, Artificial
  Synthetic oligonucleotide
atgtgtgatgtgcgtaccctggagcccattcagcttccccttcttgatgtgcgtcgagtc

SEQ ID NO: 335929 - DNA, 59 bp, Artificial
  Synthetic oligonucleotide
atgtgtgcagtctttcttatagcaattttgatcggtccagatcaaaattattattgctc

SEQ ID NO: 335930 - DNA, 60 bp, Artificial
  Synthetic oligonucleotide
atgtgtggagaggcaccagagactattgtcagattatgcactttgacacaccaaatgtgg

SEQ ID NO: 335931 - DNA, 59 bp, Artificial
  Synthetic oligonucleotide
atgtgtgggatagcgcccacactacgaaactagggatagcgccctagctccgattattg

SEQ ID NO: 335932 - DNA, 60 bp, Artificial
  Synthetic oligonucleotide
atgtgtggtatgatgcactactacttcaaaactcttggagtcaaagccgagctctgcaat

SEQ ID NO: 335933 - DNA, 49 bp, Artificial
  Synthetic oligonucleotide
atgtgtgtaagtggggtaaggtttttgttaccccaattaacggcgttta

SEQ ID NO: 335934 - DNA, 60 bp, Artificial
  Synthetic oligonucleotide
atgtgtgtatcatagtcttataggtgtgttacgggccaatctagagttatgttatggggc

SEQ ID NO: 335935 - DNA, 60 bp, Artificial
  Synthetic oligonucleotide
atgtgtgtcaaagagcttgtcgctgaattgaggtggcagtataatagatttgctgtgata

SEQ ID NO: 335936 - DNA, 57 bp, Artificial
  Synthetic oligonucleotide
atgtgtgtttagcagggttggttgtgtccggggagtggaacctgccggacaactgca

SEQ ID NO: 335937 - DNA, 57 bp, Artificial
  Synthetic oligonucleotide
atgtgtgtttcacaagaaagggtttggaaatctcctatggcaggaagaagcgacgaa

SEQ ID NO: 335938 - DNA, 60 bp, Artificial
  Synthetic oligonucleotide
atgtgttaagacaagactcaaatgcgtttcattatgatacgcttgacacatatgctgccg

SEQ ID NO: 335939 - DNA, 60 bp, Artificial
  Synthetic oligonucleotide
atgtgttaatagagatggacattgctacactagacatgttggagggttatactattatgg

SEQ ID NO: 335940 - DNA, 52 bp, Artificial
  Synthetic oligonucleotide
atgtgttacgcaccgtttttctctgtgtcactatagataaaagtggggtagc

SEQ ID NO: 335941 - DNA, 58 bp, Artificial
  Synthetic oligonucleotide
atgtgttagaattgtgtggtttcactagatcgtctatacgagtaggtaatcctgtagt

SEQ ID NO: 335942 - DNA, 60 bp, Artificial
  Synthetic oligonucleotide
atgtgttagcccatattaatgttatgaatcccagagtattagaagactggaatctagctt

SEQ ID NO: 335943 - DNA, 60 bp, Artificial
  Synthetic oligonucleotide
atgtgttaggattgtttaagttcttgatgtcattgtcagatgatatattccagcatgatc

SEQ ID NO: 335944 - DNA, 50 bp, Artificial
  Synthetic oligonucleotide
atgtgttatggatcagctgtagttacactcactaggggttctaacacgat

SEQ ID NO: 335945 - DNA, 57 bp, Artificial
  Synthetic oligonucleotide
atgtgttcagttcttataaaatgtctatccaaagctaaaaacgaagaacatgcatat

SEQ ID NO: 335946 - DNA, 55 bp, Artificial
  Synthetic oligonucleotide
atgtgttctcttcgtcggaagtggtgtatttcagcgcccaaaatggccctgccga

SEQ ID NO: 335947 - DNA, 51 bp, Artificial
  Synthetic oligonucleotide
atgtgttggactatctcctcgcacatccatgtgtcgactgtggagagcctg

SEQ ID NO: 335948 - DNA, 55 bp, Artificial
  Synthetic oligonucleotide
atgtgttggcctcaacaaactcacacactattacacctccaacagtctcacacag

SEQ ID NO: 335949 - DNA, 60 bp, Artificial
  Synthetic oligonucleotide
atgtgttgtgcaagattccctggcccatgtccaagacagacattatatggctggggacct

SEQ ID NO: 335950 - DNA, 58 bp, Artificial
  Synthetic oligonucleotide
atgtgttgtgcaggattccctgccccatatctagtacagaggaaaagtgagatgggat

SEQ ID NO: 335951 - DNA, 54 bp, Artificial
  Synthetic oligonucleotide
atgtgttgttgatcagtttagcacatttgatcaggaagcacagcttttggtgtc

SEQ ID NO: 335952 - DNA, 58 bp, Artificial
  Synthetic oligonucleotide
atgtgtttggatgaggctttgtacgggactgaaggtcttgaagccctagacctcacaa

SEQ ID NO: 335953 - DNA, 52 bp, Artificial
  Synthetic oligonucleotide
atgttaaaaacggtttatactacgcctttctaccctcacaagagctctaaca

SEQ ID NO: 335954 - DNA, 53 bp, Artificial
  Synthetic oligonucleotide
atgttaaaccttacctaccgatccattttgttgatacccagtattgcaaaacc

SEQ ID NO: 335955 - DNA, 57 bp, Artificial
  Synthetic oligonucleotide
atgttaaacggtcagaggattaacaccgtggcgcccaatgtgtattggtgggacaca

SEQ ID NO: 335956 - DNA, 53 bp, Artificial
  Synthetic oligonucleotide
atgttaaactaagtaaaggtgaggttgaaaagatcgctgtaacgaagaaagaa

SEQ ID NO: 335957 - DNA, 55 bp, Artificial
  Synthetic oligonucleotide
atgttaaatgctatgcttcgtgggaccggaccattttgtatggccatgaagggcg

SEQ ID NO: 335958 - DNA, 53 bp, Artificial
  Synthetic oligonucleotide
atgttaacaacaaaggggaggcagaccaccaaggacaataaagggactcggat

SEQ ID NO: 335959 - DNA, 54 bp, Artificial
  Synthetic oligonucleotide
atgttaaccgagcatatgcaatcaataattacattacttcccagtatactatgg

SEQ ID NO: 335960 - DNA, 60 bp, Artificial
  Synthetic oligonucleotide
atgttaagcacactggtatggtccgatgtgtcagtgatgttactcgtggatcaggcatta

SEQ ID NO: 335961 - DNA, 50 bp, Artificial
  Synthetic oligonucleotide
atgttaagtcagaagctgaccacttagattgatcagccgataaaaatgct

SEQ ID NO: 335962 - DNA, 60 bp, Artificial
  Synthetic oligonucleotide
atgttaagttatctgagatagaggaggagattccttcaaacgacaactatgacaacgcta

SEQ ID NO: 335963 - DNA, 53 bp, Artificial
  Synthetic oligonucleotide
atgttaagttcccttgatagacaccaggtccttgcctatctcctaggttaatc

SEQ ID NO: 335964 - DNA, 60 bp, Artificial
  Synthetic oligonucleotide
atgttaatacatcgcgggaagttcatcctgatgtgcttggtgttatgttgcggggtgaaa

SEQ ID NO: 335965 - DNA, 57 bp, Artificial
  Synthetic oligonucleotide
atgttaatcatcctattaacataatcattagaggaaattaaatggtgaacttcttat

SEQ ID NO: 335966 - DNA, 54 bp, Artificial
  Synthetic oligonucleotide
atgttaatcgtaagaccgcggttaaacagacggctaaatctcgtgtaccgcgaa

SEQ ID NO: 335967 - DNA, 57 bp, Artificial
  Synthetic oligonucleotide
atgttaatgaagttgacgtttactggtggatctcttgtcgttaaatgcaattttcca

SEQ ID NO: 335968 - DNA, 58 bp, Artificial
  Synthetic oligonucleotide
atgttacaggcaaaaaactccagactaatagtagcaaaatccagaatgcctataagac

SEQ ID NO: 335969 - DNA, 59 bp, Artificial
  Synthetic oligonucleotide
atgttacagtgccactgtcccctggattggatgtacctgccctttcaggccctgacata

SEQ ID NO: 335970 - DNA, 55 bp, Artificial
  Synthetic oligonucleotide
atgttacccccaatcttcccgccaaatgatcgggacagtgtacttacgattctac

SEQ ID NO: 335971 - DNA, 53 bp, Artificial
  Synthetic oligonucleotide
atgttaccctcgttacaaccgtcgcttaaactggcgttggaggaagaagcttg

SEQ ID NO: 335972 - DNA, 58 bp, Artificial
  Synthetic oligonucleotide
atgttaccgaagtattggcctaacgcttcgattggagaaatgaactctgcctctacgc

SEQ ID NO: 335973 - DNA, 57 bp, Artificial
  Synthetic oligonucleotide
atgttacctccaatcttcccgccgaatgatcgggatagtgtacttacgatcctacta

SEQ ID NO: 335974 - DNA, 58 bp, Artificial
  Synthetic oligonucleotide
atgttacctccaatctttccgccgaatgaccgggacagtgtactcacgattctgctac

SEQ ID NO: 335975 - DNA, 60 bp, Artificial
  Synthetic oligonucleotide
atgttacgaatgctggttgctgcagggaaagactctgaggcggcgtattttcgcagcatg

SEQ ID NO: 335976 - DNA, 58 bp, Artificial
  Synthetic oligonucleotide
atgttacgataccgactgacgaggtttataatctcgtgtcgaatgccagttatattcc

SEQ ID NO: 335977 - DNA, 59 bp, Artificial
  Synthetic oligonucleotide
atgttacgtgcgtcaaaaggtatatcgacagctaagatccactttagggctacagagga

SEQ ID NO: 335978 - DNA, 57 bp, Artificial
  Synthetic oligonucleotide
atgttactacttgatagtataaattttgacagaatggcatttttaccattaacatta

SEQ ID NO: 335979 - DNA, 59 bp, Artificial
  Synthetic oligonucleotide
atgttactgtcgttcctgttagcaatgccaacggcgtcgctgagtggctttctaataac

SEQ ID NO: 335980 - DNA, 58 bp, Artificial
  Synthetic oligonucleotide
atgttactgtgtctatgggcgataacataactttagtgggaccctcagacctgccagt

SEQ ID NO: 335981 - DNA, 60 bp, Artificial
  Synthetic oligonucleotide
atgttagactacacagacttcaactcacaacatacaatccaaagcatgcggttgatcttc

SEQ ID NO: 335982 - DNA, 60 bp, Artificial
  Synthetic oligonucleotide
atgttagagtgccggttaacacagatctcacacgcattgagccaattggtgtgtggatct

SEQ ID NO: 335983 - DNA, 60 bp, Artificial
  Synthetic oligonucleotide
atgttagatggccatctcatagcctttgattactccggctatgatgccagtctaagtccc

SEQ ID NO: 335984 - DNA, 55 bp, Artificial
  Synthetic oligonucleotide
atgttagatttaatagcaagaatagattatagattaggagtaggagcattagcag

SEQ ID NO: 335985 - DNA, 55 bp, Artificial
  Synthetic oligonucleotide
atgttagatttagcagcaagagtagattacaaactaggagtgggagcactgatag

SEQ ID NO: 335986 - DNA, 60 bp, Artificial
  Synthetic oligonucleotide
atgttagccgcatagattttaaacgtcgatcaagtaagtatgttcatggcaatgatgata

SEQ ID NO: 335987 - DNA, 55 bp, Artificial
  Synthetic oligonucleotide
atgttagctagacgtcaaggttatgaggaagcgaccgagcttcttaacttacgcg

SEQ ID NO: 335988 - DNA, 52 bp, Artificial
  Synthetic oligonucleotide
atgttagctgcgagagcgactcgcaggacgtagagcaatcgagtccctctct

SEQ ID NO: 335989 - DNA, 55 bp, Artificial
  Synthetic oligonucleotide
atgttaggcgacctaatatatcaacaagcttcagtgcaagaaagagacataaggg

SEQ ID NO: 335990 - DNA, 58 bp, Artificial
  Synthetic oligonucleotide
atgttaggggtctatgacaacgtagccatcctacccactcatgccgcaccaggtgaga

SEQ ID NO: 335991 - DNA, 55 bp, Artificial
  Synthetic oligonucleotide
atgttagggtcgagtgcataggatggtcaagcacgtcatgccacgatggcatatc

SEQ ID NO: 335992 - DNA, 55 bp, Artificial
  Synthetic oligonucleotide
atgttaggtttaattcatacccagtttatgtaacattcaaggacacggaggattc

SEQ ID NO: 335993 - DNA, 53 bp, Artificial
  Synthetic oligonucleotide
atgttaggtttaattcgtacccagtctatgtacaatttaaggacacggaggat

SEQ ID NO: 335994 - DNA, 54 bp, Artificial
  Synthetic oligonucleotide
atgttagtggagcacaatggaataaaacattagagagggtaagggcaaagttag

SEQ ID NO: 335995 - DNA, 53 bp, Artificial
  Synthetic oligonucleotide
atgttagtggcacacaatggaataaaacgttagaacgggtaaagacaaagtta

SEQ ID NO: 335996 - DNA, 54 bp, Artificial
  Synthetic oligonucleotide
atgttagtgtaaaccgcgctttagctgttaaagaacccgccacgttcataatag

SEQ ID NO: 335997 - DNA, 54 bp, Artificial
  Synthetic oligonucleotide
atgttagtgtcacccccatctcttacttaccccaatttaggccttggcttattc

SEQ ID NO: 335998 - DNA, 59 bp, Artificial
  Synthetic oligonucleotide
atgttagttgtataaataggttagtcactagcgctgataaactgaggtactcaaatgac

SEQ ID NO: 335999 - DNA, 60 bp, Artificial
  Synthetic oligonucleotide
atgttagtttctaactcgaaagatgatgttgaacgcgctacagcatattttacagctcca

SEQ ID NO: 336000 - DNA, 60 bp, Artificial
  Synthetic oligonucleotide
atgttatacaatgcataggatcgagaacgtatcaaatagaagatagtggttcaaaatcat

SEQ ID NO: 336001 - DNA, 60 bp, Artificial
  Synthetic oligonucleotide
atgttatcatttcttattgacatattggccgcgcagcgtaattggctctttaggtgaatg

SEQ ID NO: 336002 - DNA, 54 bp, Artificial
  Synthetic oligonucleotide
atgttatcccccgcgttgaggggtccacggtagctgataaaattttgcaaattg

SEQ ID NO: 336003 - DNA, 54 bp, Artificial
  Synthetic oligonucleotide
atgttatgacaacaaaattgggtcaattagttggcacatcacaaaaatctagag

SEQ ID NO: 336004 - DNA, 59 bp, Artificial
  Synthetic oligonucleotide
atgttatggaaatactaggaatagcaatcaacagatataatggattgacgttacgggga

SEQ ID NO: 336005 - DNA, 57 bp, Artificial
  Synthetic oligonucleotide
atgttatggggtgaagtggcgaatacgctgtcgttcgatccggggtgggctgggcag

SEQ ID NO: 336006 - DNA, 55 bp, Artificial
  Synthetic oligonucleotide
atgttcaacatggtattgaagaaaagggacgggacgctagtgaaactggacaaag

SEQ ID NO: 336007 - DNA, 56 bp, Artificial
  Synthetic oligonucleotide
atgttcaacgttggctggatgctatcatttctgtttctcgcatgggctatgctcaa

SEQ ID NO: 336008 - DNA, 60 bp, Artificial
  Synthetic oligonucleotide
atgttcagaaaattgttccaacgtttgatgcagggaagccacaccaccagttcttgcatc

SEQ ID NO: 336009 - DNA, 60 bp, Artificial
  Synthetic oligonucleotide
atgttcatgatgcggaattaccacgtattttgattgatcacaagaatcaaatttgtcacg

SEQ ID NO: 336010 - DNA, 56 bp, Artificial
  Synthetic oligonucleotide
atgttccaagaggtgacttggagtcgtgtggaaagagctacgacccccgcggtcaa

SEQ ID NO: 336011 - DNA, 52 bp, Artificial
  Synthetic oligonucleotide
atgttccatacccccgctcgaccgaggtttatgtccggtccatttttggtcc

SEQ ID NO: 336012 - DNA, 60 bp, Artificial
  Synthetic oligonucleotide
atgttccatcattcgagccgcgtggctcacgggacgctttgatcatccttacagtcctgt

SEQ ID NO: 336013 - DNA, 56 bp, Artificial
  Synthetic oligonucleotide
atgttcccacagtgccctacagcgtcatggagtaccttgattcacgtcctgacact

SEQ ID NO: 336014 - DNA, 53 bp, Artificial
  Synthetic oligonucleotide
atgttcccatgtgggaagataacttgtcctgactgtgtaacagacagcgagtt

SEQ ID NO: 336015 - DNA, 56 bp, Artificial
  Synthetic oligonucleotide
atgttcccgtaagagtcggtggggcttgctcaccccctccgcgttgccatgtgact

SEQ ID NO: 336016 - DNA, 52 bp, Artificial
  Synthetic oligonucleotide
atgttccgcctccccggaggtcccgagtgaggcttatcccggggaactcggc

SEQ ID NO: 336017 - DNA, 60 bp, Artificial
  Synthetic oligonucleotide
atgttccggatgtcatcaggttcgcttgcaggttgaacaacaaggacttcacagacacca

SEQ ID NO: 336018 - DNA, 55 bp, Artificial
  Synthetic oligonucleotide
atgttcctcactacactatacaagaggtactcagactctgttatcaagtcctctc

SEQ ID NO: 336019 - DNA, 59 bp, Artificial
  Synthetic oligonucleotide
atgttcctctatctacgtccttttatagagtggtgatctgtgggttgtgtgtctcaatt

SEQ ID NO: 336020 - DNA, 60 bp, Artificial
  Synthetic oligonucleotide
atgttcctgacagggtgtaagtatgtggtctggacggctaatgagttgtctcgactagta

SEQ ID NO: 336021 - DNA, 57 bp, Artificial
  Synthetic oligonucleotide
atgttcctgttacccccgatacccaaacgtcagatgtgtctgcagggataactggaa

SEQ ID NO: 336022 - DNA, 60 bp, Artificial
  Synthetic oligonucleotide
atgttcgacaatgaaccgagcactgcaacggtgaagaacatgcatcgtgatcgataccaa

SEQ ID NO: 336023 - DNA, 59 bp, Artificial
  Synthetic oligonucleotide
atgttcgagagtaggagcatgaagctacgcacacaaataccagcagagatgcttgcaaa

SEQ ID NO: 336024 - DNA, 60 bp, Artificial
  Synthetic oligonucleotide
atgttcgcgtaaagcttccggtgtctcctgcgggggatctcgtggatcatccatcatcaa

SEQ ID NO: 336025 - DNA, 60 bp, Artificial
  Synthetic oligonucleotide
atgttcggcatagataaggagaaacatccgatgtatggtacattaggcgggttcagtgga

SEQ ID NO: 336026 - DNA, 57 bp, Artificial
  Synthetic oligonucleotide
atgttcgggaatgtgtcgtacctagcccacttctgtcgcaagttccaaccactatac

SEQ ID NO: 336027 - DNA, 60 bp, Artificial
  Synthetic oligonucleotide
atgttcggtactacagcgacatccagatccgatcaagtgtcctccttcaggtacgcttcc

SEQ ID NO: 336028 - DNA, 54 bp, Artificial
  Synthetic oligonucleotide
atgttcgtaagagacggtaaagtgatggcaaacggaggaaactttgagaacatg

SEQ ID NO: 336029 - DNA, 59 bp, Artificial
  Synthetic oligonucleotide
atgttcgtagactcagtgatgagaggggaatgtagagcgtggatggaacccttagttaa

SEQ ID NO: 336030 - DNA, 55 bp, Artificial
  Synthetic oligonucleotide
atgttcgtggctgaacatatcgtgactgtggaacatatcgcaatgtatttagaca

SEQ ID NO: 336031 - DNA, 60 bp, Artificial
  Synthetic oligonucleotide
atgttctaatctacaacgtaacgcgagattatctaccagatcaatatgttagctacttac

SEQ ID NO: 336032 - DNA, 60 bp, Artificial
  Synthetic oligonucleotide
atgttctagacaaaaatcatgtggccgacattgataagttaattgactatgctgcctcag

SEQ ID NO: 336033 - DNA, 55 bp, Artificial
  Synthetic oligonucleotide
atgttctcaaacaaaatggcaaggttaggaaaaggatatatgttcgaaagtaaga

SEQ ID NO: 336034 - DNA, 60 bp, Artificial
  Synthetic oligonucleotide
atgttctcaaacaaaatggcgagactagggagaggatatatgttcgagagtaagagcatg

SEQ ID NO: 336035 - DNA, 58 bp, Artificial
  Synthetic oligonucleotide
atgttctcaaacaaaatggcgagattaggaaaaggatacatgtttgagagtaaaagca

SEQ ID NO: 336036 - DNA, 59 bp, Artificial
  Synthetic oligonucleotide
atgttctcacttggaatgcaggaccttttttctgacccaaggcgccctgttgaatgaca

SEQ ID NO: 336037 - DNA, 53 bp, Artificial
  Synthetic oligonucleotide
atgttctcattttagatcttgtacgtactctaagtgcgcagagatcgtgttca

SEQ ID NO: 336038 - DNA, 55 bp, Artificial
  Synthetic oligonucleotide
atgttctccaacaaaatggcaagactagggaaaggatacatgttcgaaagtaaaa

SEQ ID NO: 336039 - DNA, 60 bp, Artificial
  Synthetic oligonucleotide
atgttctccgctatgaccttccatcccaatctcataccatacggagctaacagagctaac

SEQ ID NO: 336040 - DNA, 54 bp, Artificial
  Synthetic oligonucleotide
atgttctcggaaatttaggtttcgctcggaaacgctcactcacatttattatcg

SEQ ID NO: 336041 - DNA, 53 bp, Artificial
  Synthetic oligonucleotide
atgttctgtttgaagttcttagtgtggcggcctgtccaggtaagctcgcgggc

SEQ ID NO: 336042 - DNA, 60 bp, Artificial
  Synthetic oligonucleotide
atgttcttctgactatgtgtgccgtcgctatacacaggagcgacgtcgttatgccttccg

SEQ ID NO: 336043 - DNA, 55 bp, Artificial
  Synthetic oligonucleotide
atgttgaaagtgtttctggagaaagtaaagttgaagccagcttttgatcaccttc

SEQ ID NO: 336044 - DNA, 55 bp, Artificial
  Synthetic oligonucleotide
atgttgaacaggaaaagttattaacaactggtcgtacgtttgtagcccatattca

SEQ ID NO: 336045 - DNA, 55 bp, Artificial
  Synthetic oligonucleotide
atgttgaaccacgcatcgtttgaatacactttagggctcagatccaagtgcccac

SEQ ID NO: 336046 - DNA, 60 bp, Artificial
  Synthetic oligonucleotide
atgttgaactcacacgaggagtgccaaacaaaaatgagcccgtctcatggaccagcaaca

SEQ ID NO: 336047 - DNA, 54 bp, Artificial
  Synthetic oligonucleotide
atgttgaagaccacatttattggggcgtggaaaatgaaacgtacgataaaggag

SEQ ID NO: 336048 - DNA, 58 bp, Artificial
  Synthetic oligonucleotide
atgttgaagagcaacctttagacgggccatatacaccagataagtcaaatttgccgtc

SEQ ID NO: 336049 - DNA, 60 bp, Artificial
  Synthetic oligonucleotide
atgttgaagcacctcattgataggtctaagaaggaagcattgttctactttaactacaga

SEQ ID NO: 336050 - DNA, 52 bp, Artificial
  Synthetic oligonucleotide
atgttgaatccccttggacgtaacaccggtaagggttactacgagtatggag

SEQ ID NO: 336051 - DNA, 59 bp, Artificial
  Synthetic oligonucleotide
atgttgaattgcctcctatgccattggcagatacaatacaaatggtgcctgaaagttct

SEQ ID NO: 336052 - DNA, 60 bp, Artificial
  Synthetic oligonucleotide
atgttgaccagtggcttaaggacattgcagagtgtgaagatacatatcttgagaaagcat

SEQ ID NO: 336053 - DNA, 50 bp, Artificial
  Synthetic oligonucleotide
atgttgacccgcaatatttgcggttgaacatctcagacattgtgcgggat

SEQ ID NO: 336054 - DNA, 57 bp, Artificial
  Synthetic oligonucleotide
atgttgacgatggtcattttgtcaacatagagctggagtaaaaaactaccttgtttc

SEQ ID NO: 336055 - DNA, 55 bp, Artificial
  Synthetic oligonucleotide
atgttgactcagcttggatgcaccctaaattttccaatcagtcccattaagactg

SEQ ID NO: 336056 - DNA, 60 bp, Artificial
  Synthetic oligonucleotide
atgttgagcctgtgtttcaaaccggtgccactagtaagagagtgcatactcaacgtgagg

SEQ ID NO: 336057 - DNA, 60 bp, Artificial
  Synthetic oligonucleotide
atgttgaggacacaaagattgatttatggtcatataatgcagagctattagtcgctctag

SEQ ID NO: 336058 - DNA, 55 bp, Artificial
  Synthetic oligonucleotide
atgttgaggttcggagaaactccattgattgcagattgcggttaggcgaaccgct

SEQ ID NO: 336059 - DNA, 50 bp, Artificial
  Synthetic oligonucleotide
atgttgagtgggacgcggcagccgagaggtacgccaatcccgtgacacca

SEQ ID NO: 336060 - DNA, 54 bp, Artificial
  Synthetic oligonucleotide
atgttgataagttgtaacacctcagtccttacacaggcctgtccaaaggtatcc

SEQ ID NO: 336061 - DNA, 60 bp, Artificial
  Synthetic oligonucleotide
atgttgatcaaagcttaattattgctgctaggaacatagtgagaagagctacagtatcat

SEQ ID NO: 336062 - DNA, 60 bp, Artificial
  Synthetic oligonucleotide
atgttgattccacacccgcatatccaaagatgcgatggtgggctactgagagtgactatc

SEQ ID NO: 336063 - DNA, 56 bp, Artificial
  Synthetic oligonucleotide
atgttgattcgtgtactaggtagcttgtaaacaacggagtggtggtcgttagatcc

SEQ ID NO: 336064 - DNA, 54 bp, Artificial
  Synthetic oligonucleotide
atgttgattggtacagggatcccgataaatactatgagccaaatcttactatcg

SEQ ID NO: 336065 - DNA, 59 bp, Artificial
  Synthetic oligonucleotide
atgttgattgtggggggcttgaatcgtatgtccgtggaatgtttggccgatgataatcg

SEQ ID NO: 336066 - DNA, 58 bp, Artificial
  Synthetic oligonucleotide
atgttgcaacccaagggtaccttatctcgaattttgatgagtcatcgtgtactttcat

SEQ ID NO: 336067 - DNA, 57 bp, Artificial
  Synthetic oligonucleotide
atgttgcaagttacaatgatgtcgactcgctttcacacgcactcactgagttgcact

SEQ ID NO: 336068 - DNA, 57 bp, Artificial
  Synthetic oligonucleotide
atgttgcaattaatcagaatggtgctaggaaagtatctctcggatggttagttcatg

SEQ ID NO: 336069 - DNA, 60 bp, Artificial
  Synthetic oligonucleotide
atgttgcagtaccatgatgtatctatctaccgctctaggcgatgtccccagttttgcgag

SEQ ID NO: 336070 - DNA, 59 bp, Artificial
  Synthetic oligonucleotide
atgttgccagagaactacatccggaatatttcaagaactaagcgcatgcgcaacagaaa

SEQ ID NO: 336071 - DNA, 60 bp, Artificial
  Synthetic oligonucleotide
atgttgccccaatagaacacattgcaagcatgaggaggaactattttactgctgaggtgt

SEQ ID NO: 336072 - DNA, 51 bp, Artificial
  Synthetic oligonucleotide
atgttgccgacgagactccacgctctttggccgccatgcactacgtcaact

SEQ ID NO: 336073 - DNA, 60 bp, Artificial
  Synthetic oligonucleotide
atgttgcgagctacaatgaagtggatcaactaagtaagcttttatctgacagaggctact

SEQ ID NO: 336074 - DNA, 60 bp, Artificial
  Synthetic oligonucleotide
atgttgctggtgcctacattgagaagattggaaacatgcaagttcttgattcattgcccc

SEQ ID NO: 336075 - DNA, 59 bp, Artificial
  Synthetic oligonucleotide
atgttggaacgagactcagggagacaagcgcggactgattagtgcaaccaaaatgagtt

SEQ ID NO: 336076 - DNA, 58 bp, Artificial
  Synthetic oligonucleotide
atgttggactgggctctctgggcccccacgatggaagccgattcgcctgggtccaaca

SEQ ID NO: 336077 - DNA, 60 bp, Artificial
  Synthetic oligonucleotide
atgttggactgggctctctgtaaccctacttgtgatgcggaatcacctgggtctaataca

SEQ ID NO: 336078 - DNA, 54 bp, Artificial
  Synthetic oligonucleotide
atgttggagggaacggttcacacgggtttgctgcagccctaaaacggtcatact

SEQ ID NO: 336079 - DNA, 56 bp, Artificial
  Synthetic oligonucleotide
atgttggagggccctacgcgggcgcaatggctccctcccactttgcagtcccaacc

SEQ ID NO: 336080 - DNA, 55 bp, Artificial
  Synthetic oligonucleotide
atgttggagtaaagagtctcaaactagcagttggtctgaggaatgtgcctactag

SEQ ID NO: 336081 - DNA, 59 bp, Artificial
  Synthetic oligonucleotide
atgttggagtctaatgggattgatcccagtaaggcccaatcatctagttattatggtcc

SEQ ID NO: 336082 - DNA, 55 bp, Artificial
  Synthetic oligonucleotide
atgttggatttactagcaagagtagattatagattaggagtaggagctctggtag

SEQ ID NO: 336083 - DNA, 55 bp, Artificial
  Synthetic oligonucleotide
atgttggcctacacaccgaaggccgactggcagccctacacgggctgagaggact

SEQ ID NO: 336084 - DNA, 60 bp, Artificial
  Synthetic oligonucleotide
atgttggcggatatatcgagcacgtattcgccatcactcggatttgttacttcgatgtgt

SEQ ID NO: 336085 - DNA, 56 bp, Artificial
  Synthetic oligonucleotide
atgttggctgtgcttagtgtcgggacctccttattacgaaggagtagcggtcgtgg

SEQ ID NO: 336086 - DNA, 58 bp, Artificial
  Synthetic oligonucleotide
atgttggctttaatctctttcattccaggtatcctgtttatcagattgtaaccatcgt

SEQ ID NO: 336087 - DNA, 60 bp, Artificial
  Synthetic oligonucleotide
atgttgggagtcaggaatcatttagcttgtcagacatggttcaatgggcatttgatcatg

SEQ ID NO: 336088 - DNA, 58 bp, Artificial
  Synthetic oligonucleotide
atgttggtaaggtattatgtgttagtgatgtcacccgtggtaatgggcttacacatcg

SEQ ID NO: 336089 - DNA, 56 bp, Artificial
  Synthetic oligonucleotide
atgttggtaataaattgccacttaacaccattccatctataccactcaccgttcgt

SEQ ID NO: 336090 - DNA, 54 bp, Artificial
  Synthetic oligonucleotide
atgttggtactactcctagaggtaatcttgacacgttagatagtagtttttccg

SEQ ID NO: 336091 - DNA, 50 bp, Artificial
  Synthetic oligonucleotide
atgttggtgacggagtcgatgaataaccttccttatatagacgaaatgca

SEQ ID NO: 336092 - DNA, 53 bp, Artificial
  Synthetic oligonucleotide
atgttggtggcctacttagttagggttaccaccgcgctacctaacgcgttgag

SEQ ID NO: 336093 - DNA, 55 bp, Artificial
  Synthetic oligonucleotide
atgttggtggttaggcatacagcatacaacagggataccttacaaccctcagagt

SEQ ID NO: 336094 - DNA, 55 bp, Artificial
  Synthetic oligonucleotide
atgttgtagtcatgaacagccttctttgccggattagtcaattcaaaataatggc

SEQ ID NO: 336095 - DNA, 55 bp, Artificial
  Synthetic oligonucleotide
atgttgtattgtggaagctgtaccaaccacgccaagttctcagcccagtactccc

SEQ ID NO: 336096 - DNA, 60 bp, Artificial
  Synthetic oligonucleotide
atgttgtccactggcctctatcagaagcctcttcggaccatgattcaagaaacgatgttc

SEQ ID NO: 336097 - DNA, 60 bp, Artificial
  Synthetic oligonucleotide
atgttgtcttggccttgtagcagtagaattggtcctcatcatactcttgtcgatacctca

SEQ ID NO: 336098 - DNA, 59 bp, Artificial
  Synthetic oligonucleotide
atgttgtgactatagcggataatatattagtgtacgtggctagttacaacgaggttgac

SEQ ID NO: 336099 - DNA, 56 bp, Artificial
  Synthetic oligonucleotide
atgttgtgactcctgaatctagggctagcttttgggctgccttcgggttgacgggg

SEQ ID NO: 336100 - DNA, 60 bp, Artificial
  Synthetic oligonucleotide
atgttgtgagaaaaatgatgaccaattcacaagacacagaactctctttcacaatcactg

SEQ ID NO: 336101 - DNA, 57 bp, Artificial
  Synthetic oligonucleotide
atgttgtgataaagaacgtctcacgtaccaagagggtatgtacgccagttcctttca

SEQ ID NO: 336102 - DNA, 60 bp, Artificial
  Synthetic oligonucleotide
atgttgtggagataccgtatgtgaatgatcaatcatacatttgtcaactagatgactcaa

SEQ ID NO: 336103 - DNA, 60 bp, Artificial
  Synthetic oligonucleotide
atgttgtggatataccgagagtgaagagattgccacagatgatgggaactgaaattgaat

SEQ ID NO: 336104 - DNA, 52 bp, Artificial
  Synthetic oligonucleotide
atgttgtgtcggtgtcgaagctacgtcatatcttcttacatgtccaaccggg

SEQ ID NO: 336105 - DNA, 55 bp, Artificial
  Synthetic oligonucleotide
atgttgtgtggcgcgacgactttccacacgccgcatgtccacggtgcctggacct

SEQ ID NO: 336106 - DNA, 54 bp, Artificial
  Synthetic oligonucleotide
atgttgttgtagattttggtttgaaagtaactccgtttttggatactgacaaca

SEQ ID NO: 336107 - DNA, 55 bp, Artificial
  Synthetic oligonucleotide
atgttgttgtaggtcaggaccgatttcggtgcaatatggccgaccttgcaggtgt

SEQ ID NO: 336108 - DNA, 51 bp, Artificial
  Synthetic oligonucleotide
atgttgtttcccgtgtttacggggtttcccctgggctcgttcataacctga

SEQ ID NO: 336109 - DNA, 58 bp, Artificial
  Synthetic oligonucleotide
atgttgttttcactacttgtcctaaggatgagctaagacctctggataaggtgttgga

SEQ ID NO: 336110 - DNA, 60 bp, Artificial
  Synthetic oligonucleotide
atgtttaacatgctgagtacagtcttaggagtctcaatcctgaatcttgggcaaaagagg

SEQ ID NO: 336111 - DNA, 56 bp, Artificial
  Synthetic oligonucleotide
atgtttaacatggtcaattacactggttactgtatagacgtgatattggacatatt

SEQ ID NO: 336112 - DNA, 55 bp, Artificial
  Synthetic oligonucleotide
atgtttaataggttattcatggtcaatcactttcccattatagtatatgactttg

SEQ ID NO: 336113 - DNA, 55 bp, Artificial
  Synthetic oligonucleotide
atgtttaatcgaagaggatcaataaccatgcttaaatctcgtgtcgtttcaacgg

SEQ ID NO: 336114 - DNA, 56 bp, Artificial
  Synthetic oligonucleotide
atgtttaatgatttactcaggcttattaatccgtcaaacactttggatttatctgg

SEQ ID NO: 336115 - DNA, 51 bp, Artificial
  Synthetic oligonucleotide
atgtttacaatggccgatggtagtccacaaccttattgttatacagagggg

SEQ ID NO: 336116 - DNA, 59 bp, Artificial
  Synthetic oligonucleotide
atgtttacgtggcgcgttaatcgcgtctgaatgcaagcttggtgacgtgtaccataaat

SEQ ID NO: 336117 - DNA, 57 bp, Artificial
  Synthetic oligonucleotide
atgtttactagtaatgatcggctatcctcccgaggtgtaacctatacgttcgcatac

SEQ ID NO: 336118 - DNA, 55 bp, Artificial
  Synthetic oligonucleotide
atgtttactggtatcgacagataggcaaaggaacgaacgaattatgccgatacgt

SEQ ID NO: 336119 - DNA, 57 bp, Artificial
  Synthetic oligonucleotide
atgtttagatctggagtaccaatgtatgaaagtcatcctcatctggtatttactgac

SEQ ID NO: 336120 - DNA, 60 bp, Artificial
  Synthetic oligonucleotide
atgtttagctgtggtggagcgattgaatgccttagcctcggttgacccccgccagcataa

SEQ ID NO: 336121 - DNA, 59 bp, Artificial
  Synthetic oligonucleotide
atgtttagttgttgtggatgatacatgagtctgttcttcttaaataatggtaggaattg

SEQ ID NO: 336122 - DNA, 60 bp, Artificial
  Synthetic oligonucleotide
atgtttcagcgctccaatttcagcgttcagacgcagagctattaagtgaccgtaagaatt

SEQ ID NO: 336123 - DNA, 51 bp, Artificial
  Synthetic oligonucleotide
atgtttcaggtgagagtggtagtttgaagataacagatgaaggtgtccttt

SEQ ID NO: 336124 - DNA, 58 bp, Artificial
  Synthetic oligonucleotide
atgtttcatcgatatttttacacctactgagaatacccacccacagacacataattgg

SEQ ID NO: 336125 - DNA, 58 bp, Artificial
  Synthetic oligonucleotide
atgtttccgaacagatagcgggttcatcagactctgttaggaatatttccacgcaaac

SEQ ID NO: 336126 - DNA, 56 bp, Artificial
  Synthetic oligonucleotide
atgtttccgaccatgccccttcgtccatttctcttcgcccttcctccacttctgcc

SEQ ID NO: 336127 - DNA, 53 bp, Artificial
  Synthetic oligonucleotide
atgtttccgtgaataggttttacacattatctaccaagtcttggacccaaaac

SEQ ID NO: 336128 - DNA, 55 bp, Artificial
  Synthetic oligonucleotide
atgtttccgttacaaaccacgttggcagatgaattagactccaggtggtaacgat

SEQ ID NO: 336129 - DNA, 56 bp, Artificial
  Synthetic oligonucleotide
atgtttcgaaacggattgacccgttgtgataatctcgtcactttgtttagtgcgac

SEQ ID NO: 336130 - DNA, 60 bp, Artificial
  Synthetic oligonucleotide
atgtttcgccagatcaattcaacatcaccaatgagtgaaatctgtgtcagagatgatata

SEQ ID NO: 336131 - DNA, 60 bp, Artificial
  Synthetic oligonucleotide
atgtttcggtcgaactacctgtcactgctacaactgtcgcgacagttgagacagggactg

SEQ ID NO: 336132 - DNA, 57 bp, Artificial
  Synthetic oligonucleotide
atgtttcggtgaataggttctatacattggacaccaaattgtgggagaaatcgtcca

SEQ ID NO: 336133 - DNA, 54 bp, Artificial
  Synthetic oligonucleotide
atgtttctaacgggtcagatcggttctggaggtactcaaggggtctagacccag

SEQ ID NO: 336134 - DNA, 60 bp, Artificial
  Synthetic oligonucleotide
atgtttctagagagagaagcttagcaaaacgcaagatgctaggcaaaagagcgtgtcgtt

SEQ ID NO: 336135 - DNA, 52 bp, Artificial
  Synthetic oligonucleotide
atgtttctctaacatccgcaaaagctcccgacaggacgcgactgatcgccgc

SEQ ID NO: 336136 - DNA, 58 bp, Artificial
  Synthetic oligonucleotide
atgtttgacaacgagccaagtactgccactgtcaagaacgatctcagagataggttgc

SEQ ID NO: 336137 - DNA, 58 bp, Artificial
  Synthetic oligonucleotide
atgtttgacagttagaggcacaggctcccagtctgggccaaccctttcaaaatctaca

SEQ ID NO: 336138 - DNA, 56 bp, Artificial
  Synthetic oligonucleotide
atgtttgacgaccaaggtataattcccgagcttaattgccagtggaggaagattag

SEQ ID NO: 336139 - DNA, 54 bp, Artificial
  Synthetic oligonucleotide
atgtttgacggagctatgctattcgacaggcaaggtaccatacctttgctgaac

SEQ ID NO: 336140 - DNA, 56 bp, Artificial
  Synthetic oligonucleotide
atgtttgagtccgacagtcacgcaagtcgatagcaggagcgaaactcgtaaggtct

SEQ ID NO: 336141 - DNA, 54 bp, Artificial
  Synthetic oligonucleotide
atgtttgatgaggtcagtacaaaatttccttgggaagaatatggaactttaaag

SEQ ID NO: 336142 - DNA, 60 bp, Artificial
  Synthetic oligonucleotide
atgtttgcggacggagcctcaccggtactggttaatcagtatgctgcatccggagtccaa

SEQ ID NO: 336143 - DNA, 60 bp, Artificial
  Synthetic oligonucleotide
atgtttggacatacaatgcggaattgctcgttctgctcgagaatgaaaggactctagact

SEQ ID NO: 336144 - DNA, 55 bp, Artificial
  Synthetic oligonucleotide
atgtttggagatttcactgtgcagctgaagcacaacactagaacagaaaagaggc

SEQ ID NO: 336145 - DNA, 55 bp, Artificial
  Synthetic oligonucleotide
atgtttggccaaatggtatcctgaagcttacaaaactatgacggaatatgaaagg

SEQ ID NO: 336146 - DNA, 55 bp, Artificial
  Synthetic oligonucleotide
atgtttgtacgatttagagcggtttgtgggcgcgcacctaaacgggcggatcgac

SEQ ID NO: 336147 - DNA, 56 bp, Artificial
  Synthetic oligonucleotide
atgtttgtcttgttattttaggcaaacgatttaacaatgtatgcgtctaaatataa

SEQ ID NO: 336148 - DNA, 60 bp, Artificial
  Synthetic oligonucleotide
atgttttcagatctagagcctgttccgctgaagatccgtaaaggatcgtcaacctgcatc

SEQ ID NO: 336149 - DNA, 55 bp, Artificial
  Synthetic oligonucleotide
atgttttcgttcatgccacatctacgaggaaaattccgagtataaactgggagtt

SEQ ID NO: 336150 - DNA, 54 bp, Artificial
  Synthetic oligonucleotide
atgttttcttggaaagttgggtccgggcccattgacaatcccgagaaatgcgac

SEQ ID NO: 336151 - DNA, 59 bp, Artificial
  Synthetic oligonucleotide
atgttttgaaattttccatcagtgtgacaacaactgcattgaaagcataagaaacggga

SEQ ID NO: 336152 - DNA, 58 bp, Artificial
  Synthetic oligonucleotide
atgttttggtaaccctgaggatcaagaggcaatacacagacgcttcacggaaatacac

SEQ ID NO: 336153 - DNA, 59 bp, Artificial
  Synthetic oligonucleotide
atgtttttcttcgctctttgctctatcagcttccttttcacctcggaagctgcttccac

SEQ ID NO: 336154 - DNA, 53 bp, Artificial
  Synthetic oligonucleotide
atgtttttgcgatcatatactatttgtcaggttcgacgaccttcacttgtgca

SEQ ID NO: 336155 - DNA, 58 bp, Artificial
  Synthetic oligonucleotide
atgtttttgggcttagagtcatatacgtgcttttcagtgtagtgtgtattataaaatc

SEQ ID NO: 336156 - DNA, 57 bp, Artificial
  Synthetic oligonucleotide
atgtttttgtggggacatcaaggtacagcaagaagttcaagccggaaatagcaataa

SEQ ID NO: 336157 - DNA, 56 bp, Artificial
  Synthetic oligonucleotide
attaaaaaatatgttacgtgtagtggtggtgcttattatgcaccatttaagcttaa

SEQ ID NO: 336158 - DNA, 55 bp, Artificial
  Synthetic oligonucleotide
attaaaaatgagactgaacccggttaacaagagcgactcgaagtcgtcagaactg

SEQ ID NO: 336159 - DNA, 58 bp, Artificial
  Synthetic oligonucleotide
attaaaacagttctatcacgcatagcgaacaaatattcatttgcgactaaaataattc

SEQ ID NO: 336160 - DNA, 57 bp, Artificial
  Synthetic oligonucleotide
attaaaaccaggtcaaacattacgagtaagatccaatgggaatctaatcgctccatg

SEQ ID NO: 336161 - DNA, 56 bp, Artificial
  Synthetic oligonucleotide
attaaaacgtcagcggagtctctagggtatgtgttagggccatattatgacctacg

SEQ ID NO: 336162 - DNA, 53 bp, Artificial
  Synthetic oligonucleotide
attaaaactaacgaaggcgtgacggagataatgcgtaccgtcgaagttcgcgg

SEQ ID NO: 336163 - DNA, 51 bp, Artificial
  Synthetic oligonucleotide
attaaaagacttcttagcctcaccacctttgtgccacggcaatatacaata

SEQ ID NO: 336164 - DNA, 56 bp, Artificial
  Synthetic oligonucleotide
attaaaaggggacagagtaaacggacacctgattcataaaattgagcaacacttca

SEQ ID NO: 336165 - DNA, 55 bp, Artificial
  Synthetic oligonucleotide
attaaaatgctcgagaaggcgttgaagtcttatgtgggcgtctttaaggcggaaa

SEQ ID NO: 336166 - DNA, 54 bp, Artificial
  Synthetic oligonucleotide
attaaaattcgaaaacgtgataaactacgctacccaattgaacaaatgacacaa

SEQ ID NO: 336167 - DNA, 53 bp, Artificial
  Synthetic oligonucleotide
attaaacaaaacggtataaacatcgggcaacgcagattgtttgagtggttacg

SEQ ID NO: 336168 - DNA, 58 bp, Artificial
  Synthetic oligonucleotide
attaaaccaactggggtgccaaggaatgagttcatactcaatgcgtatgtaacaccag

SEQ ID NO: 336169 - DNA, 56 bp, Artificial
  Synthetic oligonucleotide
attaaacccaagttattatacagttagttatgaacaatctgatagaaataatacac

SEQ ID NO: 336170 - DNA, 55 bp, Artificial
  Synthetic oligonucleotide
attaaacctcggttttcaagaacagtgtctgatgtactgcgccaggttaataatt

SEQ ID NO: 336171 - DNA, 55 bp, Artificial
  Synthetic oligonucleotide
attaaagaaacgatagacgttgaaatttgcgattttgtgttgttagacaatgacc

SEQ ID NO: 336172 - DNA, 56 bp, Artificial
  Synthetic oligonucleotide
attaaagaaacgatagacgttgaatatatcgattttgtggtgttaaacaatgagcg

SEQ ID NO: 336173 - DNA, 60 bp, Artificial
  Synthetic oligonucleotide
attaaagactacagatacacctaccgatgccacagaggtgatacacaaattcaaactaga

SEQ ID NO: 336174 - DNA, 53 bp, Artificial
  Synthetic oligonucleotide
attaaagatgttctaaacgtgtgtaaagaaaacgaatggaacatgttggtaac

SEQ ID NO: 336175 - DNA, 53 bp, Artificial
  Synthetic oligonucleotide
attaaagcatgggatctttggtcccgtccattttcgaaatcaagttaaaatac

SEQ ID NO: 336176 - DNA, 57 bp, Artificial
  Synthetic oligonucleotide
attaaagctttcgcccaattcaaaagaggtacactcgacatcttggatgagtacggc

SEQ ID NO: 336177 - DNA, 59 bp, Artificial
  Synthetic oligonucleotide
attaaagtaacaagtcatgactggtatgaaattcaggagagtgaatattacccaaagca

SEQ ID NO: 336178 - DNA, 55 bp, Artificial
  Synthetic oligonucleotide
attaaagtaagacaattatgcaagtgccttaggggagccaaggcactgacagcag

SEQ ID NO: 336179 - DNA, 60 bp, Artificial
  Synthetic oligonucleotide
attaaagtcactcaatctgatgttgcgagtgtactctcaaaagtagtttctgtaagacat

SEQ ID NO: 336180 - DNA, 53 bp, Artificial
  Synthetic oligonucleotide
attaaagtgctggaggtatagatggaaacctaaacttgggtcccctggcttta

SEQ ID NO: 336181 - DNA, 55 bp, Artificial
  Synthetic oligonucleotide
attaaagtggattaccgaaaatgcccttatctttgtgcctgtagagcgcgtggga

SEQ ID NO: 336182 - DNA, 55 bp, Artificial
  Synthetic oligonucleotide
attaaagttaagaatcacactaacagtgttatgttctggttagttagggatagaa

SEQ ID NO: 336183 - DNA, 57 bp, Artificial
  Synthetic oligonucleotide
attaaataggttcttcacgggtctgctctaagcctcccgctgtgaagcgttaaatca

SEQ ID NO: 336184 - DNA, 54 bp, Artificial
  Synthetic oligonucleotide
attaaatatttgcaggccgtggaggaaagttacgagcccaatactttgggccac

SEQ ID NO: 336185 - DNA, 59 bp, Artificial
  Synthetic oligonucleotide
attaaatcaacgtggatttggcttgtattatagttagatctcaaatgtccgactgagta

SEQ ID NO: 336186 - DNA, 52 bp, Artificial
  Synthetic oligonucleotide
attaaatcgtataacgatggattggcccaatggcgtagttcttataaccgtc

SEQ ID NO: 336187 - DNA, 50 bp, Artificial
  Synthetic oligonucleotide
attaaattccagtacgtcttcgggagagcgttcggtgaagggtacgttgg

SEQ ID NO: 336188 - DNA, 60 bp, Artificial
  Synthetic oligonucleotide
attaaattgaaggatgaacggtttatgagtctgtcaagcgctatgcctcaagcgagtggt

SEQ ID NO: 336189 - DNA, 60 bp, Artificial
  Synthetic oligonucleotide
attaacaaccatgtcacttacaatcatcaagaggctgcgaagtacgataaccacacagaa

SEQ ID NO: 336190 - DNA, 51 bp, Artificial
  Synthetic oligonucleotide
attaacaagagatggtgggattaataagactgacaccgagaccttcagacc

SEQ ID NO: 336191 - DNA, 55 bp, Artificial
  Synthetic oligonucleotide
attaacaagagatggtggtaacagtagtaatgactccgagaccttcagacctgga

SEQ ID NO: 336192 - DNA, 58 bp, Artificial
  Synthetic oligonucleotide
attaacaccaacggcagttggcacattaataggactgcccttaactgcgatgattccc

SEQ ID NO: 336193 - DNA, 57 bp, Artificial
  Synthetic oligonucleotide
attaacacccggagacgattcaagaccccaagatgctaaagcattcgtcttgaactc

SEQ ID NO: 336194 - DNA, 55 bp, Artificial
  Synthetic oligonucleotide
attaacaccctattcacttacaacaacccaccagattgaaactgtgactatctgc

SEQ ID NO: 336195 - DNA, 60 bp, Artificial
  Synthetic oligonucleotide
attaacactgatcttggatgcacttgtgaaagtaatgcgtccttttgatatgcaagctca

SEQ ID NO: 336196 - DNA, 54 bp, Artificial
  Synthetic oligonucleotide
attaacactgggaaactccactataaccacgcaggaggcggctaattcagtagt

SEQ ID NO: 336197 - DNA, 55 bp, Artificial
  Synthetic oligonucleotide
attaacagcactcaaggggaggctcccttaaggacctggtggcctgagttatatg

SEQ ID NO: 336198 - DNA, 55 bp, Artificial
  Synthetic oligonucleotide
attaacagtagaagtaccatacatttgtacagaaggagaagaccaaattactgtt

SEQ ID NO: 336199 - DNA, 53 bp, Artificial
  Synthetic oligonucleotide
attaacataattgggagaaatatgttgactcagattggttgtactttaaactt

SEQ ID NO: 336200 - DNA, 60 bp, Artificial
  Synthetic oligonucleotide
attaacatacgtaggatataatgggagtgatactagaggacattataacttctcattcac

SEQ ID NO: 336201 - DNA, 57 bp, Artificial
  Synthetic oligonucleotide
attaacatccgcgggggtatgtatggtcgtacgttggcattcactattaacaacaca

SEQ ID NO: 336202 - DNA, 60 bp, Artificial
  Synthetic oligonucleotide
attaacatctacgccagaaacttcagatgctaaatcgcgccaagcaaacatgacagccat

SEQ ID NO: 336203 - DNA, 60 bp, Artificial
  Synthetic oligonucleotide
attaacatggacgcaattatttcaacactgacatctaacgatttccagcgaactaacatc

SEQ ID NO: 336204 - DNA, 60 bp, Artificial
  Synthetic oligonucleotide
attaacattagcatgtatgaggaagaatattggagttttctgtgttcatacaaatagtta

SEQ ID NO: 336205 - DNA, 55 bp, Artificial
  Synthetic oligonucleotide
attaaccacaccagacaagaaacatcagaaggagcccccatttctttggatgggg

SEQ ID NO: 336206 - DNA, 59 bp, Artificial
  Synthetic oligonucleotide
attaacccaggggagacagacttttgattggacagtatgcagaaaccaacctgctgcaa

SEQ ID NO: 336207 - DNA, 53 bp, Artificial
  Synthetic oligonucleotide
attaaccccctacgttttcaagataagcgactagacgcaaaatagaagccgtg

SEQ ID NO: 336208 - DNA, 56 bp, Artificial
  Synthetic oligonucleotide
attaacccctgaaatggggccccagaccttagctactggagtatatggacctctgc

SEQ ID NO: 336209 - DNA, 57 bp, Artificial
  Synthetic oligonucleotide
attaacctaattctcaatagagatttatcatttcaagacttggcagagaacccatgt

SEQ ID NO: 336210 - DNA, 54 bp, Artificial
  Synthetic oligonucleotide
attaacctatcgttctgagagtgaacgtagtttactagaaacgagggttataga

SEQ ID NO: 336211 - DNA, 58 bp, Artificial
  Synthetic oligonucleotide
attaacctcaggactaacaattgtgccaccatagttatcccctatgctaacaccgtgc

SEQ ID NO: 336212 - DNA, 56 bp, Artificial
  Synthetic oligonucleotide
attaacctcatagattctttcttgagcagccggttgtgtttcaacgcgacctttgg

SEQ ID NO: 336213 - DNA, 55 bp, Artificial
  Synthetic oligonucleotide
attaacctgccctttgtttgaattctcttatggttatagaaccgctgaccaagac

SEQ ID NO: 336214 - DNA, 51 bp, Artificial
  Synthetic oligonucleotide
attaacgaaaatcatgcaaatgacatcagtagctatcactggatcgcttag

SEQ ID NO: 336215 - DNA, 54 bp, Artificial
  Synthetic oligonucleotide
attaacgaagttgaaacccaagtcataaatggtggcacagtaaactacacgctt

SEQ ID NO: 336216 - DNA, 59 bp, Artificial
  Synthetic oligonucleotide
attaacgattgctcctgaataattctccattattcagaaattgtgttgcgaattaatcc

SEQ ID NO: 336217 - DNA, 58 bp, Artificial
  Synthetic oligonucleotide
attaacgcaattcgttgtatttcaatgagagataaggactcgccgttagcgtgtgaaa

SEQ ID NO: 336218 - DNA, 59 bp, Artificial
  Synthetic oligonucleotide
attaacgtcaaactcttgaacccatgagagagtataaacagtcatggtatctaattgga

SEQ ID NO: 336219 - DNA, 53 bp, Artificial
  Synthetic oligonucleotide
attaacgttaactacaataagttggtctatataagtcggctgttattaatttc

SEQ ID NO: 336220 - DNA, 54 bp, Artificial
  Synthetic oligonucleotide
attaacgttcctgttgatgacaggtttggatttagggatagccccttttgcacg

SEQ ID NO: 336221 - DNA, 60 bp, Artificial
  Synthetic oligonucleotide
attaactacagatgctagtgatactacatggggagcagtccttatggcagtacctaatgc

SEQ ID NO: 336222 - DNA, 53 bp, Artificial
  Synthetic oligonucleotide
attaactaccttagccagcgcacggctaacttttcggatacccggaaacttga

SEQ ID NO: 336223 - DNA, 60 bp, Artificial
  Synthetic oligonucleotide
attaactagggagactgggacgccatttgcgatggcttgatctgcaattgtatctattgt

SEQ ID NO: 336224 - DNA, 59 bp, Artificial
  Synthetic oligonucleotide
attaactcgcagagtatggccgttgtgcccaaatatgtcaaggacggtgtcgaagagga

SEQ ID NO: 336225 - DNA, 52 bp, Artificial
  Synthetic oligonucleotide
attaactctattctggcgggggtaaacggggctatgtctttcagtttgaaac

SEQ ID NO: 336226 - DNA, 60 bp, Artificial
  Synthetic oligonucleotide
attaactctcagatagagattcaccaggtgaaagtcaacttctcctactatgcaactcca

SEQ ID NO: 336227 - DNA, 58 bp, Artificial
  Synthetic oligonucleotide
attaactgtgagagaactcccactgacctctcatactgggcattaaattactggaact

SEQ ID NO: 336228 - DNA, 55 bp, Artificial
  Synthetic oligonucleotide
attaacttaccaatcactggttctatggatacagcatatgcaaattcgtcgcagc

SEQ ID NO: 336229 - DNA, 60 bp, Artificial
  Synthetic oligonucleotide
attaacttgcgcacaaacaactgtgcaacaatagtcatgccatatataaacagcgtccca

SEQ ID NO: 336230 - DNA, 60 bp, Artificial
  Synthetic oligonucleotide
attaagaacgtacttgatggtggcaaaatagatgatcttggttgtctgtcagatgaagag

SEQ ID NO: 336231 - DNA, 59 bp, Artificial
  Synthetic oligonucleotide
attaagaactcgcccttgcgtatgaaccgaatgaagcaatcggtaggtcatgtatctac

SEQ ID NO: 336232 - DNA, 50 bp, Artificial
  Synthetic oligonucleotide
attaagaaggcatgcagaataaaggttcgagtcagaggggagcacctgac

SEQ ID NO: 336233 - DNA, 55 bp, Artificial
  Synthetic oligonucleotide
attaagaatgactgagggatggtgggggccttttccccgatataccagagtaaga

SEQ ID NO: 336234 - DNA, 55 bp, Artificial
  Synthetic oligonucleotide
attaagacaaggcacatatgcaaactaattaggggaaagatgaccctaacagaag

SEQ ID NO: 336235 - DNA, 51 bp, Artificial
  Synthetic oligonucleotide
attaagacatcttatgtactcactcaataataaaggttttgccacgacaca

SEQ ID NO: 336236 - DNA, 54 bp, Artificial
  Synthetic oligonucleotide
attaagaccaacatacgtctcggtcccttagcccgggcttgggctgccaggtac

SEQ ID NO: 336237 - DNA, 50 bp, Artificial
  Synthetic oligonucleotide
attaagaccagaaaagactgcctcttaggagcagcaaaaggcaacttgtg

SEQ ID NO: 336238 - DNA, 60 bp, Artificial
  Synthetic oligonucleotide
attaagacgaccccgtatctggatggtgatgtgttgtcaagcgactcaggaccattgctt

SEQ ID NO: 336239 - DNA, 53 bp, Artificial
  Synthetic oligonucleotide
attaagagacgcctaaggggtgatggaggtctcacctacgacaaatcgcgggg

SEQ ID NO: 336240 - DNA, 55 bp, Artificial
  Synthetic oligonucleotide
attaagagcctcgtccaagggtcgctattttaatgcctacattcgggacaggtac

SEQ ID NO: 336241 - DNA, 53 bp, Artificial
  Synthetic oligonucleotide
attaagatggcttcttgttgttcgaccatgcacttggacctggcttcggacac

SEQ ID NO: 336242 - DNA, 58 bp, Artificial
  Synthetic oligonucleotide
attaagcaaaccgctgaggtagtaggtcatactccatccatttcaaaaagtgcgtata

SEQ ID NO: 336243 - DNA, 60 bp, Artificial
  Synthetic oligonucleotide
attaagcattgaggacccgagtcatgagggagaggggataccgctatatgatgcaatcaa

SEQ ID NO: 336244 - DNA, 49 bp, Artificial
  Synthetic oligonucleotide
attaagcgggggaaaattggatcattgggaaaaaattcggttacggccg

SEQ ID NO: 336245 - DNA, 60 bp, Artificial
  Synthetic oligonucleotide
attaagcgtgctgtctatgccatcccaataagccacaggagggctagtgcttacagttct

SEQ ID NO: 336246 - DNA, 60 bp, Artificial
  Synthetic oligonucleotide
attaaggaagtggtatgcaactgtcactggtggacaatatgcatcgaaggagcaggctct

SEQ ID NO: 336247 - DNA, 57 bp, Artificial
  Synthetic oligonucleotide
attaagggacgtcattccattgttggaggacgtttcccagacattgtcaggacaaga

SEQ ID NO: 336248 - DNA, 60 bp, Artificial
  Synthetic oligonucleotide
attaagtaacatcacactaccaatgcaggatcacaacaccgatgtgtactgtattcgttc

SEQ ID NO: 336249 - DNA, 54 bp, Artificial
  Synthetic oligonucleotide
attaagtacgacgttttgttaatagacgagtatacgttattgcagaacggcgaa

SEQ ID NO: 336250 - DNA, 55 bp, Artificial
  Synthetic oligonucleotide
attaagtcccttctttatccagaactttgttgcccatgatggatcgatgcatcct

SEQ ID NO: 336251 - DNA, 53 bp, Artificial
  Synthetic oligonucleotide
attaagtctctgccgaaagattccccgaggtgcgctcccgaacttcttaaaag

SEQ ID NO: 336252 - DNA, 57 bp, Artificial
  Synthetic oligonucleotide
attaagtgcttcgaaaagtttcttgagccaaaattgaactttggacatgtcactgta

SEQ ID NO: 336253 - DNA, 55 bp, Artificial
  Synthetic oligonucleotide
attaagtgtgataagtgtgctgccatgatgtaagtgcttacgtcttgagccatag

SEQ ID NO: 336254 - DNA, 56 bp, Artificial
  Synthetic oligonucleotide
attaagtgtttcaactgtggcaaagagggacacctagccagaaattgcagggcccc

SEQ ID NO: 336255 - DNA, 52 bp, Artificial
  Synthetic oligonucleotide
attaagttacccgcctaagtcggtgttgtcaagcccattgcgtaaacgagtt

SEQ ID NO: 336256 - DNA, 55 bp, Artificial
  Synthetic oligonucleotide
attaataaatggttggtacggatttcaacatcagaatgaacaaggggttggaatc

SEQ ID NO: 336257 - DNA, 60 bp, Artificial
  Synthetic oligonucleotide
attaataaatggttggtatggattccaacatcagaacgaacaaggagtgggcatggctgc

SEQ ID NO: 336258 - DNA, 60 bp, Artificial
  Synthetic oligonucleotide
attaatacacactctatgtgtaagaatacagacatagattataacaaagagatcgaaaca

SEQ ID NO: 336259 - DNA, 54 bp, Artificial
  Synthetic oligonucleotide
attaataccaaactcccttttcagaatctttccccaagaactgtgggtcaatgc

SEQ ID NO: 336260 - DNA, 60 bp, Artificial
  Synthetic oligonucleotide
attaatagaaaggaagagatcgtatgtgatggaactacagcgcatcttgacatcctgggg

SEQ ID NO: 336261 - DNA, 60 bp, Artificial
  Synthetic oligonucleotide
attaatagcagtcagcatcatatcaattctgaagggtgttatcaacatttgggggagtgg

SEQ ID NO: 336262 - DNA, 58 bp, Artificial
  Synthetic oligonucleotide
attaataggtcgtggtgttaagtcatctgacccaagtgctgatttgtatcaccgggta

SEQ ID NO: 336263 - DNA, 60 bp, Artificial
  Synthetic oligonucleotide
attaatagtgttgtcatattctaatagatcaactttggcaaaactagtatcatctccaat

SEQ ID NO: 336264 - DNA, 54 bp, Artificial
  Synthetic oligonucleotide
attaatatcaactcctttaggaagcccccctattgttagcaatagcgacttcct

SEQ ID NO: 336265 - DNA, 56 bp, Artificial
  Synthetic oligonucleotide
attaatcagattatggtataatttgttagataaccccatcccagaagcagaaactt

SEQ ID NO: 336266 - DNA, 57 bp, Artificial
  Synthetic oligonucleotide
attaatcagcctgctcaatttgaaatagaagaacctccacgtaccagtacacctggg

SEQ ID NO: 336267 - DNA, 57 bp, Artificial
  Synthetic oligonucleotide
attaatcatggtgtgccggtctttccaacggtcttttctcctcggatgctctcggtc

SEQ ID NO: 336268 - DNA, 55 bp, Artificial
  Synthetic oligonucleotide
attaatccggtgaaactctcttctgggtacaaagatgttatactgtggtttagct

SEQ ID NO: 336269 - DNA, 58 bp, Artificial
  Synthetic oligonucleotide
attaatcctaagaatacacttgatctgtcaggtcttgagacaacaggggatggtttta

SEQ ID NO: 336270 - DNA, 59 bp, Artificial
  Synthetic oligonucleotide
attaatcgaggcatccagtttgaatgattcagtaaatatgagagtgaagttgggtaact

SEQ ID NO: 336271 - DNA, 55 bp, Artificial
  Synthetic oligonucleotide
attaatcgtcgtcaagcaagcggggaacttatctcgttgcctacaagttatgacg

SEQ ID NO: 336272 - DNA, 55 bp, Artificial
  Synthetic oligonucleotide
attaatcgttaacatactttccatgggatttatgacttaggctcgttgaacttca

SEQ ID NO: 336273 - DNA, 60 bp, Artificial
  Synthetic oligonucleotide
attaatctatgagttcacgaattggctcgccaatggtctaccagcgagcatcgatgaatt

SEQ ID NO: 336274 - DNA, 58 bp, Artificial
  Synthetic oligonucleotide
attaatcttcgtgacattgtaaccagacgtaatgttctgtaacgttatgtcggtcata

SEQ ID NO: 336275 - DNA, 55 bp, Artificial
  Synthetic oligonucleotide
attaatgaagatgtcacccaagtctacgccggtgacgacatggccatggaccatg

SEQ ID NO: 336276 - DNA, 51 bp, Artificial
  Synthetic oligonucleotide
attaatgacaagggcaagatagtgttgtcgaagtgtagcggtgagaatcat

SEQ ID NO: 336277 - DNA, 59 bp, Artificial
  Synthetic oligonucleotide
attaatgaccctatgaatacaactgactgttttatcgctgtggtaaacgccattagaga

SEQ ID NO: 336278 - DNA, 51 bp, Artificial
  Synthetic oligonucleotide
attaatgacgcagtagctataataaccgctgccaatagattgaatctatat

SEQ ID NO: 336279 - DNA, 55 bp, Artificial
  Synthetic oligonucleotide
attaatgacgttataccaggcgtcgttattgtagacctttgggctaaggtcgaga

SEQ ID NO: 336280 - DNA, 60 bp, Artificial
  Synthetic oligonucleotide
attaatgaggcgatgcaactatgaatatacgtatgaatagtcacatagtataattaaatt

SEQ ID NO: 336281 - DNA, 60 bp, Artificial
  Synthetic oligonucleotide
attaatgatgaggactacatgggctctgtgtgaggctctaaccttagcgaccgggcccat

SEQ ID NO: 336282 - DNA, 50 bp, Artificial
  Synthetic oligonucleotide
attaatgcaatcttcgggccggtttttgatgacatgactagacgtctcct

SEQ ID NO: 336283 - DNA, 56 bp, Artificial
  Synthetic oligonucleotide
attaatgccggtttgctaccagccactgcttactacgcggctttgcgtaaggcggg

SEQ ID NO: 336284 - DNA, 58 bp, Artificial
  Synthetic oligonucleotide
attaatgcgagactacacagccttaaaagttgaagaagttgtatgtgaagtatacagc

SEQ ID NO: 336285 - DNA, 55 bp, Artificial
  Synthetic oligonucleotide
attaatgctgactgatcaggtgtatatgtaccgtgatatgctcccggaaccaagg

SEQ ID NO: 336286 - DNA, 60 bp, Artificial
  Synthetic oligonucleotide
attaatgctgtcgcattcgacaacgtcagaatcatgcaagaactgtgagccattaccgta

SEQ ID NO: 336287 - DNA, 60 bp, Artificial
  Synthetic oligonucleotide
attaatgctgttgcatttgacaatatgcgtatcatgaacgagttgtaagcgccaacccca

SEQ ID NO: 336288 - DNA, 54 bp, Artificial
  Synthetic oligonucleotide
attaatggagtccccacccagtttacaggtgtctccgtctataaacttcgagta

SEQ ID NO: 336289 - DNA, 55 bp, Artificial
  Synthetic oligonucleotide
attaatgggaagttgaaccgagtaatcgagaaaacaaatgaaaagtttcatcaga

SEQ ID NO: 336290 - DNA, 55 bp, Artificial
  Synthetic oligonucleotide
attaatggtttcgtgattggtggtaaattcgaccttatctttgaaggcagactgg

SEQ ID NO: 336291 - DNA, 60 bp, Artificial
  Synthetic oligonucleotide
attaatgttgcatacgactactgagtttatacagacgcatagtcctaaaattgttataga

SEQ ID NO: 336292 - DNA, 56 bp, Artificial
  Synthetic oligonucleotide
attaattaatgtctggaaactaatccaataagccctcaaagcttcgtgtataatac

SEQ ID NO: 336293 - DNA, 58 bp, Artificial
  Synthetic oligonucleotide
attaattatggatgttatcaactattcgactttaattcaccagatctagaaaaactga

SEQ ID NO: 336294 - DNA, 55 bp, Artificial
  Synthetic oligonucleotide
attaattcgttcctgcaacacgtcctatagctgcgtatgcaggtgcctaaggcac

SEQ ID NO: 336295 - DNA, 59 bp, Artificial
  Synthetic oligonucleotide
attaattctcaaccaatattcgttagcaaccaacaccagctcgcttcgctcgcgcacct

SEQ ID NO: 336296 - DNA, 50 bp, Artificial
  Synthetic oligonucleotide
attaattgatggcagaaacacgcgtccatatgtttatttcttggcattga

SEQ ID NO: 336297 - DNA, 60 bp, Artificial
  Synthetic oligonucleotide
attaattgcaagaatacctgaggacatatctggcggattgagatatatcgaatctatcag

SEQ ID NO: 336298 - DNA, 60 bp, Artificial
  Synthetic oligonucleotide
attaattgcactctgtacagaggaaggctagtctatgccttgggtcaatagtcttcgttg

SEQ ID NO: 336299 - DNA, 52 bp, Artificial
  Synthetic oligonucleotide
attaatttatctgacttgctacctaaacatttccgcccattgtggaaagcga

SEQ ID NO: 336300 - DNA, 55 bp, Artificial
  Synthetic oligonucleotide
attaatttgttgacacgttctgcatcctctatcggtgttattcgtgtaattctcc

SEQ ID NO: 336301 - DNA, 54 bp, Artificial
  Synthetic oligonucleotide
attacaaagagaaccgatttattgaaattggggtgacacgaagggaagtccaca

SEQ ID NO: 336302 - DNA, 56 bp, Artificial
  Synthetic oligonucleotide
attacaaattcgccatttaaggcgtgtcaaaataccagtccaactgtgaataacac

SEQ ID NO: 336303 - DNA, 55 bp, Artificial
  Synthetic oligonucleotide
attacaacatgctcgagtcagagtctggccgcgacatttacacctatcgaccttt

SEQ ID NO: 336304 - DNA, 59 bp, Artificial
  Synthetic oligonucleotide
attacaaccctattgcacaagctgtatgtaggatcacaaacacaggagttgactatgat

SEQ ID NO: 336305 - DNA, 59 bp, Artificial
  Synthetic oligonucleotide
attacaagaaagtcgattggaagaaggcgactgccgctgtgaaacaattctatgattgg

SEQ ID NO: 336306 - DNA, 57 bp, Artificial
  Synthetic oligonucleotide
attacaagtacatcaaaacgcacctgggctcgaagttggggaattttgccataatgc

SEQ ID NO: 336307 - DNA, 58 bp, Artificial
  Synthetic oligonucleotide
attacaagtggtacagttacaggatcaacaaatttgtggcgaagaaattgtctgttga

SEQ ID NO: 336308 - DNA, 57 bp, Artificial
  Synthetic oligonucleotide
attacaataacaatgttggttctcccgggaaatggaaataatgggagctgcaatgaa

SEQ ID NO: 336309 - DNA, 60 bp, Artificial
  Synthetic oligonucleotide
attacaatagatatgattagaccagctgctatgacccagtatgtacagcaattgttccct

SEQ ID NO: 336310 - DNA, 60 bp, Artificial
  Synthetic oligonucleotide
attacaatcagatgatagcgagagaaatgatttctgtgcacacaaattttgctcttagat

SEQ ID NO: 336311 - DNA, 55 bp, Artificial
  Synthetic oligonucleotide
attacaatgtgacctggggtcactcgttatcaaacaatggagagataagcgcgcg

SEQ ID NO: 336312 - DNA, 55 bp, Artificial
  Synthetic oligonucleotide
attacaattcgctgacgtctccaacggacggacacgaggtaaaatcctcgttgtc

SEQ ID NO: 336313 - DNA, 60 bp, Artificial
  Synthetic oligonucleotide
attacaattggttttgtttccctcaccattgcaacaatgtgcttcctcatgcagattgcc

SEQ ID NO: 336314 - DNA, 60 bp, Artificial
  Synthetic oligonucleotide
attacaattgtgtgagaatcataatcaaaaataagcacctgctcaagtctgacgttgcaa

SEQ ID NO: 336315 - DNA, 55 bp, Artificial
  Synthetic oligonucleotide
attacacaaagttttggtatgtaaatcacaccctgacaggacaacacactcttcc

SEQ ID NO: 336316 - DNA, 58 bp, Artificial
  Synthetic oligonucleotide
attacacaaggttggcaactaatgacagagagaataaccagcgaaagagaactaacta

SEQ ID NO: 336317 - DNA, 59 bp, Artificial
  Synthetic oligonucleotide
attacacacagttagaggcaattacaattgaacaacttttatgcacagaagaagtacaa

SEQ ID NO: 336318 - DNA, 60 bp, Artificial
  Synthetic oligonucleotide
attacacaccgagcaagctcagacgcagacgagaatgagtatggcaatagcgtcagcgaa

SEQ ID NO: 336319 - DNA, 50 bp, Artificial
  Synthetic oligonucleotide
attacacacgggaaggctgaaaacgacactctggttgtgtcggctagcgc

SEQ ID NO: 336320 - DNA, 52 bp, Artificial
  Synthetic oligonucleotide
attacacagatatttgagatccctgagtccatggacccatcagaaatattgg

SEQ ID NO: 336321 - DNA, 55 bp, Artificial
  Synthetic oligonucleotide
attacaccatccaatgtgatagaccccaccaagattgctgtgtaccaggacaccc

SEQ ID NO: 336322 - DNA, 58 bp, Artificial
  Synthetic oligonucleotide
attacacccccactcctgcatccctgcacagtcacgggttaatgcaggggcgagttac

SEQ ID NO: 336323 - DNA, 57 bp, Artificial
  Synthetic oligonucleotide
attacaccctggcaatgtcgccggcccgagtccgtgagtacatggaatcgtttggcc

SEQ ID NO: 336324 - DNA, 60 bp, Artificial
  Synthetic oligonucleotide
attacacctaaagggcagcaatgaccaagataaaaattggacatgcacgagtgtaacaca

SEQ ID NO: 336325 - DNA, 50 bp, Artificial
  Synthetic oligonucleotide
attacacctaattggtacaagtactcatttactaattgtccaaatctagc

SEQ ID NO: 336326 - DNA, 56 bp, Artificial
  Synthetic oligonucleotide
attacacctagattgttgagatacttgagtacttggttcttgaagacccttaagaa

SEQ ID NO: 336327 - DNA, 59 bp, Artificial
  Synthetic oligonucleotide
attacacgcccatggaagccagcacccagtctatacagctggatgagcgttcgcgctgg

SEQ ID NO: 336328 - DNA, 56 bp, Artificial
  Synthetic oligonucleotide
attacacgccgcagactcaaggcacctacacgaacggtcggtttgtgtccttccca

SEQ ID NO: 336329 - DNA, 50 bp, Artificial
  Synthetic oligonucleotide
attacactaaactattgaaaaactttcagtattatggccatccaccacga

SEQ ID NO: 336330 - DNA, 55 bp, Artificial
  Synthetic oligonucleotide
attacactctatataccctcctatgaggagaggcacgttcagtgactcgacgatt

SEQ ID NO: 336331 - DNA, 60 bp, Artificial
  Synthetic oligonucleotide
attacactcttgacgaggagagcagagcaagaatcaagaccagactattcaccatcagac

SEQ ID NO: 336332 - DNA, 60 bp, Artificial
  Synthetic oligonucleotide
attacactttgccacggctgtgttgccaaagcactttaactcagcttcaatcagcatcca

SEQ ID NO: 336333 - DNA, 60 bp, Artificial
  Synthetic oligonucleotide
attacagaaacgcgatgcaatggctgcaggcctacggagagtacaagcgtatagacttct

SEQ ID NO: 336334 - DNA, 60 bp, Artificial
  Synthetic oligonucleotide
attacagagcagacgggcagctgtgtctgcattggagaccaaactcggagaactcaaacg

SEQ ID NO: 336335 - DNA, 60 bp, Artificial
  Synthetic oligonucleotide
attacagaggtagcagcagtcaaaattaccctatagtgcaaaatgcacaagggcaaatgg

SEQ ID NO: 336336 - DNA, 50 bp, Artificial
  Synthetic oligonucleotide
attacagataagataagagagtcagccactatgattgcatctactgtggg

SEQ ID NO: 336337 - DNA, 60 bp, Artificial
  Synthetic oligonucleotide
attacagatacacatatcgatgccacaggggtgatacacaaatccaaacaaggagatcat

SEQ ID NO: 336338 - DNA, 58 bp, Artificial
  Synthetic oligonucleotide
attacagatatactaggaatcgctgatgtttcttttccgaaactttctttggtcatgc

SEQ ID NO: 336339 - DNA, 60 bp, Artificial
  Synthetic oligonucleotide
attacagatgcatattttgcgtggaccgatacatttccagaggcgagcaattttgggagc

SEQ ID NO: 336340 - DNA, 56 bp, Artificial
  Synthetic oligonucleotide
attacagattctctgaagtttaccgttcagatttgattactgaagggttaagcgaa

SEQ ID NO: 336341 - DNA, 55 bp, Artificial
  Synthetic oligonucleotide
attacagcagcagtttaatgaacacaagaagtggtttgttgatctgaagcggatc

SEQ ID NO: 336342 - DNA, 58 bp, Artificial
  Synthetic oligonucleotide
attacagccctaacaaaaagatgtcacgcaaggtaggatgttctgagtgggttggcca

SEQ ID NO: 336343 - DNA, 54 bp, Artificial
  Synthetic oligonucleotide
attacagccgcaatcctcccggcgggttgcggtacgcggaacgtcccacgctag

SEQ ID NO: 336344 - DNA, 55 bp, Artificial
  Synthetic oligonucleotide
attacaggatttgcccctttttccaaggacaactctattcgactttctgctggtg

SEQ ID NO: 336345 - DNA, 55 bp, Artificial
  Synthetic oligonucleotide
attacaggcttaatggcctaaccagtcagccgaaacttactcataacgcttttag

SEQ ID NO: 336346 - DNA, 59 bp, Artificial
  Synthetic oligonucleotide
attacagggctgctattaacaagagatggtggtaacagaactgatagtaaccagaccga

SEQ ID NO: 336347 - DNA, 55 bp, Artificial
  Synthetic oligonucleotide
attacagggctgctattaacaagagatggtggtaataacgggaccaataacaccg

SEQ ID NO: 336348 - DNA, 54 bp, Artificial
  Synthetic oligonucleotide
attacaggggctccaggcattgatgctatcaatatggattcatctcctgggttt

SEQ ID NO: 336349 - DNA, 55 bp, Artificial
  Synthetic oligonucleotide
attacagggtcgagcagaaccccaagaggctagaggcagcgtaccgtgagacctg

SEQ ID NO: 336350 - DNA, 60 bp, Artificial
  Synthetic oligonucleotide
attacagggttactattgacaagagatgggggtgagaataatactgaagagatcttcaga

SEQ ID NO: 336351 - DNA, 60 bp, Artificial
  Synthetic oligonucleotide
attacagggttggaggagatccacaacaaagaataaggtgtgaaacagctctcatcacaa

SEQ ID NO: 336352 - DNA, 55 bp, Artificial
  Synthetic oligonucleotide
attacaggtacacataccgatgtcacaggggtgacacccaaatacaaacccgaag

SEQ ID NO: 336353 - DNA, 52 bp, Artificial
  Synthetic oligonucleotide
attacaggtacacgtatcgatgccatagaggtgacacacaaatacaaactcg

SEQ ID NO: 336354 - DNA, 52 bp, Artificial
  Synthetic oligonucleotide
attacaggttctatggatactccatacgctaattctacacaagaagagacat

SEQ ID NO: 336355 - DNA, 56 bp, Artificial
  Synthetic oligonucleotide
attacagtaagtctagaaataagcattatcctgtggtagtgacaccccctagccta

SEQ ID NO: 336356 - DNA, 60 bp, Artificial
  Synthetic oligonucleotide
attacagtagagagggtgcctcatgctatgagcgttaccctctctgctactttactaatc

SEQ ID NO: 336357 - DNA, 55 bp, Artificial
  Synthetic oligonucleotide
attacagtcacgttagatgagaaacgtggctcgggttcccccactcgcaaaagct

SEQ ID NO: 336358 - DNA, 58 bp, Artificial
  Synthetic oligonucleotide
attacagtgacagtgctagttctccctaaaaacggaagcaatggaaattgcagtggaa

SEQ ID NO: 336359 - DNA, 57 bp, Artificial
  Synthetic oligonucleotide
attacagtgatgacgagtggatttgcttttcactactatgttaacaatccacatcaa

SEQ ID NO: 336360 - DNA, 52 bp, Artificial
  Synthetic oligonucleotide
attacagttgaacccgtaacaactttgagcggttcgcgtgtatttaagaaac

SEQ ID NO: 336361 - DNA, 60 bp, Artificial
  Synthetic oligonucleotide
attacataacttaatactcctggcattgcatcctcgatgtcttgcatcaagatgccatgt

SEQ ID NO: 336362 - DNA, 55 bp, Artificial
  Synthetic oligonucleotide
attacataattggtgtcggaactggcctcttacagatcatactcgcctaccaagc

SEQ ID NO: 336363 - DNA, 60 bp, Artificial
  Synthetic oligonucleotide
attacatcaagttgcaaagtatgactgtctcgggagtgatacatgcgaaggctaattcca

SEQ ID NO: 336364 - DNA, 60 bp, Artificial
  Synthetic oligonucleotide
attacatcaccacatggggaagaccatgacctccctggcgaagaagttgcaacataccag

SEQ ID NO: 336365 - DNA, 60 bp, Artificial
  Synthetic oligonucleotide
attacatcaccacatggggaagatcatgacctcccaggtgaagagatagcaacataccag

SEQ ID NO: 336366 - DNA, 55 bp, Artificial
  Synthetic oligonucleotide
attacatcacgggaaaaggaaactatactcacggtccacctccacatggaggtgg

SEQ ID NO: 336367 - DNA, 58 bp, Artificial
  Synthetic oligonucleotide
attacatcacgtgcgagtacaaaaccgtcatcccgtctccgtacgtgaaatgctgcgg

SEQ ID NO: 336368 - DNA, 57 bp, Artificial
  Synthetic oligonucleotide
attacatcatcaacgtagaggcctcaaggtctacatccgaaaccggttggatgtaaa

SEQ ID NO: 336369 - DNA, 60 bp, Artificial
  Synthetic oligonucleotide
attacatccaccagtctatacagcagcactcaaagatgagccctacctcttggaaaaagt

SEQ ID NO: 336370 - DNA, 57 bp, Artificial
  Synthetic oligonucleotide
attacatggaggggcaataaccgttgagggtagaggatttcgacaggcgtatactga

SEQ ID NO: 336371 - DNA, 60 bp, Artificial
  Synthetic oligonucleotide
attacatgtcattgatttcaggtatgtggctgttgacggttataccaaatgatatgttta

SEQ ID NO: 336372 - DNA, 55 bp, Artificial
  Synthetic oligonucleotide
attacattcagcttcctcccggtttagcaatactagaattctcgttagagagagt

SEQ ID NO: 336373 - DNA, 60 bp, Artificial
  Synthetic oligonucleotide
attacattccaccaatgaatgatcaagcacagtacaagattggtaactccatgtatttcc

SEQ ID NO: 336374 - DNA, 58 bp, Artificial
  Synthetic oligonucleotide
attacattcggccaatctagaatgttcattccgcacataacattaagttttagtagta

SEQ ID NO: 336375 - DNA, 56 bp, Artificial
  Synthetic oligonucleotide
attacattgctttataaggaccaatcaggttaccgcccttggcgcccaagtatggc

SEQ ID NO: 336376 - DNA, 55 bp, Artificial
  Synthetic oligonucleotide
attacatttcctagcctcggtaagaccgagcctaaccgaaccaggtcctatgtca

SEQ ID NO: 336377 - DNA, 52 bp, Artificial
  Synthetic oligonucleotide
attacatttcgggatcacgaatattcgtcgattatctcgtctgagcacagca

SEQ ID NO: 336378 - DNA, 54 bp, Artificial
  Synthetic oligonucleotide
attaccaaagggctatgaagttgcctgccgaccccatccccttctccgaggagt

SEQ ID NO: 336379 - DNA, 57 bp, Artificial
  Synthetic oligonucleotide
attaccaagagtgttttcaaaggtgaacgctaaagacgttctggtgatgaggtctga

SEQ ID NO: 336380 - DNA, 56 bp, Artificial
  Synthetic oligonucleotide
attaccaatggtgttacttagatataatccagcagcagaccaaggcccaggcaaca

SEQ ID NO: 336381 - DNA, 55 bp, Artificial
  Synthetic oligonucleotide
attaccacaatatagactggaggcgatatgtgctgcaatggtggaatcatgggga

SEQ ID NO: 336382 - DNA, 52 bp, Artificial
  Synthetic oligonucleotide
attaccacacagcccacacttttaaaatcacctcatttacatattggcacca

SEQ ID NO: 336383 - DNA, 58 bp, Artificial
  Synthetic oligonucleotide
attaccaccctgctcatggccagtgcggtaatggcaggacctttggagaacagggaaa

SEQ ID NO: 336384 - DNA, 60 bp, Artificial
  Synthetic oligonucleotide
attaccagagcctacgaagcatcctagcaaacaatgggaaatttgagttcattgctgagg

SEQ ID NO: 336385 - DNA, 60 bp, Artificial
  Synthetic oligonucleotide
attaccagatgggcctccttgctctcaacgatcgaaattcttgctgatggatgccctgaa

SEQ ID NO: 336386 - DNA, 57 bp, Artificial
  Synthetic oligonucleotide
attaccagcacgactcgcaatagtcgcgatgtctttcttaaaacgaccggatgcaac

SEQ ID NO: 336387 - DNA, 53 bp, Artificial
  Synthetic oligonucleotide
attaccagctatgcaaactacaacttacgtgacaccaattagttatactatta

SEQ ID NO: 336388 - DNA, 51 bp, Artificial
  Synthetic oligonucleotide
attaccagtcctcaatacgcccggtagtaaccaattcttaacatcggatga

SEQ ID NO: 336389 - DNA, 59 bp, Artificial
  Synthetic oligonucleotide
attacccaccacgcatgcgatgtacatttaggcttgtagttacatagcccttaggacta

SEQ ID NO: 336390 - DNA, 55 bp, Artificial
  Synthetic oligonucleotide
attacccctgaagtaatggaggaacaagtgcccatgggaagagagctacatgaag

SEQ ID NO: 336391 - DNA, 55 bp, Artificial
  Synthetic oligonucleotide
attacccgacatgaccccaagtactgaaatgtcgctgagagggataagggtcagc

SEQ ID NO: 336392 - DNA, 60 bp, Artificial
  Synthetic oligonucleotide
attacccgacctaattgctggggcgcatcagaacgccgacccagtcgtgctagatgtgag

SEQ ID NO: 336393 - DNA, 60 bp, Artificial
  Synthetic oligonucleotide
attacccgagatcactccaggatcggtcgcaaagttaacgcgacagatacttgagctcag

SEQ ID NO: 336394 - DNA, 55 bp, Artificial
  Synthetic oligonucleotide
attacccggtactaactatgttgggcctggcaatgagctacaagctgggcctccg

SEQ ID NO: 336395 - DNA, 60 bp, Artificial
  Synthetic oligonucleotide
attaccctatagtgcagaacctacaggggcaaatggtacatcagcccatatcacctagaa

SEQ ID NO: 336396 - DNA, 58 bp, Artificial
  Synthetic oligonucleotide
attaccctatagtgcagaatatccaaggacaaatggtacacagtcccttatcacctag

SEQ ID NO: 336397 - DNA, 57 bp, Artificial
  Synthetic oligonucleotide
attaccctcaggccagaatagtctacacagcatgttctcatgcagctgtggatgctc

SEQ ID NO: 336398 - DNA, 59 bp, Artificial
  Synthetic oligonucleotide
attaccctgttgccaaaggatcatacaataatacaagtggggaacaaatgctgatcatt

SEQ ID NO: 336399 - DNA, 57 bp, Artificial
  Synthetic oligonucleotide
attaccgacccggtggcgtttattggtacctgctgtctgtactctatgacgcagtgg

SEQ ID NO: 336400 - DNA, 52 bp, Artificial
  Synthetic oligonucleotide
attaccgatactaagatacgctactataactcggtaagtggaaggttaattt

SEQ ID NO: 336401 - DNA, 53 bp, Artificial
  Synthetic oligonucleotide
attaccgcacggaggagtgtataaagacgggactaaatctatagtctacgggg

SEQ ID NO: 336402 - DNA, 60 bp, Artificial
  Synthetic oligonucleotide
attaccgcagagtctcgcgacttctgcaatcagatgaaattcgtattgatcggacgtttg

SEQ ID NO: 336403 - DNA, 52 bp, Artificial
  Synthetic oligonucleotide
attaccggctcccggtcctttctgctgccggttggttatgcgaggtaaacgg

SEQ ID NO: 336404 - DNA, 56 bp, Artificial
  Synthetic oligonucleotide
attaccggggtcttgacgtgtccgtcataccgactagcggagatgtcgttatcgtg

SEQ ID NO: 336405 - DNA, 60 bp, Artificial
  Synthetic oligonucleotide
attaccgtgacatacaactttaacttttgagttatggctgtgtgtcgctgctgtgatact

SEQ ID NO: 336406 - DNA, 59 bp, Artificial
  Synthetic oligonucleotide
attaccgtggcatcgagaatatgtacggcaatctgtatcagtggactgacggggttaac

SEQ ID NO: 336407 - DNA, 54 bp, Artificial
  Synthetic oligonucleotide
attacctaacacattggtaaccttcacagatttacgcgttctacatagttagca

SEQ ID NO: 336408 - DNA, 58 bp, Artificial
  Synthetic oligonucleotide
attacctcaaattattcaggttataatgacaaccttacctctcttggtccaagcagca

SEQ ID NO: 336409 - DNA, 56 bp, Artificial
  Synthetic oligonucleotide
attacctccagcgtacgctctctttggggaccctgtccagcttgactctaaggttg

SEQ ID NO: 336410 - DNA, 56 bp, Artificial
  Synthetic oligonucleotide
attacctgaccctaataagtttagccttcctgatacgtccctatataatcctgaca

SEQ ID NO: 336411 - DNA, 52 bp, Artificial
  Synthetic oligonucleotide
attaccttaagagaagagggaccccccataaaaaaactaagactgtgacatg

SEQ ID NO: 336412 - DNA, 54 bp, Artificial
  Synthetic oligonucleotide
attaccttatgacgatgatcttttatttacatacgcaaaaattttactttacga

SEQ ID NO: 336413 - DNA, 52 bp, Artificial
  Synthetic oligonucleotide
attacctttggagtacccacaaggtgctcctttggttgtcccccgtggcttc

SEQ ID NO: 336414 - DNA, 50 bp, Artificial
  Synthetic oligonucleotide
attaccttttaagacactaacaatcgcgtcccaatcattggtaagttcgt

SEQ ID NO: 336415 - DNA, 55 bp, Artificial
  Synthetic oligonucleotide
attaccttttagcgaccttcatagattcggctgctataacgccgacgaatatgac

SEQ ID NO: 336416 - DNA, 55 bp, Artificial
  Synthetic oligonucleotide
attacgagaaaccaacctgaatggtttaggaatgtcttgagcgttgcccctataa

SEQ ID NO: 336417 - DNA, 50 bp, Artificial
  Synthetic oligonucleotide
attacgagttactagaggatattaaaatgtatcgcagcgactggacggag

SEQ ID NO: 336418 - DNA, 58 bp, Artificial
  Synthetic oligonucleotide
attacgatcgttcagttcccaataagccagtgctgagttcggaacgagcggagataaa

SEQ ID NO: 336419 - DNA, 51 bp, Artificial
  Synthetic oligonucleotide
attacgatgaaagtaatccgaaaggtccgaatccgatggaccgaaaagggt

SEQ ID NO: 336420 - DNA, 55 bp, Artificial
  Synthetic oligonucleotide
attacgatgaagctagcggaaactatcgttttgtgtcggtaggaagtgctacaca

SEQ ID NO: 336421 - DNA, 54 bp, Artificial
  Synthetic oligonucleotide
attacgattaggtcatggtcgttgctgcgattgcaactgccgacaggctcgtcc

SEQ ID NO: 336422 - DNA, 55 bp, Artificial
  Synthetic oligonucleotide
attacgcaaatgctagacgggataatagattcggtaagttaatttcagggacagc

SEQ ID NO: 336423 - DNA, 55 bp, Artificial
  Synthetic oligonucleotide
attacgcagtttgccgagtacacgggttttgtcaagagcgcaaaccgcgttctcg

SEQ ID NO: 336424 - DNA, 52 bp, Artificial
  Synthetic oligonucleotide
attacgcatacatagagagtaataacgggggtcgatccttcgctgttaacat

SEQ ID NO: 336425 - DNA, 60 bp, Artificial
  Synthetic oligonucleotide
attacgcatggtaaaggtcactatagagttgtgaaatactcgtcagttgcaaatcatgca

SEQ ID NO: 336426 - DNA, 53 bp, Artificial
  Synthetic oligonucleotide
attacgccaccggacagaaagagttgcgtatcattgaaacactagagccacta

SEQ ID NO: 336427 - DNA, 55 bp, Artificial
  Synthetic oligonucleotide
attacgcgcttatgatgatagaaaatcgacgaaaagcgctcgagggatagagttc

SEQ ID NO: 336428 - DNA, 55 bp, Artificial
  Synthetic oligonucleotide
attacgctagcagtattaaggtccttggagagaacatgcgagtgttggatcggtc

SEQ ID NO: 336429 - DNA, 55 bp, Artificial
  Synthetic oligonucleotide
attacggatgaccaaattgaagtgaccaatgccactgaactggtccaaagctcct

SEQ ID NO: 336430 - DNA, 55 bp, Artificial
  Synthetic oligonucleotide
attacggcgtcggctctccaggcgtttagagaggtcgctcggttggcggaaccca

SEQ ID NO: 336431 - DNA, 51 bp, Artificial
  Synthetic oligonucleotide
attacggggatcggaaaccgtgggagcacgccgccacatatatggacgtgt

SEQ ID NO: 336432 - DNA, 53 bp, Artificial
  Synthetic oligonucleotide
attacgggttcggagtcttcacaaccaacatatggctgaaactccgagaggtg

SEQ ID NO: 336433 - DNA, 58 bp, Artificial
  Synthetic oligonucleotide
attacgggttttctgtgatgggcaagacgacttcttattggagagagaacatatcgag

SEQ ID NO: 336434 - DNA, 50 bp, Artificial
  Synthetic oligonucleotide
attacggtaactttgtacgccagttttatcctccccttaccccatgtaac

SEQ ID NO: 336435 - DNA, 54 bp, Artificial
  Synthetic oligonucleotide
attacggtttggtgcgcgccatcggtactccgtctatgtacgacggcaccactg

SEQ ID NO: 336436 - DNA, 51 bp, Artificial
  Synthetic oligonucleotide
attacgtacacgcttatgttttgtgcagacacttgtccctgtacaatagtt

SEQ ID NO: 336437 - DNA, 56 bp, Artificial
  Synthetic oligonucleotide
attacgtccagctaaagacgtggaacatgaagctttctcgattaacaaacttcgta

SEQ ID NO: 336438 - DNA, 60 bp, Artificial
  Synthetic oligonucleotide
attacgtgaggttggagaagcgagaagaatcgtatatctgattcagagcgttactgggat

SEQ ID NO: 336439 - DNA, 60 bp, Artificial
  Synthetic oligonucleotide
attacgtgatctaaagaggtctgcggcggaagtaatagaatggaaggagcagatggccga

SEQ ID NO: 336440 - DNA, 60 bp, Artificial
  Synthetic oligonucleotide
attacgtgtgggaagtgcgccgataattatgctcagatgagctctaccgaaatacggaac

SEQ ID NO: 336441 - DNA, 60 bp, Artificial
  Synthetic oligonucleotide
attacgttagttgcgcccgcagacgtcttgactataactgtatcgcattcgccgtggaca

SEQ ID NO: 336442 - DNA, 57 bp, Artificial
  Synthetic oligonucleotide
attactaactattcaccatctagggaagataatttgcaacgtgtctttacagtagcc

SEQ ID NO: 336443 - DNA, 55 bp, Artificial
  Synthetic oligonucleotide
attactacaggctcgaggacacaccaatagtcctctaggagatatgctgcgggct

SEQ ID NO: 336444 - DNA, 55 bp, Artificial
  Synthetic oligonucleotide
attactacccaaaatggagacgatggagatctagacgaaataggtttagacgcca

SEQ ID NO: 336445 - DNA, 60 bp, Artificial
  Synthetic oligonucleotide
attactacccaagaggctgctaatattgtattagcttatggagagtggcctgagtactgc

SEQ ID NO: 336446 - DNA, 50 bp, Artificial
  Synthetic oligonucleotide
attactacctgaatttggcaccatgtgggattgtgatcaatcgccactcc

SEQ ID NO: 336447 - DNA, 60 bp, Artificial
  Synthetic oligonucleotide
attactacctgcatccaagcctgctaaggcgcaaacgcaaacgtctgttcaattgatgtt

SEQ ID NO: 336448 - DNA, 52 bp, Artificial
  Synthetic oligonucleotide
attactatcgactccagtcaaggcgctacatttgatgtggttacactgcatt

SEQ ID NO: 336449 - DNA, 55 bp, Artificial
  Synthetic oligonucleotide
attactatgcaccaaggatacagtttaagcagacacaaaatgtaaaggaaccggg

SEQ ID NO: 336450 - DNA, 56 bp, Artificial
  Synthetic oligonucleotide
attactattctttggaccacttgaaggtggtggtctaatatttaaacactggtgca

SEQ ID NO: 336451 - DNA, 58 bp, Artificial
  Synthetic oligonucleotide
attactattggtctatattgaagccaggagaaaccttaaatgtagaatccaatggcaa

SEQ ID NO: 336452 - DNA, 52 bp, Artificial
  Synthetic oligonucleotide
attactatttctatcagccctatgtgtgctgagttttctggggcacgtgcaa

SEQ ID NO: 336453 - DNA, 60 bp, Artificial
  Synthetic oligonucleotide
attactcaacggtgggatcatcattgaatgccgttattgaggtgccagataaatcactgc

SEQ ID NO: 336454 - DNA, 52 bp, Artificial
  Synthetic oligonucleotide
attactcaacgtttaggtcccttgacacggacctgtggcctcttacacttac

SEQ ID NO: 336455 - DNA, 55 bp, Artificial
  Synthetic oligonucleotide
attactcaggcactggaagtgaacaggactacattcaagcctgtcgtgcttggtt

SEQ ID NO: 336456 - DNA, 56 bp, Artificial
  Synthetic oligonucleotide
attactcatagagtagggaagcgtttttgtattaagtcaatttacatcatagggaa

SEQ ID NO: 336457 - DNA, 57 bp, Artificial
  Synthetic oligonucleotide
attactccaactgtactggggaagcgacaggatacaactgggttattgactggacgc

SEQ ID NO: 336458 - DNA, 57 bp, Artificial
  Synthetic oligonucleotide
attactccacggaggagggcaagaaatggagccggtagatcctagactagagccctg

SEQ ID NO: 336459 - DNA, 55 bp, Artificial
  Synthetic oligonucleotide
attactcccaaattatctaaatacttcatacattgaaccctaaatactcttaaga

SEQ ID NO: 336460 - DNA, 55 bp, Artificial
  Synthetic oligonucleotide
attactcccgggctatctgttttgctcaggtacggggaattgaatcgtacgcaga

SEQ ID NO: 336461 - DNA, 55 bp, Artificial
  Synthetic oligonucleotide
attactccctctctgaaagaccgtttctacatacgtcacgttctgaaacgtgttc

SEQ ID NO: 336462 - DNA, 59 bp, Artificial
  Synthetic oligonucleotide
attactcgacagaggagagcaagaaatggaaccagtagaccctagactagagccctgga

SEQ ID NO: 336463 - DNA, 57 bp, Artificial
  Synthetic oligonucleotide
attactcgacgagggagagtaaggaatggagccagtagaccctagactagagccctg

SEQ ID NO: 336464 - DNA, 56 bp, Artificial
  Synthetic oligonucleotide
attactcggtgctaagcctgggcaagttttacgcgcgcaagatttacaagacgccg

SEQ ID NO: 336465 - DNA, 52 bp, Artificial
  Synthetic oligonucleotide
attactcttcggcctactcctacttttcgtaggggtaggcctcttcctactc

SEQ ID NO: 336466 - DNA, 60 bp, Artificial
  Synthetic oligonucleotide
attactgacgaatttgcgcaaacagcatgttatttttcctcttatgtataaggcttatca

SEQ ID NO: 336467 - DNA, 60 bp, Artificial
  Synthetic oligonucleotide
attactgatcttgtccatactcttattcacattatgttgtcctcgtagacctagttacag

SEQ ID NO: 336468 - DNA, 60 bp, Artificial
  Synthetic oligonucleotide
attactgcgaatgcgttatcatcaatactatccgcgtctaactcgccatggcagttgcaa

SEQ ID NO: 336469 - DNA, 55 bp, Artificial
  Synthetic oligonucleotide
attactgctggccgtcttcggacccctttggattctccaagccagtttgcttaag

SEQ ID NO: 336470 - DNA, 59 bp, Artificial
  Synthetic oligonucleotide
attactgggacactaacagcaagtattatcaactttcaatcatttaattggtcacaaca

SEQ ID NO: 336471 - DNA, 55 bp, Artificial
  Synthetic oligonucleotide
attactggtccagggatcaacttgaaacatttcttcaggttcatagacctaaaaa

SEQ ID NO: 336472 - DNA, 55 bp, Artificial
  Synthetic oligonucleotide
attactgtaaccgcaattcagatccagaggtcaatcagaggtgatgggcagtggg

SEQ ID NO: 336473 - DNA, 52 bp, Artificial
  Synthetic oligonucleotide
attacttatgagggggataccagtgcgggctataaccatgatgtgtctatac

SEQ ID NO: 336474 - DNA, 55 bp, Artificial
  Synthetic oligonucleotide
attacttcactgtaggttataaaggtccgaacgaaatggatgctggtatttacta

SEQ ID NO: 336475 - DNA, 60 bp, Artificial
  Synthetic oligonucleotide
attacttcgatatggtgttttatagagtagattgccatgtgaccgctcatagaagtccat

SEQ ID NO: 336476 - DNA, 59 bp, Artificial
  Synthetic oligonucleotide
attacttcttttccgacgatgcaaaactgttcttactgcatgggcatcacgatagtccg

SEQ ID NO: 336477 - DNA, 50 bp, Artificial
  Synthetic oligonucleotide
attacttgctgtagaaagatacctacaggatcagcagattctaggccttt

SEQ ID NO: 336478 - DNA, 54 bp, Artificial
  Synthetic oligonucleotide
attacttggtggggaccatacgttggttatgaccctgtgacaacacgtggtacc

SEQ ID NO: 336479 - DNA, 60 bp, Artificial
  Synthetic oligonucleotide
attacttgtcacgctactagaatggtacacattaaccaagctgacacagacgaatacttg

SEQ ID NO: 336480 - DNA, 55 bp, Artificial
  Synthetic oligonucleotide
attactttgaagaggtagttccctctgagggatacagtaaatacgtaatcagaaa

SEQ ID NO: 336481 - DNA, 55 bp, Artificial
  Synthetic oligonucleotide
attagaaaacactggtgtattcccaacgctttcctcaggttgtggttgaactgta

SEQ ID NO: 336482 - DNA, 58 bp, Artificial
  Synthetic oligonucleotide
attagaaacaagcactcaaacggaacaatacacgacagaactgctttcagagggttga

SEQ ID NO: 336483 - DNA, 55 bp, Artificial
  Synthetic oligonucleotide
attagaacagcaatacaacaaaccgttgtgtgatttgttaattaggtgtattaac

SEQ ID NO: 336484 - DNA, 58 bp, Artificial
  Synthetic oligonucleotide
attagaaccctcccaggtagccccgcacatgtactcagtaccaaagatatccaggctg

SEQ ID NO: 336485 - DNA, 60 bp, Artificial
  Synthetic oligonucleotide
attagaactttgatgctaaaggtttacaagggcatagatctagatcagttcagaatgata

SEQ ID NO: 336486 - DNA, 55 bp, Artificial
  Synthetic oligonucleotide
attagaagtggaccatgtgccctatactggtatagaacagcaatgggaaatggca

SEQ ID NO: 336487 - DNA, 57 bp, Artificial
  Synthetic oligonucleotide
attagacagggaccaaaagagcctttcagagactatacagataggttcttcaaggct

SEQ ID NO: 336488 - DNA, 50 bp, Artificial
  Synthetic oligonucleotide
attagacatcacatccataaagaggcaattcttgtggatcaaggctaaca

SEQ ID NO: 336489 - DNA, 58 bp, Artificial
  Synthetic oligonucleotide
attagaccacattattgttaggtagaacctgacataatggggcagttgatcagtttct

SEQ ID NO: 336490 - DNA, 59 bp, Artificial
  Synthetic oligonucleotide
attagacctaccggccataattgaaaggctacatgggcttgaggccttttcactgcaca

SEQ ID NO: 336491 - DNA, 53 bp, Artificial
  Synthetic oligonucleotide
attagacgaccttttgcttaaacatgaacccctcctccggcggttcctatgtc

SEQ ID NO: 336492 - DNA, 60 bp, Artificial
  Synthetic oligonucleotide
attagacttcgccactggagcctcatcatacgtccctataacagtgaccatagcgccgat

SEQ ID NO: 336493 - DNA, 53 bp, Artificial
  Synthetic oligonucleotide
attagacttgggccttggaccagtttcctctgctggggtttccgacccacgga

SEQ ID NO: 336494 - DNA, 55 bp, Artificial
  Synthetic oligonucleotide
attagagaagggaagatcattcatattagtccattgtcgggaagtgctcagcatg

SEQ ID NO: 336495 - DNA, 55 bp, Artificial
  Synthetic oligonucleotide
attagagacgtgagagcggaagcagctgaatacccaagagaagcaagagcgccac

SEQ ID NO: 336496 - DNA, 60 bp, Artificial
  Synthetic oligonucleotide
attagagaggggaaaattatccatatcagcccattatcaggaagtgctcagcatatagag

SEQ ID NO: 336497 - DNA, 60 bp, Artificial
  Synthetic oligonucleotide
attagagcaatcaccagaggagactatctttagctcccctactgaggatgctaggaatat

SEQ ID NO: 336498 - DNA, 60 bp, Artificial
  Synthetic oligonucleotide
attagagcacttgtgaagtcaaacggaaatgttggacattgttcgtcacaagaatcagta

SEQ ID NO: 336499 - DNA, 60 bp, Artificial
  Synthetic oligonucleotide
attagagcatatgtatataaacctggcggcgatgttagcctccaagaggcactcgctaca

SEQ ID NO: 336500 - DNA, 54 bp, Artificial
  Synthetic oligonucleotide
attagagccgcaaatatgtatccttatcccttacatatggcggaattgtcacaa

SEQ ID NO: 336501 - DNA, 56 bp, Artificial
  Synthetic oligonucleotide
attagagcttccagattactaccgtcaatgttagtggcccctcttcactggttaaa

SEQ ID NO: 336502 - DNA, 57 bp, Artificial
  Synthetic oligonucleotide
attagaggctcgtcagtttccaagactgactgcggttacggaaagtgctccgacacc

SEQ ID NO: 336503 - DNA, 57 bp, Artificial
  Synthetic oligonucleotide
attagagtaaaccctagcattgaagtcgagatgaccacttaaataattatgcggacc

SEQ ID NO: 336504 - DNA, 57 bp, Artificial
  Synthetic oligonucleotide
attagatagacgttgggagtaatggggtagcgtacttgcctggccaactgagacact

SEQ ID NO: 336505 - DNA, 60 bp, Artificial
  Synthetic oligonucleotide
attagatatcgcagataaatatctactatactatatacgagatgtccagtctcgagatgt

SEQ ID NO: 336506 - DNA, 60 bp, Artificial
  Synthetic oligonucleotide
attagatctaaaactgtccaccctatctacttaggctcgatgcactatgatatcacttac

SEQ ID NO: 336507 - DNA, 56 bp, Artificial
  Synthetic oligonucleotide
attagatggaccataccaaccaacttcatttaatccaccagtaggttattggatgt

SEQ ID NO: 336508 - DNA, 59 bp, Artificial
  Synthetic oligonucleotide
attagatgtttatcaaatattacagggctgctattaacaagagatggtggtgatacccc

SEQ ID NO: 336509 - DNA, 56 bp, Artificial
  Synthetic oligonucleotide
attagattacccgtgtgacaaacttccaagtgtgttagctcgaggagatccgaggt

SEQ ID NO: 336510 - DNA, 55 bp, Artificial
  Synthetic oligonucleotide
attagattaggagtcagcttcatagacttaacagaaccatggctagaaggttggg

SEQ ID NO: 336511 - DNA, 60 bp, Artificial
  Synthetic oligonucleotide
attagattcattgaagattttgtgcaattcattctggagcatcatgaaaggttcaattta

SEQ ID NO: 336512 - DNA, 56 bp, Artificial
  Synthetic oligonucleotide
attagcaaaaatccaaattgaatcgatgaaaccaattatgcaagattttagtaatt

SEQ ID NO: 336513 - DNA, 60 bp, Artificial
  Synthetic oligonucleotide
attagcaaacaatcgatcacgagtccaatgagtttggatccccatcaatacagagtccac

SEQ ID NO: 336514 - DNA, 51 bp, Artificial
  Synthetic oligonucleotide
attagcaacgtatcaaatgtgtgcaagaggtgtcccaagatagaggtagtt

SEQ ID NO: 336515 - DNA, 57 bp, Artificial
  Synthetic oligonucleotide
attagcaagaacgccctgttagtttattattgttggatgtcggatactgtatccaaa

SEQ ID NO: 336516 - DNA, 58 bp, Artificial
  Synthetic oligonucleotide
attagcaagaagagtgtccgagcaaaagtcaagagatttgaaggctcggtacaattgt

SEQ ID NO: 336517 - DNA, 55 bp, Artificial
  Synthetic oligonucleotide
attagcaatgctaacattgttgctggacaggatgcaacttcaatgatattagccg

SEQ ID NO: 336518 - DNA, 55 bp, Artificial
  Synthetic oligonucleotide
attagcacgtgcgtacaggccgacagaatctgtgtaggatacttaagcaccaact

SEQ ID NO: 336519 - DNA, 58 bp, Artificial
  Synthetic oligonucleotide
attagcagtactctggtgtgttcatagcagaattgacattcaggatacacagcaggca

SEQ ID NO: 336520 - DNA, 60 bp, Artificial
  Synthetic oligonucleotide
attagcatggagctgtaggagtctaaattggggacgcagatgtttgggacgtcgccttgc

SEQ ID NO: 336521 - DNA, 60 bp, Artificial
  Synthetic oligonucleotide
attagcccattgtcaggaagtgctcagcatatagaggaatgttcctgttacccccgatac

SEQ ID NO: 336522 - DNA, 60 bp, Artificial
  Synthetic oligonucleotide
attagcgaatgttgtgaggaaaatgatgactaactcacaagatacagagctctcttttac

SEQ ID NO: 336523 - DNA, 60 bp, Artificial
  Synthetic oligonucleotide
attagcgaggagcatttgtgaaaaacttgagcaatctggactcccagtcgggggcaatga

SEQ ID NO: 336524 - DNA, 60 bp, Artificial
  Synthetic oligonucleotide
attagcgatagtaaacacaataatatatccagcatttggaatgcaacgaatgcattatag

SEQ ID NO: 336525 - DNA, 60 bp, Artificial
  Synthetic oligonucleotide
attagcgatctccttgctagtgtagatagtgaagaagtgcgccaatactgcagggatcaa

SEQ ID NO: 336526 - DNA, 57 bp, Artificial
  Synthetic oligonucleotide
attagcgatgtatatgcctgcgaatcatctgaacgagctaatgcactggctagacga

SEQ ID NO: 336527 - DNA, 60 bp, Artificial
  Synthetic oligonucleotide
attagcgcaattgctagcgtttgtggcagtgcttgtgcaaccgccaacattcaaagggtt

SEQ ID NO: 336528 - DNA, 57 bp, Artificial
  Synthetic oligonucleotide
attagcgggtctccgcggggctgcaagacgccccactaatttggcacaggtaaagca

SEQ ID NO: 336529 - DNA, 60 bp, Artificial
  Synthetic oligonucleotide
attagcgtgcgccgcctggttatataatggttgcgtccagacgtacttgtctgaggattc

SEQ ID NO: 336530 - DNA, 60 bp, Artificial
  Synthetic oligonucleotide
attagctaaaccagagcaggatgagtggacgaatcacgacgttacacagataccaggcag

SEQ ID NO: 336531 - DNA, 55 bp, Artificial
  Synthetic oligonucleotide
attagctaccgtagattttagtaataattgtagaggtagtaatcaggtatttgtg

SEQ ID NO: 336532 - DNA, 58 bp, Artificial
  Synthetic oligonucleotide
attagctattcgcaaaaacttggcaatcatgggagaacgatgcccatctttctaaaaa

SEQ ID NO: 336533 - DNA, 60 bp, Artificial
  Synthetic oligonucleotide
attagctattcttctagttctcaagttttttgcaaatatccttcatacaagcaatcaaga

SEQ ID NO: 336534 - DNA, 55 bp, Artificial
  Synthetic oligonucleotide
attagctcgaaggtcgtcggccttgtgaaccccaacgggatcactcaggttcgtc

SEQ ID NO: 336535 - DNA, 56 bp, Artificial
  Synthetic oligonucleotide
attagctgatagaattactataacacaactctatcagcttgtaaactactatttta

SEQ ID NO: 336536 - DNA, 50 bp, Artificial
  Synthetic oligonucleotide
attagctggttcgtcaggaagggtcgggccaaccggtccgttctccggct

SEQ ID NO: 336537 - DNA, 57 bp, Artificial
  Synthetic oligonucleotide
attagctgttcatcaaatattacagggatactattaacacgagatggtggtgggaat

SEQ ID NO: 336538 - DNA, 57 bp, Artificial
  Synthetic oligonucleotide
attaggaaattctatgcatgggttttggaccaagccccatacaacgaactagcacga

SEQ ID NO: 336539 - DNA, 60 bp, Artificial
  Synthetic oligonucleotide
attaggaaatttctggaggagcaaccccttgcaagagcatacacgcactgcagggccgac

SEQ ID NO: 336540 - DNA, 60 bp, Artificial
  Synthetic oligonucleotide
attaggaacccagcaaaacaaaaatatgcaactatcatgcatccctgggatgtcagacgg

SEQ ID NO: 336541 - DNA, 60 bp, Artificial
  Synthetic oligonucleotide
attaggagcgtgccaatcggaagagctttactgctcccagagtactcaacattgtaccgc

SEQ ID NO: 336542 - DNA, 55 bp, Artificial
  Synthetic oligonucleotide
attaggagtaggagcactgataatagcgttgatcatagcaatagttgtgtggatc

SEQ ID NO: 336543 - DNA, 60 bp, Artificial
  Synthetic oligonucleotide
attaggatttacatgaggatgaagcacgtcagagcatggatacctcgcccaatgcgtaac

SEQ ID NO: 336544 - DNA, 59 bp, Artificial
  Synthetic oligonucleotide
attaggatttatcaagcccttgatcgccgctcatcgtgacacatatggaacgatcagct

SEQ ID NO: 336545 - DNA, 57 bp, Artificial
  Synthetic oligonucleotide
attaggcacgttgtttcagggcagggcgtatggtgggagcatatggtgcggggtcaa

SEQ ID NO: 336546 - DNA, 50 bp, Artificial
  Synthetic oligonucleotide
attaggcatgactgcaacatcagcagacaagtctgttcctaagttgaaac

SEQ ID NO: 336547 - DNA, 52 bp, Artificial
  Synthetic oligonucleotide
attaggcctacatgttaagttaaagttctgaaacggagttttagcggagttc

SEQ ID NO: 336548 - DNA, 55 bp, Artificial
  Synthetic oligonucleotide
attaggcctatgccggtgtattctgttccaggtttaagaaggatttaatatccca

SEQ ID NO: 336549 - DNA, 55 bp, Artificial
  Synthetic oligonucleotide
attaggcgtccagagacaactgggcgtctttgcattgatatgagtgtataaccta

SEQ ID NO: 336550 - DNA, 60 bp, Artificial
  Synthetic oligonucleotide
attaggcgtttcactcatatgtcttggtagtaagttgcaataagcactagcgccataaag

SEQ ID NO: 336551 - DNA, 57 bp, Artificial
  Synthetic oligonucleotide
attaggctaattggctaaccctgtcacgtatctggacgtgacaacgcgtgacagggg

SEQ ID NO: 336552 - DNA, 60 bp, Artificial
  Synthetic oligonucleotide
attaggctccgggatgtacgacatagctgaagatggatggagttcggtagaccaccgcta

SEQ ID NO: 336553 - DNA, 60 bp, Artificial
  Synthetic oligonucleotide
attagggaagatctggatggatgataacatcaagctgaagaaccacactaacagcgttat

SEQ ID NO: 336554 - DNA, 58 bp, Artificial
  Synthetic oligonucleotide
attagggacaaatatataaacctacatgatagcagagccctagaaaaagaacctgata

SEQ ID NO: 336555 - DNA, 57 bp, Artificial
  Synthetic oligonucleotide
attagggacagagcagaagacagtggcaatgagagtgagggagacattgaggaattg

SEQ ID NO: 336556 - DNA, 60 bp, Artificial
  Synthetic oligonucleotide
attagggccaaggatgagcacacgagtaaggatgtcatatgttgacaggattgattcgat

SEQ ID NO: 336557 - DNA, 60 bp, Artificial
  Synthetic oligonucleotide
attagggcgaagaattatgtcgaagcgaccagcagatatcataatttcaactccaggctc

SEQ ID NO: 336558 - DNA, 60 bp, Artificial
  Synthetic oligonucleotide
attagggttcgtgtgccattccctatagataaaaacatctcggctgatttcatcatatgt

SEQ ID NO: 336559 - DNA, 57 bp, Artificial
  Synthetic oligonucleotide
attaggtaaatacgcttcgtcaattatatcagaggttccaactctcgacgttatgat

SEQ ID NO: 336560 - DNA, 55 bp, Artificial
  Synthetic oligonucleotide
attaggtcaaggtcctggagttcgtgtgggcgccactcctacagtggtccgcccc

SEQ ID NO: 336561 - DNA, 60 bp, Artificial
  Synthetic oligonucleotide
attaggtccagctcgcggacgcgtatgacatgcagttgcaaccactcatagctctgctca

SEQ ID NO: 336562 - DNA, 59 bp, Artificial
  Synthetic oligonucleotide
attaggtctgagttcgctacacgcatagttctgtactgtagtcgctgggatattaaaac

SEQ ID NO: 336563 - DNA, 51 bp, Artificial
  Synthetic oligonucleotide
attagtaaacgagtttcccgaaaccgttcacggttttaggtgtatgctagc

SEQ ID NO: 336564 - DNA, 52 bp, Artificial
  Synthetic oligonucleotide
attagtaaattttaattggcttaaccctaccgcatgtaccgaacttgacaaa

SEQ ID NO: 336565 - DNA, 54 bp, Artificial
  Synthetic oligonucleotide
attagtaactcgcgatgacgtattattcgcaacgttctgttgtggaaaaaccct

SEQ ID NO: 336566 - DNA, 51 bp, Artificial
  Synthetic oligonucleotide
attagtaattacacagacacaatatacaggctgcttgaagactcgcaaacc

SEQ ID NO: 336567 - DNA, 55 bp, Artificial
  Synthetic oligonucleotide
attagtacacccacagccgggacccatagttatgaggaaatccccatggacactt

SEQ ID NO: 336568 - DNA, 60 bp, Artificial
  Synthetic oligonucleotide
attagtacatgagattgatgatagactatatacggcgatgattgatcgtattttaataaa

SEQ ID NO: 336569 - DNA, 60 bp, Artificial
  Synthetic oligonucleotide
attagtactatggacatgcctttattgcgtaaatctgattacactcgctggatggatatg

SEQ ID NO: 336570 - DNA, 60 bp, Artificial
  Synthetic oligonucleotide
attagtagatggccagacttgtgacattgtcaatggagcattggggagcccaggatgcga

SEQ ID NO: 336571 - DNA, 60 bp, Artificial
  Synthetic oligonucleotide
attagtagcgatgtgagtagtgttgacacgtctatttcattaggcgtggcgagtcatgcg

SEQ ID NO: 336572 - DNA, 60 bp, Artificial
  Synthetic oligonucleotide
attagtaggtgaattatgcatgataccgaagttcgcacctctaccccgatagctgagtag

SEQ ID NO: 336573 - DNA, 60 bp, Artificial
  Synthetic oligonucleotide
attagtatatatgtgcctcctccaggtacaagtgctgatcactactcccaatcgcagttg

SEQ ID NO: 336574 - DNA, 60 bp, Artificial
  Synthetic oligonucleotide
attagtatattactgttggatgtcagatgctgtgtctaaggcgtccagctttgtatcgtt

SEQ ID NO: 336575 - DNA, 52 bp, Artificial
  Synthetic oligonucleotide
attagtatcaatcgatagtgctacaggctcacttaagcctgcggttataggt

SEQ ID NO: 336576 - DNA, 55 bp, Artificial
  Synthetic oligonucleotide
attagtcatgacaccagcagacaagggtgctaccttcacagatgtagattggagc

SEQ ID NO: 336577 - DNA, 57 bp, Artificial
  Synthetic oligonucleotide
attagtccactacatttcatccgttattgagtacctcctgtttgacgtaggtctagc

SEQ ID NO: 336578 - DNA, 52 bp, Artificial
  Synthetic oligonucleotide
attagtcccggaattgtgcattaccagtttaccgccggggttccgggctcag

SEQ ID NO: 336579 - DNA, 60 bp, Artificial
  Synthetic oligonucleotide
attagtcggtattattactctcgtagacatatcgcgggtgtcgtgtctatatgtatcagc

SEQ ID NO: 336580 - DNA, 50 bp, Artificial
  Synthetic oligonucleotide
attagtcttcatggacactggcagatcagtcctttcaatcccccagaacc

SEQ ID NO: 336581 - DNA, 60 bp, Artificial
  Synthetic oligonucleotide
attagtgaagtctaaatcaggcgatttggctatgatacataggtgcgaatggggtgagcg

SEQ ID NO: 336582 - DNA, 60 bp, Artificial
  Synthetic oligonucleotide
attagtgagataccacgcttgtggaccttatgctcacacagccatcctctagtaagtttg

SEQ ID NO: 336583 - DNA, 60 bp, Artificial
  Synthetic oligonucleotide
attagtgataagctagatgctgtaaggcaaattcttaatttcgcatttgtgcctagagct

SEQ ID NO: 336584 - DNA, 60 bp, Artificial
  Synthetic oligonucleotide
attagtgatagtcacttattggggactaacaacaggagaacagccttggcatctaggaca

SEQ ID NO: 336585 - DNA, 60 bp, Artificial
  Synthetic oligonucleotide
attagtgcaattgcaggactggtagtagcgctaatcttagcaatagcagtgtggacttta

SEQ ID NO: 336586 - DNA, 55 bp, Artificial
  Synthetic oligonucleotide
attagtgggatcggggatggcaaccgccatagcgaccggacgagcgatagagggc

SEQ ID NO: 336587 - DNA, 60 bp, Artificial
  Synthetic oligonucleotide
attagtggtccctttgtgtgagttccctgcaggacacagacaggtaggatccctgcaata

SEQ ID NO: 336588 - DNA, 54 bp, Artificial
  Synthetic oligonucleotide
attagtggttaaagcggtactgtcggatttatcccgcacgcataaactagactt

SEQ ID NO: 336589 - DNA, 55 bp, Artificial
  Synthetic oligonucleotide
attagtgtcaaattgtttaaaaacgaccttgtttctactgatggccatcaattag

SEQ ID NO: 336590 - DNA, 54 bp, Artificial
  Synthetic oligonucleotide
attagttaccttgggaccgcactacaagagacttctagcccttattctctggtg

SEQ ID NO: 336591 - DNA, 53 bp, Artificial
  Synthetic oligonucleotide
attagttaggtcaatgttgtataacccgattcctgttccgccccctcaacctc

SEQ ID NO: 336592 - DNA, 58 bp, Artificial
  Synthetic oligonucleotide
attagttcttaaacgcactatattagtattcaatgatactaaatcattactagattaa

SEQ ID NO: 336593 - DNA, 60 bp, Artificial
  Synthetic oligonucleotide
attagttgagaagcattcaccaatcaaaatatcaccatctgatctagtattgtattcaaa

SEQ ID NO: 336594 - DNA, 55 bp, Artificial
  Synthetic oligonucleotide
attagttgaggcaagagttgaacaaagtcgtgagttcccatatgtgcaacaagct

SEQ ID NO: 336595 - DNA, 60 bp, Artificial
  Synthetic oligonucleotide
attagttgatggcctatcacctaggagcgccagggcttacgccatggggctctaggatgg

SEQ ID NO: 336596 - DNA, 59 bp, Artificial
  Synthetic oligonucleotide
attagttggtagttctgctgttagtggcactgtagttagagttagtcttaacatgacaa

SEQ ID NO: 336597 - DNA, 53 bp, Artificial
  Synthetic oligonucleotide
attagttggtctccctcactcccgacttacgtggtacctccgggtgactatac

SEQ ID NO: 336598 - DNA, 57 bp, Artificial
  Synthetic oligonucleotide
attagttgtgcctattagcccattagattacgaccaaggagcgacgccagtaatccc

SEQ ID NO: 336599 - DNA, 60 bp, Artificial
  Synthetic oligonucleotide
attagttgttgggatggtacgaccttcgtatctgctactcagaagctggaacatggcaag

SEQ ID NO: 336600 - DNA, 60 bp, Artificial
  Synthetic oligonucleotide
attagtttctggatcattaccagtaccggcaggattgccaacactatctggtacacctga

SEQ ID NO: 336601 - DNA, 54 bp, Artificial
  Synthetic oligonucleotide
attagtttgtaccgatttgggataagaagggtgggcactaagctttgattttgc

SEQ ID NO: 336602 - DNA, 60 bp, Artificial
  Synthetic oligonucleotide
attagtttgtgatacagaatcacctgggtctaatgatgcttccggtagttgatgtaaatg

SEQ ID NO: 336603 - DNA, 49 bp, Artificial
  Synthetic oligonucleotide
attagttttaatttcgagcggcgtttatacttttgggaacaaattttta

SEQ ID NO: 336604 - DNA, 51 bp, Artificial
  Synthetic oligonucleotide
attataacacatgtacgtatgtgcgtcaagctctattgcagcgcaccgttg

SEQ ID NO: 336605 - DNA, 60 bp, Artificial
  Synthetic oligonucleotide
attataacatatgacagacaaccaccatttatattagataagcttacatatccactatgt

SEQ ID NO: 336606 - DNA, 60 bp, Artificial
  Synthetic oligonucleotide
attataacatcagatgctccagttcacaattgcgacacaaggtgtcaaacccctcatggg

SEQ ID NO: 336607 - DNA, 60 bp, Artificial
  Synthetic oligonucleotide
attataacattcgaacgcttcgcgtcgaggaggctctctggttacgtgagtgtcagacga

SEQ ID NO: 336608 - DNA, 51 bp, Artificial
  Synthetic oligonucleotide
attataacccaccacataatgtaactttagagaatagggaatatcctcccg

SEQ ID NO: 336609 - DNA, 60 bp, Artificial
  Synthetic oligonucleotide
attataacctcatagtgatggatgaagcacatttcactgacccttgtagtgtcgcggcta

SEQ ID NO: 336610 - DNA, 60 bp, Artificial
  Synthetic oligonucleotide
attataagaaggctatgaacattaatattcggaatatcaatgtcaagacattgtggaagg

SEQ ID NO: 336611 - DNA, 58 bp, Artificial
  Synthetic oligonucleotide
attataaggggatatactatatgcatgggtgttgtaaacagtactatgtggactttaa

SEQ ID NO: 336612 - DNA, 58 bp, Artificial
  Synthetic oligonucleotide
attataatgacccgtcccctagctcttaccaatggcggcaatactaatggaggcaata

SEQ ID NO: 336613 - DNA, 56 bp, Artificial
  Synthetic oligonucleotide
attataattcaaactggtctttggtcttccgctacaactgccgaaactcaattgta

SEQ ID NO: 336614 - DNA, 57 bp, Artificial
  Synthetic oligonucleotide
attatacactatcaagtatatgaaagctgcaaagcttcatataacaagatatatgtg

SEQ ID NO: 336615 - DNA, 55 bp, Artificial
  Synthetic oligonucleotide
attataccagggagaagaggcgggaatgaagccggtagatcctaacctagagccc

SEQ ID NO: 336616 - DNA, 55 bp, Artificial
  Synthetic oligonucleotide
attataccctgacacctgcgggcctcgaaatacatgttgtctccgccgggcttga

SEQ ID NO: 336617 - DNA, 60 bp, Artificial
  Synthetic oligonucleotide
attatacgtacaaagagaatctttatgcgagcgtggtatgcatatagagaatcttgacag

SEQ ID NO: 336618 - DNA, 60 bp, Artificial
  Synthetic oligonucleotide
attatactctgaatacctatcgctcacagtgaagatccattacatggacgagatcttagt

SEQ ID NO: 336619 - DNA, 56 bp, Artificial
  Synthetic oligonucleotide
attatactctgacacctctgtaactcaccacccctcgtgagcgtgcctaattcatc

SEQ ID NO: 336620 - DNA, 60 bp, Artificial
  Synthetic oligonucleotide
attatacttacttccaatattcatgtttggatgtggtatagatttgaaagctacgatgcc

SEQ ID NO: 336621 - DNA, 56 bp, Artificial
  Synthetic oligonucleotide
attatagaaacagtactaagaatttgtagagctatcctccacatacctagaagaat

SEQ ID NO: 336622 - DNA, 55 bp, Artificial
  Synthetic oligonucleotide
attatagaaagtctcctgtcatgcaagggtggtctccattgaagccaggtgatgg

SEQ ID NO: 336623 - DNA, 60 bp, Artificial
  Synthetic oligonucleotide
attatagaagcaatacaaagaggtgttagagctatcctccacatacctagaagaataaga

SEQ ID NO: 336624 - DNA, 51 bp, Artificial
  Synthetic oligonucleotide
attatagaagcatcacaaagagctggtagagctattctcaacatacctaga

SEQ ID NO: 336625 - DNA, 55 bp, Artificial
  Synthetic oligonucleotide
attatagaagtactacaaggaattggtagggctatctaccaaatacccagaagaa

SEQ ID NO: 336626 - DNA, 57 bp, Artificial
  Synthetic oligonucleotide
attatagaagtagcacaaagaatttttagaggtatcctccacatacctacaagagta

SEQ ID NO: 336627 - DNA, 60 bp, Artificial
  Synthetic oligonucleotide
attatagaagtagcacaaagcattgggagaggcattctccacatacctacaaggataaga

SEQ ID NO: 336628 - DNA, 57 bp, Artificial
  Synthetic oligonucleotide
attatagaagtagtacaaagaatttgcagagcttttcgccacgtacctagaagaata

SEQ ID NO: 336629 - DNA, 56 bp, Artificial
  Synthetic oligonucleotide
attatagaattcatacaaagagttggtagagctatccgcaacacacctagaagaat

SEQ ID NO: 336630 - DNA, 58 bp, Artificial
  Synthetic oligonucleotide
attatagagttagtactaagaatttgtagagctatccgcaatatacctactagaataa

SEQ ID NO: 336631 - DNA, 57 bp, Artificial
  Synthetic oligonucleotide
attatagcgaaattccaacatcaacctatggtgttttaggagttcctaatgcacctg

SEQ ID NO: 336632 - DNA, 55 bp, Artificial
  Synthetic oligonucleotide
attatagctagagggttcaacaccatgccctctcaaccaccagctgtttgcaggg

SEQ ID NO: 336633 - DNA, 59 bp, Artificial
  Synthetic oligonucleotide
attataggatccggtggtgctgccgtctatgctcgggtctaccgtgggccctcaatgga

SEQ ID NO: 336634 - DNA, 56 bp, Artificial
  Synthetic oligonucleotide
attatagtcgcggtttagtttgtcaggcactctggaaaccgtatagtcaccgttga

SEQ ID NO: 336635 - DNA, 58 bp, Artificial
  Synthetic oligonucleotide
attatagtttatctcttgctgtctatatcgaaacaaggcatattcttatttttttcga

SEQ ID NO: 336636 - DNA, 53 bp, Artificial
  Synthetic oligonucleotide
attatataacagaactatcagaaacagacaaactacactggcacccaaaatac

SEQ ID NO: 336637 - DNA, 58 bp, Artificial
  Synthetic oligonucleotide
attatatacgtattgattttgttgatttgcctttcaagtacactgtatccgacccgca

SEQ ID NO: 336638 - DNA, 60 bp, Artificial
  Synthetic oligonucleotide
attatatacttggaatgtctgtccatttggtatagctaacgctccatgtgcatttcaaag

SEQ ID NO: 336639 - DNA, 54 bp, Artificial
  Synthetic oligonucleotide
attatatagttgtctctaaagggcattattgtaatatgtggaactttaattcga

SEQ ID NO: 336640 - DNA, 54 bp, Artificial
  Synthetic oligonucleotide
attatatcgagtaactaaaaagagtgatgttataaatttagattcaaacggtaa

SEQ ID NO: 336641 - DNA, 57 bp, Artificial
  Synthetic oligonucleotide
attatatctaaaaggccgcgcagcggaatcaacaccaaaataagaatcggcccactc

SEQ ID NO: 336642 - DNA, 60 bp, Artificial
  Synthetic oligonucleotide
attatatctgtcaaccctgttacattcaacaagtgtgtagaaataagcatttgttcattc

SEQ ID NO: 336643 - DNA, 60 bp, Artificial
  Synthetic oligonucleotide
attatattatgagggattaaatgcggatgggccatttatggatgaatctactgacgagaa

SEQ ID NO: 336644 - DNA, 60 bp, Artificial
  Synthetic oligonucleotide
attatattggtttagcgatcttgctacatactcgcatgaagtatgagcagttgggtagga

SEQ ID NO: 336645 - DNA, 58 bp, Artificial
  Synthetic oligonucleotide
attatatttgcacaaagaataattatagaggatagttcggttcaagaattatcttcac

SEQ ID NO: 336646 - DNA, 52 bp, Artificial
  Synthetic oligonucleotide
attatcaaatgaatctcgattaaatggactgacataaacctgttgttgtggc

SEQ ID NO: 336647 - DNA, 59 bp, Artificial
  Synthetic oligonucleotide
attatcaactaagtccatcgggatttgagcgtgttgcgtgtgctaacaaccttcgcgtc

SEQ ID NO: 336648 - DNA, 55 bp, Artificial
  Synthetic oligonucleotide
attatcagaaggagccacccctggagatttaaatatgatgctgaacatagtgggg

SEQ ID NO: 336649 - DNA, 60 bp, Artificial
  Synthetic oligonucleotide
attatcagagccaagaaacattcagcaaaagctccctccagaaattgtcacattacatcc

SEQ ID NO: 336650 - DNA, 58 bp, Artificial
  Synthetic oligonucleotide
attatcagcacttgtggagatggggcatgatgctccttggaatgttaatgatgatctg

SEQ ID NO: 336651 - DNA, 60 bp, Artificial
  Synthetic oligonucleotide
attatcagcagacagatgaggcgaataaatggatttcaatgggagattcatgcacaatta

SEQ ID NO: 336652 - DNA, 50 bp, Artificial
  Synthetic oligonucleotide
attatcagggactatggaggaagacaggaactggatagtagtccccacct

SEQ ID NO: 336653 - DNA, 55 bp, Artificial
  Synthetic oligonucleotide
attatccaaccctcggcctgttgtgttagagccggtgtcttcagggataggtagg

SEQ ID NO: 336654 - DNA, 60 bp, Artificial
  Synthetic oligonucleotide
attatccaagttcagtcacgactgagataactgaccccgactggacgaacacactgtcac

SEQ ID NO: 336655 - DNA, 60 bp, Artificial
  Synthetic oligonucleotide
attatccaggggctcggaggttgtcttggatgcatgcgattcaagctgtgaagtaatgat

SEQ ID NO: 336656 - DNA, 57 bp, Artificial
  Synthetic oligonucleotide
attatccatctatattacatccaattgatcatgcatttaacgaatacttcttacagc

SEQ ID NO: 336657 - DNA, 58 bp, Artificial
  Synthetic oligonucleotide
attatccatgtgataaattaccgagtgttctagcgcgtggggatccaagattggcggg

SEQ ID NO: 336658 - DNA, 60 bp, Artificial
  Synthetic oligonucleotide
attatcccatgctcttcctttaatctgtgagcgtgacgctatgtacggccatccctcccc

SEQ ID NO: 336659 - DNA, 55 bp, Artificial
  Synthetic oligonucleotide
attatccggaacacctagttaatcattacttccaaaccagacattatttacacac

SEQ ID NO: 336660 - DNA, 55 bp, Artificial
  Synthetic oligonucleotide
attatcctatagtgcaaaatgcacacgggcaaatggtacaccaacccctatcacc

SEQ ID NO: 336661 - DNA, 55 bp, Artificial
  Synthetic oligonucleotide
attatcctatagtgcaaaatttacaggggcaaatggtacaccagcccttaacacc

SEQ ID NO: 336662 - DNA, 58 bp, Artificial
  Synthetic oligonucleotide
attatcctcaaggccctatatatgctttctacccgggggcggcagactgtcaaggaca

SEQ ID NO: 336663 - DNA, 55 bp, Artificial
  Synthetic oligonucleotide
attatcgaaccgtgtggtgatacagtgtgcagactggatacttatttgtgcaggc

SEQ ID NO: 336664 - DNA, 60 bp, Artificial
  Synthetic oligonucleotide
attatcgacacttgtggatgtggggcaccatgctccttggaatattaatgatctgtagtg

SEQ ID NO: 336665 - DNA, 53 bp, Artificial
  Synthetic oligonucleotide
attatcgagcacggcgatacaagtttgcgaggtccgcactgtctatgtacggc

SEQ ID NO: 336666 - DNA, 50 bp, Artificial
  Synthetic oligonucleotide
attatcgccacaactcttgagcataggtttaaagatataccagatgaaca

SEQ ID NO: 336667 - DNA, 57 bp, Artificial
  Synthetic oligonucleotide
attatcgccgacctgtagtattgggctgggtactagccgtgtatatagcgggagttc

SEQ ID NO: 336668 - DNA, 57 bp, Artificial
  Synthetic oligonucleotide
attatcggctgaatcatcgacaggacctaagctactctcccggttggtcgagggaac

SEQ ID NO: 336669 - DNA, 59 bp, Artificial
  Synthetic oligonucleotide
attatcgggcataggaagctgaagagaacgattaaggatggagggtacagagataggaa

SEQ ID NO: 336670 - DNA, 58 bp, Artificial
  Synthetic oligonucleotide
attatcggggtagactgtgtaatcctctgaacccatttgtcagccacaaggaaattga

SEQ ID NO: 336671 - DNA, 58 bp, Artificial
  Synthetic oligonucleotide
attatcgtatttacgtatcaatcggttcttttggataggctgatggtagttgcctgac

SEQ ID NO: 336672 - DNA, 55 bp, Artificial
  Synthetic oligonucleotide
attatctaagggttacgagtagaccggaggatatgatcacacctaaaagggcgag

SEQ ID NO: 336673 - DNA, 57 bp, Artificial
  Synthetic oligonucleotide
attatctccaccacagtcccgaatacagggacgagaacgtagccagaatcttaaggc

SEQ ID NO: 336674 - DNA, 55 bp, Artificial
  Synthetic oligonucleotide
attatctctctggtcattagcttatatttcaccgttctccctgctttcgctgcct

SEQ ID NO: 336675 - DNA, 56 bp, Artificial
  Synthetic oligonucleotide
attatgaacacaccatccaggtttaaaatacgggttgctaggagattgtcttatgg

SEQ ID NO: 336676 - DNA, 54 bp, Artificial
  Synthetic oligonucleotide
attatgaacatagcgacgtgtttaccaacgggggaatatatagcaccgaatcca

SEQ ID NO: 336677 - DNA, 59 bp, Artificial
  Synthetic oligonucleotide
attatgaagacatactgacacgccggggtttacgtaaagctgacaagccatgtccatta

SEQ ID NO: 336678 - DNA, 60 bp, Artificial
  Synthetic oligonucleotide
attatgaagcgcgaatctggattgaggcgtgtctgcaggctgtacgccccagtggtgtgg

SEQ ID NO: 336679 - DNA, 60 bp, Artificial
  Synthetic oligonucleotide
attatgacacacttcagtgacctggctgaagcgtatattgagatgaggaatagggagcga

SEQ ID NO: 336680 - DNA, 52 bp, Artificial
  Synthetic oligonucleotide
attatgaggcggaaccttacggctgcacgtcaaaatattccgagagctaata

SEQ ID NO: 336681 - DNA, 58 bp, Artificial
  Synthetic oligonucleotide
attatgagtaacacctgggataaattccggaaaacgtgtgcgataggatttgacatga

SEQ ID NO: 336682 - DNA, 60 bp, Artificial
  Synthetic oligonucleotide
attatgatatatcctacgctaccttgaagagtaacgcacagcggatagtttatgatgatg

SEQ ID NO: 336683 - DNA, 55 bp, Artificial
  Synthetic oligonucleotide
attatgatgaagctagcggaaactatcgttttatgtcagtgggaagtcgtacgca

SEQ ID NO: 336684 - DNA, 54 bp, Artificial
  Synthetic oligonucleotide
attatgatgctgctctcatcatgtacaaggtcatactgtatgtgtccggagttg

SEQ ID NO: 336685 - DNA, 60 bp, Artificial
  Synthetic oligonucleotide
attatgattcatccacgtcagtgataaatgttaatgcgctcgttagacaagttgtatatc

SEQ ID NO: 336686 - DNA, 60 bp, Artificial
  Synthetic oligonucleotide
attatgcaaggttcctctcacagctgatgtattagcccatatacatgtaatggatccagc

SEQ ID NO: 336687 - DNA, 52 bp, Artificial
  Synthetic oligonucleotide
attatgcaatctgtagccaccgtggtagcagttgtgtccctcgtttacgtca

SEQ ID NO: 336688 - DNA, 60 bp, Artificial
  Synthetic oligonucleotide
attatgcaattcagcaaaccactcattcatgaaccaaccgatccaatatggaacgacgtt

SEQ ID NO: 336689 - DNA, 57 bp, Artificial
  Synthetic oligonucleotide
attatgcacactggtcaggaagtatcaagttgacatttacattctgcgggtcagcaa

SEQ ID NO: 336690 - DNA, 52 bp, Artificial
  Synthetic oligonucleotide
attatgcacagacattagccacattatttgaaacaaaagggtttccaaaagg

SEQ ID NO: 336691 - DNA, 58 bp, Artificial
  Synthetic oligonucleotide
attatgccatcgtcgggcgtgagacgggagcgcaggggaccccacatctgcaagggta

SEQ ID NO: 336692 - DNA, 54 bp, Artificial
  Synthetic oligonucleotide
attatgcccagtaccgggttgcccgtgccacaatccgttaccgcccgctggtcc

SEQ ID NO: 336693 - DNA, 60 bp, Artificial
  Synthetic oligonucleotide
attatgccgaagcgttcaatagatacagtgacgtcgttgccaatgtctataacacgccgg

SEQ ID NO: 336694 - DNA, 55 bp, Artificial
  Synthetic oligonucleotide
attatgccgttgacaatacgttaagtgttagtgcttacaggacttcggtccgtgg

SEQ ID NO: 336695 - DNA, 60 bp, Artificial
  Synthetic oligonucleotide
attatgccttcattagctgatggagttcatatgatcataggcatgaattttattagaact

SEQ ID NO: 336696 - DNA, 59 bp, Artificial
  Synthetic oligonucleotide
attatgcgaaacaggaatgtgttaccgtgtcaggttgggattaatccttatggcatgga

SEQ ID NO: 336697 - DNA, 57 bp, Artificial
  Synthetic oligonucleotide
attatgcgaaatttgaatggcgtatatgtcccgacagggacaaccgttggaagtgct

SEQ ID NO: 336698 - DNA, 60 bp, Artificial
  Synthetic oligonucleotide
attatgcgaacacaagagtccgaatgcgtgtgtcaggatgaattttgttatactctgata

SEQ ID NO: 336699 - DNA, 60 bp, Artificial
  Synthetic oligonucleotide
attatgcgcaaggtggattgcgagaagagttcgcagatcatagatatatttgcaagcgag

SEQ ID NO: 336700 - DNA, 60 bp, Artificial
  Synthetic oligonucleotide
attatgctgctccaggaggggcaaatcaaagagtatctcaagattggatgcttcctctaa

SEQ ID NO: 336701 - DNA, 55 bp, Artificial
  Synthetic oligonucleotide
attatgcttcccgagaatggaccagcaagcattccggacgacataacagagaggc

SEQ ID NO: 336702 - DNA, 59 bp, Artificial
  Synthetic oligonucleotide
attatggaagagtgtggtatgccccagtggctaattagactgtaccatctggtacggtc

SEQ ID NO: 336703 - DNA, 59 bp, Artificial
  Synthetic oligonucleotide
attatggacctacagtgtttagtgagttactagatttgtctcaccataataagacatct

SEQ ID NO: 336704 - DNA, 55 bp, Artificial
  Synthetic oligonucleotide
attatggactcctaatgaacgagcccacattgtcttccccgttcgactatcaccc

SEQ ID NO: 336705 - DNA, 51 bp, Artificial
  Synthetic oligonucleotide
attatggaggcagctcccgccttattacagttggccacccttattatactg

SEQ ID NO: 336706 - DNA, 60 bp, Artificial
  Synthetic oligonucleotide
attatggattcatgtatcgagatccggagactgatgaagtgtcaatgcggtcatgggtat

SEQ ID NO: 336707 - DNA, 50 bp, Artificial
  Synthetic oligonucleotide
attatggcactatttgctctttcagttgtatggctacttatgctagatgc

SEQ ID NO: 336708 - DNA, 58 bp, Artificial
  Synthetic oligonucleotide
attatggcagtggcctgaagttaccagatggtatcatgtttaacgtagtcaaatacac

SEQ ID NO: 336709 - DNA, 57 bp, Artificial
  Synthetic oligonucleotide
attatggctctatcacataactcagtcctagacactcctaaattcaagtgtcgttgt

SEQ ID NO: 336710 - DNA, 50 bp, Artificial
  Synthetic oligonucleotide
attatgggtattacagatgatattatggggatgtctcatatgggaaatgg

SEQ ID NO: 336711 - DNA, 51 bp, Artificial
  Synthetic oligonucleotide
attatggtcacttgctctgcgtgttctgacatgtcagtacgcatgcttcgg

SEQ ID NO: 336712 - DNA, 55 bp, Artificial
  Synthetic oligonucleotide
attatggttgtcaccaccctagaagcactaggctttcgaattactgaccgttact

SEQ ID NO: 336713 - DNA, 60 bp, Artificial
  Synthetic oligonucleotide
attatgtacccatgtctgggctgaggatccgggtgctccactcggcacagtggcgactca

SEQ ID NO: 336714 - DNA, 57 bp, Artificial
  Synthetic oligonucleotide
attatgtagactcctcaggggagccaaagcactaacagatatagtatccttaactga

SEQ ID NO: 336715 - DNA, 55 bp, Artificial
  Synthetic oligonucleotide
attatgtagactccttaggggaaccaaagcactaacagaagtaataccactaaca

SEQ ID NO: 336716 - DNA, 60 bp, Artificial
  Synthetic oligonucleotide
attatgtcaacttggaggcggtgtgccgccgcatagacttcctagtctatgctgagagcc

SEQ ID NO: 336717 - DNA, 55 bp, Artificial
  Synthetic oligonucleotide
attatgtcacctgatgtggcacaatggacgtaaggtgtatgaagatttctctagt

SEQ ID NO: 336718 - DNA, 60 bp, Artificial
  Synthetic oligonucleotide
attatgtcgaagcgaccaggagatatcataatttccacgcccgcatcaaaggtgcgacga

SEQ ID NO: 336719 - DNA, 55 bp, Artificial
  Synthetic oligonucleotide
attatgtggggaatgctactaataccactagtagtagcgaggaagcgatggagag

SEQ ID NO: 336720 - DNA, 55 bp, Artificial
  Synthetic oligonucleotide
attatgtgtaatagtatgtagcttaggtgcaaccttctatcgccatgacccctca

SEQ ID NO: 336721 - DNA, 60 bp, Artificial
  Synthetic oligonucleotide
attatgttagagctattacacgcgaggttatgactcggacgattcagaccaaacatacaa

SEQ ID NO: 336722 - DNA, 56 bp, Artificial
  Synthetic oligonucleotide
attatgtttgggacagccaattctgtaccctatggacatgtgggtatcgtttcggg

SEQ ID NO: 336723 - DNA, 58 bp, Artificial
  Synthetic oligonucleotide
attattaacaagagatggtggaaatagtgataggaatgatactaataagagtgaaacc

SEQ ID NO: 336724 - DNA, 53 bp, Artificial
  Synthetic oligonucleotide
attattaactcttctttcgaagctgcagtttgtcgctgcacttctacgttgga

SEQ ID NO: 336725 - DNA, 59 bp, Artificial
  Synthetic oligonucleotide
attattaagcagtagtcatagtgggagttttcaaatacaaagtgcattaaagctagcta

SEQ ID NO: 336726 - DNA, 60 bp, Artificial
  Synthetic oligonucleotide
attattaaggcaacttacaatcatatatatgacacaggccccactataggaattaatgta

SEQ ID NO: 336727 - DNA, 60 bp, Artificial
  Synthetic oligonucleotide
attattactgagtctacacctttgtctggcgaatctgcactagcagatcacgttattgtt

SEQ ID NO: 336728 - DNA, 58 bp, Artificial
  Synthetic oligonucleotide
attattagagtaatacaaggaacttgtagagctatccgcaacatacctagaagaataa

SEQ ID NO: 336729 - DNA, 59 bp, Artificial
  Synthetic oligonucleotide
attattaggagcaggtgaaggaggacgtgcagcaataggtggttcaaaatattgtcctc

SEQ ID NO: 336730 - DNA, 56 bp, Artificial
  Synthetic oligonucleotide
attattaggttaatcccggttgaagttggagcttatgcgaacagatttgggatgaa

SEQ ID NO: 336731 - DNA, 60 bp, Artificial
  Synthetic oligonucleotide
attattatcagcccaacactgatcacaatccccgtcacatacatgcatcaattccaggcc

SEQ ID NO: 336732 - DNA, 57 bp, Artificial
  Synthetic oligonucleotide
attattatgccaggcaacaaggtaaaacaaggctaggtttgtacacagtgcctccca

SEQ ID NO: 336733 - DNA, 59 bp, Artificial
  Synthetic oligonucleotide
attattatgggcttggtgtagctgaacatatgagtattgaatacgacgatataacgtta

SEQ ID NO: 336734 - DNA, 60 bp, Artificial
  Synthetic oligonucleotide
attattcaaccgcatgaaaatcgcctatggaaggacaccggcgtggacagccctcatgaa

SEQ ID NO: 336735 - DNA, 56 bp, Artificial
  Synthetic oligonucleotide
attattcagcctgttcggatcagctacgtcccaaatccttacaacccctggagacc

SEQ ID NO: 336736 - DNA, 50 bp, Artificial
  Synthetic oligonucleotide
attattcagtgaacaattcgcagtatgcagaaccatacatgatcatcccc

SEQ ID NO: 336737 - DNA, 55 bp, Artificial
  Synthetic oligonucleotide
attattccagggagaagagtcagggatggacccggtagatcctaacctagagcct

SEQ ID NO: 336738 - DNA, 55 bp, Artificial
  Synthetic oligonucleotide
attattcctctggtgccactgcgaactggaaacacgggagggactactttaccta

SEQ ID NO: 336739 - DNA, 56 bp, Artificial
  Synthetic oligonucleotide
attattcctgcagtgacactcctcattcttaagaccttaaaagttgtaacctattc

SEQ ID NO: 336740 - DNA, 54 bp, Artificial
  Synthetic oligonucleotide
attattcgaatacatttaaccaatttcgagggcgtttgcgtatcgctaggcggg

SEQ ID NO: 336741 - DNA, 59 bp, Artificial
  Synthetic oligonucleotide
attattcgcgcaagcacgtgttgggcgttatctcaatcagcgttagccaagacggtaag

SEQ ID NO: 336742 - DNA, 59 bp, Artificial
  Synthetic oligonucleotide
attattcgctatgagatggagcttaaatatacttctcgtgtgaattcttccggtcgtac

SEQ ID NO: 336743 - DNA, 50 bp, Artificial
  Synthetic oligonucleotide
attattcggatgccgaaagattctcctccattccacagcagagctaggtt

SEQ ID NO: 336744 - DNA, 52 bp, Artificial
  Synthetic oligonucleotide
attattcgtaattaaagacgccgaaaagggaaccaaagcattaactggtcta

SEQ ID NO: 336745 - DNA, 55 bp, Artificial
  Synthetic oligonucleotide
attattctggaagcgcatctttctgcatagactgtgacggaactggttttgaggt

SEQ ID NO: 336746 - DNA, 50 bp, Artificial
  Synthetic oligonucleotide
attattgaagtattacaaagaatttatagagttatcctcaacatacctgt

SEQ ID NO: 336747 - DNA, 59 bp, Artificial
  Synthetic oligonucleotide
attattgaagtctaggtgtccactgaggtaattatgtgggcctaaagcacgagcccaca

SEQ ID NO: 336748 - DNA, 60 bp, Artificial
  Synthetic oligonucleotide
attattgatcaatcagtcgcaaatggtgtacctgtgcacttatgtaacttgattcagttg

SEQ ID NO: 336749 - DNA, 53 bp, Artificial
  Synthetic oligonucleotide
attattgcaaatcaccatttgttcaagagctttaatggcagtctcgaagttaa

SEQ ID NO: 336750 - DNA, 60 bp, Artificial
  Synthetic oligonucleotide
attattgcatatgtgaaaagtgcccgtgtaattgcaacgtataatcatgagtacaagaca

SEQ ID NO: 336751 - DNA, 53 bp, Artificial
  Synthetic oligonucleotide
attattgcggacgtgaggagcgcgctaggcggtcgtagtgcgcaagcgatctc

SEQ ID NO: 336752 - DNA, 55 bp, Artificial
  Synthetic oligonucleotide
attattggaaccaacgcgcccattagcggagaacgtttgtagacaattgcaggga

SEQ ID NO: 336753 - DNA, 60 bp, Artificial
  Synthetic oligonucleotide
attattggctgtgcaccttgtataggggagcactgggatgctgccaaaccctgtgacgct

SEQ ID NO: 336754 - DNA, 53 bp, Artificial
  Synthetic oligonucleotide
attattggggggtgagtaagtacttttaaagtgatgatggttacaaaggcaaa

SEQ ID NO: 336755 - DNA, 60 bp, Artificial
  Synthetic oligonucleotide
attattgtctggtatagtgcaacagcaaaacaatttgctgagggccattgaggcgcaaca

SEQ ID NO: 336756 - DNA, 59 bp, Artificial
  Synthetic oligonucleotide
attattgtgagagcttcgtccttacctccgctgttaagtgctttagcgtatgcatcgtt

SEQ ID NO: 336757 - DNA, 59 bp, Artificial
  Synthetic oligonucleotide
attattgttcgacgaatgtttcatgagacatgcgggtttcgtttacgctgcggccactc

SEQ ID NO: 336758 - DNA, 51 bp, Artificial
  Synthetic oligonucleotide
attatttaacgaacccatacccgacaggattagaacattgtgacagtaacg

SEQ ID NO: 336759 - DNA, 54 bp, Artificial
  Synthetic oligonucleotide
attatttaactggattggacaaattggaatcccaggtaaataaagactgtcaag

SEQ ID NO: 336760 - DNA, 57 bp, Artificial
  Synthetic oligonucleotide
attatttaatgcagccagctcaaacttccaagtgggatgacccttggggagaggttc

SEQ ID NO: 336761 - DNA, 59 bp, Artificial
  Synthetic oligonucleotide
attatttctctcacagctacaaagacatctttcaattggtatcctactagtggaaacgc

SEQ ID NO: 336762 - DNA, 50 bp, Artificial
  Synthetic oligonucleotide
attatttgactttaattcaccggacttagaaaagctgattagaataccgt

SEQ ID NO: 336763 - DNA, 57 bp, Artificial
  Synthetic oligonucleotide
attatttgcagaagaggtgggagttaaaattagagtcttagatatgtagtagtagta

SEQ ID NO: 336764 - DNA, 59 bp, Artificial
  Synthetic oligonucleotide
attcaaaaagcgttacaacacaagtgacaattcaagaggcatgaattatgaaactccaa

SEQ ID NO: 336765 - DNA, 54 bp, Artificial
  Synthetic oligonucleotide
attcaaaaatccggtattcaacaaaaggcttccctgtgaattccatgaaggttc

SEQ ID NO: 336766 - DNA, 55 bp, Artificial
  Synthetic oligonucleotide
attcaaaacaccacttggccaaaccactgttcctactcaccaatgtcaactgtga

SEQ ID NO: 336767 - DNA, 60 bp, Artificial
  Synthetic oligonucleotide
attcaaaatacaacatgggaggatcattgccaaatgtcacgacctacacctatgggctac

SEQ ID NO: 336768 - DNA, 55 bp, Artificial
  Synthetic oligonucleotide
attcaaacacgtgggatccattgttaaacaatagcggatggccgcgcgatttttt

SEQ ID NO: 336769 - DNA, 55 bp, Artificial
  Synthetic oligonucleotide
attcaaacgaacagactggtacgatgtcttcatctatttctttgtacgaaaacgg

SEQ ID NO: 336770 - DNA, 60 bp, Artificial
  Synthetic oligonucleotide
attcaaatgatcaaggggttggtatggcagcagatagagactcaactcagaaagcaatcg

SEQ ID NO: 336771 - DNA, 57 bp, Artificial
  Synthetic oligonucleotide
attcaaatgatcatagatatagagaccaaccccccaccggtcccccaccaatgcgcg

SEQ ID NO: 336772 - DNA, 56 bp, Artificial
  Synthetic oligonucleotide
attcaaattaaaggataatactttctcgcgcgaatggcttttatgatttgaattat

SEQ ID NO: 336773 - DNA, 51 bp, Artificial
  Synthetic oligonucleotide
attcaacaataacgacacaagaagccgccaatgctgtggtatgttacgctg

SEQ ID NO: 336774 - DNA, 53 bp, Artificial
  Synthetic oligonucleotide
attcaacaggtgcttccactcaaatccctattactgtaagtgttgcccccatg

SEQ ID NO: 336775 - DNA, 58 bp, Artificial
  Synthetic oligonucleotide
attcaacagtgttcgccgggtgttatgaagtcaggatcgtactgtacttcctccacca

SEQ ID NO: 336776 - DNA, 60 bp, Artificial
  Synthetic oligonucleotide
attcaacataaactctattgtagtctgttgcattccttgtgatatgagggaggtcgaaag

SEQ ID NO: 336777 - DNA, 50 bp, Artificial
  Synthetic oligonucleotide
attcaacatagctgatacacttcttggtggcctgccgacagaattaattt

SEQ ID NO: 336778 - DNA, 55 bp, Artificial
  Synthetic oligonucleotide
attcaacatggagagaataaaagaactaagagacctaatgtcacagtctcgcacc

SEQ ID NO: 336779 - DNA, 56 bp, Artificial
  Synthetic oligonucleotide
attcaacatgtttgtgccaaataaggagttgttaaatgggacggaggtttatgatg

SEQ ID NO: 336780 - DNA, 56 bp, Artificial
  Synthetic oligonucleotide
attcaaccacagtagaaccaattttagatggtccttatcaacctactacatttaca

SEQ ID NO: 336781 - DNA, 60 bp, Artificial
  Synthetic oligonucleotide
attcaacgactgccacaacaaagcagtactgtggtgggaagaatgcagcatgacagaaga

SEQ ID NO: 336782 - DNA, 56 bp, Artificial
  Synthetic oligonucleotide
attcaacgaggacctgtagtttctgaagacagaggttggtacaaagtatatcttcc

SEQ ID NO: 336783 - DNA, 52 bp, Artificial
  Synthetic oligonucleotide
attcaacgcccgcgaccgtagaccaaaggtcaactttcctaaaactattagc

SEQ ID NO: 336784 - DNA, 59 bp, Artificial
  Synthetic oligonucleotide
attcaacgcctcggtccgaattccgaaattccacacacactgttgagattcattgtgtg

SEQ ID NO: 336785 - DNA, 58 bp, Artificial
  Synthetic oligonucleotide
attcaactatggtctctaccatccgttggttgtccgcgatatggttcggatccctgac

SEQ ID NO: 336786 - DNA, 60 bp, Artificial
  Synthetic oligonucleotide
attcaactccatgtcctatccatttcagagggcgtcacatggatcttcaagcctgcaaag

SEQ ID NO: 336787 - DNA, 57 bp, Artificial
  Synthetic oligonucleotide
attcaacttacctattaactattggatgctgatcgcaccaactcaagcgggtagggt

SEQ ID NO: 336788 - DNA, 55 bp, Artificial
  Synthetic oligonucleotide
attcaagaatgagagtgatcctgaaggggcactctggtaagtcaacacactcagg

SEQ ID NO: 336789 - DNA, 52 bp, Artificial
  Synthetic oligonucleotide
attcaagacttttagtgcattagttttagggtaaagggcaaggtagagtgtt

SEQ ID NO: 336790 - DNA, 58 bp, Artificial
  Synthetic oligonucleotide
attcaagaggtatgaattatgaaacgcctatgttaatcaaggtggccatattaatttg

SEQ ID NO: 336791 - DNA, 51 bp, Artificial
  Synthetic oligonucleotide
attcaagagtttcaaatattgactgaccctcctaagttacgaagtgtgcct

SEQ ID NO: 336792 - DNA, 60 bp, Artificial
  Synthetic oligonucleotide
attcaagatgggtgagcatcgtaacatcgtgtcaattgtgccctttgcaacttgccgttc

SEQ ID NO: 336793 - DNA, 58 bp, Artificial
  Synthetic oligonucleotide
attcaagccgcactaaatcagtcgacgtcgaccaagaacttgaggaacgagaatttga

SEQ ID NO: 336794 - DNA, 57 bp, Artificial
  Synthetic oligonucleotide
attcaagctatgcaatcactaactggattgtctgctatcgcagggcctatcacaacg

SEQ ID NO: 336795 - DNA, 55 bp, Artificial
  Synthetic oligonucleotide
attcaagctttgcccggtggcagtgcctccagaccaggagaacaatgagtgtaac

SEQ ID NO: 336796 - DNA, 53 bp, Artificial
  Synthetic oligonucleotide
attcaaggactatctaaagaaacctgggcttctatccaacgacgatgtagcag

SEQ ID NO: 336797 - DNA, 55 bp, Artificial
  Synthetic oligonucleotide
attcaaggtgctgtcatgatacagactgttcatctgagggtcttgtggcatcagc

SEQ ID NO: 336798 - DNA, 60 bp, Artificial
  Synthetic oligonucleotide
attcaaggtttgaatcggttgcttggtcagcaagtgcatgtcatgatggagtgggctggc

SEQ ID NO: 336799 - DNA, 60 bp, Artificial
  Synthetic oligonucleotide
attcaagtatcatgaattgggtagagtatgaaatttgttaccgtgtattatgtgaggcta

SEQ ID NO: 336800 - DNA, 55 bp, Artificial
  Synthetic oligonucleotide
attcaatatcagtattaggagtccggatcatgccgcgcgcacatgtgattgactc

SEQ ID NO: 336801 - DNA, 50 bp, Artificial
  Synthetic oligonucleotide
attcaatatgacatcttgattggtgaaggaccatgttccccaggagattg

SEQ ID NO: 336802 - DNA, 51 bp, Artificial
  Synthetic oligonucleotide
attcaatccaggctgtctccacggcacatttaaatgtatgaatggttacat

SEQ ID NO: 336803 - DNA, 55 bp, Artificial
  Synthetic oligonucleotide
attcaatctggaaggaccatggagcgtcgggatgtctaaattcaccagaggatgg

SEQ ID NO: 336804 - DNA, 59 bp, Artificial
  Synthetic oligonucleotide
attcaatgtgtttgcccagctcgcttgtccagaattttcgaatcttaatttcttggcaa

SEQ ID NO: 336805 - DNA, 55 bp, Artificial
  Synthetic oligonucleotide
attcaatgttgcacttgaccaagtctttgagaacatcgaaaacagccaggccttg

SEQ ID NO: 336806 - DNA, 57 bp, Artificial
  Synthetic oligonucleotide
attcaattagctactacttacacgaccatttcaaaacaagttggtcttggtatgtca

SEQ ID NO: 336807 - DNA, 56 bp, Artificial
  Synthetic oligonucleotide
attcaattagggcgaccgtgtgggggtgagatttaattggcgagaaccatgcggcc

SEQ ID NO: 336808 - DNA, 55 bp, Artificial
  Synthetic oligonucleotide
attcaattgattctgcgttcaatgcctttgcatatgagtcgttggcagactgctg

SEQ ID NO: 336809 - DNA, 51 bp, Artificial
  Synthetic oligonucleotide
attcaattgccgcatgaggtcggtaaatattgcgttcaagaactaagttac

SEQ ID NO: 336810 - DNA, 55 bp, Artificial
  Synthetic oligonucleotide
attcaattggagctgacaagttcagcaatgagttagctgacggagaaccccacac

SEQ ID NO: 336811 - DNA, 58 bp, Artificial
  Synthetic oligonucleotide
attcacaacagggaaaggaacctcaacaagtttatgcatgtgccaggttagcaaggta

SEQ ID NO: 336812 - DNA, 60 bp, Artificial
  Synthetic oligonucleotide
attcacaactcttggaactatcgttgtaacatcttcttctgcaaatgcgtatggagcatc

SEQ ID NO: 336813 - DNA, 60 bp, Artificial
  Synthetic oligonucleotide
attcacaagcagcaaatgattgttttaaaacactgatagcagctatgctaagtcaacgta

SEQ ID NO: 336814 - DNA, 60 bp, Artificial
  Synthetic oligonucleotide
attcacaaggtaactacgtgacacagccatttgagccagggactaagttcacgagagatg

SEQ ID NO: 336815 - DNA, 58 bp, Artificial
  Synthetic oligonucleotide
attcacaatcaaatcaactattatcatatggcgacgttacacgttttctttctaataa

SEQ ID NO: 336816 - DNA, 55 bp, Artificial
  Synthetic oligonucleotide
attcacaatggttgggagaaaagcaacagctattctcagaaaagcaaccaggagg

SEQ ID NO: 336817 - DNA, 59 bp, Artificial
  Synthetic oligonucleotide
attcacaatggttgggcggagggcaacagctatcctaaggaaagcaactagaaggctga

SEQ ID NO: 336818 - DNA, 54 bp, Artificial
  Synthetic oligonucleotide
attcacacgttgtttgtctgaggggttcgtctagcgttgcgtctacataaactt

SEQ ID NO: 336819 - DNA, 57 bp, Artificial
  Synthetic oligonucleotide
attcacagagcccaggggcaagccaccgaagccaagtgtgttagacgctgccaagaa

SEQ ID NO: 336820 - DNA, 57 bp, Artificial
  Synthetic oligonucleotide
attcacagattaacattagaagtggtgggtccagatggtgagaaagaaaggtttaca

SEQ ID NO: 336821 - DNA, 60 bp, Artificial
  Synthetic oligonucleotide
attcacagcagagggattcacatggacaggtgtcactcaaaacggaagaagtggatcctg

SEQ ID NO: 336822 - DNA, 60 bp, Artificial
  Synthetic oligonucleotide
attcacagcgctattcgggcgcttccagagatgccttcgagaacgtattattcttcctgt

SEQ ID NO: 336823 - DNA, 58 bp, Artificial
  Synthetic oligonucleotide
attcacaggatccccttccagttgacagagccgctctaagttcctacggacattcaaa

SEQ ID NO: 336824 - DNA, 55 bp, Artificial
  Synthetic oligonucleotide
attcacaggtttcgccaaagtttcaactttggtagtgcgtaggttatattcaaga

SEQ ID NO: 336825 - DNA, 51 bp, Artificial
  Synthetic oligonucleotide
attcacagtaagaatagagggacagctaataaaagctctattagacacagg

SEQ ID NO: 336826 - DNA, 60 bp, Artificial
  Synthetic oligonucleotide
attcacagtatgcattaggaatcattcaagcacaaccagacaagagtgaatcagaattag

SEQ ID NO: 336827 - DNA, 57 bp, Artificial
  Synthetic oligonucleotide
attcacatacccggcgaggttagaaacttacttgaattgtgccaagtggagaccatc

SEQ ID NO: 336828 - DNA, 57 bp, Artificial
  Synthetic oligonucleotide
attcacatgtgagcgtgggaaccgatatctacgatacttttctacgtagcttctcta

SEQ ID NO: 336829 - DNA, 60 bp, Artificial
  Synthetic oligonucleotide
attcacatttacgccgcaccatgggattcagatgatgtgttcatattacattgcgttgca

SEQ ID NO: 336830 - DNA, 60 bp, Artificial
  Synthetic oligonucleotide
attcaccaaacatagaggcttgcgggtacagtgatagagtaatgcaactaactctgggaa

SEQ ID NO: 336831 - DNA, 59 bp, Artificial
  Synthetic oligonucleotide
attcaccaggcctgatctcgattgggccgcgtaacccaaccctggacatggacgcgcat

SEQ ID NO: 336832 - DNA, 57 bp, Artificial
  Synthetic oligonucleotide
attcaccataagacaagaaatggcaagtagaggtctttgggactcctttcgtcagtc

SEQ ID NO: 336833 - DNA, 55 bp, Artificial
  Synthetic oligonucleotide
attcaccatccagggaagataatttgcaacgtgtctttacagtagcctctatcag

SEQ ID NO: 336834 - DNA, 55 bp, Artificial
  Synthetic oligonucleotide
attcacccactgctacggcttgggaaattgggttatattatgaattgactatacc

SEQ ID NO: 336835 - DNA, 56 bp, Artificial
  Synthetic oligonucleotide
attcaccccaccacacggaggccttttggggtggagccctcaagctcagggcatac

SEQ ID NO: 336836 - DNA, 58 bp, Artificial
  Synthetic oligonucleotide
attcaccccatccctcgcccctcgtgattacaggccagcattcattaaggacgccgac

SEQ ID NO: 336837 - DNA, 54 bp, Artificial
  Synthetic oligonucleotide
attcaccgcccctttcggatgcgaaatatatacaaaccccattcgcgccgaaaa

SEQ ID NO: 336838 - DNA, 50 bp, Artificial
  Synthetic oligonucleotide
attcaccgtaccatcgataggagacaatgtcctatactttataattggtg

SEQ ID NO: 336839 - DNA, 58 bp, Artificial
  Synthetic oligonucleotide
attcacctgacagattgttgtacgagggaagtaccagcccaatacttaacatacacaa

SEQ ID NO: 336840 - DNA, 60 bp, Artificial
  Synthetic oligonucleotide
attcacctttgagctcttagattccctacaccggctcacccacctcagctatcagaagat

SEQ ID NO: 336841 - DNA, 55 bp, Artificial
  Synthetic oligonucleotide
attcacgagcgctgggagcgggctgtgcccgacgaccacggatgggttcgtgtcg

SEQ ID NO: 336842 - DNA, 60 bp, Artificial
  Synthetic oligonucleotide
attcacgagtccattcgttggaccaaagatgcacgaaatactcaagatcacgtgcgctcc

SEQ ID NO: 336843 - DNA, 52 bp, Artificial
  Synthetic oligonucleotide
attcacgataatttagtgtagtattcccatccaacactgatttcgatgttcc

SEQ ID NO: 336844 - DNA, 57 bp, Artificial
  Synthetic oligonucleotide
attcacgccaagcaacccgggaaggacgttcagccgctctgggacctcgtggctgaa

SEQ ID NO: 336845 - DNA, 56 bp, Artificial
  Synthetic oligonucleotide
attcacgctcaggttatgagactttcagggtcgttggtggttggaccacggctaat

SEQ ID NO: 336846 - DNA, 60 bp, Artificial
  Synthetic oligonucleotide
attcacggcgtaaatccgatgccggggccgctcacacgtgctattgcacgcgccgcctat

SEQ ID NO: 336847 - DNA, 59 bp, Artificial
  Synthetic oligonucleotide
attcactaattattggatggtcgatgaagtacttcaaaggatatgtggacggatacaag

SEQ ID NO: 336848 - DNA, 58 bp, Artificial
  Synthetic oligonucleotide
attcactaccatggcttatcaaccccgtcgctttgaacggcggtatggacactagcgc

SEQ ID NO: 336849 - DNA, 60 bp, Artificial
  Synthetic oligonucleotide
attcactagaatgggttgacccagatagttctctaaaggaccatgtcaatctgatagtaa

SEQ ID NO: 336850 - DNA, 56 bp, Artificial
  Synthetic oligonucleotide
attcactccccattcagtaatatcacatggtaaattaattaaggacatcataccat

SEQ ID NO: 336851 - DNA, 56 bp, Artificial
  Synthetic oligonucleotide
attcactcttaaggggcctaaagggaacagcttatttgatatagtcgtgtatataa

SEQ ID NO: 336852 - DNA, 54 bp, Artificial
  Synthetic oligonucleotide
attcactgccgagtgaggttcgtagggcgagtttgtatgcacgggatacgttgc

SEQ ID NO: 336853 - DNA, 51 bp, Artificial
  Synthetic oligonucleotide
attcactgtcctgtgctatctgcgctggcggttgttggggggcgacgacta

SEQ ID NO: 336854 - DNA, 55 bp, Artificial
  Synthetic oligonucleotide
attcacttcccctgttgttatttgtaccacaaacctgcattcatcttttacaccc

SEQ ID NO: 336855 - DNA, 58 bp, Artificial
  Synthetic oligonucleotide
attcacttgaatgggtagatccagatagttcattaaaggatcatattaatttggtagt

SEQ ID NO: 336856 - DNA, 52 bp, Artificial
  Synthetic oligonucleotide
attcagaaattagtaggtaaattaaattgggctagtcaaatttacccaggaa

SEQ ID NO: 336857 - DNA, 55 bp, Artificial
  Synthetic oligonucleotide
attcagaacacaacctgggaaaatcactgtcagttctcaagaccatctcctattg

SEQ ID NO: 336858 - DNA, 57 bp, Artificial
  Synthetic oligonucleotide
attcagaacatacgccaaaggtacatatatacactacgccgtgggactctgataaag

SEQ ID NO: 336859 - DNA, 55 bp, Artificial
  Synthetic oligonucleotide
attcagaatacaccatattagcaactgcttcacagcctgacacagctaactactc

SEQ ID NO: 336860 - DNA, 56 bp, Artificial
  Synthetic oligonucleotide
attcagacactctaacctcataaaaacaatttgcaacacacaccacatatttaggg

SEQ ID NO: 336861 - DNA, 60 bp, Artificial
  Synthetic oligonucleotide
attcagacagagaatcaacaccaagctgaatcaatcagcaatactaaccctcctactgag

SEQ ID NO: 336862 - DNA, 60 bp, Artificial
  Synthetic oligonucleotide
attcagactcttcaaaaactctctcgtcctggctagagtattccaagagtctgaatagaa

SEQ ID NO: 336863 - DNA, 55 bp, Artificial
  Synthetic oligonucleotide
attcagagacactacctaataagtattatgagccaagggaccggtacttccaaca

SEQ ID NO: 336864 - DNA, 58 bp, Artificial
  Synthetic oligonucleotide
attcagagactaggcagagtcgggcggaataagcctggagccgcattgcgaataggct

SEQ ID NO: 336865 - DNA, 54 bp, Artificial
  Synthetic oligonucleotide
attcagagatgctgaatctatatgagagagtgaggaaacaactaaggcaaaatg

SEQ ID NO: 336866 - DNA, 55 bp, Artificial
  Synthetic oligonucleotide
attcagaggggtcaggtaagaacgtgtgttctaaggtcatgagttctgtcaagcg

SEQ ID NO: 336867 - DNA, 60 bp, Artificial
  Synthetic oligonucleotide
attcagatacaggtatcttcaacataagttcacctacgtgcttagttaatagagtacaga

SEQ ID NO: 336868 - DNA, 53 bp, Artificial
  Synthetic oligonucleotide
attcagatgacgtttgctcctatctggctgcagctatgcaactctttgaaggg

SEQ ID NO: 336869 - DNA, 60 bp, Artificial
  Synthetic oligonucleotide
attcagcaacctttctacagatgactgcggtactgggaaagccttggcctaaagcagatc

SEQ ID NO: 336870 - DNA, 60 bp, Artificial
  Synthetic oligonucleotide
attcagcaactattatagttccttatgtaaatgctgtccccatggactcaatgcttagac

SEQ ID NO: 336871 - DNA, 60 bp, Artificial
  Synthetic oligonucleotide
attcagcagatggcgcaactacatggttctttaatccaatcatcctaagaccaaacaacg

SEQ ID NO: 336872 - DNA, 60 bp, Artificial
  Synthetic oligonucleotide
attcagcagatgttgtggctttattgcctgactccccctctgtagtgacccctgacagca

SEQ ID NO: 336873 - DNA, 60 bp, Artificial
  Synthetic oligonucleotide
attcagcaggcacactaagcagagttgtcagattatgcacatgtgtatgcagtgattttg

SEQ ID NO: 336874 - DNA, 56 bp, Artificial
  Synthetic oligonucleotide
attcagcataatacgaccaaatgagaatccagcacacaagagtcaattggtgtgga

SEQ ID NO: 336875 - DNA, 56 bp, Artificial
  Synthetic oligonucleotide
attcagccacgtgaccctaggtacaatgtggaagtgggacgttacttgaagcctct

SEQ ID NO: 336876 - DNA, 51 bp, Artificial
  Synthetic oligonucleotide
attcagccggacgtaaaaatacgtcccataaaaaaagttgccccaggatta

SEQ ID NO: 336877 - DNA, 54 bp, Artificial
  Synthetic oligonucleotide
attcagccgtatttcggcgatatgtatttctcccccgagtattacccggcaact

SEQ ID NO: 336878 - DNA, 60 bp, Artificial
  Synthetic oligonucleotide
attcagctaacaactctggcactaccacttggttgaaccgtctgctgactacgttgccac

SEQ ID NO: 336879 - DNA, 60 bp, Artificial
  Synthetic oligonucleotide
attcagctagctctcacttatcggcgagcattacttcagaagaaacctaacgctgttaat

SEQ ID NO: 336880 - DNA, 50 bp, Artificial
  Synthetic oligonucleotide
attcagctatctcgacgttcatcagttacccggacttgggtaagatggaa

SEQ ID NO: 336881 - DNA, 60 bp, Artificial
  Synthetic oligonucleotide
attcagctgtatttatatgtcaaatctgtcaataaggtgacacaaagagatatctttgcg

SEQ ID NO: 336882 - DNA, 60 bp, Artificial
  Synthetic oligonucleotide
attcagcttccaaggaggtccttgaaagcattcttctcctggtctttgacagactcatcc

SEQ ID NO: 336883 - DNA, 56 bp, Artificial
  Synthetic oligonucleotide
attcaggaaatattgtccatcgatataacgaccaatatagcccgcactcatttatg

SEQ ID NO: 336884 - DNA, 59 bp, Artificial
  Synthetic oligonucleotide
attcaggaaccgccttctggtgatttgcaagaacgcgtacttattcgccaccatgatta

SEQ ID NO: 336885 - DNA, 60 bp, Artificial
  Synthetic oligonucleotide
attcaggaatggatgactctgtgaagtgtgctgaattagatcgtataaccgaatttctgc

SEQ ID NO: 336886 - DNA, 55 bp, Artificial
  Synthetic oligonucleotide
attcaggagtccatgagagctgagggtgcggccgaatcaagtgagatgagcgggg

SEQ ID NO: 336887 - DNA, 60 bp, Artificial
  Synthetic oligonucleotide
attcaggatgggcaggatatcatcagcctgatgttgacaccacatggggttgaagcgaca

SEQ ID NO: 336888 - DNA, 55 bp, Artificial
  Synthetic oligonucleotide
attcaggctgctacgttcctcggccatgaacattgggccagtgttacctcaggat

SEQ ID NO: 336889 - DNA, 51 bp, Artificial
  Synthetic oligonucleotide
attcaggcttagctagtaacgtagtaggtcaatacggtcaagcgagctcgt

SEQ ID NO: 336890 - DNA, 55 bp, Artificial
  Synthetic oligonucleotide
attcagggtgtcgatagtggccttgtcgaagttaacgtgcgagcaatccgtagtc

SEQ ID NO: 336891 - DNA, 59 bp, Artificial
  Synthetic oligonucleotide
attcaggtcctcacatatatattgagacccattgtatcggggtctcaattggggtattg

SEQ ID NO: 336892 - DNA, 60 bp, Artificial
  Synthetic oligonucleotide
attcaggttaatcttcatgctcgtaatggattacctcatactgcagtgatgttcaccgga

SEQ ID NO: 336893 - DNA, 60 bp, Artificial
  Synthetic oligonucleotide
attcagtaaagtgcataacgatattgaatggaccctagcccacccagtgccgatataaca

SEQ ID NO: 336894 - DNA, 58 bp, Artificial
  Synthetic oligonucleotide
attcagtacagtggtcgtccgagacaagaagccttgcgagttctcatctgtggatcct

SEQ ID NO: 336895 - DNA, 58 bp, Artificial
  Synthetic oligonucleotide
attcagtattagctttgagtccacaattagaatctgttagtatatctccccacccgaa

SEQ ID NO: 336896 - DNA, 59 bp, Artificial
  Synthetic oligonucleotide
attcagtgaaatagaggagaggataaaccaattgtcgaaacacgtagatgattctgtgg

SEQ ID NO: 336897 - DNA, 59 bp, Artificial
  Synthetic oligonucleotide
attcagttaatttactagaaaacagccacaatggaaaactctgcagcctgaatggaata

SEQ ID NO: 336898 - DNA, 59 bp, Artificial
  Synthetic oligonucleotide
attcagttccagcctgcatcttatttcttcggcgtagcttggactttaaatgatcttat

SEQ ID NO: 336899 - DNA, 50 bp, Artificial
  Synthetic oligonucleotide
attcagttcggctcggtacttcttcgcggctgtcgtcttgttacgcttgc

SEQ ID NO: 336900 - DNA, 60 bp, Artificial
  Synthetic oligonucleotide
attcagttctaaataatttcactcaatacgcagcagttaggctgactaaaccagatctct

SEQ ID NO: 336901 - DNA, 57 bp, Artificial
  Synthetic oligonucleotide
attcagttgccctcaagggagttataccattcaatacgacacataatccgttcgaac

SEQ ID NO: 336902 - DNA, 60 bp, Artificial
  Synthetic oligonucleotide
attcagttggtcaacctatgggggcattatcctcatgaggtatgcttgctttaactcatc

SEQ ID NO: 336903 - DNA, 60 bp, Artificial
  Synthetic oligonucleotide
attcagttgtgaataacatcctaattgactatcttgcagactgccaaagtgtgaagatcc

SEQ ID NO: 336904 - DNA, 50 bp, Artificial
  Synthetic oligonucleotide
attcagttttccagcaaacaacagttaacgatgtcgacgattgtgtttgg

SEQ ID NO: 336905 - DNA, 59 bp, Artificial
  Synthetic oligonucleotide
attcataaagctgtgaacacttcaatgctgccttctccggagctctcaaaagaacaatt

SEQ ID NO: 336906 - DNA, 57 bp, Artificial
  Synthetic oligonucleotide
attcatacacgagttacatctgagcgctccggcaaggtatgatgcatttaccctgag

SEQ ID NO: 336907 - DNA, 59 bp, Artificial
  Synthetic oligonucleotide
attcataccctcgtctgccatacaaaaatcgtctggttacgcattagtaattatgatta

SEQ ID NO: 336908 - DNA, 55 bp, Artificial
  Synthetic oligonucleotide
attcatactacgacatttaggacagtgaaccccgttatgaaacataggtgctttc

SEQ ID NO: 336909 - DNA, 60 bp, Artificial
  Synthetic oligonucleotide
attcataggagcgcacctggagtgcgctctatagaaggggtgatcggattgagttggatc

SEQ ID NO: 336910 - DNA, 60 bp, Artificial
  Synthetic oligonucleotide
attcataggttgcgcataaactatgttgaaatgtcacttctcatggcgtcgcagtgtagg

SEQ ID NO: 336911 - DNA, 58 bp, Artificial
  Synthetic oligonucleotide
attcatatcattcacgtcactgaaaaaaagacgtatgaccaaataggcagtagacggg

SEQ ID NO: 336912 - DNA, 58 bp, Artificial
  Synthetic oligonucleotide
attcatatgcaccggtttatttagaaaaacgtcgtgcacaaatatcagcgctattaac

SEQ ID NO: 336913 - DNA, 59 bp, Artificial
  Synthetic oligonucleotide
attcatcaacgcaatcacgaccttcaagtaacgttgggtgcgatcaagtggatttctcc

SEQ ID NO: 336914 - DNA, 60 bp, Artificial
  Synthetic oligonucleotide
attcatcaggctgggtactgtaatccagagggatggtgttgtttgcaagatgttgaggtg

SEQ ID NO: 336915 - DNA, 60 bp, Artificial
  Synthetic oligonucleotide
attcatcatcaattggtcgtcggcgtagttatagtagctatcatgtttacgaaagtctga

SEQ ID NO: 336916 - DNA, 60 bp, Artificial
  Synthetic oligonucleotide
attcatcatccaactactgagatcaggtcagaattttatgcgatactagatgtatgggat

SEQ ID NO: 336917 - DNA, 60 bp, Artificial
  Synthetic oligonucleotide
attcatccgacttggtgccgaatttcgtgatgagagatccttcacatgcgttcaatggtg

SEQ ID NO: 336918 - DNA, 60 bp, Artificial
  Synthetic oligonucleotide
attcatccgcccaacattgaggacaattaccatcacatacatgcattaattcaagaccct

SEQ ID NO: 336919 - DNA, 60 bp, Artificial
  Synthetic oligonucleotide
attcatcctgtacatcagaaattaggtggagatgctgccaatgatcccaatgcgcgctat

SEQ ID NO: 336920 - DNA, 60 bp, Artificial
  Synthetic oligonucleotide
attcatcggactgcgcgttgaatcatccgtgctgagagtccgaaacccaacattacatga

SEQ ID NO: 336921 - DNA, 55 bp, Artificial
  Synthetic oligonucleotide
attcatcgtcaatgatgtgggagattaacggccctgagtcagttttggtcaatac

SEQ ID NO: 336922 - DNA, 60 bp, Artificial
  Synthetic oligonucleotide
attcatcgttagcatatccagacacactgaaaaattggattacaaggttgtttcaagcaa

SEQ ID NO: 336923 - DNA, 58 bp, Artificial
  Synthetic oligonucleotide
attcatgaacgttccacgcgtcgtttgttttctcgttcgtaccacagatagcgcagaa

SEQ ID NO: 336924 - DNA, 60 bp, Artificial
  Synthetic oligonucleotide
attcatgacggcaggcgcgttgtggtgacgtatgagggtgataccagtgctggttataac

SEQ ID NO: 336925 - DNA, 59 bp, Artificial
  Synthetic oligonucleotide
attcatgactcccgatggaacttttgtgaaattccgagccagcatcttcagtttcccaa

SEQ ID NO: 336926 - DNA, 60 bp, Artificial
  Synthetic oligonucleotide
attcatgagctgggtggcacctccgtgacgtgcatagccgggaaggggcgtgatcacacg

SEQ ID NO: 336927 - DNA, 60 bp, Artificial
  Synthetic oligonucleotide
attcatgcagagatccagcatttaggtcattggatggatgctacatttaatcttaaaact

SEQ ID NO: 336928 - DNA, 56 bp, Artificial
  Synthetic oligonucleotide
attcatgcgaattacatttaacgacgtgaaaacgtctctaggtattaccgaatcat

SEQ ID NO: 336929 - DNA, 59 bp, Artificial
  Synthetic oligonucleotide
attcatgcgagatgagcgtactacgtttgattcaaatggtatggcagttgaacctaaat

SEQ ID NO: 336930 - DNA, 60 bp, Artificial
  Synthetic oligonucleotide
attcatgcgagtccagctctgaagaagtccctgatatccactgccaagagcacgctcctg

SEQ ID NO: 336931 - DNA, 60 bp, Artificial
  Synthetic oligonucleotide
attcatgctgagatccaacccttaggtcattggatggatgcaacatttaataccaagact

SEQ ID NO: 336932 - DNA, 53 bp, Artificial
  Synthetic oligonucleotide
attcatgctgtcgctcctgactatcgggtcgaacataaccccaaacggctcga

SEQ ID NO: 336933 - DNA, 58 bp, Artificial
  Synthetic oligonucleotide
attcatggatccacaggactcctttcttctacagccgcgggtacccacagcgactcct

SEQ ID NO: 336934 - DNA, 55 bp, Artificial
  Synthetic oligonucleotide
attcatggcacatcctatcaaaggacaacgcaataaggataggagaggacgccca

SEQ ID NO: 336935 - DNA, 60 bp, Artificial
  Synthetic oligonucleotide
attcatgggctttatgctgtgctttctcacgtcaaagaacgatgatgggcgagagtgtgg

SEQ ID NO: 336936 - DNA, 59 bp, Artificial
  Synthetic oligonucleotide
attcattacagaattgggtgccaacatagcagaataggcattactccaagcagaggagt

SEQ ID NO: 336937 - DNA, 60 bp, Artificial
  Synthetic oligonucleotide
attcattcattgagggaaaaatggaagttgatacaatagattggaagtctagatatgagc

SEQ ID NO: 336938 - DNA, 60 bp, Artificial
  Synthetic oligonucleotide
attcattctacagaagcatgagatggttgactcaaaagagcaacgcttaccctattcaag

SEQ ID NO: 336939 - DNA, 58 bp, Artificial
  Synthetic oligonucleotide
attcattgagtatcagtaatgcaaatccagaatgtaaaagagcaatgaaccatctgag

SEQ ID NO: 336940 - DNA, 54 bp, Artificial
  Synthetic oligonucleotide
attcattgagtctataaacgctatgctgcgaatttatgccatgcaggtgggttt

SEQ ID NO: 336941 - DNA, 60 bp, Artificial
  Synthetic oligonucleotide
attcattggatcaatccctctgagagacctgctctggcgcgagcaaaagcgcaattgtca

SEQ ID NO: 336942 - DNA, 60 bp, Artificial
  Synthetic oligonucleotide
attcattgtcacctgcttgcgatcattctgtggattacgtgacttacctagagaaaactc

SEQ ID NO: 336943 - DNA, 55 bp, Artificial
  Synthetic oligonucleotide
attcattttagtaaccctacctcagtcgaattggattgggttatgctgttgtagg

SEQ ID NO: 336944 - DNA, 58 bp, Artificial
  Synthetic oligonucleotide
attccaaaccaaccaagctcatgagtgggatacaaacggtttctaagagcgccacaga

SEQ ID NO: 336945 - DNA, 54 bp, Artificial
  Synthetic oligonucleotide
attccaacacggggaatggaatttaagaccatctacggctgtagtacccgtaca

SEQ ID NO: 336946 - DNA, 60 bp, Artificial
  Synthetic oligonucleotide
attccaacagaaccgattcattcgaagcatgcaggttctcctatcagggtttgacaagaa

SEQ ID NO: 336947 - DNA, 55 bp, Artificial
  Synthetic oligonucleotide
attccaaccaataaggacgtagatgagaaatacatctacttcatcgaacgcgcag

SEQ ID NO: 336948 - DNA, 59 bp, Artificial
  Synthetic oligonucleotide
attccaactagcgcctctagcttcgcctggcaaacatcaacaaaccctagtgtattctg

SEQ ID NO: 336949 - DNA, 57 bp, Artificial
  Synthetic oligonucleotide
attccaagcgaagcaggagatccgtgtcggtccaaacacatggggagagttcactag

SEQ ID NO: 336950 - DNA, 56 bp, Artificial
  Synthetic oligonucleotide
attccaataaggcagtgggcagaagacatgggggtcacaaacaaccaggattattc

SEQ ID NO: 336951 - DNA, 53 bp, Artificial
  Synthetic oligonucleotide
attccaataataaggcaaaagacgtaaatcacagtaagtcccgcgggagggcc

SEQ ID NO: 336952 - DNA, 53 bp, Artificial
  Synthetic oligonucleotide
attccaattccagtaactatgtattaataaattgtaatacctcaacggtaaaa

SEQ ID NO: 336953 - DNA, 59 bp, Artificial
  Synthetic oligonucleotide
attccacaaatcgtaattcaatcagaatttggatcacctaaagcatactttggcattaa

SEQ ID NO: 336954 - DNA, 60 bp, Artificial
  Synthetic oligonucleotide
attccacaagaatgcaattggatctgtcactgatgtttgtggcgagcacaagggctattg

SEQ ID NO: 336955 - DNA, 55 bp, Artificial
  Synthetic oligonucleotide
attccacacaagatgacgagttcctatcctacttcaaattcagatatggggtacc

SEQ ID NO: 336956 - DNA, 54 bp, Artificial
  Synthetic oligonucleotide
attccacaccatgaaccggagggcccaagcatgagcatagacgccattcatatc

SEQ ID NO: 336957 - DNA, 53 bp, Artificial
  Synthetic oligonucleotide
attccacacctttgactacagacgggggctttttggaaaggacgctattaagc

SEQ ID NO: 336958 - DNA, 60 bp, Artificial
  Synthetic oligonucleotide
attccaccaaggagcactcctagtcgctgtcctaccagagtatgtcattgggacagtggc

SEQ ID NO: 336959 - DNA, 56 bp, Artificial
  Synthetic oligonucleotide
attccaccaggccagattagggaacctagggggagtgatatagctggacctactag

SEQ ID NO: 336960 - DNA, 55 bp, Artificial
  Synthetic oligonucleotide
attccacctttaatttgaatgggcttcccgtacttcgtgttgctttgccagtctc

SEQ ID NO: 336961 - DNA, 53 bp, Artificial
  Synthetic oligonucleotide
attccacctttaatttgaatgggtttcccgtattttgtgttactctgccagtc

SEQ ID NO: 336962 - DNA, 52 bp, Artificial
  Synthetic oligonucleotide
attccacgggtttccaagttaatgggggaattgtcggcaatttgttacagct

SEQ ID NO: 336963 - DNA, 51 bp, Artificial
  Synthetic oligonucleotide
attccactgcgcagacttcatgtctcattagtggtagtgtttgcgcattat

SEQ ID NO: 336964 - DNA, 55 bp, Artificial
  Synthetic oligonucleotide
attccagatggtcttctgatccccaccagtggaaccgataccactgtaaccaaac

SEQ ID NO: 336965 - DNA, 60 bp, Artificial
  Synthetic oligonucleotide
attccagatttgccacagcatcttcgagccttcgctgagaagcgcgggtcatcctctcct

SEQ ID NO: 336966 - DNA, 60 bp, Artificial
  Synthetic oligonucleotide
attccagcaatgcaaattgccatgaacctgttgtaagaaattacattttttatggcacca

SEQ ID NO: 336967 - DNA, 58 bp, Artificial
  Synthetic oligonucleotide
attccagcacagagagagtagtggtgagcattgaccggtttctaagggttcgggacca

SEQ ID NO: 336968 - DNA, 60 bp, Artificial
  Synthetic oligonucleotide
attccagcagcttatcccaccacgatggaggagggaaacaggtctgtgttgtgctatctt

SEQ ID NO: 336969 - DNA, 51 bp, Artificial
  Synthetic oligonucleotide
attccaggacacgttaccgtagaactggtaaacccaaacgtggatggaccc

SEQ ID NO: 336970 - DNA, 54 bp, Artificial
  Synthetic oligonucleotide
attccaggccctcgatattgggggtcggggggacattgagggccgtccaagcga

SEQ ID NO: 336971 - DNA, 55 bp, Artificial
  Synthetic oligonucleotide
attccaggctctttgaaggtcaaaattaactgtcaggtggccccaacgtgcggaa

SEQ ID NO: 336972 - DNA, 55 bp, Artificial
  Synthetic oligonucleotide
attccagggtcctccgaagagagtatctaggatcaggccaagaagtgaaccaaaa

SEQ ID NO: 336973 - DNA, 50 bp, Artificial
  Synthetic oligonucleotide
attccagtagaacaacaattattttgtcaagaagtagtagagttatctgc

SEQ ID NO: 336974 - DNA, 55 bp, Artificial
  Synthetic oligonucleotide
attccagtattgcacgctcgccctggctcatagtcaccatgtccgcgtactcgtc

SEQ ID NO: 336975 - DNA, 56 bp, Artificial
  Synthetic oligonucleotide
attccagtctcttcgaataaaattaaagggtggtgtattgaatgttgtcaactcac

SEQ ID NO: 336976 - DNA, 55 bp, Artificial
  Synthetic oligonucleotide
attccagtggatggagaaaaatgacttctaccccgccaggtaccaaactcaccta

SEQ ID NO: 336977 - DNA, 60 bp, Artificial
  Synthetic oligonucleotide
attccagttgcacccttggattatatgacaggtgctacaaccgctataccaatcacggtc

SEQ ID NO: 336978 - DNA, 60 bp, Artificial
  Synthetic oligonucleotide
attccatcaagtggagtatgtcagtggtttggtccaactgcgagcagtggtactcctcgt

SEQ ID NO: 336979 - DNA, 51 bp, Artificial
  Synthetic oligonucleotide
attccatcagggcactctcttggtagtaatgataccagaacaccaattagc

SEQ ID NO: 336980 - DNA, 53 bp, Artificial
  Synthetic oligonucleotide
attccatgtgactagcgcccatgcgacccgtcgtgtggttgtaaacgcacggg

SEQ ID NO: 336981 - DNA, 50 bp, Artificial
  Synthetic oligonucleotide
attccattgaaccgatacgtcgggattggacttagtctacagccggagcc

SEQ ID NO: 336982 - DNA, 60 bp, Artificial
  Synthetic oligonucleotide
attccatttcagtaacataacagagatgagtacaattgtagtagggaatgagaccaagat

SEQ ID NO: 336983 - DNA, 54 bp, Artificial
  Synthetic oligonucleotide
attcccaacgctttcctcaggttgtagttgaattgaacttgtattgtcgttacg

SEQ ID NO: 336984 - DNA, 55 bp, Artificial
  Synthetic oligonucleotide
attcccaatatgttatgggagttttacagggattaccagatcaaagtgactcccc

SEQ ID NO: 336985 - DNA, 60 bp, Artificial
  Synthetic oligonucleotide
attcccaccaggcatgaattggactgagctgattactaactattcaccatccagggaaga

SEQ ID NO: 336986 - DNA, 60 bp, Artificial
  Synthetic oligonucleotide
attcccagctctactaatgctctatcagttaattatgtacagcttacgtcgaccgcgtct

SEQ ID NO: 336987 - DNA, 60 bp, Artificial
  Synthetic oligonucleotide
attcccatgcgagatgtttcttgtgcatggttgagttcattgcgacgaaagactcttgtt

SEQ ID NO: 336988 - DNA, 60 bp, Artificial
  Synthetic oligonucleotide
attccccaagttggtgcctgcatcacgtcacgccgtgtatatcacgtcttcgccgcacag

SEQ ID NO: 336989 - DNA, 52 bp, Artificial
  Synthetic oligonucleotide
attccccaccgtgtcctaagccaggaaccgtcacccaccgtccacctgtacc

SEQ ID NO: 336990 - DNA, 56 bp, Artificial
  Synthetic oligonucleotide
attcccccagctatgtttacagccagttcgaaggatccacccgacacaaaagagaa

SEQ ID NO: 336991 - DNA, 58 bp, Artificial
  Synthetic oligonucleotide
attcccccctgcgatgcccatatgggcacgaccggattacaacccaccactgatagag

SEQ ID NO: 336992 - DNA, 55 bp, Artificial
  Synthetic oligonucleotide
attccccgagcccctgttcgtgttagcggccgagaaggacgtctcgggtcactca

SEQ ID NO: 336993 - DNA, 54 bp, Artificial
  Synthetic oligonucleotide
attcccgaaggccttggcattcctaataccattgtaaatggtataacaccgacg

SEQ ID NO: 336994 - DNA, 55 bp, Artificial
  Synthetic oligonucleotide
attcccgaaggtcctagtgttcctaataccactataagtggtatagcaccatcgg

SEQ ID NO: 336995 - DNA, 60 bp, Artificial
  Synthetic oligonucleotide
attcccgaatgcacaaccatttgaacaccatgctacggtaggcctgacactaagaattga

SEQ ID NO: 336996 - DNA, 58 bp, Artificial
  Synthetic oligonucleotide
attcccgaggatgttatagaaggatacatccaaatcaaactcactgccgaaatattcc

SEQ ID NO: 336997 - DNA, 59 bp, Artificial
  Synthetic oligonucleotide
attcccgcacgggtactttgacctcacattttcaatcatgagtcaagaagtgcccacag

SEQ ID NO: 336998 - DNA, 59 bp, Artificial
  Synthetic oligonucleotide
attcccgcactgatccaccgctaggacgaaccgtttctctccaccagtcagggcgatga

SEQ ID NO: 336999 - DNA, 55 bp, Artificial
  Synthetic oligonucleotide
attcccggtatcaatcccaatcacagctgcagcttggtacctatgggagacaaaa

SEQ ID NO: 337000 - DNA, 53 bp, Artificial
  Synthetic oligonucleotide
attcccgtaccccgcccattttgccaaattggaagttgacgaggtggagacac

SEQ ID NO: 337001 - DNA, 57 bp, Artificial
  Synthetic oligonucleotide
attccctacccgagttcctcgcatcgacgccctttaccatgcagctgggtactctcc

SEQ ID NO: 337002 - DNA, 54 bp, Artificial
  Synthetic oligonucleotide
attccctagcgacacggtgccccgatcaggaaccccctaaggaaccagaggatc

SEQ ID NO: 337003 - DNA, 58 bp, Artificial
  Synthetic oligonucleotide
attccctatgttctgtggatggtatttgagtccatatggaattatcaaatccccaaaa

SEQ ID NO: 337004 - DNA, 55 bp, Artificial
  Synthetic oligonucleotide
attccctcaagagccgttacttgagtttccaccagtacaagatattggggctcgg

SEQ ID NO: 337005 - DNA, 55 bp, Artificial
  Synthetic oligonucleotide
attccctccagactgggttcattgccgcgttgttctacgcacacagtttcaacgc

SEQ ID NO: 337006 - DNA, 58 bp, Artificial
  Synthetic oligonucleotide
attccctgcacagatcatggcaagaaatattatcagtcctgtaatgggggtaatcggg

SEQ ID NO: 337007 - DNA, 60 bp, Artificial
  Synthetic oligonucleotide
attccctgcacgatctacatccgcgtgaggttgccagggcaatgcgtgctcatggtatgc

SEQ ID NO: 337008 - DNA, 50 bp, Artificial
  Synthetic oligonucleotide
attccctggggaggggcgattgcattggccctatctatatctgatatggc

SEQ ID NO: 337009 - DNA, 60 bp, Artificial
  Synthetic oligonucleotide
attccctgtaatcagttctcattcttagtgcactatgcagacgcgtcatcgcgttacgct

SEQ ID NO: 337010 - DNA, 59 bp, Artificial
  Synthetic oligonucleotide
attccctgttcaccagggtgtctgacgctgtcgagagcggtgtcgccactttcctcact

SEQ ID NO: 337011 - DNA, 53 bp, Artificial
  Synthetic oligonucleotide
attcccttacgaagatcgtcttgaaggaaggtctcgtccgatttgaacgccct

SEQ ID NO: 337012 - DNA, 54 bp, Artificial
  Synthetic oligonucleotide
attcccttctgaggaaaattactcttatacccctgttcagacgcaggagtcttt

SEQ ID NO: 337013 - DNA, 54 bp, Artificial
  Synthetic oligonucleotide
attccctttaaccggacccccttccgatgacacttctgaggagatggtggcgct

SEQ ID NO: 337014 - DNA, 54 bp, Artificial
  Synthetic oligonucleotide
attccgaaaagattgtgtgaacccgtgcggtaaccgtctatttcaaggagccac

SEQ ID NO: 337015 - DNA, 57 bp, Artificial
  Synthetic oligonucleotide
attccgaagcggcgtactttcggagcatgctaccctttcatatggtaaggttcgcta

SEQ ID NO: 337016 - DNA, 56 bp, Artificial
  Synthetic oligonucleotide
attccgaagggatgcgtgggtccttgtaaggtacaggattacgaattcaagatgga

SEQ ID NO: 337017 - DNA, 56 bp, Artificial
  Synthetic oligonucleotide
attccgaatcggacgatttccatgggaaaccatgagacctttgggtcgatgcttac

SEQ ID NO: 337018 - DNA, 56 bp, Artificial
  Synthetic oligonucleotide
attccgacatcagaattcggaagggacaggacaagctggagatctaaaaagcactc

SEQ ID NO: 337019 - DNA, 57 bp, Artificial
  Synthetic oligonucleotide
attccgactaccaacacgactgcgacaggccgcgtttctgtcatttgggataaggat

SEQ ID NO: 337020 - DNA, 49 bp, Artificial
  Synthetic oligonucleotide
attccgactccccccccaagggtcgcccgggaatggcgggaccccactc

SEQ ID NO: 337021 - DNA, 58 bp, Artificial
  Synthetic oligonucleotide
attccgagggtagtaatcaggcggtagagaagttttacctagagcatatcaatgctta

SEQ ID NO: 337022 - DNA, 60 bp, Artificial
  Synthetic oligonucleotide
attccgagtccgcatccgtgtgcgatattcctattgtgcttcttgaagcccaagactcac

SEQ ID NO: 337023 - DNA, 51 bp, Artificial
  Synthetic oligonucleotide
attccgcatcatagctgagttagacggcgcgtcacaatgggtgaactatcc

SEQ ID NO: 337024 - DNA, 51 bp, Artificial
  Synthetic oligonucleotide
attccgccccagctataggttcgggagtcaacccccgaggggtaggaccac

SEQ ID NO: 337025 - DNA, 56 bp, Artificial
  Synthetic oligonucleotide
attccggaaactacacaagacgtagggctctggctactgtgttaggtggaggagca

SEQ ID NO: 337026 - DNA, 60 bp, Artificial
  Synthetic oligonucleotide
attccggacgacataacagagagacacatactaaaacaagagacctcatcatacaactta

SEQ ID NO: 337027 - DNA, 51 bp, Artificial
  Synthetic oligonucleotide
attccggcacgattgtaggtgcggataggtctctctacagagctgtatagg

SEQ ID NO: 337028 - DNA, 53 bp, Artificial
  Synthetic oligonucleotide
attccgggcaagttagcttatccctaacgctcataagcgaaagaacgagtagg

SEQ ID NO: 337029 - DNA, 52 bp, Artificial
  Synthetic oligonucleotide
attccggggtaagtaatcacgcggcaccaagctttcccgacccgtcaaccac

SEQ ID NO: 337030 - DNA, 56 bp, Artificial
  Synthetic oligonucleotide
attccggtggggaacgattgtatcacggttcaaagactgtgctgcactcgccaccc

SEQ ID NO: 337031 - DNA, 50 bp, Artificial
  Synthetic oligonucleotide
attccgtaatccaagtttagtacaacaatctgaggtcagtggcctacaac

SEQ ID NO: 337032 - DNA, 51 bp, Artificial
  Synthetic oligonucleotide
attccgtacacggacaccaattgcttctcccccccttgtattggggactgg

SEQ ID NO: 337033 - DNA, 57 bp, Artificial
  Synthetic oligonucleotide
attccgtcaagttgagggattagcctttggatattacagttctagtactgcttcacc

SEQ ID NO: 337034 - DNA, 58 bp, Artificial
  Synthetic oligonucleotide
attccgtctcacgttctccaactgaactgtttggagatccaatctccaaacaatatac

SEQ ID NO: 337035 - DNA, 57 bp, Artificial
  Synthetic oligonucleotide
attccgtgtacgtcagcggcggcaaagctctaggggttcacaagcccccggcagcta

SEQ ID NO: 337036 - DNA, 53 bp, Artificial
  Synthetic oligonucleotide
attccgttagatatagaccttactattttaattatcgggaacgattttacaca

SEQ ID NO: 337037 - DNA, 53 bp, Artificial
  Synthetic oligonucleotide
attccgttggcttttcgaactgggaggaggttcccttctgctcaccccatttc

SEQ ID NO: 337038 - DNA, 54 bp, Artificial
  Synthetic oligonucleotide
attccgtttatccggtttaagcagtgtaacttcatctggctttgggcggaccgc

SEQ ID NO: 337039 - DNA, 57 bp, Artificial
  Synthetic oligonucleotide
attcctaaaatacccctgtatctgtgtctggtaggcgcgtgatagtggactgaaaaa

SEQ ID NO: 337040 - DNA, 55 bp, Artificial
  Synthetic oligonucleotide
attcctaatcccctcttccaaattattgaaatcgaaaggaggaataagtccagca

SEQ ID NO: 337041 - DNA, 60 bp, Artificial
  Synthetic oligonucleotide
attcctaccattggtgtcagagatcattaaacacttgaaagatttactatagcatatcat

SEQ ID NO: 337042 - DNA, 51 bp, Artificial
  Synthetic oligonucleotide
attcctacgaagcagatccagagggcaaaagtggccagaacattcactgtg

SEQ ID NO: 337043 - DNA, 56 bp, Artificial
  Synthetic oligonucleotide
attcctagaaaaaagtacccaccacagccttagctgacatttggcgctgtaggaac

SEQ ID NO: 337044 - DNA, 59 bp, Artificial
  Synthetic oligonucleotide
attcctagcggcgttgataaacgtgcaagagtcggatgcaaaagactacacgcaaatgg

SEQ ID NO: 337045 - DNA, 55 bp, Artificial
  Synthetic oligonucleotide
attcctcaacatgggttttaccgactgaactacgtgttagtcgctgtggtacctc

SEQ ID NO: 337046 - DNA, 60 bp, Artificial
  Synthetic oligonucleotide
attcctcacttcagattgattgtcaacaaatcctttcctaagcctattagcaatcttcag

SEQ ID NO: 337047 - DNA, 59 bp, Artificial
  Synthetic oligonucleotide
attcctcatccatgaatgggtgtcagggaaaggtattggtgcaccccacgccatattaa

SEQ ID NO: 337048 - DNA, 53 bp, Artificial
  Synthetic oligonucleotide
attcctccaggattaatgtttaacccaaaagttccaacaagacgagttcaata

SEQ ID NO: 337049 - DNA, 56 bp, Artificial
  Synthetic oligonucleotide
attcctcgtgcaagcgtggaagtccaagaaaaccccaatggggttctcgtatgata

SEQ ID NO: 337050 - DNA, 52 bp, Artificial
  Synthetic oligonucleotide
attcctctcacaaatttagacagacagcgtgatctatttaaacttccaagct

SEQ ID NO: 337051 - DNA, 55 bp, Artificial
  Synthetic oligonucleotide
attcctctcaccccagcgtcgccatattaattcaccacatgcatcggttctgtga

SEQ ID NO: 337052 - DNA, 55 bp, Artificial
  Synthetic oligonucleotide
attcctgagggcaattttgcaatactcgatgagtatacattggacaacaccacaa

SEQ ID NO: 337053 - DNA, 58 bp, Artificial
  Synthetic oligonucleotide
attcctgctcaaggaatctctatgtgtccctcttgttgctgtacaaaaccttcggacg

SEQ ID NO: 337054 - DNA, 58 bp, Artificial
  Synthetic oligonucleotide
attcctgctgaacaaattctctacaccaactttcaatggtatagaaacatcttcagtt

SEQ ID NO: 337055 - DNA, 57 bp, Artificial
  Synthetic oligonucleotide
attcctggacaggcgcacttgtcaccccgtgcgccgcggaagaacaaaaactgccca

SEQ ID NO: 337056 - DNA, 55 bp, Artificial
  Synthetic oligonucleotide
attcctggaggcatttaagaaggacccagtactcttgaaccaaggtgctccaacc

SEQ ID NO: 337057 - DNA, 55 bp, Artificial
  Synthetic oligonucleotide
attcctgtaccagagcagtaagtattattaagcagtatatgtaatgtcagatttg

SEQ ID NO: 337058 - DNA, 57 bp, Artificial
  Synthetic oligonucleotide
attcctgtaggcaaatctcatttgcggtggttgttaccataaacaataatgtcgttg

SEQ ID NO: 337059 - DNA, 53 bp, Artificial
  Synthetic oligonucleotide
attcctgtcttcggccggtcgatcctgtatatcctggagatgcctctcgtcaa

SEQ ID NO: 337060 - DNA, 55 bp, Artificial
  Synthetic oligonucleotide
attcctgtgagtattgctacagaggccgcattcctctgtttcgcttatggcttac

SEQ ID NO: 337061 - DNA, 50 bp, Artificial
  Synthetic oligonucleotide
attccttacatcttccaagttttctactactttggttagaggtatatcat

SEQ ID NO: 337062 - DNA, 60 bp, Artificial
  Synthetic oligonucleotide
attccttagctggatacgtgacttgctggtatcaaactaatctggtggtaccaagcaaca

SEQ ID NO: 337063 - DNA, 53 bp, Artificial
  Synthetic oligonucleotide
attccttccccaccccgttgccgtacgtgaaatctccacttagtgggcttcac

SEQ ID NO: 337064 - DNA, 60 bp, Artificial
  Synthetic oligonucleotide
attccttcctcgtactggagtgacaatggctggtgcacttgtgacactcatcgtcacgtc

SEQ ID NO: 337065 - DNA, 57 bp, Artificial
  Synthetic oligonucleotide
attccttcggtgcatccatcggcgggaattcaactttcacgcgaatacgtttgcgaa

SEQ ID NO: 337066 - DNA, 55 bp, Artificial
  Synthetic oligonucleotide
attccttctcctcgatgatgtcagcgttcttggatgaggaaggagttcatagtgc

SEQ ID NO: 337067 - DNA, 60 bp, Artificial
  Synthetic oligonucleotide
attccttgcttgatgagcagtgatgggttcccctgtgcgtgaatccattattggcgcagt

SEQ ID NO: 337068 - DNA, 57 bp, Artificial
  Synthetic oligonucleotide
attccttggggtgcatgcgtgctccaacttataccctgaggacacttggctaggtaa

SEQ ID NO: 337069 - DNA, 51 bp, Artificial
  Synthetic oligonucleotide
attccttggtggagcgatggagaagcttggtcctcttggtaggactgttgg

SEQ ID NO: 337070 - DNA, 50 bp, Artificial
  Synthetic oligonucleotide
attccttgtaaacccctaccatatcaaaatctgcatccgctgctaatgct

SEQ ID NO: 337071 - DNA, 52 bp, Artificial
  Synthetic oligonucleotide
attccttgtgcaagaatttactagcagacacttcaagacacaaccacttgcg

SEQ ID NO: 337072 - DNA, 59 bp, Artificial
  Synthetic oligonucleotide
attccttgtggaagagcaccaattactgacgatgtcaggcctggctgaacgttgaaaag

SEQ ID NO: 337073 - DNA, 60 bp, Artificial
  Synthetic oligonucleotide
attcctttctcacaggaggtgtgggaagcgtgtgcgcacgaggtgcaaagcaagtacttg

SEQ ID NO: 337074 - DNA, 58 bp, Artificial
  Synthetic oligonucleotide
attcgaaacagcttgaccccagagttattttatgagggattaatagatggacttatca

SEQ ID NO: 337075 - DNA, 56 bp, Artificial
  Synthetic oligonucleotide
attcgaaatgcctaagcgggatccctcatggcgccaaatggcgggaacctcaaagg

SEQ ID NO: 337076 - DNA, 54 bp, Artificial
  Synthetic oligonucleotide
attcgaacgacactagagcggatttgttgtcatggactttgagatattgatcaa

SEQ ID NO: 337077 - DNA, 55 bp, Artificial
  Synthetic oligonucleotide
attcgaagaatctaccctacatttgcacactggtgcatcatgttgtgtccgacct

SEQ ID NO: 337078 - DNA, 53 bp, Artificial
  Synthetic oligonucleotide
attcgaagccgttgggaaagaattcaacaacctagaaaggagaatagagaact

SEQ ID NO: 337079 - DNA, 60 bp, Artificial
  Synthetic oligonucleotide
attcgaaggggccagcatttgggtgagtcacttattggatattgcactgggtcaagtgct

SEQ ID NO: 337080 - DNA, 57 bp, Artificial
  Synthetic oligonucleotide
attcgaatgataaagcggggaatcaatgatcgaaatttttggagaggcgagaacgga

SEQ ID NO: 337081 - DNA, 57 bp, Artificial
  Synthetic oligonucleotide
attcgaatttctggagacactggatcgatacaaaagatgggcagtgtggtttaccac

SEQ ID NO: 337082 - DNA, 58 bp, Artificial
  Synthetic oligonucleotide
attcgacagctaaggggatactccttccttttcgtcgtatatgagggagatcgtgtgc

SEQ ID NO: 337083 - DNA, 58 bp, Artificial
  Synthetic oligonucleotide
attcgaccaactgggccgacgagacagtgttaacagctcgtaatataggcctatgtag

SEQ ID NO: 337084 - DNA, 57 bp, Artificial
  Synthetic oligonucleotide
attcgacccttgcgaacaaactggatagcgtgtttcttgatgttaaacgcacggtca

SEQ ID NO: 337085 - DNA, 55 bp, Artificial
  Synthetic oligonucleotide
attcgaccgggggcccaattgacccgctcacattgaaccaaaggagcctatcatg

SEQ ID NO: 337086 - DNA, 53 bp, Artificial
  Synthetic oligonucleotide
attcgacgattcctaaagttccaactggaaaggaaatgggtgcacatggtaac

SEQ ID NO: 337087 - DNA, 56 bp, Artificial
  Synthetic oligonucleotide
attcgagaaatttttccctagtagttcatacaggaggccagttggaatttctagca

SEQ ID NO: 337088 - DNA, 55 bp, Artificial
  Synthetic oligonucleotide
attcgagagaaactaccgcttggtgttgtcgcccgatcccgctacgcggcggcac

SEQ ID NO: 337089 - DNA, 59 bp, Artificial
  Synthetic oligonucleotide
attcgagagaggtcatcatggagggtgaactagaagcaggtacagatcccaaggaaggt

SEQ ID NO: 337090 - DNA, 56 bp, Artificial
  Synthetic oligonucleotide
attcgagagggccctaatgcacgtcggtaatctaggggttggcaccacgataattc

SEQ ID NO: 337091 - DNA, 60 bp, Artificial
  Synthetic oligonucleotide
attcgagataaatgaactcagctacatgctcacacaccctctcgccatgctcctaaacaa

SEQ ID NO: 337092 - DNA, 60 bp, Artificial
  Synthetic oligonucleotide
attcgagatccattatgtgctttcctcccagttgaatggaatggagttggagcttattat

SEQ ID NO: 337093 - DNA, 60 bp, Artificial
  Synthetic oligonucleotide
attcgagcaggttgagcctccagtattgaataaattcgatcctgcgttccctcaagatag

SEQ ID NO: 337094 - DNA, 55 bp, Artificial
  Synthetic oligonucleotide
attcgagctactatacggcccaaaatagtcgaggagttgagacggagtaaggagg

SEQ ID NO: 337095 - DNA, 56 bp, Artificial
  Synthetic oligonucleotide
attcgataaacagctgaaaccgaacccgagcaatctggttcaggatgtttcggatt

SEQ ID NO: 337096 - DNA, 57 bp, Artificial
  Synthetic oligonucleotide
attcgataccgaggacaaatccgttgatatgtctgactcgctggggactataccgga

SEQ ID NO: 337097 - DNA, 60 bp, Artificial
  Synthetic oligonucleotide
attcgatcggatactactgaacttgctatctggatgagaaagattcgcagttatgacgtt

SEQ ID NO: 337098 - DNA, 51 bp, Artificial
  Synthetic oligonucleotide
attcgatctgaggacgaacgttttatggattccattacgttcggtctaggt

SEQ ID NO: 337099 - DNA, 54 bp, Artificial
  Synthetic oligonucleotide
attcgatcttggtcgcaatacatgactcaggatacaatgacggaactatcttcc

SEQ ID NO: 337100 - DNA, 55 bp, Artificial
  Synthetic oligonucleotide
attcgatggacatccctatgggacaatatcgagctaaatgatattcggtagcctt

SEQ ID NO: 337101 - DNA, 60 bp, Artificial
  Synthetic oligonucleotide
attcgatgggcctcatacaagtatgcagagaagatacgcgccatgctgccaccagacttt

SEQ ID NO: 337102 - DNA, 55 bp, Artificial
  Synthetic oligonucleotide
attcgatgttgtagcagttcgtacagacgggtcaaacatatcgacacagtggcca

SEQ ID NO: 337103 - DNA, 60 bp, Artificial
  Synthetic oligonucleotide
attcgattaagcgtgtccagattgtgtatgtcgtggtgcactgtgatgttgacgggtccg

SEQ ID NO: 337104 - DNA, 58 bp, Artificial
  Synthetic oligonucleotide
attcgattactcagggtatgacgccagtcttagcccggtgtggtttagagcactagaa

SEQ ID NO: 337105 - DNA, 54 bp, Artificial
  Synthetic oligonucleotide
attcgcaaaagaagggtaagtggaatcttttacgcgaatttgtgtgttggccac

SEQ ID NO: 337106 - DNA, 60 bp, Artificial
  Synthetic oligonucleotide
attcgcaaaccatacaggtatttcaagaagatcacatcagattagattttcagagtctgc

SEQ ID NO: 337107 - DNA, 51 bp, Artificial
  Synthetic oligonucleotide
attcgcaatcgatacggatgccccacattccaggtcacgcatcatcacacg

SEQ ID NO: 337108 - DNA, 60 bp, Artificial
  Synthetic oligonucleotide
attcgcaccattctacacgagcaatgcagatgctgttccaacgtttaggagaccgcgttg

SEQ ID NO: 337109 - DNA, 60 bp, Artificial
  Synthetic oligonucleotide
attcgcacgactctcagtgttgatctgacgggcactccgagttacgaagtgcctatcgtc

SEQ ID NO: 337110 - DNA, 60 bp, Artificial
  Synthetic oligonucleotide
attcgcacttgctataatcttgaaggcattgtacatgctgtcaaccagagggagacaaac

SEQ ID NO: 337111 - DNA, 55 bp, Artificial
  Synthetic oligonucleotide
attcgcagcacttcacttcgagccctaaaatagaagcttactttgtcaaggatgc

SEQ ID NO: 337112 - DNA, 52 bp, Artificial
  Synthetic oligonucleotide
attcgcagtgcgaatctcatctggctaccatacggtgtgtcgagttccggtt

SEQ ID NO: 337113 - DNA, 58 bp, Artificial
  Synthetic oligonucleotide
attcgcatatggaagggggatactgccaggcactaagaaggacttcttgaccgtaatg

SEQ ID NO: 337114 - DNA, 60 bp, Artificial
  Synthetic oligonucleotide
attcgcatcgctttgattcaatatagttgcttgtcgcaacaactcccgtgtaattttcca

SEQ ID NO: 337115 - DNA, 60 bp, Artificial
  Synthetic oligonucleotide
attcgccgcaatatgcacacatttggaagtatgcttcatgtattcagatttccacttcat

SEQ ID NO: 337116 - DNA, 52 bp, Artificial
  Synthetic oligonucleotide
attcgccgcacgaggtgggcgactccggtcctcgtctgttgcgattcggcat

SEQ ID NO: 337117 - DNA, 52 bp, Artificial
  Synthetic oligonucleotide
attcgccggaacttattttgtgtgccatcattctacgagagaaaggaaaatt

SEQ ID NO: 337118 - DNA, 60 bp, Artificial
  Synthetic oligonucleotide
attcgccggacacagtcggctacgatcttgttcgcgatcttattctagttctccgcgcaa

SEQ ID NO: 337119 - DNA, 59 bp, Artificial
  Synthetic oligonucleotide
attcgcgacggtacagttgcaatatcatttggtcctgggatttactctcgcatgtttcc

SEQ ID NO: 337120 - DNA, 58 bp, Artificial
  Synthetic oligonucleotide
attcgcggtcttcctactgacctgtcggtgttagatctatttgattggtctcgctttc

SEQ ID NO: 337121 - DNA, 53 bp, Artificial
  Synthetic oligonucleotide
attcgcgtgcacgcgccaaaatctgacgctgtacaatctcacggttaaagata

SEQ ID NO: 337122 - DNA, 55 bp, Artificial
  Synthetic oligonucleotide
attcgcgtttcgccgagatatcatccctatggggggagaccggtaagacggaggc

SEQ ID NO: 337123 - DNA, 55 bp, Artificial
  Synthetic oligonucleotide
attcgctaagatattcccttcaaatccgttgaagtcgaatggaacgtgcatgtct

SEQ ID NO: 337124 - DNA, 60 bp, Artificial
  Synthetic oligonucleotide
attcgctagacatgctggttaccgagatgtttagggagtacaaccatagacacagtgtcg

SEQ ID NO: 337125 - DNA, 55 bp, Artificial
  Synthetic oligonucleotide
attcgctcatgcaatatgatcgaccaaagttgcaaccacccaccaataccgcgtg

SEQ ID NO: 337126 - DNA, 58 bp, Artificial
  Synthetic oligonucleotide
attcgctcccgacgcgcctctgtattccggcccagcatactaagccgtagattcgttg

SEQ ID NO: 337127 - DNA, 55 bp, Artificial
  Synthetic oligonucleotide
attcgctcctaatacgctaaagtcggttgagatctccctagcctcaaaaccagcg

SEQ ID NO: 337128 - DNA, 60 bp, Artificial
  Synthetic oligonucleotide
attcgctcgtaaggtgcctgcggcatggacgattcggggaagatggtcgctcccttgagc

SEQ ID NO: 337129 - DNA, 55 bp, Artificial
  Synthetic oligonucleotide
attcgctctggtggcgatcattccgacaaacgcagacaagatctgcctcgggcac

SEQ ID NO: 337130 - DNA, 59 bp, Artificial
  Synthetic oligonucleotide
attcgctgaacttgtgacggattctccagttatatcagcgataatagattttaagacgt

SEQ ID NO: 337131 - DNA, 56 bp, Artificial
  Synthetic oligonucleotide
attcgctgaattacgtgctaagaaattacgtggccaaacgaaagatacttcattgt

SEQ ID NO: 337132 - DNA, 60 bp, Artificial
  Synthetic oligonucleotide
attcgctgaccggttaggcgagcacaatccagtggcgactgcaaacacacaagtatattc

SEQ ID NO: 337133 - DNA, 60 bp, Artificial
  Synthetic oligonucleotide
attcgctgcttgagctgcagtgatgggttcccctgtgcgtgaatccatggttgtggcagt

SEQ ID NO: 337134 - DNA, 54 bp, Artificial
  Synthetic oligonucleotide
attcggaaagtagctaacacaatccgtgacagcgtgtttaataagattcaatgg

SEQ ID NO: 337135 - DNA, 56 bp, Artificial
  Synthetic oligonucleotide
attcggaacattcggtgcgtaattgggaggatgacaacattactatgtttttccac

SEQ ID NO: 337136 - DNA, 56 bp, Artificial
  Synthetic oligonucleotide
attcggaacctgccccaaatacattagagttaagagtctcaaactggcagtcggtc

SEQ ID NO: 337137 - DNA, 60 bp, Artificial
  Synthetic oligonucleotide
attcggaacgtatgaatacggcatatatgtcatatattgcccaaccgatatgtagaatag

SEQ ID NO: 337138 - DNA, 60 bp, Artificial
  Synthetic oligonucleotide
attcggaagggacagggcaagctggagatctaaagagcactcaagcagccattgaccaga

SEQ ID NO: 337139 - DNA, 60 bp, Artificial
  Synthetic oligonucleotide
attcggacaagcatatgaagtatgattccaactttgatgctgtgatggatcagtttcaaa

SEQ ID NO: 337140 - DNA, 52 bp, Artificial
  Synthetic oligonucleotide
attcggacagacactagtatttccctaagcattgatcagcacaagtcttatg

SEQ ID NO: 337141 - DNA, 60 bp, Artificial
  Synthetic oligonucleotide
attcggacatgagaagggagcatgttctactctaagagttagagatgcacataggaatag

SEQ ID NO: 337142 - DNA, 60 bp, Artificial
  Synthetic oligonucleotide
attcggacgctcaagacggctgacgagatgcgcatcggtctctacaccaagccctacctg

SEQ ID NO: 337143 - DNA, 58 bp, Artificial
  Synthetic oligonucleotide
attcggactaaatcgctatcagcgggggtcaggtctgtctataacaacgtcaccgcta

SEQ ID NO: 337144 - DNA, 54 bp, Artificial
  Synthetic oligonucleotide
attcggactaagtgcacagtgttacagcttacccccagcgaagtggaaggtaat

SEQ ID NO: 337145 - DNA, 60 bp, Artificial
  Synthetic oligonucleotide
attcggagaaagtgaacaaatcatcgttactagggagccatatgtgtcatgcgatccatc

SEQ ID NO: 337146 - DNA, 60 bp, Artificial
  Synthetic oligonucleotide
attcggatgtctacgaggccgttcgtttcttgctcgcaatgtcaaagtcatcacgcccaa

SEQ ID NO: 337147 - DNA, 60 bp, Artificial
  Synthetic oligonucleotide
attcggccacagagacatgttggtggaccctgttgtttgtgtaacaagcagtacatacgc

SEQ ID NO: 337148 - DNA, 59 bp, Artificial
  Synthetic oligonucleotide
attcggcgccccgtgcgttactcatgttagaatgctcgtatcccgacgtgcgtatatta

SEQ ID NO: 337149 - DNA, 58 bp, Artificial
  Synthetic oligonucleotide
attcggctcagctattagaaatagaaattggatgactgattctaaaacggttgctaaa

SEQ ID NO: 337150 - DNA, 60 bp, Artificial
  Synthetic oligonucleotide
attcggctcctgctacggtgccatcggctgtattccctactaccttactacactgcgaca

SEQ ID NO: 337151 - DNA, 55 bp, Artificial
  Synthetic oligonucleotide
attcggctcttcaaactctaactcccaactttccacaggttctagctgctcttgc

SEQ ID NO: 337152 - DNA, 57 bp, Artificial
  Synthetic oligonucleotide
attcggctttaccatctggtccgttccgcttggatcctgcaagcgcccaaggagtcc

SEQ ID NO: 337153 - DNA, 55 bp, Artificial
  Synthetic oligonucleotide
attcgggaagaaaatactagacagaaactcgaaatcctccatctggaggtcgtcc

SEQ ID NO: 337154 - DNA, 60 bp, Artificial
  Synthetic oligonucleotide
attcgggaattttgctgcgtgatcatgtcgaaaaaatcatcgatcgtttcgtccatgggc

SEQ ID NO: 337155 - DNA, 53 bp, Artificial
  Synthetic oligonucleotide
attcgggagagttgaggtctattctacgctacatctactccaaaatttattgt

SEQ ID NO: 337156 - DNA, 54 bp, Artificial
  Synthetic oligonucleotide
attcgggagttacgcttggtaatcatcttgactacccaaacggattcccaggaa

SEQ ID NO: 337157 - DNA, 51 bp, Artificial
  Synthetic oligonucleotide
attcgggatcctaggatataaataccacgtcaccgaggctggtgtagtatt

SEQ ID NO: 337158 - DNA, 59 bp, Artificial
  Synthetic oligonucleotide
attcgggccacagatcacttcccctgccttaactcagctgactatccaggcgctttaca

SEQ ID NO: 337159 - DNA, 57 bp, Artificial
  Synthetic oligonucleotide
attcgggcccatctctccacctctaagagacagtcatcctcaggccatgcagtgaaa

SEQ ID NO: 337160 - DNA, 60 bp, Artificial
  Synthetic oligonucleotide
attcgggcgtatgatagaaagcacaagattgcgttagacaaacgtacggatgattctggc

SEQ ID NO: 337161 - DNA, 56 bp, Artificial
  Synthetic oligonucleotide
attcggggataatcgttcaccggtgcttaacgtgactgccaacgctgactgggtta

SEQ ID NO: 337162 - DNA, 56 bp, Artificial
  Synthetic oligonucleotide
attcggggcacgctggaccggggtccaagctttaagccgtacagcggcacagctta

SEQ ID NO: 337163 - DNA, 55 bp, Artificial
  Synthetic oligonucleotide
attcgggtggctacttaagcgcttctatacttaagtaccgaatgttataccgtca

SEQ ID NO: 337164 - DNA, 53 bp, Artificial
  Synthetic oligonucleotide
attcggtaaaccgagtaggaaactacttatcaggagacaatagcccttatgac

SEQ ID NO: 337165 - DNA, 60 bp, Artificial
  Synthetic oligonucleotide
attcggtagccaatgcctttatgtcctggtgtcagtatgcggcagtctgtaggtatgaat

SEQ ID NO: 337166 - DNA, 54 bp, Artificial
  Synthetic oligonucleotide
attcggtatatagagcaggagtgccgttaaactggaagtatagagtagtgattg

SEQ ID NO: 337167 - DNA, 60 bp, Artificial
  Synthetic oligonucleotide
attcggtgatttcattgagtgagcaggcaataccataccgcgcatcagctgactggatgt

SEQ ID NO: 337168 - DNA, 49 bp, Artificial
  Synthetic oligonucleotide
attcggtgttcaacttttaatgcctaagaccgggaaacccttggggtat

SEQ ID NO: 337169 - DNA, 55 bp, Artificial
  Synthetic oligonucleotide
attcggttgcagatcggtaacgggcagtgttgctacggcgcccggtcacgcctgt

SEQ ID NO: 337170 - DNA, 57 bp, Artificial
  Synthetic oligonucleotide
attcgtacggccggtcttcaactaccaggtgtctcaagctatcaacgagattcaaaa

SEQ ID NO: 337171 - DNA, 50 bp, Artificial
  Synthetic oligonucleotide
attcgtagagaagaagcaagatacttggacgttggggttaaggagatcgg

SEQ ID NO: 337172 - DNA, 55 bp, Artificial
  Synthetic oligonucleotide
attcgtataatttctcattcgcttcgcttccagtctccaggtaagtcgttttcac

SEQ ID NO: 337173 - DNA, 60 bp, Artificial
  Synthetic oligonucleotide
attcgtattcgtatggaagttgagcacgtgatgcctaagttcatcacgcgtttctcaccc

SEQ ID NO: 337174 - DNA, 56 bp, Artificial
  Synthetic oligonucleotide
attcgtattgaaatagtcgcgcaggcccggaaatgccgtcggctccaggttaaatg

SEQ ID NO: 337175 - DNA, 59 bp, Artificial
  Synthetic oligonucleotide
attcgtcaagaaattgcctgctctaccaatcaatgtccattctaccaattacgtatttg

SEQ ID NO: 337176 - DNA, 51 bp, Artificial
  Synthetic oligonucleotide
attcgtcggagtcggcattgtagcgaacagaagacgggaggcctgcgctgg

SEQ ID NO: 337177 - DNA, 58 bp, Artificial
  Synthetic oligonucleotide
attcgtcgtcagtcattcgtttgtcatggatctccacaattaccgacccagtcgcgtt

SEQ ID NO: 337178 - DNA, 54 bp, Artificial
  Synthetic oligonucleotide
attcgtctcggtgagtagaatccaacgagccctattacggaattttaacaccga

SEQ ID NO: 337179 - DNA, 60 bp, Artificial
  Synthetic oligonucleotide
attcgtctcttctatgcatgggttcttgaacaagcaccctacaacgaactcgcaagacaa

SEQ ID NO: 337180 - DNA, 58 bp, Artificial
  Synthetic oligonucleotide
attcgtcttttcgacggacggaacgcaattgtcacagttgctcacaatatagaggagg

SEQ ID NO: 337181 - DNA, 58 bp, Artificial
  Synthetic oligonucleotide
attcgtgacaggctcgaccgcctaaccgtttatggtgtaggtcgatttgtctgtgtgc

SEQ ID NO: 337182 - DNA, 60 bp, Artificial
  Synthetic oligonucleotide
attcgtgatacataacagcattggtggaaatacccttgaggatcttcatcaaatagtgct

SEQ ID NO: 337183 - DNA, 60 bp, Artificial
  Synthetic oligonucleotide
attcgtgcatgcatgttggtgcggaaggttgctgggggtcattatgtccaaatggccttc

SEQ ID NO: 337184 - DNA, 55 bp, Artificial
  Synthetic oligonucleotide
attcgtgctccccgtgccctactggctaaacttgtgttagccctagacgaccgaa

SEQ ID NO: 337185 - DNA, 50 bp, Artificial
  Synthetic oligonucleotide
attcgtgggaattgcaatagcaggactcgtcatcgggctagttgcgaaat

SEQ ID NO: 337186 - DNA, 52 bp, Artificial
  Synthetic oligonucleotide
attcgtgggattattaacccgttctgttattaagaaagcttaggcggagtaa

SEQ ID NO: 337187 - DNA, 55 bp, Artificial
  Synthetic oligonucleotide
attcgtgggtgcaaactcaaacgctaacgtatatgtcttcggacctaatcctggc

SEQ ID NO: 337188 - DNA, 55 bp, Artificial
  Synthetic oligonucleotide
attcgtgtacgtcattcgcaccttgttccaaacggtgactgcgttagggcacacc

SEQ ID NO: 337189 - DNA, 58 bp, Artificial
  Synthetic oligonucleotide
attcgtgtatcttgctgcgcaagccagaataatgttgaccggttaccttgaccttcgg

SEQ ID NO: 337190 - DNA, 51 bp, Artificial
  Synthetic oligonucleotide
attcgtgtcacgtctacagtcgccatttcccgcggaccacacatctaattg

SEQ ID NO: 337191 - DNA, 53 bp, Artificial
  Synthetic oligonucleotide
attcgtgtgcttgtatcgaccatgaccctgagtggtatgaagacctcatttgc

SEQ ID NO: 337192 - DNA, 60 bp, Artificial
  Synthetic oligonucleotide
attcgtgtgtaatgggtgagtgagctgatgtgatcactgaggcatgtgccgatgcttcgg

SEQ ID NO: 337193 - DNA, 57 bp, Artificial
  Synthetic oligonucleotide
attcgttcaagactgtaccgagcattgacgagctattccgcgttggcatttttttta

SEQ ID NO: 337194 - DNA, 60 bp, Artificial
  Synthetic oligonucleotide
attcgttcaagagtatatactcgtgaaataccctgtgctggatcggttctatatcagcgg

SEQ ID NO: 337195 - DNA, 53 bp, Artificial
  Synthetic oligonucleotide
attcgttcacgttttcttacgcatgaagttttcgacttaacgtctgacccgcc

SEQ ID NO: 337196 - DNA, 58 bp, Artificial
  Synthetic oligonucleotide
attcgttgatgcaattaagacctcggaagatggaagttacaatcaacatggacaactt

SEQ ID NO: 337197 - DNA, 60 bp, Artificial
  Synthetic oligonucleotide
attcgttgtcagtcattcttttgtcgtggatctccactatcacactcccggtggcgttga

SEQ ID NO: 337198 - DNA, 60 bp, Artificial
  Synthetic oligonucleotide
attcgttgtctgacgagcagtgatgagttcccctgtgcgagaatccatggttggcgcagt

SEQ ID NO: 337199 - DNA, 57 bp, Artificial
  Synthetic oligonucleotide
attcgtttacgcattaagcgtcgttatcctgatttggatccgaaagaagtcgattgc

SEQ ID NO: 337200 - DNA, 58 bp, Artificial
  Synthetic oligonucleotide
attcgtttgcctagccatatccgttcctcgtgggtagttaggcgatattgccggcaga

SEQ ID NO: 337201 - DNA, 58 bp, Artificial
  Synthetic oligonucleotide
attctaacaggtcaactttagcgaaactggtatcatctccaatgtcaattttagtcgc

SEQ ID NO: 337202 - DNA, 60 bp, Artificial
  Synthetic oligonucleotide
attctaacgaatgagagttcgtacctgtacaactctatttctatggttatgcgcacaatg

SEQ ID NO: 337203 - DNA, 60 bp, Artificial
  Synthetic oligonucleotide
attctaagagattgacctgccgtgaagctacgataatactgactcagctgggcgatactt

SEQ ID NO: 337204 - DNA, 58 bp, Artificial
  Synthetic oligonucleotide
attctaagttcaatctagggagagggtttatctcaaacacattagctctcctatccac

SEQ ID NO: 337205 - DNA, 59 bp, Artificial
  Synthetic oligonucleotide
attctaatagatcaactttagcaaagttggtgtcatctccaatgtcaattttagtcgct

SEQ ID NO: 337206 - DNA, 59 bp, Artificial
  Synthetic oligonucleotide
attctaatagatcaactttggcaaaactagtatcatctccaatgtcaattttagttgct

SEQ ID NO: 337207 - DNA, 56 bp, Artificial
  Synthetic oligonucleotide
attctaataggaagtcgttctctggtgatgacggagagcttagaagggattaccct

SEQ ID NO: 337208 - DNA, 59 bp, Artificial
  Synthetic oligonucleotide
attctaatgcgaaggactgctttccgttattatcagagcagtccctcgaagttcctgta

SEQ ID NO: 337209 - DNA, 57 bp, Artificial
  Synthetic oligonucleotide
attctaatggcacggtaaaagacaggagtccctataggactctaatgagtgtagaaa

SEQ ID NO: 337210 - DNA, 53 bp, Artificial
  Synthetic oligonucleotide
attctacacaaaaattagatatgtctgagttagccgatcttatactgaacgaa

SEQ ID NO: 337211 - DNA, 56 bp, Artificial
  Synthetic oligonucleotide
attctacacagaacgagccgtttttgacatcgaccctttgcctatattatccaacc

SEQ ID NO: 337212 - DNA, 55 bp, Artificial
  Synthetic oligonucleotide
attctacagattttcttaccccaattttgaccgctcctcagaatggtggttttgc

SEQ ID NO: 337213 - DNA, 60 bp, Artificial
  Synthetic oligonucleotide
attctacatgctcaaccacgacacctcatgtggcccgtacatcggcggccgcaagaaaga

SEQ ID NO: 337214 - DNA, 58 bp, Artificial
  Synthetic oligonucleotide
attctacattcaaagtttttgactctgaaaatttcatgatagagtatggaacgaccga

SEQ ID NO: 337215 - DNA, 60 bp, Artificial
  Synthetic oligonucleotide
attctacattgctacgcactaactcaaagcacgtaaagaccgcactgtatgcgatggcgt

SEQ ID NO: 337216 - DNA, 60 bp, Artificial
  Synthetic oligonucleotide
attctaccacaaatgtgataatgcatgcatggagagcgtcagaaatgggacttatgacta

SEQ ID NO: 337217 - DNA, 48 bp, Artificial
  Synthetic oligonucleotide
attctacccccgaatacaaaataggggaaggagaggttaccgggttaa

SEQ ID NO: 337218 - DNA, 60 bp, Artificial
  Synthetic oligonucleotide
attctaccggtgagtacgttgcaacaagccacgatgcacttacgagcctatatgcaacac

SEQ ID NO: 337219 - DNA, 52 bp, Artificial
  Synthetic oligonucleotide
attctacgaataaccgcttggagggtaacttaaaattcgtgtttgacactta

SEQ ID NO: 337220 - DNA, 55 bp, Artificial
  Synthetic oligonucleotide
attctacgattgacacgtgctttgacgggtatgaagttgctacaggtggtataca

SEQ ID NO: 337221 - DNA, 55 bp, Artificial
  Synthetic oligonucleotide
attctacgatttgggtctcgcttcgtcgtctggacgaaacgactcttcttacttc

SEQ ID NO: 337222 - DNA, 54 bp, Artificial
  Synthetic oligonucleotide
attctacgtccttccgctccgtggaaagttgtctttctgggaggccggcacgac

SEQ ID NO: 337223 - DNA, 50 bp, Artificial
  Synthetic oligonucleotide
attctactaaagaatttgtacaacgtacatcttatgtttttcatggaaca

SEQ ID NO: 337224 - DNA, 58 bp, Artificial
  Synthetic oligonucleotide
attctactatgccatcgttggacgggaaaagggtgagcaaggcactccccatttgcaa

SEQ ID NO: 337225 - DNA, 60 bp, Artificial
  Synthetic oligonucleotide
attctactccctgggtgaattgccgtcagcatggggtccagcttgctacatcagctctgt

SEQ ID NO: 337226 - DNA, 60 bp, Artificial
  Synthetic oligonucleotide
attctactgaagcaatggtgtactacttcatgtgcatttggggatcctggtgatataatg

SEQ ID NO: 337227 - DNA, 52 bp, Artificial
  Synthetic oligonucleotide
attctagaggcattacaaagagctggtagagctttcatccacatacccgtac

SEQ ID NO: 337228 - DNA, 52 bp, Artificial
  Synthetic oligonucleotide
attctagatactccttactatgactttttacctattaccccaaaaataccca

SEQ ID NO: 337229 - DNA, 58 bp, Artificial
  Synthetic oligonucleotide
attctagatggtccttatcaacctactacatttacaccacctactgattactggatac

SEQ ID NO: 337230 - DNA, 52 bp, Artificial
  Synthetic oligonucleotide
attctaggagcgtcgactacaatgagaagatcgagtttgaagctcctcctag

SEQ ID NO: 337231 - DNA, 60 bp, Artificial
  Synthetic oligonucleotide
attctagtcgctgtagctgctcgagtgctgcttctttagagagagaacaccttgggtatg

SEQ ID NO: 337232 - DNA, 60 bp, Artificial
  Synthetic oligonucleotide
attctatagaacctgcaagctagttgggatcaatatgagcaaaaagaagtcctacataaa

SEQ ID NO: 337233 - DNA, 60 bp, Artificial
  Synthetic oligonucleotide
attctatatctagaacacttgctcgcattgatctattgctagaagatgagcgaactaagc

SEQ ID NO: 337234 - DNA, 55 bp, Artificial
  Synthetic oligonucleotide
attctatggcaatcggtgtaacggggtgcgatatataggtgtaccccaaatggca

SEQ ID NO: 337235 - DNA, 54 bp, Artificial
  Synthetic oligonucleotide
attctatggttggaaaggtttgtggaatgggtcgctcaaggcggaacttagacc

SEQ ID NO: 337236 - DNA, 55 bp, Artificial
  Synthetic oligonucleotide
attctatgtgtctggacatccaggcgtacagttcaccattcgcttaaaaatcacc

SEQ ID NO: 337237 - DNA, 53 bp, Artificial
  Synthetic oligonucleotide
attctattgagacaaggagcgtgactaaacgttgcccggcggatgtgaccgtt

SEQ ID NO: 337238 - DNA, 60 bp, Artificial
  Synthetic oligonucleotide
attctattgtgaatcagctcgcatgctacaccattttagctgtcttgggctatgacatca

SEQ ID NO: 337239 - DNA, 54 bp, Artificial
  Synthetic oligonucleotide
attctcaaaaggttaagtggccgcaagttacagcaaaggaagtaatatgcatgg

SEQ ID NO: 337240 - DNA, 58 bp, Artificial
  Synthetic oligonucleotide
attctcaaacatgtcgctgtccctgttggacttgtacttaggtcgaggttacaatgtg

SEQ ID NO: 337241 - DNA, 60 bp, Artificial
  Synthetic oligonucleotide
attctcaacagaggtggcgatgaaaatccacgaggcccggtgagccgtgaacatgtggag

SEQ ID NO: 337242 - DNA, 58 bp, Artificial
  Synthetic oligonucleotide
attctcaatatacctgtaagaatacgacaaggctttgaaagagctcttttataacatg

SEQ ID NO: 337243 - DNA, 55 bp, Artificial
  Synthetic oligonucleotide
attctcacgtcctcttccaatttgtcccagtcaaacttgaaatttaggccctgtc

SEQ ID NO: 337244 - DNA, 60 bp, Artificial
  Synthetic oligonucleotide
attctcagatatatgttcaccagatgaaagtccacttctcccacaattacactccatgcc

SEQ ID NO: 337245 - DNA, 60 bp, Artificial
  Synthetic oligonucleotide
attctcagatctgagcacgtgggagggcgatcgcaatctggctcccagctttgtgaatga

SEQ ID NO: 337246 - DNA, 51 bp, Artificial
  Synthetic oligonucleotide
attctcagcatgttgccgggtgtcgagatgcccacggcgatcccgtatgtc

SEQ ID NO: 337247 - DNA, 51 bp, Artificial
  Synthetic oligonucleotide
attctcagctaggggggtcaatgctatcgcctattataggggtaaagacag

SEQ ID NO: 337248 - DNA, 55 bp, Artificial
  Synthetic oligonucleotide
attctcatctcccaaatctagaacgtgactttaacatcgcttctttgtatgtacg

SEQ ID NO: 337249 - DNA, 60 bp, Artificial
  Synthetic oligonucleotide
attctcattctctgccataaccatatcaattgcctccactatgtcttcgtgcctcaattc

SEQ ID NO: 337250 - DNA, 60 bp, Artificial
  Synthetic oligonucleotide
attctcccagccccgccgagctaagcatgatgtgcttttacgtagcacaaatggaactct

SEQ ID NO: 337251 - DNA, 57 bp, Artificial
  Synthetic oligonucleotide
attctcccaggctccagatgaagtaattagcctattagaatcagttttctatacaca

SEQ ID NO: 337252 - DNA, 52 bp, Artificial
  Synthetic oligonucleotide
attctccgtccccgatcctttacgcgagctgcagcgtttaggaacgaagaag

SEQ ID NO: 337253 - DNA, 55 bp, Artificial
  Synthetic oligonucleotide
attctcctaataccctcttgtttagggtatattggtgactttagatgtatccagc

SEQ ID NO: 337254 - DNA, 60 bp, Artificial
  Synthetic oligonucleotide
attctcgagaagtaggagtcatgtgtgacgacaaggagagacgttatattaggcgcgtcc

SEQ ID NO: 337255 - DNA, 57 bp, Artificial
  Synthetic oligonucleotide
attctcgataaacaacgtgtcgtccattatacgaagttatacatttgacgttgccaa

SEQ ID NO: 337256 - DNA, 55 bp, Artificial
  Synthetic oligonucleotide
attctcgatacgccaacacctctgctgaagtcactggtggattcttcggatgtgt

SEQ ID NO: 337257 - DNA, 60 bp, Artificial
  Synthetic oligonucleotide
attctcgcccaacagattgaggcaacgaccgaaaagctgaaccaattgcgctccgcacaa

SEQ ID NO: 337258 - DNA, 57 bp, Artificial
  Synthetic oligonucleotide
attctcggagagggcggacggtcctgagaactcttatcttcctgcttagaagaggag

SEQ ID NO: 337259 - DNA, 56 bp, Artificial
  Synthetic oligonucleotide
attctcggcttagttataccacggtccgcggttgccgtggcaatggttatattgac

SEQ ID NO: 337260 - DNA, 57 bp, Artificial
  Synthetic oligonucleotide
attctcgggcgacgactctctaggattttcattgcttccccctgttggtgatccgag

SEQ ID NO: 337261 - DNA, 54 bp, Artificial
  Synthetic oligonucleotide
attctcgtgaacatgagttacataagatctgtccgttgcgaaacgaacagctct

SEQ ID NO: 337262 - DNA, 55 bp, Artificial
  Synthetic oligonucleotide
attctctaaatttcacttgaatccaggggttgttacaggttgtgcagtaggttgt

SEQ ID NO: 337263 - DNA, 51 bp, Artificial
  Synthetic oligonucleotide
attctctagaagaagcccgtgctatttacgacgggcgcttttatggcatcc

SEQ ID NO: 337264 - DNA, 55 bp, Artificial
  Synthetic oligonucleotide
attctctagactcagagacaggctaaacatacccgaaaactgggtggaaatgatc

SEQ ID NO: 337265 - DNA, 54 bp, Artificial
  Synthetic oligonucleotide
attctctcaaagaatgaaacgagttcagtgaaacatctgatcgtgattcattca

SEQ ID NO: 337266 - DNA, 60 bp, Artificial
  Synthetic oligonucleotide
attctctcagcaaccgtgtaacgaccactgagaagtcaatcagcgctcaaagtgactcaa

SEQ ID NO: 337267 - DNA, 51 bp, Artificial
  Synthetic oligonucleotide
attctctgagaaaacccgagccacaccccagcaatttccgtgatcgatgta

SEQ ID NO: 337268 - DNA, 58 bp, Artificial
  Synthetic oligonucleotide
attctctgcaatgttggaatcgcagcgatggcgaagacatataccaaggcctttcgtc

SEQ ID NO: 337269 - DNA, 51 bp, Artificial
  Synthetic oligonucleotide
attctctgcctcagctctataactgttgcagactatagatgcaggcagcct

SEQ ID NO: 337270 - DNA, 59 bp, Artificial
  Synthetic oligonucleotide
attctgaattcatggacatgcccaatgtaatcagggcatgggacataagcactataccc

SEQ ID NO: 337271 - DNA, 56 bp, Artificial
  Synthetic oligonucleotide
attctgacattgtttggttttattcgagcgttgtagggtggcccttgggagtgagc

SEQ ID NO: 337272 - DNA, 60 bp, Artificial
  Synthetic oligonucleotide
attctgacggaaatcccgaccaaacttggactcatgactgtgttgctgtagtcttcaaga

SEQ ID NO: 337273 - DNA, 60 bp, Artificial
  Synthetic oligonucleotide
attctgatgctcgctatccctatcaaacggtttgtgataatgggctcggtcttgcttatt

SEQ ID NO: 337274 - DNA, 60 bp, Artificial
  Synthetic oligonucleotide
attctgattaccagcaatcagaccccgttggaatggtactcctcaactgctgtcccagct

SEQ ID NO: 337275 - DNA, 56 bp, Artificial
  Synthetic oligonucleotide
attctgcaagatcttgaataaggcccctctcgacctaaaaggatgcaccatagagg

SEQ ID NO: 337276 - DNA, 58 bp, Artificial
  Synthetic oligonucleotide
attctgcaagatcttgagcaaggccccactcgacctaaggggatgtacaatagaaggt

SEQ ID NO: 337277 - DNA, 60 bp, Artificial
  Synthetic oligonucleotide
attctgccaccatgagtgacattttcaacagtccacaggcgcgaagcaagatctcagcag

SEQ ID NO: 337278 - DNA, 55 bp, Artificial
  Synthetic oligonucleotide
attctgcgacagaatattcgttgggattcgttccgaggtgagaaagtctcaaaac

SEQ ID NO: 337279 - DNA, 54 bp, Artificial
  Synthetic oligonucleotide
attctgcgccctcccactctagagagaccatcgaaggactgtggaactccgggg

SEQ ID NO: 337280 - DNA, 57 bp, Artificial
  Synthetic oligonucleotide
attctgcgggacggcattagcaaccggtaaactgctactggcatactccccacctgg

SEQ ID NO: 337281 - DNA, 57 bp, Artificial
  Synthetic oligonucleotide
attctgcggtgacgacagtttgatttacattccgaaaggtttagatctgccggatat

SEQ ID NO: 337282 - DNA, 60 bp, Artificial
  Synthetic oligonucleotide
attctgcgtcactgccatctggattccgtctttcccgtatattgtcttatatgttctttc

SEQ ID NO: 337283 - DNA, 52 bp, Artificial
  Synthetic oligonucleotide
attctgctgcatttgaagatctaagagtatcaagcttcatcagagggacgaa

SEQ ID NO: 337284 - DNA, 51 bp, Artificial
  Synthetic oligonucleotide
attctgctgcgaatattttgtgtttattccgagaaattccgaaaaacaagc

SEQ ID NO: 337285 - DNA, 60 bp, Artificial
  Synthetic oligonucleotide
attctgcttctgacttgcagtactattatgattgttgtctgccaggaaatagcactgtgc

SEQ ID NO: 337286 - DNA, 55 bp, Artificial
  Synthetic oligonucleotide
attctggaaatcacagaatgatcggattagtcaaggtggtcattgggcttgcctt

SEQ ID NO: 337287 - DNA, 55 bp, Artificial
  Synthetic oligonucleotide
attctggcacttgtatttcccttcgaactgcataagcacgtggagatgaggagac

SEQ ID NO: 337288 - DNA, 60 bp, Artificial
  Synthetic oligonucleotide
attctggcatccccaggaatcctgcgtggcgcacacaacctcgactgcgtgctatgggag

SEQ ID NO: 337289 - DNA, 60 bp, Artificial
  Synthetic oligonucleotide
attctggcgatctattcaaccgtcgccagctcactagtactgttagtctccctgggggca

SEQ ID NO: 337290 - DNA, 56 bp, Artificial
  Synthetic oligonucleotide
attctgggcatccccggactagaccccatggatccccacacagctccgggtctgcc

SEQ ID NO: 337291 - DNA, 55 bp, Artificial
  Synthetic oligonucleotide
attctggtacctggaacacgcaaagactggcgaaactagtgtgcctaaatgttgg

SEQ ID NO: 337292 - DNA, 55 bp, Artificial
  Synthetic oligonucleotide
attctggtatgtgaatgacaccataactgggaaacatagtctgcctcaatgttgg

SEQ ID NO: 337293 - DNA, 59 bp, Artificial
  Synthetic oligonucleotide
attctggtcgcaaattggagaggtaccaacaggctgtggagtcgttagcaatccgccca

SEQ ID NO: 337294 - DNA, 55 bp, Artificial
  Synthetic oligonucleotide
attctggttagttagggatagacgtcctggttcaactccttatggattccaagag

SEQ ID NO: 337295 - DNA, 60 bp, Artificial
  Synthetic oligonucleotide
attctgtacattcactgtactgaaagctgacaccatctgtgtgggctaccatgcaaacaa

SEQ ID NO: 337296 - DNA, 60 bp, Artificial
  Synthetic oligonucleotide
attctgtcattgcgtgtgctatgacgatgcttgcgatgttctttggtgttccgcaaatga

SEQ ID NO: 337297 - DNA, 58 bp, Artificial
  Synthetic oligonucleotide
attctgtctactgtcgtagttacgtagcaatgaaaaacttcctcaatgacacaaagtg

SEQ ID NO: 337298 - DNA, 55 bp, Artificial
  Synthetic oligonucleotide
attctgttcagtctgtgccctcttcggttcctgggcaacctgtgacgtctgcgca

SEQ ID NO: 337299 - DNA, 59 bp, Artificial
  Synthetic oligonucleotide
attctgttgaagacagatttttccaagaatgggtggagacccacgacatcgatctcgaa

SEQ ID NO: 337300 - DNA, 55 bp, Artificial
  Synthetic oligonucleotide
attctgttgttgtcaaccctaaaactggcaggtgggacctctccagttgggcatc

SEQ ID NO: 337301 - DNA, 60 bp, Artificial
  Synthetic oligonucleotide
attctgtttctgctcatagcagagggctcctcccagaattacacagggaatcctgtgata

SEQ ID NO: 337302 - DNA, 56 bp, Artificial
  Synthetic oligonucleotide
attctgttttggatggctgcttataccctcggtaacattaataatattaagaatct

SEQ ID NO: 337303 - DNA, 52 bp, Artificial
  Synthetic oligonucleotide
attcttaagcaaaccacgcttaatattcacatcagtaccagcattctcattc

SEQ ID NO: 337304 - DNA, 57 bp, Artificial
  Synthetic oligonucleotide
attcttaatatcacaggacccctacaaataagttacatggtatatcaattagaagga

SEQ ID NO: 337305 - DNA, 55 bp, Artificial
  Synthetic oligonucleotide
attcttacacgaagggcaggtcgtaatcctcgatgaatttcaactgtatcccccg

SEQ ID NO: 337306 - DNA, 60 bp, Artificial
  Synthetic oligonucleotide
attcttaggagtgctgaagggcgtgttggagaacagccaactagtgcttctgatgcggct

SEQ ID NO: 337307 - DNA, 55 bp, Artificial
  Synthetic oligonucleotide
attcttaggcccacttgagcaaggtggattaatattcaaacaatggtgtacaaca

SEQ ID NO: 337308 - DNA, 55 bp, Artificial
  Synthetic oligonucleotide
attcttatcacgagataaccaaccagcactcgctacgcctgcgcggaatatgggg

SEQ ID NO: 337309 - DNA, 60 bp, Artificial
  Synthetic oligonucleotide
attcttcactttcataacccctataacagctgaatgctataattacacgagcttaccagc

SEQ ID NO: 337310 - DNA, 57 bp, Artificial
  Synthetic oligonucleotide
attcttcggttggaaagagcccaacataatcaagccacatgaaaagggcataaatcc

SEQ ID NO: 337311 - DNA, 60 bp, Artificial
  Synthetic oligonucleotide
attcttctcgacaggcattctaccctactatctcctcacaatggactggtggctctcacc

SEQ ID NO: 337312 - DNA, 50 bp, Artificial
  Synthetic oligonucleotide
attcttctgaattgttataagtagactttccaactcatttaggatttccg

SEQ ID NO: 337313 - DNA, 59 bp, Artificial
  Synthetic oligonucleotide
attcttgagaaaacgcataatgggaagttgtgcagattaagcgggatccctccattgga

SEQ ID NO: 337314 - DNA, 60 bp, Artificial
  Synthetic oligonucleotide
attcttgattccgcagacatggctgctaatcttaacgctgcaaaagctgataatggtcaa

SEQ ID NO: 337315 - DNA, 57 bp, Artificial
  Synthetic oligonucleotide
attcttgctcaaaacgccactcacaacaactgggatccactgaaccccgtcggccta

SEQ ID NO: 337316 - DNA, 59 bp, Artificial
  Synthetic oligonucleotide
attcttgctgatggatgccctgaaactaagcattgaggacccgagtcacgaaggggagg

SEQ ID NO: 337317 - DNA, 56 bp, Artificial
  Synthetic oligonucleotide
attcttggtgctcggaattcgacgtcagtcgaatgtttagccgaggatagttttaa

SEQ ID NO: 337318 - DNA, 58 bp, Artificial
  Synthetic oligonucleotide
attcttgtaataagaggggtgtacaccgattggggctctctcaaactggctgattgta

SEQ ID NO: 337319 - DNA, 59 bp, Artificial
  Synthetic oligonucleotide
attcttgtcactccaggttctgccgccaccaagaatgggaaacttgacttggccgctgc

SEQ ID NO: 337320 - DNA, 55 bp, Artificial
  Synthetic oligonucleotide
attcttgtggatcagagcctaagctgatagtgatcaagggaacattggtttgcat

SEQ ID NO: 337321 - DNA, 54 bp, Artificial
  Synthetic oligonucleotide
attcttgttgggaagtggattgaggctggtcaaccaaacccaaggtcaaaagag

SEQ ID NO: 337322 - DNA, 60 bp, Artificial
  Synthetic oligonucleotide
attcttgtttctcacacatctgcttcccaatgtcttacacaaacctatgaaaccagatga

SEQ ID NO: 337323 - DNA, 56 bp, Artificial
  Synthetic oligonucleotide
attctttaaacacaagtcacgtggacctcacgtggtcgggtcacttggtgcgagga

SEQ ID NO: 337324 - DNA, 59 bp, Artificial
  Synthetic oligonucleotide
attctttagaaccaactgaccaagttcacgtacgtatgacgtgatgacccgctgcgcgc

SEQ ID NO: 337325 - DNA, 58 bp, Artificial
  Synthetic oligonucleotide
attctttataactgctgttggggccaggattgcacaggaagattgtcggtattccgcc

SEQ ID NO: 337326 - DNA, 55 bp, Artificial
  Synthetic oligonucleotide
attctttatacgacgatgtaggtcctggattgcagaggaagattgttgggatccc

SEQ ID NO: 337327 - DNA, 58 bp, Artificial
  Synthetic oligonucleotide
attctttccgcatgctccaaaacagtcaagtgttcagtcttatcagaccaaacgaaaa

SEQ ID NO: 337328 - DNA, 55 bp, Artificial
  Synthetic oligonucleotide
attctttctctggaggtgtttcttacgtgctaagcgtatgaaattccaggcaaag

SEQ ID NO: 337329 - DNA, 54 bp, Artificial
  Synthetic oligonucleotide
attctttgaagcccaatttttaagtgcagaattcttttcctcgttcaagtactc

SEQ ID NO: 337330 - DNA, 55 bp, Artificial
  Synthetic oligonucleotide
attctttgtacatcacatctagcaagtttttaatcccctcttctaagccgttaaa

SEQ ID NO: 337331 - DNA, 58 bp, Artificial
  Synthetic oligonucleotide
attctttgtgggaaggtgattgtaatatatgggcccacaatatcacggttcacccagc

SEQ ID NO: 337332 - DNA, 60 bp, Artificial
  Synthetic oligonucleotide
attgaaaaatcaagatctatctgaatccactgcctccgtaggaggcagctcagggggaga

SEQ ID NO: 337333 - DNA, 60 bp, Artificial
  Synthetic oligonucleotide
attgaaaataagagtacatgaaggatatgaggaattcacaatggttggacgaagagcaac

SEQ ID NO: 337334 - DNA, 56 bp, Artificial
  Synthetic oligonucleotide
attgaaacagattactttgtgaccacgttcagcccacggcaacgcatcataaccgg

SEQ ID NO: 337335 - DNA, 52 bp, Artificial
  Synthetic oligonucleotide
attgaaacatacatgcgcaatgcgctagatggcaaccctgtgtgcttagacg

SEQ ID NO: 337336 - DNA, 54 bp, Artificial
  Synthetic oligonucleotide
attgaaacatgtgggatccattgttaaacgagttccctgagacggttcacgggt

SEQ ID NO: 337337 - DNA, 51 bp, Artificial
  Synthetic oligonucleotide
attgaaacattacacaggtactttgacgcgccgacatgcttaggcagctag

SEQ ID NO: 337338 - DNA, 50 bp, Artificial
  Synthetic oligonucleotide
attgaaacgagtactgctcgtgcttcgatgactactcgcattgatccaaa

SEQ ID NO: 337339 - DNA, 60 bp, Artificial
  Synthetic oligonucleotide
attgaaacggatgatggacattgtggattgccagtagtgagtaccgctgatggatgtctg

SEQ ID NO: 337340 - DNA, 56 bp, Artificial
  Synthetic oligonucleotide
attgaaactgattacacaaaaaacttccactttcactctaaaagggtcactgcaca

SEQ ID NO: 337341 - DNA, 60 bp, Artificial
  Synthetic oligonucleotide
attgaaagagttcacgacgcaaactgatactttaagctttgatgacatctctgcagctgt

SEQ ID NO: 337342 - DNA, 60 bp, Artificial
  Synthetic oligonucleotide
attgaaaggagaagccatacatgggcaaatcaactgtagtccaggggtatggcaattaga

SEQ ID NO: 337343 - DNA, 55 bp, Artificial
  Synthetic oligonucleotide
attgaaataacgcaaggtgaaaatttcgctaaatgggatgaatggcgtcctatgg

SEQ ID NO: 337344 - DNA, 51 bp, Artificial
  Synthetic oligonucleotide
attgaaataagcttagaagccacatgtgagcatattcacatcacatgcggc

SEQ ID NO: 337345 - DNA, 60 bp, Artificial
  Synthetic oligonucleotide
attgaaatacaatggcataataacagacactatcaagagttggaggaataacatactgag

SEQ ID NO: 337346 - DNA, 59 bp, Artificial
  Synthetic oligonucleotide
attgaaatcgaaaggaggtataattccatcatgcccgtatggaatcgagaatgtcttct

SEQ ID NO: 337347 - DNA, 53 bp, Artificial
  Synthetic oligonucleotide
attgaacaacctaaagagaaaggcaaaggccttaatctaggaaaatattctta

SEQ ID NO: 337348 - DNA, 55 bp, Artificial
  Synthetic oligonucleotide
attgaacactcaaacactagggataggatgtcagacaacaaatactgggacattt

SEQ ID NO: 337349 - DNA, 60 bp, Artificial
  Synthetic oligonucleotide
attgaacagaaaccaaccggctgctacagcattagccaacactatagaggttttcagatc

SEQ ID NO: 337350 - DNA, 58 bp, Artificial
  Synthetic oligonucleotide
attgaacccacccagcgcgctcatcaaaattctgacctcacgctcgaaagttcaaccc

SEQ ID NO: 337351 - DNA, 60 bp, Artificial
  Synthetic oligonucleotide
attgaacccatcgacaatgtgatgggaatgatcggagtactgcccgatatgaccccaagt

SEQ ID NO: 337352 - DNA, 52 bp, Artificial
  Synthetic oligonucleotide
attgaacccattgttttctggtattcaactttaaccttttctagaatgaatt

SEQ ID NO: 337353 - DNA, 58 bp, Artificial
  Synthetic oligonucleotide
attgaaccccctatagatataccacaggccggggaagcatcaggtcatatatttacta

SEQ ID NO: 337354 - DNA, 55 bp, Artificial
  Synthetic oligonucleotide
attgaacctgtgggcccaactgaaccttccatagttactttagtagaagaatcaa

SEQ ID NO: 337355 - DNA, 60 bp, Artificial
  Synthetic oligonucleotide
attgaacgctgataatcatcggatgagtcgtgcaactcgtgttggagacgcttttgtcag

SEQ ID NO: 337356 - DNA, 59 bp, Artificial
  Synthetic oligonucleotide
attgaacttgaacagcaggcaacgcatggggaagctgtgcaggaaatgttggatttaag

SEQ ID NO: 337357 - DNA, 55 bp, Artificial
  Synthetic oligonucleotide
attgaacttgtattgtcgtgacgtcgtggttctgtagaaatggtctctggttgtg

SEQ ID NO: 337358 - DNA, 53 bp, Artificial
  Synthetic oligonucleotide
attgaagacgaaattggataaatcgacacaaatttcgcaaaatacactaccag

SEQ ID NO: 337359 - DNA, 57 bp, Artificial
  Synthetic oligonucleotide
attgaagagacaagaaatagagggtataaagctgaagtcagaagacaacgtttacaa

SEQ ID NO: 337360 - DNA, 57 bp, Artificial
  Synthetic oligonucleotide
attgaagcaatacgttttttgaatcaatctcaacaaaacccctcagtgttggagatg

SEQ ID NO: 337361 - DNA, 54 bp, Artificial
  Synthetic oligonucleotide
attgaagcactacattgtgggggagagttcgatccaaccactagctgcttgcac

SEQ ID NO: 337362 - DNA, 60 bp, Artificial
  Synthetic oligonucleotide
attgaagcagactctcctggatctagaacgctcgtcccgagcctgttcaggtgtctgtat

SEQ ID NO: 337363 - DNA, 60 bp, Artificial
  Synthetic oligonucleotide
attgaagcatgtggttatagtgacagggtgatgcagctaaccctaggcaattcaacgatc

SEQ ID NO: 337364 - DNA, 60 bp, Artificial
  Synthetic oligonucleotide
attgaaggagttaactagtgaatatgagagaactcatccttcagatggtccaagaccact

SEQ ID NO: 337365 - DNA, 58 bp, Artificial
  Synthetic oligonucleotide
attgaagggataaagttgaagactgaagacaatgtatataaggtactgtcaatttata

SEQ ID NO: 337366 - DNA, 53 bp, Artificial
  Synthetic oligonucleotide
attgaagggatacctcctttaatttgaaccggctttccatatttacagtttga

SEQ ID NO: 337367 - DNA, 57 bp, Artificial
  Synthetic oligonucleotide
attgaagggtttgagccatactgtgtgaaaaatccctcaactagcaaatgtccaaat

SEQ ID NO: 337368 - DNA, 60 bp, Artificial
  Synthetic oligonucleotide
attgaaggtggtaggtattatgaacatgctccgatagaattgatttatgcatgtaggtca

SEQ ID NO: 337369 - DNA, 58 bp, Artificial
  Synthetic oligonucleotide
attgaagtattgcatttgactcaagggacctgttgggaacaaatgtacactccaggcg

SEQ ID NO: 337370 - DNA, 55 bp, Artificial
  Synthetic oligonucleotide
attgaagttgcacaaaataaagatgggaagtgcccacggcgtaaatcgcgtggat

SEQ ID NO: 337371 - DNA, 60 bp, Artificial
  Synthetic oligonucleotide
attgaatacacagactctaggaataggatgtacaactacaaatacggcgacatttgaaga

SEQ ID NO: 337372 - DNA, 60 bp, Artificial
  Synthetic oligonucleotide
attgaatagaaatcagccggctgcgactgctcttgctaatactatagaagtcttcagatc

SEQ ID NO: 337373 - DNA, 60 bp, Artificial
  Synthetic oligonucleotide
attgaatcagcatacatcttgtctagcatccctgcattaggtggaattagtgttggttat

SEQ ID NO: 337374 - DNA, 50 bp, Artificial
  Synthetic oligonucleotide
attgaatccataatgtgggctgcaagtgcagctgaaatcccacttgtccc

SEQ ID NO: 337375 - DNA, 60 bp, Artificial
  Synthetic oligonucleotide
attgaatccgtaaacaatgctgtagtaatgccagcccatggcccagctaagagcatggaa

SEQ ID NO: 337376 - DNA, 60 bp, Artificial
  Synthetic oligonucleotide
attgaatcggtgtactggagtctcaattgacttggtcaatgggtacctaatgagagaata

SEQ ID NO: 337377 - DNA, 60 bp, Artificial
  Synthetic oligonucleotide
attgaatcgtctaattgacaaaacaaatcagcagtttgagctgatagacaatgagttcaa

SEQ ID NO: 337378 - DNA, 55 bp, Artificial
  Synthetic oligonucleotide
attgaatcttgatgtctccggtgtcattaatgtgaagacatcgtccattgaccat

SEQ ID NO: 337379 - DNA, 55 bp, Artificial
  Synthetic oligonucleotide
attgaatgtactggctagatttactgatttggaacttcatggattgacacccctg

SEQ ID NO: 337380 - DNA, 56 bp, Artificial
  Synthetic oligonucleotide
attgaattcgtttgatactagaaataggatcatagaaactgaaaacccggcaaatc

SEQ ID NO: 337381 - DNA, 55 bp, Artificial
  Synthetic oligonucleotide
attgacaaattgacccagggtcgtcagacctatgactggacattaaacagaaacc

SEQ ID NO: 337382 - DNA, 60 bp, Artificial
  Synthetic oligonucleotide
attgacaacaacactcttattgctggctagatctagtgcagtagcacacccactaaccac

SEQ ID NO: 337383 - DNA, 55 bp, Artificial
  Synthetic oligonucleotide
attgacaacacagtggacaaagggaaaatcctaccgcagtccgtgttctcggaca

SEQ ID NO: 337384 - DNA, 55 bp, Artificial
  Synthetic oligonucleotide
attgacaagagatggtggtaatgagagtaacattgagaccttcagacctgaggga

SEQ ID NO: 337385 - DNA, 55 bp, Artificial
  Synthetic oligonucleotide
attgacaagagatggtggtcagactaatgaaactaatactgagaccttcagacct

SEQ ID NO: 337386 - DNA, 60 bp, Artificial
  Synthetic oligonucleotide
attgacaagccaacacaaccggacacctcatccaatcggttctatactctggagagcaaa

SEQ ID NO: 337387 - DNA, 56 bp, Artificial
  Synthetic oligonucleotide
attgacaagttcgctcaagggtggggtcccatcacctacgccgggcgtaacagctc

SEQ ID NO: 337388 - DNA, 60 bp, Artificial
  Synthetic oligonucleotide
attgacaatccagtcagaaacgcaattccttacaggtataaactcacaggcagccaacga

SEQ ID NO: 337389 - DNA, 60 bp, Artificial
  Synthetic oligonucleotide
attgacaatgagttcaatgagatagaacaacagattgggaatgtcataaattggacaaga

SEQ ID NO: 337390 - DNA, 58 bp, Artificial
  Synthetic oligonucleotide
attgacaatgtgatgggaatgatcggaatattacccgatatgaccccaagtacggagg

SEQ ID NO: 337391 - DNA, 57 bp, Artificial
  Synthetic oligonucleotide
attgacacaggtgctcaaggaatatggcctaaaacccacaagacccgataaaactga

SEQ ID NO: 337392 - DNA, 55 bp, Artificial
  Synthetic oligonucleotide
attgacaccctgaccatgcatatgtcagaagtacccgtaatcactgctgatgggg

SEQ ID NO: 337393 - DNA, 60 bp, Artificial
  Synthetic oligonucleotide
attgacactctacacgatttatcatgtaagttccttcctttgtatgctagtgaggccaag

SEQ ID NO: 337394 - DNA, 60 bp, Artificial
  Synthetic oligonucleotide
attgacacttagaattgaatctgcaatttgtgagtctgtactagctgatgcaagtgaaac

SEQ ID NO: 337395 - DNA, 51 bp, Artificial
  Synthetic oligonucleotide
attgacagaaatcctgagtgtgagacatgtatctatagctgtgaggtggat

SEQ ID NO: 337396 - DNA, 56 bp, Artificial
  Synthetic oligonucleotide
attgacagcgttgtggtagacgtcatctttattggacttggaacccccagacacct

SEQ ID NO: 337397 - DNA, 54 bp, Artificial
  Synthetic oligonucleotide
attgacattatgggtctgcaagctgcttatgctaatttgcattctgaccaagaa

SEQ ID NO: 337398 - DNA, 55 bp, Artificial
  Synthetic oligonucleotide
attgacccactgctcgagggcgtcctccctgccccctcggttcttcttcgactcg

SEQ ID NO: 337399 - DNA, 53 bp, Artificial
  Synthetic oligonucleotide
attgacccagatgcgatggagctcgcgaggagtagcacggatgcccgcgcgtg

SEQ ID NO: 337400 - DNA, 50 bp, Artificial
  Synthetic oligonucleotide
attgacccagcggtggggtgggtaagttgggacagcacaatcgaccgcat

SEQ ID NO: 337401 - DNA, 55 bp, Artificial
  Synthetic oligonucleotide
attgacccattagtagcgtctattatactaagcccctgggtggatgtttgattta

SEQ ID NO: 337402 - DNA, 55 bp, Artificial
  Synthetic oligonucleotide
attgacccttttgttgctgtcgactttagctgatgtatatactgtgctacgaccg

SEQ ID NO: 337403 - DNA, 55 bp, Artificial
  Synthetic oligonucleotide
attgaccgaatcctacgcggcgacacggtaatgaggggtatccttacgtcaagtg

SEQ ID NO: 337404 - DNA, 56 bp, Artificial
  Synthetic oligonucleotide
attgaccgctttttaagggttcgagatcagcggggaaatatactcttatctcctga

SEQ ID NO: 337405 - DNA, 55 bp, Artificial
  Synthetic oligonucleotide
attgaccgggcgaacgtaatagctcccgtacaagtgcttgcgcttttgtctgaac

SEQ ID NO: 337406 - DNA, 57 bp, Artificial
  Synthetic oligonucleotide
attgaccgtttcttgagggtccgagatcagcgagggaatgtactcttatcccctgaa

SEQ ID NO: 337407 - DNA, 56 bp, Artificial
  Synthetic oligonucleotide
attgacctaggcgctccctggttaggtgatgtgcaaaaccctaaccaggtgaagtg

SEQ ID NO: 337408 - DNA, 53 bp, Artificial
  Synthetic oligonucleotide
attgacctcagtttgattatttccagggtgtggggggaacgatttctttgaga

SEQ ID NO: 337409 - DNA, 55 bp, Artificial
  Synthetic oligonucleotide
attgacctggggattcgatccacctccagctaacttatcggagtctgaatctagt

SEQ ID NO: 337410 - DNA, 60 bp, Artificial
  Synthetic oligonucleotide
attgacgaatgtttcatgctaccgcttgtttacgtctcgatagttgcagcaatttcgccg

SEQ ID NO: 337411 - DNA, 58 bp, Artificial
  Synthetic oligonucleotide
attgacgcaaatgactgccttgttaccccgtctgtaaaagtctgcatgatcgggacag

SEQ ID NO: 337412 - DNA, 51 bp, Artificial
  Synthetic oligonucleotide
attgacgcagcaaagtcaatggcaacaaacgtaatgaagaaatttaaggag

SEQ ID NO: 337413 - DNA, 60 bp, Artificial
  Synthetic oligonucleotide
attgacgcgggagcgaacagaatacatatgctccctgagctctcaactggtggtcgggat

SEQ ID NO: 337414 - DNA, 55 bp, Artificial
  Synthetic oligonucleotide
attgacgcttgccctcttgactatacaattttgtgtcgaatgtattggggtccag

SEQ ID NO: 337415 - DNA, 59 bp, Artificial
  Synthetic oligonucleotide
attgacgcttgtcctttggattatacaattctatgtcatctgaatccaaggtttcacac

SEQ ID NO: 337416 - DNA, 59 bp, Artificial
  Synthetic oligonucleotide
attgacggattattagatacagtattcgacacaataaagttatttggacatgaggcctc

SEQ ID NO: 337417 - DNA, 58 bp, Artificial
  Synthetic oligonucleotide
attgacgggaaaattaagtgcgtgaccgccgcacatatcctcacgggtaactctgcta

SEQ ID NO: 337418 - DNA, 56 bp, Artificial
  Synthetic oligonucleotide
attgacgggatgagcattctgggccgcgtggatagcattgctaccctgcgcaccat

SEQ ID NO: 337419 - DNA, 60 bp, Artificial
  Synthetic oligonucleotide
attgacgggattactaacaaggtgaattctgttatcgagaagatgaacacgcaattcaca

SEQ ID NO: 337420 - DNA, 60 bp, Artificial
  Synthetic oligonucleotide
attgacggtggatacgatttcaattgtcctgctagcaccacagacgtgacgcactatggc

SEQ ID NO: 337421 - DNA, 60 bp, Artificial
  Synthetic oligonucleotide
attgacgtccatgctaacagatccgtcccatatcacggcggaggctgcagcgcggcgctt

SEQ ID NO: 337422 - DNA, 60 bp, Artificial
  Synthetic oligonucleotide
attgacgtctgttacgtcactctgcatgttaattggaaatactaccgtcattccagagcc

SEQ ID NO: 337423 - DNA, 58 bp, Artificial
  Synthetic oligonucleotide
attgacgtcttgtatctgacgtctctgggtgaaagctaccggccccgtgagcttgaac

SEQ ID NO: 337424 - DNA, 55 bp, Artificial
  Synthetic oligonucleotide
attgactaaggaagtgattggacatgtggtcactgcaagattctatcttcacttg

SEQ ID NO: 337425 - DNA, 60 bp, Artificial
  Synthetic oligonucleotide
attgactaccaccctctctcgcccattgaactgtgagaattggatcagatcatctaaaga

SEQ ID NO: 337426 - DNA, 52 bp, Artificial
  Synthetic oligonucleotide
attgactatcgtcacgactcactggcgtacagtcccggcgttattccgttct

SEQ ID NO: 337427 - DNA, 60 bp, Artificial
  Synthetic oligonucleotide
attgactcagatgaagtgggcgagcaaatggaacctacgtttgagcatgcggttatggag

SEQ ID NO: 337428 - DNA, 55 bp, Artificial
  Synthetic oligonucleotide
attgactccagttatttgtgctcagggctcgttggtgacacacccagaaatgacg

SEQ ID NO: 337429 - DNA, 52 bp, Artificial
  Synthetic oligonucleotide
attgactcgcgagaattaatcaatccaaccacttatggaatcggtatgacct

SEQ ID NO: 337430 - DNA, 57 bp, Artificial
  Synthetic oligonucleotide
attgacttcaacaagcaagccttgaaaacattcaaatcggaggttaaccatggtcta

SEQ ID NO: 337431 - DNA, 55 bp, Artificial
  Synthetic oligonucleotide
attgactttaatggccttgatgacacagagcctgggaagaatatagttgactgca

SEQ ID NO: 337432 - DNA, 60 bp, Artificial
  Synthetic oligonucleotide
attgactttcactggacactagtacagccgggtgacaacataaccttctcacacaatgga

SEQ ID NO: 337433 - DNA, 55 bp, Artificial
  Synthetic oligonucleotide
attgacttttatatgttcaaaacaggattggcgggcaaattacatgtgccagggg

SEQ ID NO: 337434 - DNA, 55 bp, Artificial
  Synthetic oligonucleotide
attgagaaagagggttcgccgaccttcctgggggataagcgtatcgagggctctg

SEQ ID NO: 337435 - DNA, 60 bp, Artificial
  Synthetic oligonucleotide
attgagaattggaatctacagaacaggcgacagcgcaccggatttgtatttcataaacca

SEQ ID NO: 337436 - DNA, 55 bp, Artificial
  Synthetic oligonucleotide
attgagacaaaccccggacctgctcattcggtttttcaattgcaaggtggggtgc

SEQ ID NO: 337437 - DNA, 55 bp, Artificial
  Synthetic oligonucleotide
attgagacaatccccgagagaaatgagcaaggacaaaccctatggagtagaacga

SEQ ID NO: 337438 - DNA, 60 bp, Artificial
  Synthetic oligonucleotide
attgagaccaggtgaatctagacatacttcagatcatatgtctatttacaaatttatggg

SEQ ID NO: 337439 - DNA, 55 bp, Artificial
  Synthetic oligonucleotide
attgagaccccacttgacgtgtcggtgttcctcggatgacgcagcctagattcat

SEQ ID NO: 337440 - DNA, 55 bp, Artificial
  Synthetic oligonucleotide
attgagacgaccacgcttccccaggacgctgtctcccgcacacaacgtcggggta

SEQ ID NO: 337441 - DNA, 60 bp, Artificial
  Synthetic oligonucleotide
attgagactttcgatcaataatagaacacgattttttttgcacttatgtgactgtattca

SEQ ID NO: 337442 - DNA, 60 bp, Artificial
  Synthetic oligonucleotide
attgagagacttaatcttggttgtgacgagagcagtggaacttctgggacgcagcagcct

SEQ ID NO: 337443 - DNA, 60 bp, Artificial
  Synthetic oligonucleotide
attgagagactttctattggtgacagtgagagcagcggaacttctgggacgcagcagtct

SEQ ID NO: 337444 - DNA, 51 bp, Artificial
  Synthetic oligonucleotide
attgagaggccttgttggtgaaggccgagaaagggtgcagctggtaccctt

SEQ ID NO: 337445 - DNA, 60 bp, Artificial
  Synthetic oligonucleotide
attgagagggcagctcttcgtaatttatacacacagatagtgtatacgccaattttaaca

SEQ ID NO: 337446 - DNA, 60 bp, Artificial
  Synthetic oligonucleotide
attgagcacgcacatcgaaagaatccggttcacgaatataaggagaagcagttacggatg

SEQ ID NO: 337447 - DNA, 55 bp, Artificial
  Synthetic oligonucleotide
attgagcactcttacaagtaaaagggccctggatctgccagaaataggtccagac

SEQ ID NO: 337448 - DNA, 60 bp, Artificial
  Synthetic oligonucleotide
attgagccacacacttgtacagttgattttgcgaatgctcaatgtggggaggttgctgca

SEQ ID NO: 337449 - DNA, 55 bp, Artificial
  Synthetic oligonucleotide
attgagccatggctaattgaaccctgcaagctccttcctgatacctcggcagtaa

SEQ ID NO: 337450 - DNA, 55 bp, Artificial
  Synthetic oligonucleotide
attgagccccgcgactttgcccgctacgagccagatacccttcgggaacacctcg

SEQ ID NO: 337451 - DNA, 60 bp, Artificial
  Synthetic oligonucleotide
attgagccctctcaaacttgctcattcaattggagtattagagtctcatatatagtagaa

SEQ ID NO: 337452 - DNA, 55 bp, Artificial
  Synthetic oligonucleotide
attgagccgtttctgaagacaacaccacgtcctctcaggttgcctgatgggcccc

SEQ ID NO: 337453 - DNA, 52 bp, Artificial
  Synthetic oligonucleotide
attgagcgtcaagttcaatagtcccaaaatcaagtcccttcgcgtgttacac

SEQ ID NO: 337454 - DNA, 53 bp, Artificial
  Synthetic oligonucleotide
attgagcgtgctaagaagagtgctcaagcctgcctaagcatgggttacactta

SEQ ID NO: 337455 - DNA, 60 bp, Artificial
  Synthetic oligonucleotide
attgagctaattggtagtcctccggcccctgaatgcggctaatcccaactgtggagcaga

SEQ ID NO: 337456 - DNA, 60 bp, Artificial
  Synthetic oligonucleotide
attgagctcactttgaccaatacgtcggttgccaactacacatcgatgaataggatcaga

SEQ ID NO: 337457 - DNA, 59 bp, Artificial
  Synthetic oligonucleotide
attgagctctcaaacttctatctatgtaattggggtaatggggtacaatatatactaga

SEQ ID NO: 337458 - DNA, 60 bp, Artificial
  Synthetic oligonucleotide
attgaggaaccaagcggccagacagcagattggtataccataggaatttatgtgataggc

SEQ ID NO: 337459 - DNA, 60 bp, Artificial
  Synthetic oligonucleotide
attgaggaaccgagtggccaaacagcagattggtatacaattggagtctatgtaatagga

SEQ ID NO: 337460 - DNA, 59 bp, Artificial
  Synthetic oligonucleotide
attgaggacggcggcagaaatgccacgaactgctggtctacttgagaaccttgtcgcga

SEQ ID NO: 337461 - DNA, 55 bp, Artificial
  Synthetic oligonucleotide
attgaggagtactatctcactaggatggaatctgtgtcctcactgctccatacct

SEQ ID NO: 337462 - DNA, 59 bp, Artificial
  Synthetic oligonucleotide
attgaggagtgcctgattaatgatccctgggttttgcttaatgcatcttggtttaactc

SEQ ID NO: 337463 - DNA, 58 bp, Artificial
  Synthetic oligonucleotide
attgaggataaagacaatgggtagaatctttcaactgttgatgcgcttaggcgttaaa

SEQ ID NO: 337464 - DNA, 58 bp, Artificial
  Synthetic oligonucleotide
attgaggattagaatacatgaggggtatgaggaattccccatggttgaccgaagggca

SEQ ID NO: 337465 - DNA, 60 bp, Artificial
  Synthetic oligonucleotide
attgaggcacatgccagaagtctatgtgggtcatgttatacgcctttgacagtatttcaa

SEQ ID NO: 337466 - DNA, 55 bp, Artificial
  Synthetic oligonucleotide
attgaggctgggggacagcccgtccgtccattctgtgcagagagtttagtgggca

SEQ ID NO: 337467 - DNA, 60 bp, Artificial
  Synthetic oligonucleotide
attgagggactgattaccacagtccgcattatggatccaggtgtccccagtaacatgact

SEQ ID NO: 337468 - DNA, 55 bp, Artificial
  Synthetic oligonucleotide
attgagggccaatcaactcgagacagcctccaaattaagggcaacaagccagcag

SEQ ID NO: 337469 - DNA, 55 bp, Artificial
  Synthetic oligonucleotide
attgaggggagggtcggcgagcagggttatgacaatgaggcatttgagggatcgg

SEQ ID NO: 337470 - DNA, 56 bp, Artificial
  Synthetic oligonucleotide
attgaggtgatggggaagttagcagaagtatgtgctaataatttaggtaaaggtag

SEQ ID NO: 337471 - DNA, 60 bp, Artificial
  Synthetic oligonucleotide
attgagtattatcttgatgatcatattttcctctccgatgagcccaactcaattatgaat

SEQ ID NO: 337472 - DNA, 55 bp, Artificial
  Synthetic oligonucleotide
attgagtcactaatgcacccgagcagcaagttttctgcgttctgccgagactact

SEQ ID NO: 337473 - DNA, 55 bp, Artificial
  Synthetic oligonucleotide
attgagtccccgaatgcaccctgggtatttgcctgtgcacctgatcggtgcccac

SEQ ID NO: 337474 - DNA, 57 bp, Artificial
  Synthetic oligonucleotide
attgagtccgggagagcagggtatacagactaagttgaaagaactagaagaggaaca

SEQ ID NO: 337475 - DNA, 60 bp, Artificial
  Synthetic oligonucleotide
attgagtcctggaatgatgatgggcatgtttaacatgctgagcacagtcctaggagtctc

SEQ ID NO: 337476 - DNA, 60 bp, Artificial
  Synthetic oligonucleotide
attgagtctgtctgatgaggagtacgttggttacttcgaacagtatctctgtcgagctat

SEQ ID NO: 337477 - DNA, 60 bp, Artificial
  Synthetic oligonucleotide
attgagtgcactactgatgagattccgaagatacccgcatacattgcaaatgctgagggt

SEQ ID NO: 337478 - DNA, 60 bp, Artificial
  Synthetic oligonucleotide
attgagtggtgtttgtgactgtttagtcatgcaggccatagtgagacttggcatagtgcc

SEQ ID NO: 337479 - DNA, 55 bp, Artificial
  Synthetic oligonucleotide
attgagtggttccggttgaggcttgacgtttataactctcggctcgtttttctga

SEQ ID NO: 337480 - DNA, 60 bp, Artificial
  Synthetic oligonucleotide
attgagttccggagattagagaattgcgactttctgaagcgttccttcaagatgagccca

SEQ ID NO: 337481 - DNA, 59 bp, Artificial
  Synthetic oligonucleotide
attgagttgaggtgacgattcttacctcagttgattacatccccttcttgattataaga

SEQ ID NO: 337482 - DNA, 55 bp, Artificial
  Synthetic oligonucleotide
attgataaagtcggcttgcattttgttttggatatgccagatacaacagttggcc

SEQ ID NO: 337483 - DNA, 55 bp, Artificial
  Synthetic oligonucleotide
attgataacaacgatcttaccatccaccggctgtcagggtatctggctagatggg

SEQ ID NO: 337484 - DNA, 58 bp, Artificial
  Synthetic oligonucleotide
attgatacttgatttatcttgcaatcacctgacagtctaacagaaagtcttgcaactg

SEQ ID NO: 337485 - DNA, 55 bp, Artificial
  Synthetic oligonucleotide
attgatagaagacatgtgctgtcatctgtggaactcaacctaacgaggatgtttg

SEQ ID NO: 337486 - DNA, 60 bp, Artificial
  Synthetic oligonucleotide
attgatagcaagagggacagtcaaccaggggggatgtgttggagtggaatcaacaggctg

SEQ ID NO: 337487 - DNA, 60 bp, Artificial
  Synthetic oligonucleotide
attgatatcacattttccaccaacgagagcttgcactctagaagtggagccagtttgggt

SEQ ID NO: 337488 - DNA, 58 bp, Artificial
  Synthetic oligonucleotide
attgatattgctgcaaaaacacctgaaaaacccgtgatatgctcggaacgagttagtc

SEQ ID NO: 337489 - DNA, 59 bp, Artificial
  Synthetic oligonucleotide
attgatcccacaaaacttgctgtgttccaagacaatcacgttaaatccgaagtgcagac

SEQ ID NO: 337490 - DNA, 60 bp, Artificial
  Synthetic oligonucleotide
attgatccgatcctatgtggaacggaattaggatcaccactagtgcttgatgactgttca

SEQ ID NO: 337491 - DNA, 59 bp, Artificial
  Synthetic oligonucleotide
attgatccgtgcataggaccggcaacagccaaccgtaaggtcgtgcggaccacagactg

SEQ ID NO: 337492 - DNA, 58 bp, Artificial
  Synthetic oligonucleotide
attgatcgattgcatgtcgtaccttagcggttagtagtgacgaagggaccttggttga

SEQ ID NO: 337493 - DNA, 57 bp, Artificial
  Synthetic oligonucleotide
attgatctaggagctgtgtgttcgaacggacttggtgccacggttctatcgattgac

SEQ ID NO: 337494 - DNA, 60 bp, Artificial
  Synthetic oligonucleotide
attgatctcatatatgatgagattctcaacacaaccatctgcctggctaatgggatggtt

SEQ ID NO: 337495 - DNA, 55 bp, Artificial
  Synthetic oligonucleotide
attgatcttctggcaatcgctacaattgccgttgaactttgtgctgtagttcctt

SEQ ID NO: 337496 - DNA, 60 bp, Artificial
  Synthetic oligonucleotide
attgatctttcgaaacaggatgagatacttccggcattcatgactaaagtcaagagtgtt

SEQ ID NO: 337497 - DNA, 60 bp, Artificial
  Synthetic oligonucleotide
attgatgaagggaatgggtgctttgaactccttcataaatgtaatgactcttgtatggag

SEQ ID NO: 337498 - DNA, 59 bp, Artificial
  Synthetic oligonucleotide
attgatgacacttgggtgttgcaacaccataaaacggtcatgttaccaggtcaaatcga

SEQ ID NO: 337499 - DNA, 60 bp, Artificial
  Synthetic oligonucleotide
attgatgactttctggctgcacggtgcccatttctacctgaacagaaggaccctagagat

SEQ ID NO: 337500 - DNA, 55 bp, Artificial
  Synthetic oligonucleotide
attgatgcacagggatgcaattatcccacaaagaataaccgatggatcggtcggt

SEQ ID NO: 337501 - DNA, 60 bp, Artificial
  Synthetic oligonucleotide
attgatgctggtggtgcaacagttgatgtagctacagatggccctgaccttggtgcagga

SEQ ID NO: 337502 - DNA, 57 bp, Artificial
  Synthetic oligonucleotide
attgatggaccactacctgagaataatgagcccagcgggtatgcacaaacagattgt

SEQ ID NO: 337503 - DNA, 60 bp, Artificial
  Synthetic oligonucleotide
attgatggaccattgcctgaggataacgagccaagcggatatgcacaaacagattgtgtg

SEQ ID NO: 337504 - DNA, 54 bp, Artificial
  Synthetic oligonucleotide
attgatggcagcgttagctatcagagaagtcccacgtaatacggatccgatttt

SEQ ID NO: 337505 - DNA, 60 bp, Artificial
  Synthetic oligonucleotide
attgatggctatgcaggtatcccaaaatggtgatggttggctgctttcacctgatcaaat

SEQ ID NO: 337506 - DNA, 53 bp, Artificial
  Synthetic oligonucleotide
attgatgggataccccctttaatttgaacaggctttccgtacttacaatttga

SEQ ID NO: 337507 - DNA, 53 bp, Artificial
  Synthetic oligonucleotide
attgatgggattccacctttaatttgaacgggtttcccgtatttgcagtttga

SEQ ID NO: 337508 - DNA, 58 bp, Artificial
  Synthetic oligonucleotide
attgatgggtgtggctgctggagcattcagtgctgagcctcaaagtagaaagcccaat

SEQ ID NO: 337509 - DNA, 59 bp, Artificial
  Synthetic oligonucleotide
attgatgggttagtccagggtagcgttcactcaattatgacgggcgaatcctatggaga

SEQ ID NO: 337510 - DNA, 59 bp, Artificial
  Synthetic oligonucleotide
attgatgtccgcaagatcgcgatcgttaaattccgctgcgttttactatagagtatagg

SEQ ID NO: 337511 - DNA, 60 bp, Artificial
  Synthetic oligonucleotide
attgatgttgcacactatctcacgaagaagtcttattatagtggaggtagggtgcttacg

SEQ ID NO: 337512 - DNA, 55 bp, Artificial
  Synthetic oligonucleotide
attgatgttgtcgtagagccagtccacgatcgaagcgggttcggtggctggccta

SEQ ID NO: 337513 - DNA, 54 bp, Artificial
  Synthetic oligonucleotide
attgattaaaagctgggtatcacgtgggttatctattgagaaagtatatagtcc

SEQ ID NO: 337514 - DNA, 59 bp, Artificial
  Synthetic oligonucleotide
attgattaaatctattagccatcataccctttccagtgatcgttccaaaattgagtcaa

SEQ ID NO: 337515 - DNA, 58 bp, Artificial
  Synthetic oligonucleotide
attgattacaaaaacaatggactaaccgctgaaattacagtcggcgcagaatacgcga

SEQ ID NO: 337516 - DNA, 58 bp, Artificial
  Synthetic oligonucleotide
attgattattattggtcggtactaaaaccaggtcagacattgcgagtgaggtccaatg

SEQ ID NO: 337517 - DNA, 56 bp, Artificial
  Synthetic oligonucleotide
attgattcgttgcatagcaagtctggttcggaggtagggtgaggattgatgaactc

SEQ ID NO: 337518 - DNA, 55 bp, Artificial
  Synthetic oligonucleotide
attgattgaagcaagctctttgaatgattcagttgctatgagacaggcgtttggc

SEQ ID NO: 337519 - DNA, 50 bp, Artificial
  Synthetic oligonucleotide
attgattgactggttagcattaccgctacccagggaaatctgcaaagccg

SEQ ID NO: 337520 - DNA, 59 bp, Artificial
  Synthetic oligonucleotide
attgattgaggagactggggtccacaaggaccttacagacataccgctgactggagaag

SEQ ID NO: 337521 - DNA, 60 bp, Artificial
  Synthetic oligonucleotide
attgattgcggcgcaatggaaacggtcatgcatcaaaacgcagaaggcattagtaagtgc

SEQ ID NO: 337522 - DNA, 57 bp, Artificial
  Synthetic oligonucleotide
attgattgttcatcaaatattacagggttgatattaacaagagatggtggtagtaac

SEQ ID NO: 337523 - DNA, 59 bp, Artificial
  Synthetic oligonucleotide
attgattgttgtgcatatgtgtctgataggttgcaaagtctgttcccagccatgactat

SEQ ID NO: 337524 - DNA, 60 bp, Artificial
  Synthetic oligonucleotide
attgatttcatacatattgtgtacaatctatagatcatacacaggcctgaaaagaaaaat

SEQ ID NO: 337525 - DNA, 57 bp, Artificial
  Synthetic oligonucleotide
attgattttaaaactctcaagaatctaaatgataattacggaataagcagacaacaa

SEQ ID NO: 337526 - DNA, 55 bp, Artificial
  Synthetic oligonucleotide
attgattttgagcatgccggcttggtccccgcgatccgccccgagcttgcgccaa

SEQ ID NO: 337527 - DNA, 55 bp, Artificial
  Synthetic oligonucleotide
attgattttgttgatttgcctttcaagtacactgtatccgacccgcatttgactg

SEQ ID NO: 337528 - DNA, 58 bp, Artificial
  Synthetic oligonucleotide
attgcaaaaagttggggccgcgagagaatgtagctgtaattcaagtcggaggttctga

SEQ ID NO: 337529 - DNA, 57 bp, Artificial
  Synthetic oligonucleotide
attgcaaaacataatctttcggtgctaattctttcaatactttcaacgcatcttcct

SEQ ID NO: 337530 - DNA, 56 bp, Artificial
  Synthetic oligonucleotide
attgcaaaacgaccatcccttggcatatttgaagtcgtttttgtatcggtgtacac

SEQ ID NO: 337531 - DNA, 55 bp, Artificial
  Synthetic oligonucleotide
attgcaaagatgttagcgatctaaaacagtatgacagtgatgaaccagaaacgag

SEQ ID NO: 337532 - DNA, 60 bp, Artificial
  Synthetic oligonucleotide
attgcaaagcgtttcgctcagcacaaccccagtgtagatcaggtcgatgagtcactgcat

SEQ ID NO: 337533 - DNA, 60 bp, Artificial
  Synthetic oligonucleotide
attgcaaattacaatcattctgatgaatatttgtcctttagctgttatttgtctgtcaca

SEQ ID NO: 337534 - DNA, 51 bp, Artificial
  Synthetic oligonucleotide
attgcaactggcctaaaagctgcatatgatgttacccctgttgttggcgtt

SEQ ID NO: 337535 - DNA, 58 bp, Artificial
  Synthetic oligonucleotide
attgcaagaagcgttacggaagaacggcgcttacaccggcaacttcagagacgcaatg

SEQ ID NO: 337536 - DNA, 60 bp, Artificial
  Synthetic oligonucleotide
attgcaagcatctgtcctaacacaaggcagaccatcagacgactacacagcgtggttcaa

SEQ ID NO: 337537 - DNA, 53 bp, Artificial
  Synthetic oligonucleotide
attgcaagctgatttttgcgtttacatgcagggaatgttggtgaaccaagaga

SEQ ID NO: 337538 - DNA, 60 bp, Artificial
  Synthetic oligonucleotide
attgcaaggatattagcgatctgaaacaatatgacagtgatgagcaagagcctaggtcgc

SEQ ID NO: 337539 - DNA, 56 bp, Artificial
  Synthetic oligonucleotide
attgcaagtggttcggatggttagatgaagttgttaaccgtgacctgccggagtac

SEQ ID NO: 337540 - DNA, 54 bp, Artificial
  Synthetic oligonucleotide
attgcaagtgttcatattgcatgtttttttgtagcgatcacagggaacacatat

SEQ ID NO: 337541 - DNA, 54 bp, Artificial
  Synthetic oligonucleotide
attgcaagttacttcacacactggactggtagtttgcgtttcagctttatgttt

SEQ ID NO: 337542 - DNA, 55 bp, Artificial
  Synthetic oligonucleotide
attgcaatacatcagccctgtttaatagcacttgggaaaatgacactgtcagcac

SEQ ID NO: 337543 - DNA, 54 bp, Artificial
  Synthetic oligonucleotide
attgcaatactttccgacgtcacaaacctatatcgatgattcagacgtcaagaa

SEQ ID NO: 337544 - DNA, 60 bp, Artificial
  Synthetic oligonucleotide
attgcaattggacatgtcagagttagctgacttaatacttaatgagtggctatgtaatcc

SEQ ID NO: 337545 - DNA, 56 bp, Artificial
  Synthetic oligonucleotide
attgcacaacgttgttcgggcgaaaccaaaggtcatccaagatcctttcgcggatc

SEQ ID NO: 337546 - DNA, 51 bp, Artificial
  Synthetic oligonucleotide
attgcacaagagcatggagatgagggtttccatcctcgtgtagttctctac

SEQ ID NO: 337547 - DNA, 58 bp, Artificial
  Synthetic oligonucleotide
attgcacaagccaaactagcagagaagaactcgacccaggtaagcttaactacattaa

SEQ ID NO: 337548 - DNA, 56 bp, Artificial
  Synthetic oligonucleotide
attgcacaatccttttagggtcaaacccttggtaagcaaactcattgacccaggca

SEQ ID NO: 337549 - DNA, 58 bp, Artificial
  Synthetic oligonucleotide
attgcacagcacgattgatgggattccacctttaatttgaaccggctttccatattta

SEQ ID NO: 337550 - DNA, 60 bp, Artificial
  Synthetic oligonucleotide
attgcacagtgcctatggttctgcccatgccatccaccaagcacaccgcgagtgcagcgc

SEQ ID NO: 337551 - DNA, 59 bp, Artificial
  Synthetic oligonucleotide
attgcacatcttaactccgtggaagaaggtccttacgagtggaagtgtgttcagtgcaa

SEQ ID NO: 337552 - DNA, 60 bp, Artificial
  Synthetic oligonucleotide
attgcacatctttgacgtaacaaaagtacctgatgaccagatgtacaggttacgtgacag

SEQ ID NO: 337553 - DNA, 54 bp, Artificial
  Synthetic oligonucleotide
attgcacatgggtccggtactgccccctgtattgaatgcgacgccccctgcggt

SEQ ID NO: 337554 - DNA, 60 bp, Artificial
  Synthetic oligonucleotide
attgcacccccaatcataccgctctcaggcaagctattttgtgctggggtgagttaatga

SEQ ID NO: 337555 - DNA, 56 bp, Artificial
  Synthetic oligonucleotide
attgcacgaaattccaatggataggttcgtaatggatcttaagcgggacgtgaaag

SEQ ID NO: 337556 - DNA, 56 bp, Artificial
  Synthetic oligonucleotide
attgcacgaatttccagaaagcgtggatggtctaaggtgcatgctagctgtaaaat

SEQ ID NO: 337557 - DNA, 60 bp, Artificial
  Synthetic oligonucleotide
attgcacgcaagacagcagcgatcgagaaagagaaagtgcacgtaaccactgcagacctg

SEQ ID NO: 337558 - DNA, 50 bp, Artificial
  Synthetic oligonucleotide
attgcacggtggcagagggcataaagacccttatacagccattgtgtgat

SEQ ID NO: 337559 - DNA, 57 bp, Artificial
  Synthetic oligonucleotide
attgcagaacaatttcggtcaagtcatgagacagctgatattcatccctgtgcgact

SEQ ID NO: 337560 - DNA, 57 bp, Artificial
  Synthetic oligonucleotide
attgcagacatggcaataaacaaagacgagttatcataaaacatctggtttaccggt

SEQ ID NO: 337561 - DNA, 59 bp, Artificial
  Synthetic oligonucleotide
attgcagaggtttaccgagtcggatgacgatcacttttccacgtgtgctttaaatgctc

SEQ ID NO: 337562 - DNA, 60 bp, Artificial
  Synthetic oligonucleotide
attgcagatgcacatattgagaggacccctacatttccagcgacgcgcaatattgggcgc

SEQ ID NO: 337563 - DNA, 60 bp, Artificial
  Synthetic oligonucleotide
attgcagattatgtcagcaatgtcagatcagatgaagcgaccaatgttggtagattcctc

SEQ ID NO: 337564 - DNA, 54 bp, Artificial
  Synthetic oligonucleotide
attgcagcaatgctaagtcagcgaactatgtcgcttgatttcgtgactacaaac

SEQ ID NO: 337565 - DNA, 55 bp, Artificial
  Synthetic oligonucleotide
attgcagcgacgtggtccctatcggccgcgttcgctggttctccgagaccactga

SEQ ID NO: 337566 - DNA, 50 bp, Artificial
  Synthetic oligonucleotide
attgcagcgcaagccccctctggtctacggtatgagcttctcggcacggt

SEQ ID NO: 337567 - DNA, 50 bp, Artificial
  Synthetic oligonucleotide
attgcaggcatggcagagttaggtgcattttttgctgtcctccaggatat

SEQ ID NO: 337568 - DNA, 60 bp, Artificial
  Synthetic oligonucleotide
attgcaggctgccgcagggcgcaacagcctggtgaatgatttagcctcgcgacgcgttta

SEQ ID NO: 337569 - DNA, 57 bp, Artificial
  Synthetic oligonucleotide
attgcaggggttctaaggaccaataaaacattccagaatgtgagtcccctgtggata

SEQ ID NO: 337570 - DNA, 60 bp, Artificial
  Synthetic oligonucleotide
attgcaggtagatttttctcattgatgtcttggaagcttagggaatactttgttgtcaca

SEQ ID NO: 337571 - DNA, 60 bp, Artificial
  Synthetic oligonucleotide
attgcaggtcctactgaagcaaaagtccctcacactgccagctccaaaaacctggcattg

SEQ ID NO: 337572 - DNA, 60 bp, Artificial
  Synthetic oligonucleotide
attgcagtattgttgccacagtatgatgttataatacaacatccagcagatatgagctgg

SEQ ID NO: 337573 - DNA, 55 bp, Artificial
  Synthetic oligonucleotide
attgcagtctaattcgtgtgaagactccaaataaaacgttgtacgaacactacac

SEQ ID NO: 337574 - DNA, 60 bp, Artificial
  Synthetic oligonucleotide
attgcagttacaccctatgggtattgtgaactcagcctgctttgagtctccttcatgtaa

SEQ ID NO: 337575 - DNA, 59 bp, Artificial
  Synthetic oligonucleotide
attgcataagaccttgcttctgggttgaactaatcagagggcgacccaaagagaacaca

SEQ ID NO: 337576 - DNA, 60 bp, Artificial
  Synthetic oligonucleotide
attgcatatcatgtagtctcacctacgagtgcttgcattctaggagtgaagccagtttgg

SEQ ID NO: 337577 - DNA, 60 bp, Artificial
  Synthetic oligonucleotide
attgcatcacccaagggtcctgttatccaaatgtataccaatgtggatcaagatctcgta

SEQ ID NO: 337578 - DNA, 54 bp, Artificial
  Synthetic oligonucleotide
attgcatctgtccgatgaaatgtgcagaagatccggacagactgtttaagtatg

SEQ ID NO: 337579 - DNA, 55 bp, Artificial
  Synthetic oligonucleotide
attgcatggacactcaatcaagtaccttgaacaagaggaggaattgaccctgcat

SEQ ID NO: 337580 - DNA, 60 bp, Artificial
  Synthetic oligonucleotide
attgcatggactcattcccacccgaagacaggatcatagattttggtgggtcctggtggc

SEQ ID NO: 337581 - DNA, 55 bp, Artificial
  Synthetic oligonucleotide
attgcatgggtcggagatcaggtcaaagtcttcgagtggtgtaatcccaggtgtg

SEQ ID NO: 337582 - DNA, 55 bp, Artificial
  Synthetic oligonucleotide
attgcattaggaccccacagggtccaagtggtctatgaaagaacctactgcatga

SEQ ID NO: 337583 - DNA, 58 bp, Artificial
  Synthetic oligonucleotide
attgcattccatatcaaagagatccctcctaagctccacgaaatgctttgggaaacgg

SEQ ID NO: 337584 - DNA, 60 bp, Artificial
  Synthetic oligonucleotide
attgcattcgattacagatgctcggctacgagcaaagataaaccaaactatggaaggccg

SEQ ID NO: 337585 - DNA, 55 bp, Artificial
  Synthetic oligonucleotide
attgcattgtgtcgcaccacatcatgcgaatgaatcgttctttatgggatttgat

SEQ ID NO: 337586 - DNA, 60 bp, Artificial
  Synthetic oligonucleotide
attgccaaatcaagtgtgaaggtgcttacccgatctttccacattatatcgttgatgcat

SEQ ID NO: 337587 - DNA, 60 bp, Artificial
  Synthetic oligonucleotide
attgccaacgactttatttgcctccttcatcttgagaccatggccgacaaccagtctcaa

SEQ ID NO: 337588 - DNA, 57 bp, Artificial
  Synthetic oligonucleotide
attgccaactaagaatcatcttgtcattggtaactctggggacccgaaatacgttga

SEQ ID NO: 337589 - DNA, 58 bp, Artificial
  Synthetic oligonucleotide
attgccaaggacatctttggcacccatacccttagtcaacaccaggctattggtctaa

SEQ ID NO: 337590 - DNA, 55 bp, Artificial
  Synthetic oligonucleotide
attgccactcctcattcagtctgggtctttgcatgtgctccagatcgttgtccac

SEQ ID NO: 337591 - DNA, 56 bp, Artificial
  Synthetic oligonucleotide
attgccagacatcctaattcttcgcaaccccaccaagaagttggtgtaacacaaaa

SEQ ID NO: 337592 - DNA, 60 bp, Artificial
  Synthetic oligonucleotide
attgccagcagaggttaatgggcgcctattaatatctactcctaccatcacaccccactc

SEQ ID NO: 337593 - DNA, 60 bp, Artificial
  Synthetic oligonucleotide
attgccagggtatatgtctgcctttgtatagacctacatgcctgtatagaacgtatggtc

SEQ ID NO: 337594 - DNA, 54 bp, Artificial
  Synthetic oligonucleotide
attgccagtccctttgggcccccatgaactctttaaagtgtttgaggaaatgcg

SEQ ID NO: 337595 - DNA, 60 bp, Artificial
  Synthetic oligonucleotide
attgccatcttagcaacgactgtgacactgcatttcaaacacaatgattgcagcattccc

SEQ ID NO: 337596 - DNA, 58 bp, Artificial
  Synthetic oligonucleotide
attgccatggaggttgtcctacgtaaaagacaaggaccaaagcagatgctggtgggag

SEQ ID NO: 337597 - DNA, 58 bp, Artificial
  Synthetic oligonucleotide
attgccatgggttccttctacaacggggtcaccgattgcctcgagtggcgtgattggc

SEQ ID NO: 337598 - DNA, 57 bp, Artificial
  Synthetic oligonucleotide
attgcccacggcccatagttacaaagaagaccagttctaaagcaaatgtgaccagag

SEQ ID NO: 337599 - DNA, 54 bp, Artificial
  Synthetic oligonucleotide
attgcccagctggcatttcatcttccgcgctcggcgtatgaccgccttatgctc

SEQ ID NO: 337600 - DNA, 60 bp, Artificial
  Synthetic oligonucleotide
attgcccaggtaccaccgtcacaatcactgaagcatgtgggaagagaggaccctccataa

SEQ ID NO: 337601 - DNA, 55 bp, Artificial
  Synthetic oligonucleotide
attgcccattgttctaaacaatatccacctgggacatgtgctccgcttgagtccg

SEQ ID NO: 337602 - DNA, 60 bp, Artificial
  Synthetic oligonucleotide
attgccccaggcaatggtctcactttcaccgcgcatggaattgcgcggttgtacttcaag

SEQ ID NO: 337603 - DNA, 57 bp, Artificial
  Synthetic oligonucleotide
attgccccgtgtcgtgaccaacacgagatcattgggcgggcacggatccagaaaggg

SEQ ID NO: 337604 - DNA, 55 bp, Artificial
  Synthetic oligonucleotide
attgcccgacatgaccccaagtaccgagatgtcattaaggggggtgagagtcagc

SEQ ID NO: 337605 - DNA, 55 bp, Artificial
  Synthetic oligonucleotide
attgccctagtgggtctcacaaacgccggcaaagggaatcggtaattcgatctcc

SEQ ID NO: 337606 - DNA, 55 bp, Artificial
  Synthetic oligonucleotide
attgccctagtggttcccacaggcgcagacaacgggaacttgtaattagaagtcc

SEQ ID NO: 337607 - DNA, 55 bp, Artificial
  Synthetic oligonucleotide
attgccctagtggttcgaataagaggaaattggcggaattacttgagaattccga

SEQ ID NO: 337608 - DNA, 54 bp, Artificial
  Synthetic oligonucleotide
attgccctggtgggtcccacaaacgccggctaagggaatcggtgattcgaagtc

SEQ ID NO: 337609 - DNA, 57 bp, Artificial
  Synthetic oligonucleotide
attgccctgtcagcatactagacataaaacaagggccaaaagagtcattcagagatt

SEQ ID NO: 337610 - DNA, 60 bp, Artificial
  Synthetic oligonucleotide
attgccgaatcatccaatccgctcagatttttatatggtctgctggtgacggacgaaagt

SEQ ID NO: 337611 - DNA, 56 bp, Artificial
  Synthetic oligonucleotide
attgccgaatttctagagaaatatagcgatttcctaaatgaatatgtaaagtttac

SEQ ID NO: 337612 - DNA, 55 bp, Artificial
  Synthetic oligonucleotide
attgccgacgctctcctttccggagggttaggatcgtggctcctcctaggagcgg

SEQ ID NO: 337613 - DNA, 55 bp, Artificial
  Synthetic oligonucleotide
attgccggatgatattatagctttcctacgtacagatggggaagattgctatggg

SEQ ID NO: 337614 - DNA, 53 bp, Artificial
  Synthetic oligonucleotide
attgccggcttccctggctgcgggaaaacacacccgatcaccaagctcctaca

SEQ ID NO: 337615 - DNA, 60 bp, Artificial
  Synthetic oligonucleotide
attgccgggagtttatctgggaatcctgtgaatcgtgactatatcagacagagacaaggt

SEQ ID NO: 337616 - DNA, 55 bp, Artificial
  Synthetic oligonucleotide
attgccggtccccgcaaccgcctcgtcacgtccggctacgtcagcctgaccctta

SEQ ID NO: 337617 - DNA, 54 bp, Artificial
  Synthetic oligonucleotide
attgccgtacggctaatgctctctcgtaagggttaaggggaggaccccaaggca

SEQ ID NO: 337618 - DNA, 60 bp, Artificial
  Synthetic oligonucleotide
attgcctaacaagtgcgattcattcatggatccacagaactcctttcttctacagccgcg

SEQ ID NO: 337619 - DNA, 57 bp, Artificial
  Synthetic oligonucleotide
attgcctatttggtgagtggggtaatggtagcctacgctcttgtggcagtaagtaaa

SEQ ID NO: 337620 - DNA, 59 bp, Artificial
  Synthetic oligonucleotide
attgcctctaaggccgcggacctgctaacagtaatgtcgacgcccgacgctgagacacc

SEQ ID NO: 337621 - DNA, 51 bp, Artificial
  Synthetic oligonucleotide
attgcctctctcacatcatcaatcttctcgacgactgggggccctgctatg

SEQ ID NO: 337622 - DNA, 60 bp, Artificial
  Synthetic oligonucleotide
attgcctgatgggcctccctgctctcagcggtcaaaattcttgctgatggatgctctgaa

SEQ ID NO: 337623 - DNA, 50 bp, Artificial
  Synthetic oligonucleotide
attgcctggacggtggtgaatagtatctgcaacagcacaggagtcgagaa

SEQ ID NO: 337624 - DNA, 59 bp, Artificial
  Synthetic oligonucleotide
attgcctgtccacaggttgcgtggtcatagtaggcaggatagtcttgtccgggaagccg

SEQ ID NO: 337625 - DNA, 51 bp, Artificial
  Synthetic oligonucleotide
attgcctttcctaaaatacccccccttttgtgtctaataggcgcgtcggag

SEQ ID NO: 337626 - DNA, 57 bp, Artificial
  Synthetic oligonucleotide
attgcctttgattactcaaattttgatgccagtctttccccagtatggtttgaatgt

SEQ ID NO: 337627 - DNA, 56 bp, Artificial
  Synthetic oligonucleotide
attgcgaatgccgaagagattagaaatacattaattggagaaattccgttaaccag

SEQ ID NO: 337628 - DNA, 59 bp, Artificial
  Synthetic oligonucleotide
attgcgacaaaatccgtagagtcaccttcctatataatctatatggggccatcaaccag

SEQ ID NO: 337629 - DNA, 55 bp, Artificial
  Synthetic oligonucleotide
attgcgacaaggtcggtgtaaacagcaagtctctgaccaatttacaacctgtggg

SEQ ID NO: 337630 - DNA, 53 bp, Artificial
  Synthetic oligonucleotide
attgcgagagccagtgatctggagtccacggccggtttttctcctcgcagcaa

SEQ ID NO: 337631 - DNA, 59 bp, Artificial
  Synthetic oligonucleotide
attgcgagcagaggtagcacgtctgaaggcacaagtcaccaaccccgttactcccatcg

SEQ ID NO: 337632 - DNA, 59 bp, Artificial
  Synthetic oligonucleotide
attgcgagtgacaactgccttgctaatgacccagactgggcgtgagtatttttcgtttc

SEQ ID NO: 337633 - DNA, 60 bp, Artificial
  Synthetic oligonucleotide
attgcgatacatgcggagggcagctatacttaaagacgtctttctcaataaagacgttga

SEQ ID NO: 337634 - DNA, 60 bp, Artificial
  Synthetic oligonucleotide
attgcgatcatcatcaattacaaagattgcgtacacactgagcactgatttgtatgcaat

SEQ ID NO: 337635 - DNA, 60 bp, Artificial
  Synthetic oligonucleotide
attgcgatgccccacctatctgtgtgggcgacgttgaagtgtttgcaattgaaattcaca

SEQ ID NO: 337636 - DNA, 56 bp, Artificial
  Synthetic oligonucleotide
attgcgattataacgttgtattgatgaagtatgattcaacattagagttagatatg

SEQ ID NO: 337637 - DNA, 60 bp, Artificial
  Synthetic oligonucleotide
attgcgcaacttagcaatcttcagaatcttgactcaggacaagcagatgatgaaggatgg

SEQ ID NO: 337638 - DNA, 55 bp, Artificial
  Synthetic oligonucleotide
attgcgcaaggtgtgattatagcatatcgtgacatgcagttagaacgcgatgaga

SEQ ID NO: 337639 - DNA, 60 bp, Artificial
  Synthetic oligonucleotide
attgcgcattggctgcttttgcgaaaagaagctgtgttgctatatttcgctaggcaaaaa

SEQ ID NO: 337640 - DNA, 55 bp, Artificial
  Synthetic oligonucleotide
attgcgcatttgggtgaaattcggcagaccgtctggggtgagtaaggttgaaaaa

SEQ ID NO: 337641 - DNA, 60 bp, Artificial
  Synthetic oligonucleotide
attgcgccactgccaaaatgcggtataccgaggatatcggaacctcgatgacaattgacg

SEQ ID NO: 337642 - DNA, 56 bp, Artificial
  Synthetic oligonucleotide
attgcgccatccaccgcactctctatcgccacatctagcgataccgcagcctccat

SEQ ID NO: 337643 - DNA, 53 bp, Artificial
  Synthetic oligonucleotide
attgcgcctgacgagtctagatatgtgggaaagacttgggccctaagttgttg

SEQ ID NO: 337644 - DNA, 55 bp, Artificial
  Synthetic oligonucleotide
attgcgctgactgtggggacgggtacttctgctatagcccagttgctatcgagaa

SEQ ID NO: 337645 - DNA, 56 bp, Artificial
  Synthetic oligonucleotide
attgcggatttcattacgcaattccgtttatccggtttaagcagtgtaacttcatc

SEQ ID NO: 337646 - DNA, 60 bp, Artificial
  Synthetic oligonucleotide
attgcggcctaatcgaatgtggaacatcagggctttctgttggaaggatgctgcttaggg

SEQ ID NO: 337647 - DNA, 60 bp, Artificial
  Synthetic oligonucleotide
attgcggcctatcacgccgatggcgtgatagttggcttttggcgcgatccatccagtggt

SEQ ID NO: 337648 - DNA, 53 bp, Artificial
  Synthetic oligonucleotide
attgcggggtagtgtgcggctgttttagtgcatgcccggttgagtgtgcgtag

SEQ ID NO: 337649 - DNA, 60 bp, Artificial
  Synthetic oligonucleotide
attgcggtaaagaaggcaacttactgattgaatgcggagctcctagatctcaaggacaac

SEQ ID NO: 337650 - DNA, 56 bp, Artificial
  Synthetic oligonucleotide
attgcggtggcattcttagatgtcaacacggtgttgtggggttagtctctaccggg

SEQ ID NO: 337651 - DNA, 60 bp, Artificial
  Synthetic oligonucleotide
attgcggttgcccatacatttacaagcgcggcaatgacatagtcgtggcaggtgtccata

SEQ ID NO: 337652 - DNA, 56 bp, Artificial
  Synthetic oligonucleotide
attgcgtaacagtaattttggacctaattggagtcacgtgaccccttctagagcac

SEQ ID NO: 337653 - DNA, 60 bp, Artificial
  Synthetic oligonucleotide
attgcgtcagtttcgaagttgtcgctagagacacggtgatcagcgatttgcaacgtgtgc

SEQ ID NO: 337654 - DNA, 56 bp, Artificial
  Synthetic oligonucleotide
attgcgtcatacttatttacaaatacctacgttcatctgattgtaagcttttaagt

SEQ ID NO: 337655 - DNA, 55 bp, Artificial
  Synthetic oligonucleotide
attgcgtcttggttcacagctctcactcagcatggcaaggaggaacttagattcc

SEQ ID NO: 337656 - DNA, 60 bp, Artificial
  Synthetic oligonucleotide
attgcgtgaggaagcgaagctttctaatcacaatatgtttcacagactggcgagactttc

SEQ ID NO: 337657 - DNA, 58 bp, Artificial
  Synthetic oligonucleotide
attgcgtgtggtgaacccaatgggccaagtgtgtataggaaaccatcaggtggtgtat

SEQ ID NO: 337658 - DNA, 58 bp, Artificial
  Synthetic oligonucleotide
attgcgttagactgtgtctgagatactgaatctccaggatccaatgacgcccctggca

SEQ ID NO: 337659 - DNA, 54 bp, Artificial
  Synthetic oligonucleotide
attgctaaaaacagggaaattctcaaaggacaagggaactcattataatgactt

SEQ ID NO: 337660 - DNA, 57 bp, Artificial
  Synthetic oligonucleotide
attgctaaaagatcatacaacaacacaagcggggagcaaatgctggtaatttggggg

SEQ ID NO: 337661 - DNA, 55 bp, Artificial
  Synthetic oligonucleotide
attgctaaatcgggctcaaagccgatgggtaaggcggctcgtcgaaaggctgctg

SEQ ID NO: 337662 - DNA, 56 bp, Artificial
  Synthetic oligonucleotide
attgctaagagattattggggggtgagtaagtacttttaaagtgatgatggttaca

SEQ ID NO: 337663 - DNA, 60 bp, Artificial
  Synthetic oligonucleotide
attgctaattatgattcctccaagtcccgagaatatcagcgacatgtagaggaatatgag

SEQ ID NO: 337664 - DNA, 54 bp, Artificial
  Synthetic oligonucleotide
attgctacacgtggccggccatccgttataatattaccggatggccgcccgatt

SEQ ID NO: 337665 - DNA, 58 bp, Artificial
  Synthetic oligonucleotide
attgctacagtgttcggtgaagatgctggagtctcgcccgcccgttggcccgccctag

SEQ ID NO: 337666 - DNA, 56 bp, Artificial
  Synthetic oligonucleotide
attgctaccatgaatttgaggtccccatacgtcttttcgtattgtccatgtgcgct

SEQ ID NO: 337667 - DNA, 60 bp, Artificial
  Synthetic oligonucleotide
attgctaccgctgctgcctgcaagtattcatctattggcactggcgtggtgtggttggtg

SEQ ID NO: 337668 - DNA, 60 bp, Artificial
  Synthetic oligonucleotide
attgctactacatcattggcttataactatgagcctgaacagctgaataagactgatcct

SEQ ID NO: 337669 - DNA, 52 bp, Artificial
  Synthetic oligonucleotide
attgctacttagtccctttaataaacgtgttacaatggtagctgtccgtgcc

SEQ ID NO: 337670 - DNA, 60 bp, Artificial
  Synthetic oligonucleotide
attgctagcacctgcaaagatgcccaaccacctcctggcagttgccctccattggaatta

SEQ ID NO: 337671 - DNA, 60 bp, Artificial
  Synthetic oligonucleotide
attgctagcggatctatcaaagggaatatagtaacaactagtacaagcgagcaaataata

SEQ ID NO: 337672 - DNA, 57 bp, Artificial
  Synthetic oligonucleotide
attgctagttacccacataagattgatccgggtctactggcagaggcaggcaaacat

SEQ ID NO: 337673 - DNA, 59 bp, Artificial
  Synthetic oligonucleotide
attgctatcctagtaacaactgtgacactacacttcaaacaaagtgaatgcaaaatccc

SEQ ID NO: 337674 - DNA, 57 bp, Artificial
  Synthetic oligonucleotide
attgctatgcatcattggttacaaaccgcaatacttctataataatgcattgctggc

SEQ ID NO: 337675 - DNA, 51 bp, Artificial
  Synthetic oligonucleotide
attgctcacttcatacctatggtcgtgtgttctcacttcatacctatggtc

SEQ ID NO: 337676 - DNA, 56 bp, Artificial
  Synthetic oligonucleotide
attgctcccggaggcaccatcatccttgaatcctgccatggcgcacgaatgtgggc

SEQ ID NO: 337677 - DNA, 57 bp, Artificial
  Synthetic oligonucleotide
attgctccgggtataaacctggaattgagttgaatgcaggaagatcctgtgcctggt

SEQ ID NO: 337678 - DNA, 52 bp, Artificial
  Synthetic oligonucleotide
attgctcctgtcacctatccgagtgtcaagccgaacgacaaactcattgact

SEQ ID NO: 337679 - DNA, 60 bp, Artificial
  Synthetic oligonucleotide
attgctcgatgtgcgtgtcggacaggtgtatacttctgtgagtcaaaaggaaaacactat

SEQ ID NO: 337680 - DNA, 60 bp, Artificial
  Synthetic oligonucleotide
attgctcggcgggattgtgattgtatctggatgcggtgctgtagcgtactgcatatccaa

SEQ ID NO: 337681 - DNA, 50 bp, Artificial
  Synthetic oligonucleotide
attgctcgggctatagcagacaagtatcactccagtgtgtactcacttcc

SEQ ID NO: 337682 - DNA, 60 bp, Artificial
  Synthetic oligonucleotide
attgctctaagcaagcaagctgtaagaagaatgctgtcaatgaacgttgaaggacgtgat

SEQ ID NO: 337683 - DNA, 59 bp, Artificial
  Synthetic oligonucleotide
attgctctcaccgaggctctgaagggtatatcatcgccacgaggacaggggttgctctg

SEQ ID NO: 337684 - DNA, 60 bp, Artificial
  Synthetic oligonucleotide
attgctctcctcaccatacggcactcaggcaagccactctatgctggggggagttaatga

SEQ ID NO: 337685 - DNA, 60 bp, Artificial
  Synthetic oligonucleotide
attgctctcgagtcggctggagacgcgttactagttcaatacctagtagcgtggatccca

SEQ ID NO: 337686 - DNA, 56 bp, Artificial
  Synthetic oligonucleotide
attgctgacacagaagaatctaagggactttccgctggggactttccagggaggtg

SEQ ID NO: 337687 - DNA, 60 bp, Artificial
  Synthetic oligonucleotide
attgctgacctcagagaagtcaagcccatgcaagagagcttgagcgtccttcaccacttg

SEQ ID NO: 337688 - DNA, 60 bp, Artificial
  Synthetic oligonucleotide
attgctgagcttgaaatctcacggaaggaaaataatgtgcagcaaactactcatgattac

SEQ ID NO: 337689 - DNA, 60 bp, Artificial
  Synthetic oligonucleotide
attgctgatgtgccatatgatatgcaaggaaaatttgtgccatataatgttgtgttcctt

SEQ ID NO: 337690 - DNA, 60 bp, Artificial
  Synthetic oligonucleotide
attgctgcagacaaagaatcaacccagacagcaatagaccagataacctctaaagtcaat

SEQ ID NO: 337691 - DNA, 59 bp, Artificial
  Synthetic oligonucleotide
attgctgccccacttagttcgtcgctttctaccaatgagagagagtccggagataatag

SEQ ID NO: 337692 - DNA, 55 bp, Artificial
  Synthetic oligonucleotide
attgctgctaggaacatagtgagaagagctacagtatcatcagatccactagcat

SEQ ID NO: 337693 - DNA, 60 bp, Artificial
  Synthetic oligonucleotide
attgctggcactacgcgcctaagaagtgtggtattgtacccgcgtcgcaggtgtgtggtc

SEQ ID NO: 337694 - DNA, 50 bp, Artificial
  Synthetic oligonucleotide
attgcttacggccggtatataagcgtacaacgaatgaaataggtgtccag

SEQ ID NO: 337695 - DNA, 59 bp, Artificial
  Synthetic oligonucleotide
attgcttacgtcatggacgctgttcgcagattcgcttacggcgactttccctacgagtc

SEQ ID NO: 337696 - DNA, 56 bp, Artificial
  Synthetic oligonucleotide
attgcttatcgtctctccaagttcattgacaatggagagcttcccagatgttgggg

SEQ ID NO: 337697 - DNA, 60 bp, Artificial
  Synthetic oligonucleotide
attgcttcaacactgactgtaggcttcttcataaaagaggcgtgcgattcatttgcaacc

SEQ ID NO: 337698 - DNA, 60 bp, Artificial
  Synthetic oligonucleotide
attgcttcgtgggcaggaaatatattaagaactcaggaatcagaatgtgtgtgccataat

SEQ ID NO: 337699 - DNA, 55 bp, Artificial
  Synthetic oligonucleotide
attgcttctactggtaacactcgtttcggtatctctgttctcagtggtctaaatg

SEQ ID NO: 337700 - DNA, 58 bp, Artificial
  Synthetic oligonucleotide
attgcttctcaccctctagttcaggcatacgggcttagcttgaatgatgcaaagtctg

SEQ ID NO: 337701 - DNA, 55 bp, Artificial
  Synthetic oligonucleotide
attgcttgcacaagacacacaacagcccttcatgtcagggcaccaccaccttacc

SEQ ID NO: 337702 - DNA, 57 bp, Artificial
  Synthetic oligonucleotide
attgcttgcaggaacatgactatatgtctgggtcacagattgtgcccattacttcaa

SEQ ID NO: 337703 - DNA, 55 bp, Artificial
  Synthetic oligonucleotide
attgcttgcttttccgacggaattatcacgactagcgttcctatttactagggag

SEQ ID NO: 337704 - DNA, 60 bp, Artificial
  Synthetic oligonucleotide
attgcttgtggaccaaaggaatgcaaacactttgctctaacccattatgcagctcaacca

SEQ ID NO: 337705 - DNA, 58 bp, Artificial
  Synthetic oligonucleotide
attgcttgttttgacatttcatgtaaccaaacagtgtgtcagccgactgtttacttag

SEQ ID NO: 337706 - DNA, 51 bp, Artificial
  Synthetic oligonucleotide
attgctttccctttcactgattcttacatcatctgacagttttcctgtgtc

SEQ ID NO: 337707 - DNA, 60 bp, Artificial
  Synthetic oligonucleotide
attgctttgacagaagtcaacaaattagatagtgtgcaaaatcatacttttgaagtagag

SEQ ID NO: 337708 - DNA, 60 bp, Artificial
  Synthetic oligonucleotide
attgctttgtaaatggaatatgtgcaagacaacactttaaagaatgctgtaatattgcta

SEQ ID NO: 337709 - DNA, 59 bp, Artificial
  Synthetic oligonucleotide
attgctttgttgcccgcaatcgacatcttgcaacgtgatgaaacctcagtaggaaggtt

SEQ ID NO: 337710 - DNA, 55 bp, Artificial
  Synthetic oligonucleotide
attggaaagtatgtcagagaattgtggatcctttgggttttgctgcccctttcac

SEQ ID NO: 337711 - DNA, 58 bp, Artificial
  Synthetic oligonucleotide
attggaaatgcaactgtcatacccagtccacagacgttatttcattattataacgtta

SEQ ID NO: 337712 - DNA, 58 bp, Artificial
  Synthetic oligonucleotide
attggaacatacggcgaataatactataacagttaaactctacaatccgactgctaga

SEQ ID NO: 337713 - DNA, 51 bp, Artificial
  Synthetic oligonucleotide
attggaacccgtttgcctcgacctgcgactctggaggggaagacaggggtt

SEQ ID NO: 337714 - DNA, 60 bp, Artificial
  Synthetic oligonucleotide
attggaagagaggtatgctgtctttcgttgctcagatgcatgcgatgatgaacgatgtat

SEQ ID NO: 337715 - DNA, 57 bp, Artificial
  Synthetic oligonucleotide
attggaagcgctatcgcagtacccagttcgtcgcacgttctcctacggaactgtttg

SEQ ID NO: 337716 - DNA, 58 bp, Artificial
  Synthetic oligonucleotide
attggaagtacaatttatactaaaacctcagatagcgcttggagacacgtggcggcca

SEQ ID NO: 337717 - DNA, 60 bp, Artificial
  Synthetic oligonucleotide
attggaatagtactcagactaatagtactcagactaatagctggccaaatgccactatca

SEQ ID NO: 337718 - DNA, 56 bp, Artificial
  Synthetic oligonucleotide
attggaatcccgtcgagagattggtttctatcctcctgttgcaagtaagaacgttc

SEQ ID NO: 337719 - DNA, 54 bp, Artificial
  Synthetic oligonucleotide
attggaatgggaaaaatcttttgaccactggtcggaagagttctctaccgcggc

SEQ ID NO: 337720 - DNA, 56 bp, Artificial
  Synthetic oligonucleotide
attggaattcgctgacgtctccaacggacggtcacggggcaagctcctcgttgtcg

SEQ ID NO: 337721 - DNA, 53 bp, Artificial
  Synthetic oligonucleotide
attggaattcttgtcctcgtctaggtattctttataggacgaatgggggcccg

SEQ ID NO: 337722 - DNA, 55 bp, Artificial
  Synthetic oligonucleotide
attggacaagaatggtaatttcgtgtggggtgagagaggaaggcattctaagagg

SEQ ID NO: 337723 - DNA, 55 bp, Artificial
  Synthetic oligonucleotide
attggacaatctgtgcaaacggtgcatgaagttcaaggtggtacattcccaagag

SEQ ID NO: 337724 - DNA, 60 bp, Artificial
  Synthetic oligonucleotide
attggacaatgcatctactcagtaacaagcctgttttcaattatgcccggtgtagcacat

SEQ ID NO: 337725 - DNA, 55 bp, Artificial
  Synthetic oligonucleotide
attggacaccgataggtaatttgtaccccaatacaccggtgtctattggtgtcca

SEQ ID NO: 337726 - DNA, 58 bp, Artificial
  Synthetic oligonucleotide
attggacaccggatttggcatttggtcattgtcactacctggaactccccactgaaca

SEQ ID NO: 337727 - DNA, 54 bp, Artificial
  Synthetic oligonucleotide
attggacaccgtacgccgctgagctgagtgggttcaattacgtctatgatgtag

SEQ ID NO: 337728 - DNA, 60 bp, Artificial
  Synthetic oligonucleotide
attggacagcacttacatacacccctctctcgaaagcaatatatatcccacataggctat

SEQ ID NO: 337729 - DNA, 55 bp, Artificial
  Synthetic oligonucleotide
attggacagttggaaaaatctgtggagttggttcagcataacaaattggctgtgg

SEQ ID NO: 337730 - DNA, 56 bp, Artificial
  Synthetic oligonucleotide
attggaccattgtgaaacctggggacatcctaatggtaaacagtaatggcaactta

SEQ ID NO: 337731 - DNA, 52 bp, Artificial
  Synthetic oligonucleotide
attggacccgcgtgattcggttgctcgcggttgtcttgtttggacgtttttt

SEQ ID NO: 337732 - DNA, 50 bp, Artificial
  Synthetic oligonucleotide
attggacgaccgtggcaaggcggttctacagccgtctgccggactgagcc

SEQ ID NO: 337733 - DNA, 60 bp, Artificial
  Synthetic oligonucleotide
attggacgcaataaccgctctgggtacttctgtgcgcgacgagttgactcctctgcaaga

SEQ ID NO: 337734 - DNA, 55 bp, Artificial
  Synthetic oligonucleotide
attggacgctgaccagacactgacctccttgtctgacgcgctttcctccatatcg

SEQ ID NO: 337735 - DNA, 59 bp, Artificial
  Synthetic oligonucleotide
attggacgttcgtgatggagctcggtatactgacaggttcatgtctgtggcgggggctt

SEQ ID NO: 337736 - DNA, 60 bp, Artificial
  Synthetic oligonucleotide
attggactcgaggagagcgctgtaacctggatgacagggatagatcggagcttagcccac

SEQ ID NO: 337737 - DNA, 60 bp, Artificial
  Synthetic oligonucleotide
attggactcgaggagagcgttgtgatttgacggacagggatagatcagagcttagtccgc

SEQ ID NO: 337738 - DNA, 60 bp, Artificial
  Synthetic oligonucleotide
attggactcgaggagatcgctgtgacttggaggacagggatagatcggagcttagtccgc

SEQ ID NO: 337739 - DNA, 60 bp, Artificial
  Synthetic oligonucleotide
attggactgatcttctcaaaaagccaattgtgcacgaaatttgataatcgctttagagta

SEQ ID NO: 337740 - DNA, 51 bp, Artificial
  Synthetic oligonucleotide
attggacttggccatattgcagtccgcgggaacaatctgctgagaggacta

SEQ ID NO: 337741 - DNA, 54 bp, Artificial
  Synthetic oligonucleotide
attggagacaattacagaagttaccgtgactatagaattttggagggtttggga

SEQ ID NO: 337742 - DNA, 60 bp, Artificial
  Synthetic oligonucleotide
attggagacactcaatatagaacctacacgcgtgactattggagatatgccctcaacact

SEQ ID NO: 337743 - DNA, 57 bp, Artificial
  Synthetic oligonucleotide
attggagagcctgactggtgttgttgacgacgccaccttattgtcgaatttaggttc

SEQ ID NO: 337744 - DNA, 58 bp, Artificial
  Synthetic oligonucleotide
attggagagcctgtccggtgttgttgatgatgctactctggtggccaatctaggctct

SEQ ID NO: 337745 - DNA, 53 bp, Artificial
  Synthetic oligonucleotide
attggagagtgtggtgcatccatgggccagcttgtgacaatgtttgaggcttt

SEQ ID NO: 337746 - DNA, 50 bp, Artificial
  Synthetic oligonucleotide
attggagatccgatatacgacacagaaggaagccaaatctctatagtcac

SEQ ID NO: 337747 - DNA, 55 bp, Artificial
  Synthetic oligonucleotide
attggagatctcaccaagaccaacgcagcaggcggaaggtaccactccacggccg

SEQ ID NO: 337748 - DNA, 60 bp, Artificial
  Synthetic oligonucleotide
attggagatgagacatctgtgacttcgccaggcgcactacgtcgaatgacgtcaaaggac

SEQ ID NO: 337749 - DNA, 56 bp, Artificial
  Synthetic oligonucleotide
attggagatttaaggaagggcctgaacaaacaaagtgccttgaagataagacgcaa

SEQ ID NO: 337750 - DNA, 55 bp, Artificial
  Synthetic oligonucleotide
attggagcaactgggataaattttaattaccgactgccagagtattcgccaaacg

SEQ ID NO: 337751 - DNA, 57 bp, Artificial
  Synthetic oligonucleotide
attggagcgtcttaccgcaatctatctttagggttatatttaggcaagctaatctaa

SEQ ID NO: 337752 - DNA, 58 bp, Artificial
  Synthetic oligonucleotide
attggaggaatatctcagttaagtcatgggaaagctgatactcgtctcgatgggactc

SEQ ID NO: 337753 - DNA, 59 bp, Artificial
  Synthetic oligonucleotide
attggaggaggactctccgcgagcgcgattgaagtggaagaagttcgcacgaagtggcc

SEQ ID NO: 337754 - DNA, 52 bp, Artificial
  Synthetic oligonucleotide
attggaggcagagtagtaacgcgaggctccattgcatgcacactattaagca

SEQ ID NO: 337755 - DNA, 53 bp, Artificial
  Synthetic oligonucleotide
attggaggcgtaattccgtcatcaagtacttgccttcgaagggtcgtttgctg

SEQ ID NO: 337756 - DNA, 58 bp, Artificial
  Synthetic oligonucleotide
attggagggtttatcaaagtaaaacagtatgataatgtgataatagagatacaaggga

SEQ ID NO: 337757 - DNA, 56 bp, Artificial
  Synthetic oligonucleotide
attggaggtgacgggagaaatggctttgcggcccctttgccccatattccacaggc

SEQ ID NO: 337758 - DNA, 58 bp, Artificial
  Synthetic oligonucleotide
attggaggttgcctctgaacccacaccacccactcgcaccagaatttccagaacacag

SEQ ID NO: 337759 - DNA, 59 bp, Artificial
  Synthetic oligonucleotide
attggagtagggtcaattcgaggatgggatccaccacgatggttgaagcaagctagccg

SEQ ID NO: 337760 - DNA, 60 bp, Artificial
  Synthetic oligonucleotide
attggagtattagagtctcatatatagtagaaccctctatagaactctcaatctggttca

SEQ ID NO: 337761 - DNA, 55 bp, Artificial
  Synthetic oligonucleotide
attggataccaacttccaccacaaaagtgtataagcaggtaccgcaaccctttga

SEQ ID NO: 337762 - DNA, 59 bp, Artificial
  Synthetic oligonucleotide
attggatatatcacaaggttaccgattaatgctaatgtaatttggaatgttccaagatg

SEQ ID NO: 337763 - DNA, 60 bp, Artificial
  Synthetic oligonucleotide
attggatatcgaccactatcgccttcttcatccgagtggttaactctgtcaacatgactg

SEQ ID NO: 337764 - DNA, 60 bp, Artificial
  Synthetic oligonucleotide
attggatattgctcaggtataggcaattcgttatccataaggtcctcagggtcatcgacg

SEQ ID NO: 337765 - DNA, 55 bp, Artificial
  Synthetic oligonucleotide
attggatcgatccaaatttgttcgggatccgggggcaacacaatcagataaaacg

SEQ ID NO: 337766 - DNA, 54 bp, Artificial
  Synthetic oligonucleotide
attggatcgtaaatttatcgacgaagacgaaagtggagcgggttggaaagcttg

SEQ ID NO: 337767 - DNA, 58 bp, Artificial
  Synthetic oligonucleotide
attggatctcagagtttctcatgtgtgatataaggcagttaagtatgtaccttggaca

SEQ ID NO: 337768 - DNA, 60 bp, Artificial
  Synthetic oligonucleotide
attggatgactcaaacactgctgattcaaaatgctaacccagattgcaagctagtgctga

SEQ ID NO: 337769 - DNA, 60 bp, Artificial
  Synthetic oligonucleotide
attggatgcagatccagtagagtcccagtcaactctagaaatagcaggattagttaggaa

SEQ ID NO: 337770 - DNA, 60 bp, Artificial
  Synthetic oligonucleotide
attggatgctagtatccacttgattcaagaggtagacttcagacacgaggaagagcgaaa

SEQ ID NO: 337771 - DNA, 60 bp, Artificial
  Synthetic oligonucleotide
attggatgctgattgcaccaactcaagcgggtagggttgcagagggaacaaacacaacga

SEQ ID NO: 337772 - DNA, 60 bp, Artificial
  Synthetic oligonucleotide
attggatggatccatcctagtaaactcgttagtgcactctgacgacaaccaaacatctat

SEQ ID NO: 337773 - DNA, 60 bp, Artificial
  Synthetic oligonucleotide
attggatggtggtcctctgatactttgatatgctttctctggtctaaaaatgctcgatct

SEQ ID NO: 337774 - DNA, 51 bp, Artificial
  Synthetic oligonucleotide
attggatgttcgacttcaagacatatagtgctgacaaggcatatggggtac

SEQ ID NO: 337775 - DNA, 59 bp, Artificial
  Synthetic oligonucleotide
attggattacgtaatgaatcaataccacaggctttggataatatacactcacagtggat

SEQ ID NO: 337776 - DNA, 55 bp, Artificial
  Synthetic oligonucleotide
attggattagggtccagttaatggacaatggttgctaagccatgggaagggtcct

SEQ ID NO: 337777 - DNA, 60 bp, Artificial
  Synthetic oligonucleotide
attggatttatctggccacttatatgttacgttgatgtccggtgcttatgtcacagattt

SEQ ID NO: 337778 - DNA, 59 bp, Artificial
  Synthetic oligonucleotide
attggcaaaactacacaccggggccaggagtcagatatccactgacctttggatggtgc

SEQ ID NO: 337779 - DNA, 60 bp, Artificial
  Synthetic oligonucleotide
attggcaaagaaatttgctgcgcgttgagatccccatccgtcctggccattgtggtagtc

SEQ ID NO: 337780 - DNA, 57 bp, Artificial
  Synthetic oligonucleotide
attggcaagtgtttgaatttacctgaatacagcgtcctcaggagacgctggttggac

SEQ ID NO: 337781 - DNA, 59 bp, Artificial
  Synthetic oligonucleotide
attggcaatgctacacaccaggaccgggggtcagatatccactgacctttggatggtgc

SEQ ID NO: 337782 - DNA, 55 bp, Artificial
  Synthetic oligonucleotide
attggcacatggctcaacactggttcttacacgtttgagcggggtacgattgagc

SEQ ID NO: 337783 - DNA, 55 bp, Artificial
  Synthetic oligonucleotide
attggcaccagaataggtgatggacagagaagttggatgaaactatattggcacc

SEQ ID NO: 337784 - DNA, 56 bp, Artificial
  Synthetic oligonucleotide
attggcacgctttaggcgccgcgcaaacggttgttggacgcacgttccaagaggcg

SEQ ID NO: 337785 - DNA, 54 bp, Artificial
  Synthetic oligonucleotide
attggcactaacctgccactacaaatagggttttctactggcgtaaactttgta

SEQ ID NO: 337786 - DNA, 60 bp, Artificial
  Synthetic oligonucleotide
attggcagacataagtaatagatacaaatattttgctctttggaatcaagcggttgacaa

SEQ ID NO: 337787 - DNA, 55 bp, Artificial
  Synthetic oligonucleotide
attggcagcactcatcatgggtttcatcctttgggcgtgcagtaatggatcatgt

SEQ ID NO: 337788 - DNA, 55 bp, Artificial
  Synthetic oligonucleotide
attggcaggcggtgcgaaaggagaatgtactgctgtactacgccagggagaaggg

SEQ ID NO: 337789 - DNA, 56 bp, Artificial
  Synthetic oligonucleotide
attggcagggttacacaccagggccaggaattagatacccactaacatttggatgg

SEQ ID NO: 337790 - DNA, 60 bp, Artificial
  Synthetic oligonucleotide
attggcaggtaagtagaagactctttgcagtgctccaaggaggagtaaatagcgctatgc

SEQ ID NO: 337791 - DNA, 59 bp, Artificial
  Synthetic oligonucleotide
attggcagtcgcagggaattgaggtcattcccacggcgtgttggagcacgccagacaca

SEQ ID NO: 337792 - DNA, 58 bp, Artificial
  Synthetic oligonucleotide
attggcagtgctacacaccagggccagggactagatttccactgacctttgggtggtg

SEQ ID NO: 337793 - DNA, 55 bp, Artificial
  Synthetic oligonucleotide
attggcatctgcacttacgctaactaatgaatttgcatctgattccgcaaatctg

SEQ ID NO: 337794 - DNA, 60 bp, Artificial
  Synthetic oligonucleotide
attggccacacttattgaggcttcatacttctacaattttgtggcagttctctcggctct

SEQ ID NO: 337795 - DNA, 55 bp, Artificial
  Synthetic oligonucleotide
attggccatccggtgagtattgtgtcaggtacacaactgttcgttggaaccactg

SEQ ID NO: 337796 - DNA, 51 bp, Artificial
  Synthetic oligonucleotide
attggcccacaatacatgagtctgtgttgtccaatagacgatgccctaagg

SEQ ID NO: 337797 - DNA, 55 bp, Artificial
  Synthetic oligonucleotide
attggcccataatatggccttgtcctcgtacattagcttccccagtctcacgagg

SEQ ID NO: 337798 - DNA, 50 bp, Artificial
  Synthetic oligonucleotide
attggcccttagacgtgaccgtacgttcgccccgtgccacatgggacgcg

SEQ ID NO: 337799 - DNA, 60 bp, Artificial
  Synthetic oligonucleotide
attggccgatgtatactgcagctccaagagatgtccctcgataatcgggatgtctcctat

SEQ ID NO: 337800 - DNA, 55 bp, Artificial
  Synthetic oligonucleotide
attggccgctattaacccgcccgggcccgctttagagcagggcctgttgtacatg

SEQ ID NO: 337801 - DNA, 56 bp, Artificial
  Synthetic oligonucleotide
attggccggcgcggctactctcgacttgtcggggtggtttacgtcaggctacagcg

SEQ ID NO: 337802 - DNA, 55 bp, Artificial
  Synthetic oligonucleotide
attggcctcactatataaaacaatgttatttgctgttaggcttttcccagaggtg

SEQ ID NO: 337803 - DNA, 60 bp, Artificial
  Synthetic oligonucleotide
attggcctcccaaatagagcagaggttatgccacacattttgaccacagagatcaagggg

SEQ ID NO: 337804 - DNA, 55 bp, Artificial
  Synthetic oligonucleotide
attggcctctttgacagggcccgatttgattgggccgacggggttgggttgagca

SEQ ID NO: 337805 - DNA, 55 bp, Artificial
  Synthetic oligonucleotide
attggcctgtaactctaacatataaaatagcccattccatagggccagcatcctg

SEQ ID NO: 337806 - DNA, 60 bp, Artificial
  Synthetic oligonucleotide
attggcgaagcattcgcaacgcttgacttttcactgacgcgaagcattgaacaggaggca

SEQ ID NO: 337807 - DNA, 55 bp, Artificial
  Synthetic oligonucleotide
attggcgatttgtttacaaatgcagtacgtgacatagaacgtgatcttgatagcc

SEQ ID NO: 337808 - DNA, 56 bp, Artificial
  Synthetic oligonucleotide
attggcgcccgaacaggacttgaaggagagtgagagactcctgagtacggctgagt

SEQ ID NO: 337809 - DNA, 60 bp, Artificial
  Synthetic oligonucleotide
attggcgctgtattcaaaccattgaagctttgaggcccattcatgtgggaattggtctct

SEQ ID NO: 337810 - DNA, 59 bp, Artificial
  Synthetic oligonucleotide
attggcggcgtagtacacactattgaattaaacagccgaccaattgcactaccatcaca

SEQ ID NO: 337811 - DNA, 59 bp, Artificial
  Synthetic oligonucleotide
attggcgggatcgggaggttttacatccaaatgcgcactgaactcaaactcagcgatta

SEQ ID NO: 337812 - DNA, 60 bp, Artificial
  Synthetic oligonucleotide
attggcgtaacaagtgatctcacgcctgttgtcgattcaccaacatttagtggcttagtg

SEQ ID NO: 337813 - DNA, 59 bp, Artificial
  Synthetic oligonucleotide
attggcgtctgaaatggatcagcctgcaacttctttttgtatttattccaacaatattg

SEQ ID NO: 337814 - DNA, 59 bp, Artificial
  Synthetic oligonucleotide
attggcgtgaggtctagactggtaaacaacggggacgactgcgtgcttatatgtgagtc

SEQ ID NO: 337815 - DNA, 54 bp, Artificial
  Synthetic oligonucleotide
attggctaaaccagcgaccacaaaggccgttaatccacaaccccgtcgacgcaa

SEQ ID NO: 337816 - DNA, 60 bp, Artificial
  Synthetic oligonucleotide
attggctacaaagctatgggctgcacctgtgtggaggaggccatgaatctactcaaggat

SEQ ID NO: 337817 - DNA, 58 bp, Artificial
  Synthetic oligonucleotide
attggctagaaagccgatcagtaactttgaagggactgatagatataatttgggccca

SEQ ID NO: 337818 - DNA, 60 bp, Artificial
  Synthetic oligonucleotide
attggctatcatctatgtgctattgcctatatgctttaagttaagagatacccttagaaa

SEQ ID NO: 337819 - DNA, 60 bp, Artificial
  Synthetic oligonucleotide
attggctcaggaacgtgttatgacctggataaccacatacagatcagaacgatcggagag

SEQ ID NO: 337820 - DNA, 60 bp, Artificial
  Synthetic oligonucleotide
attggctcctcactctttgtgcactctctgaagtcacggacctgtcccctgacatcatcc

SEQ ID NO: 337821 - DNA, 55 bp, Artificial
  Synthetic oligonucleotide
attggctgaagaataactaggcccgactctcccgtgtcaatgtaaatgatggggt

SEQ ID NO: 337822 - DNA, 55 bp, Artificial
  Synthetic oligonucleotide
attggctgaatcaataaacaaatcagccttccaggcatcagtcgcttcaggattc

SEQ ID NO: 337823 - DNA, 58 bp, Artificial
  Synthetic oligonucleotide
attggctgattgctgacctcctcttgcagatctgccgtctatctgaaactctccccat

SEQ ID NO: 337824 - DNA, 60 bp, Artificial
  Synthetic oligonucleotide
attggctgcagagaggaccaagagagttctgcatcaaggttctctgcccatacatgccac

SEQ ID NO: 337825 - DNA, 55 bp, Artificial
  Synthetic oligonucleotide
attggctgcagtgtccccgtgcccgcccctagggaggagcaatggcgccgtcagg

SEQ ID NO: 337826 - DNA, 55 bp, Artificial
  Synthetic oligonucleotide
attggcttaacttctacgctttgtatttactatccaaaagaggcgtcggatgaga

SEQ ID NO: 337827 - DNA, 50 bp, Artificial
  Synthetic oligonucleotide
attggcttactccaacggactggaacacgctcgttagagcagtcctctca

SEQ ID NO: 337828 - DNA, 60 bp, Artificial
  Synthetic oligonucleotide
attggcttatccatcataagttgggcacgttttcatgtgagatagattatggagaattgt

SEQ ID NO: 337829 - DNA, 60 bp, Artificial
  Synthetic oligonucleotide
attggcttcacaatcacattgcatgagcttggtgaatgcattggacaaaactattccgtt

SEQ ID NO: 337830 - DNA, 60 bp, Artificial
  Synthetic oligonucleotide
attggcttccaaaacaatggagatgcctatgaaaatgagactcctgcagtcatgtttgcc

SEQ ID NO: 337831 - DNA, 60 bp, Artificial
  Synthetic oligonucleotide
attggcttgctatctctcatatccagagagggggcaaattcctgactgtgaaaagattgg

SEQ ID NO: 337832 - DNA, 53 bp, Artificial
  Synthetic oligonucleotide
attggcttggaaaatgatatgatggcgtgtgcgacttagaggggtcaagttgc

SEQ ID NO: 337833 - DNA, 54 bp, Artificial
  Synthetic oligonucleotide
attgggaaaacgagccactattcgtacacgctcgggggcccaaattgggtcaca

SEQ ID NO: 337834 - DNA, 55 bp, Artificial
  Synthetic oligonucleotide
attgggaaacaacccactataccagacgtagttctggagctgcaagagcttgtcc

SEQ ID NO: 337835 - DNA, 54 bp, Artificial
  Synthetic oligonucleotide
attgggaaccagtcggtcatagggtctactaaagctggcgttaattctccgtta

SEQ ID NO: 337836 - DNA, 55 bp, Artificial
  Synthetic oligonucleotide
attgggaagaaccagaacccgccgaaaggacaggctgggggcgtacgattcatgc

SEQ ID NO: 337837 - DNA, 57 bp, Artificial
  Synthetic oligonucleotide
attgggaaggcccgccatatatgacgtataaccagccgcaagccggtagcgtcaccc

SEQ ID NO: 337838 - DNA, 57 bp, Artificial
  Synthetic oligonucleotide
attgggaaggtaatgtgtattagtgatgtcacccgtggaattgggctaactcatagg

SEQ ID NO: 337839 - DNA, 57 bp, Artificial
  Synthetic oligonucleotide
attgggaatgaatccaaccttggaggaaatgctaatagcttgccagggagtaggagg

SEQ ID NO: 337840 - DNA, 58 bp, Artificial
  Synthetic oligonucleotide
attgggaatgttgggactatataagccaacgggtacctaatggcatattgcaaagatg

SEQ ID NO: 337841 - DNA, 57 bp, Artificial
  Synthetic oligonucleotide
attgggaccacgagaaaatgtagctgtaatccaagttgggggttctgatgtacttga

SEQ ID NO: 337842 - DNA, 59 bp, Artificial
  Synthetic oligonucleotide
attgggaccactacaagtatttcgaccaatcacatgttgtctgtggtgactagttatta

SEQ ID NO: 337843 - DNA, 57 bp, Artificial
  Synthetic oligonucleotide
attgggacgattcacaagcgtttagaaatatggtgtatgtacgatcgttggcagcga

SEQ ID NO: 337844 - DNA, 55 bp, Artificial
  Synthetic oligonucleotide
attgggacggcaagtacaacgagcacggccgcaaccctggtgacgtgtggacgct

SEQ ID NO: 337845 - DNA, 52 bp, Artificial
  Synthetic oligonucleotide
attgggactctcgcgaatacactacaatttacattgttttcggttacaacgc

SEQ ID NO: 337846 - DNA, 58 bp, Artificial
  Synthetic oligonucleotide
attgggagtatggattggtttatggcggcgtcactggctacagtgaaaagtggacagt

SEQ ID NO: 337847 - DNA, 55 bp, Artificial
  Synthetic oligonucleotide
attgggatgacttatcattgctacaatgagatgttacgaatgctggttgctgcag

SEQ ID NO: 337848 - DNA, 56 bp, Artificial
  Synthetic oligonucleotide
attgggatgtggtaccccatgtggactgaaaaagtctctgccaagcagctgtatca

SEQ ID NO: 337849 - DNA, 60 bp, Artificial
  Synthetic oligonucleotide
attgggattcacctctcacatacttctgattctgctagtgtgcacatggtagtggtttgc

SEQ ID NO: 337850 - DNA, 54 bp, Artificial
  Synthetic oligonucleotide
attgggattggagaggctttacagctaggtatcacaaagagtttgtgttacagc

SEQ ID NO: 337851 - DNA, 55 bp, Artificial
  Synthetic oligonucleotide
attgggatttagacgatagtgatgttacgtatgagttccccacattggatgattc

SEQ ID NO: 337852 - DNA, 52 bp, Artificial
  Synthetic oligonucleotide
attgggatttagtaatctccgtcgtgtttcgcccttttccacggaccagaag

SEQ ID NO: 337853 - DNA, 60 bp, Artificial
  Synthetic oligonucleotide
attgggcactggaacgcagtctgaagctttaatgcaaacgttggctgaattccgcatgta

SEQ ID NO: 337854 - DNA, 58 bp, Artificial
  Synthetic oligonucleotide
attgggccagaaagtaaggtgggtgacattgaattacaattggaagagttggtcatgc

SEQ ID NO: 337855 - DNA, 54 bp, Artificial
  Synthetic oligonucleotide
attgggccctggattgcaaaggaagattgttggaatcccgcctttaatttgaac

SEQ ID NO: 337856 - DNA, 54 bp, Artificial
  Synthetic oligonucleotide
attgggcctagaaggagcaaggcccaaggtgtccgacttcagaagaagggaaac

SEQ ID NO: 337857 - DNA, 58 bp, Artificial
  Synthetic oligonucleotide
attgggccttcaggtaagtagaggacagcctctaggagcccctgtcacagggaatcaa

SEQ ID NO: 337858 - DNA, 55 bp, Artificial
  Synthetic oligonucleotide
attgggcgaggaagacgttttcagtgtggccgtctcgcagtccacggggtcgtcg

SEQ ID NO: 337859 - DNA, 60 bp, Artificial
  Synthetic oligonucleotide
attgggctgcttggttctcagagatggattaatggtcttagaaaactccaacatgaataa

SEQ ID NO: 337860 - DNA, 55 bp, Artificial
  Synthetic oligonucleotide
attgggcttaactcaattcttgtgggttatctctctgatattagcgcacaattac

SEQ ID NO: 337861 - DNA, 59 bp, Artificial
  Synthetic oligonucleotide
attgggcttggagcgctggtgttaagccagagacatttttcactttgtctcaattcctc

SEQ ID NO: 337862 - DNA, 59 bp, Artificial
  Synthetic oligonucleotide
attggggactcatacacgttatcgggaggtactcattaccgtcaaggcgcatgtgcagg

SEQ ID NO: 337863 - DNA, 60 bp, Artificial
  Synthetic oligonucleotide
attggggcctacatattaggatttgccataccaatcatcctgaaagctctctacatgctt

SEQ ID NO: 337864 - DNA, 55 bp, Artificial
  Synthetic oligonucleotide
attgggggaattacacaccagggccagggatcaggtacccactaacatttggatg

SEQ ID NO: 337865 - DNA, 54 bp, Artificial
  Synthetic oligonucleotide
attggggggcaactaaaaaccacgcctacatgtatattagaacaggagtgtcac

SEQ ID NO: 337866 - DNA, 58 bp, Artificial
  Synthetic oligonucleotide
attgggggggaaagagtggtcttacattgtcgagagatcatcagctgtaaacggaatg

SEQ ID NO: 337867 - DNA, 52 bp, Artificial
  Synthetic oligonucleotide
attgggggtcgccataaactttgggctccattttaggccttccggactacaa

SEQ ID NO: 337868 - DNA, 53 bp, Artificial
  Synthetic oligonucleotide
attggggtgggaaactaaagcttaaaggatagcaattatggaatcctccgtaa

SEQ ID NO: 337869 - DNA, 58 bp, Artificial
  Synthetic oligonucleotide
attgggtaccatgccaacaattcaacaacacaagtggatacaatacttgaaaagaatg

SEQ ID NO: 337870 - DNA, 56 bp, Artificial
  Synthetic oligonucleotide
attgggtacgaccctggcacacctgggacgtaaggcatcacagtgtgcggtacaga

SEQ ID NO: 337871 - DNA, 60 bp, Artificial
  Synthetic oligonucleotide
attgggtagcaagagtagattatagaataggaataggggcatttatagtagcactactca

SEQ ID NO: 337872 - DNA, 60 bp, Artificial
  Synthetic oligonucleotide
attgggtgagtctgagagagtttgtccaaatctgacatattggggaactttgctgtgtag

SEQ ID NO: 337873 - DNA, 59 bp, Artificial
  Synthetic oligonucleotide
attgggtgggttctgacctataaactcctgggtcagtcatttggtcagcagacgctgag

SEQ ID NO: 337874 - DNA, 55 bp, Artificial
  Synthetic oligonucleotide
attgggttatagttatctttcgagctgctgttgaagttttggaaagctctaaaat

SEQ ID NO: 337875 - DNA, 56 bp, Artificial
  Synthetic oligonucleotide
attgggttcatttggaactcaaacacaatgggtgaactactaattttgccagacta

SEQ ID NO: 337876 - DNA, 56 bp, Artificial
  Synthetic oligonucleotide
attgggttctcattttttgtgaaagactggccagaaaagattgaggaatttctcat

SEQ ID NO: 337877 - DNA, 55 bp, Artificial
  Synthetic oligonucleotide
attgggttcttagtgttgtggattggcacgaactcaaggaacacttcaatggcta

SEQ ID NO: 337878 - DNA, 55 bp, Artificial
  Synthetic oligonucleotide
attgggtttacactgccaattgtcctgaaagcattgtatatgttgtccacaaggg

SEQ ID NO: 337879 - DNA, 54 bp, Artificial
  Synthetic oligonucleotide
attggtaaagttgaatgaaatcgaagtcgttactggaggtagtcgcgatttgtt

SEQ ID NO: 337880 - DNA, 53 bp, Artificial
  Synthetic oligonucleotide
attggtaacactgaagttggaaggaccttcctggaaggtaacagatttgttcg

SEQ ID NO: 337881 - DNA, 55 bp, Artificial
  Synthetic oligonucleotide
attggtaagagatggtggtaatcgtaatcagacaaataagactgagaccttcaga

SEQ ID NO: 337882 - DNA, 51 bp, Artificial
  Synthetic oligonucleotide
attggtacaggccgtggttcaggtggtgctacaggttatgttcctttggga

SEQ ID NO: 337883 - DNA, 60 bp, Artificial
  Synthetic oligonucleotide
attggtacccaacatatgaaggacagcaagaaaccattaacgacattgtatgctgtggtc

SEQ ID NO: 337884 - DNA, 57 bp, Artificial
  Synthetic oligonucleotide
attggtacctgagtacagtggtccttcaagggtgacgaagatcgcattcttcactgc

SEQ ID NO: 337885 - DNA, 58 bp, Artificial
  Synthetic oligonucleotide
attggtactggctgtactgcatgcgggctatacattgaccagcttaaacctgtaggca

SEQ ID NO: 337886 - DNA, 58 bp, Artificial
  Synthetic oligonucleotide
attggtactggtagtctccctgggggcaatcagtttctggatgtgctctaatgggtct

SEQ ID NO: 337887 - DNA, 60 bp, Artificial
  Synthetic oligonucleotide
attggtagaatggcagcgttaattggagtgaaacaccaactatgggctagtcatgaaatc

SEQ ID NO: 337888 - DNA, 60 bp, Artificial
  Synthetic oligonucleotide
attggtagacagcatagtgggcgacttgcgcaattactggacgcagctaaagacccccca

SEQ ID NO: 337889 - DNA, 55 bp, Artificial
  Synthetic oligonucleotide
attggtagagctatccgcaacctacccagaagaataagacagggttttgaagcag

SEQ ID NO: 337890 - DNA, 55 bp, Artificial
  Synthetic oligonucleotide
attggtagggcaatagctgataagttagacaaccagagaccctatacccttcccc

SEQ ID NO: 337891 - DNA, 55 bp, Artificial
  Synthetic oligonucleotide
attggtagttttctcaaactaccgttcggtagttatgagtcattctgccaattac

SEQ ID NO: 337892 - DNA, 56 bp, Artificial
  Synthetic oligonucleotide
attggtataccattggagtatatgtaatagggttcacactacctattattttgaag

SEQ ID NO: 337893 - DNA, 53 bp, Artificial
  Synthetic oligonucleotide
attggtcaacagggatcctcccccaaaaccagctcaaactttcgaaatcaaac

SEQ ID NO: 337894 - DNA, 53 bp, Artificial
  Synthetic oligonucleotide
attggtcaatcaaaagagattgaaactactgccacagctgaaggaggcgaaat

SEQ ID NO: 337895 - DNA, 60 bp, Artificial
  Synthetic oligonucleotide
attggtcagggtatagcgggagttttgtgcagcatccagaattaacaggactggactgca

SEQ ID NO: 337896 - DNA, 60 bp, Artificial
  Synthetic oligonucleotide
attggtcaggttactctggaagcttcattgattattgggatgatggtagtgagtgctaca

SEQ ID NO: 337897 - DNA, 54 bp, Artificial
  Synthetic oligonucleotide
attggtccgatcatgaagcctcatcaggggtgagctcagcatgttcatacctgg

SEQ ID NO: 337898 - DNA, 60 bp, Artificial
  Synthetic oligonucleotide
attggtcgaaaaatgacctaattgcattcttagagatctgcaagccagaggtcctgctag

SEQ ID NO: 337899 - DNA, 60 bp, Artificial
  Synthetic oligonucleotide
attggtctacatatacaacgtgatgtaatacattccataatacatgatcaaccgatttaa

SEQ ID NO: 337900 - DNA, 60 bp, Artificial
  Synthetic oligonucleotide
attggtctacatatacaacgtgatgtagtacattatacaatacatgatctacagacttaa

SEQ ID NO: 337901 - DNA, 60 bp, Artificial
  Synthetic oligonucleotide
attggtctcgattccgcgccactatcaacgtagacacgtcactagtggagctaggcgctg

SEQ ID NO: 337902 - DNA, 60 bp, Artificial
  Synthetic oligonucleotide
attggtctcttatcattcccagatagtgttccttagacgttgcagtgttgatgatagttc

SEQ ID NO: 337903 - DNA, 58 bp, Artificial
  Synthetic oligonucleotide
attggtctgataataaggatatggaaaggcctataggtcaagttttgttgatggctgg

SEQ ID NO: 337904 - DNA, 55 bp, Artificial
  Synthetic oligonucleotide
attggtctgcgcaaagcaaggagcaaaagttacgtgatttaaagaggtctgcagc

SEQ ID NO: 337905 - DNA, 59 bp, Artificial
  Synthetic oligonucleotide
attggtgaactaaatgccaggtctgactcctagagccgatcttactgacacgtacaaaa

SEQ ID NO: 337906 - DNA, 57 bp, Artificial
  Synthetic oligonucleotide
attggtgaatcgccccaaggagtagaggaaggctccatcgggaaggtatgcaggacc

SEQ ID NO: 337907 - DNA, 55 bp, Artificial
  Synthetic oligonucleotide
attggtgacgagagaaccctacattagctgtgacaatgagggttgttggtctttt

SEQ ID NO: 337908 - DNA, 56 bp, Artificial
  Synthetic oligonucleotide
attggtgactattattttgctttcccaaaatacccctatctatgtgtctggaaggc

SEQ ID NO: 337909 - DNA, 60 bp, Artificial
  Synthetic oligonucleotide
attggtgagcaatacttccgtatgccagttacctatgtcatgaatatgggtctcagtcca

SEQ ID NO: 337910 - DNA, 60 bp, Artificial
  Synthetic oligonucleotide
attggtgaggttcgctatttcagagaagtgtcgcgatttatttgtgggcattcaggaggc

SEQ ID NO: 337911 - DNA, 55 bp, Artificial
  Synthetic oligonucleotide
attggtgcacgtaagcaagataaggtatatgtgtcactaattgatggatccacac

SEQ ID NO: 337912 - DNA, 57 bp, Artificial
  Synthetic oligonucleotide
attggtggaatatgcattacttgggttctagcaagttttcgccagttctggcgtttg

SEQ ID NO: 337913 - DNA, 50 bp, Artificial
  Synthetic oligonucleotide
attggtgggactgcaggtgaccgtggattatcggacgctgcaagattatt

SEQ ID NO: 337914 - DNA, 60 bp, Artificial
  Synthetic oligonucleotide
attggtggtgcgagaaatagcaaatcaattatggctacaatgaagggaacatcaatagga

SEQ ID NO: 337915 - DNA, 55 bp, Artificial
  Synthetic oligonucleotide
attggtgtaacagggccggattccaaggcagtagcagtagttcattatggggggg

SEQ ID NO: 337916 - DNA, 59 bp, Artificial
  Synthetic oligonucleotide
attggtgtacaccgattcattctctagccccctatcggtgtattggtgtactatatata

SEQ ID NO: 337917 - DNA, 51 bp, Artificial
  Synthetic oligonucleotide
attggtgtacaggcaggtccgagcactaatatttaccatataaactgtatt

SEQ ID NO: 337918 - DNA, 58 bp, Artificial
  Synthetic oligonucleotide
attggtgtagtgaacactactctatcaacaatagcccttctcattggagttgggaacc

SEQ ID NO: 337919 - DNA, 56 bp, Artificial
  Synthetic oligonucleotide
attggtgtattggatcgtcatttcgtggtgcctttgcttctggagttggtcttttt

SEQ ID NO: 337920 - DNA, 56 bp, Artificial
  Synthetic oligonucleotide
attggtgtattggatcgtcattttggtggtgcctccgcttcttgaactggtctttt

SEQ ID NO: 337921 - DNA, 50 bp, Artificial
  Synthetic oligonucleotide
attggtgtctggagtcctatatataggtaagacactaatggcataattgt

SEQ ID NO: 337922 - DNA, 56 bp, Artificial
  Synthetic oligonucleotide
attggtgtctggtgtcttatttatacttagacaccgaatggcatatctgtaattgt

SEQ ID NO: 337923 - DNA, 57 bp, Artificial
  Synthetic oligonucleotide
attggtgtggtcgtaccaggtgctggtagaaccaaggcttatggtcaaaatgaacta

SEQ ID NO: 337924 - DNA, 58 bp, Artificial
  Synthetic oligonucleotide
attggttaaccgagtgctcaattgaaaagttcccactgatggctaaaatatattcatg

SEQ ID NO: 337925 - DNA, 55 bp, Artificial
  Synthetic oligonucleotide
attggttaataagtgctaggatgcagtcaagcttatattgtaatgtgggagacac

SEQ ID NO: 337926 - DNA, 55 bp, Artificial
  Synthetic oligonucleotide
attggttatctgaatgtgattgcatggtggcttatatgctcgagtttaactccag

SEQ ID NO: 337927 - DNA, 55 bp, Artificial
  Synthetic oligonucleotide
attggttcaaaatgcgaacccagactgtaagaccattctaaaagcactgggacca

SEQ ID NO: 337928 - DNA, 52 bp, Artificial
  Synthetic oligonucleotide
attggttcaaatgagtttatgggtaagtatgagaggtacaagggacctgaat

SEQ ID NO: 337929 - DNA, 57 bp, Artificial
  Synthetic oligonucleotide
attggttcagaattgaacgcacaacgcacgtaaagggagggcgaagagtagatattc

SEQ ID NO: 337930 - DNA, 60 bp, Artificial
  Synthetic oligonucleotide
attggttccaagggagatgtgtttgtcataagagagccattcatttcgtgctcccacttg

SEQ ID NO: 337931 - DNA, 58 bp, Artificial
  Synthetic oligonucleotide
attggttcggttgtacctggatgaacgcaactggatacaccaaagcgtgcggagcgcc

SEQ ID NO: 337932 - DNA, 58 bp, Artificial
  Synthetic oligonucleotide
attggttctgagaaaacgcaaaacgtgacaataaatccaggaccatttgctcagactg

SEQ ID NO: 337933 - DNA, 55 bp, Artificial
  Synthetic oligonucleotide
attggttgagaggagaaatgtgataacagacccactccttaagttggtagaaccc

SEQ ID NO: 337934 - DNA, 58 bp, Artificial
  Synthetic oligonucleotide
attggttgttcaccggctagtacagaaacatatgaggtggtatcaaataatactcaac

SEQ ID NO: 337935 - DNA, 50 bp, Artificial
  Synthetic oligonucleotide
attggtttgaatgtaacccagttcaagatagtatgggaacattcactgtt

SEQ ID NO: 337936 - DNA, 57 bp, Artificial
  Synthetic oligonucleotide
attgtaaaacaggttcgtgccaacataagtggtggatcaacgcaccgtcacaaatcg

SEQ ID NO: 337937 - DNA, 56 bp, Artificial
  Synthetic oligonucleotide
attgtaaacatagtacaaggaatttgtagagctatccgcaacatacctagaagaat

SEQ ID NO: 337938 - DNA, 58 bp, Artificial
  Synthetic oligonucleotide
attgtaaagagcaaaagctacatagtccagcaggcgttacgtcaccaaatcggcttac

SEQ ID NO: 337939 - DNA, 54 bp, Artificial
  Synthetic oligonucleotide
attgtaaattaggcttcttgaatcgtatggtacttggtttatgtggttatacgg

SEQ ID NO: 337940 - DNA, 54 bp, Artificial
  Synthetic oligonucleotide
attgtaacgtgagtaaaaaagattggaatgacactttaagcaaggtagctaaaa

SEQ ID NO: 337941 - DNA, 59 bp, Artificial
  Synthetic oligonucleotide
attgtaactgcacatccggtgtgtattactctagatattacaacaaattctaccctata

SEQ ID NO: 337942 - DNA, 60 bp, Artificial
  Synthetic oligonucleotide
attgtaacttgatgggcatctcgttgttggacagtctgtattcgcaactctttgtctcga

SEQ ID NO: 337943 - DNA, 57 bp, Artificial
  Synthetic oligonucleotide
attgtaaggtacttggttacgatactcaattactatatggtcaaccttcatgcattt

SEQ ID NO: 337944 - DNA, 54 bp, Artificial
  Synthetic oligonucleotide
attgtaaggttcacccgcataagaatgtgaaagtttggcaagataaacggggtc

SEQ ID NO: 337945 - DNA, 58 bp, Artificial
  Synthetic oligonucleotide
attgtaatcctgttgctaccattgcgtagtttgctttcagacaaaaggcttaggcatt

SEQ ID NO: 337946 - DNA, 54 bp, Artificial
  Synthetic oligonucleotide
attgtaatgtcagtagagcagaatggaatgaaactctacgagaggtagctaaac

SEQ ID NO: 337947 - DNA, 59 bp, Artificial
  Synthetic oligonucleotide
attgtacattacatgatcgacagatcgaataacattattaatacaaagtacgcctaaac

SEQ ID NO: 337948 - DNA, 60 bp, Artificial
  Synthetic oligonucleotide
attgtaccaattcatgcatgcaatatgatgaaaagctgtttgattgcattgggaccatac

SEQ ID NO: 337949 - DNA, 56 bp, Artificial
  Synthetic oligonucleotide
attgtaccagaaagtgggaacctatgtttccgaagccacatcaacattgaacaaaa

SEQ ID NO: 337950 - DNA, 53 bp, Artificial
  Synthetic oligonucleotide
attgtaccatgttttacaaggtgccgcttacgctttaaaaacgaattttgagc

SEQ ID NO: 337951 - DNA, 56 bp, Artificial
  Synthetic oligonucleotide
attgtaccgccgttggctcgattcattctagtaaccctacctcagtcgaattggat

SEQ ID NO: 337952 - DNA, 55 bp, Artificial
  Synthetic oligonucleotide
attgtacctgggggggggactgtttcctgcgcttcctcagtgccttcaaacgcca

SEQ ID NO: 337953 - DNA, 55 bp, Artificial
  Synthetic oligonucleotide
attgtacgcctgtcctctgcacggtttgaacgcgccccgtccggacatgttaggg

SEQ ID NO: 337954 - DNA, 55 bp, Artificial
  Synthetic oligonucleotide
attgtactagaacccattgaaccatctgtattacctgaagtgcctggtaatgcac

SEQ ID NO: 337955 - DNA, 59 bp, Artificial
  Synthetic oligonucleotide
attgtactggaataaattatgcatcatctaacttcgaggcattctatgcggtgagtgaa

SEQ ID NO: 337956 - DNA, 60 bp, Artificial
  Synthetic oligonucleotide
attgtactgttcacaagcaccatgcaactttttcccctctgcctaatcatctcatgttca

SEQ ID NO: 337957 - DNA, 54 bp, Artificial
  Synthetic oligonucleotide
attgtactttgctcgaaaacacggagtaatgcggttggggtaccaacctgtgcc

SEQ ID NO: 337958 - DNA, 58 bp, Artificial
  Synthetic oligonucleotide
attgtagaagggtacgttagcgacgagaccggtgctgtcgaatcggcatgtggcgcaa

SEQ ID NO: 337959 - DNA, 60 bp, Artificial
  Synthetic oligonucleotide
attgtagaggagaattcttctattgcaatacatcaaagctgtttactgaatcgcttaata

SEQ ID NO: 337960 - DNA, 60 bp, Artificial
  Synthetic oligonucleotide
attgtagaggagagtttatctattgtaatacatcaaagctgtttaatggtacatacaaca

SEQ ID NO: 337961 - DNA, 60 bp, Artificial
  Synthetic oligonucleotide
attgtagcaatggtattttcacaagaggactgcatgataaaggcagtccgaggtgatttg

SEQ ID NO: 337962 - DNA, 60 bp, Artificial
  Synthetic oligonucleotide
attgtagcaatggtgttctcacaagaggattgcatgataaaggcagttcgaggcgacctg

SEQ ID NO: 337963 - DNA, 60 bp, Artificial
  Synthetic oligonucleotide
attgtagcaatggtgttctcacaggaggattgcatgataaaagcagtcagaggtgatctg

SEQ ID NO: 337964 - DNA, 60 bp, Artificial
  Synthetic oligonucleotide
attgtagcaattactgattggtcaggctatagtgggagcttcgtgcagcatccagagctg

SEQ ID NO: 337965 - DNA, 59 bp, Artificial
  Synthetic oligonucleotide
attgtagcctcaacatgtaaatggcctgattttttgcgaatgtctaatgatccatatgg

SEQ ID NO: 337966 - DNA, 54 bp, Artificial
  Synthetic oligonucleotide
attgtagcgaagggacgttatgaggccatccagtatttcgggctggaacccccc

SEQ ID NO: 337967 - DNA, 58 bp, Artificial
  Synthetic oligonucleotide
attgtagctgtaagtgtgggtcaagagggccagttacaggtgtattcctctggaatag

SEQ ID NO: 337968 - DNA, 60 bp, Artificial
  Synthetic oligonucleotide
attgtaggatgcacaccttgcataggagagcattgggataaagctgtgccttgtgcaaaa

SEQ ID NO: 337969 - DNA, 59 bp, Artificial
  Synthetic oligonucleotide
attgtaggattgctcctttaatggtagcatacatgttggaaagagaactggttcgcaaa

SEQ ID NO: 337970 - DNA, 58 bp, Artificial
  Synthetic oligonucleotide
attgtagtactattgtgcaacgctctgacgttgtttctaacagtcacatggatagtgt

SEQ ID NO: 337971 - DNA, 56 bp, Artificial
  Synthetic oligonucleotide
attgtatacaaataccttcaggacagagctcctccctttttagtcgtcaacgacca

SEQ ID NO: 337972 - DNA, 59 bp, Artificial
  Synthetic oligonucleotide
attgtatatggcatgtacccatgcctctaaccccgtgtatgcaacccttaagattcgaa

SEQ ID NO: 337973 - DNA, 59 bp, Artificial
  Synthetic oligonucleotide
attgtatcaccaacgctatcatagaacttaggcccgtcgtgcttgctatacgcggctga

SEQ ID NO: 337974 - DNA, 59 bp, Artificial
  Synthetic oligonucleotide
attgtatcgttaaggcgaggtcagcaaatgcagacactatttattacgactattaccca

SEQ ID NO: 337975 - DNA, 60 bp, Artificial
  Synthetic oligonucleotide
attgtatgtggcatgttcatcatatgtggtgaagtcgatggtcccattccagtagttgtg

SEQ ID NO: 337976 - DNA, 60 bp, Artificial
  Synthetic oligonucleotide
attgtatgttgtatccaggtgcggaggggaggatctcagctgtcacgcaggtgactaagt

SEQ ID NO: 337977 - DNA, 60 bp, Artificial
  Synthetic oligonucleotide
attgtattacatggaagtgaagcggagactctaaataatgcaaacccgcgattgcacaaa

SEQ ID NO: 337978 - DNA, 56 bp, Artificial
  Synthetic oligonucleotide
attgtattcagtcgctctgcggagaggctggcagatcgagccctgggaggttctct

SEQ ID NO: 337979 - DNA, 50 bp, Artificial
  Synthetic oligonucleotide
attgtatttaggtggtatgtcatactattgtgaagaccataaaccacagt

SEQ ID NO: 337980 - DNA, 51 bp, Artificial
  Synthetic oligonucleotide
attgtcaaaagtctttgtatgtggcaccgcgcccccacctgagtttgttgg

SEQ ID NO: 337981 - DNA, 57 bp, Artificial
  Synthetic oligonucleotide
attgtcaacagcgaatgcgtgatttgcaacagcgagtctctttctaatgtcactcgc

SEQ ID NO: 337982 - DNA, 56 bp, Artificial
  Synthetic oligonucleotide
attgtcaataaagtcggttgtccaaggacccacactcctgaggaacttgccgcaac

SEQ ID NO: 337983 - DNA, 60 bp, Artificial
  Synthetic oligonucleotide
attgtcactgatcagcttgtcgtgggcgaaccgcggagggtatctgctaaggctgtgatt

SEQ ID NO: 337984 - DNA, 53 bp, Artificial
  Synthetic oligonucleotide
attgtcacttaaccgattgcacacctatctttaattaatagggtgcccccggg

SEQ ID NO: 337985 - DNA, 59 bp, Artificial
  Synthetic oligonucleotide
attgtcacttactaagagcctactcgctattagcaacctaagctccaccttatttgaga

SEQ ID NO: 337986 - DNA, 60 bp, Artificial
  Synthetic oligonucleotide
attgtcatcaatggtatgtccatgcaatctggcgagcgtatcgacattaacgattatcat

SEQ ID NO: 337987 - DNA, 60 bp, Artificial
  Synthetic oligonucleotide
attgtcatccattatagtagagcagttataagagtcggtaatcttgtcggtggactatac

SEQ ID NO: 337988 - DNA, 60 bp, Artificial
  Synthetic oligonucleotide
attgtccaatcatttcgctcgggttgtctcctcgcgcgacgctcgcttttggcaatctcg

SEQ ID NO: 337989 - DNA, 58 bp, Artificial
  Synthetic oligonucleotide
attgtccatctattgtggaacaaaatttgcttgtagtcaagtaacaattgtacaccca

SEQ ID NO: 337990 - DNA, 59 bp, Artificial
  Synthetic oligonucleotide
attgtccatgctatcacaaacatttatgagagaatgtttagtggtaatgacgggatgag

SEQ ID NO: 337991 - DNA, 54 bp, Artificial
  Synthetic oligonucleotide
attgtcccaaactgattgtttagaagatcagggtttcgaacgtcccacactctg

SEQ ID NO: 337992 - DNA, 60 bp, Artificial
  Synthetic oligonucleotide
attgtcccagaactgcaaagaagacacttatgttgtcaagaaactcagagattttagctg

SEQ ID NO: 337993 - DNA, 51 bp, Artificial
  Synthetic oligonucleotide
attgtcccagttttgaaatatcatctcagtggagatattatattggataaa

SEQ ID NO: 337994 - DNA, 54 bp, Artificial
  Synthetic oligonucleotide
attgtcccatcaaggacaggtttgggtgtgaattaacgggagtggtaggagaag

SEQ ID NO: 337995 - DNA, 55 bp, Artificial
  Synthetic oligonucleotide
attgtcccgttgcacagtgaagcaagcacgagtagctcttaattttgagctgact

SEQ ID NO: 337996 - DNA, 55 bp, Artificial
  Synthetic oligonucleotide
attgtccgccgcctcgatcaccatggatttgataccccggacatgccaccgcccg

SEQ ID NO: 337997 - DNA, 60 bp, Artificial
  Synthetic oligonucleotide
attgtcctaatcttgaatggttggagcccagatcagattacaaattcatgtacatgggag

SEQ ID NO: 337998 - DNA, 60 bp, Artificial
  Synthetic oligonucleotide
attgtcctatttctagcaatctacatcttcttgcctatggtgttcaaacttagagatgtg

SEQ ID NO: 337999 - DNA, 60 bp, Artificial
  Synthetic oligonucleotide
attgtcctcgtcgtactaatgctaaattatattgttccatggcatatctgcgctgtccct

SEQ ID NO: 338000 - DNA, 57 bp, Artificial
  Synthetic oligonucleotide
attgtcctgtccggaaagccggcaattataccagacagagaaactctctaccaggag

SEQ ID NO: 338001 - DNA, 60 bp, Artificial
  Synthetic oligonucleotide
attgtcgaagagagatatggagcatcagctagattggacaatgcagtggataaactaact

SEQ ID NO: 338002 - DNA, 60 bp, Artificial
  Synthetic oligonucleotide
attgtcgcatatggagaatggcctagttacttatcagatatggatgccacttcagttgat

SEQ ID NO: 338003 - DNA, 55 bp, Artificial
  Synthetic oligonucleotide
attgtcggatctctaatgccgggccgactgccggtggacggatattgcccggcct

SEQ ID NO: 338004 - DNA, 55 bp, Artificial
  Synthetic oligonucleotide
attgtcgtacaggaccatgttcccagttgattcgtgtgcgcagatggacttatcg

SEQ ID NO: 338005 - DNA, 57 bp, Artificial
  Synthetic oligonucleotide
attgtcgtcctcgtccactatcctttactgtcgaccaatgagaattcgttttcagag

SEQ ID NO: 338006 - DNA, 51 bp, Artificial
  Synthetic oligonucleotide
attgtctcaaacgtggtatgttaaagaacacgcgtgatgcagttatcttcc

SEQ ID NO: 338007 - DNA, 60 bp, Artificial
  Synthetic oligonucleotide
attgtctcgcgacgacgtggccaatgctcgaccatgctgctgagtctatttatccgatta

SEQ ID NO: 338008 - DNA, 60 bp, Artificial
  Synthetic oligonucleotide
attgtctgtaccatgtcttcttgcttgaattcctggatagttgattccttgtacatcaga

SEQ ID NO: 338009 - DNA, 59 bp, Artificial
  Synthetic oligonucleotide
attgtcttagccgccgcgggagcctgccgcgtcggactcagaggtaagtggtgcgctcg

SEQ ID NO: 338010 - DNA, 54 bp, Artificial
  Synthetic oligonucleotide
attgtcttcttcggggggggggcagttgaggttgtcgcggtcagtctcttgaac

SEQ ID NO: 338011 - DNA, 60 bp, Artificial
  Synthetic oligonucleotide
attgtcttgtatgtttcagtgcattgagtcgacggagtcccgctgccgacttgaaaatcg

SEQ ID NO: 338012 - DNA, 54 bp, Artificial
  Synthetic oligonucleotide
attgtgaaacttgggcaagacaattgctgggtgattatggacctacacagggaa

SEQ ID NO: 338013 - DNA, 60 bp, Artificial
  Synthetic oligonucleotide
attgtgaactcagcctgctttgagtctccttcatgtaaccttgtgtcgtgcatttctatg

SEQ ID NO: 338014 - DNA, 58 bp, Artificial
  Synthetic oligonucleotide
attgtgaagtcttgtctgaggttcctctccaaggtttcactcaaggtgctcacaaaag

SEQ ID NO: 338015 - DNA, 60 bp, Artificial
  Synthetic oligonucleotide
attgtgaattctgcttgtttcgtgtccccctctgtcaatctcatgtcgtgaatttcaata

SEQ ID NO: 338016 - DNA, 58 bp, Artificial
  Synthetic oligonucleotide
attgtgacctagattgctacccttattacccagccaacctagttgactgctcttggag

SEQ ID NO: 338017 - DNA, 57 bp, Artificial
  Synthetic oligonucleotide
attgtgacgaagtattatcacctgaagagtcagaaaacctgtcagaatcttcacaag

SEQ ID NO: 338018 - DNA, 55 bp, Artificial
  Synthetic oligonucleotide
attgtgacgataaccgttcctttggcattgaagggaacttggtttctgtactcaa

SEQ ID NO: 338019 - DNA, 53 bp, Artificial
  Synthetic oligonucleotide
attgtgagaagaaggggtggattgtgaacatcacaagtgcagtacagactgag

SEQ ID NO: 338020 - DNA, 59 bp, Artificial
  Synthetic oligonucleotide
attgtgagatgctccgcctctgcgaccgttacccacataaggtgccagttaagggcgcc

SEQ ID NO: 338021 - DNA, 60 bp, Artificial
  Synthetic oligonucleotide
attgtgagcacgagtcagcttttctgatcgatggaggtcgtgtacaattcagacgatgtt

SEQ ID NO: 338022 - DNA, 52 bp, Artificial
  Synthetic oligonucleotide
attgtgatcatgacggtaggctagttggtatccatctaggtacacagggtgt

SEQ ID NO: 338023 - DNA, 60 bp, Artificial
  Synthetic oligonucleotide
attgtgatgggagctgagttggtagtattgctataaactgcctgaagtcactaaacgctt

SEQ ID NO: 338024 - DNA, 60 bp, Artificial
  Synthetic oligonucleotide
attgtgattggaggtgacccaatacagagtgactatgacaatgagaaggacaggaattgg

SEQ ID NO: 338025 - DNA, 55 bp, Artificial
  Synthetic oligonucleotide
attgtgcatcggtataatgatcagtatagccctcactcctttatggctaaccgca

SEQ ID NO: 338026 - DNA, 53 bp, Artificial
  Synthetic oligonucleotide
attgtgcattaccagtttaccgccggggttccgggctcaggtaagtcaaggtc

SEQ ID NO: 338027 - DNA, 55 bp, Artificial
  Synthetic oligonucleotide
attgtgccaatttcgaacatgtcgctacgtgcacagaatgctcaggacgttgttc

SEQ ID NO: 338028 - DNA, 56 bp, Artificial
  Synthetic oligonucleotide
attgtgccataaatggtccaaaaagggttactgggcatgcaattgggccttcttgt

SEQ ID NO: 338029 - DNA, 58 bp, Artificial
  Synthetic oligonucleotide
attgtgcccgcgtcggaggtgtgtggcccagtctactgcttcaccccaagccctgttg

SEQ ID NO: 338030 - DNA, 58 bp, Artificial
  Synthetic oligonucleotide
attgtgcgcactggttcggttatctgaggttttccagagttaggactctggggtgaga

SEQ ID NO: 338031 - DNA, 55 bp, Artificial
  Synthetic oligonucleotide
attgtgcgtcaaccattacaagaggttgtgattcgttgtttaaaatgccttactg

SEQ ID NO: 338032 - DNA, 52 bp, Artificial
  Synthetic oligonucleotide
attgtgctcaccgtcgttattggccctcatcgaagtgagcagtaggctaagt

SEQ ID NO: 338033 - DNA, 56 bp, Artificial
  Synthetic oligonucleotide
attgtgctccagctgggtttgcgattttaaagtgtaggggtaagaatttcactgga

SEQ ID NO: 338034 - DNA, 55 bp, Artificial
  Synthetic oligonucleotide
attgtgcttcaagcccacaatttggctcacaccggacgtgaagccactcttttaa

SEQ ID NO: 338035 - DNA, 55 bp, Artificial
  Synthetic oligonucleotide
attgtgctttgggacgactacggtatgagcaaccctgtgaccgatgcactgcgac

SEQ ID NO: 338036 - DNA, 55 bp, Artificial
  Synthetic oligonucleotide
attgtggaagcctgagcgtaatgatctggccccctgcggcctattacctgtctaa

SEQ ID NO: 338037 - DNA, 60 bp, Artificial
  Synthetic oligonucleotide
attgtggcatccaatgaaccacaatctcgtgtacgatgacgacgaatacggagatattga

SEQ ID NO: 338038 - DNA, 60 bp, Artificial
  Synthetic oligonucleotide
attgtggccatggtgttttcacaagaggattgtatgataaaggcagtccgaggtgatctg

SEQ ID NO: 338039 - DNA, 55 bp, Artificial
  Synthetic oligonucleotide
attgtggccgggaaagccgcgtatcgtgtagaacgcgttgccgatcttagtggag

SEQ ID NO: 338040 - DNA, 57 bp, Artificial
  Synthetic oligonucleotide
attgtggcctaccaatgcgaaagccaagaacggattctactttctccgtcacttatg

SEQ ID NO: 338041 - DNA, 60 bp, Artificial
  Synthetic oligonucleotide
attgtggcctctgaacatctgctgcatcagtctcttgttggaaagcagtctcctttccag

SEQ ID NO: 338042 - DNA, 60 bp, Artificial
  Synthetic oligonucleotide
attgtggcgggccatcacccatggggactcacgatggcatgcacagtgacattctgtggg

SEQ ID NO: 338043 - DNA, 56 bp, Artificial
  Synthetic oligonucleotide
attgtggctgggaatccggacgccccaaagctcagcttgccgatagtcttaaaggg

SEQ ID NO: 338044 - DNA, 60 bp, Artificial
  Synthetic oligonucleotide
attgtgggaggccgtggaagtcttggcttattgtcatgattcacctgatcttgttatgca

SEQ ID NO: 338045 - DNA, 55 bp, Artificial
  Synthetic oligonucleotide
attgtgggccttttgggttttgctgccccttttacacaatgtggctatcctgcct

SEQ ID NO: 338046 - DNA, 56 bp, Artificial
  Synthetic oligonucleotide
attgtgggcgacttggcttacaaaacgcccgtagatacttcgcaagctttgtcgaa

SEQ ID NO: 338047 - DNA, 57 bp, Artificial
  Synthetic oligonucleotide
attgtggggccgcaagaggttttatcctgaatgggtttggcagattgatttggccaa

SEQ ID NO: 338048 - DNA, 55 bp, Artificial
  Synthetic oligonucleotide
attgtggggcctgagtgttccgattcccctctagtgctcgatggaggctctatct

SEQ ID NO: 338049 - DNA, 51 bp, Artificial
  Synthetic oligonucleotide
attgtggggggaaaggacggcaattaaggggtatactgttgagaaggtagg

SEQ ID NO: 338050 - DNA, 54 bp, Artificial
  Synthetic oligonucleotide
attgtggggtcctagtgaacgtgcccacattgtctttcccgttctactatcccc

SEQ ID NO: 338051 - DNA, 60 bp, Artificial
  Synthetic oligonucleotide
attgtggtgaatagcattatagatggttggcaagccgtgctaaccctatgggatagtagc

SEQ ID NO: 338052 - DNA, 55 bp, Artificial
  Synthetic oligonucleotide
attgtggtggtattcttagatgccaacacggtgtcgtagggatagtttccaccgg

SEQ ID NO: 338053 - DNA, 60 bp, Artificial
  Synthetic oligonucleotide
attgtggtgttaattgtggtatgcctgcagcttttgttctggtgaaaggacatccagagt

SEQ ID NO: 338054 - DNA, 60 bp, Artificial
  Synthetic oligonucleotide
attgtgtctgtggtgcccgctatgatacttcagatagaatgaaactgcatagagcttctg

SEQ ID NO: 338055 - DNA, 58 bp, Artificial
  Synthetic oligonucleotide
attgtgtgcaaatcacaaggagcacacgcgcccaaccgactgttccggtttcgactgg

SEQ ID NO: 338056 - DNA, 59 bp, Artificial
  Synthetic oligonucleotide
attgtgtgctctatgcgtgtagacttgcgcaatttccgcggacaacgagggaggtggcg

SEQ ID NO: 338057 - DNA, 60 bp, Artificial
  Synthetic oligonucleotide
attgtgtgctcttcatgggccttattgtgggtttcgtgccttatgtagagtaatgttatg

SEQ ID NO: 338058 - DNA, 58 bp, Artificial
  Synthetic oligonucleotide
attgtgttagctattgtttctgtgttaatagtgtcactattacaacgattaaggtctc

SEQ ID NO: 338059 - DNA, 60 bp, Artificial
  Synthetic oligonucleotide
attgtgttcgatgatgagaagtatcaaagcctaatccctgactacatcaaccaattgatc

SEQ ID NO: 338060 - DNA, 53 bp, Artificial
  Synthetic oligonucleotide
attgtgttgctccgatgaaatacaaaaccgccaagtataccaatctagtgtgc

SEQ ID NO: 338061 - DNA, 56 bp, Artificial
  Synthetic oligonucleotide
attgtgttgtgtttattcaacatttaccaattatgtctcgatttattaacggtgaa

SEQ ID NO: 338062 - DNA, 55 bp, Artificial
  Synthetic oligonucleotide
attgttaagacagaaaaagatagataggttaattgaaagaattagggaaagagca

SEQ ID NO: 338063 - DNA, 54 bp, Artificial
  Synthetic oligonucleotide
attgttaatggttaggaatcactgaatattttatcgcttcggctttaaaataag

SEQ ID NO: 338064 - DNA, 60 bp, Artificial
  Synthetic oligonucleotide
attgttacaaagcctcaatgcagggattctgagaaaccccacattaatccctatgctgat

SEQ ID NO: 338065 - DNA, 56 bp, Artificial
  Synthetic oligonucleotide
attgttacaggcgtgtagatcctatgtctaggtttaaacctattgataagtttcaa

SEQ ID NO: 338066 - DNA, 60 bp, Artificial
  Synthetic oligonucleotide
attgttacatatggcactcacttacaggagtcccatcgaggaaatgctaaatagtttcac

SEQ ID NO: 338067 - DNA, 58 bp, Artificial
  Synthetic oligonucleotide
attgttaccggactaagacaagagtatgcgattcctgttggaccagtatttcctgctg

SEQ ID NO: 338068 - DNA, 56 bp, Artificial
  Synthetic oligonucleotide
attgttaggaattataagaggatgggaacaggaccaatacacctcaactacttgga

SEQ ID NO: 338069 - DNA, 60 bp, Artificial
  Synthetic oligonucleotide
attgttagtcgggattgcaaccgtatctgggtgcggtgccgtagtgtactgcatatccaa

SEQ ID NO: 338070 - DNA, 60 bp, Artificial
  Synthetic oligonucleotide
attgttatagcctagctgctacagaccaatcagatggaatgctgaaacctgagaggtcca

SEQ ID NO: 338071 - DNA, 60 bp, Artificial
  Synthetic oligonucleotide
attgttatctatttgacatcctttgttgtaccgatccttctgaaagccctgtatatgcta

SEQ ID NO: 338072 - DNA, 56 bp, Artificial
  Synthetic oligonucleotide
attgttatggtgcctgccaaaagtattcttacccgtggcaaactgcaaaatgtttc

SEQ ID NO: 338073 - DNA, 60 bp, Artificial
  Synthetic oligonucleotide
attgttattatgtccatcttgctcgagtaaggacagtcctcgtggcttaggatcttgaaa

SEQ ID NO: 338074 - DNA, 55 bp, Artificial
  Synthetic oligonucleotide
attgttcaacgccctacctcaaccactacaacaactctcattagctctggccggt

SEQ ID NO: 338075 - DNA, 60 bp, Artificial
  Synthetic oligonucleotide
attgttcaactcggcacataatgtagaacgattgtgctttcctacaggagacatccaatt

SEQ ID NO: 338076 - DNA, 59 bp, Artificial
  Synthetic oligonucleotide
attgttcacctcaccatactgcactcaggcacgcatgtctttgctggggggacctaatg

SEQ ID NO: 338077 - DNA, 55 bp, Artificial
  Synthetic oligonucleotide
attgttcaggcacttagggacaacctggaacctgggaccttcgatcttggagggc

SEQ ID NO: 338078 - DNA, 59 bp, Artificial
  Synthetic oligonucleotide
attgttcagtcggtggtggagacaatagccaggtctatagggaagttctttgcttctga

SEQ ID NO: 338079 - DNA, 57 bp, Artificial
  Synthetic oligonucleotide
attgttcccgagtcggctggaaacgcgttactagctctattcctagtagcgtggatc

SEQ ID NO: 338080 - DNA, 60 bp, Artificial
  Synthetic oligonucleotide
attgttccctgttggtggaccatactctcatcaagctgcctatatgcttactcttagtgt

SEQ ID NO: 338081 - DNA, 60 bp, Artificial
  Synthetic oligonucleotide
attgttccggaaccatgccactgacgctcgtgctttgtacatcctgaagcctctaatcgt

SEQ ID NO: 338082 - DNA, 60 bp, Artificial
  Synthetic oligonucleotide
attgttctcaaaagattaggttatgatcaagatgctatttctctgattgaggggatcaac

SEQ ID NO: 338083 - DNA, 53 bp, Artificial
  Synthetic oligonucleotide
attgttctgattgtgtgtgaagtccactgtgactgaaaactccaacactccct

SEQ ID NO: 338084 - DNA, 60 bp, Artificial
  Synthetic oligonucleotide
attgttgaagtataatgagccagttcgagttgggtcagtgaatttcccatgcttgatacg

SEQ ID NO: 338085 - DNA, 58 bp, Artificial
  Synthetic oligonucleotide
attgttgactttatatacttcgtcacgaagtagtggagcgcgtccaaatgtggaatcc

SEQ ID NO: 338086 - DNA, 58 bp, Artificial
  Synthetic oligonucleotide
attgttgagggcgcgtgggaagtgcgcgatgttgttaccgctgcccaaaagcgggcca

SEQ ID NO: 338087 - DNA, 60 bp, Artificial
  Synthetic oligonucleotide
attgttgagtggatactggctccggaagaacccaaagctcttgtatatgcagacaacata

SEQ ID NO: 338088 - DNA, 60 bp, Artificial
  Synthetic oligonucleotide
attgttgagtgtgactcgacacaatgggacagttaattagcttcttccaagacataccga

SEQ ID NO: 338089 - DNA, 60 bp, Artificial
  Synthetic oligonucleotide
attgttgatctaatgtgccacgcaacgttcacaatgcgtttgctgtcaccagtcagagtt

SEQ ID NO: 338090 - DNA, 56 bp, Artificial
  Synthetic oligonucleotide
attgttgccgaaggtctgttatttgaatgttgagataaggaaaggggcggcgaagc

SEQ ID NO: 338091 - DNA, 55 bp, Artificial
  Synthetic oligonucleotide
attgttgcgtatctattagtagcttctttagctgatgtgtatgcggctttgagac

SEQ ID NO: 338092 - DNA, 53 bp, Artificial
  Synthetic oligonucleotide
attgttggaatgccccctttaatttgaactggcttcccgtactttgtgtttga

SEQ ID NO: 338093 - DNA, 55 bp, Artificial
  Synthetic oligonucleotide
attgttggctgtacacctcctatgggtgaatattggggtcagggtgtgccttgca

SEQ ID NO: 338094 - DNA, 54 bp, Artificial
  Synthetic oligonucleotide
attgttgggatgccacctttaatttgaatgggcttcccgtactttgtgttgctt

SEQ ID NO: 338095 - DNA, 56 bp, Artificial
  Synthetic oligonucleotide
attgttgggggtgcccccaaggctgccaactcaaatcgttgcaccgattatggtcg

SEQ ID NO: 338096 - DNA, 55 bp, Artificial
  Synthetic oligonucleotide
attgttggttcatgtgtgagatgcggattccgcccacggagagtgccagacgcac

SEQ ID NO: 338097 - DNA, 59 bp, Artificial
  Synthetic oligonucleotide
attgttggttggtgtcacactaccatatgataacttgccccgcccaggtgccgactggc

SEQ ID NO: 338098 - DNA, 57 bp, Artificial
  Synthetic oligonucleotide
attgttggtttcagatggagggccaaacttatacaatatccggaatcttcacattcc

SEQ ID NO: 338099 - DNA, 54 bp, Artificial
  Synthetic oligonucleotide
attgttgtacccagtctatttaattctttatacgggtgaatttcctcatctaaa

SEQ ID NO: 338100 - DNA, 60 bp, Artificial
  Synthetic oligonucleotide
attgttgtatatggcatgtactcatgcctcaaaccctgtgtatgctacgttaaagatacg

SEQ ID NO: 338101 - DNA, 54 bp, Artificial
  Synthetic oligonucleotide
attgttgtatgaagcgtttatggccgataacacgtcatcccgtatttgaacgtt

SEQ ID NO: 338102 - DNA, 50 bp, Artificial
  Synthetic oligonucleotide
attgttgtcggtaacaaccattataaagccagtctgtagagcatatttta

SEQ ID NO: 338103 - DNA, 52 bp, Artificial
  Synthetic oligonucleotide
attgtttacgcagaccgatgttgtgcactaagtgcgcctatgatcatgtgtt

SEQ ID NO: 338104 - DNA, 54 bp, Artificial
  Synthetic oligonucleotide
attgtttacggtcgagaggttttgagcgcactgatgaaccgctgcccagtgata

SEQ ID NO: 338105 - DNA, 60 bp, Artificial
  Synthetic oligonucleotide
attgtttatttcccaggtatacacgccattcattgcttgaggagcagtgatgagttcccc

SEQ ID NO: 338106 - DNA, 55 bp, Artificial
  Synthetic oligonucleotide
attgtttccgcaaacatccggaagccacgtactctcggtgcggctccggtccttg

SEQ ID NO: 338107 - DNA, 53 bp, Artificial
  Synthetic oligonucleotide
attgttttagcgcgggtagccctgcctagaaactccgcgtaggtgtcgccgtt

SEQ ID NO: 338108 - DNA, 52 bp, Artificial
  Synthetic oligonucleotide
attgttttatcaggactacgtttctatcgtgagtttcggttgcctaaaaaag

SEQ ID NO: 338109 - DNA, 60 bp, Artificial
  Synthetic oligonucleotide
attgttttgacaatttggatgccgctgcttctaattgcacgcgatgtaatcccgcagtgt

SEQ ID NO: 338110 - DNA, 57 bp, Artificial
  Synthetic oligonucleotide
atttaaacagtggtaactgtgtagtgcaatgtcagactgaaaggggcggcttaaaca

SEQ ID NO: 338111 - DNA, 53 bp, Artificial
  Synthetic oligonucleotide
atttaaaccctggtgtaataactggatcagctgtgggatgtgacccggacaca

SEQ ID NO: 338112 - DNA, 51 bp, Artificial
  Synthetic oligonucleotide
atttaaacttataattgaaaaggtgaaacaggaataccagaaaacaatggg

SEQ ID NO: 338113 - DNA, 59 bp, Artificial
  Synthetic oligonucleotide
atttaaagctgcaacaatagcagcactaccaaactaccccacaataatgtccacagacc

SEQ ID NO: 338114 - DNA, 59 bp, Artificial
  Synthetic oligonucleotide
atttaaaggaaagatgcgaattatggatataagccaagcgctcaaggtgggcaccaagc

SEQ ID NO: 338115 - DNA, 60 bp, Artificial
  Synthetic oligonucleotide
atttaaaggagagatcaatgctcagctatgggaatgtgctggacttgaaccatcttgaca

SEQ ID NO: 338116 - DNA, 53 bp, Artificial
  Synthetic oligonucleotide
atttaaatgtaaacactgactaagctatatttttaggcggcggagggcgggaa

SEQ ID NO: 338117 - DNA, 57 bp, Artificial
  Synthetic oligonucleotide
atttaacacacacttgcctaagatgcggatggttaaaagattgattgaaacagaaag

SEQ ID NO: 338118 - DNA, 58 bp, Artificial
  Synthetic oligonucleotide
atttaacacagggaacatgctgggaacaaatgtacactccaggtggagaagtgaggaa

SEQ ID NO: 338119 - DNA, 60 bp, Artificial
  Synthetic oligonucleotide
atttaacaccttataatttcaggaacgggatgctagatggtatacgagaagcgatgcgca

SEQ ID NO: 338120 - DNA, 53 bp, Artificial
  Synthetic oligonucleotide
atttaaccagcagctccaaaccaactctttcaagcatgacttggaaatgcttg

SEQ ID NO: 338121 - DNA, 57 bp, Artificial
  Synthetic oligonucleotide
atttaaccgacatgagcttagctcgttacgcgtttgatttctacgaaatgacttcta

SEQ ID NO: 338122 - DNA, 55 bp, Artificial
  Synthetic oligonucleotide
atttaacctggcaacaatgggatgagaaagtaagaaactattcaggtgtcatttt

SEQ ID NO: 338123 - DNA, 59 bp, Artificial
  Synthetic oligonucleotide
atttaacgtgtatactaacgtgacattagatgcgtctgaaaagtcaaatatagttgata

SEQ ID NO: 338124 - DNA, 58 bp, Artificial
  Synthetic oligonucleotide
atttaactcccagcaccgtgacatcaaggcatacacaccatccagacagaccgcaggt

SEQ ID NO: 338125 - DNA, 55 bp, Artificial
  Synthetic oligonucleotide
atttaactgcgacatctcctagttttgctagagagtctattcctaccatcattcc

SEQ ID NO: 338126 - DNA, 60 bp, Artificial
  Synthetic oligonucleotide
atttaagatcattcgttcatacactcctggttatatgtgtgagttgctgcctattgagtt

SEQ ID NO: 338127 - DNA, 57 bp, Artificial
  Synthetic oligonucleotide
atttaagcaatggtgtactactacctgtcactttggagacccgggggacatcatgag

SEQ ID NO: 338128 - DNA, 59 bp, Artificial
  Synthetic oligonucleotide
atttaagcgaaacaaacgccacgccatttacaagagaccagacacacagagtatagtca

SEQ ID NO: 338129 - DNA, 57 bp, Artificial
  Synthetic oligonucleotide
atttaagctttttgctacgatttgtatgtgaacgatattataaacatggtgtgtccc

SEQ ID NO: 338130 - DNA, 54 bp, Artificial
  Synthetic oligonucleotide
atttaaggagcggaccctgcgtgcggacacaccatgagcaaacaaatccccacc

SEQ ID NO: 338131 - DNA, 55 bp, Artificial
  Synthetic oligonucleotide
atttaaggcacgacaagcaggactaacgcgtgtgggccaccagatggtgccaaca

SEQ ID NO: 338132 - DNA, 53 bp, Artificial
  Synthetic oligonucleotide
atttaaggtaatcctgggggtgttgtcctccaaatccagtactatcgttatta

SEQ ID NO: 338133 - DNA, 57 bp, Artificial
  Synthetic oligonucleotide
atttaataggctccccgtggtgtattgccatgggtgatgactctgtcgaaggttacg

SEQ ID NO: 338134 - DNA, 60 bp, Artificial
  Synthetic oligonucleotide
atttaatcggaaagatataattgtgcggaagtgctttgacaatgcatatgaatcgtgtaa

SEQ ID NO: 338135 - DNA, 50 bp, Artificial
  Synthetic oligonucleotide
atttaatctctattaagagtttcttggaaggtacataaacgtctggtgta

SEQ ID NO: 338136 - DNA, 55 bp, Artificial
  Synthetic oligonucleotide
atttaatgagcttgaaggaggatatcagctttctccaaggtttattggagacctt

SEQ ID NO: 338137 - DNA, 60 bp, Artificial
  Synthetic oligonucleotide
atttaattaagtatgcatggcatgagccacaaaatatcgaattcgctaagttgaataact

SEQ ID NO: 338138 - DNA, 60 bp, Artificial
  Synthetic oligonucleotide
atttacaatggactgcgtggcctcgtaccaaacgatccagtctcgcaacgtgctcttagc

SEQ ID NO: 338139 - DNA, 55 bp, Artificial
  Synthetic oligonucleotide
atttacaatggctcaaagtgggaaagatcaagtggagggaccctaaggatagctt

SEQ ID NO: 338140 - DNA, 59 bp, Artificial
  Synthetic oligonucleotide
atttacacataatgcgagagaacggtttgtacgctgaaaacgaagagccgcgagcagac

SEQ ID NO: 338141 - DNA, 55 bp, Artificial
  Synthetic oligonucleotide
atttacacgatcaaaaccaactaagtgtcgtgctgaataacatctaccagggctc

SEQ ID NO: 338142 - DNA, 60 bp, Artificial
  Synthetic oligonucleotide
atttacagcatagtaagacaaatgagacaagcacacctaaatgctggctcgtgaccaatg

SEQ ID NO: 338143 - DNA, 60 bp, Artificial
  Synthetic oligonucleotide
atttacaggaggagagacggaaaatggataagagagctgattctgtatgacaaagaggag

SEQ ID NO: 338144 - DNA, 60 bp, Artificial
  Synthetic oligonucleotide
atttacaggcctaccagagacggatgggagtgcaaatgcaacgattcaaatgatcctctc

SEQ ID NO: 338145 - DNA, 60 bp, Artificial
  Synthetic oligonucleotide
atttacaggcctatcagaaacgaattggagtgcagatgcaacgattcaagtgatcctctc

SEQ ID NO: 338146 - DNA, 57 bp, Artificial
  Synthetic oligonucleotide
atttacagtcgataaactaagacggttgtgtacagaaccaaagactgtcgactatga

SEQ ID NO: 338147 - DNA, 58 bp, Artificial
  Synthetic oligonucleotide
atttacattgcagggatggcagaacttggtgccttcctttcaatccttcaggacatgc

SEQ ID NO: 338148 - DNA, 57 bp, Artificial
  Synthetic oligonucleotide
atttaccaaaatacgtaatggttgcattacctagcaggactattgtctacacacttg

SEQ ID NO: 338149 - DNA, 57 bp, Artificial
  Synthetic oligonucleotide
atttaccaacaattgaattgattactagagaacacacttttaatggtgacgtcatcc

SEQ ID NO: 338150 - DNA, 59 bp, Artificial
  Synthetic oligonucleotide
atttaccaatgttgtgacctggacccccaagcacgtgtggccatcaagtccctcactga

SEQ ID NO: 338151 - DNA, 55 bp, Artificial
  Synthetic oligonucleotide
atttaccacaagttatggatgctaagtgggctttacaaggtaactgtgtattcct

SEQ ID NO: 338152 - DNA, 55 bp, Artificial
  Synthetic oligonucleotide
atttacccgcaggccgcaacagaactgctgaccgggcagtcttcgctaccgtcga

SEQ ID NO: 338153 - DNA, 57 bp, Artificial
  Synthetic oligonucleotide
atttaccctaggcatagagcttcagataccgtgaccttcataatggctgttaaaaaa

SEQ ID NO: 338154 - DNA, 50 bp, Artificial
  Synthetic oligonucleotide
atttaccctgacttaaatcttgactgcgtgccgccactatatctttgaga

SEQ ID NO: 338155 - DNA, 55 bp, Artificial
  Synthetic oligonucleotide
atttaccgaacaaacacaaaaggcgatgatgtgattccaaactgtgattgcactg

SEQ ID NO: 338156 - DNA, 51 bp, Artificial
  Synthetic oligonucleotide
atttaccgtcgctttaaatacggactgaaaggagggccttctacggaagga

SEQ ID NO: 338157 - DNA, 58 bp, Artificial
  Synthetic oligonucleotide
atttaccttcgaattgtatgaggacgtgcagatgaggttccccattttcatgtaattc

SEQ ID NO: 338158 - DNA, 55 bp, Artificial
  Synthetic oligonucleotide
atttacgatcgcggaacatttcaacgcttttcatcgtatacggaagttaagcgcg

SEQ ID NO: 338159 - DNA, 55 bp, Artificial
  Synthetic oligonucleotide
atttacggcaaattccgagaagctaactctgaggagtatgacgaaagtctgcgac

SEQ ID NO: 338160 - DNA, 57 bp, Artificial
  Synthetic oligonucleotide
atttacggcacagaaggactggaggcgttagatctaggcactagtgcaggttacccc

SEQ ID NO: 338161 - DNA, 60 bp, Artificial
  Synthetic oligonucleotide
atttacggcttggtgtcaatttgcaatagtagccaggtataaatatggaatcatgacgct

SEQ ID NO: 338162 - DNA, 53 bp, Artificial
  Synthetic oligonucleotide
atttacgtcgggacagccggaaaagacctgagcttaccgaccgggactgtgga

SEQ ID NO: 338163 - DNA, 53 bp, Artificial
  Synthetic oligonucleotide
atttactaccgggatggaaactaacgtacgttggatacaacggaagtgacaca

SEQ ID NO: 338164 - DNA, 55 bp, Artificial
  Synthetic oligonucleotide
atttactagaaaacagccacaatggaaaactctgcagcctgaatggaaaagcccc

SEQ ID NO: 338165 - DNA, 50 bp, Artificial
  Synthetic oligonucleotide
atttactagcgttccaactatggcgtctgtccgttggcgcctaactgata

SEQ ID NO: 338166 - DNA, 60 bp, Artificial
  Synthetic oligonucleotide
atttactatgcctcaggcggcaattctgtgataaagctgaaccgatggatggggcgtttg

SEQ ID NO: 338167 - DNA, 56 bp, Artificial
  Synthetic oligonucleotide
atttactcaacaaggagcaaggaaccgtcgtggagtacctaggacaattgtcatac

SEQ ID NO: 338168 - DNA, 60 bp, Artificial
  Synthetic oligonucleotide
atttactcctgtgcctactcatactcacagtaggggtaggcatcttcctgctgcctgctc

SEQ ID NO: 338169 - DNA, 53 bp, Artificial
  Synthetic oligonucleotide
atttactcgaaatggctcttctatctagaactgccgcagaggaagtaatcgca

SEQ ID NO: 338170 - DNA, 55 bp, Artificial
  Synthetic oligonucleotide
atttactcgaagacaaccataatggaaaactctgcaacctgaacggaatagctcc

SEQ ID NO: 338171 - DNA, 56 bp, Artificial
  Synthetic oligonucleotide
atttactctatacgtagatgaaagggccggcgtggcccggggagtgcttactcaga

SEQ ID NO: 338172 - DNA, 59 bp, Artificial
  Synthetic oligonucleotide
atttactcttaacagtgacgatccagaggatagatggaactttgcggtattctgtcttc

SEQ ID NO: 338173 - DNA, 55 bp, Artificial
  Synthetic oligonucleotide
atttactgagcatattaccactactcggtggggaaatgccaccgggtgtgaaccg

SEQ ID NO: 338174 - DNA, 56 bp, Artificial
  Synthetic oligonucleotide
atttactgctattactactgtatacaaatgggttggcaataataatgcagacgaag

SEQ ID NO: 338175 - DNA, 54 bp, Artificial
  Synthetic oligonucleotide
atttacttatacgggtaatactggcattattatcagggttaagggcgtatcagg

SEQ ID NO: 338176 - DNA, 52 bp, Artificial
  Synthetic oligonucleotide
atttacttctaccacttagaattcaaggagaaaagagtaatgagataaatac

SEQ ID NO: 338177 - DNA, 55 bp, Artificial
  Synthetic oligonucleotide
atttactttcgggaatagtgcaacaacagaataatctgctaagagccatagaagc

SEQ ID NO: 338178 - DNA, 50 bp, Artificial
  Synthetic oligonucleotide
atttagaacagacgggcagcatgatgttcgaggtaaacgtagagggtaag

SEQ ID NO: 338179 - DNA, 55 bp, Artificial
  Synthetic oligonucleotide
atttagaagacatatctttaattcaaatcccccctctcggccatccgtctaatat

SEQ ID NO: 338180 - DNA, 57 bp, Artificial
  Synthetic oligonucleotide
atttagaagagttaatgagaactggggactatggtcaaattactactatgctattaa

SEQ ID NO: 338181 - DNA, 59 bp, Artificial
  Synthetic oligonucleotide
atttagaccaatgacagtaaccatcagccaaagtggtggcgccaaattaggaattggca

SEQ ID NO: 338182 - DNA, 55 bp, Artificial
  Synthetic oligonucleotide
atttagacgctctgtaaaacttctattaaaatggttcgtgcagcaagacgaaaac

SEQ ID NO: 338183 - DNA, 54 bp, Artificial
  Synthetic oligonucleotide
atttagacgtgggttatcctatggtccacggcgttttaatgcacgtaattatgg

SEQ ID NO: 338184 - DNA, 60 bp, Artificial
  Synthetic oligonucleotide
atttagcaatgagttctgttcaaatgagttcattgtatagttatgagagccggattgtgc

SEQ ID NO: 338185 - DNA, 56 bp, Artificial
  Synthetic oligonucleotide
atttagcattgttaggggaagccagagcctatttcccagtaattctttggatgtaa

SEQ ID NO: 338186 - DNA, 57 bp, Artificial
  Synthetic oligonucleotide
atttagccaagaatgcccttttagtatattattgttgggtatcgaacatgccttcta

SEQ ID NO: 338187 - DNA, 56 bp, Artificial
  Synthetic oligonucleotide
atttagctccctgaatgttcggatggaaatgtgctgaccgacttggggaaaccaag

SEQ ID NO: 338188 - DNA, 57 bp, Artificial
  Synthetic oligonucleotide
atttaggcctaaacatcggactccattataaggtgggtgatacaccggatgtgaaca

SEQ ID NO: 338189 - DNA, 55 bp, Artificial
  Synthetic oligonucleotide
atttaggctcacacgtgggcaattcgccgtgtgctacatgccacatcgagtcggc

SEQ ID NO: 338190 - DNA, 60 bp, Artificial
  Synthetic oligonucleotide
atttagggaagagaatccagatgtcatcatttaccagtacatggatgatctctttgtagg

SEQ ID NO: 338191 - DNA, 54 bp, Artificial
  Synthetic oligonucleotide
atttagggccggctgggaagagtactcgcgaggtcgtaaagtatttgatgtacc

SEQ ID NO: 338192 - DNA, 60 bp, Artificial
  Synthetic oligonucleotide
atttaggtaagaccgttatagtactacctgcacgccatgcatatgatgcctataagactt

SEQ ID NO: 338193 - DNA, 58 bp, Artificial
  Synthetic oligonucleotide
atttaggtttgaacatcggactccattataaggtaggctatacaccagatgtgaatac

SEQ ID NO: 338194 - DNA, 59 bp, Artificial
  Synthetic oligonucleotide
atttagtaatcagaacagtggtgttacaatagaaatcgatgaagagtctttatccagaa

SEQ ID NO: 338195 - DNA, 51 bp, Artificial
  Synthetic oligonucleotide
atttagtaatttaaggcttagttatttaactttacttatcaagatggccgt

SEQ ID NO: 338196 - DNA, 55 bp, Artificial
  Synthetic oligonucleotide
atttagtaccaattctcctgcgttccctaacggggcacggtgataggccattgac

SEQ ID NO: 338197 - DNA, 60 bp, Artificial
  Synthetic oligonucleotide
atttagtcataaatctgctccccatcttcacgcttacctacgcgaccagcaagatagcct

SEQ ID NO: 338198 - DNA, 60 bp, Artificial
  Synthetic oligonucleotide
atttagtcctgggatctcgacagcataagactgatgctgatgaggctgatttggacgaaa

SEQ ID NO: 338199 - DNA, 52 bp, Artificial
  Synthetic oligonucleotide
atttagtcgacacaagtataatcttttgttttcaaacacttcaggggaaccc

SEQ ID NO: 338200 - DNA, 55 bp, Artificial
  Synthetic oligonucleotide
atttagtgtaatgaggaaatcatcgattgccacggcgtgggtagggcggacgcca

SEQ ID NO: 338201 - DNA, 60 bp, Artificial
  Synthetic oligonucleotide
atttagttaagttagctaattgatttatatgattatcacaattgaatgtaatcataagca

SEQ ID NO: 338202 - DNA, 60 bp, Artificial
  Synthetic oligonucleotide
atttagttaatcaggagtatgtcgcatcttacatgtacccgacattcttacggcttgtca

SEQ ID NO: 338203 - DNA, 57 bp, Artificial
  Synthetic oligonucleotide
atttagttattctggaatcttggattacggccgtgtgaccgaatccggctgaagcaa

SEQ ID NO: 338204 - DNA, 59 bp, Artificial
  Synthetic oligonucleotide
atttagttattctggagtcttggattactgctgtgtggccgaatccctctgaagaaatg

SEQ ID NO: 338205 - DNA, 55 bp, Artificial
  Synthetic oligonucleotide
atttagttgaacgtcttttagatgctgaaatgacggctgatattatacctcccca

SEQ ID NO: 338206 - DNA, 51 bp, Artificial
  Synthetic oligonucleotide
atttagttttatgttctgtggtacagctaatactagccttaaattactcat

SEQ ID NO: 338207 - DNA, 56 bp, Artificial
  Synthetic oligonucleotide
atttataacactccaatcaacgtgtctaggcggagacgcggtaagggtggagctgt

SEQ ID NO: 338208 - DNA, 51 bp, Artificial
  Synthetic oligonucleotide
atttataagttcgtaaaggattggttgccatggtagactttgtttccgctc

SEQ ID NO: 338209 - DNA, 55 bp, Artificial
  Synthetic oligonucleotide
atttatacctcccatggcagacttaccagataaaggaaaaccttttgactctaga

SEQ ID NO: 338210 - DNA, 59 bp, Artificial
  Synthetic oligonucleotide
atttatagaaatgatttcgtccaatcattgattgacattggggtttcattataactgaa

SEQ ID NO: 338211 - DNA, 57 bp, Artificial
  Synthetic oligonucleotide
atttataggacgttaagaagccctgatgttcctagaggctgtgaagggccttgcaaa

SEQ ID NO: 338212 - DNA, 50 bp, Artificial
  Synthetic oligonucleotide
atttatagtatttacggtggagtaattttcagtgttttagcagtcatgtc

SEQ ID NO: 338213 - DNA, 56 bp, Artificial
  Synthetic oligonucleotide
atttatatttctggagatacgggtgtgggcaaaagtacactatcttatcctttatc

SEQ ID NO: 338214 - DNA, 55 bp, Artificial
  Synthetic oligonucleotide
atttatcaaacgtgacttttgggtccaccattcatttctcatcctacgattactt

SEQ ID NO: 338215 - DNA, 50 bp, Artificial
  Synthetic oligonucleotide
atttatcaaatgggccttatctgctttgaacgaaagatgggtcaaaaaaa

SEQ ID NO: 338216 - DNA, 57 bp, Artificial
  Synthetic oligonucleotide
atttatcaacacgtctcgaccggtgttcaaccccgcaataagatcactttcgatctc

SEQ ID NO: 338217 - DNA, 56 bp, Artificial
  Synthetic oligonucleotide
atttatcccgaaaactgggcacctgataatttccacaaacgtgaattctgtctcac

SEQ ID NO: 338218 - DNA, 52 bp, Artificial
  Synthetic oligonucleotide
atttatccggtaacggttatatgtttttccccggtggacttatcctgcagtg

SEQ ID NO: 338219 - DNA, 57 bp, Artificial
  Synthetic oligonucleotide
atttatcttcagtattctcctgcaatcaggtacgaacttttatgggacctttcagag

SEQ ID NO: 338220 - DNA, 60 bp, Artificial
  Synthetic oligonucleotide
atttatgacagtgtggcgcccatactgaggtgtccaactgggactgtattcgtattgaga

SEQ ID NO: 338221 - DNA, 52 bp, Artificial
  Synthetic oligonucleotide
atttatgagtggtgtaacgacagtctatctgttgtgttaacaataaatctct

SEQ ID NO: 338222 - DNA, 60 bp, Artificial
  Synthetic oligonucleotide
atttatgatagaacactaatcttaccaacacatgcagatcctggtagtgaggtacaaatt

SEQ ID NO: 338223 - DNA, 50 bp, Artificial
  Synthetic oligonucleotide
atttatgcgaaacctctctatatctctaacgtggactatggttacggtgg

SEQ ID NO: 338224 - DNA, 59 bp, Artificial
  Synthetic oligonucleotide
atttatgcggccccgtgggattctgatgacgtattcttctttcattgcgtttcacacca

SEQ ID NO: 338225 - DNA, 55 bp, Artificial
  Synthetic oligonucleotide
atttatgcgggtacgggtgctattaacacatctgacgagagacataaaacggaca

SEQ ID NO: 338226 - DNA, 54 bp, Artificial
  Synthetic oligonucleotide
atttatgctagaaattctgagcaggagtattgggatggttatactggtcaactc

SEQ ID NO: 338227 - DNA, 50 bp, Artificial
  Synthetic oligonucleotide
atttatggcaaacagggcaacgtgtcatatcctcaactgattaaggaaca

SEQ ID NO: 338228 - DNA, 52 bp, Artificial
  Synthetic oligonucleotide
atttatggcgcttaaaaaggcgccccatgtgcgtatccgcctttaatttgaa

SEQ ID NO: 338229 - DNA, 56 bp, Artificial
  Synthetic oligonucleotide
atttatggtattgcaccaccgccacaattcaaaaaacgttacaacacgagtgataa

SEQ ID NO: 338230 - DNA, 59 bp, Artificial
  Synthetic oligonucleotide
atttatgtaaggaccaagaggatgtatgattcgatacgaaccaacatcgatagattaaa

SEQ ID NO: 338231 - DNA, 58 bp, Artificial
  Synthetic oligonucleotide
atttatgtatcaatgtggacgggaattgttattcgcggatccaagagggtctgtacta

SEQ ID NO: 338232 - DNA, 55 bp, Artificial
  Synthetic oligonucleotide
atttatgtcattcacttctccaggtaacatagagtaaatgctgagcgattgaacc

SEQ ID NO: 338233 - DNA, 55 bp, Artificial
  Synthetic oligonucleotide
atttattatattccgggaaaatgcccgatgctggtggttcgcacaatcttgttgg

SEQ ID NO: 338234 - DNA, 60 bp, Artificial
  Synthetic oligonucleotide
atttattcataataaatggaactgacaaatatgataaactagaccaatatgcaaatcata

SEQ ID NO: 338235 - DNA, 57 bp, Artificial
  Synthetic oligonucleotide
atttattccgccgccaacagagacgaagagaaaggatcatagggccacaattacctc

SEQ ID NO: 338236 - DNA, 55 bp, Artificial
  Synthetic oligonucleotide
atttattgtaggctgtaaacccagtttaggtgctcattgggacctagctaagcct

SEQ ID NO: 338237 - DNA, 52 bp, Artificial
  Synthetic oligonucleotide
atttattgtcacacgccccctgtagatgcactgcccgacaatgcttccgttg

SEQ ID NO: 338238 - DNA, 57 bp, Artificial
  Synthetic oligonucleotide
atttcaaaggtctgcatagaaaggaacagccactaggtccattatgggacccctcat

SEQ ID NO: 338239 - DNA, 56 bp, Artificial
  Synthetic oligonucleotide
atttcaaggtccccccatgctcccccgcccaactggcacctatgcaggcctcccca

SEQ ID NO: 338240 - DNA, 60 bp, Artificial
  Synthetic oligonucleotide
atttcaatcattcaacttaagcaatcctcatctgacagccaacaacctagaatggacgga

SEQ ID NO: 338241 - DNA, 57 bp, Artificial
  Synthetic oligonucleotide
atttcaatcctgaggtatccggtcttcgcacgcttcccattttattctctcccgcag

SEQ ID NO: 338242 - DNA, 60 bp, Artificial
  Synthetic oligonucleotide
atttcaatgaaattgctctccctgaaacatctcttagtgatgactatgtcttggttggag

SEQ ID NO: 338243 - DNA, 55 bp, Artificial
  Synthetic oligonucleotide
atttcaatgcccggatggaaggtacgccgtcggctgaacttcgacagcccgtccg

SEQ ID NO: 338244 - DNA, 52 bp, Artificial
  Synthetic oligonucleotide
atttcaatgttggcaatacatggatgtaaatatgcgaaatgcattagatggt

SEQ ID NO: 338245 - DNA, 58 bp, Artificial
  Synthetic oligonucleotide
atttcacaaagtaccataccagacataatatctgaatcgtctgaaaagtttataccaa

SEQ ID NO: 338246 - DNA, 56 bp, Artificial
  Synthetic oligonucleotide
atttcacaaatgcgacaacaactgcattgagagtatccggaatggaacctataacc

SEQ ID NO: 338247 - DNA, 55 bp, Artificial
  Synthetic oligonucleotide
atttcacaagaacgcaattggatcagtcactgatgtgtgtggggaacacaaggga

SEQ ID NO: 338248 - DNA, 55 bp, Artificial
  Synthetic oligonucleotide
atttcacacaacgtttacttgaactaatgataacacgaacatcaggcaacaaccg

SEQ ID NO: 338249 - DNA, 57 bp, Artificial
  Synthetic oligonucleotide
atttcacattcgctacgtagagtaactgtatagataatatagtgagaggatgtgacc

SEQ ID NO: 338250 - DNA, 55 bp, Artificial
  Synthetic oligonucleotide
atttcaccctcagaaattgaccgactcaaaagattgggattcataggggaagaac

SEQ ID NO: 338251 - DNA, 60 bp, Artificial
  Synthetic oligonucleotide
atttcacctgactatacgcaacacatggccaccataggtgtgctggcgacgcctgagata

SEQ ID NO: 338252 - DNA, 53 bp, Artificial
  Synthetic oligonucleotide
atttcacgatagcttgctgtttttgtataagttgtagtatccatagagttagc

SEQ ID NO: 338253 - DNA, 55 bp, Artificial
  Synthetic oligonucleotide
atttcactcgaggaataacgaggcaccgtataatgagtgggttcgttcactgggc

SEQ ID NO: 338254 - DNA, 56 bp, Artificial
  Synthetic oligonucleotide
atttcactctaaaataagaaggctaaggcgctatagaagttcagtgtatggggaaa

SEQ ID NO: 338255 - DNA, 60 bp, Artificial
  Synthetic oligonucleotide
atttcagaatgtgaataagatcacctacggggcatgccccaagtatgtcaaacagagcac

SEQ ID NO: 338256 - DNA, 60 bp, Artificial
  Synthetic oligonucleotide
atttcagattgccagtgttggtgcttacactagtgaattcagttggggaatcttctgagt

SEQ ID NO: 338257 - DNA, 52 bp, Artificial
  Synthetic oligonucleotide
atttcagcaaaagtcgaacaatcagagttattaagtacaaatcaaaatgtcg

SEQ ID NO: 338258 - DNA, 60 bp, Artificial
  Synthetic oligonucleotide
atttcagccctgtgtgtgaacaagccagcatagaacatgaactaagtccaaggctagacg

SEQ ID NO: 338259 - DNA, 60 bp, Artificial
  Synthetic oligonucleotide
atttcagcctttcacagtaccaggtgagaccagatttggggcacggttgtcagacatcta

SEQ ID NO: 338260 - DNA, 51 bp, Artificial
  Synthetic oligonucleotide
atttcaggccaaaaaacgtatcttagagccatttggcctagtagaagatcc

SEQ ID NO: 338261 - DNA, 52 bp, Artificial
  Synthetic oligonucleotide
atttcaggcgtagtctttgcgatgtcgctacaaattttggtaactgtgcgta

SEQ ID NO: 338262 - DNA, 58 bp, Artificial
  Synthetic oligonucleotide
atttcatacccgttgagtccatggaaaccactatgcggtctccggtctacacagacaa

SEQ ID NO: 338263 - DNA, 55 bp, Artificial
  Synthetic oligonucleotide
atttcatagatgacacacatgtggaattgcaggtaggggatgaggcgcatggggc

SEQ ID NO: 338264 - DNA, 60 bp, Artificial
  Synthetic oligonucleotide
atttcatattggcatagacagtgggctatacctatggtactctttgacgaaaccatcaaa

SEQ ID NO: 338265 - DNA, 50 bp, Artificial
  Synthetic oligonucleotide
atttcatcacggttaacagccgaggtacggtaatgtttgttgtcccaaaa

SEQ ID NO: 338266 - DNA, 56 bp, Artificial
  Synthetic oligonucleotide
atttcatcccccatatgacagatcgtacgaccggagaggggttcaggggagcgcgt

SEQ ID NO: 338267 - DNA, 53 bp, Artificial
  Synthetic oligonucleotide
atttcatcccttgagatggcaggttttgatgttaagaacaaacattgtctcga

SEQ ID NO: 338268 - DNA, 60 bp, Artificial
  Synthetic oligonucleotide
atttcatgattgggcagatactagggcttttgtactagatgatctgtctccagatgagat

SEQ ID NO: 338269 - DNA, 50 bp, Artificial
  Synthetic oligonucleotide
atttcatggtagtgaagcggaaacactaatggtgacagacccaaaacgac

SEQ ID NO: 338270 - DNA, 51 bp, Artificial
  Synthetic oligonucleotide
atttcatggtcaactaacaaggttattgatggtattcgagcgcgctttgaa

SEQ ID NO: 338271 - DNA, 58 bp, Artificial
  Synthetic oligonucleotide
atttcattagaggaaccaaagtagtcccaagaggacaattggcaaccagaggagtgca

SEQ ID NO: 338272 - DNA, 55 bp, Artificial
  Synthetic oligonucleotide
atttcattatgtcgtttcatcgggttacgcgtagagtcctctttaatgcgggtac

SEQ ID NO: 338273 - DNA, 52 bp, Artificial
  Synthetic oligonucleotide
atttccaacacttttttattctccaactttaggactggaacaactggaaagc

SEQ ID NO: 338274 - DNA, 52 bp, Artificial
  Synthetic oligonucleotide
atttccaacttcgacgccattagcgagtcggtggacggctacgattgatgac

SEQ ID NO: 338275 - DNA, 51 bp, Artificial
  Synthetic oligonucleotide
atttccaactttgaattcctacaagttgaggtctttggaccggttgtttag

SEQ ID NO: 338276 - DNA, 55 bp, Artificial
  Synthetic oligonucleotide
atttccaagaagctattcgtgactatgaggccgcatcgtctattgcgctacaata

SEQ ID NO: 338277 - DNA, 52 bp, Artificial
  Synthetic oligonucleotide
atttccaagctagacaaactgtcgtatatacgagtcagacaaacgcgacacg

SEQ ID NO: 338278 - DNA, 55 bp, Artificial
  Synthetic oligonucleotide
atttccacaaggggttagtagttaaagaagaggcattaaagggatcagccagaca

SEQ ID NO: 338279 - DNA, 57 bp, Artificial
  Synthetic oligonucleotide
atttccacgactcaaatgtaaagaacctgtatgagaaagtaagaagccagctaagaa

SEQ ID NO: 338280 - DNA, 60 bp, Artificial
  Synthetic oligonucleotide
atttccactgacctttggatggtgcttcaagctagtaccagttgatccagatgaggtaga

SEQ ID NO: 338281 - DNA, 58 bp, Artificial
  Synthetic oligonucleotide
atttccacttctttgctgttggtggagaccccttggaaatgcagggagtgctaatgaa

SEQ ID NO: 338282 - DNA, 55 bp, Artificial
  Synthetic oligonucleotide
atttccagggtccgggccctctgccccgtcgtgtcactacctttgtggcattgcg

SEQ ID NO: 338283 - DNA, 60 bp, Artificial
  Synthetic oligonucleotide
atttccataaggatttattggaacagattgtcgaagagagatatggagcatcagctagat

SEQ ID NO: 338284 - DNA, 60 bp, Artificial
  Synthetic oligonucleotide
atttccatcctgatgtgcctctcgggcacatatgatgtacagaggagtccaatgactaca

SEQ ID NO: 338285 - DNA, 60 bp, Artificial
  Synthetic oligonucleotide
atttccatctaggagatgatatggacccagaactgagaggcttggcccaagcactgattg

SEQ ID NO: 338286 - DNA, 58 bp, Artificial
  Synthetic oligonucleotide
atttccattggttgatactggatcccaatgacacagtcacctttagtttcaatggggc

SEQ ID NO: 338287 - DNA, 51 bp, Artificial
  Synthetic oligonucleotide
atttcccaccgggcgcctaacgtggattgcaccccggtccgcgctacccgg

SEQ ID NO: 338288 - DNA, 57 bp, Artificial
  Synthetic oligonucleotide
atttcccatactaaggctgataagtttgctttaaagagattaccaggtatgagcaac

SEQ ID NO: 338289 - DNA, 55 bp, Artificial
  Synthetic oligonucleotide
atttcccccaacgttgcggttaagtgttgcgttgcgcgcttagaagatggaattc

SEQ ID NO: 338290 - DNA, 56 bp, Artificial
  Synthetic oligonucleotide
atttcccccataaccctgagtgcaccgtgttccgggcccctgatggggatgtcatc

SEQ ID NO: 338291 - DNA, 51 bp, Artificial
  Synthetic oligonucleotide
atttcccgaattacgataccaccccttagctttgcctaaggcccgtggtaa

SEQ ID NO: 338292 - DNA, 55 bp, Artificial
  Synthetic oligonucleotide
atttcccgcaaccgaagaagccacagcgtgaggcagacttggaggctaaggtggc

SEQ ID NO: 338293 - DNA, 55 bp, Artificial
  Synthetic oligonucleotide
atttcccggagatccacccgcctcatagggtctcattcacccatcttccacaacc

SEQ ID NO: 338294 - DNA, 55 bp, Artificial
  Synthetic oligonucleotide
atttcccgtacacggtgttgtaattttcgagtcatcacaactgaccttgtcgtcc

SEQ ID NO: 338295 - DNA, 53 bp, Artificial
  Synthetic oligonucleotide
atttccctggcctcctaaaaagcctccacgcccttactacttctgagtaagct

SEQ ID NO: 338296 - DNA, 54 bp, Artificial
  Synthetic oligonucleotide
atttccgaaggagaattagcatacttcgaggattaccttcggggaaagcaacca

SEQ ID NO: 338297 - DNA, 56 bp, Artificial
  Synthetic oligonucleotide
atttccgaataggacgtgggcagtatgattgtaacgctttccgcaccaatttccaa

SEQ ID NO: 338298 - DNA, 57 bp, Artificial
  Synthetic oligonucleotide
atttccgaccgagatggtaatctcaaacaacgacctgtctacgcaatggacgacctc

SEQ ID NO: 338299 - DNA, 58 bp, Artificial
  Synthetic oligonucleotide
atttccgactttgaattcctacaagtcgagaccattggtcgatcaaattgctcgtcat

SEQ ID NO: 338300 - DNA, 57 bp, Artificial
  Synthetic oligonucleotide
atttccgatacgcttaaccgcgtgtgggctggtctatgaccgcttccatctttctag

SEQ ID NO: 338301 - DNA, 50 bp, Artificial
  Synthetic oligonucleotide
atttccgatcgaaatgactgatgccaggagtgctgtgactgacgtgaaac

SEQ ID NO: 338302 - DNA, 56 bp, Artificial
  Synthetic oligonucleotide
atttccgctcgtccgttttcgagcgattcgaggcgaccaagccacgcgattccacc

SEQ ID NO: 338303 - DNA, 55 bp, Artificial
  Synthetic oligonucleotide
atttccggacgtgtttcggtatgttgtaggcgcgctgtagaggccttgaagcgtt

SEQ ID NO: 338304 - DNA, 48 bp, Artificial
  Synthetic oligonucleotide
atttccgggttcccacgctacgtcacctttaaacgacttttaaattcc

SEQ ID NO: 338305 - DNA, 58 bp, Artificial
  Synthetic oligonucleotide
atttccggtcgcttatacgaggtagagttctgctctcacgttataaggaagatcgatg

SEQ ID NO: 338306 - DNA, 56 bp, Artificial
  Synthetic oligonucleotide
atttccgtacgacctggtcgtacgtttagtgtcgtcacacagggcattgttaagca

SEQ ID NO: 338307 - DNA, 56 bp, Artificial
  Synthetic oligonucleotide
atttccgtcttccacacttctcgtctgcgttcaagaaggtaattggtcgtcatacc

SEQ ID NO: 338308 - DNA, 53 bp, Artificial
  Synthetic oligonucleotide
atttcctaacaaaagtaacggtcacatgtttaccttatctctagggccgtaga

SEQ ID NO: 338309 - DNA, 54 bp, Artificial
  Synthetic oligonucleotide
atttcctagatgagggtctacttcctaaatcatggggttttactaactcatttg

SEQ ID NO: 338310 - DNA, 55 bp, Artificial
  Synthetic oligonucleotide
atttcctaggagctcttggtccaaccatgatgcctcatcaggagtgagctctgca

SEQ ID NO: 338311 - DNA, 54 bp, Artificial
  Synthetic oligonucleotide
atttcctatagcagtagaggatccttttactctacctccaccacgtttcccaac

SEQ ID NO: 338312 - DNA, 50 bp, Artificial
  Synthetic oligonucleotide
atttcctcattggaggctcaggagacgactacccgcccctgctagcgcgt

SEQ ID NO: 338313 - DNA, 56 bp, Artificial
  Synthetic oligonucleotide
atttcctccgacctctggcatgtacgccataacttctaaagagacgttaagtgtaa

SEQ ID NO: 338314 - DNA, 60 bp, Artificial
  Synthetic oligonucleotide
atttcctgaagtggttagtgagggcgtggtgcgcatagttcgcacgcgtgccatgaccta

SEQ ID NO: 338315 - DNA, 60 bp, Artificial
  Synthetic oligonucleotide
atttcctgagaaataaccctgaggagcgaatcactgtcatcctaccaacaaatgaactga

SEQ ID NO: 338316 - DNA, 59 bp, Artificial
  Synthetic oligonucleotide
atttcctttagctgcggttctttagcagccgcactcctttgtcctataagatgctcctc

SEQ ID NO: 338317 - DNA, 56 bp, Artificial
  Synthetic oligonucleotide
atttcgaaacctctcaagatgacaacactgggagataaaccctcctccgactttga

SEQ ID NO: 338318 - DNA, 55 bp, Artificial
  Synthetic oligonucleotide
atttcgaaatttgcacagatcaattggacttggctaactacgttcgacaaccgaa

SEQ ID NO: 338319 - DNA, 52 bp, Artificial
  Synthetic oligonucleotide
atttcgaacagaatgtcgtatacgctcttcaatacgtaccacgaacacttga

SEQ ID NO: 338320 - DNA, 56 bp, Artificial
  Synthetic oligonucleotide
atttcgaaccaggaaccactaaagatatgagagaacattgatagaatactaacccg

SEQ ID NO: 338321 - DNA, 60 bp, Artificial
  Synthetic oligonucleotide
atttcgacaactcatctgagtatatagaaaactggaatttgcagaatagaagacagagga

SEQ ID NO: 338322 - DNA, 56 bp, Artificial
  Synthetic oligonucleotide
atttcgacaccgcatcgactctatctatctcatgggatcgctccgcgccccgcgta

SEQ ID NO: 338323 - DNA, 55 bp, Artificial
  Synthetic oligonucleotide
atttcgaccagggctggggtcccatcagctatgccaacgggagtggccccgaaca

SEQ ID NO: 338324 - DNA, 52 bp, Artificial
  Synthetic oligonucleotide
atttcgaccttcataacataccctactcttgggaaggctctccctaaccggt

SEQ ID NO: 338325 - DNA, 57 bp, Artificial
  Synthetic oligonucleotide
atttcgacttatgtcttccattaaaattgacgttacgtcagatttaggtgaatgtca

SEQ ID NO: 338326 - DNA, 55 bp, Artificial
  Synthetic oligonucleotide
atttcgagaaaattaagattctgcccagagatcaatggactcagcacacgacgac

SEQ ID NO: 338327 - DNA, 55 bp, Artificial
  Synthetic oligonucleotide
atttcgagtacgtttagcagcgcgatacatgcgaggcgtatgataaggtcacgcg

SEQ ID NO: 338328 - DNA, 60 bp, Artificial
  Synthetic oligonucleotide
atttcgagtggttcaattacagtcttggcgccatcgctaaagagcatcttagcagggccg

SEQ ID NO: 338329 - DNA, 58 bp, Artificial
  Synthetic oligonucleotide
atttcgatacttttgcgaggacgcatcgtatcgtcatcgaatttaagaccgaagtgcc

SEQ ID NO: 338330 - DNA, 58 bp, Artificial
  Synthetic oligonucleotide
atttcgatcgattccttcctctagtcgaagtcgacgcatccggtagattactagctac

SEQ ID NO: 338331 - DNA, 56 bp, Artificial
  Synthetic oligonucleotide
atttcgcaacacaactacaggcccggataccacacccaaacggcaggaccctggca

SEQ ID NO: 338332 - DNA, 60 bp, Artificial
  Synthetic oligonucleotide
atttcgccgactatgaggaattgagggagcaattgagctcagtatcatcattcgagagat

SEQ ID NO: 338333 - DNA, 55 bp, Artificial
  Synthetic oligonucleotide
atttcgcctacctcgtggcctatcaagccaccgtgtgtgcgcgagcaaaggcgcc

SEQ ID NO: 338334 - DNA, 60 bp, Artificial
  Synthetic oligonucleotide
atttcgctattgcgtgatcattgacgatttgagcaccgtcaaagctactctcaacaccct

SEQ ID NO: 338335 - DNA, 55 bp, Artificial
  Synthetic oligonucleotide
atttcgctctaaccactccttgggggaacgctgctgaagtcgtaaacctattgct

SEQ ID NO: 338336 - DNA, 58 bp, Artificial
  Synthetic oligonucleotide
atttcgctgtgtatagaagccctaaatcagttaggccctgtacaacatcattgagaga

SEQ ID NO: 338337 - DNA, 52 bp, Artificial
  Synthetic oligonucleotide
atttcggaagaaaaggctaaccatcatggacttacatccaggagcgggaaaa

SEQ ID NO: 338338 - DNA, 60 bp, Artificial
  Synthetic oligonucleotide
atttcgggtgacatagcctatgcctccatgcgtactgagctggggaagattaaggccttg

SEQ ID NO: 338339 - DNA, 53 bp, Artificial
  Synthetic oligonucleotide
atttcgggttccacccaaacgctgagtggattctgaagacccttgtgaacacg

SEQ ID NO: 338340 - DNA, 56 bp, Artificial
  Synthetic oligonucleotide
atttcggtaaggtacggtcgttttgtcagcattcgtgaagtcgaagcagccacttg

SEQ ID NO: 338341 - DNA, 59 bp, Artificial
  Synthetic oligonucleotide
atttcggtcaggtgttcaacatgttcgacaacgagcccagcactgctacggtgaagaac

SEQ ID NO: 338342 - DNA, 60 bp, Artificial
  Synthetic oligonucleotide
atttcggtctctcgtgagcggccgctgtctctggtctcaagtgacagagcttagcccctc

SEQ ID NO: 338343 - DNA, 55 bp, Artificial
  Synthetic oligonucleotide
atttcggttacgactcggtggtttttcatgtgtgggaggctgtcgcggccgcgcc

SEQ ID NO: 338344 - DNA, 55 bp, Artificial
  Synthetic oligonucleotide
atttcggttttcgagtagctcagtaagacagcaatggcgctgctccttggatagg

SEQ ID NO: 338345 - DNA, 55 bp, Artificial
  Synthetic oligonucleotide
atttcgtaccgttcatgaccgatgagaacggggtgaatgtgccgacgaacaaacc

SEQ ID NO: 338346 - DNA, 55 bp, Artificial
  Synthetic oligonucleotide
atttcgtatggtggaaccatccatggccggttagtcaaaatcggttctggactag

SEQ ID NO: 338347 - DNA, 57 bp, Artificial
  Synthetic oligonucleotide
atttcgtcaacagagcgaaccaacggttgaatccaatgcaccaactactaaggcatt

SEQ ID NO: 338348 - DNA, 55 bp, Artificial
  Synthetic oligonucleotide
atttcgtcggctgggggtcagttgttctactcccgccccgtcgtctcagccaatg

SEQ ID NO: 338349 - DNA, 60 bp, Artificial
  Synthetic oligonucleotide
atttcgtgaagtcaccagctcaatgggtgaggaatagcgccagtaattcagcgctactag

SEQ ID NO: 338350 - DNA, 59 bp, Artificial
  Synthetic oligonucleotide
atttcgtgatggatggattcgagctactatacggcccaaaatagtcgaggagttgagac

SEQ ID NO: 338351 - DNA, 54 bp, Artificial
  Synthetic oligonucleotide
atttcgttaggaaagaacgaacgaaattcgcaagaatccaagtagcacacttaa

SEQ ID NO: 338352 - DNA, 55 bp, Artificial
  Synthetic oligonucleotide
atttcgttatgtacattatctactggattatgtgtactataaaactgccaaaact

SEQ ID NO: 338353 - DNA, 55 bp, Artificial
  Synthetic oligonucleotide
atttcgttcgtaccgtcgtcgtggacctgttcgtccattagctcgtcggaatctg

SEQ ID NO: 338354 - DNA, 50 bp, Artificial
  Synthetic oligonucleotide
atttcgttgagcggtcttttcaggttacggcctttgggaattattcggtt

SEQ ID NO: 338355 - DNA, 53 bp, Artificial
  Synthetic oligonucleotide
atttctaataggcgtcagaaatttcggtttcccactacctacttaactgtgga

SEQ ID NO: 338356 - DNA, 60 bp, Artificial
  Synthetic oligonucleotide
atttctagcatggtggaggccatggtttctagggcccgaattgatgcgcgaattgacttc

SEQ ID NO: 338357 - DNA, 60 bp, Artificial
  Synthetic oligonucleotide
atttctagccatgcagagcttacttgctagtgcgcttgaacaggattacacaacacatga

SEQ ID NO: 338358 - DNA, 56 bp, Artificial
  Synthetic oligonucleotide
atttctaggatataagtttgatgaagggacggtacgtccgactggtgtaaacatca

SEQ ID NO: 338359 - DNA, 60 bp, Artificial
  Synthetic oligonucleotide
atttctatgaaatgacatcaaggacgccagctcgggcccgggaagcccacatccagatga

SEQ ID NO: 338360 - DNA, 60 bp, Artificial
  Synthetic oligonucleotide
atttctcagatccagtaatggatagagtgtgatccccagtttaagaggtgctggggtgag

SEQ ID NO: 338361 - DNA, 55 bp, Artificial
  Synthetic oligonucleotide
atttctcagcacagcaggcactgccatgggcgcagtggcgacagccctgacggtg

SEQ ID NO: 338362 - DNA, 50 bp, Artificial
  Synthetic oligonucleotide
atttctcattatggtgtattcttggcaattgatgtccagcttgaacttgc

SEQ ID NO: 338363 - DNA, 57 bp, Artificial
  Synthetic oligonucleotide
atttctcatttctaatctaactacacataatatattatacctgaattacaaccttaa

SEQ ID NO: 338364 - DNA, 60 bp, Artificial
  Synthetic oligonucleotide
atttctcccagttgctggtggaacaagcagtgtgtacattgaagttttgcatttaacaca

SEQ ID NO: 338365 - DNA, 58 bp, Artificial
  Synthetic oligonucleotide
atttctcgtgcttcaagaatggggaatgactattaccgggtaatgcagactggaggac

SEQ ID NO: 338366 - DNA, 54 bp, Artificial
  Synthetic oligonucleotide
atttctctagacatgtctgacagtttgatgtcaggtaacaccaatgtcttaaaa

SEQ ID NO: 338367 - DNA, 51 bp, Artificial
  Synthetic oligonucleotide
atttctctgcgtttggctaacctctaaggcatccataagggcggatacatg

SEQ ID NO: 338368 - DNA, 60 bp, Artificial
  Synthetic oligonucleotide
atttctgaaaagctacacagtcctggggttgtctcctctctatcaacaggcaatgcaatc

SEQ ID NO: 338369 - DNA, 55 bp, Artificial
  Synthetic oligonucleotide
atttctgaagacttaaatggtctgacattcctgcggagaactgtgacccgcgacc

SEQ ID NO: 338370 - DNA, 57 bp, Artificial
  Synthetic oligonucleotide
atttctggaattcaggagaattcgacaaatacgctgaaaagcgaggtttcatcaaaa

SEQ ID NO: 338371 - DNA, 60 bp, Artificial
  Synthetic oligonucleotide
atttctggctccagaagggttccactgtgattaatcttgagcaaactggtagtatgatgt

SEQ ID NO: 338372 - DNA, 57 bp, Artificial
  Synthetic oligonucleotide
atttctggtaaaggggggcatagtggttctgccttcaaatgctgccatggggaggat

SEQ ID NO: 338373 - DNA, 57 bp, Artificial
  Synthetic oligonucleotide
atttctgtacacgagaactactatgtgggtgataatttaagttacaaagtgctggga

SEQ ID NO: 338374 - DNA, 60 bp, Artificial
  Synthetic oligonucleotide
atttctgtctaagtcctagatgcagtacaatacgctatccaattaataggagacatatta

SEQ ID NO: 338375 - DNA, 57 bp, Artificial
  Synthetic oligonucleotide
atttcttaagtaatgtctatgaagaatcttttaatcctacggaaatatcacacgtca

SEQ ID NO: 338376 - DNA, 60 bp, Artificial
  Synthetic oligonucleotide
atttcttaatctggcgattagcaatacgtatacatctccaatgcatgctagacgtatgat

SEQ ID NO: 338377 - DNA, 60 bp, Artificial
  Synthetic oligonucleotide
atttcttacgaccagcagatgctacccccgcggcgccatgactttgttggcttcacactc

SEQ ID NO: 338378 - DNA, 55 bp, Artificial
  Synthetic oligonucleotide
atttcttcaagagaatttcagttcgctagacaaaatcaggcgaaggagaatggcg

SEQ ID NO: 338379 - DNA, 51 bp, Artificial
  Synthetic oligonucleotide
atttcttcaagccacttatgggagcatatggtccaagccacttgaacaaag

SEQ ID NO: 338380 - DNA, 60 bp, Artificial
  Synthetic oligonucleotide
atttcttcagatttgtcttacagagtcggatacttgtgtgcaggtctccccagtgacact

SEQ ID NO: 338381 - DNA, 55 bp, Artificial
  Synthetic oligonucleotide
atttcttccgtagcttccctgaatgacctcacacctgttggaagactggtgaccg

SEQ ID NO: 338382 - DNA, 60 bp, Artificial
  Synthetic oligonucleotide
atttcttgagtgagatagagctggctgttccagggttgctctcactcaatagctttacag

SEQ ID NO: 338383 - DNA, 55 bp, Artificial
  Synthetic oligonucleotide
atttcttgatcgttttcggagttatgaggtattccccatttcgattgagcacctt

SEQ ID NO: 338384 - DNA, 60 bp, Artificial
  Synthetic oligonucleotide
atttctttagtacagcccgtgccatagtagccagcaatgccgttgcaacaaatgaggacc

SEQ ID NO: 338385 - DNA, 53 bp, Artificial
  Synthetic oligonucleotide
atttgaaaacgcttaggaggagccattgacttggtcaaatgggtaccaattgg

SEQ ID NO: 338386 - DNA, 51 bp, Artificial
  Synthetic oligonucleotide
atttgaaagatgggagagtatcaccctcctacacatgacagagagaagctt

SEQ ID NO: 338387 - DNA, 57 bp, Artificial
  Synthetic oligonucleotide
atttgaaagtgactccccaaataaggacatgcttccttgttacagtgtggccagaat

SEQ ID NO: 338388 - DNA, 55 bp, Artificial
  Synthetic oligonucleotide
atttgaaccggctttccatatttacagtttgactgccagtccctttgagccccaa

SEQ ID NO: 338389 - DNA, 60 bp, Artificial
  Synthetic oligonucleotide
atttgaacgatcaagcatccagggaagcagtagtcagctatgtcaacgttaatatgggcc

SEQ ID NO: 338390 - DNA, 55 bp, Artificial
  Synthetic oligonucleotide
atttgaactggcttaccgtattttgtgttggactgccagtctctttgggccccca

SEQ ID NO: 338391 - DNA, 59 bp, Artificial
  Synthetic oligonucleotide
atttgaagagcggatttcatcaagtcgctatggatccggaatcaatcccatggacagca

SEQ ID NO: 338392 - DNA, 57 bp, Artificial
  Synthetic oligonucleotide
atttgaagagtgaagcagtgtgcccacacgcggggggcgcggtatataccttccgta

SEQ ID NO: 338393 - DNA, 58 bp, Artificial
  Synthetic oligonucleotide
atttgaagtcgtttgcattcgtaggcaatgttatcttgtccttgcgacgtaggcggaa

SEQ ID NO: 338394 - DNA, 60 bp, Artificial
  Synthetic oligonucleotide
atttgaagtttgatatgtctcttatggctagtggtgcattttgggcgagtcctaactata

SEQ ID NO: 338395 - DNA, 55 bp, Artificial
  Synthetic oligonucleotide
atttgaatcacctggctttctacagtcctgcacaggtagatttgtcgaacacgcg

SEQ ID NO: 338396 - DNA, 55 bp, Artificial
  Synthetic oligonucleotide
atttgaatgcctaccaggaccaagctggtagtgtagatctagtgagcccaaagcc

SEQ ID NO: 338397 - DNA, 57 bp, Artificial
  Synthetic oligonucleotide
atttgaatggaagggctactattggggaaatgttacaagcaatgtgcaattataacc

SEQ ID NO: 338398 - DNA, 57 bp, Artificial
  Synthetic oligonucleotide
atttgaatggagcgtgccctaatgtcgtggcctttgaaccccgctgggactcattac

SEQ ID NO: 338399 - DNA, 57 bp, Artificial
  Synthetic oligonucleotide
atttgaattgccgaccacaaactgccatatgctaattacttccccttttacactata

SEQ ID NO: 338400 - DNA, 51 bp, Artificial
  Synthetic oligonucleotide
atttgaattggcgtgctgcgactgaccggaattcatacagggcactcaaag

SEQ ID NO: 338401 - DNA, 53 bp, Artificial
  Synthetic oligonucleotide
atttgacaacgaccccaaaggaaggggagactgacgaaggaaggaaggccaga

SEQ ID NO: 338402 - DNA, 53 bp, Artificial
  Synthetic oligonucleotide
atttgacacccactccacaatcccgctactcattttggcgtgcgttcggagtg

SEQ ID NO: 338403 - DNA, 60 bp, Artificial
  Synthetic oligonucleotide
atttgacacgcttatgggaagtttgattgcaccgaacacatcacaaactggtgacgtaga

SEQ ID NO: 338404 - DNA, 57 bp, Artificial
  Synthetic oligonucleotide
atttgacactaatttgtatgagttcggcctaaaacgcgtaaatcagccgatgccttc

SEQ ID NO: 338405 - DNA, 60 bp, Artificial
  Synthetic oligonucleotide
atttgacatccgatcagttagaacagtatcagttgagcaagtaaaagcactactagctgg

SEQ ID NO: 338406 - DNA, 60 bp, Artificial
  Synthetic oligonucleotide
atttgaccaatgcatccaaactgacccccgcatccttgcaatgaactgtgtcactgctct

SEQ ID NO: 338407 - DNA, 56 bp, Artificial
  Synthetic oligonucleotide
atttgaccagtcttctctcccatttgccgtatccaacgtgccagaaatctatatcc

SEQ ID NO: 338408 - DNA, 57 bp, Artificial
  Synthetic oligonucleotide
atttgaccctgtatctagcacacgagaagtacccgctactggacctttgtacccaga

SEQ ID NO: 338409 - DNA, 59 bp, Artificial
  Synthetic oligonucleotide
atttgacggagaaaaatggtttgcagacttggatggcaaagtcgcatacgcagtcggtc

SEQ ID NO: 338410 - DNA, 60 bp, Artificial
  Synthetic oligonucleotide
atttgacggcaagcataatggagggttgggagtactatgacaactcgctcctatatgcca

SEQ ID NO: 338411 - DNA, 54 bp, Artificial
  Synthetic oligonucleotide
atttgacggtgcgtcagagcggctcgacggttccgcagacgccatctggcaacg

SEQ ID NO: 338412 - DNA, 51 bp, Artificial
  Synthetic oligonucleotide
atttgacggttgatacatcatatatagattggcacaagtatgaaacggaaa

SEQ ID NO: 338413 - DNA, 56 bp, Artificial
  Synthetic oligonucleotide
atttgacgtacccctgtgggccaccttcacaggatactcagaattctgttcaaaag

SEQ ID NO: 338414 - DNA, 60 bp, Artificial
  Synthetic oligonucleotide
atttgactagcggaggctagaaggagagagatgggtgcgagagcgtcaatcttacgaggg

SEQ ID NO: 338415 - DNA, 54 bp, Artificial
  Synthetic oligonucleotide
atttgactaggtaccattgaaacgaattaaaagtcctatttctctagtaacatc

SEQ ID NO: 338416 - DNA, 60 bp, Artificial
  Synthetic oligonucleotide
atttgactatctgtcaccagcgctacctccgtacccaggcgatatccaagggtatgcgcc

SEQ ID NO: 338417 - DNA, 50 bp, Artificial
  Synthetic oligonucleotide
atttgactctggtgtccagactccgattaacttcaaaggctgatcttatg

SEQ ID NO: 338418 - DNA, 58 bp, Artificial
  Synthetic oligonucleotide
atttgacttagccctatgcacgggcagaattaatcaatcgaaacgtgtaagaccattg

SEQ ID NO: 338419 - DNA, 54 bp, Artificial
  Synthetic oligonucleotide
atttgagactagcggctaatgccatctgttcagccgttccagttgactgggtcc

SEQ ID NO: 338420 - DNA, 59 bp, Artificial
  Synthetic oligonucleotide
atttgagagagtgatgaaggtcgcattctttaatgcccaggatttgagatgcgcgtttt

SEQ ID NO: 338421 - DNA, 55 bp, Artificial
  Synthetic oligonucleotide
atttgagaggaagatacgtagcgtgagcgctggacgtgcgctatatatccctcca

SEQ ID NO: 338422 - DNA, 54 bp, Artificial
  Synthetic oligonucleotide
atttgagataacaagaaaagggagtttctaactgcttgtttagcttctgtaaaa

SEQ ID NO: 338423 - DNA, 57 bp, Artificial
  Synthetic oligonucleotide
atttgagatactgagggtaaagaatggttggacacagacaagtaaagagcaagttag

SEQ ID NO: 338424 - DNA, 60 bp, Artificial
  Synthetic oligonucleotide
atttgagcagtatgttgggttcaaggatagaatgtcgcacatgcgaaatttctctgagta

SEQ ID NO: 338425 - DNA, 59 bp, Artificial
  Synthetic oligonucleotide
atttgagctgtgagagactattctatggttggaaaggtttgtggaatgggtcgctcaag

SEQ ID NO: 338426 - DNA, 55 bp, Artificial
  Synthetic oligonucleotide
atttgaggacctgggctttgaagacccttaagagaatcccaatctgagggcgtaa

SEQ ID NO: 338427 - DNA, 60 bp, Artificial
  Synthetic oligonucleotide
atttgaggcagtttctgctgaagttgaccttaaggggacatgtgtcttgaagcacaagat

SEQ ID NO: 338428 - DNA, 53 bp, Artificial
  Synthetic oligonucleotide
atttgaggctttcatccttaggttgtcatttagattctcactgaactcctagg

SEQ ID NO: 338429 - DNA, 51 bp, Artificial
  Synthetic oligonucleotide
atttgagtgcttgtacattattttgaggcagtgttttatgccttcttctag

SEQ ID NO: 338430 - DNA, 55 bp, Artificial
  Synthetic oligonucleotide
atttgataaggtaaagtgtaccggaacacagaacaaatggttcgtgtcatcctgg

SEQ ID NO: 338431 - DNA, 58 bp, Artificial
  Synthetic oligonucleotide
atttgataatgttatcgttgatgcacaaaacagaaccgttcaatttaatgttagaatg

SEQ ID NO: 338432 - DNA, 52 bp, Artificial
  Synthetic oligonucleotide
atttgatagctccctcacaccatacctcctgaacgctgtattggagatgcgg

SEQ ID NO: 338433 - DNA, 59 bp, Artificial
  Synthetic oligonucleotide
atttgatcccgagatttataacgcatctcgttgcgcatttatgacccacaactacgaaa

SEQ ID NO: 338434 - DNA, 56 bp, Artificial
  Synthetic oligonucleotide
atttgatcttaaacgatggatatacttacattcaaccggtaaagctagtattgaag

SEQ ID NO: 338435 - DNA, 55 bp, Artificial
  Synthetic oligonucleotide
atttgatgcaaccccgacagttggttttccgtcctgaggtactttggaatcatcc

SEQ ID NO: 338436 - DNA, 59 bp, Artificial
  Synthetic oligonucleotide
atttgatgcagaatgattctggagcaaactacatttttcgccaaaagtttgtggccgtg

SEQ ID NO: 338437 - DNA, 55 bp, Artificial
  Synthetic oligonucleotide
atttgatgggcatccatctgatgtgactgcagtccagtttactgttgggcgtcag

SEQ ID NO: 338438 - DNA, 57 bp, Artificial
  Synthetic oligonucleotide
atttgattccctctcaagacagaacggaatcccactctagtcctttgtcccttgctc

SEQ ID NO: 338439 - DNA, 60 bp, Artificial
  Synthetic oligonucleotide
atttgattgatgaaatgcagaaaaaatacgaattacagagcgtcggcagctgtgaacgcg

SEQ ID NO: 338440 - DNA, 60 bp, Artificial
  Synthetic oligonucleotide
atttgattttagagcatctatgcatatgttaacgtctaatttgactttcactgtatattc

SEQ ID NO: 338441 - DNA, 53 bp, Artificial
  Synthetic oligonucleotide
atttgcaaagcttgttcatattggcaattatctcaaaactgaacatgaagcca

SEQ ID NO: 338442 - DNA, 60 bp, Artificial
  Synthetic oligonucleotide
atttgcaaatcatatgagtatatcacggcgatcacaccagatacgattttcggagtcagc

SEQ ID NO: 338443 - DNA, 59 bp, Artificial
  Synthetic oligonucleotide
atttgcaacactacgtgcccctgcggtgctagcattgcgggccatgttaagaacgggac

SEQ ID NO: 338444 - DNA, 56 bp, Artificial
  Synthetic oligonucleotide
atttgcaactatacgactaacacaatatgggggttaaagagtcacattacaaagag

SEQ ID NO: 338445 - DNA, 53 bp, Artificial
  Synthetic oligonucleotide
atttgcaactgaatgacgggaccgttaaggccagttgcgtggcaggttccttt

SEQ ID NO: 338446 - DNA, 60 bp, Artificial
  Synthetic oligonucleotide
atttgcaaggatactgatgaggtgacgcaacaggctgtgttgcaaggtgatcctgtggag

SEQ ID NO: 338447 - DNA, 55 bp, Artificial
  Synthetic oligonucleotide
atttgcacttgaatcgtagtacgcagtttaccatggatttgactgccgcggctcc

SEQ ID NO: 338448 - DNA, 57 bp, Artificial
  Synthetic oligonucleotide
atttgcagcttgaagctttaacaatacaatttgaaacgcagtttctagccggtataa

SEQ ID NO: 338449 - DNA, 57 bp, Artificial
  Synthetic oligonucleotide
atttgcagtccccaacctccaatcactcactaacctcttgtcctccaatttgtcctg

SEQ ID NO: 338450 - DNA, 60 bp, Artificial
  Synthetic oligonucleotide
atttgcataaacttatgctgtccgatgagatgaaggcgttaccaacgaaaggttgtcata

SEQ ID NO: 338451 - DNA, 58 bp, Artificial
  Synthetic oligonucleotide
atttgcatatcggacgtgactcgaggtaatggaattacacatcgtattggcaaacgtt

SEQ ID NO: 338452 - DNA, 60 bp, Artificial
  Synthetic oligonucleotide
atttgcatcagcaaccaccaacgccgtcaccaacaaactagcatccaccggaatggtaca

SEQ ID NO: 338453 - DNA, 54 bp, Artificial
  Synthetic oligonucleotide
atttgcatccctctaataaaccgtgaatccataaaaagggtccaacatactcgt

SEQ ID NO: 338454 - DNA, 60 bp, Artificial
  Synthetic oligonucleotide
atttgccaacatattttcagctatagaagatgattatatcgatatacctatgccaagcac

SEQ ID NO: 338455 - DNA, 55 bp, Artificial
  Synthetic oligonucleotide
atttgccaatagagagctgtgatgccacatgccaaactgttgcaggagtcctgag

SEQ ID NO: 338456 - DNA, 60 bp, Artificial
  Synthetic oligonucleotide
atttgccagacaatgcgccatgggtgagcgagtttattgcagagtgtgaatcgtttaccg

SEQ ID NO: 338457 - DNA, 60 bp, Artificial
  Synthetic oligonucleotide
atttgccaggcgtgatgagatcaaattatgatatccgcgaattacggcaaaagatcaaaa

SEQ ID NO: 338458 - DNA, 60 bp, Artificial
  Synthetic oligonucleotide
atttgccatatgacaaccatggaacattctattgtgacatgtcatctgcgagaaaacatg

SEQ ID NO: 338459 - DNA, 55 bp, Artificial
  Synthetic oligonucleotide
atttgccatctgaagtgtcacgtgaaggaactatagtcacgtcatatgatggata

SEQ ID NO: 338460 - DNA, 54 bp, Artificial
  Synthetic oligonucleotide
atttgcccaatgaagagcgcagaagaccctgacagactctaccgctacgcagac

SEQ ID NO: 338461 - DNA, 55 bp, Artificial
  Synthetic oligonucleotide
atttgcccataggacagtgtgtgactgagtgccaattgaatgagggtgtaatgaa

SEQ ID NO: 338462 - DNA, 57 bp, Artificial
  Synthetic oligonucleotide
atttgccctaatgggcaagttttattattccaacaggcgtctggcctgttgggctgc

SEQ ID NO: 338463 - DNA, 58 bp, Artificial
  Synthetic oligonucleotide
atttgcctagacattgaggggggctcttgggattgggcagaccacctgtggttcgcat

SEQ ID NO: 338464 - DNA, 58 bp, Artificial
  Synthetic oligonucleotide
atttgcctcaatgagtacgcccaactttcttccaaaactcaagctaccattgtctcca

SEQ ID NO: 338465 - DNA, 60 bp, Artificial
  Synthetic oligonucleotide
atttgccttcgaactgcaccagcacatggaggtgaggttccccatcctcgtgcagttctc

SEQ ID NO: 338466 - DNA, 52 bp, Artificial
  Synthetic oligonucleotide
atttgcgaagacccgctcggctacttttgcttcggggacgggctctaaagcc

SEQ ID NO: 338467 - DNA, 57 bp, Artificial
  Synthetic oligonucleotide
atttgcgagataggtttcaagttttgcggaaattccatgccactgtggtaggtggtc

SEQ ID NO: 338468 - DNA, 55 bp, Artificial
  Synthetic oligonucleotide
atttgcgagtttctattttcaggtttgtgaacgttcttcccatatagtacgtcag

SEQ ID NO: 338469 - DNA, 55 bp, Artificial
  Synthetic oligonucleotide
atttgcgcgccaaaactacttggcagaacatttcaccgataacggtaagatttta

SEQ ID NO: 338470 - DNA, 55 bp, Artificial
  Synthetic oligonucleotide
atttgcgctccaaggaccatgccaaagcggaactacgataccgccttctcaactc

SEQ ID NO: 338471 - DNA, 54 bp, Artificial
  Synthetic oligonucleotide
atttgcggaactggacgacgagtttgaatgtgacacttttgaagttcaccatca

SEQ ID NO: 338472 - DNA, 60 bp, Artificial
  Synthetic oligonucleotide
atttgcgggaccgagtgcaatggccacgcagatactgaaaagcgcaaatagacaggcaac

SEQ ID NO: 338473 - DNA, 55 bp, Artificial
  Synthetic oligonucleotide
atttgcgttacaagctgacagggacaaaattcctggggttttatcggatctgaaa

SEQ ID NO: 338474 - DNA, 59 bp, Artificial
  Synthetic oligonucleotide
atttgctaaacagactccgagttgccattggacaccgtagctgtgaatcagtaacgaaa

SEQ ID NO: 338475 - DNA, 57 bp, Artificial
  Synthetic oligonucleotide
atttgctaatcacaccagtatatcaagaagaacacaccaaattaggttttcggaatc

SEQ ID NO: 338476 - DNA, 60 bp, Artificial
  Synthetic oligonucleotide
atttgctgagtattcaaatgcctcaatatagttgtgcaagagttcaattacctatgttga

SEQ ID NO: 338477 - DNA, 50 bp, Artificial
  Synthetic oligonucleotide
atttgctgccatgcttgaacgttctgagtgaggatcgagaacaattggtt

SEQ ID NO: 338478 - DNA, 55 bp, Artificial
  Synthetic oligonucleotide
atttgctgtctgagtccttattaagtactgggattgttaggggcaaactgacgga

SEQ ID NO: 338479 - DNA, 60 bp, Artificial
  Synthetic oligonucleotide
atttgctgttcgcacatctgacgtgatgaccgaagttgggcaaacaaatggactatacgg

SEQ ID NO: 338480 - DNA, 59 bp, Artificial
  Synthetic oligonucleotide
atttgctgttcgtaagtctgacttgatgaccgaagtcgtgcaaacaaatggactctacg

SEQ ID NO: 338481 - DNA, 58 bp, Artificial
  Synthetic oligonucleotide
atttgcttagttagggagaatggtgacatggtaccactgctgaatggtttgtttgttc

SEQ ID NO: 338482 - DNA, 51 bp, Artificial
  Synthetic oligonucleotide
atttgcttattatcaatagttactggttcgtttacttccattcccatgata

SEQ ID NO: 338483 - DNA, 56 bp, Artificial
  Synthetic oligonucleotide
atttggaaactgcccaaagtatgttggagtaaagagtctcaaactagcagttggtc

SEQ ID NO: 338484 - DNA, 50 bp, Artificial
  Synthetic oligonucleotide
atttggaacccttggacctcgcaaccagtgctggtttcccttatgtgact

SEQ ID NO: 338485 - DNA, 58 bp, Artificial
  Synthetic oligonucleotide
atttggaacggcacacagcgcgcgtgtaccttctgggctgttaacgcctactcctctg

SEQ ID NO: 338486 - DNA, 55 bp, Artificial
  Synthetic oligonucleotide
atttggaactgcctttagtctcttgggatacttaaagcctatcctaataggagta

SEQ ID NO: 338487 - DNA, 59 bp, Artificial
  Synthetic oligonucleotide
atttggaagaatcatgcagtactataactgagggatacctcagtgttttaagaacaggc

SEQ ID NO: 338488 - DNA, 54 bp, Artificial
  Synthetic oligonucleotide
atttggaatgaatggtttcgtgacgaaaaccttcaagattcccttggagttcca

SEQ ID NO: 338489 - DNA, 54 bp, Artificial
  Synthetic oligonucleotide
atttggaccaaattgctccgatgagatttgttctagatctagggggcaagagct

SEQ ID NO: 338490 - DNA, 60 bp, Artificial
  Synthetic oligonucleotide
atttggacgattagacttgttgaactacaggttactgaatcacttgcgctaatcaacatg

SEQ ID NO: 338491 - DNA, 52 bp, Artificial
  Synthetic oligonucleotide
atttggacggtgatgatgtcctctttcatgagaaatggtcggttgtggtgtt

SEQ ID NO: 338492 - DNA, 55 bp, Artificial
  Synthetic oligonucleotide
atttggacggttatgatgtcgtggttcctccggaatggtctctctaggtgttggg

SEQ ID NO: 338493 - DNA, 55 bp, Artificial
  Synthetic oligonucleotide
atttggacgtgcgaccaatgatgtccatatctcgggaatgtcacggatcgctcaa

SEQ ID NO: 338494 - DNA, 55 bp, Artificial
  Synthetic oligonucleotide
atttggagaatggacacacgaccccgagttgaggcctggattaatgggagaaaga

SEQ ID NO: 338495 - DNA, 57 bp, Artificial
  Synthetic oligonucleotide
atttggagcctcaaccaactctcctacaggtttgcgatttagaataacgcactcctc

SEQ ID NO: 338496 - DNA, 60 bp, Artificial
  Synthetic oligonucleotide
atttggagtgttttgctcctctttaccatgctatggatgttaccacacaggttggagatg

SEQ ID NO: 338497 - DNA, 57 bp, Artificial
  Synthetic oligonucleotide
atttggatacattgatatatgctcaaaactcgcaaaagataagagcttctacctatc

SEQ ID NO: 338498 - DNA, 60 bp, Artificial
  Synthetic oligonucleotide
atttggatgtggtatatcctggtgttcgtgtagattgggtcctctacatcgattatcgtg

SEQ ID NO: 338499 - DNA, 52 bp, Artificial
  Synthetic oligonucleotide
atttggatgttgttttcactacctgccctaaggatgaattaagacctctgga

SEQ ID NO: 338500 - DNA, 55 bp, Artificial
  Synthetic oligonucleotide
atttggcactcgattagaagagctcgaaattcttttgtcagtctgtacttcctct

SEQ ID NO: 338501 - DNA, 59 bp, Artificial
  Synthetic oligonucleotide
atttggcagaggaacaaatcagaacacacaaatctctccaagtagtccctctagcccaa

SEQ ID NO: 338502 - DNA, 60 bp, Artificial
  Synthetic oligonucleotide
atttggcagcaggaaggggatggatctcacaatgggcagtttccatagaatgggtctata

SEQ ID NO: 338503 - DNA, 60 bp, Artificial
  Synthetic oligonucleotide
atttggcattcgatgctctgatttgatgaccgatgtcgatcaacccagtggactttatgg

SEQ ID NO: 338504 - DNA, 54 bp, Artificial
  Synthetic oligonucleotide
atttggccacaataagcccaatttggttgaagattaaagtagtgagccccctta

SEQ ID NO: 338505 - DNA, 58 bp, Artificial
  Synthetic oligonucleotide
atttggcccaccaattgaggattgctcaacggttgaatgcaggtcggacacaccccac

SEQ ID NO: 338506 - DNA, 55 bp, Artificial
  Synthetic oligonucleotide
atttggccgggtaccagcgtgctttgggcgccggacgtagtgattactacggtgc

SEQ ID NO: 338507 - DNA, 58 bp, Artificial
  Synthetic oligonucleotide
atttggccgtgtgtgcggaatgttcgcgtcggtgcaagcgatgttgtgtgtgtaacgc

SEQ ID NO: 338508 - DNA, 60 bp, Artificial
  Synthetic oligonucleotide
atttggcctgatatgcgcaacctgtgaacagattgctgactcccagcataggtctcatag

SEQ ID NO: 338509 - DNA, 58 bp, Artificial
  Synthetic oligonucleotide
atttggcgggaaagaatccaccactctcagagtaccaaggtccattgactctacagtc

SEQ ID NO: 338510 - DNA, 60 bp, Artificial
  Synthetic oligonucleotide
atttggcgtcggaggaggagcgcgcagtttcaatgtgacagtggaattgacgtgagttct

SEQ ID NO: 338511 - DNA, 59 bp, Artificial
  Synthetic oligonucleotide
atttggctaggacgaaatgctcctgctatagatggagtgttccctgttacaacaccgga

SEQ ID NO: 338512 - DNA, 53 bp, Artificial
  Synthetic oligonucleotide
atttggctgacgtcccagatggatttgtttgtcctaacggacaaaggggaacc

SEQ ID NO: 338513 - DNA, 55 bp, Artificial
  Synthetic oligonucleotide
atttggctgtccttgaagaggataataaagatgaactttatgactaccccactgc

SEQ ID NO: 338514 - DNA, 52 bp, Artificial
  Synthetic oligonucleotide
atttgggagaaacttggtcttaatggctttctcgaagaagtttggaaacagg

SEQ ID NO: 338515 - DNA, 53 bp, Artificial
  Synthetic oligonucleotide
atttgggatagggaatgtgagtcaagtttatgttgacatcaagcaccaatcca

SEQ ID NO: 338516 - DNA, 52 bp, Artificial
  Synthetic oligonucleotide
atttgggcacggccggactataaccccccgctactggagacgtggaaaaagc

SEQ ID NO: 338517 - DNA, 55 bp, Artificial
  Synthetic oligonucleotide
atttgggccacacaagcctgtgtgcctacagacccctctccagaagaggtcatcc

SEQ ID NO: 338518 - DNA, 54 bp, Artificial
  Synthetic oligonucleotide
atttgggcctgggcccaatttatcgacgtcacgggacgtacgtctgctttagaa

SEQ ID NO: 338519 - DNA, 56 bp, Artificial
  Synthetic oligonucleotide
atttgggcgtgcccccgcgagactgctagccgagtagtgttgggtcgcgaaaggcc

SEQ ID NO: 338520 - DNA, 53 bp, Artificial
  Synthetic oligonucleotide
atttggggacgtcaactgttagggcgttttgcatctagatttcaaacaaaccc

SEQ ID NO: 338521 - DNA, 56 bp, Artificial
  Synthetic oligonucleotide
atttggggctaagctttaatcttataaaccaatcaggttcaactgttatctattca

SEQ ID NO: 338522 - DNA, 55 bp, Artificial
  Synthetic oligonucleotide
atttggtaaaggggtaacatggtcagcattgcattctatggggatatcccagggg

SEQ ID NO: 338523 - DNA, 55 bp, Artificial
  Synthetic oligonucleotide
atttggtaagccatccatatgctgccggtacttatgacaagaaagccccttctgg

SEQ ID NO: 338524 - DNA, 51 bp, Artificial
  Synthetic oligonucleotide
atttggtaatagtatcgtaaaactggggggactgggttataaatggtccga

SEQ ID NO: 338525 - DNA, 55 bp, Artificial
  Synthetic oligonucleotide
atttggtagaatggcagttttgtttagtcatccgttaatgttaacgatatcaagt

SEQ ID NO: 338526 - DNA, 53 bp, Artificial
  Synthetic oligonucleotide
atttggtagctagagggaccccttggtagtaaccttggacacctgttaagcgc

SEQ ID NO: 338527 - DNA, 60 bp, Artificial
  Synthetic oligonucleotide
atttggtcactgatagcaagacaccttttattggtcattggtgccgggcttatcagagaa

SEQ ID NO: 338528 - DNA, 55 bp, Artificial
  Synthetic oligonucleotide
atttggtcggatcacagctcccatgtgaacccgaaccggatgttacagtgctcac

SEQ ID NO: 338529 - DNA, 60 bp, Artificial
  Synthetic oligonucleotide
atttggtctagtatgcgcaacctgtgaacagattgctgattcccagcatcgatcccatag

SEQ ID NO: 338530 - DNA, 60 bp, Artificial
  Synthetic oligonucleotide
atttggtctcccatcaccttagttggtcgcgtcagctccaatcctaaattgatcactcta

SEQ ID NO: 338531 - DNA, 55 bp, Artificial
  Synthetic oligonucleotide
atttggtggcgacaacaccaagtatgacgtgggattccagtatcagtcctacacg

SEQ ID NO: 338532 - DNA, 60 bp, Artificial
  Synthetic oligonucleotide
atttggtgtttggcaatacacggcgcagcactacaacatatacagtacctagatttgaat

SEQ ID NO: 338533 - DNA, 58 bp, Artificial
  Synthetic oligonucleotide
atttggttgccgttcttgcgcgctacatagctcgttcttttggaaatagccaagtctg

SEQ ID NO: 338534 - DNA, 53 bp, Artificial
  Synthetic oligonucleotide
atttggttgtcctattttcggatgaccaagtctccggggttggctttcgtatg

SEQ ID NO: 338535 - DNA, 52 bp, Artificial
  Synthetic oligonucleotide
atttggtttcgtgagaagtggttttaatgaaccctaattatgatcataatta

SEQ ID NO: 338536 - DNA, 54 bp, Artificial
  Synthetic oligonucleotide
atttgtaacactacaggggttgggaaaccaaagtttctcccagatctgtatgac

SEQ ID NO: 338537 - DNA, 60 bp, Artificial
  Synthetic oligonucleotide
atttgtaatttggagctgtacaccaattgagctctctcaaacttgctgattcaattggtg

SEQ ID NO: 338538 - DNA, 53 bp, Artificial
  Synthetic oligonucleotide
atttgtacggggtagggtcaagcattacgtcttgggccattaagtgggagtac

SEQ ID NO: 338539 - DNA, 59 bp, Artificial
  Synthetic oligonucleotide
atttgtagatttgcacagactcctgtttgtgagtatgggggtaacacagtttcaggcta

SEQ ID NO: 338540 - DNA, 55 bp, Artificial
  Synthetic oligonucleotide
atttgtaggcccactcacagtcaatgagaaaagaagactgcaattgattatgcct

SEQ ID NO: 338541 - DNA, 51 bp, Artificial
  Synthetic oligonucleotide
atttgtatcgtttgaccttgactatgttggttaaatagtcagatatgttga

SEQ ID NO: 338542 - DNA, 56 bp, Artificial
  Synthetic oligonucleotide
atttgtatgcaatgagttcatacgaaacgcttttttacattttatagtcgttgcat

SEQ ID NO: 338543 - DNA, 57 bp, Artificial
  Synthetic oligonucleotide
atttgtatggcccattcctatagcacttcttgtggcccaggattctcctgggtttat

SEQ ID NO: 338544 - DNA, 60 bp, Artificial
  Synthetic oligonucleotide
atttgtatgtggtatattctgacccacgtatgaggtggatcctctactcggcacatcttg

SEQ ID NO: 338545 - DNA, 60 bp, Artificial
  Synthetic oligonucleotide
atttgtatttctgagctgagcctgacttggatgatgaacgatattcctttattgttgcta

SEQ ID NO: 338546 - DNA, 55 bp, Artificial
  Synthetic oligonucleotide
atttgtcaaagctgacgacacgcttcccattggtgccgccccggttacagggatc

SEQ ID NO: 338547 - DNA, 55 bp, Artificial
  Synthetic oligonucleotide
atttgtcaaataccttacaacagacgatgacaacgcaaatggaaagcgtacaggc

SEQ ID NO: 338548 - DNA, 60 bp, Artificial
  Synthetic oligonucleotide
atttgtcaaggctggtgatgtacttcctactggtgccgctccagtcacggggataatgaa

SEQ ID NO: 338549 - DNA, 60 bp, Artificial
  Synthetic oligonucleotide
atttgtcacaaatgtataatggttgggttggtaacatgcgagtcagggtcatcctggcag

SEQ ID NO: 338550 - DNA, 53 bp, Artificial
  Synthetic oligonucleotide
atttgtcacacccccgtccagcaggagctctagtgtcggcacagtctcgaccg

SEQ ID NO: 338551 - DNA, 56 bp, Artificial
  Synthetic oligonucleotide
atttgtcacagtgtgtatacccactttatccgggatctacgcggttgcctttgtac

SEQ ID NO: 338552 - DNA, 59 bp, Artificial
  Synthetic oligonucleotide
atttgtcgagtcacttacctatcccactatgttaggtggacgcaatcaaatcaggagac

SEQ ID NO: 338553 - DNA, 54 bp, Artificial
  Synthetic oligonucleotide
atttgtgaaagattggggcggttgtgtaaatatctttgggtcccttggatataa

SEQ ID NO: 338554 - DNA, 57 bp, Artificial
  Synthetic oligonucleotide
atttgtgaagcacttaattcaattaaagttactcaatctgacgttgctagtgtcctt

SEQ ID NO: 338555 - DNA, 57 bp, Artificial
  Synthetic oligonucleotide
atttgtgaaggatttaatctgcctgttgcgttgtaaaaactatgccgaagcgttcca

SEQ ID NO: 338556 - DNA, 55 bp, Artificial
  Synthetic oligonucleotide
atttgtgaggacgctattccagcagatgcgtgatgtattggggacatttgacacc

SEQ ID NO: 338557 - DNA, 55 bp, Artificial
  Synthetic oligonucleotide
atttgtgagtacccctgtgttggcgtttctcttttgttggatgcgtgacgcgagg

SEQ ID NO: 338558 - DNA, 60 bp, Artificial
  Synthetic oligonucleotide
atttgtgatgagtgccacagtcatgactcaactgtgttgctggggataggacgggttagg

SEQ ID NO: 338559 - DNA, 54 bp, Artificial
  Synthetic oligonucleotide
atttgtgcattcgaaaaacaagaactcggaggatataccgaaaactttcgaaga

SEQ ID NO: 338560 - DNA, 60 bp, Artificial
  Synthetic oligonucleotide
atttgtggactccctatgactgctgcttcaaacatgagacaatccagcaatgcacagtgt

SEQ ID NO: 338561 - DNA, 57 bp, Artificial
  Synthetic oligonucleotide
atttgtggagagtagtaatgacccaggacctagttcagactcggggctatcaataac

SEQ ID NO: 338562 - DNA, 57 bp, Artificial
  Synthetic oligonucleotide
atttgtgtccaaggatagttacaccgatgctgggtttatcacctgttggtatcaaac

SEQ ID NO: 338563 - DNA, 51 bp, Artificial
  Synthetic oligonucleotide
atttgtgtcctgggtatccagattttaccaacttaagcctgtgggaacggc

SEQ ID NO: 338564 - DNA, 60 bp, Artificial
  Synthetic oligonucleotide
atttgtgtcgtgatgtaaagtttgagacgaatgcatgtgatacgctttttggcgcgtcct

SEQ ID NO: 338565 - DNA, 60 bp, Artificial
  Synthetic oligonucleotide
atttgtgtcgttggaccaagatgcaacatcctctcaacctgaatcacctgatactataaa

SEQ ID NO: 338566 - DNA, 55 bp, Artificial
  Synthetic oligonucleotide
atttgtgtctcgttgagcaactcctttgagttgggtgtctgggtcctagcagagc

SEQ ID NO: 338567 - DNA, 55 bp, Artificial
  Synthetic oligonucleotide
atttgtgtgggactaggcttagctgtagtgcttttcacggcaacgaggagcacct

SEQ ID NO: 338568 - DNA, 55 bp, Artificial
  Synthetic oligonucleotide
atttgtgttcttagcccactctggcggatgacatcctaaacgaatactccttccc

SEQ ID NO: 338569 - DNA, 51 bp, Artificial
  Synthetic oligonucleotide
atttgttagaatttaactccaatgcaagagatatatttgaccggttgtccc

SEQ ID NO: 338570 - DNA, 56 bp, Artificial
  Synthetic oligonucleotide
atttgttagattctattgaggaacctaagacccatagattcgttactaggaatgta

SEQ ID NO: 338571 - DNA, 56 bp, Artificial
  Synthetic oligonucleotide
atttgttcagtggttcgccgggctttcccccactgtctggctttcagttatatgga

SEQ ID NO: 338572 - DNA, 57 bp, Artificial
  Synthetic oligonucleotide
atttgttccgtcaagggtgtttgtgtgcgccacgcgttagagccgccttgtgacacg

SEQ ID NO: 338573 - DNA, 51 bp, Artificial
  Synthetic oligonucleotide
atttgttcggcgatatatgcgtccgggacccgtgctcggtggaccccatca

SEQ ID NO: 338574 - DNA, 60 bp, Artificial
  Synthetic oligonucleotide
atttgttgaacgagccaccagtgaaaatctgaatttgacaacatcaatggaaatcatgaa

SEQ ID NO: 338575 - DNA, 55 bp, Artificial
  Synthetic oligonucleotide
atttgttgcagcatcactacataatgtgaaagcaaaggctccttcgcagttagcc

SEQ ID NO: 338576 - DNA, 56 bp, Artificial
  Synthetic oligonucleotide
atttgttgttaaagtctttgaaagactcaccctttggtaatgagacatggtcatta

SEQ ID NO: 338577 - DNA, 56 bp, Artificial
  Synthetic oligonucleotide
attttaacacattgagtgtccgtgcaaaacagcgcagggctccccacaatgggcaa

SEQ ID NO: 338578 - DNA, 58 bp, Artificial
  Synthetic oligonucleotide
attttaaccctgttactatctctgatccacgagctttagatcgtcggatcacttttga

SEQ ID NO: 338579 - DNA, 59 bp, Artificial
  Synthetic oligonucleotide
attttaacgaaattgctctccctgacccatctcctagtgatgactatgtcttggtcgga

SEQ ID NO: 338580 - DNA, 56 bp, Artificial
  Synthetic oligonucleotide
attttaactggggactcagaggactttgtgtattaagagataacatgaaactagga

SEQ ID NO: 338581 - DNA, 53 bp, Artificial
  Synthetic oligonucleotide
attttaagctctcgatgtcacatgattcataggaaacttccatttgatttatt

SEQ ID NO: 338582 - DNA, 52 bp, Artificial
  Synthetic oligonucleotide
attttaagggcccaaggaaaaccattaagtgcttcaactgtggcaaggaagg

SEQ ID NO: 338583 - DNA, 60 bp, Artificial
  Synthetic oligonucleotide
attttacacgcccaaagaagacgatgcgagctacgttattatggatgagtatactgacgc

SEQ ID NO: 338584 - DNA, 59 bp, Artificial
  Synthetic oligonucleotide
attttacacgtaccattttgtgcggtatgatggaaccatgcacccagagatccacaaag

SEQ ID NO: 338585 - DNA, 56 bp, Artificial
  Synthetic oligonucleotide
attttacatcaccatgactcaagctgataaaacagccttacgtacgagggctcgag

SEQ ID NO: 338586 - DNA, 57 bp, Artificial
  Synthetic oligonucleotide
attttaccaccttctgccagatggtgtccacgacaaacttactcccaaacatggcta

SEQ ID NO: 338587 - DNA, 51 bp, Artificial
  Synthetic oligonucleotide
attttacgaacagtttcgacagtaagtcaatatgtcaagtaacctacaatg

SEQ ID NO: 338588 - DNA, 60 bp, Artificial
  Synthetic oligonucleotide
attttacgcagagtctgtttctgggctgcacttagctattcaggttgtcgctggtacttc

SEQ ID NO: 338589 - DNA, 51 bp, Artificial
  Synthetic oligonucleotide
attttacggaggccgtaatctttaaaagtccgtgtttcgtaaggatacatg

SEQ ID NO: 338590 - DNA, 52 bp, Artificial
  Synthetic oligonucleotide
attttacgtcgaggggccttcgggtctccaagatgcccctaagcccgtcaag

SEQ ID NO: 338591 - DNA, 55 bp, Artificial
  Synthetic oligonucleotide
attttacgtggtactattatgtttgatggtgccatgttgttcgatcgcgaaggtc

SEQ ID NO: 338592 - DNA, 52 bp, Artificial
  Synthetic oligonucleotide
attttactacagagtgtagatatagcttaggttaaagctgtaagatgtgacc

SEQ ID NO: 338593 - DNA, 55 bp, Artificial
  Synthetic oligonucleotide
attttactattgggcaccatgaggagttcattcaaactagatctccaaaggtgac

SEQ ID NO: 338594 - DNA, 54 bp, Artificial
  Synthetic oligonucleotide
attttactcagaaacgcaaacattcaagaattctctcttaactaaggtagggga

SEQ ID NO: 338595 - DNA, 52 bp, Artificial
  Synthetic oligonucleotide
attttactcccttacattattatgttaaggacaggaaacacttaaatttaga

SEQ ID NO: 338596 - DNA, 57 bp, Artificial
  Synthetic oligonucleotide
attttactgagacagtcaaaccagttcttgatctcactaattccattatacatcggg

SEQ ID NO: 338597 - DNA, 55 bp, Artificial
  Synthetic oligonucleotide
attttagaagggttacaaagagcttttagagctattatacacatacctagaagaa

SEQ ID NO: 338598 - DNA, 59 bp, Artificial
  Synthetic oligonucleotide
attttagacttctatcttgatacgacaatattctctggtggcatacaaagtagcgtggt

SEQ ID NO: 338599 - DNA, 55 bp, Artificial
  Synthetic oligonucleotide
attttagatccatgacggatgtggttgactccataccgtcgctcttgaatgagcg

SEQ ID NO: 338600 - DNA, 58 bp, Artificial
  Synthetic oligonucleotide
attttagccacgaactcatgacaatgacaaggccaacattaagattgttagtgttggc

SEQ ID NO: 338601 - DNA, 60 bp, Artificial
  Synthetic oligonucleotide
attttaggaccacgtgatgcgacgagacacgaagagagaatgtgtcgtttgagaaagatg

SEQ ID NO: 338602 - DNA, 57 bp, Artificial
  Synthetic oligonucleotide
attttagtggctcacaacttgtagtaggtactaggcgaagcacaaatacattaacag

SEQ ID NO: 338603 - DNA, 60 bp, Artificial
  Synthetic oligonucleotide
attttataataaacagcacatcactcctcccttctatgcccacactgtgcagaatcaatg

SEQ ID NO: 338604 - DNA, 56 bp, Artificial
  Synthetic oligonucleotide
attttatctcataacgtcgatcttttgtagatattttactggcgatcggaagagtt

SEQ ID NO: 338605 - DNA, 54 bp, Artificial
  Synthetic oligonucleotide
attttatgtctgccccgggtcacatcgcccccgggaagccaagtcctgtggagg

SEQ ID NO: 338606 - DNA, 58 bp, Artificial
  Synthetic oligonucleotide
attttattcctgcccatactattgcccattgttctaaacaatatccacctgggacatg

SEQ ID NO: 338607 - DNA, 55 bp, Artificial
  Synthetic oligonucleotide
attttattctgggtgaccacttcattttggttgacgctagatcgctcatgaatgg

SEQ ID NO: 338608 - DNA, 60 bp, Artificial
  Synthetic oligonucleotide
attttatttgactagcggaggctagaaggagagagatgggtgcgagagcgtcaatattaa

SEQ ID NO: 338609 - DNA, 50 bp, Artificial
  Synthetic oligonucleotide
attttcaaacttcctagaatctgctttactgagagaaatgtctaccaacc

SEQ ID NO: 338610 - DNA, 55 bp, Artificial
  Synthetic oligonucleotide
attttcacgactcgaatgtaaagaacctatatgagaaagtaagaggtcaattaag

SEQ ID NO: 338611 - DNA, 55 bp, Artificial
  Synthetic oligonucleotide
attttcagaagctcgaacctggcgatgtggtcaggcttttcgaagtggatggcac

SEQ ID NO: 338612 - DNA, 60 bp, Artificial
  Synthetic oligonucleotide
attttcatacaactacgactcagcctcgctgttatctgagatgccgtcgagggaaattgc

SEQ ID NO: 338613 - DNA, 50 bp, Artificial
  Synthetic oligonucleotide
attttcatgggagcgaagtagaaacagtcacgcatggagatatccgcgga

SEQ ID NO: 338614 - DNA, 51 bp, Artificial
  Synthetic oligonucleotide
attttccaaggtttccaactaatcaggttttgttacattataattggggga

SEQ ID NO: 338615 - DNA, 53 bp, Artificial
  Synthetic oligonucleotide
attttccctcacctgggcaccggtgggacatgatttcgcggtacttgttaccg

SEQ ID NO: 338616 - DNA, 55 bp, Artificial
  Synthetic oligonucleotide
attttcccttggctctaaccaagggcgatatggcaaatagaatccccttggaata

SEQ ID NO: 338617 - DNA, 55 bp, Artificial
  Synthetic oligonucleotide
attttccgtagtccacatgggaaaagtccacatctttgtccgtgaactgtttgga

SEQ ID NO: 338618 - DNA, 55 bp, Artificial
  Synthetic oligonucleotide
attttcctacagcatccaagactaatctcacgtattgttctgctcccttcacagc

SEQ ID NO: 338619 - DNA, 60 bp, Artificial
  Synthetic oligonucleotide
attttcctagagtgtggctccatagcttagggcaatatatctatgaaacttatggggata

SEQ ID NO: 338620 - DNA, 60 bp, Artificial
  Synthetic oligonucleotide
attttcctggcacggtcagcactcattttaagagggtcagttgcacataagtcttgcctg

SEQ ID NO: 338621 - DNA, 52 bp, Artificial
  Synthetic oligonucleotide
attttcgaatctctatgctatgtactgcgaagagtgtgacatgtatcatgat

SEQ ID NO: 338622 - DNA, 60 bp, Artificial
  Synthetic oligonucleotide
attttcgatgtagctagagttccagatgatcaaatgtatagattaagggatagactacga

SEQ ID NO: 338623 - DNA, 55 bp, Artificial
  Synthetic oligonucleotide
attttcggtaacgtgagtgtatatagcagttgttgttttaccgccatccttatgc

SEQ ID NO: 338624 - DNA, 58 bp, Artificial
  Synthetic oligonucleotide
attttcgtcactttgttaagtgtcgaaggagtgatagtgtaagaaatccattgaagca

SEQ ID NO: 338625 - DNA, 54 bp, Artificial
  Synthetic oligonucleotide
attttcgtgtcttcgtaattaattatcaaaaacactccattcatttatcgtaaa

SEQ ID NO: 338626 - DNA, 50 bp, Artificial
  Synthetic oligonucleotide
attttcgttagtgcgacgggaaggtcaaatttccaaacgaaagaaacggc

SEQ ID NO: 338627 - DNA, 53 bp, Artificial
  Synthetic oligonucleotide
attttctactatgggtggtttttgagatggaaaacatcgatgtggattatggg

SEQ ID NO: 338628 - DNA, 60 bp, Artificial
  Synthetic oligonucleotide
attttctcataagatgcggtttttggcagatcaagcagctgcctgagctctgctatgtca

SEQ ID NO: 338629 - DNA, 52 bp, Artificial
  Synthetic oligonucleotide
attttctgattaggacagataatactcatttcaagagttttgttaaccttaa

SEQ ID NO: 338630 - DNA, 56 bp, Artificial
  Synthetic oligonucleotide
attttctgcgaagtgtaccgacgactactcgtagtagaaccactgcatatatcacg

SEQ ID NO: 338631 - DNA, 52 bp, Artificial
  Synthetic oligonucleotide
attttctgggtcgatctgcggagcctgttcctcttcagctaccaccgattgg

SEQ ID NO: 338632 - DNA, 55 bp, Artificial
  Synthetic oligonucleotide
attttcttagacaccctaatagaatgtctaaggaccaaattaaactgctcctgga

SEQ ID NO: 338633 - DNA, 53 bp, Artificial
  Synthetic oligonucleotide
attttcttagcgaggacgctccgttctctccctgtgcaggtgcgactcttgct

SEQ ID NO: 338634 - DNA, 60 bp, Artificial
  Synthetic oligonucleotide
attttcttcatgtcgcccaaaggcatgagtaggatgtctatggcaatggggactatggct

SEQ ID NO: 338635 - DNA, 60 bp, Artificial
  Synthetic oligonucleotide
attttcttggcacggtcagcactcatcctgagagggtcagtagcccataaatcgtgtcta

SEQ ID NO: 338636 - DNA, 53 bp, Artificial
  Synthetic oligonucleotide
attttcttggcgcgaacgtttgtgtttaaaactaggtataggttcatcaaatc

SEQ ID NO: 338637 - DNA, 55 bp, Artificial
  Synthetic oligonucleotide
attttctttcaggcatgttgatgtgctgttaaaaagactatttcctcgtgaccct

SEQ ID NO: 338638 - DNA, 55 bp, Artificial
  Synthetic oligonucleotide
attttgaaagagcaatgattgcggcaactgatgctgaggaaccacggaaagcatt

SEQ ID NO: 338639 - DNA, 56 bp, Artificial
  Synthetic oligonucleotide
attttgaaaggagtcttctcaagggttgtaccggcattaggtcatccactctcttc

SEQ ID NO: 338640 - DNA, 58 bp, Artificial
  Synthetic oligonucleotide
attttgaatcgaacagcgttgcccggagttatgccgcccatctttccccctgcagata

SEQ ID NO: 338641 - DNA, 57 bp, Artificial
  Synthetic oligonucleotide
attttgacccagcccgcctcactcaaattctcaaggaatatggcctcaaaccaacaa

SEQ ID NO: 338642 - DNA, 57 bp, Artificial
  Synthetic oligonucleotide
attttgacgtccttgtcatccaatttaaacgcagttatgttctggctagagaaacac

SEQ ID NO: 338643 - DNA, 55 bp, Artificial
  Synthetic oligonucleotide
attttgactacgatgatatcaatctgttcggccctgcacaccacaaggagtatgg

SEQ ID NO: 338644 - DNA, 56 bp, Artificial
  Synthetic oligonucleotide
attttgacttcaacagattccactgccacttttcaccacgtgactggcaaagactc

SEQ ID NO: 338645 - DNA, 57 bp, Artificial
  Synthetic oligonucleotide
attttgagactgtcgcgagtccaaacattgtccttaagaaacatacacaaagagtcc

SEQ ID NO: 338646 - DNA, 60 bp, Artificial
  Synthetic oligonucleotide
attttgagcctggttgctgctagtcatgcacatatctgaaccaatcacacagtcattaag

SEQ ID NO: 338647 - DNA, 56 bp, Artificial
  Synthetic oligonucleotide
attttgagggtataaccggaacaaactcatacagctttctcaggtcttcttcagga

SEQ ID NO: 338648 - DNA, 52 bp, Artificial
  Synthetic oligonucleotide
attttgatagttggaatgaaaggagcaatttaaaaattgtaagtgtgaatga

SEQ ID NO: 338649 - DNA, 55 bp, Artificial
  Synthetic oligonucleotide
attttgcaagcctgccaattttacggggtgaaataatggctaatttcaacgtgcc

SEQ ID NO: 338650 - DNA, 60 bp, Artificial
  Synthetic oligonucleotide
attttgcagcagtgacccttgaggagcgatattttgttatccagaagagatggaaaactc

SEQ ID NO: 338651 - DNA, 60 bp, Artificial
  Synthetic oligonucleotide
attttgcccgtctgactatggacgtgcagcctatgcgatccatgctcatgcctgaaacgg

SEQ ID NO: 338652 - DNA, 56 bp, Artificial
  Synthetic oligonucleotide
attttgcccttattaatgtgtctgttaggcgcgtgggagtgccctgaaaaagtaga

SEQ ID NO: 338653 - DNA, 51 bp, Artificial
  Synthetic oligonucleotide
attttgcgataggttatacaggatcaggcctatgtcgtatcaagatgatgc

SEQ ID NO: 338654 - DNA, 54 bp, Artificial
  Synthetic oligonucleotide
attttgcggaaaatccagtaaatgccatggttcaatacaactactttgggacat

SEQ ID NO: 338655 - DNA, 54 bp, Artificial
  Synthetic oligonucleotide
attttgctacgtcactaaccacgtgacccctcccacccaaccagagtctacttc

SEQ ID NO: 338656 - DNA, 59 bp, Artificial
  Synthetic oligonucleotide
attttgctatgcatagggagtaaatatggcggaaggctgccacgatacatagttgccca

SEQ ID NO: 338657 - DNA, 60 bp, Artificial
  Synthetic oligonucleotide
attttgctctcatagtgaatgcaccaaatcatgagggaatacaagcaggagtggataggt

SEQ ID NO: 338658 - DNA, 60 bp, Artificial
  Synthetic oligonucleotide
attttgctctgcttatgagtgcactgctcagtatgccaatgcttattgttcacatgctaa

SEQ ID NO: 338659 - DNA, 55 bp, Artificial
  Synthetic oligonucleotide
attttgctggtgccaatccaaatacagcattgtccttgtacagtcgatggcttgc

SEQ ID NO: 338660 - DNA, 57 bp, Artificial
  Synthetic oligonucleotide
attttggaacgaaatacaacacgctgtgaaatacaagacgctgtgacaaatgtacgg

SEQ ID NO: 338661 - DNA, 52 bp, Artificial
  Synthetic oligonucleotide
attttggacaacttatagcgtaaatacttcacctaaattttcagtaaacgcc

SEQ ID NO: 338662 - DNA, 60 bp, Artificial
  Synthetic oligonucleotide
attttggaccctgcttgtatgcttatgtcgaaattgagctagaggtgtactatacatctt

SEQ ID NO: 338663 - DNA, 55 bp, Artificial
  Synthetic oligonucleotide
attttggacgacactctcaagtgccgactaggacaatggcttgctggacggcccc

SEQ ID NO: 338664 - DNA, 53 bp, Artificial
  Synthetic oligonucleotide
attttggacttatcgaattcaacgtcgtccttgtagatatcgctgatatacgc

SEQ ID NO: 338665 - DNA, 59 bp, Artificial
  Synthetic oligonucleotide
attttggagacaccaataggtaaatgagacaccgatatatgggtgtctcaattggtgac

SEQ ID NO: 338666 - DNA, 58 bp, Artificial
  Synthetic oligonucleotide
attttggatttagtaacaagaactggtgcaagacgtgtcatgcgagaacaattacggc

SEQ ID NO: 338667 - DNA, 60 bp, Artificial
  Synthetic oligonucleotide
attttggcagttgtatttgccttcgaactggagcaacacatgtaaatgaggctgcccatc

SEQ ID NO: 338668 - DNA, 53 bp, Artificial
  Synthetic oligonucleotide
attttggcccggctggtgaccttaacaaccctatcctagaatggacgttcctg

SEQ ID NO: 338669 - DNA, 58 bp, Artificial
  Synthetic oligonucleotide
attttggctatgtcgagactctggagaaccttaaggttagattcacacgcccgtgata

SEQ ID NO: 338670 - DNA, 55 bp, Artificial
  Synthetic oligonucleotide
attttgggattagctttacaggcatatgaccagatgcgtagagcattacctgtcc

SEQ ID NO: 338671 - DNA, 54 bp, Artificial
  Synthetic oligonucleotide
attttggtatcgtcatgtgagaaccctcccgactccgacacgcccacccttccc

SEQ ID NO: 338672 - DNA, 60 bp, Artificial
  Synthetic oligonucleotide
attttggttaccagatccaaggagtcacggactacctcacaagccatggagtctcttgca

SEQ ID NO: 338673 - DNA, 53 bp, Artificial
  Synthetic oligonucleotide
attttggttgcaggtaccggaaacccgaatttccattctgacatcacagactt

SEQ ID NO: 338674 - DNA, 60 bp, Artificial
  Synthetic oligonucleotide
attttgtaccgtgcttgactccacgctcgatccactggcgagtgttagtagcggcactgc

SEQ ID NO: 338675 - DNA, 60 bp, Artificial
  Synthetic oligonucleotide
attttgtactgtgattgactccacgctcggtccactagcgagtgttagtagcagcactgt

SEQ ID NO: 338676 - DNA, 57 bp, Artificial
  Synthetic oligonucleotide
attttgtataccttcctctagggcgttgaagtcgaacggaggtatgatcccatcatg

SEQ ID NO: 338677 - DNA, 60 bp, Artificial
  Synthetic oligonucleotide
attttgtatctcccagataaacacgccactctgtgcttgagctgcagtgatgagttcccc

SEQ ID NO: 338678 - DNA, 51 bp, Artificial
  Synthetic oligonucleotide
attttgtctaactgaaattgtactaacgaagaatagtccttatacattata

SEQ ID NO: 338679 - DNA, 56 bp, Artificial
  Synthetic oligonucleotide
attttgtgtcctgttaggaagcataaaaaatcataaatccaaccgattaatcttca

SEQ ID NO: 338680 - DNA, 56 bp, Artificial
  Synthetic oligonucleotide
attttgtgtctctaaattcacttcgatttaggtttagtctgactgtcgaagaacca

SEQ ID NO: 338681 - DNA, 60 bp, Artificial
  Synthetic oligonucleotide
attttgtgtgaaatctgtctatgttctggggaagatatggatggatgaaaacatcaagac

SEQ ID NO: 338682 - DNA, 59 bp, Artificial
  Synthetic oligonucleotide
attttgtgttaagaatgaggatgaagcaagtcgcaatgcaattgatcgaagatttgtaa

SEQ ID NO: 338683 - DNA, 52 bp, Artificial
  Synthetic oligonucleotide
attttgttcgtggtgtaggctggcctactgggtggggttgggatccggactg

SEQ ID NO: 338684 - DNA, 60 bp, Artificial
  Synthetic oligonucleotide
attttgttgagcggtaggctataccaacaacattctcattgctgttccgactgatccatt

SEQ ID NO: 338685 - DNA, 52 bp, Artificial
  Synthetic oligonucleotide
atttttaaagacgcggtgtccttcaacgtgtggtttccagagagtaaaggga

SEQ ID NO: 338686 - DNA, 50 bp, Artificial
  Synthetic oligonucleotide
atttttaaataccgcaatagaggtgcaatggcatgagagagattgaattc

SEQ ID NO: 338687 - DNA, 55 bp, Artificial
  Synthetic oligonucleotide
atttttaaggatactactggactacataatcaactatcaactaaggaagccgacg

SEQ ID NO: 338688 - DNA, 55 bp, Artificial
  Synthetic oligonucleotide
atttttaaggcgtcgggccccgccattcttgaccgtagaggactcagttgctgaa

SEQ ID NO: 338689 - DNA, 58 bp, Artificial
  Synthetic oligonucleotide
atttttacactggaatttcccttcgaattggatgaggatatgcaggtgaggagtccca

SEQ ID NO: 338690 - DNA, 54 bp, Artificial
  Synthetic oligonucleotide
atttttacatgcaagtttggatgttttcccgtgttattgtcccagtttgcaagt

SEQ ID NO: 338691 - DNA, 56 bp, Artificial
  Synthetic oligonucleotide
atttttactcagcgtgaccgtcttaccctgggcgccatgggaccgaagacgcaagc

SEQ ID NO: 338692 - DNA, 60 bp, Artificial
  Synthetic oligonucleotide
atttttatcatcgcagcaaatattcttttgctatcactaagttcgcataccaagtgctga

SEQ ID NO: 338693 - DNA, 51 bp, Artificial
  Synthetic oligonucleotide
atttttcaaccaccgacgcattgggatcagacagttaatggtacgaagatg

SEQ ID NO: 338694 - DNA, 56 bp, Artificial
  Synthetic oligonucleotide
atttttcatgcgatacgacgttgagcctttcgacatcataaaagataactactact

SEQ ID NO: 338695 - DNA, 60 bp, Artificial
  Synthetic oligonucleotide
atttttcggatgcagcggaggcatatatagagatgagaaatgcagaggcaccatacatgc

SEQ ID NO: 338696 - DNA, 58 bp, Artificial
  Synthetic oligonucleotide
atttttcttagcccactaagaagcaatctagaattccctacagcataccaagatgtaa

SEQ ID NO: 338697 - DNA, 60 bp, Artificial
  Synthetic oligonucleotide
atttttcttgagcgatagcgcacctactgcatcttatcttcatgtcttacgactagcctc

SEQ ID NO: 338698 - DNA, 54 bp, Artificial
  Synthetic oligonucleotide
atttttgaggacgtgttcaagcttacttggactcccgcccagccggggccttga

SEQ ID NO: 338699 - DNA, 60 bp, Artificial
  Synthetic oligonucleotide
atttttgcactcatcctgctgctgattgcaaagtacaagcccactttgctatatctattc

SEQ ID NO: 338700 - DNA, 54 bp, Artificial
  Synthetic oligonucleotide
atttttgccgcatgtgcatttttccggttcggtgtacgaccacgttttgaccaa

SEQ ID NO: 338701 - DNA, 60 bp, Artificial
  Synthetic oligonucleotide
atttttggactcagatccagatgaccacataggtagttatgaggacctaatgacctagcc

SEQ ID NO: 338702 - DNA, 56 bp, Artificial
  Synthetic oligonucleotide
atttttgggcatttatagacaacagctttatacagggcaaaaacccatgggactca

SEQ ID NO: 338703 - DNA, 58 bp, Artificial
  Synthetic oligonucleotide
atttttggttgcgctttgctttgttcacaaattagtgatcaagaaatgggtcagattg

SEQ ID NO: 338704 - DNA, 57 bp, Artificial
  Synthetic oligonucleotide
atttttgtaaataaggggtgtaccccaattgagagctcgctctataagtcatatgaa

SEQ ID NO: 338705 - DNA, 52 bp, Artificial
  Synthetic oligonucleotide
atttttgtaataacatacaaggccccagttagatccactggtaagttaaggg

SEQ ID NO: 338706 - DNA, 55 bp, Artificial
  Synthetic oligonucleotide
atttttgttgtcataaatttgaagaatgtcaggttaaagccccgtttgccatggc

SEQ ID NO: 338707 - DNA, 58 bp, Artificial
  Synthetic oligonucleotide
attttttaaagcccactccttaagcgctgcattcgactcctcatccatatattcttta

SEQ ID NO: 338708 - DNA, 59 bp, Artificial
  Synthetic oligonucleotide
attttttccttaatcagagagataagtacgagagaattcataatgaatacttggcacga

SEQ ID NO: 338709 - DNA, 56 bp, Artificial
  Synthetic oligonucleotide
attttttggagcaagttcctgagatggtaggtagtgaaaccgcaagcgccagaagg

SEQ ID NO: 338710 - DNA, 59 bp, Artificial
  Synthetic oligonucleotide
atttttttcgtcatgtccaacataaactattatgctcgcgagttgcccgtaatgagcac

SEQ ID NO: 338711 - DNA, 54 bp, Artificial
  Synthetic oligonucleotide
caaaaaaactcgacaataaatccattgaagctaattgtaaatcacttttgtccg

SEQ ID NO: 338712 - DNA, 60 bp, Artificial
  Synthetic oligonucleotide
caaaaaacactagcatcttatacatactttccaactgtcagtggatcattagtatctagt

SEQ ID NO: 338713 - DNA, 55 bp, Artificial
  Synthetic oligonucleotide
caaaaaagactatggaactgaacaaactattttgccgtttacaggaacagcaatg

SEQ ID NO: 338714 - DNA, 57 bp, Artificial
  Synthetic oligonucleotide
caaaaaagtggaggtcctcaataataagaattggtcaggatacagcggagctttcac

SEQ ID NO: 338715 - DNA, 59 bp, Artificial
  Synthetic oligonucleotide
caaaaacaagagcgagatcctggctttactgaaagctctttttctgccaaagagactca

SEQ ID NO: 338716 - DNA, 59 bp, Artificial
  Synthetic oligonucleotide
caaaaacatggttcatggatttgcagctgctgaacgaaaactacaagccttgttgcttt

SEQ ID NO: 338717 - DNA, 57 bp, Artificial
  Synthetic oligonucleotide
caaaaaccgagcgcattatcgatcttggcggtaactatgttacacacgccaaacaag

SEQ ID NO: 338718 - DNA, 58 bp, Artificial
  Synthetic oligonucleotide
caaaaaccgctaacgctgacactatatattatgactattttcccctcgaagatagagc

SEQ ID NO: 338719 - DNA, 56 bp, Artificial
  Synthetic oligonucleotide
caaaaacctactcctgataaggagaaacaggatccttatgcaggtctcagtttttg

SEQ ID NO: 338720 - DNA, 60 bp, Artificial
  Synthetic oligonucleotide
caaaaacctgcttcgcaaactgggcatgggttcatatgggattctctatggcgcccaaga

SEQ ID NO: 338721 - DNA, 57 bp, Artificial
  Synthetic oligonucleotide
caaaaactaagaatgctgggacaaaaaatttcacatataaactgccgcaccgctgaa

SEQ ID NO: 338722 - DNA, 57 bp, Artificial
  Synthetic oligonucleotide
caaaaactactaaaaactggtcaatagctactcctagctcaaagttcagcctgtcca

SEQ ID NO: 338723 - DNA, 54 bp, Artificial
  Synthetic oligonucleotide
caaaaactccccggagctccgattaagggtcttccggtcatcaaattgcgacac

SEQ ID NO: 338724 - DNA, 54 bp, Artificial
  Synthetic oligonucleotide
caaaaactcgccggaacggcgattgagggtcttccggttatcaatttgcgacac

SEQ ID NO: 338725 - DNA, 54 bp, Artificial
  Synthetic oligonucleotide
caaaaactgagggagaggaggcaaaggttggagggggcgatagacggattggag

SEQ ID NO: 338726 - DNA, 54 bp, Artificial
  Synthetic oligonucleotide
caaaaacttttcttatcgccgtttcttgacacagattcgataagtttatgttat

SEQ ID NO: 338727 - DNA, 50 bp, Artificial
  Synthetic oligonucleotide
caaaaagaaaaaagagcggtgggagtaataggagctatgttccttgggtt

SEQ ID NO: 338728 - DNA, 58 bp, Artificial
  Synthetic oligonucleotide
caaaaagaataggttcactgttgctgaaacatcatgtttagaactgaattatggatct

SEQ ID NO: 338729 - DNA, 60 bp, Artificial
  Synthetic oligonucleotide
caaaaagaccctagggatgctgcactggcaaccaatcgagcctatttcataacacgtcaa

SEQ ID NO: 338730 - DNA, 58 bp, Artificial
  Synthetic oligonucleotide
caaaaagcgttataacacaaatgataattcaagaggaatgaattatgaaactccaatg

SEQ ID NO: 338731 - DNA, 52 bp, Artificial
  Synthetic oligonucleotide
caaaaagggaataacaggtgtggcaaaaacatggggacctctaccggaatgg

SEQ ID NO: 338732 - DNA, 60 bp, Artificial
  Synthetic oligonucleotide
caaaaagggcagtatcaattgtgtctcaagagctctatgggaaactaatgctaaaggtga

SEQ ID NO: 338733 - DNA, 57 bp, Artificial
  Synthetic oligonucleotide
caaaaaggtgcaccaatgttgtgacaggcagtggggggaaaagtcccaaatatgcca

SEQ ID NO: 338734 - DNA, 60 bp, Artificial
  Synthetic oligonucleotide
caaaaagtaccagcacagatttttgaatctttatgcaatgtattgtgaggaatgtgatat

SEQ ID NO: 338735 - DNA, 60 bp, Artificial
  Synthetic oligonucleotide
caaaaagtagctaaccctcagaagctgcatataagcagccgctttctgcttataccaagt

SEQ ID NO: 338736 - DNA, 50 bp, Artificial
  Synthetic oligonucleotide
caaaaagtgaactaataataacagacctaccattatggttaataacatgg

SEQ ID NO: 338737 - DNA, 53 bp, Artificial
  Synthetic oligonucleotide
caaaaagtgcagcgacgattggagcgcactctcagaggtcagactcagattgg

SEQ ID NO: 338738 - DNA, 52 bp, Artificial
  Synthetic oligonucleotide
caaaaagtggttacagaaagcatagtaatatggggaaagacccctaaattta

SEQ ID NO: 338739 - DNA, 56 bp, Artificial
  Synthetic oligonucleotide
caaaaatatctatgattggacctttcttccaaccgactttgataccaaagaagcta

SEQ ID NO: 338740 - DNA, 57 bp, Artificial
  Synthetic oligonucleotide
caaaaatatgggttatcgcggcctctacttttcaattagcacgatccacggctacga

SEQ ID NO: 338741 - DNA, 60 bp, Artificial
  Synthetic oligonucleotide
caaaaatcccacgggccatgcagacaatgctcctgaccctcgcgtcaacatggctgtcga

SEQ ID NO: 338742 - DNA, 53 bp, Artificial
  Synthetic oligonucleotide
caaaaatgaccggagggggggctaggagcgcggggggacccagtggagccatg

SEQ ID NO: 338743 - DNA, 56 bp, Artificial
  Synthetic oligonucleotide
caaaaatgatagggggaattggagggtttatcaaagtaagacagtatgatgaggtg

SEQ ID NO: 338744 - DNA, 54 bp, Artificial
  Synthetic oligonucleotide
caaaaatgctaaaagaaacctcaataaacaatacttttctgattaatagcggcc

SEQ ID NO: 338745 - DNA, 60 bp, Artificial
  Synthetic oligonucleotide
caaaaatggagacgtgattggactgtatgggaacggcgtcatcatgcctaatggttcgta

SEQ ID NO: 338746 - DNA, 55 bp, Artificial
  Synthetic oligonucleotide
caaaaatggcggatttagtgacgtcacggccgccattttaagtaaggcggaagca

SEQ ID NO: 338747 - DNA, 58 bp, Artificial
  Synthetic oligonucleotide
caaaaattactggagacagtaaacaaggccgattaattcgatggcaaatgtggctgtc

SEQ ID NO: 338748 - DNA, 57 bp, Artificial
  Synthetic oligonucleotide
caaaaattcgtgattgttctccagtgagtcttacatccaccaattttagatcttttc

SEQ ID NO: 338749 - DNA, 51 bp, Artificial
  Synthetic oligonucleotide
caaaaattgcagggctcctaggaaaaggggttgttggaaatatggaaagga

SEQ ID NO: 338750 - DNA, 60 bp, Artificial
  Synthetic oligonucleotide
caaaaattgtgaccgtcaagcagcccagcatatctgcccccgggttcactctgtccgctc

SEQ ID NO: 338751 - DNA, 53 bp, Artificial
  Synthetic oligonucleotide
caaaacaaacgttgtttcctggataatgaaccgcatcttctgaagttaagaac

SEQ ID NO: 338752 - DNA, 60 bp, Artificial
  Synthetic oligonucleotide
caaaacaagattcctcccagtggctggtgggacaagcagtgtgtacattgaggtgttgca

SEQ ID NO: 338753 - DNA, 56 bp, Artificial
  Synthetic oligonucleotide
caaaacaccccgcacgtgttggactcccgcctacagctagcagtggtcacgggtac

SEQ ID NO: 338754 - DNA, 50 bp, Artificial
  Synthetic oligonucleotide
caaaacacgaacttttacagcagcgccaattgatacattgctcggagcta

SEQ ID NO: 338755 - DNA, 54 bp, Artificial
  Synthetic oligonucleotide
caaaacactgaaatgtggccaattgcctgtgcctcttatgttggcatcctagat

SEQ ID NO: 338756 - DNA, 52 bp, Artificial
  Synthetic oligonucleotide
caaaacactttgggtagctctatttacgtgcctaccgttagtggttctttgg

SEQ ID NO: 338757 - DNA, 58 bp, Artificial
  Synthetic oligonucleotide
caaaacagaagacgttcatcttacagccgaattcatgggttacaatgaaggaagcttc

SEQ ID NO: 338758 - DNA, 57 bp, Artificial
  Synthetic oligonucleotide
caaaacagacgacagcgtacaggattcgtgtttcataaacctaatatacttccatat

SEQ ID NO: 338759 - DNA, 54 bp, Artificial
  Synthetic oligonucleotide
caaaacagcctttaacaagaagttcccaggtacggcaatacatatcccagctag

SEQ ID NO: 338760 - DNA, 55 bp, Artificial
  Synthetic oligonucleotide
caaaacagctgatgagctgattgaggctatagaagatatgatggcaccatcacag

SEQ ID NO: 338761 - DNA, 54 bp, Artificial
  Synthetic oligonucleotide
caaaacaggatggactgcaaccttacagattaacacatctccctttcattcagg

SEQ ID NO: 338762 - DNA, 60 bp, Artificial
  Synthetic oligonucleotide
caaaacagtcaagtcttcagtctcatcagaccaaacgaaaatccagcacacaaaagtcaa

SEQ ID NO: 338763 - DNA, 54 bp, Artificial
  Synthetic oligonucleotide
caaaacataaagccccaactcaaacaaagttgccacctttaatggttactagca

SEQ ID NO: 338764 - DNA, 53 bp, Artificial
  Synthetic oligonucleotide
caaaacatagttgcttggtttaaagataaacggaagaacaacacgtttgctaa

SEQ ID NO: 338765 - DNA, 54 bp, Artificial
  Synthetic oligonucleotide
caaaacatcaactacctgttccgtgtccggggcgaaaacgcgacttcgatagcc

SEQ ID NO: 338766 - DNA, 55 bp, Artificial
  Synthetic oligonucleotide
caaaacatcaggaataccgaaggagttaatccgaaatacaagatggaaccgcact

SEQ ID NO: 338767 - DNA, 58 bp, Artificial
  Synthetic oligonucleotide
caaaacatctcgaggatagcaattggagactgccccaaatacgttaaacagggctctc

SEQ ID NO: 338768 - DNA, 57 bp, Artificial
  Synthetic oligonucleotide
caaaacatctgcagggtgtgtgagatcatgtgttagcctctccctcatcatggcctg

SEQ ID NO: 338769 - DNA, 60 bp, Artificial
  Synthetic oligonucleotide
caaaacatgatcagcagctctaattacattgttaattgagataacacccatattatccaa

SEQ ID NO: 338770 - DNA, 60 bp, Artificial
  Synthetic oligonucleotide
caaaacatgcacactcttctgggcatgggcccacagcagtaaaggccaagtaaattggcc

SEQ ID NO: 338771 - DNA, 54 bp, Artificial
  Synthetic oligonucleotide
caaaacatgcacacttttttgggcatgggccccccgcagtaaaggctaagtaaa

SEQ ID NO: 338772 - DNA, 54 bp, Artificial
  Synthetic oligonucleotide
caaaacatgtggggctcccccttgtgtgactcgacccacgaggggtaacaacac

SEQ ID NO: 338773 - DNA, 55 bp, Artificial
  Synthetic oligonucleotide
caaaacatttgctgacagtgttgatataactgcagaagggtcgtgtgctggctgt

SEQ ID NO: 338774 - DNA, 60 bp, Artificial
  Synthetic oligonucleotide
caaaacattttcagagtggctagatagatttatcagagtgggtgtgcctcctattgatcc

SEQ ID NO: 338775 - DNA, 57 bp, Artificial
  Synthetic oligonucleotide
caaaaccaagcactttcacgactttcgtgtcagctgccccacgaatgaactccgttc

SEQ ID NO: 338776 - DNA, 55 bp, Artificial
  Synthetic oligonucleotide
caaaaccacgttatttggagagattgcacagtattactcacactggtcaggctcc

SEQ ID NO: 338777 - DNA, 59 bp, Artificial
  Synthetic oligonucleotide
caaaaccactgccattaagaagatgtttaatccagcgaccgatttgatagtcacggcga

SEQ ID NO: 338778 - DNA, 54 bp, Artificial
  Synthetic oligonucleotide
caaaacccactagggcctttgaatgggttaacaggcccatgtacaggaagccca

SEQ ID NO: 338779 - DNA, 57 bp, Artificial
  Synthetic oligonucleotide
caaaacccactcaaggtcaaacaatcgtattaaacactgactggagtggctacagtg

SEQ ID NO: 338780 - DNA, 50 bp, Artificial
  Synthetic oligonucleotide
caaaaccccacttgacgccgcgctagcagatatagcccctagcgcctggc

SEQ ID NO: 338781 - DNA, 60 bp, Artificial
  Synthetic oligonucleotide
caaaaccctagacatgcatgatgccaatgttagaaatttgcatgagcaagtgcgaagaac

SEQ ID NO: 338782 - DNA, 53 bp, Artificial
  Synthetic oligonucleotide
caaaaccgggagtgtttcgcacccctttcggggaagttggagcagtcagcttg

SEQ ID NO: 338783 - DNA, 55 bp, Artificial
  Synthetic oligonucleotide
caaaaccggtggtagtgtaatggtatcttctcgccctgagcgtgcacaaaacgag

SEQ ID NO: 338784 - DNA, 55 bp, Artificial
  Synthetic oligonucleotide
caaaaccgtgtaaagatcgcttgtcaatttcgtgatcctgaaggatttaacgtgg

SEQ ID NO: 338785 - DNA, 51 bp, Artificial
  Synthetic oligonucleotide
caaaacctacgggttgttgcctacagaactgacatttctgcgaaagtatct

SEQ ID NO: 338786 - DNA, 55 bp, Artificial
  Synthetic oligonucleotide
caaaacctagaattccttcaacaatcatacttttctcgagtccactatgcatcag

SEQ ID NO: 338787 - DNA, 58 bp, Artificial
  Synthetic oligonucleotide
caaaacctatgacgtcggtgcattgcgttccttaccatagggacgcacagtacttgac

SEQ ID NO: 338788 - DNA, 55 bp, Artificial
  Synthetic oligonucleotide
caaaacctcccagacatctagacctgctctcagtagtgggtcatctgtgaggtca

SEQ ID NO: 338789 - DNA, 59 bp, Artificial
  Synthetic oligonucleotide
caaaacctgtacaccctctggggaagctccgtcgtctgcatgtacctctatcagctttc

SEQ ID NO: 338790 - DNA, 54 bp, Artificial
  Synthetic oligonucleotide
caaaacctttgtagaggtatccgcaacgtacctagaagaataagacagggcttc

SEQ ID NO: 338791 - DNA, 55 bp, Artificial
  Synthetic oligonucleotide
caaaacgaccccttaaatcaatcagagacgactacaactatgcaaaggctaaggg

SEQ ID NO: 338792 - DNA, 56 bp, Artificial
  Synthetic oligonucleotide
caaaacgcagcgtttacaatgtggagattgacatatttggagcataaattaatgcc

SEQ ID NO: 338793 - DNA, 60 bp, Artificial
  Synthetic oligonucleotide
caaaacgcttgccacaagtgtggactaagcaagactgggaaacagaatatcaaacatgcg

SEQ ID NO: 338794 - DNA, 53 bp, Artificial
  Synthetic oligonucleotide
caaaacggacgacaagggtaagttcaaggcccgaaagaacatgctgactgaat

SEQ ID NO: 338795 - DNA, 53 bp, Artificial
  Synthetic oligonucleotide
caaaacgtacttcgagaaggttgaaaggctgaaacatggaaccttcggtccag

SEQ ID NO: 338796 - DNA, 56 bp, Artificial
  Synthetic oligonucleotide
caaaacgtatgcaaaagaacgtgcagaacaattttgtagacatttacgaggttgaa

SEQ ID NO: 338797 - DNA, 56 bp, Artificial
  Synthetic oligonucleotide
caaaactaagaatggcaacaggactaagaaacgtcccatccattcaatcccgagga

SEQ ID NO: 338798 - DNA, 54 bp, Artificial
  Synthetic oligonucleotide
caaaactagagttattgaagctagtagtgtgaatgatactttgctgttcagaac

SEQ ID NO: 338799 - DNA, 60 bp, Artificial
  Synthetic oligonucleotide
caaaactaggccttgcaaatccagaggttctccaccaattgcaaacatgtgataattgag

SEQ ID NO: 338800 - DNA, 60 bp, Artificial
  Synthetic oligonucleotide
caaaactaggtgtatcgaggcatgtgaggtagactattgtatagtctataggatgatcat

SEQ ID NO: 338801 - DNA, 55 bp, Artificial
  Synthetic oligonucleotide
caaaactcccaaacccatccccacccaacatatccagcgccaggggatctctccc

SEQ ID NO: 338802 - DNA, 60 bp, Artificial
  Synthetic oligonucleotide
caaaactcccagtgacactggaagcccggtgcatgcagctgcctgcctcacgcctaatgc

SEQ ID NO: 338803 - DNA, 55 bp, Artificial
  Synthetic oligonucleotide
caaaactccggttccatcgcttacgagctggacccacactgtaggctcgacgccc

SEQ ID NO: 338804 - DNA, 55 bp, Artificial
  Synthetic oligonucleotide
caaaactccgttggctcgtggagaaaggatttgtctcgccaataggaaaagtcat

SEQ ID NO: 338805 - DNA, 56 bp, Artificial
  Synthetic oligonucleotide
caaaactctcgacgcggaaggaaagagacatcagtacccaatcgaggtattccttc

SEQ ID NO: 338806 - DNA, 54 bp, Artificial
  Synthetic oligonucleotide
caaaactctgaggaatgggggactcgggggacgcatttatatggtgtccccaaa

SEQ ID NO: 338807 - DNA, 51 bp, Artificial
  Synthetic oligonucleotide
caaaactgaagggggtaggaaatcgggggatatgaacaccggtctcggtaa

SEQ ID NO: 338808 - DNA, 55 bp, Artificial
  Synthetic oligonucleotide
caaaactgctatgcgtcaacattcgctgagcgattccgcggcaccccggggcact

SEQ ID NO: 338809 - DNA, 55 bp, Artificial
  Synthetic oligonucleotide
caaaactgtgaaatccgagtgcagtagcgtcgacactttcgttcgaagccaagat

SEQ ID NO: 338810 - DNA, 55 bp, Artificial
  Synthetic oligonucleotide
caaaactgtgcaggaaggcctggacacctactacagccgagcaggtacaggcgac

SEQ ID NO: 338811 - DNA, 55 bp, Artificial
  Synthetic oligonucleotide
caaaactgtgtcaagtgagcttgtgtgcagagaaggggattcctactggacatca

SEQ ID NO: 338812 - DNA, 55 bp, Artificial
  Synthetic oligonucleotide
caaaactgtttaacagaacaatgctggagaacgaaaccatacttccatgcaggat

SEQ ID NO: 338813 - DNA, 55 bp, Artificial
  Synthetic oligonucleotide
caaaacttaaactattcttctcacagtcaagaaaggtgacctgcctctctgccag

SEQ ID NO: 338814 - DNA, 54 bp, Artificial
  Synthetic oligonucleotide
caaaacttgatgctacagttttcgcccaaatcgttaaattaaggaaagttgaca

SEQ ID NO: 338815 - DNA, 51 bp, Artificial
  Synthetic oligonucleotide
caaaacttgggtcctaaagacccgtaagaaacgcccagtctgaggagttaa

SEQ ID NO: 338816 - DNA, 55 bp, Artificial
  Synthetic oligonucleotide
caaaactttaacgccatgtagaacgaacggcgattgtcagatgtgtcgcgaggtt

SEQ ID NO: 338817 - DNA, 55 bp, Artificial
  Synthetic oligonucleotide
caaaactttaagagctgaacaagctacacaagaagtaaaaggttggatgacagac

SEQ ID NO: 338818 - DNA, 51 bp, Artificial
  Synthetic oligonucleotide
caaaagaacgagcgggtcgtcagttaggagagaagaagaagtgcttacggg

SEQ ID NO: 338819 - DNA, 60 bp, Artificial
  Synthetic oligonucleotide
caaaagaactgggcaacggatgctttgaattctaccacaagtgtgacaatgaatgcatgg

SEQ ID NO: 338820 - DNA, 60 bp, Artificial
  Synthetic oligonucleotide
caaaagaataccaggaggaattgcagctttagcgcataaactctacactcattgcaaacg

SEQ ID NO: 338821 - DNA, 58 bp, Artificial
  Synthetic oligonucleotide
caaaagacaacaacaagacagcaataaatccagtaacagtagaagtaccatacatttg

SEQ ID NO: 338822 - DNA, 55 bp, Artificial
  Synthetic oligonucleotide
caaaagacactcctgactttcaccaagattcaaagcttgagatggttcgggatgc

SEQ ID NO: 338823 - DNA, 52 bp, Artificial
  Synthetic oligonucleotide
caaaagacagcaatttatctggcatgggtaccagcccataaaggtatagggg

SEQ ID NO: 338824 - DNA, 58 bp, Artificial
  Synthetic oligonucleotide
caaaagacagtccgagagccagcctgatcccagatgccacacatctagggccacagtt

SEQ ID NO: 338825 - DNA, 56 bp, Artificial
  Synthetic oligonucleotide
caaaagaccgcgctgaggcctgtgcctacggaatgtggtcgttaaacgacgtagaa

SEQ ID NO: 338826 - DNA, 57 bp, Artificial
  Synthetic oligonucleotide
caaaagacgccgcattcagtcaaccctcggtcctttcttgtctgtgccgggccttca

SEQ ID NO: 338827 - DNA, 55 bp, Artificial
  Synthetic oligonucleotide
caaaagactgagttgcatgcaatctatttagccttgcaggattcaggatcagagg

SEQ ID NO: 338828 - DNA, 60 bp, Artificial
  Synthetic oligonucleotide
caaaagacttcttcaggtatgatgaagagtctacatcaaccagcttttccgttgatacga

SEQ ID NO: 338829 - DNA, 51 bp, Artificial
  Synthetic oligonucleotide
caaaagagcgtacagtgatttacatcactcgaattcctcaatatattccgc

SEQ ID NO: 338830 - DNA, 58 bp, Artificial
  Synthetic oligonucleotide
caaaagaggacctacctgggaatgaccttataggagagttgtgtgtagtccaggctgc

SEQ ID NO: 338831 - DNA, 59 bp, Artificial
  Synthetic oligonucleotide
caaaagagggcctgctagtggtttcttcagtaggctgaattggctgactaaatctggaa

SEQ ID NO: 338832 - DNA, 58 bp, Artificial
  Synthetic oligonucleotide
caaaagagtcaatattgaagaaactggaagatatcaaaccggaacaagcgaagaagca

SEQ ID NO: 338833 - DNA, 55 bp, Artificial
  Synthetic oligonucleotide
caaaagataagatgggagaacaccaaggttgtaagcgagactcgttctctttgtg

SEQ ID NO: 338834 - DNA, 50 bp, Artificial
  Synthetic oligonucleotide
caaaagataggtgttccggcttcttactaccagttcctgattccgatcga

SEQ ID NO: 338835 - DNA, 58 bp, Artificial
  Synthetic oligonucleotide
caaaagatatggggaaggaaatattcgatgggccattagaatggctaatgtaactaca

SEQ ID NO: 338836 - DNA, 60 bp, Artificial
  Synthetic oligonucleotide
caaaagatggtcatgggcaacactaagcctgttgagctcatcctcgacggcaagacagta

SEQ ID NO: 338837 - DNA, 55 bp, Artificial
  Synthetic oligonucleotide
caaaagcaatacagctatggcggctcatattacgttaatgtaagagaaacgcgag

SEQ ID NO: 338838 - DNA, 60 bp, Artificial
  Synthetic oligonucleotide
caaaagcaggagattaaaatgaatccaaatcagaagataatgaccattggatcaatctgt

SEQ ID NO: 338839 - DNA, 55 bp, Artificial
  Synthetic oligonucleotide
caaaagccaatcaggtaggagtgggagcatttggaccagggttcacccccccaca

SEQ ID NO: 338840 - DNA, 55 bp, Artificial
  Synthetic oligonucleotide
caaaagccttgtgcgccatggatacttggtacacttctacgggagtaggtaaccc

SEQ ID NO: 338841 - DNA, 60 bp, Artificial
  Synthetic oligonucleotide
caaaagcggatgacagagagatcagtcaaaattatcctatagtgcagaatcctcaagggc

SEQ ID NO: 338842 - DNA, 56 bp, Artificial
  Synthetic oligonucleotide
caaaagcgttcaaatttgttgggactcccgctgacactggccatggaacggtggtg

SEQ ID NO: 338843 - DNA, 54 bp, Artificial
  Synthetic oligonucleotide
caaaagctaagttatgggaaagtcaaagtgaacctcctactcgtgttaccgctg

SEQ ID NO: 338844 - DNA, 55 bp, Artificial
  Synthetic oligonucleotide
caaaagctctccaaatacaactacgcagtatcatatggagcttggaccgaacgcg

SEQ ID NO: 338845 - DNA, 55 bp, Artificial
  Synthetic oligonucleotide
caaaagctgttacgtgcttgtaacacactacacactcgttttgtgttcgaggagt

SEQ ID NO: 338846 - DNA, 55 bp, Artificial
  Synthetic oligonucleotide
caaaaggaaatcgctaagatgcaaaacgaaactcagaaggaaattgctgggcttc

SEQ ID NO: 338847 - DNA, 59 bp, Artificial
  Synthetic oligonucleotide
caaaaggacagatttatggctggtgactactctaatttggtctatcaatcatttttgaa

SEQ ID NO: 338848 - DNA, 52 bp, Artificial
  Synthetic oligonucleotide
caaaaggacgacacgtgtgtgacggtggcgctgcacctgtaatacacctgcg

SEQ ID NO: 338849 - DNA, 54 bp, Artificial
  Synthetic oligonucleotide
caaaaggacgtttgaatatttgtataatggggatttaggtggcgacctaatatc

SEQ ID NO: 338850 - DNA, 60 bp, Artificial
  Synthetic oligonucleotide
caaaaggagttatctaattagggcattgactctgaacacaatgaccaaagacgctgagag

SEQ ID NO: 338851 - DNA, 55 bp, Artificial
  Synthetic oligonucleotide
caaaaggatagctataagtccaggcctgtacgggaaaccttcgggctacgccgca

SEQ ID NO: 338852 - DNA, 60 bp, Artificial
  Synthetic oligonucleotide
caaaaggattccatctacgcatctgctctagtggaggcaaccaaattctgtgcacctata

SEQ ID NO: 338853 - DNA, 60 bp, Artificial
  Synthetic oligonucleotide
caaaagggcagattacagtgctggacatgcacccaggctctgggaagacccatagagtcc

SEQ ID NO: 338854 - DNA, 54 bp, Artificial
  Synthetic oligonucleotide
caaaaggggaagctaagaatcctcgcaagaaaacaaccgccgaagagcgcaccc

SEQ ID NO: 338855 - DNA, 56 bp, Artificial
  Synthetic oligonucleotide
caaaaggggatcagccgatagtttctttagccgactgaattggctaacaaaatctg

SEQ ID NO: 338856 - DNA, 60 bp, Artificial
  Synthetic oligonucleotide
caaaagggtcaatggtgtgtgatgtctgtaagtatgagtgtgaaacttataaagaattga

SEQ ID NO: 338857 - DNA, 55 bp, Artificial
  Synthetic oligonucleotide
caaaaggtagctaaggagtgtctagtaatctggggaaagctaccgaaattctatc

SEQ ID NO: 338858 - DNA, 55 bp, Artificial
  Synthetic oligonucleotide
caaaaggtagtaaaggtggatggcctgctgtaagggatagaatgagacaaacccc

SEQ ID NO: 338859 - DNA, 60 bp, Artificial
  Synthetic oligonucleotide
caaaaggtagtgtagttagatagcatgcagcagaaggggtggatgctgattgtgcctggc

SEQ ID NO: 338860 - DNA, 55 bp, Artificial
  Synthetic oligonucleotide
caaaaggttttacaggttgaatcatcacgtaacatataatcatcaggaggcaggg

SEQ ID NO: 338861 - DNA, 55 bp, Artificial
  Synthetic oligonucleotide
caaaagtacctgatgaccagatgtacaggttacgtgacaggctcagacgtctacc

SEQ ID NO: 338862 - DNA, 55 bp, Artificial
  Synthetic oligonucleotide
caaaagtcatcagaacagtggaatataatgagctggcagtggcgggtccatgtcc

SEQ ID NO: 338863 - DNA, 58 bp, Artificial
  Synthetic oligonucleotide
caaaagtcccagcgagagagcgcgttcaaatctcagactgttccgcttcctaccgttc

SEQ ID NO: 338864 - DNA, 59 bp, Artificial
  Synthetic oligonucleotide
caaaagtgaaggctaatctgctatccgtagaggaagcttgtagcctgacgcccccacac

SEQ ID NO: 338865 - DNA, 53 bp, Artificial
  Synthetic oligonucleotide
caaaagtgtggaaccgcccggtacgcaagtactactcagacaccccctactac

SEQ ID NO: 338866 - DNA, 60 bp, Artificial
  Synthetic oligonucleotide
caaaagttccagcagatattactcaaggagtagacaaagaagccaatggcagtgttagat

SEQ ID NO: 338867 - DNA, 53 bp, Artificial
  Synthetic oligonucleotide
caaaagttttggcggctcctcaacttccggcgtaacgggcgacaatacaacaa

SEQ ID NO: 338868 - DNA, 57 bp, Artificial
  Synthetic oligonucleotide
caaaataatcttctattaaccttgtgaacatttttgtcctcaaatctccaatataga

SEQ ID NO: 338869 - DNA, 55 bp, Artificial
  Synthetic oligonucleotide
caaaatacaacaaggccgctgaatgggttaacaggcccatgtaccggaagcccag

SEQ ID NO: 338870 - DNA, 55 bp, Artificial
  Synthetic oligonucleotide
caaaatacactgtgtttaggattggctccctatttgtgagtggaagggaaaaatc

SEQ ID NO: 338871 - DNA, 53 bp, Artificial
  Synthetic oligonucleotide
caaaatacccctgtctctgtgtctgataggcgcgtgctattgctctgaaaaag

SEQ ID NO: 338872 - DNA, 59 bp, Artificial
  Synthetic oligonucleotide
caaaataccggaagcattgtgagctaagagaacccaccaaggagcatatacagtacctg

SEQ ID NO: 338873 - DNA, 60 bp, Artificial
  Synthetic oligonucleotide
caaaatagacctatggtcctacaatgcagagttactggtggctctagaaaatcaacatac

SEQ ID NO: 338874 - DNA, 60 bp, Artificial
  Synthetic oligonucleotide
caaaatagcaaagcgttatgtgcaaagcgcatgggagcccggtataactgggacgatgat

SEQ ID NO: 338875 - DNA, 53 bp, Artificial
  Synthetic oligonucleotide
caaaatagcgagaaagaaaatttcgcgtggttcaattttagtttaccagctat

SEQ ID NO: 338876 - DNA, 54 bp, Artificial
  Synthetic oligonucleotide
caaaatagtaaagagcaggtcaaaagacaagtcgtggttgacaatttaaattgg

SEQ ID NO: 338877 - DNA, 60 bp, Artificial
  Synthetic oligonucleotide
caaaatagtgagaggaatgatgacaacgcgctgaatgaatcattatgtactgaacaacag

SEQ ID NO: 338878 - DNA, 60 bp, Artificial
  Synthetic oligonucleotide
caaaatatactcagaactcaggaatcagaatgcgtttgcatcaatgggacttgcacagta

SEQ ID NO: 338879 - DNA, 54 bp, Artificial
  Synthetic oligonucleotide
caaaatatactgtctttaaaattggctccctatttgtgagtggaagagaaaaac

SEQ ID NO: 338880 - DNA, 51 bp, Artificial
  Synthetic oligonucleotide
caaaatatgacggtggcggtattccttctgaacagttaggcacgttatgta

SEQ ID NO: 338881 - DNA, 60 bp, Artificial
  Synthetic oligonucleotide
caaaatatgtataggatatctaagcaataactcttcagacacagtggacacactaacaga

SEQ ID NO: 338882 - DNA, 55 bp, Artificial
  Synthetic oligonucleotide
caaaatatgtcgttcgatgggagtgggtggtactcttattcctgctcctagcgga

SEQ ID NO: 338883 - DNA, 55 bp, Artificial
  Synthetic oligonucleotide
caaaatattctctgaaaattctctctgtgacggttgtctctgaacctctgaggag

SEQ ID NO: 338884 - DNA, 60 bp, Artificial
  Synthetic oligonucleotide
caaaatcaacgaagtctctgtctttctccacataggctttgacatctgacgcgctcttag

SEQ ID NO: 338885 - DNA, 55 bp, Artificial
  Synthetic oligonucleotide
caaaatcaactctggggcaaataacaatggagttgccaatcctcaaaacaaatgc

SEQ ID NO: 338886 - DNA, 55 bp, Artificial
  Synthetic oligonucleotide
caaaatcaaggagcatggccggaaggggcgggaaggagagtaggattaaccaatc

SEQ ID NO: 338887 - DNA, 55 bp, Artificial
  Synthetic oligonucleotide
caaaatcacgaagaaacaagcccatcgaacccacaggcatccgcaagcacaatgc

SEQ ID NO: 338888 - DNA, 54 bp, Artificial
  Synthetic oligonucleotide
caaaatcaggattttgtggtggtgtcctttataaaataggtttagtcttaggca

SEQ ID NO: 338889 - DNA, 59 bp, Artificial
  Synthetic oligonucleotide
caaaatcccctcgaacaatcaagtagttccatgtgagccgatcataatagaaaggaaca

SEQ ID NO: 338890 - DNA, 56 bp, Artificial
  Synthetic oligonucleotide
caaaatcctgatggaaaggatatttcacttttctgtcaaatggtttctaccgttga

SEQ ID NO: 338891 - DNA, 59 bp, Artificial
  Synthetic oligonucleotide
caaaatcgactctaccactggccccgctgcactgttgtcaaaaatttctgacctccagc

SEQ ID NO: 338892 - DNA, 57 bp, Artificial
  Synthetic oligonucleotide
caaaatcgagctaatgtcaccgtccatgtcaaggaattagtgttcggtcccggacaa

SEQ ID NO: 338893 - DNA, 56 bp, Artificial
  Synthetic oligonucleotide
caaaatcgagtgggaatgactcgcgcttgacacgtaacgaggttacgagtaaagtc

SEQ ID NO: 338894 - DNA, 55 bp, Artificial
  Synthetic oligonucleotide
caaaatcgatgaccaaatacaagacctttgggcatacaatgcagaactgctagta

SEQ ID NO: 338895 - DNA, 55 bp, Artificial
  Synthetic oligonucleotide
caaaatctagagtatcaaatagggtacatatgcagtggggttttcggagacaatc

SEQ ID NO: 338896 - DNA, 60 bp, Artificial
  Synthetic oligonucleotide
caaaatctttaggcatggcgattgatgtgtgccacggcgccattgcgtagcacggacaca

SEQ ID NO: 338897 - DNA, 54 bp, Artificial
  Synthetic oligonucleotide
caaaatcttttggttgttcttcccttagaactgctaaggcagattgaaccgaac

SEQ ID NO: 338898 - DNA, 58 bp, Artificial
  Synthetic oligonucleotide
caaaatgaacatccaaattctggtagccatcgcttgtgcactcatcgaaactaaagca

SEQ ID NO: 338899 - DNA, 58 bp, Artificial
  Synthetic oligonucleotide
caaaatgaacgggaattatgactctatacgaggtgaattcagccaagtagaacaacga

SEQ ID NO: 338900 - DNA, 53 bp, Artificial
  Synthetic oligonucleotide
caaaatgaccatgctcagttctcgagcttccgcctacacttctgacattaaga

SEQ ID NO: 338901 - DNA, 60 bp, Artificial
  Synthetic oligonucleotide
caaaatgagatacatggagaaccttctcggagaagacgagaagaagcacttcattgaatg

SEQ ID NO: 338902 - DNA, 56 bp, Artificial
  Synthetic oligonucleotide
caaaatgagtctgggacagttgtaagcacgaagccggattggtatacaccggttaa

SEQ ID NO: 338903 - DNA, 60 bp, Artificial
  Synthetic oligonucleotide
caaaatgattcgtgatgttttgatccctatgcttgggcagtggccttcgttgatggatgt

SEQ ID NO: 338904 - DNA, 50 bp, Artificial
  Synthetic oligonucleotide
caaaatgcaatcagctgtggaattagcataatgagtgtagtagaacaatt

SEQ ID NO: 338905 - DNA, 60 bp, Artificial
  Synthetic oligonucleotide
caaaatgcacagggagagggaactgcggcagattacaagagcactcagtcggcaattgat

SEQ ID NO: 338906 - DNA, 60 bp, Artificial
  Synthetic oligonucleotide
caaaatgcagctacagacgatgacgcaataatagaatatatctactcaaatgaattagac

SEQ ID NO: 338907 - DNA, 56 bp, Artificial
  Synthetic oligonucleotide
caaaatgcctaagcgggatgctccatggcgtttaatggcggggacctcaaaggtta

SEQ ID NO: 338908 - DNA, 55 bp, Artificial
  Synthetic oligonucleotide
caaaatgcgccgagtctccatccccgaacacctcatccagctccataaaaccatc

SEQ ID NO: 338909 - DNA, 60 bp, Artificial
  Synthetic oligonucleotide
caaaatgcggctggattgtcaaacggttggggacatgacatggaggcatttgtcagaaat

SEQ ID NO: 338910 - DNA, 57 bp, Artificial
  Synthetic oligonucleotide
caaaatgcgtctgggcacgagtccgagattttaaacgaaagccctcccatcgctata

SEQ ID NO: 338911 - DNA, 51 bp, Artificial
  Synthetic oligonucleotide
caaaatggacgaccacactatcacatgatactactaactgacgatccggag

SEQ ID NO: 338912 - DNA, 56 bp, Artificial
  Synthetic oligonucleotide
caaaatggaggtcaattacttccgggtcaaaggtcactgctacgtcataggtgacg

SEQ ID NO: 338913 - DNA, 60 bp, Artificial
  Synthetic oligonucleotide
caaaatgggtactaagctggctgcgccgactgtgtagagatgcgacctatctatgcactc

SEQ ID NO: 338914 - DNA, 52 bp, Artificial
  Synthetic oligonucleotide
caaaatggtaattgtaagcgaacaattacgtttcaaccgttcaggattttat

SEQ ID NO: 338915 - DNA, 58 bp, Artificial
  Synthetic oligonucleotide
caaaatgtatacgcaccacactttgttggtgtacaaagtagtcgtcataattatacaa

SEQ ID NO: 338916 - DNA, 56 bp, Artificial
  Synthetic oligonucleotide
caaaatgtcgcttttactatgtggaaactgacatatttggatcataagctaatgcc

SEQ ID NO: 338917 - DNA, 55 bp, Artificial
  Synthetic oligonucleotide
caaaatgtcgtcacaacgtatacatgaaaaccaatatggccctgaatttgtgatg

SEQ ID NO: 338918 - DNA, 60 bp, Artificial
  Synthetic oligonucleotide
caaaatgtgaacaagattacatatgggaaatgccctaagtatgtcaagcagagtactttg

SEQ ID NO: 338919 - DNA, 60 bp, Artificial
  Synthetic oligonucleotide
caaaatgtgccacacttgcagctctgcatgtgtgcgcgttaccacaaatcccaacggcgc

SEQ ID NO: 338920 - DNA, 54 bp, Artificial
  Synthetic oligonucleotide
caaaatgtgggaccctttactgaacgagttcccagactcagtccatgggtttcg

SEQ ID NO: 338921 - DNA, 60 bp, Artificial
  Synthetic oligonucleotide
caaaatgtgggacgcgcaacgatcttgaactgtgacccagaagtcttggcccatcgacga

SEQ ID NO: 338922 - DNA, 55 bp, Artificial
  Synthetic oligonucleotide
caaaatgtgtccagtgctggagagtgtagctctagtagagtcgattgactacaca

SEQ ID NO: 338923 - DNA, 56 bp, Artificial
  Synthetic oligonucleotide
caaaattaactttgacttgtgttacaaagaataaaggcctgcaaatttcatatctc

SEQ ID NO: 338924 - DNA, 59 bp, Artificial
  Synthetic oligonucleotide
caaaattaagtggagtaaatacacgggacagagctatcactggctgcacctgcctaaac

SEQ ID NO: 338925 - DNA, 60 bp, Artificial
  Synthetic oligonucleotide
caaaattaccctatagtgcagaatcttcaagggcaaatggtacaccaggccatgtcagct

SEQ ID NO: 338926 - DNA, 58 bp, Artificial
  Synthetic oligonucleotide
caaaattacgacttcatgtttcaagcaggcatcttatatagtcaaatgacaactggag

SEQ ID NO: 338927 - DNA, 59 bp, Artificial
  Synthetic oligonucleotide
caaaattagacagatagttaattcctggatgagagttggaaagggtatctatgctccac

SEQ ID NO: 338928 - DNA, 57 bp, Artificial
  Synthetic oligonucleotide
caaaattaggcgatgtttactttactctacgatcttggtatgactggagtgttagaa

SEQ ID NO: 338929 - DNA, 57 bp, Artificial
  Synthetic oligonucleotide
caaaattattatacgttaacaacggccattgcgcaaaacgcgcatttagatgatttc

SEQ ID NO: 338930 - DNA, 52 bp, Artificial
  Synthetic oligonucleotide
caaaattccgattaaacgtcacccgcaggcaacgggtgaggttggtacaact

SEQ ID NO: 338931 - DNA, 50 bp, Artificial
  Synthetic oligonucleotide
caaaattcgtaatctaattccttcaaccatgttatcacatagtcaagatt

SEQ ID NO: 338932 - DNA, 55 bp, Artificial
  Synthetic oligonucleotide
caaaattctcacgcttcatggaatactttcaagggtgttacccttgtccgtcgga

SEQ ID NO: 338933 - DNA, 51 bp, Artificial
  Synthetic oligonucleotide
caaaattcttgctaattcatcgcgaacaggtatgagacgtaaacgaagcgt

SEQ ID NO: 338934 - DNA, 51 bp, Artificial
  Synthetic oligonucleotide
caaaattgaaaaaactagtacaaaacaaccttatgctcacctacccatagg

SEQ ID NO: 338935 - DNA, 55 bp, Artificial
  Synthetic oligonucleotide
caaaattgacctccgggtccccgaccatatggaatcaccatgtgggtcacagggt

SEQ ID NO: 338936 - DNA, 53 bp, Artificial
  Synthetic oligonucleotide
caaaattgattgagaagcatagttataggagtgaaccggattggcctagtaac

SEQ ID NO: 338937 - DNA, 55 bp, Artificial
  Synthetic oligonucleotide
caaaattgcgagtgccgaagctttggttcctgaattgagtgcctcggcatatgcg

SEQ ID NO: 338938 - DNA, 55 bp, Artificial
  Synthetic oligonucleotide
caaaattggaagcgctatcgcagtgttcaatctgtatcgcgtcctccaaccgaac

SEQ ID NO: 338939 - DNA, 60 bp, Artificial
  Synthetic oligonucleotide
caaaattggaaggatctagattacctaaatctagaatcctcatcaagagctgacttagct

SEQ ID NO: 338940 - DNA, 54 bp, Artificial
  Synthetic oligonucleotide
caaaattggcctacaaacatcttccattgagggggcctggggttctggtgtagg

SEQ ID NO: 338941 - DNA, 55 bp, Artificial
  Synthetic oligonucleotide
caaaattgggagttacacaataccaccaaaaccaaagcttctgcaatcaagtcaa

SEQ ID NO: 338942 - DNA, 55 bp, Artificial
  Synthetic oligonucleotide
caaaatttcatcaaggtgctctattagtggtagcaattccagaacatcagagggg

SEQ ID NO: 338943 - DNA, 58 bp, Artificial
  Synthetic oligonucleotide
caaaatttgccgcctttgacacttttgactttgtgatgaaccctgctgcgatccaacc

SEQ ID NO: 338944 - DNA, 55 bp, Artificial
  Synthetic oligonucleotide
caaaattttgccagtacagtggtatgaccaaggacgtgtgatgaacgtaaatggc

SEQ ID NO: 338945 - DNA, 60 bp, Artificial
  Synthetic oligonucleotide
caaacaaaaccacatagcccaaggctctgagcccaggacggagctgatacctgacgcctc

SEQ ID NO: 338946 - DNA, 53 bp, Artificial
  Synthetic oligonucleotide
caaacaaaaggcccaacgtccctactataaggactgctaaagttcagggtcca

SEQ ID NO: 338947 - DNA, 58 bp, Artificial
  Synthetic oligonucleotide
caaacaaaagggaaggcatctgagatgggttaggaaagtgtaggacaccagcagtgga

SEQ ID NO: 338948 - DNA, 52 bp, Artificial
  Synthetic oligonucleotide
caaacaaacataaagtaaggaggtgtctccgttagaagtttctccgttagaa

SEQ ID NO: 338949 - DNA, 55 bp, Artificial
  Synthetic oligonucleotide
caaacaaagggttctagggatgtaccgattaaagcgacaagaacgatctattcga

SEQ ID NO: 338950 - DNA, 55 bp, Artificial
  Synthetic oligonucleotide
caaacaaatacgtcgcatggacaatcaacacaagacagatggtacaaatgaggcg

SEQ ID NO: 338951 - DNA, 51 bp, Artificial
  Synthetic oligonucleotide
caaacaaatagtaacataatgatgcagagaagcaactttaaaggccctaga

SEQ ID NO: 338952 - DNA, 58 bp, Artificial
  Synthetic oligonucleotide
caaacaaatggtttatacggagtgatgtctgtagttgtagtccgcgataaatctccaa

SEQ ID NO: 338953 - DNA, 55 bp, Artificial
  Synthetic oligonucleotide
caaacaaattacgctccagttaattggggacctggtgaaacgaatgactcaacta

SEQ ID NO: 338954 - DNA, 57 bp, Artificial
  Synthetic oligonucleotide
caaacaacccacctatcccagtgggagacatctataaaagatggataatcctgggat

SEQ ID NO: 338955 - DNA, 55 bp, Artificial
  Synthetic oligonucleotide
caaacaactggagtggctcaaagttggacatctcaaatctccagaactatgcctc

SEQ ID NO: 338956 - DNA, 59 bp, Artificial
  Synthetic oligonucleotide
caaacaagactctataagaactcgaacacttatgtgtctgtaggaacatcaacactaaa

SEQ ID NO: 338957 - DNA, 55 bp, Artificial
  Synthetic oligonucleotide
caaacaagagatgagatgagtatagaaagttttcttggtagatctggctgtgtgc

SEQ ID NO: 338958 - DNA, 59 bp, Artificial
  Synthetic oligonucleotide
caaacaagcatttaaggtgttaagccagtgtggaggtgtgtgttgtaagacagtgcggc

SEQ ID NO: 338959 - DNA, 51 bp, Artificial
  Synthetic oligonucleotide
caaacaaggattacaaacagttattacctgatttttgtaatactcacagaa

SEQ ID NO: 338960 - DNA, 55 bp, Artificial
  Synthetic oligonucleotide
caaacaaggcccgagaagataacaagatgacgtcgcatcggatccatgaaaacca

SEQ ID NO: 338961 - DNA, 57 bp, Artificial
  Synthetic oligonucleotide
caaacaaggtgaactctgtaatcgagaaaatgaacacccaattcacagctgtaggta

SEQ ID NO: 338962 - DNA, 53 bp, Artificial
  Synthetic oligonucleotide
caaacaaggtgcgccgttcctttccagcatggtaacggattcgcccattaagt

SEQ ID NO: 338963 - DNA, 58 bp, Artificial
  Synthetic oligonucleotide
caaacaaggttatttggattggatggtggcataggaacacaaggagaaaacacagagc

SEQ ID NO: 338964 - DNA, 55 bp, Artificial
  Synthetic oligonucleotide
caaacaagtgtgcatagcatggtcaagctcaagttgtcatgatgggaaagcatgg

SEQ ID NO: 338965 - DNA, 59 bp, Artificial
  Synthetic oligonucleotide
caaacaataagctattggttgttattctaaaatatggtcaatatatggttggcctgagc

SEQ ID NO: 338966 - DNA, 59 bp, Artificial
  Synthetic oligonucleotide
caaacaatcatggttgttcctctgtataaaactgatgtgcagatattcaaaacatctcc

SEQ ID NO: 338967 - DNA, 60 bp, Artificial
  Synthetic oligonucleotide
caaacaattcagatagatggttagctactatactaatcgaaccaaatgtcacgtcacaaa

SEQ ID NO: 338968 - DNA, 58 bp, Artificial
  Synthetic oligonucleotide
caaacacaactgtgcattctgggctgtacgcctcccatgggcgaacactggggtaagg

SEQ ID NO: 338969 - DNA, 60 bp, Artificial
  Synthetic oligonucleotide
caaacacacagtcaacaactttacttgattggagtgtgggatatgtactaatgtatattg

SEQ ID NO: 338970 - DNA, 58 bp, Artificial
  Synthetic oligonucleotide
caaacacaccaaatactgcagatatcatatgttttgtttctggttgcaaagacttctg

SEQ ID NO: 338971 - DNA, 58 bp, Artificial
  Synthetic oligonucleotide
caaacacagaaactggagcaccccaactcaacccgattgatggaccattacctgagga

SEQ ID NO: 338972 - DNA, 57 bp, Artificial
  Synthetic oligonucleotide
caaacacagggaaatcgatgttttgcatgagccttctacggttcttgagagggaagg

SEQ ID NO: 338973 - DNA, 54 bp, Artificial
  Synthetic oligonucleotide
caaacacatcagtcatgaataggtcaactgagaatgtaacaagcatcaggagtc

SEQ ID NO: 338974 - DNA, 56 bp, Artificial
  Synthetic oligonucleotide
caaacaccaaccgtgtccaaattacccagagacatttcgcttacgtgtgtgcacgg

SEQ ID NO: 338975 - DNA, 56 bp, Artificial
  Synthetic oligonucleotide
caaacaccccagggagctataaacagtagtcttcctttccagaatgtacatccagt

SEQ ID NO: 338976 - DNA, 56 bp, Artificial
  Synthetic oligonucleotide
caaacaccctgttactactcagggcttgctgtgggtattaacccatataaagattg

SEQ ID NO: 338977 - DNA, 55 bp, Artificial
  Synthetic oligonucleotide
caaacaccgaaactggggcaccacaactaaacccaattgatggaccactgcccga

SEQ ID NO: 338978 - DNA, 60 bp, Artificial
  Synthetic oligonucleotide
caaacacgagtggacaagctaacacaaggccgacagacctatgactggactctgaataga

SEQ ID NO: 338979 - DNA, 60 bp, Artificial
  Synthetic oligonucleotide
caaacacggtaagtcgcatgcctgaaatcaagtctgctaacgtcagggctagactctcaa

SEQ ID NO: 338980 - DNA, 60 bp, Artificial
  Synthetic oligonucleotide
caaacactaatcgtgttcaaattacgcagaggcatttcgcttacgtgtgtgctcggtctc

SEQ ID NO: 338981 - DNA, 55 bp, Artificial
  Synthetic oligonucleotide
caaacactccaatggaaccgttaaagacagaagtccttacagaaccttaatgagc

SEQ ID NO: 338982 - DNA, 55 bp, Artificial
  Synthetic oligonucleotide
caaacactctaagtataggtaccactatgatgctgactactctagatgggattca

SEQ ID NO: 338983 - DNA, 56 bp, Artificial
  Synthetic oligonucleotide
caaacagaaaccgaaactaacagctctttgcatagtgcgaacatagtatagtggta

SEQ ID NO: 338984 - DNA, 55 bp, Artificial
  Synthetic oligonucleotide
caaacagaaataaatgagcaaaccttcaggatgctgaagttgttacagaggcgtg

SEQ ID NO: 338985 - DNA, 55 bp, Artificial
  Synthetic oligonucleotide
caaacagacttgggttaataaacctcttgatgcgccttcaggccattacaatgtg

SEQ ID NO: 338986 - DNA, 55 bp, Artificial
  Synthetic oligonucleotide
caaacagagtcgtaaaatgaggagatgattagcgttatcagtgagtttctgtgac

SEQ ID NO: 338987 - DNA, 58 bp, Artificial
  Synthetic oligonucleotide
caaacagatctggtggtcaaaccatcaggacaccccgagaaacagcgtcagttgttac

SEQ ID NO: 338988 - DNA, 60 bp, Artificial
  Synthetic oligonucleotide
caaacagattagtccttgcaacagggctcagaaatagccctcaaagagagagcagaagaa

SEQ ID NO: 338989 - DNA, 55 bp, Artificial
  Synthetic oligonucleotide
caaacagattgtgagaatgtggcagagagtaggacaagcaatgtatgcccctccc

SEQ ID NO: 338990 - DNA, 57 bp, Artificial
  Synthetic oligonucleotide
caaacagattgtgttttggaagctatggctttccttgaagagtcccacccagggatc

SEQ ID NO: 338991 - DNA, 58 bp, Artificial
  Synthetic oligonucleotide
caaacagccactttttacatgggctgctggcttaatagaactgcaacgaccctttgac

SEQ ID NO: 338992 - DNA, 60 bp, Artificial
  Synthetic oligonucleotide
caaacagcctgggacactgtgacctttcatgtccctgatgtcattagagtcggtaacgcg

SEQ ID NO: 338993 - DNA, 60 bp, Artificial
  Synthetic oligonucleotide
caaacagcgccgggaatgtgaaagaagtcattgaagagcgacgaaagcaattggtggctg

SEQ ID NO: 338994 - DNA, 57 bp, Artificial
  Synthetic oligonucleotide
caaacagctaggatgattaaatacaattacccaacaaaatcaggattttgtggtgga

SEQ ID NO: 338995 - DNA, 60 bp, Artificial
  Synthetic oligonucleotide
caaacagctgttgcttcaacactgtgcttatatatggttgcagcatatgcctccaatgtg

SEQ ID NO: 338996 - DNA, 54 bp, Artificial
  Synthetic oligonucleotide
caaacaggagggcggtattgtcttattgtcgccacggacaaaggggtctttgga

SEQ ID NO: 338997 - DNA, 60 bp, Artificial
  Synthetic oligonucleotide
caaacaggccatgggttcgcatgaacaatgaaactatattggaaactgggtatgtatgca

SEQ ID NO: 338998 - DNA, 55 bp, Artificial
  Synthetic oligonucleotide
caaacagggaatcaatatgcaacttgtacatggacgacggatgatccatatccaa

SEQ ID NO: 338999 - DNA, 55 bp, Artificial
  Synthetic oligonucleotide
caaacagggcccgaatggatttaagattgacgcgaggcatacacggacattttag

SEQ ID NO: 339000 - DNA, 55 bp, Artificial
  Synthetic oligonucleotide
caaacaggtgggcccaacattgggaataacagaccggcagtcaacattggacaca

SEQ ID NO: 339001 - DNA, 55 bp, Artificial
  Synthetic oligonucleotide
caaacagtacagctggcctaagcgaggtagtggggcagaaagaggatccctcctc

SEQ ID NO: 339002 - DNA, 52 bp, Artificial
  Synthetic oligonucleotide
caaacagtacccagacggtgtccagtgctaccagtaaccagtcaaccggtgg

SEQ ID NO: 339003 - DNA, 55 bp, Artificial
  Synthetic oligonucleotide
caaacagtctataaccaaccatgtgtaacgtgtggccagtggttaaccgtgtgct

SEQ ID NO: 339004 - DNA, 52 bp, Artificial
  Synthetic oligonucleotide
caaacagtgctatgttttggttggtcagggatcgtagaccgtatggtacccc

SEQ ID NO: 339005 - DNA, 55 bp, Artificial
  Synthetic oligonucleotide
caaacagttttcgtactgtcttgttgccttgacaagacataaggtcacattccgc

SEQ ID NO: 339006 - DNA, 55 bp, Artificial
  Synthetic oligonucleotide
caaacatacgcccacaatcaaagctaagcaagaagctacgctaggcaaaggcgag

SEQ ID NO: 339007 - DNA, 55 bp, Artificial
  Synthetic oligonucleotide
caaacatcatagttggctatggtgagtggccctcctactgctcggattctgacgc

SEQ ID NO: 339008 - DNA, 55 bp, Artificial
  Synthetic oligonucleotide
caaacatccagcctctccaaatctcaatcgctgatgattgcgtcaactattcgtg

SEQ ID NO: 339009 - DNA, 55 bp, Artificial
  Synthetic oligonucleotide
caaacatccctaaagttagtgcatatcagtatagagtgtttagggtacggttgcc

SEQ ID NO: 339010 - DNA, 53 bp, Artificial
  Synthetic oligonucleotide
caaacatcgctcttacaaaagaaaaggcagtccagggaaagacgagaaaaaac

SEQ ID NO: 339011 - DNA, 51 bp, Artificial
  Synthetic oligonucleotide
caaacatcgtcaaaagcatggagaaagacctgggagacatccgcctggtca

SEQ ID NO: 339012 - DNA, 56 bp, Artificial
  Synthetic oligonucleotide
caaacatcgttgatttttccgttgacccacaattatattgtgattataacttagta

SEQ ID NO: 339013 - DNA, 55 bp, Artificial
  Synthetic oligonucleotide
caaacatctaaaggaatgtatggcgcgagcctgcaccctagaacgagaacgattg

SEQ ID NO: 339014 - DNA, 55 bp, Artificial
  Synthetic oligonucleotide
caaacatctaggaagcgtaaatatccccaggtaggagaagtattgcatatgtcac

SEQ ID NO: 339015 - DNA, 60 bp, Artificial
  Synthetic oligonucleotide
caaacatgctatataagaagctttctcataccacgtaattactcagctgatgaaattaac

SEQ ID NO: 339016 - DNA, 60 bp, Artificial
  Synthetic oligonucleotide
caaacatggtgtgatcggcatcatcacagctggtggtgagggtcatgtggcatttataga

SEQ ID NO: 339017 - DNA, 55 bp, Artificial
  Synthetic oligonucleotide
caaacatgtacattcctgtagggcaggtcacagactacggtttcttaaacttggg

SEQ ID NO: 339018 - DNA, 60 bp, Artificial
  Synthetic oligonucleotide
caaacatgtcagagcatggatcccaaggcctctgagaaatcaaccctatttgtttaagac

SEQ ID NO: 339019 - DNA, 50 bp, Artificial
  Synthetic oligonucleotide
caaacatgtcccacattgcgtgaactaccatggaaggcatggctcaaact

SEQ ID NO: 339020 - DNA, 52 bp, Artificial
  Synthetic oligonucleotide
caaacatgtggaaactgttttatttccaccgaagggacctgaggctcatggc

SEQ ID NO: 339021 - DNA, 56 bp, Artificial
  Synthetic oligonucleotide
caaacatgtggaccattccacgttccacaccaaccttgggtagatcccaatgggaa

SEQ ID NO: 339022 - DNA, 55 bp, Artificial
  Synthetic oligonucleotide
caaacatgttcataccagtgggtcaggtcactgagtatggtttcttaaacctgag

SEQ ID NO: 339023 - DNA, 50 bp, Artificial
  Synthetic oligonucleotide
caaacatgtttgggccaaccggatcgacgttaaaagtcatgccgttctga

SEQ ID NO: 339024 - DNA, 58 bp, Artificial
  Synthetic oligonucleotide
caaacattacaggactactattaacaagagatggtggggttaacaatacagtcaatga

SEQ ID NO: 339025 - DNA, 57 bp, Artificial
  Synthetic oligonucleotide
caaacattagtccaagttggagtgaagtacaaaacacaaaactactagatcacacag

SEQ ID NO: 339026 - DNA, 55 bp, Artificial
  Synthetic oligonucleotide
caaacattcataccgaacccgaataatatgccacaagtcaaccataaggacgggg

SEQ ID NO: 339027 - DNA, 59 bp, Artificial
  Synthetic oligonucleotide
caaacattgctcgaaaatttatactggagacctcgcgagagattcacgctagacaaaac

SEQ ID NO: 339028 - DNA, 57 bp, Artificial
  Synthetic oligonucleotide
caaaccaaccgcaggaacgctaccatgacgaccctctacccagatctgactgacgcc

SEQ ID NO: 339029 - DNA, 60 bp, Artificial
  Synthetic oligonucleotide
caaaccaacttcgaacactcaataaaaagaatgagctcatagatgagtacgatctagaac

SEQ ID NO: 339030 - DNA, 60 bp, Artificial
  Synthetic oligonucleotide
caaaccaagacttacctgcagacacattcagcaacgatgtgacgtttgaggactggtggg

SEQ ID NO: 339031 - DNA, 58 bp, Artificial
  Synthetic oligonucleotide
caaaccaagagcaaaccagtttgtatgttcaggcatcgggaagggtcacagtctcaac

SEQ ID NO: 339032 - DNA, 59 bp, Artificial
  Synthetic oligonucleotide
caaaccaattcttgaccactgacgatggtgtctcagcacccattctaccaaacttccac

SEQ ID NO: 339033 - DNA, 55 bp, Artificial
  Synthetic oligonucleotide
caaaccacagaggtccacatgcacgaaattgctggtcggttacaagaaggacacg

SEQ ID NO: 339034 - DNA, 55 bp, Artificial
  Synthetic oligonucleotide
caaaccacatgagaaaggtataaaccccaattacctcctggcttggaagcaggtg

SEQ ID NO: 339035 - DNA, 60 bp, Artificial
  Synthetic oligonucleotide
caaaccactattgataggcattcaaacactaaaatctcagagggaaaggctgtatatctc

SEQ ID NO: 339036 - DNA, 55 bp, Artificial
  Synthetic oligonucleotide
caaaccacttcaccaatacaatcttagatgtagggccaataaccatggcaggttt

SEQ ID NO: 339037 - DNA, 60 bp, Artificial
  Synthetic oligonucleotide
caaaccagcactgataatttggggaatacatcactctggatcggctactgagcaaaccaa

SEQ ID NO: 339038 - DNA, 60 bp, Artificial
  Synthetic oligonucleotide
caaaccagcctatatgttcaagcaatagggagagtcacagtctctaccaaaagtagccaa

SEQ ID NO: 339039 - DNA, 56 bp, Artificial
  Synthetic oligonucleotide
caaaccaggaccggtttacaatcaagactatgctgggcccgtttatcatagagccc

SEQ ID NO: 339040 - DNA, 51 bp, Artificial
  Synthetic oligonucleotide
caaaccagtcaacaatgatgggtacgtactaccgagagtattagatatcac

SEQ ID NO: 339041 - DNA, 56 bp, Artificial
  Synthetic oligonucleotide
caaaccagtgtttgagatcgacaaagaatatcacgaaccagacaaattcattgaac

SEQ ID NO: 339042 - DNA, 59 bp, Artificial
  Synthetic oligonucleotide
caaaccagttcctccgggagctatcagcgctgctgaagcaaggtgcagggaccaaaggg

SEQ ID NO: 339043 - DNA, 58 bp, Artificial
  Synthetic oligonucleotide
caaaccatttgaatggatgtcaatccgactctacttttcttgaaggttccagcgcaaa

SEQ ID NO: 339044 - DNA, 53 bp, Artificial
  Synthetic oligonucleotide
caaacccacgtattgttagtcggccgtatataaatagttcgggtgtttatgcc

SEQ ID NO: 339045 - DNA, 55 bp, Artificial
  Synthetic oligonucleotide
caaacccactcgacctgacgtatcagtgaacaggtttttcacgttagacactaaa

SEQ ID NO: 339046 - DNA, 53 bp, Artificial
  Synthetic oligonucleotide
caaaccccacaaggcacatgaggctcaccatgctaatgctaagcttttttatg

SEQ ID NO: 339047 - DNA, 52 bp, Artificial
  Synthetic oligonucleotide
caaaccccagttcgcgtaagggacctccaacgagccctttggcgagcatcta

SEQ ID NO: 339048 - DNA, 53 bp, Artificial
  Synthetic oligonucleotide
caaaccccccaagttaagcagcacactcgaatacaccgcaacccgttacggtc

SEQ ID NO: 339049 - DNA, 57 bp, Artificial
  Synthetic oligonucleotide
caaaccccccgcgacctgtgatgagttccgacctccggctgacattgcttgaattag

SEQ ID NO: 339050 - DNA, 55 bp, Artificial
  Synthetic oligonucleotide
caaacccctacaaggatacactggacttggagggcccggctgatggccgggtgga

SEQ ID NO: 339051 - DNA, 53 bp, Artificial
  Synthetic oligonucleotide
caaacccctcggtaatactcactgggacttactctatgaaaaacccgtataca

SEQ ID NO: 339052 - DNA, 57 bp, Artificial
  Synthetic oligonucleotide
caaacccctcgtgaggctcagaggtcggctgaggcactcttcaggctgcaagctatg

SEQ ID NO: 339053 - DNA, 54 bp, Artificial
  Synthetic oligonucleotide
caaacccgacatgctcaaatttacgaatttaccacgttattgtcgattaattag

SEQ ID NO: 339054 - DNA, 53 bp, Artificial
  Synthetic oligonucleotide
caaacccgcggagaaaccacaagctgaaggaccctacgctggcccccttgaac

SEQ ID NO: 339055 - DNA, 54 bp, Artificial
  Synthetic oligonucleotide
caaaccctcaacgaatttcgtttagaggaaaggagctcacctggaaaggtggca

SEQ ID NO: 339056 - DNA, 60 bp, Artificial
  Synthetic oligonucleotide
caaaccctcgctttcatttcttattgacatattggaagcgcagcgaatagggagtgcagt

SEQ ID NO: 339057 - DNA, 54 bp, Artificial
  Synthetic oligonucleotide
caaaccctgaatatcgtaaagtgttttatgtgttactcgattgggttaaacatc

SEQ ID NO: 339058 - DNA, 54 bp, Artificial
  Synthetic oligonucleotide
caaaccgacaataaactcggagccccacgagcccaccttaaaagatgcgctggt

SEQ ID NO: 339059 - DNA, 59 bp, Artificial
  Synthetic oligonucleotide
caaaccgaggagaagaaattcaaatgcagctatttagtacgcccagaagcagtacacca

SEQ ID NO: 339060 - DNA, 55 bp, Artificial
  Synthetic oligonucleotide
caaaccgcatgatacgctatgagtaccccactagaacaggtcagtgcggtggtgt

SEQ ID NO: 339061 - DNA, 58 bp, Artificial
  Synthetic oligonucleotide
caaaccgccggaaggccccagatgtgccattatacgatttactcctatcaatagataa

SEQ ID NO: 339062 - DNA, 50 bp, Artificial
  Synthetic oligonucleotide
caaaccgctacccctacgtaccgccatcatgaacggttacgaatcactca

SEQ ID NO: 339063 - DNA, 57 bp, Artificial
  Synthetic oligonucleotide
caaaccggagtgtactactgcaattctaagagaaagcactacccagttagtttctca

SEQ ID NO: 339064 - DNA, 59 bp, Artificial
  Synthetic oligonucleotide
caaaccgggattgttgtgccagctgggacacccacgtcatgctcgataatgtgtttcgt

SEQ ID NO: 339065 - DNA, 55 bp, Artificial
  Synthetic oligonucleotide
caaaccggtcagcctacttccacgaatggggtgtacttcatgaataggcaagcac

SEQ ID NO: 339066 - DNA, 53 bp, Artificial
  Synthetic oligonucleotide
caaaccgtcggtggtaacggattgcgtggcaaacgcaaaagttcgggcgtggc

SEQ ID NO: 339067 - DNA, 50 bp, Artificial
  Synthetic oligonucleotide
caaaccgtcttaagtgctttagatataggttacagcaatcagtgccccaa

SEQ ID NO: 339068 - DNA, 59 bp, Artificial
  Synthetic oligonucleotide
caaaccgtggattccgcccagggtagtgagtatgattacgtcatctacacacagacctc

SEQ ID NO: 339069 - DNA, 58 bp, Artificial
  Synthetic oligonucleotide
caaacctcaccacattacgtaggatcctgcccgtggggatgcccaggatttctctgga

SEQ ID NO: 339070 - DNA, 53 bp, Artificial
  Synthetic oligonucleotide
caaacctcactgggtaaagcggattcgtcggtgcagaaatccggcaccgcaac

SEQ ID NO: 339071 - DNA, 53 bp, Artificial
  Synthetic oligonucleotide
caaacctcggcagagatgctagtgttctacaactggctcaagagcacaacgtg

SEQ ID NO: 339072 - DNA, 55 bp, Artificial
  Synthetic oligonucleotide
caaacctctcggagacgatgatcggaggccttccggtcatcattttccgacacgc

SEQ ID NO: 339073 - DNA, 51 bp, Artificial
  Synthetic oligonucleotide
caaacctctgtaaattaaacccttcaataaaccgtttatgcgtaactgtac

SEQ ID NO: 339074 - DNA, 54 bp, Artificial
  Synthetic oligonucleotide
caaaccttacagggaggtacataaagccttactttcctgggtgtgcggtgcagg

SEQ ID NO: 339075 - DNA, 53 bp, Artificial
  Synthetic oligonucleotide
caaaccttatggtttgcgttaaacccgatatcttccttgcgaagtgttaccgc

SEQ ID NO: 339076 - DNA, 59 bp, Artificial
  Synthetic oligonucleotide
caaaccttcagacaggatcagaagaacttagatccttattcaatacagtagcaaccctc

SEQ ID NO: 339077 - DNA, 55 bp, Artificial
  Synthetic oligonucleotide
caaaccttccaattgaagattgtgacactgcctgtcagacagtagctggagcact

SEQ ID NO: 339078 - DNA, 58 bp, Artificial
  Synthetic oligonucleotide
caaaccttcccaaccttagccttatacttctcagcacacttctcaatggctggatttg

SEQ ID NO: 339079 - DNA, 56 bp, Artificial
  Synthetic oligonucleotide
caaaccttctgcgggtgaccttgattggtcactcaacgtcaaggagacgtttactc

SEQ ID NO: 339080 - DNA, 52 bp, Artificial
  Synthetic oligonucleotide
caaacctttcatgaatgtcaacttagcggggaaagtaattggaaaccccagg

SEQ ID NO: 339081 - DNA, 54 bp, Artificial
  Synthetic oligonucleotide
caaacgaaagcgacgacggtcctcgtccaggcaaaagaagcaagggcgaaggtc

SEQ ID NO: 339082 - DNA, 60 bp, Artificial
  Synthetic oligonucleotide
caaacgaacaagagaaaatcccatttcatctgcagttaagcaaacaagtgattcatgcag

SEQ ID NO: 339083 - DNA, 57 bp, Artificial
  Synthetic oligonucleotide
caaacgaaccccatgcaagacgatttcctttcccgctgcgttgtagatcccgtggca

SEQ ID NO: 339084 - DNA, 51 bp, Artificial
  Synthetic oligonucleotide
caaacgaagcgccccatccagggtttaccacaactttccctggtaccaccg

SEQ ID NO: 339085 - DNA, 60 bp, Artificial
  Synthetic oligonucleotide
caaacgaatcgcactccattaactgttttagcgataacgcgcaagtctgcaaatgcgcac

SEQ ID NO: 339086 - DNA, 60 bp, Artificial
  Synthetic oligonucleotide
caaacgaatgatcgaccattgatggatatatacaacggggcttgtgatgatgcgctttac

SEQ ID NO: 339087 - DNA, 55 bp, Artificial
  Synthetic oligonucleotide
caaacgaatgatcggccgctaatggatatatataacggagcttgtgacgatgcgt

SEQ ID NO: 339088 - DNA, 55 bp, Artificial
  Synthetic oligonucleotide
caaacgacgacaacgagaatctgtaattcgaagtccggtgagaatggctgaggag

SEQ ID NO: 339089 - DNA, 55 bp, Artificial
  Synthetic oligonucleotide
caaacgacgtattcacccgacgggacttctaagaagctaggagaccaggcatcgt

SEQ ID NO: 339090 - DNA, 55 bp, Artificial
  Synthetic oligonucleotide
caaacgactcatgatggatgaacctctcaccctaacattggcactcgcatcaccg

SEQ ID NO: 339091 - DNA, 55 bp, Artificial
  Synthetic oligonucleotide
caaacgagcatcgggtcgtatgaacatcaaggtcgagccgcttcccgcacttgct

SEQ ID NO: 339092 - DNA, 55 bp, Artificial
  Synthetic oligonucleotide
caaacgaggaacctatagacgtagactgcttttgccggggcgttgacaacgtctg

SEQ ID NO: 339093 - DNA, 57 bp, Artificial
  Synthetic oligonucleotide
caaacgagtgaatcaaataagtggatagctatgggtacaaattgcactataaaagtt

SEQ ID NO: 339094 - DNA, 52 bp, Artificial
  Synthetic oligonucleotide
caaacgatacttgcgtgcgtggttattatttccgttgtcccaggggtggggg

SEQ ID NO: 339095 - DNA, 60 bp, Artificial
  Synthetic oligonucleotide
caaacgatatgttcataagagaatcattagttgcatgccaactagctatagtgaatacga

SEQ ID NO: 339096 - DNA, 53 bp, Artificial
  Synthetic oligonucleotide
caaacgatgcttgcaaacctgtacacgcacatcataaacacatgcatactcat

SEQ ID NO: 339097 - DNA, 51 bp, Artificial
  Synthetic oligonucleotide
caaacgattaggggataataggaaggttttgactattcaaccgaaagcccc

SEQ ID NO: 339098 - DNA, 54 bp, Artificial
  Synthetic oligonucleotide
caaacgatttcttcagggaatgtgtgaacgatcaacgttattattcatcattat

SEQ ID NO: 339099 - DNA, 57 bp, Artificial
  Synthetic oligonucleotide
caaacgccacgagtcttgtgccatctgcgaaacgggctcaagtcactacgggtggtt

SEQ ID NO: 339100 - DNA, 55 bp, Artificial
  Synthetic oligonucleotide
caaacgctatatcagatttgacgaatagcatgtcagatgcggcttcctcaattag

SEQ ID NO: 339101 - DNA, 59 bp, Artificial
  Synthetic oligonucleotide
caaacgctcgtcaccttaacgcaattagtcactctgtctgctcttttttacaagagcta

SEQ ID NO: 339102 - DNA, 59 bp, Artificial
  Synthetic oligonucleotide
caaacgctcgtcaccttaactcaattagccacgctgtctgcacttttctacaagagtta

SEQ ID NO: 339103 - DNA, 60 bp, Artificial
  Synthetic oligonucleotide
caaacgctctgcttcacgcaggaggaaaagtcgcgccacggggctgagggcgcgatgact

SEQ ID NO: 339104 - DNA, 57 bp, Artificial
  Synthetic oligonucleotide
caaacgctgcaataggttcgccaggtcctggtaaagttgatggtttactaaatgaca

SEQ ID NO: 339105 - DNA, 56 bp, Artificial
  Synthetic oligonucleotide
caaacgctggctggtgtaacggttagtgtcggaggtgttgacatgagggcggggcg

SEQ ID NO: 339106 - DNA, 60 bp, Artificial
  Synthetic oligonucleotide
caaacgcttatcaaaaatcacaaacgaatcccgtagcagattgagaaagatctgcgccca

SEQ ID NO: 339107 - DNA, 50 bp, Artificial
  Synthetic oligonucleotide
caaacgcttggaagaactcttatacaaactattcttaagtacaggggcca

SEQ ID NO: 339108 - DNA, 50 bp, Artificial
  Synthetic oligonucleotide
caaacggacccggggggttgtttctatccgtacccatacatttagaacca

SEQ ID NO: 339109 - DNA, 52 bp, Artificial
  Synthetic oligonucleotide
caaacggccgagtatacagcccgctacgatcgtaatgggaaaagaacgattg

SEQ ID NO: 339110 - DNA, 60 bp, Artificial
  Synthetic oligonucleotide
caaacggcttctgacatcatcacaaatacacgctcaatttcgacaaccgttcagctaaaa

SEQ ID NO: 339111 - DNA, 60 bp, Artificial
  Synthetic oligonucleotide
caaacgggacgcccgaggattagcgtatgattatcgcaatcaagcaagggcggcagccac

SEQ ID NO: 339112 - DNA, 55 bp, Artificial
  Synthetic oligonucleotide
caaacgggagattgctctctggcgtgcaatccccagtaaacccggttttggactg

SEQ ID NO: 339113 - DNA, 55 bp, Artificial
  Synthetic oligonucleotide
caaacgggataaaaggttgacagtccttgattggacacaacaaattcatattgct

SEQ ID NO: 339114 - DNA, 57 bp, Artificial
  Synthetic oligonucleotide
caaacgggcgacaaaactgagagacagcatatcctggtttgttcaacccgattcaaa

SEQ ID NO: 339115 - DNA, 55 bp, Artificial
  Synthetic oligonucleotide
caaacgggcttagggccggtggtaggggtaattatcatactggcaatgatggggc

SEQ ID NO: 339116 - DNA, 59 bp, Artificial
  Synthetic oligonucleotide
caaacgggtcctatctcaatgaaactcgtttctcagacgacatagaacaacaagctgac

SEQ ID NO: 339117 - DNA, 55 bp, Artificial
  Synthetic oligonucleotide
caaacggtccccgtggaatacttagcctcacactatattgtcaacaagtttagac

SEQ ID NO: 339118 - DNA, 60 bp, Artificial
  Synthetic oligonucleotide
caaacggtctacaaggcgcaagcgtgcatctgctacacaactttaccaaacatgcaaggc

SEQ ID NO: 339119 - DNA, 56 bp, Artificial
  Synthetic oligonucleotide
caaacgtacgccctaacagagcgttcagatacgtttatcggccctagcaacaccta

SEQ ID NO: 339120 - DNA, 50 bp, Artificial
  Synthetic oligonucleotide
caaacgtacttacacgatgacatgaaggacgattatgaaaacgcttttct

SEQ ID NO: 339121 - DNA, 59 bp, Artificial
  Synthetic oligonucleotide
caaacgtagcgatgaagattctcatcgaggagacctgcgcgctcacaaactaccccccc

SEQ ID NO: 339122 - DNA, 57 bp, Artificial
  Synthetic oligonucleotide
caaacgtagtctgaaacaggtgaaggccctatttggggatctgaatccccatctcga

SEQ ID NO: 339123 - DNA, 51 bp, Artificial
  Synthetic oligonucleotide
caaacgtatccgtggcccacgaccataccggacagagatactactacctca

SEQ ID NO: 339124 - DNA, 55 bp, Artificial
  Synthetic oligonucleotide
caaacgtatggatgattggtcgggatacttagaagtggctgtttgggaacgaggt

SEQ ID NO: 339125 - DNA, 58 bp, Artificial
  Synthetic oligonucleotide
caaacgtcttaagtactacaggagctcaatcaatcgccttagtaggtgagagagcttt

SEQ ID NO: 339126 - DNA, 55 bp, Artificial
  Synthetic oligonucleotide
caaacgtgagaccaatgtaggtaaacgcactcacaaagttattcaagccgccaga

SEQ ID NO: 339127 - DNA, 50 bp, Artificial
  Synthetic oligonucleotide
caaacgtgagctgaggttggagcaccaggtagcggcgccagtacgagcgt

SEQ ID NO: 339128 - DNA, 51 bp, Artificial
  Synthetic oligonucleotide
caaacgtgagtttgtgctaagagatcatttttggattgcgcccctatcccg

SEQ ID NO: 339129 - DNA, 55 bp, Artificial
  Synthetic oligonucleotide
caaacgtggagtctcgatacatgatagtcagtatattcctaatcccctcttccaa

SEQ ID NO: 339130 - DNA, 55 bp, Artificial
  Synthetic oligonucleotide
caaacgtgggatcaatgaccgaaacttctggaggggtccaaatggacgacgaaca

SEQ ID NO: 339131 - DNA, 51 bp, Artificial
  Synthetic oligonucleotide
caaacgtgtccacaagtcttcttggttcgtgtaccgttaagcaggcgcgaa

SEQ ID NO: 339132 - DNA, 58 bp, Artificial
  Synthetic oligonucleotide
caaacgtgttggtgatggtcttgccaatgttgatttcaggttacgccccttcaatgaa

SEQ ID NO: 339133 - DNA, 55 bp, Artificial
  Synthetic oligonucleotide
caaacgttcgcgacagatattagaaattatcttgcgagtggtgttttatcgaacc

SEQ ID NO: 339134 - DNA, 57 bp, Artificial
  Synthetic oligonucleotide
caaacgttcggaccttctgggactcttgagaatttggaaggaatgtgcaccctgaca

SEQ ID NO: 339135 - DNA, 55 bp, Artificial
  Synthetic oligonucleotide
caaacgttcgggttgtatgactgcgaaaagtgcaagtggttattgttgccagccg

SEQ ID NO: 339136 - DNA, 55 bp, Artificial
  Synthetic oligonucleotide
caaacgtttcagaaacctgaagggggaggcactttgcgggcacaatactcaacta

SEQ ID NO: 339137 - DNA, 54 bp, Artificial
  Synthetic oligonucleotide
caaactaacacaaggccgacaaacttacgattggaccttgaataggaatcaacc

SEQ ID NO: 339138 - DNA, 55 bp, Artificial
  Synthetic oligonucleotide
caaactaatttcgttgtacccaccggggcacccaccagtgcttacatcatagccc

SEQ ID NO: 339139 - DNA, 55 bp, Artificial
  Synthetic oligonucleotide
caaactacacaactgcagatgtcgcagctgcaatagcatttaactctccttggaa

SEQ ID NO: 339140 - DNA, 60 bp, Artificial
  Synthetic oligonucleotide
caaactacattgactacttgtgcaactcccatcacctgtacagggataagcattactttg

SEQ ID NO: 339141 - DNA, 57 bp, Artificial
  Synthetic oligonucleotide
caaactactacagtacacaagacagtgaactatttctactagaaaacttagtgaaca

SEQ ID NO: 339142 - DNA, 55 bp, Artificial
  Synthetic oligonucleotide
caaactagattctcaggacttcttattgtgaaaacagttctcgagttcatcttgc

SEQ ID NO: 339143 - DNA, 60 bp, Artificial
  Synthetic oligonucleotide
caaactagccatacccaatcgaggagtaaacgcctggctcacagctagtgagtacgcacg

SEQ ID NO: 339144 - DNA, 54 bp, Artificial
  Synthetic oligonucleotide
caaactagccgtgcgctttaaggcgttaggtgtagccgttgtcaggaaaattac

SEQ ID NO: 339145 - DNA, 55 bp, Artificial
  Synthetic oligonucleotide
caaactaggaatcccgctctactagctcaaccttcccgcgcgatagtgtttggtt

SEQ ID NO: 339146 - DNA, 52 bp, Artificial
  Synthetic oligonucleotide
caaactagtaagtaatggaatcaggagagtgctgtttctagatagaatagat

SEQ ID NO: 339147 - DNA, 59 bp, Artificial
  Synthetic oligonucleotide
caaactataatgccaagcctgctttgggaacactgaacagggtggttgaggacaccaca

SEQ ID NO: 339148 - DNA, 57 bp, Artificial
  Synthetic oligonucleotide
caaactatactagggcgctgtggagggtggccgcagaggagtacgtggaggttacgc

SEQ ID NO: 339149 - DNA, 56 bp, Artificial
  Synthetic oligonucleotide
caaactatgcggatctaacattacatgtccaaaaattgtgactgtttgggctgatc

SEQ ID NO: 339150 - DNA, 55 bp, Artificial
  Synthetic oligonucleotide
caaactatggtaaactggttgtgtgaaaacagagtgtttacagaggataagtgga

SEQ ID NO: 339151 - DNA, 50 bp, Artificial
  Synthetic oligonucleotide
caaactatgtcattttcaagagtgaagcatggttttggagaattgtgcga

SEQ ID NO: 339152 - DNA, 55 bp, Artificial
  Synthetic oligonucleotide
caaactcaacaactgtgttatcccatgctctaccttttatctgtgatcgtgaggc

SEQ ID NO: 339153 - DNA, 50 bp, Artificial
  Synthetic oligonucleotide
caaactcaagccacttaacctactacatctgcttgcgtcgtgtgactgga

SEQ ID NO: 339154 - DNA, 57 bp, Artificial
  Synthetic oligonucleotide
caaactcaccgcttcagcgcctggttcgaatcagagcaagtctgctctcgttcgttc

SEQ ID NO: 339155 - DNA, 55 bp, Artificial
  Synthetic oligonucleotide
caaactcagcagagaagactgctccatcaacttcagcagagaaaactgctccaac

SEQ ID NO: 339156 - DNA, 52 bp, Artificial
  Synthetic oligonucleotide
caaactcagttccaacctggtgattctacctggtcaagatctccaatatgtt

SEQ ID NO: 339157 - DNA, 55 bp, Artificial
  Synthetic oligonucleotide
caaactccaacctacgagatcgtagaattgtgttttaaacacaacatattaataa

SEQ ID NO: 339158 - DNA, 60 bp, Artificial
  Synthetic oligonucleotide
caaactccaattatcaattcagtcactgttaggcaagatcttgagagacaacttggagat

SEQ ID NO: 339159 - DNA, 59 bp, Artificial
  Synthetic oligonucleotide
caaactccacaattgtattgtcccaagctctacctttgatttgtgaccgtgaagctatg

SEQ ID NO: 339160 - DNA, 55 bp, Artificial
  Synthetic oligonucleotide
caaactcgacaatgttccgtacgaaaccattcacaaacgcgcaatggggacgagg

SEQ ID NO: 339161 - DNA, 58 bp, Artificial
  Synthetic oligonucleotide
caaactcgatgaggggcgctaccgcctcataatgagcgtttccttggtggaccaactg

SEQ ID NO: 339162 - DNA, 52 bp, Artificial
  Synthetic oligonucleotide
caaactcggtaaatcggttcttgtgttagtttagaacacaatcccgagagca

SEQ ID NO: 339163 - DNA, 55 bp, Artificial
  Synthetic oligonucleotide
caaactctaactcaatgagtgaaaatgtggaacaacacaaccctattaatgcagg

SEQ ID NO: 339164 - DNA, 52 bp, Artificial
  Synthetic oligonucleotide
caaactctcgctatgttttggtgactggtgtacaatatatactagtaccctt

SEQ ID NO: 339165 - DNA, 60 bp, Artificial
  Synthetic oligonucleotide
caaactcttgcccagtgccagaattctgtgtttgtcacctgcgatgtttgtgctacgcca

SEQ ID NO: 339166 - DNA, 59 bp, Artificial
  Synthetic oligonucleotide
caaactgaacaaatacgcattgtctgtgttttgtgtaaacgtgttgcctggacacaaca

SEQ ID NO: 339167 - DNA, 56 bp, Artificial
  Synthetic oligonucleotide
caaactgattcttgatcgtatccttaaaggtaagcttcggatccgactggaaattg

SEQ ID NO: 339168 - DNA, 59 bp, Artificial
  Synthetic oligonucleotide
caaactgcccaagatgtactttcttagtcggatagtatgtactcactcaatacaaaggc

SEQ ID NO: 339169 - DNA, 60 bp, Artificial
  Synthetic oligonucleotide
caaactgcgcaaggagttattattgcgtaccgcgatatgcaattggaaagagacgaaatg

SEQ ID NO: 339170 - DNA, 57 bp, Artificial
  Synthetic oligonucleotide
caaactgctctttcaatatcaccacaagcataagagatagggttcagcgagaatatg

SEQ ID NO: 339171 - DNA, 55 bp, Artificial
  Synthetic oligonucleotide
caaactgcttcaaaccagccaagtatacagcctaatcagaccaaacgagaatccc

SEQ ID NO: 339172 - DNA, 51 bp, Artificial
  Synthetic oligonucleotide
caaactgcttcggagcctattgcgaccggacctccagagttgggggtgacc

SEQ ID NO: 339173 - DNA, 50 bp, Artificial
  Synthetic oligonucleotide
caaactgcttgggacgacataccgtgggtgccatcctcatcgtgatacga

SEQ ID NO: 339174 - DNA, 60 bp, Artificial
  Synthetic oligonucleotide
caaactggagcccttatcaccgcgtgccaatgaggtacttcccaagcttcatgacgctgg

SEQ ID NO: 339175 - DNA, 60 bp, Artificial
  Synthetic oligonucleotide
caaactggcaaatgttgtacgaaagatgatgaccaattcgcaagatacagagctttcctt

SEQ ID NO: 339176 - DNA, 60 bp, Artificial
  Synthetic oligonucleotide
caaactggcaaatgttgtgagaaaaatgatgactaattcacaagacacagagctctcttt

SEQ ID NO: 339177 - DNA, 58 bp, Artificial
  Synthetic oligonucleotide
caaactggcagttggtctaagaaatgtacctgctagatcaagtagaggactatttggg

SEQ ID NO: 339178 - DNA, 56 bp, Artificial
  Synthetic oligonucleotide
caaactggtacttgtggtctgcggctgtgagctttccacactcccaatcggcgaaa

SEQ ID NO: 339179 - DNA, 60 bp, Artificial
  Synthetic oligonucleotide
caaactggttgaatgctattggacagtgtgggctcgcattgtcagctggggtgccagtgt

SEQ ID NO: 339180 - DNA, 60 bp, Artificial
  Synthetic oligonucleotide
caaactgtgcagcagctcagtgataagttaacagttcctgtagaggatctgttattaccc

SEQ ID NO: 339181 - DNA, 58 bp, Artificial
  Synthetic oligonucleotide
caaactgtgggcaacgttgatgtggtactgacaaagagggtggagttcccgatcctga

SEQ ID NO: 339182 - DNA, 55 bp, Artificial
  Synthetic oligonucleotide
caaacttagtatccatgcacttcataatggtgcatgctcttgaagatgttggttc

SEQ ID NO: 339183 - DNA, 60 bp, Artificial
  Synthetic oligonucleotide
caaacttatacgcatccttctgacggaatggattatagaaagtatgttgtagatatgaaa

SEQ ID NO: 339184 - DNA, 59 bp, Artificial
  Synthetic oligonucleotide
caaacttatggaacgaagtacaaaacacaacagcactgtcaccaaaaggcacaaatgca

SEQ ID NO: 339185 - DNA, 55 bp, Artificial
  Synthetic oligonucleotide
caaacttcagatccctaattccaatgtcagaaggagtatatacaaaatcggagaa

SEQ ID NO: 339186 - DNA, 51 bp, Artificial
  Synthetic oligonucleotide
caaacttctcgttaagctcggagggtctaccccttttgtgactgacgtcga

SEQ ID NO: 339187 - DNA, 60 bp, Artificial
  Synthetic oligonucleotide
caaacttgatgcaatttttcaaggaccgtatgaaacatgcccctcctatgagtcatggct

SEQ ID NO: 339188 - DNA, 56 bp, Artificial
  Synthetic oligonucleotide
caaacttggtacaatgaaacctaacggatataatttatgtcttggtggcgataata

SEQ ID NO: 339189 - DNA, 55 bp, Artificial
  Synthetic oligonucleotide
caaacttggtcgctggtctttaatcgttgtagctcagggaagctaatccctcgcg

SEQ ID NO: 339190 - DNA, 60 bp, Artificial
  Synthetic oligonucleotide
caaacttgtaagatcactttcatctctcttgtccctcctcatcattctctgaacactagc

SEQ ID NO: 339191 - DNA, 55 bp, Artificial
  Synthetic oligonucleotide
caaacttgtgacgtggttgtcacagttgggccactagagttggtttatccagctc

SEQ ID NO: 339192 - DNA, 60 bp, Artificial
  Synthetic oligonucleotide
caaactttaactggggactcagagcactatgtatactcagagataacatgcacctaggaa

SEQ ID NO: 339193 - DNA, 57 bp, Artificial
  Synthetic oligonucleotide
caaactttaactggggactcagagcactttgtatacttagagataacatgactttgg

SEQ ID NO: 339194 - DNA, 55 bp, Artificial
  Synthetic oligonucleotide
caaactttacctcccatacaagatttcggactgtgtgatgtgcaaactcccggtc

SEQ ID NO: 339195 - DNA, 54 bp, Artificial
  Synthetic oligonucleotide
caaactttccatgtaatagattcatatggctccatgactacaggatatcacatc

SEQ ID NO: 339196 - DNA, 55 bp, Artificial
  Synthetic oligonucleotide
caaactttgttcagatgctcatataatggttgctgtcactcgattcaacagaggc

SEQ ID NO: 339197 - DNA, 54 bp, Artificial
  Synthetic oligonucleotide
caaacttttccaatagcttctttagtatcatatttcttctggtctattcccagc

SEQ ID NO: 339198 - DNA, 53 bp, Artificial
  Synthetic oligonucleotide
caaacttttgtatatgggtaagtaacaacctgaacaaaaatcaagaaggacta

SEQ ID NO: 339199 - DNA, 57 bp, Artificial
  Synthetic oligonucleotide
caaagaaaagggggctcgtcaggaagacatgaaaagagtgagaactgttgattctta

SEQ ID NO: 339200 - DNA, 53 bp, Artificial
  Synthetic oligonucleotide
caaagaaagaaatttatgcaaaattaagtataatagggcctcatagtacagga

SEQ ID NO: 339201 - DNA, 53 bp, Artificial
  Synthetic oligonucleotide
caaagaaagccccgaagaatgatgctacccagttaaaaggagccttaacccag

SEQ ID NO: 339202 - DNA, 56 bp, Artificial
  Synthetic oligonucleotide
caaagaaagctgcaggatggttttatagacatcactatgaaagccagcatccaaag

SEQ ID NO: 339203 - DNA, 51 bp, Artificial
  Synthetic oligonucleotide
caaagaaatgcgagctatttgggtgggattgcaagctggaaacgtggatcc

SEQ ID NO: 339204 - DNA, 55 bp, Artificial
  Synthetic oligonucleotide
caaagaaatgtgcgctgcatggtccagtagcagctgcttcgatgggaaagaatgg

SEQ ID NO: 339205 - DNA, 56 bp, Artificial
  Synthetic oligonucleotide
caaagaaattgaaggccaaaggatacaactcgggctactactacagcggagaggac

SEQ ID NO: 339206 - DNA, 60 bp, Artificial
  Synthetic oligonucleotide
caaagaacatagagaggttgaaatcaatgtgcttctcccccaagttgcagttaatctctc

SEQ ID NO: 339207 - DNA, 55 bp, Artificial
  Synthetic oligonucleotide
caaagaacatggacccccccactccttatatatgttctaagtttctattgacgga

SEQ ID NO: 339208 - DNA, 55 bp, Artificial
  Synthetic oligonucleotide
caaagaacccaggaaactctttgcctcactccaactggctaagcacattggcaag

SEQ ID NO: 339209 - DNA, 53 bp, Artificial
  Synthetic oligonucleotide
caaagaaccggactttcactattttatccaactcgaacaaggtgaggtgttct

SEQ ID NO: 339210 - DNA, 54 bp, Artificial
  Synthetic oligonucleotide
caaagaacctctaacacaacctagtaccgggtcttcctctactgacctcagccc

SEQ ID NO: 339211 - DNA, 55 bp, Artificial
  Synthetic oligonucleotide
caaagaacgtctcacgtaccaagagggtatgtacgccagttcctatcatcggaac

SEQ ID NO: 339212 - DNA, 55 bp, Artificial
  Synthetic oligonucleotide
caaagaactgctactagggaattggcaagcctgttgagtagactaaggcagaata

SEQ ID NO: 339213 - DNA, 60 bp, Artificial
  Synthetic oligonucleotide
caaagaagatactgagtgcgatgatatttgactggtttgatacaagatatatgagagaaa

SEQ ID NO: 339214 - DNA, 57 bp, Artificial
  Synthetic oligonucleotide
caaagaagtcaacaggggatgttccacgcttaccctgtattggtaagtagcagacaa

SEQ ID NO: 339215 - DNA, 57 bp, Artificial
  Synthetic oligonucleotide
caaagaagtcctgttcttcatagtacttccgtgttaaatttcgcaacaacatctcaa

SEQ ID NO: 339216 - DNA, 55 bp, Artificial
  Synthetic oligonucleotide
caaagaagttctccttagagtgtgtgttgtttacccaacacactgtccctatggg

SEQ ID NO: 339217 - DNA, 58 bp, Artificial
  Synthetic oligonucleotide
caaagaatagactacaagatagtttcctcgtgtggtggctgcggaattaagcttcgaa

SEQ ID NO: 339218 - DNA, 54 bp, Artificial
  Synthetic oligonucleotide
caaagaatgggtgcccaattgagtaagaacactgctggatctcacactactggg

SEQ ID NO: 339219 - DNA, 60 bp, Artificial
  Synthetic oligonucleotide
caaagaatggtgcctcatgatgctagatccacaaccaaatttcatgacatgcaatagcat

SEQ ID NO: 339220 - DNA, 58 bp, Artificial
  Synthetic oligonucleotide
caaagaattcccagcgcatgtgggtactatactagaggaagttaagtattgcttaatc

SEQ ID NO: 339221 - DNA, 55 bp, Artificial
  Synthetic oligonucleotide
caaagaattggtagggcttttctcaacatacctacaagaataagacaaggcttgg

SEQ ID NO: 339222 - DNA, 54 bp, Artificial
  Synthetic oligonucleotide
caaagacaatggaataagaattgggtcgaggggtcatgtttttgttataaggga

SEQ ID NO: 339223 - DNA, 59 bp, Artificial
  Synthetic oligonucleotide
caaagacatacatatgtagtagagattgcactataaccatagataaagaggaagctcag

SEQ ID NO: 339224 - DNA, 58 bp, Artificial
  Synthetic oligonucleotide
caaagacatggtcctcagtgtcttcaagccaagtattgagagtaaggctatccagtgg

SEQ ID NO: 339225 - DNA, 50 bp, Artificial
  Synthetic oligonucleotide
caaagaccaaatgcatactaacgtcattgcgctcgaagattgtgaccctt

SEQ ID NO: 339226 - DNA, 56 bp, Artificial
  Synthetic oligonucleotide
caaagaccatcccaggacaaaagcaaacgtctatgggaatgctcaacattgactgc

SEQ ID NO: 339227 - DNA, 58 bp, Artificial
  Synthetic oligonucleotide
caaagaccgtttgtgtaacactagatgaaaatgttatatactcctcgctctaattggc

SEQ ID NO: 339228 - DNA, 60 bp, Artificial
  Synthetic oligonucleotide
caaagacctagcgataggtgtgctgaacaagaggacgtcggttcttgacaattatagtga

SEQ ID NO: 339229 - DNA, 52 bp, Artificial
  Synthetic oligonucleotide
caaagacgaggaaggaaatttcgttggcgataagcccgttatttctactaat

SEQ ID NO: 339230 - DNA, 60 bp, Artificial
  Synthetic oligonucleotide
caaagacgcttactgtttctgtcatggacctgtctcaaatgtattctcctgtctttgagt

SEQ ID NO: 339231 - DNA, 58 bp, Artificial
  Synthetic oligonucleotide
caaagacgttcttggtccatcgtgagtggttcatggacctcaacctcccttggagcag

SEQ ID NO: 339232 - DNA, 55 bp, Artificial
  Synthetic oligonucleotide
caaagactcaacaacctgagccggtgaacatttcgacaaacaagatagaaaatcc

SEQ ID NO: 339233 - DNA, 53 bp, Artificial
  Synthetic oligonucleotide
caaagactgtttgtttaaggactgggaggaatcaggggaggagattaggttaa

SEQ ID NO: 339234 - DNA, 54 bp, Artificial
  Synthetic oligonucleotide
caaagacttagaactgcatttaggcgaaggggaggattaacaaataggcgttta

SEQ ID NO: 339235 - DNA, 56 bp, Artificial
  Synthetic oligonucleotide
caaagacttcggctgtgccgggttacaattattgctaatacattcgtgaaccgtag

SEQ ID NO: 339236 - DNA, 58 bp, Artificial
  Synthetic oligonucleotide
caaagactttaaggtacttgatgctttggataaggctttagtggatagatatcgatcc

SEQ ID NO: 339237 - DNA, 56 bp, Artificial
  Synthetic oligonucleotide
caaagagaaagtgcgacgagctcgccgcaaagctggtcgcattgggcatcaatgcc

SEQ ID NO: 339238 - DNA, 53 bp, Artificial
  Synthetic oligonucleotide
caaagagaaccgattcattgaaattggagtgacacggagggaatgtcatacat

SEQ ID NO: 339239 - DNA, 59 bp, Artificial
  Synthetic oligonucleotide
caaagagaaccgatttattgagattggcgtgacacggagggaagttcacacatactatc

SEQ ID NO: 339240 - DNA, 55 bp, Artificial
  Synthetic oligonucleotide
caaagagaatacgttttagatggacagacggtgcagctacaagtctcgaacgact

SEQ ID NO: 339241 - DNA, 59 bp, Artificial
  Synthetic oligonucleotide
caaagagaataggttcattgaaattggagtgacacggagagaagttcacacgtactatc

SEQ ID NO: 339242 - DNA, 56 bp, Artificial
  Synthetic oligonucleotide
caaagagaattggagcagctagttaaccaaccaggccgtcctgtttctaacaggcg

SEQ ID NO: 339243 - DNA, 60 bp, Artificial
  Synthetic oligonucleotide
caaagagagacctggacagtgaatgatatacagaagttagtaggagtattaaattgggca

SEQ ID NO: 339244 - DNA, 60 bp, Artificial
  Synthetic oligonucleotide
caaagagattgaatcggtgaacagtgcagtagtaatgcctgcgcatggccctgccaaaag

SEQ ID NO: 339245 - DNA, 58 bp, Artificial
  Synthetic oligonucleotide
caaagagcaagctactacccttttagattccttctctggagattctgagaatccctgg

SEQ ID NO: 339246 - DNA, 60 bp, Artificial
  Synthetic oligonucleotide
caaagagcaatgatggaccaggtacgagaaagcaggaatcctgggaatgctgaaattgaa

SEQ ID NO: 339247 - DNA, 58 bp, Artificial
  Synthetic oligonucleotide
caaagagcactcctcatggtcccaatccccaagcccattgatatagacatagcaatga

SEQ ID NO: 339248 - DNA, 55 bp, Artificial
  Synthetic oligonucleotide
caaagagctttacaacgcgctaaatcaatggctcaacgatggcgagagcattctg

SEQ ID NO: 339249 - DNA, 60 bp, Artificial
  Synthetic oligonucleotide
caaagaggagcagaaacatcatgggaccaggcaacagacatggagtgggaatcagaaatc

SEQ ID NO: 339250 - DNA, 58 bp, Artificial
  Synthetic oligonucleotide
caaagaggattcacgctcaggttatgagactttcagagtcgttggtggttggaccacg

SEQ ID NO: 339251 - DNA, 60 bp, Artificial
  Synthetic oligonucleotide
caaagaggcctcatgcattcaatttggatcattgccctcctctcttgcggaagccagccg

SEQ ID NO: 339252 - DNA, 55 bp, Artificial
  Synthetic oligonucleotide
caaagagggttgctagatatttcgcgagcaaaacaacacatgttcacccgtcaag

SEQ ID NO: 339253 - DNA, 58 bp, Artificial
  Synthetic oligonucleotide
caaagaggtcacgcagaatgacggtacgacgacgattgccaataaccttaccagcacg

SEQ ID NO: 339254 - DNA, 55 bp, Artificial
  Synthetic oligonucleotide
caaagagtagcatagttggatggtctgctataagggagagaatgagacgagcccc

SEQ ID NO: 339255 - DNA, 60 bp, Artificial
  Synthetic oligonucleotide
caaagagtaggtccagctacttcagacacaggagcctggatggttgcagttaaaccagaa

SEQ ID NO: 339256 - DNA, 60 bp, Artificial
  Synthetic oligonucleotide
caaagagtatatcaggggtgctcaagcttggtatgtcagggaagtaatcagaaagactga

SEQ ID NO: 339257 - DNA, 58 bp, Artificial
  Synthetic oligonucleotide
caaagagtcctccggcccctgaatgcggctaatcctaaccacggagcaagtgcccaca

SEQ ID NO: 339258 - DNA, 55 bp, Artificial
  Synthetic oligonucleotide
caaagagtggctctaaacctcgatcacctaatcatgtacacaccagagcagacgg

SEQ ID NO: 339259 - DNA, 56 bp, Artificial
  Synthetic oligonucleotide
caaagagttactggaccttaaagtcattaagcccagtaaaagccctcacatggcac

SEQ ID NO: 339260 - DNA, 59 bp, Artificial
  Synthetic oligonucleotide
caaagagttgcacaagctctaaagatggtaacttcttgtatccatgttgttgtgttaca

SEQ ID NO: 339261 - DNA, 53 bp, Artificial
  Synthetic oligonucleotide
caaagatacactagaccgtttagaggtagctaacgataaactactagagactt

SEQ ID NO: 339262 - DNA, 58 bp, Artificial
  Synthetic oligonucleotide
caaagatagacaactggaaggagtggagcgtggctgacagcacggctgtggttgggca

SEQ ID NO: 339263 - DNA, 60 bp, Artificial
  Synthetic oligonucleotide
caaagatgacaggtggccatacttacatagcagggtagtggtctttacatttcacaatga

SEQ ID NO: 339264 - DNA, 55 bp, Artificial
  Synthetic oligonucleotide
caaagatgattcatcctatgaggaagtcaatggaatacgtaagccaagacacctg

SEQ ID NO: 339265 - DNA, 60 bp, Artificial
  Synthetic oligonucleotide
caaagatggagagggcagctgcaatccagtgactgttgatggagcaaacggagtaaaagg

SEQ ID NO: 339266 - DNA, 60 bp, Artificial
  Synthetic oligonucleotide
caaagatgtcagcgatctaaaacagtatgacagtgatgaaccagagcctagatcactagc

SEQ ID NO: 339267 - DNA, 60 bp, Artificial
  Synthetic oligonucleotide
caaagatgtcagcgatctgaaacagtatgatagtgatgagcccgagtctaggtcactagc

SEQ ID NO: 339268 - DNA, 60 bp, Artificial
  Synthetic oligonucleotide
caaagattgatgagcttaagcgacaactagcagacagaattgcaacagggaaaaatcttg

SEQ ID NO: 339269 - DNA, 60 bp, Artificial
  Synthetic oligonucleotide
caaagattggatactgtggatttcattcgccatatcatgcttcttaatttgcgttgttct

SEQ ID NO: 339270 - DNA, 60 bp, Artificial
  Synthetic oligonucleotide
caaagattggattctatggatttcctttgccatatcatgctttttgctgtgtgttgttct

SEQ ID NO: 339271 - DNA, 55 bp, Artificial
  Synthetic oligonucleotide
caaagattgtatcttacttctgaaggctcagcgaggtagatccacggaggagctg

SEQ ID NO: 339272 - DNA, 60 bp, Artificial
  Synthetic oligonucleotide
caaagatttggcacacacttcgcccagtacagaaatgtgtgggatgtggactactcggcc

SEQ ID NO: 339273 - DNA, 55 bp, Artificial
  Synthetic oligonucleotide
caaagcaaaacaagacttgaagctatgctggaaagaggtccagacacgttcagaa

SEQ ID NO: 339274 - DNA, 60 bp, Artificial
  Synthetic oligonucleotide
caaagcaacgggtggctcaagaagttcacagagatgactaacgcctgcaaagggatggaa

SEQ ID NO: 339275 - DNA, 55 bp, Artificial
  Synthetic oligonucleotide
caaagcaagattcgctatcgtacctcaacaaatggcaacgctgttctcggtgtga

SEQ ID NO: 339276 - DNA, 60 bp, Artificial
  Synthetic oligonucleotide
caaagcaattgatatcgacgaagatagcaagtacagcgacgtggttaagcaaactgtaga

SEQ ID NO: 339277 - DNA, 54 bp, Artificial
  Synthetic oligonucleotide
caaagcaattttgttggaacctgcacagaatctgactatgaagcttttgattcc

SEQ ID NO: 339278 - DNA, 55 bp, Artificial
  Synthetic oligonucleotide
caaagcacacgccacactgcaagagagctcctctcagtaacaggcacggaggcag

SEQ ID NO: 339279 - DNA, 55 bp, Artificial
  Synthetic oligonucleotide
caaagcacgccaccactccattcccgaagtgtacattgagggttacctggacctc

SEQ ID NO: 339280 - DNA, 60 bp, Artificial
  Synthetic oligonucleotide
caaagcacgccgcgaggcacaatggtaccctaatcaacccacgtatgtacgccgatatga

SEQ ID NO: 339281 - DNA, 56 bp, Artificial
  Synthetic oligonucleotide
caaagcacggtacggagaaggaggtggacgaatcgtccgatgtggaggaagccacg

SEQ ID NO: 339282 - DNA, 60 bp, Artificial
  Synthetic oligonucleotide
caaagcactttgctgatctaggtcttaacttcgattttacatcacgcacaagagatagga

SEQ ID NO: 339283 - DNA, 57 bp, Artificial
  Synthetic oligonucleotide
caaagcagaagtcaaatgagctaaaatccataactgtcaactcagacagatgcatct

SEQ ID NO: 339284 - DNA, 60 bp, Artificial
  Synthetic oligonucleotide
caaagcagatcaggtgaagagggtggatgaggactgatgaactcttcctgaatgtcagga

SEQ ID NO: 339285 - DNA, 60 bp, Artificial
  Synthetic oligonucleotide
caaagcagattaaattgaaggatgaacggttcatgagtttgtcaaacgccatgcctcaag

SEQ ID NO: 339286 - DNA, 60 bp, Artificial
  Synthetic oligonucleotide
caaagcagcactcatacactttgtcaatgacaaagccttgctcaatgactcagaattgct

SEQ ID NO: 339287 - DNA, 52 bp, Artificial
  Synthetic oligonucleotide
caaagcagcccgcccccagggtttcctcccccaatagggagggaaaacatga

SEQ ID NO: 339288 - DNA, 55 bp, Artificial
  Synthetic oligonucleotide
caaagcagtggaagcttacgtgcaatttacctttgacacaagcaggatggagagc

SEQ ID NO: 339289 - DNA, 55 bp, Artificial
  Synthetic oligonucleotide
caaagcatcggtacagtccagtgaaatggcatatccattaagcaaggcctgatta

SEQ ID NO: 339290 - DNA, 55 bp, Artificial
  Synthetic oligonucleotide
caaagcatgtgtttcagacttttctcaaggatgagctccggagtaaggccaaggt

SEQ ID NO: 339291 - DNA, 60 bp, Artificial
  Synthetic oligonucleotide
caaagcattggctgctgagcaggtgtacaaaatagtcaaggtaccaagcatatcttttag

SEQ ID NO: 339292 - DNA, 55 bp, Artificial
  Synthetic oligonucleotide
caaagcatttatgtatgccaaccgtgcagtgtgtgatgtgatacctaacccttcc

SEQ ID NO: 339293 - DNA, 60 bp, Artificial
  Synthetic oligonucleotide
caaagccaggtacatcgcatgcaccaagaaaaatactcgaagttaatccttcatggaata

SEQ ID NO: 339294 - DNA, 59 bp, Artificial
  Synthetic oligonucleotide
caaagccatttgttatggtgcagaaagtgtggcgttaacaagaggccagaacacagtta

SEQ ID NO: 339295 - DNA, 51 bp, Artificial
  Synthetic oligonucleotide
caaagcccaagaggagcatgaaagatatcacaataattggagagcaatggc

SEQ ID NO: 339296 - DNA, 54 bp, Artificial
  Synthetic oligonucleotide
caaagcccgcaatctcgggatttgtgtagccttagtccgcaattggcaagcatt

SEQ ID NO: 339297 - DNA, 59 bp, Artificial
  Synthetic oligonucleotide
caaagccgcattcgactaccacttcagtgctaacgctggaccctgcgcatactccagta

SEQ ID NO: 339298 - DNA, 51 bp, Artificial
  Synthetic oligonucleotide
caaagccggttttaggttatacacggtgattttaggcaacactgactactc

SEQ ID NO: 339299 - DNA, 55 bp, Artificial
  Synthetic oligonucleotide
caaagcctataccaacgtcatggttacagaaagaccccaaaatagtcctcagtgc

SEQ ID NO: 339300 - DNA, 54 bp, Artificial
  Synthetic oligonucleotide
caaagcgacgagacagctaccagtcacgggtcggcgcaagtcccagaaccccca

SEQ ID NO: 339301 - DNA, 55 bp, Artificial
  Synthetic oligonucleotide
caaagcgagacgggtatcgtaagagttgccatgtagcatttcctttgtgctgttg

SEQ ID NO: 339302 - DNA, 60 bp, Artificial
  Synthetic oligonucleotide
caaagcgccacagcccttgctagttccatgaaggcgcgcctcatgtgcgaagttacacaa

SEQ ID NO: 339303 - DNA, 60 bp, Artificial
  Synthetic oligonucleotide
caaagcgccgttcacgagacttgcgcttccctacactgcgccacaccgcgtgttggcaac

SEQ ID NO: 339304 - DNA, 52 bp, Artificial
  Synthetic oligonucleotide
caaagcgctgattacggagttacgaatctacgagacgggtataatcccttgt

SEQ ID NO: 339305 - DNA, 54 bp, Artificial
  Synthetic oligonucleotide
caaagcggtcccagaagggaaagttttcgtgagggcagcgacccggcacttcca

SEQ ID NO: 339306 - DNA, 55 bp, Artificial
  Synthetic oligonucleotide
caaagcgtaggagctcaagataggtgttagtgtcattagaccacggtgatacgca

SEQ ID NO: 339307 - DNA, 60 bp, Artificial
  Synthetic oligonucleotide
caaagcgtctaccatgagacgtcagacgacgcctccattaggcacttgggtccagccact

SEQ ID NO: 339308 - DNA, 57 bp, Artificial
  Synthetic oligonucleotide
caaagcgttagctgctgagcgggtgtataaaatagttaaagtgccaagtatatcctt

SEQ ID NO: 339309 - DNA, 54 bp, Artificial
  Synthetic oligonucleotide
caaagctaccatccacccaaccggccaagccccagccttcccaaccaccgttgc

SEQ ID NO: 339310 - DNA, 59 bp, Artificial
  Synthetic oligonucleotide
caaagctatgacagcgaatggtaagcaatatatctctactattgacccatgtttgctag

SEQ ID NO: 339311 - DNA, 54 bp, Artificial
  Synthetic oligonucleotide
caaagctcaactgccgaagcctccggcgttgaaagtcccggttgcgaaaccgac

SEQ ID NO: 339312 - DNA, 54 bp, Artificial
  Synthetic oligonucleotide
caaagctcagcttggatcgattacacctctactgaccctactcagtttgggact

SEQ ID NO: 339313 - DNA, 55 bp, Artificial
  Synthetic oligonucleotide
caaagctccccacgttgcatcttcccaaactaccgtcaatttatacattcgtaaa

SEQ ID NO: 339314 - DNA, 59 bp, Artificial
  Synthetic oligonucleotide
caaagctctatgggtatcggtgtattggggtcttatttatagtcagactccaaatggca

SEQ ID NO: 339315 - DNA, 60 bp, Artificial
  Synthetic oligonucleotide
caaagctgactttccatatgctccaggagacatgtttggtcccataggtaagtgccccca

SEQ ID NO: 339316 - DNA, 55 bp, Artificial
  Synthetic oligonucleotide
caaagctgagttcttatcctcgtccaagaattctttatagcttgcgttgggccct

SEQ ID NO: 339317 - DNA, 60 bp, Artificial
  Synthetic oligonucleotide
caaagctgctgggctatcgcatcccagttccaacaatctcacacttgtccattgccggac

SEQ ID NO: 339318 - DNA, 60 bp, Artificial
  Synthetic oligonucleotide
caaagctggctagatcaattcgcatgcatatggagcaatacaacgaagtcgctgagaaat

SEQ ID NO: 339319 - DNA, 60 bp, Artificial
  Synthetic oligonucleotide
caaagctgggaaacaggtcatataggaacatatctgaggagtcacgatttagcttttatc

SEQ ID NO: 339320 - DNA, 54 bp, Artificial
  Synthetic oligonucleotide
caaagctgggatgcatcagtgccctaggaaacttgtcagatatcgcatccattg

SEQ ID NO: 339321 - DNA, 60 bp, Artificial
  Synthetic oligonucleotide
caaagctggtaagcatgcaacataatataaaacgtatgcgaacagatcaatggaatcgca

SEQ ID NO: 339322 - DNA, 60 bp, Artificial
  Synthetic oligonucleotide
caaagctgttttggcttgtcaccagctggccatggttcttcgccagctgtcacgtaaggc

SEQ ID NO: 339323 - DNA, 55 bp, Artificial
  Synthetic oligonucleotide
caaagcttaattatgtaatggtcccctataaagcttggtccccaagtactcattg

SEQ ID NO: 339324 - DNA, 55 bp, Artificial
  Synthetic oligonucleotide
caaagcttggctggtgcacaggcaatggttcttagacctgccgttaccatggctg

SEQ ID NO: 339325 - DNA, 55 bp, Artificial
  Synthetic oligonucleotide
caaagctttcacattggcacatggagagtataggcgggaaattccccagagcctt

SEQ ID NO: 339326 - DNA, 55 bp, Artificial
  Synthetic oligonucleotide
caaagctttcgcgctttacgactgcggcatattttcgaacttcctcaatgttgtg

SEQ ID NO: 339327 - DNA, 58 bp, Artificial
  Synthetic oligonucleotide
caaagctttcgttattgaccttgctagaggataaagctagaactgaagaattgcaaac

SEQ ID NO: 339328 - DNA, 55 bp, Artificial
  Synthetic oligonucleotide
caaaggaaacgggagctcttcaacggcgggatcgttcaggatcaccatcaagtgc

SEQ ID NO: 339329 - DNA, 55 bp, Artificial
  Synthetic oligonucleotide
caaaggaacatatgtggtgcagaatgaattctcttcttacggggatctgttgaca

SEQ ID NO: 339330 - DNA, 55 bp, Artificial
  Synthetic oligonucleotide
caaaggaacattgaatcacatttggaggtggatgggtgtactagattcgttcgcc

SEQ ID NO: 339331 - DNA, 55 bp, Artificial
  Synthetic oligonucleotide
caaaggaaccgccccccagactctggcaaaattgcccctcagaagtcccgtgata

SEQ ID NO: 339332 - DNA, 58 bp, Artificial
  Synthetic oligonucleotide
caaaggaactgggctaatgaggctagccgctgaagggatcgtactggctgacatgcgt

SEQ ID NO: 339333 - DNA, 55 bp, Artificial
  Synthetic oligonucleotide
caaaggaagatggaccattgctttgcaggcacagaaaagtttatcgcggtctaca

SEQ ID NO: 339334 - DNA, 58 bp, Artificial
  Synthetic oligonucleotide
caaaggaagccttaaaggttgatctaacaccacacgatcctttgagagtgagtgataa

SEQ ID NO: 339335 - DNA, 53 bp, Artificial
  Synthetic oligonucleotide
caaaggaagtgttacctacggacctaataatctacctcggtaacttcatgaag

SEQ ID NO: 339336 - DNA, 52 bp, Artificial
  Synthetic oligonucleotide
caaaggacaacctcgtgggcaacacccaaggaagtttcaccttcgggccgag

SEQ ID NO: 339337 - DNA, 54 bp, Artificial
  Synthetic oligonucleotide
caaaggacaatagaagtttctgtaggtcctattgtaggcctagattacactcta

SEQ ID NO: 339338 - DNA, 59 bp, Artificial
  Synthetic oligonucleotide
caaaggaccaatattttctatcatgcatatagtgacagattattaacagtaggtcaccc

SEQ ID NO: 339339 - DNA, 55 bp, Artificial
  Synthetic oligonucleotide
caaaggaccagtcattagctcaggcaaagtatctactaggggatgacggacaggt

SEQ ID NO: 339340 - DNA, 58 bp, Artificial
  Synthetic oligonucleotide
caaaggacccagtagtggtggttatgttgattgctgatttcggattggaggtctttga

SEQ ID NO: 339341 - DNA, 56 bp, Artificial
  Synthetic oligonucleotide
caaaggacgccaacccagttgaccaaccgaccgaacccgatgtggctgcgtgccgc

SEQ ID NO: 339342 - DNA, 55 bp, Artificial
  Synthetic oligonucleotide
caaaggacgcggtcctgcctcacttgtgcatctagccaagcgaggtggaggtgtt

SEQ ID NO: 339343 - DNA, 55 bp, Artificial
  Synthetic oligonucleotide
caaaggacgggacaacaattattgtacagctacgcctgtagttcaattacaaggt

SEQ ID NO: 339344 - DNA, 58 bp, Artificial
  Synthetic oligonucleotide
caaaggacttgttagctccaatggccagaaagttttatgataactcaatgagtgaggg

SEQ ID NO: 339345 - DNA, 60 bp, Artificial
  Synthetic oligonucleotide
caaaggagcacctccagagctgaatggtgtcaccaacggaggtttcataccacatagtta

SEQ ID NO: 339346 - DNA, 55 bp, Artificial
  Synthetic oligonucleotide
caaaggagcgtaaataatatggaccagttagcaggattcatgggcgaacctttcg

SEQ ID NO: 339347 - DNA, 55 bp, Artificial
  Synthetic oligonucleotide
caaaggagctagaaggagcggggatgttctttgggacattcccacaccaaaagtc

SEQ ID NO: 339348 - DNA, 54 bp, Artificial
  Synthetic oligonucleotide
caaaggagcttatatccctttccatgcagatgacgaaccatgctatgatgataa

SEQ ID NO: 339349 - DNA, 60 bp, Artificial
  Synthetic oligonucleotide
caaaggaggtacaacgtgcattgttgttgcccacttcttgacgtgagagactgtgcccgc

SEQ ID NO: 339350 - DNA, 60 bp, Artificial
  Synthetic oligonucleotide
caaaggatgcgttaacacatgctatccagaaagatgttaagccttacgagaataacataa

SEQ ID NO: 339351 - DNA, 58 bp, Artificial
  Synthetic oligonucleotide
caaaggatggccgatatcgaaaatggacttaggcgtaccactattggcactgggttgc

SEQ ID NO: 339352 - DNA, 57 bp, Artificial
  Synthetic oligonucleotide
caaaggattccggaaagaagatacctgactctcataagtcaaggttagccaatgatc

SEQ ID NO: 339353 - DNA, 58 bp, Artificial
  Synthetic oligonucleotide
caaaggattcggatttaaagttcagaatgatgtgtggcttggaaggacaatatcatat

SEQ ID NO: 339354 - DNA, 59 bp, Artificial
  Synthetic oligonucleotide
caaaggattgaaagggacctaaagcctcagcaccgtcctcagaaggcatcatacctctg

SEQ ID NO: 339355 - DNA, 60 bp, Artificial
  Synthetic oligonucleotide
caaaggattggagtgatagaattgagccatggctaattgaaccctgcaagctccttcctg

SEQ ID NO: 339356 - DNA, 57 bp, Artificial
  Synthetic oligonucleotide
caaaggattgtactccggttggcgcggcactacctgggataatactgtgttgaatgg

SEQ ID NO: 339357 - DNA, 56 bp, Artificial
  Synthetic oligonucleotide
caaaggatttcccagtgttcccacagaaacttagattcagggaaccaacgcatgag

SEQ ID NO: 339358 - DNA, 54 bp, Artificial
  Synthetic oligonucleotide
caaaggatttgaccaaactaggagccacttatgacagtgcgaagaaatattggg

SEQ ID NO: 339359 - DNA, 57 bp, Artificial
  Synthetic oligonucleotide
caaaggcaaacaaggcgtttgttggatggagaaatcagaaggagaatattaaggaga

SEQ ID NO: 339360 - DNA, 59 bp, Artificial
  Synthetic oligonucleotide
caaaggcaaatatggtagacaaattacatattctcgtgcttgtcccatagttgtaggta

SEQ ID NO: 339361 - DNA, 53 bp, Artificial
  Synthetic oligonucleotide
caaaggcaaattcataaacgaacccggagatttaagtagaactaagtcttcga

SEQ ID NO: 339362 - DNA, 60 bp, Artificial
  Synthetic oligonucleotide
caaaggcacaaagattgttaagacgagagttcgcaacgaaaaatgtggtcatgagtatga

SEQ ID NO: 339363 - DNA, 56 bp, Artificial
  Synthetic oligonucleotide
caaaggcaccgaaataaacaagatttgtggttcatgtcacatcgaggtattctgat

SEQ ID NO: 339364 - DNA, 55 bp, Artificial
  Synthetic oligonucleotide
caaaggcacgcagtgcaattgaagtgcatgtagcgttgcaacaaatacaacaaag

SEQ ID NO: 339365 - DNA, 53 bp, Artificial
  Synthetic oligonucleotide
caaaggcactcaaagccaagtcaacccgaatgacgggtcgctcatctcaccga

SEQ ID NO: 339366 - DNA, 59 bp, Artificial
  Synthetic oligonucleotide
caaaggcactcgattttccaatagctatacacggcgagagggggtacgctgagacacca

SEQ ID NO: 339367 - DNA, 55 bp, Artificial
  Synthetic oligonucleotide
caaaggcactgactctaagccggacgtagacatactaacgactccacgtgtttcc

SEQ ID NO: 339368 - DNA, 51 bp, Artificial
  Synthetic oligonucleotide
caaaggcccgtccaccaaccgtgattacttgaaccaacgacaagcagcact

SEQ ID NO: 339369 - DNA, 60 bp, Artificial
  Synthetic oligonucleotide
caaaggcctggactcgtccagagaatcgccaagtcagtaatgtgcatctactgtgccgaa

SEQ ID NO: 339370 - DNA, 60 bp, Artificial
  Synthetic oligonucleotide
caaaggcgaagagtagggcatctggttcctatgtgcccagatctgtgtcatccaggaggg

SEQ ID NO: 339371 - DNA, 60 bp, Artificial
  Synthetic oligonucleotide
caaaggcgggaatgtgtcagtgaagtataaatatacacatccaggagagagtggtataga

SEQ ID NO: 339372 - DNA, 55 bp, Artificial
  Synthetic oligonucleotide
caaaggctgacatagatgctagcagagcgctattttcaacaacacaaccatacac

SEQ ID NO: 339373 - DNA, 55 bp, Artificial
  Synthetic oligonucleotide
caaaggctgttggcagggtaaggtgagccctcaccaggttactgacaagccagta

SEQ ID NO: 339374 - DNA, 55 bp, Artificial
  Synthetic oligonucleotide
caaaggctttgccaaatctggactgttacagcgtcactgtcgtgcgcctaagttc

SEQ ID NO: 339375 - DNA, 55 bp, Artificial
  Synthetic oligonucleotide
caaagggaaagtgtaattcgaagtccggtgagaatggcggaggagaatccctctg

SEQ ID NO: 339376 - DNA, 57 bp, Artificial
  Synthetic oligonucleotide
caaagggacaaggatccgattcaaagatgacagttcttttgaggatgtgaacggaat

SEQ ID NO: 339377 - DNA, 58 bp, Artificial
  Synthetic oligonucleotide
caaagggaccaacgtggctctaggcctcgccaacctgctgtggctaatatactcccag

SEQ ID NO: 339378 - DNA, 58 bp, Artificial
  Synthetic oligonucleotide
caaagggactacttgtttgctcgacgcgaataattacctgatccagccaattctcgga

SEQ ID NO: 339379 - DNA, 57 bp, Artificial
  Synthetic oligonucleotide
caaagggactgtgaagattgaacgtgttcagacggacctgaacatggacggttctac

SEQ ID NO: 339380 - DNA, 56 bp, Artificial
  Synthetic oligonucleotide
caaagggagacaaaaggctgtccccctaactggcacaacaaatcagaaggctgagt

SEQ ID NO: 339381 - DNA, 57 bp, Artificial
  Synthetic oligonucleotide
caaagggagatggctcgacccgtggccataaagctacagtttacactgggagtgccc

SEQ ID NO: 339382 - DNA, 60 bp, Artificial
  Synthetic oligonucleotide
caaagggatactcagcatatgagatccgcaagcatccgaatggaacaaggaagctctcaa

SEQ ID NO: 339383 - DNA, 60 bp, Artificial
  Synthetic oligonucleotide
caaagggatgcagcaggacagtatcagtatactccaataagtcctaggattatacagaca

SEQ ID NO: 339384 - DNA, 55 bp, Artificial
  Synthetic oligonucleotide
caaagggcagggataaccttcttatctatttagttaggaagttgaatgatccaag

SEQ ID NO: 339385 - DNA, 55 bp, Artificial
  Synthetic oligonucleotide
caaagggccccagaagaccaaggggcccaaacctaccactcattagattcatgga

SEQ ID NO: 339386 - DNA, 58 bp, Artificial
  Synthetic oligonucleotide
caaaggggcacagcgtctagctgccctaggcgacacagcgtgggactttgggtcggtc

SEQ ID NO: 339387 - DNA, 52 bp, Artificial
  Synthetic oligonucleotide
caaagggggcccaagaaggggatactgatcagtttgccgtgtggacgattag

SEQ ID NO: 339388 - DNA, 57 bp, Artificial
  Synthetic oligonucleotide
caaagggtataacttcattaggacaacctttcctcaacaacatggtgacatggatac

SEQ ID NO: 339389 - DNA, 57 bp, Artificial
  Synthetic oligonucleotide
caaagggtcagacattgacacaaaatgctacggatgttaatcaggtgctacagcgtg

SEQ ID NO: 339390 - DNA, 60 bp, Artificial
  Synthetic oligonucleotide
caaagggtcagatcacagtgttggatatgcacccaggctctggaaagacccacagagtcc

SEQ ID NO: 339391 - DNA, 60 bp, Artificial
  Synthetic oligonucleotide
caaagggtggacgtggttcaggtaagtcatcagacatatctatcatcattacacaactta

SEQ ID NO: 339392 - DNA, 58 bp, Artificial
  Synthetic oligonucleotide
caaagggtggctaactcaaacactgttgattcaaaatgccaacccagaatgcagacag

SEQ ID NO: 339393 - DNA, 59 bp, Artificial
  Synthetic oligonucleotide
caaagggttcgacacgcttatcgcggcaacggatggaagtgatttggctttgatcgaca

SEQ ID NO: 339394 - DNA, 60 bp, Artificial
  Synthetic oligonucleotide
caaagggttctagagatgacacagttctgcactgagctgtcatcaacagacacggacacc

SEQ ID NO: 339395 - DNA, 54 bp, Artificial
  Synthetic oligonucleotide
caaaggtaaataattaggaccccaaaggtaaatgaggcaccgatatatcggtgc

SEQ ID NO: 339396 - DNA, 53 bp, Artificial
  Synthetic oligonucleotide
caaaggtacactctccaaacttggagggtcgctaaggagtggtgagtcctctc

SEQ ID NO: 339397 - DNA, 55 bp, Artificial
  Synthetic oligonucleotide
caaaggtagagttgaaggattgctgttattgcatggcggattagcaccgataacg

SEQ ID NO: 339398 - DNA, 60 bp, Artificial
  Synthetic oligonucleotide
caaaggtataggacgtctcgcatctcgtgccgcatcttcagatatcgggaaaagattgat

SEQ ID NO: 339399 - DNA, 55 bp, Artificial
  Synthetic oligonucleotide
caaaggtatttatgggcccaatatactacttaaggctaaggcacttaacacagga

SEQ ID NO: 339400 - DNA, 54 bp, Artificial
  Synthetic oligonucleotide
caaaggtcaacaacggggactacgcaagactttacatatggggagttcaccacc

SEQ ID NO: 339401 - DNA, 55 bp, Artificial
  Synthetic oligonucleotide
caaaggtcaaggagctacttattatgggcctgggccttgtaatcaggttaagtcc

SEQ ID NO: 339402 - DNA, 59 bp, Artificial
  Synthetic oligonucleotide
caaaggtcctaaccgatacaagtcgccccaatgatcccactaatgggaactgtgatgca

SEQ ID NO: 339403 - DNA, 55 bp, Artificial
  Synthetic oligonucleotide
caaaggtcctgctatccaaatgtataccaacgtagaccaagacctcgtaggctgg

SEQ ID NO: 339404 - DNA, 52 bp, Artificial
  Synthetic oligonucleotide
caaaggtcgggggtttggactaatgacgttcaagccccgtctgctccaagtt

SEQ ID NO: 339405 - DNA, 60 bp, Artificial
  Synthetic oligonucleotide
caaaggtgcccaaacttctcccaaatttgttgatcatagagtcttgcctgatcagatgtg

SEQ ID NO: 339406 - DNA, 52 bp, Artificial
  Synthetic oligonucleotide
caaaggtgctgacaatcttgagtttgctgctcctaaggaaattgacacgtca

SEQ ID NO: 339407 - DNA, 60 bp, Artificial
  Synthetic oligonucleotide
caaaggtgctgtgtggacttgctctacatcagatgatgctaggaaatggaatcaaggtca

SEQ ID NO: 339408 - DNA, 55 bp, Artificial
  Synthetic oligonucleotide
caaaggtggaccgtaaggttgtcagtctggtggtgcgaccattctcttcaggcgc

SEQ ID NO: 339409 - DNA, 55 bp, Artificial
  Synthetic oligonucleotide
caaaggtggtaatcactttgtgacggaggaggctagacacagcttccatctcgcc

SEQ ID NO: 339410 - DNA, 55 bp, Artificial
  Synthetic oligonucleotide
caaaggtgtgtacggcagtcttatggactcctatgcatacatgaggaacggatgg

SEQ ID NO: 339411 - DNA, 55 bp, Artificial
  Synthetic oligonucleotide
caaaggtgttggtttcactacatggaaaatcagcttacaagaaatggcacaagtc

SEQ ID NO: 339412 - DNA, 55 bp, Artificial
  Synthetic oligonucleotide
caaaggttccagacccttcccaggtgatccttcatgagtgatccatgagggaaac

SEQ ID NO: 339413 - DNA, 55 bp, Artificial
  Synthetic oligonucleotide
caaaggttcgtagcaaaggcatgcgacaatacttcagtagtgcaatacaagttcg

SEQ ID NO: 339414 - DNA, 55 bp, Artificial
  Synthetic oligonucleotide
caaaggttggagtcaacagaagatgtattttctgtcctagatcaggtgtttggat

SEQ ID NO: 339415 - DNA, 54 bp, Artificial
  Synthetic oligonucleotide
caaaggtttctggaagaaacactctggtgagcccggtacccttctctggaacac

SEQ ID NO: 339416 - DNA, 58 bp, Artificial
  Synthetic oligonucleotide
caaagtaaagggcgcgggtgaaaatcgctatgctgatcgtcacagtctaacagaaaag

SEQ ID NO: 339417 - DNA, 55 bp, Artificial
  Synthetic oligonucleotide
caaagtaattgcaaacacagtggaaatctacgatctgatgaccgaaacgtcgcag

SEQ ID NO: 339418 - DNA, 53 bp, Artificial
  Synthetic oligonucleotide
caaagtacagatcacacgtaattgtagtgaactgtctgttgactggaatgaag

SEQ ID NO: 339419 - DNA, 58 bp, Artificial
  Synthetic oligonucleotide
caaagtactacccaacacatcgccctagcaaggagaagcccaatgcgtacccgccaga

SEQ ID NO: 339420 - DNA, 54 bp, Artificial
  Synthetic oligonucleotide
caaagtactgggacagaccccccagacgcgacctgaggagcacccccttctacc

SEQ ID NO: 339421 - DNA, 55 bp, Artificial
  Synthetic oligonucleotide
caaagtagccatttctcactactcagcacaactcatgactctggacatcaaccca

SEQ ID NO: 339422 - DNA, 60 bp, Artificial
  Synthetic oligonucleotide
caaagtaggatgcagttctcttccttgactgtgaatgtgagaggatcaggaatgaggata

SEQ ID NO: 339423 - DNA, 55 bp, Artificial
  Synthetic oligonucleotide
caaagtagtatccaatgatctccccctaaaccgagctccctccgttggaattgaa

SEQ ID NO: 339424 - DNA, 55 bp, Artificial
  Synthetic oligonucleotide
caaagtagttagcatagaacccataggagtagcaccaggtaaagctaaaagacgc

SEQ ID NO: 339425 - DNA, 56 bp, Artificial
  Synthetic oligonucleotide
caaagtatatagtataacctatgctgacgatcctaattactttataggaattaaat

SEQ ID NO: 339426 - DNA, 60 bp, Artificial
  Synthetic oligonucleotide
caaagtatcctagcccagctcacatacgcatacggcggtgagacggcatgaatcctggac

SEQ ID NO: 339427 - DNA, 55 bp, Artificial
  Synthetic oligonucleotide
caaagtattagatgttgagagagcctttagacccacaggtgatgctcccctcccg

SEQ ID NO: 339428 - DNA, 60 bp, Artificial
  Synthetic oligonucleotide
caaagtattcttgcagcagcgcggcgctgcgatactccccattctatagcgagatggaca

SEQ ID NO: 339429 - DNA, 59 bp, Artificial
  Synthetic oligonucleotide
caaagtcacagaggggtggatcaactcccccaatcatgccaaatcagttacacaaacat

SEQ ID NO: 339430 - DNA, 56 bp, Artificial
  Synthetic oligonucleotide
caaagtcaccaatgttgaacgggaagagtgcgcaacggttgtacaccgagtggtgt

SEQ ID NO: 339431 - DNA, 56 bp, Artificial
  Synthetic oligonucleotide
caaagtcagaagtcaggtcggattaagccatagtacggaaaaaactatgctacctg

SEQ ID NO: 339432 - DNA, 53 bp, Artificial
  Synthetic oligonucleotide
caaagtcagatccgtgcgattagtgaacggattattgacacttatctgggacg

SEQ ID NO: 339433 - DNA, 51 bp, Artificial
  Synthetic oligonucleotide
caaagtcaggaaggggaagacccgcctgatagagtgcagttccatgaatga

SEQ ID NO: 339434 - DNA, 60 bp, Artificial
  Synthetic oligonucleotide
caaagtccatgctttggagattcagccttgtggatagcagaaaactgtatggctacccta

SEQ ID NO: 339435 - DNA, 59 bp, Artificial
  Synthetic oligonucleotide
caaagtcccgaacgccagtttcacctcagccgactggactgaattcgacaccgcgcaca

SEQ ID NO: 339436 - DNA, 55 bp, Artificial
  Synthetic oligonucleotide
caaagtcgaggattacgttggggctgctggtacattcctgacgaatcctaagtgg

SEQ ID NO: 339437 - DNA, 58 bp, Artificial
  Synthetic oligonucleotide
caaagtcgataaacgcctggcatataaacttgagcgcgagtcggtcggcattcttaac

SEQ ID NO: 339438 - DNA, 60 bp, Artificial
  Synthetic oligonucleotide
caaagtcggatacttatgtgcaggtctccccagtgacactccaagaggagaagatagtca

SEQ ID NO: 339439 - DNA, 57 bp, Artificial
  Synthetic oligonucleotide
caaagtctccacatatgccggctgtcaaggcatcactgctccgagggtacagattct

SEQ ID NO: 339440 - DNA, 55 bp, Artificial
  Synthetic oligonucleotide
caaagtcttcttcggccatttcatctctaacctgatctttatccaaaagaccttc

SEQ ID NO: 339441 - DNA, 54 bp, Artificial
  Synthetic oligonucleotide
caaagtgaccgaggggggagctaggaccgtgggggaccaatgggagccatggga

SEQ ID NO: 339442 - DNA, 55 bp, Artificial
  Synthetic oligonucleotide
caaagtgcagcagacttcttcaaacctctcatgggattttaccaaccaagtaggt

SEQ ID NO: 339443 - DNA, 54 bp, Artificial
  Synthetic oligonucleotide
caaagtgccaaacgtcagtaggtgggataaacaccaacaaaactttccagaaca

SEQ ID NO: 339444 - DNA, 55 bp, Artificial
  Synthetic oligonucleotide
caaagtgccacggtcgcaacagccgcaaatacacatatatagtgcaccatgggac

SEQ ID NO: 339445 - DNA, 60 bp, Artificial
  Synthetic oligonucleotide
caaagtgccctactttgtgcgcgtccaaggccttctcaggatctgcgcgctagcgcgcaa

SEQ ID NO: 339446 - DNA, 60 bp, Artificial
  Synthetic oligonucleotide
caaagtgccgtacttcgtacgcgcacacgggctcattcgtgcatgcatgctggtgcggaa

SEQ ID NO: 339447 - DNA, 55 bp, Artificial
  Synthetic oligonucleotide
caaagtgctattagcttgctagactgtgttgctgtatggactgctgattggactg

SEQ ID NO: 339448 - DNA, 60 bp, Artificial
  Synthetic oligonucleotide
caaagtgctcctttcacaatcgtgttgggtgcccatgcaaacagcatactggtgaggcgg

SEQ ID NO: 339449 - DNA, 60 bp, Artificial
  Synthetic oligonucleotide
caaagtgctttatggctcctggatctggacccatactagtgaatatcctagggtcatggg

SEQ ID NO: 339450 - DNA, 55 bp, Artificial
  Synthetic oligonucleotide
caaagtggccatttcgactagcccgactttttgtgggtggaacttgagtagcgac

SEQ ID NO: 339451 - DNA, 60 bp, Artificial
  Synthetic oligonucleotide
caaagtggcgcaggagaggctactggagaagatcctaccgaccagcttatggccgccgcc

SEQ ID NO: 339452 - DNA, 60 bp, Artificial
  Synthetic oligonucleotide
caaagtggtggcatcttacccataggtgcccagcagacgtctgtgagctaattcgtggcg

SEQ ID NO: 339453 - DNA, 58 bp, Artificial
  Synthetic oligonucleotide
caaagtgtaaagatccggctgcttctttgttgcttcgatctcccatattgtgcgcctg

SEQ ID NO: 339454 - DNA, 50 bp, Artificial
  Synthetic oligonucleotide
caaagtgtatggggaccataccttcggcaaaagcttcaatactccatgaa

SEQ ID NO: 339455 - DNA, 54 bp, Artificial
  Synthetic oligonucleotide
caaagtgtcgatcaacaaaaagcgaaagtatgagggcataaaagactgcattcc

SEQ ID NO: 339456 - DNA, 60 bp, Artificial
  Synthetic oligonucleotide
caaagtgtcgcacatgttaaccctctttgctgtggtgctgagaaatacaaatggctagat

SEQ ID NO: 339457 - DNA, 55 bp, Artificial
  Synthetic oligonucleotide
caaagtgtggcagcagcaatatattggtttcgagcaggaatatctaatgccagtg

SEQ ID NO: 339458 - DNA, 55 bp, Artificial
  Synthetic oligonucleotide
caaagttaaagtgagggcacaggcgccttttgttagctcgtatggtgctacagcg

SEQ ID NO: 339459 - DNA, 51 bp, Artificial
  Synthetic oligonucleotide
caaagttaagagcaaaacactaccccaaggagaacctggggtggaaaatca

SEQ ID NO: 339460 - DNA, 59 bp, Artificial
  Synthetic oligonucleotide
caaagttacagagggatggattaactctcccaatcatgtcaaatcagttacacaaacac

SEQ ID NO: 339461 - DNA, 56 bp, Artificial
  Synthetic oligonucleotide
caaagttactcaatctgatatcgctagtgtgctctcaagagtagtttctgtaagac

SEQ ID NO: 339462 - DNA, 54 bp, Artificial
  Synthetic oligonucleotide
caaagttagaatacatatgtgttacaggtttaaacccacaaatgggctttacac

SEQ ID NO: 339463 - DNA, 58 bp, Artificial
  Synthetic oligonucleotide
caaagttaggattcatgtaaatgaaccggatgaattcacagtacatgtaaaaagcaat

SEQ ID NO: 339464 - DNA, 55 bp, Artificial
  Synthetic oligonucleotide
caaagttatcttagaaagggttaaggttgaatatcagaaaacaatgggctctatg

SEQ ID NO: 339465 - DNA, 60 bp, Artificial
  Synthetic oligonucleotide
caaagttatggatggaacattgtcaccatgaagagtggagtggatgtgttctacagacct

SEQ ID NO: 339466 - DNA, 55 bp, Artificial
  Synthetic oligonucleotide
caaagttcaagctcctacatagtggtcaagcttttaccgaatatccaacccactg

SEQ ID NO: 339467 - DNA, 57 bp, Artificial
  Synthetic oligonucleotide
caaagttcccctgctaccactttgttgctgagaaagacaacgttcacgccacttaca

SEQ ID NO: 339468 - DNA, 55 bp, Artificial
  Synthetic oligonucleotide
caaagttctcgtcagccaactgatttagttcacattgttgacacacgatctggtc

SEQ ID NO: 339469 - DNA, 55 bp, Artificial
  Synthetic oligonucleotide
caaagttctggtatctggaacatgctaagactggtgagactagtgtacccaagtg

SEQ ID NO: 339470 - DNA, 55 bp, Artificial
  Synthetic oligonucleotide
caaagttgcattacattcgtacctgtgattcttacttgatgtctgcctcggcggt

SEQ ID NO: 339471 - DNA, 55 bp, Artificial
  Synthetic oligonucleotide
caaagttggacacacttagagtgcatttagcagcattatgcggcggtttatcgga

SEQ ID NO: 339472 - DNA, 57 bp, Artificial
  Synthetic oligonucleotide
caaagttgttatcggactaactttgtcaggagctccagtccctgagggaatgaactg

SEQ ID NO: 339473 - DNA, 55 bp, Artificial
  Synthetic oligonucleotide
caaagtttaatcgcagagccagccattactagttatcgaggattggaaagagatc

SEQ ID NO: 339474 - DNA, 59 bp, Artificial
  Synthetic oligonucleotide
caaagtttacaatcatgttgtgtataaccatcaggaagcggcaaagtatgaaaaccata

SEQ ID NO: 339475 - DNA, 58 bp, Artificial
  Synthetic oligonucleotide
caaagtttcaaatggctggattgattcgagaaaccaggaaaaggcagccatccaaaca

SEQ ID NO: 339476 - DNA, 60 bp, Artificial
  Synthetic oligonucleotide
caaagtttcacaccacctgccatgatgaggtcatagatcttaaacaagggaatgagatat

SEQ ID NO: 339477 - DNA, 59 bp, Artificial
  Synthetic oligonucleotide
caaagtttccacatatgccgggtgtcaaggcatcacagcgcccaaagttcaaatcctcc

SEQ ID NO: 339478 - DNA, 60 bp, Artificial
  Synthetic oligonucleotide
caaagtttgcgaggcattttgtttcactttagcgcggctcttgtggccattctagcgcag

SEQ ID NO: 339479 - DNA, 54 bp, Artificial
  Synthetic oligonucleotide
caaagtttgggacaagtctaccggtgataccttttacacagacgattctcggta

SEQ ID NO: 339480 - DNA, 56 bp, Artificial
  Synthetic oligonucleotide
caaataaaaacgagattagcgagggatggacattaatggtcgaaagggtgcaagac

SEQ ID NO: 339481 - DNA, 55 bp, Artificial
  Synthetic oligonucleotide
caaataaactaaattggcctctgccgccctgatgtctcaccccctttgggggtga

SEQ ID NO: 339482 - DNA, 55 bp, Artificial
  Synthetic oligonucleotide
caaataaatgcgcgcttttactgggtctagtaatgggcagtttccctcgagtgga

SEQ ID NO: 339483 - DNA, 54 bp, Artificial
  Synthetic oligonucleotide
caaataacagtttccatgttgacctaaacccagatggtagtattacttggtggg

SEQ ID NO: 339484 - DNA, 52 bp, Artificial
  Synthetic oligonucleotide
caaataactaagtatttcgggagagataaagcgcccttttccaaagcgaggg

SEQ ID NO: 339485 - DNA, 54 bp, Artificial
  Synthetic oligonucleotide
caaataacttcattccaaaggtgcaactctaacgggtggatttgttcaacccca

SEQ ID NO: 339486 - DNA, 55 bp, Artificial
  Synthetic oligonucleotide
caaataaggcattgaaagtggacttgactccgcataatcctcttcgggtaagcga

SEQ ID NO: 339487 - DNA, 58 bp, Artificial
  Synthetic oligonucleotide
caaataaggtgaatgaggtaacaaatcttggcgtgaggcgaattgtggaaatgtgtct

SEQ ID NO: 339488 - DNA, 60 bp, Artificial
  Synthetic oligonucleotide
caaataagttgcagcccagtgtttgcagtagaaagacctattgctctaagcaagcaagct

SEQ ID NO: 339489 - DNA, 55 bp, Artificial
  Synthetic oligonucleotide
caaataatactctaacggtttgtagacacgcgagcgtataaatgacgtcatctcc

SEQ ID NO: 339490 - DNA, 54 bp, Artificial
  Synthetic oligonucleotide
caaataatagagaagctaataggaaaagaaagggtttacctgtcatgggtacca

SEQ ID NO: 339491 - DNA, 55 bp, Artificial
  Synthetic oligonucleotide
caaataatagaggaaagagtattcttttcatgtggggcataaatcacccacccac

SEQ ID NO: 339492 - DNA, 53 bp, Artificial
  Synthetic oligonucleotide
caaataatctcttttcgctgatacaagtaccctacacgaaaatgacccatgcg

SEQ ID NO: 339493 - DNA, 56 bp, Artificial
  Synthetic oligonucleotide
caaataatggaacagttacaatcagctctcaatacaggaacagaagaactgagatc

SEQ ID NO: 339494 - DNA, 55 bp, Artificial
  Synthetic oligonucleotide
caaataatttgtagagctgtacgcaacctacctagaagaataagacagggttttg

SEQ ID NO: 339495 - DNA, 59 bp, Artificial
  Synthetic oligonucleotide
caaatacactcgtatggaacctcaaggtgctaacgttggtcctggtgagctctctattc

SEQ ID NO: 339496 - DNA, 55 bp, Artificial
  Synthetic oligonucleotide
caaatacagtatggtgacctcagtaaagaagggaaagtcctcatcaggtgtccct

SEQ ID NO: 339497 - DNA, 60 bp, Artificial
  Synthetic oligonucleotide
caaatacatcatatattgcgccatagagaatgatctaaatgagttgatggactcacctca

SEQ ID NO: 339498 - DNA, 55 bp, Artificial
  Synthetic oligonucleotide
caaataccagatggcaacgtcatcaagaaaatacaatacggagctgtagcatcag

SEQ ID NO: 339499 - DNA, 55 bp, Artificial
  Synthetic oligonucleotide
caaataccctgctaaaacgaaattttctactaggcaatcgtccctagtcgtatca

SEQ ID NO: 339500 - DNA, 54 bp, Artificial
  Synthetic oligonucleotide
caaatacctagaagagcatcccagcgctgggaaggaccctaagaagaccggggg

SEQ ID NO: 339501 - DNA, 55 bp, Artificial
  Synthetic oligonucleotide
caaatactctgactatcgactccctcacacccacattagaaacagcatacggagc

SEQ ID NO: 339502 - DNA, 59 bp, Artificial
  Synthetic oligonucleotide
caaatactctttcgcgacgaagataataagagttgacggagatgacaattacgcagtat

SEQ ID NO: 339503 - DNA, 53 bp, Artificial
  Synthetic oligonucleotide
caaatactgacggtatcgtcacgcgtgttccggatgggctgcaatggcgcaag

SEQ ID NO: 339504 - DNA, 55 bp, Artificial
  Synthetic oligonucleotide
caaatagaacgtgcttcagacaaaattgcacaaggcgtcattattgcgtaccgtg

SEQ ID NO: 339505 - DNA, 60 bp, Artificial
  Synthetic oligonucleotide
caaatagacccattatagagattgatatgagcacactagagcacacaagtagatgcgtgt

SEQ ID NO: 339506 - DNA, 53 bp, Artificial
  Synthetic oligonucleotide
caaatagagcaaaaacggccaagaatatacggttgtacaaaggaaacgaccca

SEQ ID NO: 339507 - DNA, 54 bp, Artificial
  Synthetic oligonucleotide
caaatagagcataccgagttatagacaacgatgaggtgtttgaagctggaacag

SEQ ID NO: 339508 - DNA, 57 bp, Artificial
  Synthetic oligonucleotide
caaatagatccactttagctaagatcgtttcgtcaccaatgtcaattttagtcgcgt

SEQ ID NO: 339509 - DNA, 60 bp, Artificial
  Synthetic oligonucleotide
caaatagcaactcttgaacatgcaccagcattcatgtttcgcaaagagttggggacatta

SEQ ID NO: 339510 - DNA, 54 bp, Artificial
  Synthetic oligonucleotide
caaatagcaatatcacaccaatcatgtcaacagagaaaaatgtcaacagtacac

SEQ ID NO: 339511 - DNA, 54 bp, Artificial
  Synthetic oligonucleotide
caaatagcagcatgagatgtacaacacaaccaggagggtgtgtagagggatatc

SEQ ID NO: 339512 - DNA, 60 bp, Artificial
  Synthetic oligonucleotide
caaatagcctcagcatgtcacaaaactcttcatcatgcttctcattacactttgccacgg

SEQ ID NO: 339513 - DNA, 58 bp, Artificial
  Synthetic oligonucleotide
caaatagcttgtcagtgctcaaataatcattatgcaagtccactgacatgtcaagctg

SEQ ID NO: 339514 - DNA, 51 bp, Artificial
  Synthetic oligonucleotide
caaataggcgagcatattcagggaaacagtatgatgcatattgtgttcaaa

SEQ ID NO: 339515 - DNA, 59 bp, Artificial
  Synthetic oligonucleotide
caaatagggaagttatcgagtcaagtatgtcatactacagattgtattatgtcaaaaat

SEQ ID NO: 339516 - DNA, 54 bp, Artificial
  Synthetic oligonucleotide
caaatagtgagtttgtacgatcaaattactataaaccggaaagttcagagttac

SEQ ID NO: 339517 - DNA, 51 bp, Artificial
  Synthetic oligonucleotide
caaatagtgatgttgagagcggcgtgcggactaccattgaagagaatgaga

SEQ ID NO: 339518 - DNA, 55 bp, Artificial
  Synthetic oligonucleotide
caaatagtgtgcgcagatcccatctatgccaggataggggcatgctttgaacaac

SEQ ID NO: 339519 - DNA, 55 bp, Artificial
  Synthetic oligonucleotide
caaatagtgtggagtctccttgcgtgcctcttctggtggatccagcatgggtgga

SEQ ID NO: 339520 - DNA, 60 bp, Artificial
  Synthetic oligonucleotide
caaatagttgaagcgctcaatgctacgcgtaggttcagaggaatgccagaactacaacca

SEQ ID NO: 339521 - DNA, 60 bp, Artificial
  Synthetic oligonucleotide
caaatataaggttgatgggtgccggatgagtggtgatatgaatacagctatgggtaactg

SEQ ID NO: 339522 - DNA, 57 bp, Artificial
  Synthetic oligonucleotide
caaatataccgatttataggttatgattgtagtagtataagaaggagactaaacaca

SEQ ID NO: 339523 - DNA, 60 bp, Artificial
  Synthetic oligonucleotide
caaatatatgagctaattacagaatcgcagaaccagcaggacaggaatgaaaaggagttg

SEQ ID NO: 339524 - DNA, 55 bp, Artificial
  Synthetic oligonucleotide
caaatatcggatgttcacctatgtgcgctgtgattatgacgttgtcttggtcgcc

SEQ ID NO: 339525 - DNA, 56 bp, Artificial
  Synthetic oligonucleotide
caaatatgaccctcgaattgaaattgaggtggctttcgtgcagacgttttagaaag

SEQ ID NO: 339526 - DNA, 57 bp, Artificial
  Synthetic oligonucleotide
caaatatgatatgagatggatgcaaaagaataagtcggggaaccatttagatgtctc

SEQ ID NO: 339527 - DNA, 53 bp, Artificial
  Synthetic oligonucleotide
caaatatgtttgcagtgggtaatatctgccataaggtcggtcagacatatggc

SEQ ID NO: 339528 - DNA, 55 bp, Artificial
  Synthetic oligonucleotide
caaatattgacttaactcaaacagcacaccctgttactttatcggctgaaacttc

SEQ ID NO: 339529 - DNA, 59 bp, Artificial
  Synthetic oligonucleotide
caaatattgcaaagcgagcggggttatcgcaccttatacgccaaatgaggtcgatcgaa

SEQ ID NO: 339530 - DNA, 57 bp, Artificial
  Synthetic oligonucleotide
caaatcaaacacaagaatcaaaaccaagaggttatgaagttccagacatcaaaggaa

SEQ ID NO: 339531 - DNA, 55 bp, Artificial
  Synthetic oligonucleotide
caaatcaacagtgttctctgattggtggagcaatcaactgaatatgggtcggacc

SEQ ID NO: 339532 - DNA, 55 bp, Artificial
  Synthetic oligonucleotide
caaatcaacggggctgcgaataatagcgggtgtggggcacctgttcatgacccag

SEQ ID NO: 339533 - DNA, 59 bp, Artificial
  Synthetic oligonucleotide
caaatcaagagaattagactttcctttatggtcaactgaggaacttcatgatgtcctag

SEQ ID NO: 339534 - DNA, 54 bp, Artificial
  Synthetic oligonucleotide
caaatcaagatccccgattggtttgctattactaaaaccaagaggggaggacaa

SEQ ID NO: 339535 - DNA, 60 bp, Artificial
  Synthetic oligonucleotide
caaatcaagttgcgcatccgaaacgacctagatgcggcactgccagaaacaaacggcaaa

SEQ ID NO: 339536 - DNA, 54 bp, Artificial
  Synthetic oligonucleotide
caaatcacaaacgacttcgagggggtaccgagctcccctgcaaccccaccaagc

SEQ ID NO: 339537 - DNA, 55 bp, Artificial
  Synthetic oligonucleotide
caaatcactttgaagttgctggtactacagttaaatcagggtggttcaagagtac

SEQ ID NO: 339538 - DNA, 57 bp, Artificial
  Synthetic oligonucleotide
caaatcagaagactgaattacaagccattaatctagctttacaggattcaggagtag

SEQ ID NO: 339539 - DNA, 60 bp, Artificial
  Synthetic oligonucleotide
caaatcagaggattcgtgtactttgtagaaacactagcgaggagcatctgtgagaaactc

SEQ ID NO: 339540 - DNA, 57 bp, Artificial
  Synthetic oligonucleotide
caaatcagatgttcctctggacatttgcaccagtgtgtgtaagtatcccgactattt

SEQ ID NO: 339541 - DNA, 57 bp, Artificial
  Synthetic oligonucleotide
caaatcagcaggaggggatccagaaattacaacgcatacttttaattgtgggggaga

SEQ ID NO: 339542 - DNA, 55 bp, Artificial
  Synthetic oligonucleotide
caaatcatccccaaaagttcctggtccgatcatgaagcctcatcaggagtgagct

SEQ ID NO: 339543 - DNA, 51 bp, Artificial
  Synthetic oligonucleotide
caaatcatctacatcgtcagaaattaggccaactaaacgacctaaagaaga

SEQ ID NO: 339544 - DNA, 58 bp, Artificial
  Synthetic oligonucleotide
caaatcatctcgagcaggattgccagttttcagcttgtacttacttatcaattcatta

SEQ ID NO: 339545 - DNA, 52 bp, Artificial
  Synthetic oligonucleotide
caaatcattcccacaagcgagctcgagctgtacgatcccgatgaaattgtgc

SEQ ID NO: 339546 - DNA, 56 bp, Artificial
  Synthetic oligonucleotide
caaatccaacgagccatgggtcatctctaaattcccacggaaagtgtcgaagtggt

SEQ ID NO: 339547 - DNA, 60 bp, Artificial
  Synthetic oligonucleotide
caaatccagatgctttacgcctcccacttcggcagctcgtgtcgagtagtctttcaggta

SEQ ID NO: 339548 - DNA, 57 bp, Artificial
  Synthetic oligonucleotide
caaatccagattgggacttcaatcccaacaaggacacttggccagacgccaacaagg

SEQ ID NO: 339549 - DNA, 55 bp, Artificial
  Synthetic oligonucleotide
caaatccagctacagtaatgatgcagagaggcaattttaggaaccaaagaaggcc

SEQ ID NO: 339550 - DNA, 60 bp, Artificial
  Synthetic oligonucleotide
caaatccagtcatacctcgatgtatcgcatagattagatgagctctcgacctgggaagcc

SEQ ID NO: 339551 - DNA, 60 bp, Artificial
  Synthetic oligonucleotide
caaatccattcaagctcaagaagtctgatggctccattagctggtctggattgttcaatc

SEQ ID NO: 339552 - DNA, 58 bp, Artificial
  Synthetic oligonucleotide
caaatccgttgaagtcgaatggaacgtgcatgtctccgtacgtgtacttgacgatccc

SEQ ID NO: 339553 - DNA, 60 bp, Artificial
  Synthetic oligonucleotide
caaatcctcgactgcataaaatttatggaatgccagaaataccgccgctatatatggaat

SEQ ID NO: 339554 - DNA, 58 bp, Artificial
  Synthetic oligonucleotide
caaatcctttctcgtatcctgtttatggccccggagttgtatgctcctctcgactctg

SEQ ID NO: 339555 - DNA, 60 bp, Artificial
  Synthetic oligonucleotide
caaatcgagggtcacgatacccttaaggctcgattaatgagtcgcactgctccttgatct

SEQ ID NO: 339556 - DNA, 57 bp, Artificial
  Synthetic oligonucleotide
caaatcgagtaacgttagtgattcatcactaagtgccaacaatcctcactcaaagat

SEQ ID NO: 339557 - DNA, 55 bp, Artificial
  Synthetic oligonucleotide
caaatcgcacatcttcttccaatccaacacattgtgatcttgtttgggttcccgc

SEQ ID NO: 339558 - DNA, 56 bp, Artificial
  Synthetic oligonucleotide
caaatcggaaacatggccaattggagagtcacccaagggggtggaagaaggctcca

SEQ ID NO: 339559 - DNA, 55 bp, Artificial
  Synthetic oligonucleotide
caaatcggcatttcttcttcaactccactttcgctaagtgccgctactggtgctc

SEQ ID NO: 339560 - DNA, 60 bp, Artificial
  Synthetic oligonucleotide
caaatcggcttatatgattaataagacggtgagctatcctgagatggctcaatttacaac

SEQ ID NO: 339561 - DNA, 55 bp, Artificial
  Synthetic oligonucleotide
caaatcgggcatattttctggcaaggcaaagtcaggtgagagagtctattcttcc

SEQ ID NO: 339562 - DNA, 52 bp, Artificial
  Synthetic oligonucleotide
caaatcgtcacgatccgcatgaatcactagactgcgacctataatactgttt

SEQ ID NO: 339563 - DNA, 55 bp, Artificial
  Synthetic oligonucleotide
caaatctacaagtgaatgtggtctgcctagcattcacacaccaagcaaaaccaag

SEQ ID NO: 339564 - DNA, 60 bp, Artificial
  Synthetic oligonucleotide
caaatctacatcctgattctacttataagcgacaagaagctctctggaagcaacttgtct

SEQ ID NO: 339565 - DNA, 57 bp, Artificial
  Synthetic oligonucleotide
caaatctaccatattcacgagacaacatccatcaatttcctcacggggggcgttacc

SEQ ID NO: 339566 - DNA, 58 bp, Artificial
  Synthetic oligonucleotide
caaatctaggggaaaagtgacactgagccaagaaaagattccactaatcaatcgcttc

SEQ ID NO: 339567 - DNA, 54 bp, Artificial
  Synthetic oligonucleotide
caaatctagtgtcaaccaatgcatatgaaacagtacctttgcattcatctgaat

SEQ ID NO: 339568 - DNA, 60 bp, Artificial
  Synthetic oligonucleotide
caaatctatgtcgctacacggcatcccagcatctacctgcgtcgggaaacgagattttcc

SEQ ID NO: 339569 - DNA, 59 bp, Artificial
  Synthetic oligonucleotide
caaatctcagattgttccgcttcctaccattttatcaggtggatggtccggaactgata

SEQ ID NO: 339570 - DNA, 50 bp, Artificial
  Synthetic oligonucleotide
caaatctcaggctattccgcttcctaccattctatcaagtagatggttcg

SEQ ID NO: 339571 - DNA, 60 bp, Artificial
  Synthetic oligonucleotide
caaatctggacagatttgtattccagatggctagtgccactgatgatgcacaaaaggatt

SEQ ID NO: 339572 - DNA, 59 bp, Artificial
  Synthetic oligonucleotide
caaatctgtacgggttcatcataaaggggaggtctcatttgagaaacgatactgatgta

SEQ ID NO: 339573 - DNA, 57 bp, Artificial
  Synthetic oligonucleotide
caaatgaaactttattggcgaatgttaccgcggtacgtcaagagtatgctataccag

SEQ ID NO: 339574 - DNA, 60 bp, Artificial
  Synthetic oligonucleotide
caaatgaaagccgcagcattgaaatcagctcaacctcgacttttcgggttggatggtggc

SEQ ID NO: 339575 - DNA, 58 bp, Artificial
  Synthetic oligonucleotide
caaatgaagaattatattgattacttatcggcctctcttggttctacgctgggtaatc

SEQ ID NO: 339576 - DNA, 59 bp, Artificial
  Synthetic oligonucleotide
caaatgacactctattggcgaatgtgaccgcagtgcgtcaagagtacgccataccagtt

SEQ ID NO: 339577 - DNA, 55 bp, Artificial
  Synthetic oligonucleotide
caaatgacatgggaaccttgtgttttcgggcactggatgggactgaggtgagtga

SEQ ID NO: 339578 - DNA, 55 bp, Artificial
  Synthetic oligonucleotide
caaatgacctagatgctggggacgacatgcctgaaaagtttgagaaacaactagg

SEQ ID NO: 339579 - DNA, 60 bp, Artificial
  Synthetic oligonucleotide
caaatgacgctggatcagacagggtaatggtatcacctctggctgtaacgtggtggaaca

SEQ ID NO: 339580 - DNA, 55 bp, Artificial
  Synthetic oligonucleotide
caaatgacgttcaaatcgattttctactaaatggccaagtaattaacaattacgc

SEQ ID NO: 339581 - DNA, 60 bp, Artificial
  Synthetic oligonucleotide
caaatgagaatccagcacataagagtcaactgatatggatggcatgccattctgcagcat

SEQ ID NO: 339582 - DNA, 56 bp, Artificial
  Synthetic oligonucleotide
caaatgatcttgtaccgtgatctttcatcgtaagcctaataagagaacccatacag

SEQ ID NO: 339583 - DNA, 58 bp, Artificial
  Synthetic oligonucleotide
caaatgatgttaacaggaacatgcatcacattgctggagcacgattttagagtatccg

SEQ ID NO: 339584 - DNA, 58 bp, Artificial
  Synthetic oligonucleotide
caaatgattacattaaagcacacggtcccattaaagttggacgtggtgtcatgttgga

SEQ ID NO: 339585 - DNA, 52 bp, Artificial
  Synthetic oligonucleotide
caaatgcaagatgcaatgtgccaggaagtcagagagcagtactcaggacctc

SEQ ID NO: 339586 - DNA, 60 bp, Artificial
  Synthetic oligonucleotide
caaatgcaattgcggctagcgtccaccatcaatccatatgcacatagttctgactcagct

SEQ ID NO: 339587 - DNA, 59 bp, Artificial
  Synthetic oligonucleotide
caaatgcactactgaaacaccgattcgagataattgaaggaagagaccggacaatggcc

SEQ ID NO: 339588 - DNA, 54 bp, Artificial
  Synthetic oligonucleotide
caaatgcactcaaacaacggaccgcaaattggctcaacggtcggttgcaaacct

SEQ ID NO: 339589 - DNA, 57 bp, Artificial
  Synthetic oligonucleotide
caaatgcagaactaaagaaggaagacggaaaactaatctatatggattcattataaa

SEQ ID NO: 339590 - DNA, 57 bp, Artificial
  Synthetic oligonucleotide
caaatgcagaactgtaggcttcttttggcttggacaccgcaaggttttaatgctact

SEQ ID NO: 339591 - DNA, 55 bp, Artificial
  Synthetic oligonucleotide
caaatgcaggacaaaagaagggagacggaaaacaaacctgtatgggttcattata

SEQ ID NO: 339592 - DNA, 60 bp, Artificial
  Synthetic oligonucleotide
caaatgcatatgcagagacaattggaagggagcaaatagaccggtaatcactatagaccc

SEQ ID NO: 339593 - DNA, 60 bp, Artificial
  Synthetic oligonucleotide
caaatgcatgaagacatttttcggatggaaagagcccaacattgtcaaaccacatgagaa

SEQ ID NO: 339594 - DNA, 60 bp, Artificial
  Synthetic oligonucleotide
caaatgcattgtagcgatcgaggtatctgatgaaagagttccggctagcataagagcggg

SEQ ID NO: 339595 - DNA, 60 bp, Artificial
  Synthetic oligonucleotide
caaatgcgattgctacgctggtctcgactgccacctctcattccgataagatgtctgaat

SEQ ID NO: 339596 - DNA, 60 bp, Artificial
  Synthetic oligonucleotide
caaatgcgcgctgcgggagtgctcttccccaactcaccctagtatcctctcatgtgtgtg

SEQ ID NO: 339597 - DNA, 55 bp, Artificial
  Synthetic oligonucleotide
caaatgcgctcttgaaacacagatttgaaataatcgaaggaagggatcggaatgt

SEQ ID NO: 339598 - DNA, 57 bp, Artificial
  Synthetic oligonucleotide
caaatgcgtgatgtgctgggaacatttgatactgcccaaataataaagctactgcca

SEQ ID NO: 339599 - DNA, 60 bp, Artificial
  Synthetic oligonucleotide
caaatgctcagggaaattcagttcagacacaggcaggagttacggtgagcatcgggggtg

SEQ ID NO: 339600 - DNA, 60 bp, Artificial
  Synthetic oligonucleotide
caaatgctcagtgacacgctgaagggattgtctgacagagtcgtgtttgtcctttgggct

SEQ ID NO: 339601 - DNA, 60 bp, Artificial
  Synthetic oligonucleotide
caaatgctgataatttggggaatacatcatcccaatgatgatacggaacaaaggacactg

SEQ ID NO: 339602 - DNA, 52 bp, Artificial
  Synthetic oligonucleotide
caaatggaaatggtacctgtaacttgtgtaacaaaaaactttactcaatggg

SEQ ID NO: 339603 - DNA, 52 bp, Artificial
  Synthetic oligonucleotide
caaatggaacaaaggtcaacacactggcagaaaggggagttgaagtagtgaa

SEQ ID NO: 339604 - DNA, 54 bp, Artificial
  Synthetic oligonucleotide
caaatggaactcctacgtcgttgcgacccaaggattgcatgtaggtttatatcg

SEQ ID NO: 339605 - DNA, 57 bp, Artificial
  Synthetic oligonucleotide
caaatggaactctgtcataaagacgcctttgaaactcctatcgaacgagaaagaagc

SEQ ID NO: 339606 - DNA, 60 bp, Artificial
  Synthetic oligonucleotide
caaatggacacttgttcagaaggaacaatggaatgctcacagttaagacatggcatggcg

SEQ ID NO: 339607 - DNA, 52 bp, Artificial
  Synthetic oligonucleotide
caaatggacgcgttccgtaggtaccattctgacccgactgctgtaacctgtc

SEQ ID NO: 339608 - DNA, 55 bp, Artificial
  Synthetic oligonucleotide
caaatggagaaagttagtagattttagagagctcaataaaagaacacaagacttt

SEQ ID NO: 339609 - DNA, 55 bp, Artificial
  Synthetic oligonucleotide
caaatggagtcaaaggccttcacaattgacaacatggaaactcttttgaaagctg

SEQ ID NO: 339610 - DNA, 56 bp, Artificial
  Synthetic oligonucleotide
caaatggattgtacacatttagaaggcaaaatcataatagtagctgtccatgtggc

SEQ ID NO: 339611 - DNA, 56 bp, Artificial
  Synthetic oligonucleotide
caaatggcactattggaaatggcactattagggacatgagaaactgctctttcaat

SEQ ID NO: 339612 - DNA, 60 bp, Artificial
  Synthetic oligonucleotide
caaatggcatgccttgaagagtaggttgaacagaaatgcacctagctatgttgtaacttc

SEQ ID NO: 339613 - DNA, 55 bp, Artificial
  Synthetic oligonucleotide
caaatggccacgaccctagcattgtctggttgaacctgagcgaagcccccatttc

SEQ ID NO: 339614 - DNA, 55 bp, Artificial
  Synthetic oligonucleotide
caaatggctaatcagagtaatatcagcactagtgatagcagtgcgtagccaaggg

SEQ ID NO: 339615 - DNA, 54 bp, Artificial
  Synthetic oligonucleotide
caaatgggtccttgctggtctagagaacaatctgaaagcggttgcacaatctga

SEQ ID NO: 339616 - DNA, 55 bp, Artificial
  Synthetic oligonucleotide
caaatgggtggactggaacggacagtaatttttcggtaaagcaagatatcgtagc

SEQ ID NO: 339617 - DNA, 57 bp, Artificial
  Synthetic oligonucleotide
caaatgggtggactggaacggacagtagcttttcggtgaaacaagatatagtagcaa

SEQ ID NO: 339618 - DNA, 60 bp, Artificial
  Synthetic oligonucleotide
caaatggtacaggcaatgagaacaattgggactcatcctagttccagcgctggtctaaaa

SEQ ID NO: 339619 - DNA, 55 bp, Artificial
  Synthetic oligonucleotide
caaatggtctacctacgtatgtcgttactcgtaaatacggaattagtatgggagc

SEQ ID NO: 339620 - DNA, 58 bp, Artificial
  Synthetic oligonucleotide
caaatggtgcatttatcgctcctcggtatgcttttgagttggtgtccttggggaatgg

SEQ ID NO: 339621 - DNA, 51 bp, Artificial
  Synthetic oligonucleotide
caaatgtacccggtacggtccaacatcccactatttgacctttctatgcag

SEQ ID NO: 339622 - DNA, 53 bp, Artificial
  Synthetic oligonucleotide
caaatgtacgggtatctgattggtctatattaaccccttaagggccgaaggcc

SEQ ID NO: 339623 - DNA, 60 bp, Artificial
  Synthetic oligonucleotide
caaatgtactctcctgtttttgagtacttgtcaggtgacagacaagtggaggaatggcca

SEQ ID NO: 339624 - DNA, 58 bp, Artificial
  Synthetic oligonucleotide
caaatgtagttgagtacaattctaaataatttgaccataagtccaaatcaagctcaac

SEQ ID NO: 339625 - DNA, 55 bp, Artificial
  Synthetic oligonucleotide
caaatgtattcagggattattgtaatcaattgtttactaatgtttattaatacgg

SEQ ID NO: 339626 - DNA, 59 bp, Artificial
  Synthetic oligonucleotide
caaatgtattggactaggggccccaaccatgaagacccatctgaaacaatgataccaca

SEQ ID NO: 339627 - DNA, 55 bp, Artificial
  Synthetic oligonucleotide
caaatgtcacgaggaatgccaatgaaatctgtcagctggggctggatacatgcgt

SEQ ID NO: 339628 - DNA, 60 bp, Artificial
  Synthetic oligonucleotide
caaatgtcagaccccagtaggtgctataaattccagtatgcctttccataatgtccatcc

SEQ ID NO: 339629 - DNA, 55 bp, Artificial
  Synthetic oligonucleotide
caaatgtcatgactctgtaactggaagcgaatgacgtcacccaacaaccgtcgcg

SEQ ID NO: 339630 - DNA, 55 bp, Artificial
  Synthetic oligonucleotide
caaatgtccaacttcatcattaaagagaacgagtaccacgaaattcaaggttcga

SEQ ID NO: 339631 - DNA, 50 bp, Artificial
  Synthetic oligonucleotide
caaatgtcccagaaatttgcaccattgtatgccgttgaggcaaagagaat

SEQ ID NO: 339632 - DNA, 55 bp, Artificial
  Synthetic oligonucleotide
caaatgtccgccattattagtgacatctaacatagacattacaacagaggagaga

SEQ ID NO: 339633 - DNA, 60 bp, Artificial
  Synthetic oligonucleotide
caaatgtcgtgagaaagatgatgactaactcacaagatacagaactctcctttacaatta

SEQ ID NO: 339634 - DNA, 60 bp, Artificial
  Synthetic oligonucleotide
caaatgtgacgagcttgctgcaaagttgtcggccctcggactcaatgctgtagcgtatta

SEQ ID NO: 339635 - DNA, 54 bp, Artificial
  Synthetic oligonucleotide
caaatgtgatgacacatgcatggagagcgtcaaaaatgggacttatgattatcc

SEQ ID NO: 339636 - DNA, 55 bp, Artificial
  Synthetic oligonucleotide
caaatgtgccaatacaaggggagtcgcacaccttggtaaaacatctctttggtcg

SEQ ID NO: 339637 - DNA, 54 bp, Artificial
  Synthetic oligonucleotide
caaatgtgcccgtaaaaagtttttccggtatgatatctcgtaccgagaacctga

SEQ ID NO: 339638 - DNA, 60 bp, Artificial
  Synthetic oligonucleotide
caaatgtgctcaatagcagcagttacctggtggaatacatatggaccaataggagatact

SEQ ID NO: 339639 - DNA, 54 bp, Artificial
  Synthetic oligonucleotide
caaatgtggaaatgtctcatacggctaaagcccacactgcacgggccgacaccc

SEQ ID NO: 339640 - DNA, 59 bp, Artificial
  Synthetic oligonucleotide
caaatgttaattcagagagcaggcaatactctctatttggagtaaacaagcaaattacc

SEQ ID NO: 339641 - DNA, 58 bp, Artificial
  Synthetic oligonucleotide
caaatgttcaaaacctgactgggtctcggagagcagttacaatgaaacaactctaatg

SEQ ID NO: 339642 - DNA, 55 bp, Artificial
  Synthetic oligonucleotide
caaattaaaccagcaaaggctgattcccttcagattgaggaggattccagcagtg

SEQ ID NO: 339643 - DNA, 57 bp, Artificial
  Synthetic oligonucleotide
caaattaaaggaaacccatcaggacaagtgtctacaactatggataataatatggta

SEQ ID NO: 339644 - DNA, 60 bp, Artificial
  Synthetic oligonucleotide
caaattaagtacgttagtgtcttcactacatgctagatcgcgactaagtcgatctaggtg

SEQ ID NO: 339645 - DNA, 56 bp, Artificial
  Synthetic oligonucleotide
caaattacagggtttgctcctttctccaaggacaactcaattcggctttctgctgg

SEQ ID NO: 339646 - DNA, 52 bp, Artificial
  Synthetic oligonucleotide
caaattacatgctgctgatactaggggctttgaacacagtgagggatatggg

SEQ ID NO: 339647 - DNA, 55 bp, Artificial
  Synthetic oligonucleotide
caaattacccgggacagattactcatcattatccttccgataaattgttacaatt

SEQ ID NO: 339648 - DNA, 60 bp, Artificial
  Synthetic oligonucleotide
caaattacgatgaaagtgaatctccttgcgaacgaagatgtcattacttggaagatagag

SEQ ID NO: 339649 - DNA, 50 bp, Artificial
  Synthetic oligonucleotide
caaattactcctcaagtcaaagcctgtaatcacgcagcaaaagaaaggca

SEQ ID NO: 339650 - DNA, 56 bp, Artificial
  Synthetic oligonucleotide
caaattagagggttcgtgtactttgttgagactttagctagaagcatttgcgaaaa

SEQ ID NO: 339651 - DNA, 54 bp, Artificial
  Synthetic oligonucleotide
caaattagcctatcgtgaattaggagaacgcctagctttaggtgggggtcacct

SEQ ID NO: 339652 - DNA, 56 bp, Artificial
  Synthetic oligonucleotide
caaattatcgttttgactgctgctgctaagacggcggatgcacctgtctatgtacc

SEQ ID NO: 339653 - DNA, 55 bp, Artificial
  Synthetic oligonucleotide
caaattatgtcaatcctactagcttgctgttttcagttactggattgcatggtgg

SEQ ID NO: 339654 - DNA, 60 bp, Artificial
  Synthetic oligonucleotide
caaattattaagtatcgatgggatatgcagaaatattgcacgatcaatacaccaaaacgt

SEQ ID NO: 339655 - DNA, 59 bp, Artificial
  Synthetic oligonucleotide
caaattattctaagccacaaatgatatcaattgagtatcgattttcgttcgaatataac

SEQ ID NO: 339656 - DNA, 60 bp, Artificial
  Synthetic oligonucleotide
caaattcaacaacttgaagctcacgtgcaagagaacaatgttgaaaacctgattcaatct

SEQ ID NO: 339657 - DNA, 58 bp, Artificial
  Synthetic oligonucleotide
caaattccagagtactaagatctatcgaagttgtgccgataaattcccctgtgagcgt

SEQ ID NO: 339658 - DNA, 57 bp, Artificial
  Synthetic oligonucleotide
caaattccatcagggggcactaggggtattcgctgtaccagagatgtgtttggccgg

SEQ ID NO: 339659 - DNA, 56 bp, Artificial
  Synthetic oligonucleotide
caaattccctttgtatcaaggattcctcacttccgattgaaggaccatttagtgtc

SEQ ID NO: 339660 - DNA, 55 bp, Artificial
  Synthetic oligonucleotide
caaattccgggagagtgggctgaattctgcgggtacctcattacacccaagggct

SEQ ID NO: 339661 - DNA, 55 bp, Artificial
  Synthetic oligonucleotide
caaattcgttgaagactgagcggcggcggaccactcggaggggtcgatctctcga

SEQ ID NO: 339662 - DNA, 55 bp, Artificial
  Synthetic oligonucleotide
caaattctcatgtggtgttaatcaatggttctagacgtagcacaatgaatgtccc

SEQ ID NO: 339663 - DNA, 59 bp, Artificial
  Synthetic oligonucleotide
caaattcttcgccacggctacgctgtaatggaacaacctctccaccattgcgccgacaa

SEQ ID NO: 339664 - DNA, 55 bp, Artificial
  Synthetic oligonucleotide
caaattgaacgcgcttccttcaaacaagtctaccgtgagatcatctgcgcattcg

SEQ ID NO: 339665 - DNA, 52 bp, Artificial
  Synthetic oligonucleotide
caaattgacccctggattttccaaaattttgtccaatgcccccttggtgagt

SEQ ID NO: 339666 - DNA, 55 bp, Artificial
  Synthetic oligonucleotide
caaattgaccctagcgacggtttacgctttggtggtaatactgttattgcagacc

SEQ ID NO: 339667 - DNA, 58 bp, Artificial
  Synthetic oligonucleotide
caaattgataacagtaggaagctcgaaataccagcaatcattcaccccaagtccggga

SEQ ID NO: 339668 - DNA, 55 bp, Artificial
  Synthetic oligonucleotide
caaattgattgactccggtcaacactctgaagtgatgcggccacacggctgggtg

SEQ ID NO: 339669 - DNA, 58 bp, Artificial
  Synthetic oligonucleotide
caaattgcacagtccgacaggccagagttatgtctcgttttgagttgccgccttactt

SEQ ID NO: 339670 - DNA, 60 bp, Artificial
  Synthetic oligonucleotide
caaattgcaggggccgcatttgtcaccacgcgcattgtcaagcgcatgaacatacaggac

SEQ ID NO: 339671 - DNA, 60 bp, Artificial
  Synthetic oligonucleotide
caaattgcatcccttgctactgtagagggcataacaactacctcagaggctatagctgct

SEQ ID NO: 339672 - DNA, 55 bp, Artificial
  Synthetic oligonucleotide
caaattgctacacaaatcgctgagtacaagcaatcagtagacggacgattcacaa

SEQ ID NO: 339673 - DNA, 55 bp, Artificial
  Synthetic oligonucleotide
caaattgctctattactggaaattgactgggctaccgcttcctgatgaatgcgac

SEQ ID NO: 339674 - DNA, 55 bp, Artificial
  Synthetic oligonucleotide
caaattgctgattccacaatggacggtgaagctatcaatcgtgaaatttgactga

SEQ ID NO: 339675 - DNA, 60 bp, Artificial
  Synthetic oligonucleotide
caaattgctttcgtgtgttttcttgagcctctcatgtcttccttcattggatgtacgtga

SEQ ID NO: 339676 - DNA, 60 bp, Artificial
  Synthetic oligonucleotide
caaattggcaggatcggagatcattattatacaacaaattgctacactggagcggaggct

SEQ ID NO: 339677 - DNA, 60 bp, Artificial
  Synthetic oligonucleotide
caaattggccattggcaaccttgttatgtcaacgaatctggcagcactacgtaaacagct

SEQ ID NO: 339678 - DNA, 55 bp, Artificial
  Synthetic oligonucleotide
caaattgggcaactcagctattgtcactcaagaagcagcaaactactgttgcgct

SEQ ID NO: 339679 - DNA, 59 bp, Artificial
  Synthetic oligonucleotide
caaattgtacacagtgcgatttggaagccttgacccagtagtcgtcaagggtgtagcag

SEQ ID NO: 339680 - DNA, 60 bp, Artificial
  Synthetic oligonucleotide
caaattgtagccggagacattgatctgtgattgctcctgtgttatgtaacttaggcaggg

SEQ ID NO: 339681 - DNA, 52 bp, Artificial
  Synthetic oligonucleotide
caaatttagtcttaaacgcggccttaggatttccgacgggaatttacatatc

SEQ ID NO: 339682 - DNA, 60 bp, Artificial
  Synthetic oligonucleotide
caaatttagttcattagtgtcgtcagttgagtggtatctaagatctatggaactaccaga

SEQ ID NO: 339683 - DNA, 55 bp, Artificial
  Synthetic oligonucleotide
caaatttatgaagccgggacaaaactgcctctccacaaggatgacgaagagtgct

SEQ ID NO: 339684 - DNA, 60 bp, Artificial
  Synthetic oligonucleotide
caaatttcacaggatcatatggggttaggatctatgtaagacctgtaaacattgaggcat

SEQ ID NO: 339685 - DNA, 59 bp, Artificial
  Synthetic oligonucleotide
caaatttcacgcggtgtgaacggcgatcccattggtcgcgcgtggcttcctgtgcgtag

SEQ ID NO: 339686 - DNA, 59 bp, Artificial
  Synthetic oligonucleotide
caaatttcacgctccgcgcgcgacattgctatcgaaattggatttctcccccccatcga

SEQ ID NO: 339687 - DNA, 60 bp, Artificial
  Synthetic oligonucleotide
caaatttcaggcacactgtcagtgataccaggtccagtcgggactattagtgcaggcgtt

SEQ ID NO: 339688 - DNA, 55 bp, Artificial
  Synthetic oligonucleotide
caaatttcatcaagggtgtttgcttgtagtgtgtgttccagaggctgaaatgggg

SEQ ID NO: 339689 - DNA, 57 bp, Artificial
  Synthetic oligonucleotide
caaatttgaaatcactggtcgcactcgtcaaggttattttctccttgcgacgtaggc

SEQ ID NO: 339690 - DNA, 55 bp, Artificial
  Synthetic oligonucleotide
caaatttgagtcggtcactataactgatcctagaagtaacacggaaactaccgtg

SEQ ID NO: 339691 - DNA, 53 bp, Artificial
  Synthetic oligonucleotide
caaatttgcactataatcatctcaggtattcgtcgttgtatagagagatcatt

SEQ ID NO: 339692 - DNA, 50 bp, Artificial
  Synthetic oligonucleotide
caaatttgcgtgaagagtttaatcagttatcatcagaaatagctgtatca

SEQ ID NO: 339693 - DNA, 56 bp, Artificial
  Synthetic oligonucleotide
caaatttggcaggctcatcagcacccccccaaaacaccaagagaagccaaaaggac

SEQ ID NO: 339694 - DNA, 54 bp, Artificial
  Synthetic oligonucleotide
caaatttggctacggggcaaaagacgtccgttgccatgccagaaaggccgtaaa

SEQ ID NO: 339695 - DNA, 58 bp, Artificial
  Synthetic oligonucleotide
caacaaaactctatacccaaagtcatcgaaggcatctcgtggaatttgtaacatggtc

SEQ ID NO: 339696 - DNA, 60 bp, Artificial
  Synthetic oligonucleotide
caacaaaagctgtgcaatcccactttccattcctttctcgtgctgtccgatgcttatctc

SEQ ID NO: 339697 - DNA, 54 bp, Artificial
  Synthetic oligonucleotide
caacaaaagggatgacacttcttctcccagaaccggagtggacataccctcgtt

SEQ ID NO: 339698 - DNA, 55 bp, Artificial
  Synthetic oligonucleotide
caacaaaataacagaaatcgatctagaagccttagaaagattaggtcggggtctg

SEQ ID NO: 339699 - DNA, 60 bp, Artificial
  Synthetic oligonucleotide
caacaaaatgcaatcaatgtaggaacaatctataagagttggattatactgggcatgaat

SEQ ID NO: 339700 - DNA, 55 bp, Artificial
  Synthetic oligonucleotide
caacaaaatggaatttgagccgtttcagtctttagttcctaaggccattagaggc

SEQ ID NO: 339701 - DNA, 60 bp, Artificial
  Synthetic oligonucleotide
caacaaacaccagtaatcatttccactaaccatgacatctactctgtagttggtggcaat

SEQ ID NO: 339702 - DNA, 55 bp, Artificial
  Synthetic oligonucleotide
caacaaacaccgtaattaagattgcgcttactaggaggccattaggcataaagag

SEQ ID NO: 339703 - DNA, 58 bp, Artificial
  Synthetic oligonucleotide
caacaaaccgcgataagcgcatgacgtcatggtctcactgtaggtacggggcggagta

SEQ ID NO: 339704 - DNA, 60 bp, Artificial
  Synthetic oligonucleotide
caacaaactagagcgtgacttgcagtcaaaaattggatcagtcgtctcatcgatagaatg

SEQ ID NO: 339705 - DNA, 55 bp, Artificial
  Synthetic oligonucleotide
caacaaagggcctctgcgggccaaatcagcatacaacctacgttttctgtgcaga

SEQ ID NO: 339706 - DNA, 59 bp, Artificial
  Synthetic oligonucleotide
caacaaagtttatcaacggagaacaaatagagatccagtacagttacgatccagcaaca

SEQ ID NO: 339707 - DNA, 56 bp, Artificial
  Synthetic oligonucleotide
caacaaatagtaaggtttgacacgacagtgaagcatattgtcggtaaaagctacgg

SEQ ID NO: 339708 - DNA, 58 bp, Artificial
  Synthetic oligonucleotide
caacaaatagtacttatggcaacataggttggggtgcacgtagtgtgagtctcgtaat

SEQ ID NO: 339709 - DNA, 52 bp, Artificial
  Synthetic oligonucleotide
caacaaatcatacttataacaatcaaccacaactacaaactataacaggatt

SEQ ID NO: 339710 - DNA, 58 bp, Artificial
  Synthetic oligonucleotide
caacaaatcccaggtgctagatcctaccctcaagggaattctagacaaagatggtgtg

SEQ ID NO: 339711 - DNA, 56 bp, Artificial
  Synthetic oligonucleotide
caacaaatccctgagggtgtcggactgttcagacctgaaataaaacagtacgacga

SEQ ID NO: 339712 - DNA, 60 bp, Artificial
  Synthetic oligonucleotide
caacaaatctgccaataacgctcttagggctcacaaacttgttgagctgatcgctcatat

SEQ ID NO: 339713 - DNA, 55 bp, Artificial
  Synthetic oligonucleotide
caacaaatggatagtcccagcagaatgccaaatagagagagacttaagcatagcc

SEQ ID NO: 339714 - DNA, 55 bp, Artificial
  Synthetic oligonucleotide
caacaaatggggattgtggtgcaccattagtaattaatgaaacccaagttatacg

SEQ ID NO: 339715 - DNA, 51 bp, Artificial
  Synthetic oligonucleotide
caacaacaatacaagaaagagtgtacatatgggaccagggggagcatttta

SEQ ID NO: 339716 - DNA, 55 bp, Artificial
  Synthetic oligonucleotide
caacaacaattggtcaggatactcaggaagtttcattgactactgggatgaaagc

SEQ ID NO: 339717 - DNA, 60 bp, Artificial
  Synthetic oligonucleotide
caacaacaccttgtattgccccactgattgcttccgcaagcacccggaagccacatactc

SEQ ID NO: 339718 - DNA, 55 bp, Artificial
  Synthetic oligonucleotide
caacaacactgacgtcgtcaacgtgtcagtgctatgtcgctggagtgtgcgtctc

SEQ ID NO: 339719 - DNA, 59 bp, Artificial
  Synthetic oligonucleotide
caacaacagatagtggaaagatcatacctgaatggtgctgccgcagttgcaccatgcct

SEQ ID NO: 339720 - DNA, 59 bp, Artificial
  Synthetic oligonucleotide
caacaacagtcgaaccagtacttgatggtccatatcaacctaccacgttcaatccacca

SEQ ID NO: 339721 - DNA, 60 bp, Artificial
  Synthetic oligonucleotide
caacaacagtctccacagagcagaatgttccagatcctcaagttggtataacaaccatga

SEQ ID NO: 339722 - DNA, 60 bp, Artificial
  Synthetic oligonucleotide
caacaacatgcgcctaattgacggctctgatgttagtcatgctaccatcaaccgatatgc

SEQ ID NO: 339723 - DNA, 56 bp, Artificial
  Synthetic oligonucleotide
caacaacatggagtcattgctacaaggactaggcattccggacgttttggaagggt

SEQ ID NO: 339724 - DNA, 58 bp, Artificial
  Synthetic oligonucleotide
caacaaccaatagtatattgaatgatgatttagtgttttccgaaagatatgattccct

SEQ ID NO: 339725 - DNA, 55 bp, Artificial
  Synthetic oligonucleotide
caacaaccagctcgtgaccaaaggagtcacggtcctgaacctgccaacagggttc

SEQ ID NO: 339726 - DNA, 54 bp, Artificial
  Synthetic oligonucleotide
caacaaccatgtggtgtacaaccatcaagaagcagggaaatacgagaaccacac

SEQ ID NO: 339727 - DNA, 60 bp, Artificial
  Synthetic oligonucleotide
caacaacccatatagggttctagatggaagaaactgcacattaatagatgcaatgctagg

SEQ ID NO: 339728 - DNA, 60 bp, Artificial
  Synthetic oligonucleotide
caacaacctacccagtgtttctcactttctgagcctttagatctagattgcttgatcagt

SEQ ID NO: 339729 - DNA, 60 bp, Artificial
  Synthetic oligonucleotide
caacaacctgcacaatgttgagggtataggcattttaaatgcagtccaactacagagcaa

SEQ ID NO: 339730 - DNA, 59 bp, Artificial
  Synthetic oligonucleotide
caacaacgactgttagaatgccaataaccactgagagcgtattaagtatgcggtttgtg

SEQ ID NO: 339731 - DNA, 55 bp, Artificial
  Synthetic oligonucleotide
caacaacgccgccgctagaactaatgaccgtggacactctactggaaaacttttc

SEQ ID NO: 339732 - DNA, 55 bp, Artificial
  Synthetic oligonucleotide
caacaacggggccatttgctattctaactggatcaaccccaactgcacagcaact

SEQ ID NO: 339733 - DNA, 55 bp, Artificial
  Synthetic oligonucleotide
caacaactacactcatatcgcagctgggaagactctagtactgcctttcaacaga

SEQ ID NO: 339734 - DNA, 58 bp, Artificial
  Synthetic oligonucleotide
caacaactagcaaacaacggcttctatcgtgtaagtatcaatcaagattgggacgcct

SEQ ID NO: 339735 - DNA, 55 bp, Artificial
  Synthetic oligonucleotide
caacaactagccaaggtccctctttgggaggattgctcgtgagtcatatagcccc

SEQ ID NO: 339736 - DNA, 59 bp, Artificial
  Synthetic oligonucleotide
caacaactcaaattgttgctagagcaggaaacgatgactttacctttggttggatgata

SEQ ID NO: 339737 - DNA, 52 bp, Artificial
  Synthetic oligonucleotide
caacaactgcacagaacgcgactccactgtacaacgcagttgaatacaccat

SEQ ID NO: 339738 - DNA, 55 bp, Artificial
  Synthetic oligonucleotide
caacaactggacatcaggtgcatctatcgtaggtagagactccaatggtagtaca

SEQ ID NO: 339739 - DNA, 53 bp, Artificial
  Synthetic oligonucleotide
caacaactggcaaccaaaacatgtctggaaacagcggttcaattgtccaaaat

SEQ ID NO: 339740 - DNA, 60 bp, Artificial
  Synthetic oligonucleotide
caacaacttagtacagctttcagcgcacttagaactgttcatgaacatccgaataaattc

SEQ ID NO: 339741 - DNA, 60 bp, Artificial
  Synthetic oligonucleotide
caacaacttgttgttgcccggcaaaagcttagagatgcagagaaagcagtggaaatggac

SEQ ID NO: 339742 - DNA, 55 bp, Artificial
  Synthetic oligonucleotide
caacaagaatgttcgtggtgtcaggggtcaggcagcattcgtcaaccagggcctg

SEQ ID NO: 339743 - DNA, 55 bp, Artificial
  Synthetic oligonucleotide
caacaagacaagcactcataaacccagtagaatacgttggatcaccttttccgac

SEQ ID NO: 339744 - DNA, 55 bp, Artificial
  Synthetic oligonucleotide
caacaagacgttcacagatggcgttgcctactactctgatgagcagccccgtcaa

SEQ ID NO: 339745 - DNA, 56 bp, Artificial
  Synthetic oligonucleotide
caacaagagcttcgtctttaacgattgccagaacaagctcttgtgctggtgggaag

SEQ ID NO: 339746 - DNA, 60 bp, Artificial
  Synthetic oligonucleotide
caacaagaggcaggcaagtatgagaatcatactgaaaacgcattaatgttgtatatggcc

SEQ ID NO: 339747 - DNA, 55 bp, Artificial
  Synthetic oligonucleotide
caacaagcaccctgcaagagcaaattcactagactaccaaggctaaccagcctat

SEQ ID NO: 339748 - DNA, 60 bp, Artificial
  Synthetic oligonucleotide
caacaagctgccttgaaatggagaaaggacataggtttccgtgtcaatgcaaacacagcg

SEQ ID NO: 339749 - DNA, 51 bp, Artificial
  Synthetic oligonucleotide
caacaaggatgttgcttgtctaggtaaattcctcaaggtgaactgtgttcg

SEQ ID NO: 339750 - DNA, 55 bp, Artificial
  Synthetic oligonucleotide
caacaaggatttcaagctatagatgacccagatataccattttaaagtgggaggg

SEQ ID NO: 339751 - DNA, 50 bp, Artificial
  Synthetic oligonucleotide
caacaaggtccactgagtctatagagtctctactgagatcagtagaggtt

SEQ ID NO: 339752 - DNA, 52 bp, Artificial
  Synthetic oligonucleotide
caacaaggtccttacggaacaggcccccccagttgcaccggctcccccgaga

SEQ ID NO: 339753 - DNA, 58 bp, Artificial
  Synthetic oligonucleotide
caacaagtaggggatttgtctacgttccgcaataagatatcagctaaaacacatatta

SEQ ID NO: 339754 - DNA, 55 bp, Artificial
  Synthetic oligonucleotide
caacaagtctaggatccctgagagtcatgcacatagggctagaaaacactgcagg

SEQ ID NO: 339755 - DNA, 57 bp, Artificial
  Synthetic oligonucleotide
caacaagtggtatagcgcataaatttataaacgagtggtatcaaagagataatgggg

SEQ ID NO: 339756 - DNA, 60 bp, Artificial
  Synthetic oligonucleotide
caacaagtggtggaacggattcgttcaagaggactgcaagagggtcataattgatgactg

SEQ ID NO: 339757 - DNA, 59 bp, Artificial
  Synthetic oligonucleotide
caacaagttatgtggcatgttattaatcacagaagatgctaatcataaattcactgggg

SEQ ID NO: 339758 - DNA, 60 bp, Artificial
  Synthetic oligonucleotide
caacaagttcaatctccacacagacatcaacgataagcagaaggttaaggctaaaagaga

SEQ ID NO: 339759 - DNA, 60 bp, Artificial
  Synthetic oligonucleotide
caacaagtttcaagtctttccttccatgtatgtcgaagagctttttgatgtcatctgctc

SEQ ID NO: 339760 - DNA, 55 bp, Artificial
  Synthetic oligonucleotide
caacaataaagaaaagctacaataataccaaccaagaagatcttttggtactgtg

SEQ ID NO: 339761 - DNA, 56 bp, Artificial
  Synthetic oligonucleotide
caacaataaagaggacccacagtaacaccaatgtagaagaccttttgatattatgg

SEQ ID NO: 339762 - DNA, 57 bp, Artificial
  Synthetic oligonucleotide
caacaataaagcgacgtggttaaacatgcctggcgctacagatggagcgaaaaaaac

SEQ ID NO: 339763 - DNA, 60 bp, Artificial
  Synthetic oligonucleotide
caacaataacacatttaatggaacagggccatgcacaaatgtcagcacagtacagtgtac

SEQ ID NO: 339764 - DNA, 51 bp, Artificial
  Synthetic oligonucleotide
caacaatacaagtggggaacaaatgctgatcatttgggggatacatcaccc

SEQ ID NO: 339765 - DNA, 58 bp, Artificial
  Synthetic oligonucleotide
caacaatacactttaatcagtcctcaggaggagatatagaaattacaacacacagttt

SEQ ID NO: 339766 - DNA, 60 bp, Artificial
  Synthetic oligonucleotide
caacaatatgaggacacgtatgacttttggaccaggacacgtattctatagaacaggaga

SEQ ID NO: 339767 - DNA, 55 bp, Artificial
  Synthetic oligonucleotide
caacaatcacaacccaagaggcagctaatgcagttgttgcatatgctgaatggcc

SEQ ID NO: 339768 - DNA, 58 bp, Artificial
  Synthetic oligonucleotide
caacaatcagtttaggcaagtagttattgatggtgtattgaatcaggtactgaatgac

SEQ ID NO: 339769 - DNA, 60 bp, Artificial
  Synthetic oligonucleotide
caacaatcatgtggtctacaatcaccaagaggccgggaagtacgagaatcatacggagaa

SEQ ID NO: 339770 - DNA, 60 bp, Artificial
  Synthetic oligonucleotide
caacaatcatgtggtctacaatcatcaagaggctggcaagtatgagaatcacactgagaa

SEQ ID NO: 339771 - DNA, 60 bp, Artificial
  Synthetic oligonucleotide
caacaatctatgagggaaacgctgacatcgtgaactccacaacagtgaccggggacataa

SEQ ID NO: 339772 - DNA, 55 bp, Artificial
  Synthetic oligonucleotide
caacaatctcgtcaacaggttgttgtctgaagaagtataaggcagtatggctaat

SEQ ID NO: 339773 - DNA, 60 bp, Artificial
  Synthetic oligonucleotide
caacaatgagaccatggcacttgaaccggtggctggggcttcaatagccgccccactcac

SEQ ID NO: 339774 - DNA, 55 bp, Artificial
  Synthetic oligonucleotide
caacaatgattggagaaatgtctagctatttcacacattggacaggcagtctacg

SEQ ID NO: 339775 - DNA, 54 bp, Artificial
  Synthetic oligonucleotide
caacaatgcaccaaattcgagaaaaggtttgtggacgccaaagccggtcaaact

SEQ ID NO: 339776 - DNA, 59 bp, Artificial
  Synthetic oligonucleotide
caacaatggaggacaaaaggaagctgtttgcaaaatgggctattacctacactgacaca

SEQ ID NO: 339777 - DNA, 54 bp, Artificial
  Synthetic oligonucleotide
caacaatggctcactcgaagtgaaaccctcatcttcttgcgaccctatgacccc

SEQ ID NO: 339778 - DNA, 51 bp, Artificial
  Synthetic oligonucleotide
caacaatggggctattctggtaatttaagtagcaatcatgaccggtattgt

SEQ ID NO: 339779 - DNA, 55 bp, Artificial
  Synthetic oligonucleotide
caacaatgttcagtattactcacattactgtaggaagtacgcaccactttacgca

SEQ ID NO: 339780 - DNA, 53 bp, Artificial
  Synthetic oligonucleotide
caacaattactatagctggtggggatcccccgtcaaagtttgagccacagacg

SEQ ID NO: 339781 - DNA, 51 bp, Artificial
  Synthetic oligonucleotide
caacaattagaaggcaatgactagtgattttaacctgccacctgtagtagc

SEQ ID NO: 339782 - DNA, 60 bp, Artificial
  Synthetic oligonucleotide
caacaatttgaacatatcgtacagctccgaagagtactgactactgctacaataactctt

SEQ ID NO: 339783 - DNA, 60 bp, Artificial
  Synthetic oligonucleotide
caacacaaagtcaatgatggttcaatctttggcaactggaaagcctgtcaaactctcgcc

SEQ ID NO: 339784 - DNA, 60 bp, Artificial
  Synthetic oligonucleotide
caacacaaatgacaattcaagaggcatgaattatgaaactccaatgtttaataaggtggc

SEQ ID NO: 339785 - DNA, 51 bp, Artificial
  Synthetic oligonucleotide
caacacaacaacgtcctctgagcccgccccctctgactgcccccccgactc

SEQ ID NO: 339786 - DNA, 55 bp, Artificial
  Synthetic oligonucleotide
caacacaacccgacgtggccacatgtcggttctacactttagagtccgtgcagtg

SEQ ID NO: 339787 - DNA, 57 bp, Artificial
  Synthetic oligonucleotide
caacacaactgtttaatagtacttggaatgtaactggtacttggaatgttactgcaa

SEQ ID NO: 339788 - DNA, 54 bp, Artificial
  Synthetic oligonucleotide
caacacaactgtttaatagtacttggaatgttactgaaggggcaaataaaaaca

SEQ ID NO: 339789 - DNA, 60 bp, Artificial
  Synthetic oligonucleotide
caacacaagaggcagccaatgcagttgtggcatatggtgaatggccatcgttcctaaatg

SEQ ID NO: 339790 - DNA, 57 bp, Artificial
  Synthetic oligonucleotide
caacacaatactattcctgtaaaggtaggtatagactgtttatctaatgagtggtcc

SEQ ID NO: 339791 - DNA, 57 bp, Artificial
  Synthetic oligonucleotide
caacacaattgtttaacagtacttgggggtctaatagtacttggaatgatacagaga

SEQ ID NO: 339792 - DNA, 55 bp, Artificial
  Synthetic oligonucleotide
caacacacaattaaagggaagccagtatctagcaattttgaccctatagagttcc

SEQ ID NO: 339793 - DNA, 60 bp, Artificial
  Synthetic oligonucleotide
caacacacagaacatcagtattgcatacaaaatcattccccggcacacacaattcactgg

SEQ ID NO: 339794 - DNA, 55 bp, Artificial
  Synthetic oligonucleotide
caacacacctcccaactctacttcaacgatacgagtgccaaactcgacactgtcc

SEQ ID NO: 339795 - DNA, 50 bp, Artificial
  Synthetic oligonucleotide
caacacacgagcctctacgagcgccacgtaaatagcatatctggtccgta

SEQ ID NO: 339796 - DNA, 58 bp, Artificial
  Synthetic oligonucleotide
caacacactataaattcaagtaccatggggaatggctgagtttttgccgctccagggc

SEQ ID NO: 339797 - DNA, 55 bp, Artificial
  Synthetic oligonucleotide
caacacactcatccagttgttcacacagctattcactcagatgtcacagctccag

SEQ ID NO: 339798 - DNA, 52 bp, Artificial
  Synthetic oligonucleotide
caacacagacagtcctcccacagagtgttacctctatagccattcaagacat

SEQ ID NO: 339799 - DNA, 51 bp, Artificial
  Synthetic oligonucleotide
caacacagatgtctagaagtgttaaacagtgttaatgacagagttgttggc

SEQ ID NO: 339800 - DNA, 57 bp, Artificial
  Synthetic oligonucleotide
caacacagcaagtagggggcgcaattgggaccgttagaaaactatggccaagcatgg

SEQ ID NO: 339801 - DNA, 60 bp, Artificial
  Synthetic oligonucleotide
caacacagccctgatggaacccgggctgaatctgcctgtggatgctgcttcatacatcag

SEQ ID NO: 339802 - DNA, 56 bp, Artificial
  Synthetic oligonucleotide
caacacaggaacaataggagccgtatccttagacttctccccaggaacatcaggat

SEQ ID NO: 339803 - DNA, 60 bp, Artificial
  Synthetic oligonucleotide
caacacagtaacgcaattagcgagttgatgttggctgtgtactacgatcgaatacatgtt

SEQ ID NO: 339804 - DNA, 55 bp, Artificial
  Synthetic oligonucleotide
caacacagtcatacatgagaaaataggagaccatcaaatagtgacccatccaaca

SEQ ID NO: 339805 - DNA, 55 bp, Artificial
  Synthetic oligonucleotide
caacacagtcatacatgagaaaataggggaccaccaaacagtgattcacccaaca

SEQ ID NO: 339806 - DNA, 60 bp, Artificial
  Synthetic oligonucleotide
caacacagtggcctagcaggaggaatgaaggtgttgtacaggcaatgaggttgatacaag

SEQ ID NO: 339807 - DNA, 60 bp, Artificial
  Synthetic oligonucleotide
caacacagttatcataagaaatatgacgactcgtggtacagatgttagagatcaggatac

SEQ ID NO: 339808 - DNA, 57 bp, Artificial
  Synthetic oligonucleotide
caacacatcgtatagatagaaagaaacggcacgactgttctagtatacaaactccca

SEQ ID NO: 339809 - DNA, 57 bp, Artificial
  Synthetic oligonucleotide
caacacatgacgaagccaaaacatactttgcccccctactaggaaagtatgataaga

SEQ ID NO: 339810 - DNA, 60 bp, Artificial
  Synthetic oligonucleotide
caacacatgacgcacttgacgcattactagcagctctacagaacgcaggctacacaaatg

SEQ ID NO: 339811 - DNA, 57 bp, Artificial
  Synthetic oligonucleotide
caacacatgggtcgttaacaatattctcgatgtacctcgctttcgaaaagtgttaga

SEQ ID NO: 339812 - DNA, 60 bp, Artificial
  Synthetic oligonucleotide
caacaccaaatggaatgagaatcaaaatcctcggatgtttctggcgatgataacatacat

SEQ ID NO: 339813 - DNA, 60 bp, Artificial
  Synthetic oligonucleotide
caacaccaaatttgacagagttggacacctatctgtcatatattggtgcaatgtatgctt

SEQ ID NO: 339814 - DNA, 55 bp, Artificial
  Synthetic oligonucleotide
caacaccaagtgccaaactccaatgggtgcgataaactctagcatgccactccac

SEQ ID NO: 339815 - DNA, 58 bp, Artificial
  Synthetic oligonucleotide
caacaccaggagttcattcaaactagagctccaaaggtaactatagattgtgcggctt

SEQ ID NO: 339816 - DNA, 55 bp, Artificial
  Synthetic oligonucleotide
caacaccatagggaatttaatcgctccaaggggccattacaaactcaacagtcag

SEQ ID NO: 339817 - DNA, 55 bp, Artificial
  Synthetic oligonucleotide
caacaccatgtatcctcagaagctcttgccatcaaattgccacagtttcacttgg

SEQ ID NO: 339818 - DNA, 60 bp, Artificial
  Synthetic oligonucleotide
caacaccattggctggagagaggacattgatagagcacccttgagagaagttcgagtagg

SEQ ID NO: 339819 - DNA, 58 bp, Artificial
  Synthetic oligonucleotide
caacacccaccattgtttcggcttaaagaaatcaggctctagcgcgttgtttgcattg

SEQ ID NO: 339820 - DNA, 57 bp, Artificial
  Synthetic oligonucleotide
caacaccccgaccactcaaaatgccaggtggtccaccctgccatcaacgatctaaat

SEQ ID NO: 339821 - DNA, 57 bp, Artificial
  Synthetic oligonucleotide
caacaccccggccactcaggatacccggtggtccaccctgccatcagcgatccaaat

SEQ ID NO: 339822 - DNA, 56 bp, Artificial
  Synthetic oligonucleotide
caacaccggagcgacgagcggtgctttttgggacaagctgaacgcaactccttacc

SEQ ID NO: 339823 - DNA, 59 bp, Artificial
  Synthetic oligonucleotide
caacaccgggaccggtgtgatgtggctggtgtatgacactactcccggcggacaagcgc

SEQ ID NO: 339824 - DNA, 55 bp, Artificial
  Synthetic oligonucleotide
caacaccgtggcaaacctcaacgagtctcggtacgtgtcctacacctcctacgtc

SEQ ID NO: 339825 - DNA, 55 bp, Artificial
  Synthetic oligonucleotide
caacacctcgaccaattagacttccgaatgggcctccttgttttcagcggtcaaa

SEQ ID NO: 339826 - DNA, 57 bp, Artificial
  Synthetic oligonucleotide
caacacgaacgatctactcaattaatttatcggtgttagttccacaattaatagtca

SEQ ID NO: 339827 - DNA, 55 bp, Artificial
  Synthetic oligonucleotide
caacacgaagcacatgggactatgtagatacctatttaaggaatgccctagatgg

SEQ ID NO: 339828 - DNA, 57 bp, Artificial
  Synthetic oligonucleotide
caacacgatatcgttcaatcattcaaaccaacttcaagctctttatcaattaccagc

SEQ ID NO: 339829 - DNA, 60 bp, Artificial
  Synthetic oligonucleotide
caacacgattcaacgcttacagtggcttgctgccaaccttcgttcaatctcttggtcttc

SEQ ID NO: 339830 - DNA, 55 bp, Artificial
  Synthetic oligonucleotide
caacacgcaaacggtgcctcgactaatatctcaaacgtcggaaacggcccatata

SEQ ID NO: 339831 - DNA, 52 bp, Artificial
  Synthetic oligonucleotide
caacacgcgactctcaaacgcggaaagttgcatcccgctttgtacccctact

SEQ ID NO: 339832 - DNA, 52 bp, Artificial
  Synthetic oligonucleotide
caacacggagggactaaagttgtaattaatagggaacctaggttatatatac

SEQ ID NO: 339833 - DNA, 60 bp, Artificial
  Synthetic oligonucleotide
caacacggtgctctctcgggcgtggctgcccatgagttcaggtgatcgaacaacgaaagt

SEQ ID NO: 339834 - DNA, 55 bp, Artificial
  Synthetic oligonucleotide
caacacgtaaattagtgccccgattagagtgttattcacgtccaaacacatcagg

SEQ ID NO: 339835 - DNA, 60 bp, Artificial
  Synthetic oligonucleotide
caacacgtagcgcctcattttgcgggtcaccatattcttgggaacaagagctacagcatg

SEQ ID NO: 339836 - DNA, 55 bp, Artificial
  Synthetic oligonucleotide
caacacgtttggacgtccgttttagacatccactatagtagatagctttcacagg

SEQ ID NO: 339837 - DNA, 55 bp, Artificial
  Synthetic oligonucleotide
caacactaccacttgagtctccattgtaattgcgctcctggtcgcccttttttcg

SEQ ID NO: 339838 - DNA, 59 bp, Artificial
  Synthetic oligonucleotide
caacactacggtacgctaatgagatagaaaggtacataaataaagtatatagcatagta

SEQ ID NO: 339839 - DNA, 55 bp, Artificial
  Synthetic oligonucleotide
caacactactactgcctcctcgtattaacaaagcgaaatatatacccgtcagcct

SEQ ID NO: 339840 - DNA, 59 bp, Artificial
  Synthetic oligonucleotide
caacactatagaagtcttcagatcgaatggtttgacagctaacgagtcgggaagactaa

SEQ ID NO: 339841 - DNA, 55 bp, Artificial
  Synthetic oligonucleotide
caacactatagagaatgccagacagggagcagcgagggtgacatcctggctcggg

SEQ ID NO: 339842 - DNA, 60 bp, Artificial
  Synthetic oligonucleotide
caacactatagaggtattcagatcgaatggtctaacggctaatgaatcaggaaggctaat

SEQ ID NO: 339843 - DNA, 58 bp, Artificial
  Synthetic oligonucleotide
caacactatagaggtcttcagatcgaacggtctaacagctaatgagtcggggaggtta

SEQ ID NO: 339844 - DNA, 55 bp, Artificial
  Synthetic oligonucleotide
caacactatcagcaatctatacagtattccgtatcattcatgaaccgcataagcg

SEQ ID NO: 339845 - DNA, 53 bp, Artificial
  Synthetic oligonucleotide
caacactatcgcttgattacatcacgtgcgagtacaaaaccgtcatcccgtct

SEQ ID NO: 339846 - DNA, 53 bp, Artificial
  Synthetic oligonucleotide
caacactcagagttactcgaaaataaaacttattaagcgaggagtaaacgaaa

SEQ ID NO: 339847 - DNA, 58 bp, Artificial
  Synthetic oligonucleotide
caacactcgatcccggagacgccgggtcttctcctcagcttgggagagagtgccattc

SEQ ID NO: 339848 - DNA, 59 bp, Artificial
  Synthetic oligonucleotide
caacactcggggagaaggcaccatacatggtaatactcgaagaatccatccagacaaaa

SEQ ID NO: 339849 - DNA, 59 bp, Artificial
  Synthetic oligonucleotide
caacactcgttggcaggtacggccgtcgaacgaagttgaatgaagcagcccactctgac

SEQ ID NO: 339850 - DNA, 60 bp, Artificial
  Synthetic oligonucleotide
caacactgcgtatgcgtggaaatagtatatttggctcttctccaatctccgtcatgacta

SEQ ID NO: 339851 - DNA, 57 bp, Artificial
  Synthetic oligonucleotide
caacactgctaagccgaagctccaacactccctcgacccaacagtcccgggagtgga

SEQ ID NO: 339852 - DNA, 55 bp, Artificial
  Synthetic oligonucleotide
caacactggatactaatgttcggcacgatactaatgttcggcaccaatcgctcga

SEQ ID NO: 339853 - DNA, 55 bp, Artificial
  Synthetic oligonucleotide
caacactgtaatgttctttctggtccgcgatagaaggcccttcggtactgctatg

SEQ ID NO: 339854 - DNA, 58 bp, Artificial
  Synthetic oligonucleotide
caacactgtgcttagggcatcatgcggtaccgaacgggacaatagtgaagacaattac

SEQ ID NO: 339855 - DNA, 55 bp, Artificial
  Synthetic oligonucleotide
caacactgttccgttgaagcgttgcaatatgagcatagcttctacagggccatgt

SEQ ID NO: 339856 - DNA, 52 bp, Artificial
  Synthetic oligonucleotide
caacactgttgggaacctttccaggttcggacataactttggaggaagttgg

SEQ ID NO: 339857 - DNA, 58 bp, Artificial
  Synthetic oligonucleotide
caacactgtttcttcacctggtaggctttccaactcatagacacatacgtggtgaacc

SEQ ID NO: 339858 - DNA, 55 bp, Artificial
  Synthetic oligonucleotide
caacacttcccagaaggtctggggccgcaggtgctgcagtgaaaggagttggaac

SEQ ID NO: 339859 - DNA, 51 bp, Artificial
  Synthetic oligonucleotide
caacacttgagcatcgattcaaagacatacctgatgatcgattagctataa

SEQ ID NO: 339860 - DNA, 55 bp, Artificial
  Synthetic oligonucleotide
caacactttagttatgtcatgcctcttatctttgggagcttgctcacggcgtgtg

SEQ ID NO: 339861 - DNA, 55 bp, Artificial
  Synthetic oligonucleotide
caacactttctcaatccgctactagcaactcgaccggatttcttccaacttctgg

SEQ ID NO: 339862 - DNA, 60 bp, Artificial
  Synthetic oligonucleotide
caacagaaacaacagtcaattgcagacaatgcacaatctctgcacaagacatgtatactc

SEQ ID NO: 339863 - DNA, 50 bp, Artificial
  Synthetic oligonucleotide
caacagaacggctgacacgactgagccccgggcggagcactgcgcttcgt

SEQ ID NO: 339864 - DNA, 55 bp, Artificial
  Synthetic oligonucleotide
caacagaagcccgtcagtttccaattctgactgcggttccggaaagcgctccgac

SEQ ID NO: 339865 - DNA, 51 bp, Artificial
  Synthetic oligonucleotide
caacagaagtccgatgtgggtcgagcctgagtagggaccatcggtcagagc

SEQ ID NO: 339866 - DNA, 56 bp, Artificial
  Synthetic oligonucleotide
caacagaatcttcagaccaaatatagggccacgacccctagttagggaacagcagg

SEQ ID NO: 339867 - DNA, 60 bp, Artificial
  Synthetic oligonucleotide
caacagaatgcaggacgttctttcttactcaaggttccctactcaatgacaagcactcta

SEQ ID NO: 339868 - DNA, 55 bp, Artificial
  Synthetic oligonucleotide
caacagacaactttcaatcaccgtgcatagtccccaactacgatgttaccgcacc

SEQ ID NO: 339869 - DNA, 50 bp, Artificial
  Synthetic oligonucleotide
caacagacaaggtaacgtttgagctaccgtcgattgaagcagaaccactt

SEQ ID NO: 339870 - DNA, 56 bp, Artificial
  Synthetic oligonucleotide
caacagacagtccagggggcatactatgacccagaacagccattagtggcagaaat

SEQ ID NO: 339871 - DNA, 60 bp, Artificial
  Synthetic oligonucleotide
caacagaccaatcagatggaatgctgaaacctgagaggtctattcgactcctcaaaacag

SEQ ID NO: 339872 - DNA, 55 bp, Artificial
  Synthetic oligonucleotide
caacagaccacaatagtattgttagtagtacgcccatcccagggaggcaacctgc

SEQ ID NO: 339873 - DNA, 53 bp, Artificial
  Synthetic oligonucleotide
caacagaccagtaccccccaagcctccaaacgtcaacagaccagttaacaccg

SEQ ID NO: 339874 - DNA, 52 bp, Artificial
  Synthetic oligonucleotide
caacagacgggtcttacagggattggacggtcttcttgattccgcatagtag

SEQ ID NO: 339875 - DNA, 55 bp, Artificial
  Synthetic oligonucleotide
caacagacttctgggagaaacttgattccacaccctacctcaaaactttcttgga

SEQ ID NO: 339876 - DNA, 60 bp, Artificial
  Synthetic oligonucleotide
caacagagaaagtcgacacaatcttggagcgaaacgtcaccgtgacccatgccaaggaca

SEQ ID NO: 339877 - DNA, 55 bp, Artificial
  Synthetic oligonucleotide
caacagagccgtccacgccgatatgggttattggatagaaagcgcactcaatgac

SEQ ID NO: 339878 - DNA, 60 bp, Artificial
  Synthetic oligonucleotide
caacagagctcttgtgctagcagcctaccactagtggctgcggtgttgcacggtcaccgc

SEQ ID NO: 339879 - DNA, 55 bp, Artificial
  Synthetic oligonucleotide
caacagaggacgtctggtcgaactggggatgttatcaccccattcacgctaggga

SEQ ID NO: 339880 - DNA, 55 bp, Artificial
  Synthetic oligonucleotide
caacagatagagtcaatactgcaattttacaacaaaggcctgactgtctcacata

SEQ ID NO: 339881 - DNA, 57 bp, Artificial
  Synthetic oligonucleotide
caacagatatgttaccagtttggataaggtgaggtacggtagtgaatttcacattag

SEQ ID NO: 339882 - DNA, 60 bp, Artificial
  Synthetic oligonucleotide
caacagatcgcattggtaatgcaattacccgcaataccccagtcactgatacgaatgagg

SEQ ID NO: 339883 - DNA, 56 bp, Artificial
  Synthetic oligonucleotide
caacagatgcccccttaccgtatacaggaagatatgacctaaattttgataggtgg

SEQ ID NO: 339884 - DNA, 56 bp, Artificial
  Synthetic oligonucleotide
caacagatggtattggaagttaaaacgagacaccttgcccgatggagattatgatg

SEQ ID NO: 339885 - DNA, 55 bp, Artificial
  Synthetic oligonucleotide
caacagcaagcacacatagctgagcttcaagtgtacaataataaactagaacgcg

SEQ ID NO: 339886 - DNA, 55 bp, Artificial
  Synthetic oligonucleotide
caacagcacggaggactgagtgtccagaactttgactatttcctagcaccttatg

SEQ ID NO: 339887 - DNA, 60 bp, Artificial
  Synthetic oligonucleotide
caacagcagagtggaatgcattggatggtcaagtactagttgccatgatggcaaagccag

SEQ ID NO: 339888 - DNA, 55 bp, Artificial
  Synthetic oligonucleotide
caacagcagatgttgagactcactgtctggggcattaaacagctccaggcgagag

SEQ ID NO: 339889 - DNA, 55 bp, Artificial
  Synthetic oligonucleotide
caacagcagcctcgatgaactacctgaggaattacaagtacacctctccgctgag

SEQ ID NO: 339890 - DNA, 59 bp, Artificial
  Synthetic oligonucleotide
caacagcatatgggtacaatcggagtgttagcgaccccagaagttccatttaccactga

SEQ ID NO: 339891 - DNA, 57 bp, Artificial
  Synthetic oligonucleotide
caacagcatccaagtctggtgttgtggcgtctagttcatctgtcgctaatgctgagc

SEQ ID NO: 339892 - DNA, 55 bp, Artificial
  Synthetic oligonucleotide
caacagcatccatagatggggcatggggttcaggggttggttttaacctggtctg

SEQ ID NO: 339893 - DNA, 59 bp, Artificial
  Synthetic oligonucleotide
caacagccaacaacaccaccacatcgaattccaaaacctgcgccttgggcaccagtgaa

SEQ ID NO: 339894 - DNA, 55 bp, Artificial
  Synthetic oligonucleotide
caacagcgctacattggttttaccatatgtgaacgcaattccaatggattctggt

SEQ ID NO: 339895 - DNA, 55 bp, Artificial
  Synthetic oligonucleotide
caacagcggaacccttcaaatcttacttcgctaagggcttcctttcaatagattc

SEQ ID NO: 339896 - DNA, 55 bp, Artificial
  Synthetic oligonucleotide
caacagcgtgaggactccaagtccgaaacgcaagcggcatactcaggtctgccgc

SEQ ID NO: 339897 - DNA, 52 bp, Artificial
  Synthetic oligonucleotide
caacagctacagccataaccgccaccagcaacatattgccggacaaacgaac

SEQ ID NO: 339898 - DNA, 58 bp, Artificial
  Synthetic oligonucleotide
caacagctactttagctaacagtacatactttcctacacctagcggctccatggttac

SEQ ID NO: 339899 - DNA, 60 bp, Artificial
  Synthetic oligonucleotide
caacagctagtccatgcgcatgtcaacatgggtctacccctaggtgatttcgcgcctcta

SEQ ID NO: 339900 - DNA, 60 bp, Artificial
  Synthetic oligonucleotide
caacagctccagacaccatgaagttctcctgtggagatgaaacaaagtctctggggctat

SEQ ID NO: 339901 - DNA, 56 bp, Artificial
  Synthetic oligonucleotide
caacagctgaaccctttaagtcctattttgctaaaggcttcctttcaatagattca

SEQ ID NO: 339902 - DNA, 54 bp, Artificial
  Synthetic oligonucleotide
caacagctgacgaaatggttcaacttgaaaaagcagctagagaagcaggggctt

SEQ ID NO: 339903 - DNA, 60 bp, Artificial
  Synthetic oligonucleotide
caacagctgcatgcttcagagccattgctaggggcattatcaacatcccaagaagaattc

SEQ ID NO: 339904 - DNA, 56 bp, Artificial
  Synthetic oligonucleotide
caacagctgctttgaaactctagttaggccaatttaaacatacttctcgcacagaa

SEQ ID NO: 339905 - DNA, 50 bp, Artificial
  Synthetic oligonucleotide
caacaggaattatcgcgaattacctgtactattgggcaccattagtgaca

SEQ ID NO: 339906 - DNA, 55 bp, Artificial
  Synthetic oligonucleotide
caacaggatcatttggtggcccttcaatgtcaatccacgttgtatcattggtgag

SEQ ID NO: 339907 - DNA, 60 bp, Artificial
  Synthetic oligonucleotide
caacaggatctatctattttaaagactacgctgacattgcctcattttcagttgatccac

SEQ ID NO: 339908 - DNA, 55 bp, Artificial
  Synthetic oligonucleotide
caacaggcaaagagcccttgttgctatcacccgggcaagacatgccatcttcgtg

SEQ ID NO: 339909 - DNA, 59 bp, Artificial
  Synthetic oligonucleotide
caacaggccaatgtacaggaagcccaggatataccgggccttcagaactccagatgtcc

SEQ ID NO: 339910 - DNA, 60 bp, Artificial
  Synthetic oligonucleotide
caacaggctgctctcaagtggaggaaggacataggtttccgtgtcaatgcaaacacggca

SEQ ID NO: 339911 - DNA, 54 bp, Artificial
  Synthetic oligonucleotide
caacaggcttgggaaacaaaacgcaatacaggaactacgcctaaacgaacaggc

SEQ ID NO: 339912 - DNA, 57 bp, Artificial
  Synthetic oligonucleotide
caacagggaacggaatatgttttgccgaacaacagatacatgacctcttacgtaaca

SEQ ID NO: 339913 - DNA, 59 bp, Artificial
  Synthetic oligonucleotide
caacagggactccctgccgaactcaagccaggcaccaatcaattcctcactacagacga

SEQ ID NO: 339914 - DNA, 60 bp, Artificial
  Synthetic oligonucleotide
caacagggcagaataagacagagacattcagacctggaggaggagatatgagggacaatt

SEQ ID NO: 339915 - DNA, 56 bp, Artificial
  Synthetic oligonucleotide
caacagggcgatgtagacgtaatagtggtaccaacccgtgagctacgtaattcgtg

SEQ ID NO: 339916 - DNA, 56 bp, Artificial
  Synthetic oligonucleotide
caacagggctaagaaacgtcccatccattcaatccagaggactatttggagcaatc

SEQ ID NO: 339917 - DNA, 55 bp, Artificial
  Synthetic oligonucleotide
caacagggggattatacgtcctacgtgtcactcccttgtcgaggtatcgaaggta

SEQ ID NO: 339918 - DNA, 50 bp, Artificial
  Synthetic oligonucleotide
caacagggtccttgaatgtacggtccgcatgatggagattcaaccatgac

SEQ ID NO: 339919 - DNA, 60 bp, Artificial
  Synthetic oligonucleotide
caacagggtcgcgcgtggttgatgctgcagattgctttagaaacagcggagacaaagata

SEQ ID NO: 339920 - DNA, 60 bp, Artificial
  Synthetic oligonucleotide
caacaggtaagagaacacattgctgtctgtcatggggaatgagtcagggaaagaagagag

SEQ ID NO: 339921 - DNA, 55 bp, Artificial
  Synthetic oligonucleotide
caacaggtcgtacgggtattgtccctaaggtgactgcagagcctggagtagtgtc

SEQ ID NO: 339922 - DNA, 55 bp, Artificial
  Synthetic oligonucleotide
caacaggtgagactattgcccacggcaaggtgggccagggtatttcggcctggag

SEQ ID NO: 339923 - DNA, 51 bp, Artificial
  Synthetic oligonucleotide
caacaggtgctagcacagccttcaacccagtgcacaatgcaaccaccgatg

SEQ ID NO: 339924 - DNA, 60 bp, Artificial
  Synthetic oligonucleotide
caacaggttgagcgagcaagtgtttaaggcgaatgtcgctgcaatggaggggtcgagaat

SEQ ID NO: 339925 - DNA, 55 bp, Artificial
  Synthetic oligonucleotide
caacaggtttgtcttagagcgctttctaactctacgttgcgacatagtccatgct

SEQ ID NO: 339926 - DNA, 55 bp, Artificial
  Synthetic oligonucleotide
caacagtaaactctctgatttccgatcagctactaatgagaaaccacctgaggga

SEQ ID NO: 339927 - DNA, 54 bp, Artificial
  Synthetic oligonucleotide
caacagtaacaaaccttgccaggggctctaatacagtgaaagtagttggtaaag

SEQ ID NO: 339928 - DNA, 56 bp, Artificial
  Synthetic oligonucleotide
caacagtaacacaagcctgtccaaaggtctcttttgaaccaatccctatacattat

SEQ ID NO: 339929 - DNA, 59 bp, Artificial
  Synthetic oligonucleotide
caacagtaagcatggcacaccagccatgttttgatcaagcacttctgttatcccggact

SEQ ID NO: 339930 - DNA, 55 bp, Artificial
  Synthetic oligonucleotide
caacagtacagcaagtgacctacgaaccatacagcaactacttatgggcacagtg

SEQ ID NO: 339931 - DNA, 59 bp, Artificial
  Synthetic oligonucleotide
caacagtaggatcaagtttgagctcagtaattgaggtacctgataaatctttgccaaat

SEQ ID NO: 339932 - DNA, 60 bp, Artificial
  Synthetic oligonucleotide
caacagtagtctttagtatagtttgcatgcacaaggaaaaaaacgacctgatggatgcag

SEQ ID NO: 339933 - DNA, 60 bp, Artificial
  Synthetic oligonucleotide
caacagtatcagcggacccactggcatcactcttggagatgtgtcacagcacacaaattg

SEQ ID NO: 339934 - DNA, 60 bp, Artificial
  Synthetic oligonucleotide
caacagtatcggcagatccactggcatcactattggagatgtgccatagcacacaaattg

SEQ ID NO: 339935 - DNA, 60 bp, Artificial
  Synthetic oligonucleotide
caacagtcaagttagcataatagtaataggcgtgttttaggataagtccagtccatctca

SEQ ID NO: 339936 - DNA, 55 bp, Artificial
  Synthetic oligonucleotide
caacagtccagagttatctggaattgtagacatagaaaacactgcctcagtagtc

SEQ ID NO: 339937 - DNA, 55 bp, Artificial
  Synthetic oligonucleotide
caacagtccccttgcaacgccttgtgtgtggcccacattggacccgtggacagtg

SEQ ID NO: 339938 - DNA, 55 bp, Artificial
  Synthetic oligonucleotide
caacagtccgttcaagagcgctgctgctgtccccactgtccgcgtcacaagaagg

SEQ ID NO: 339939 - DNA, 60 bp, Artificial
  Synthetic oligonucleotide
caacagtctctgcggaccccttggcctcactattagagatgtgtcacagtactcaaatag

SEQ ID NO: 339940 - DNA, 60 bp, Artificial
  Synthetic oligonucleotide
caacagtctggggcgatatacgtgggcaattacagactagtgaatagacaccttgccacg

SEQ ID NO: 339941 - DNA, 60 bp, Artificial
  Synthetic oligonucleotide
caacagtctggtgaatgatttggcgtctcgtcgcgtttatgataacgcggttgaggagct

SEQ ID NO: 339942 - DNA, 56 bp, Artificial
  Synthetic oligonucleotide
caacagtgaagatcatcctttcaaggactacattgataagtgcatcgctgccttgg

SEQ ID NO: 339943 - DNA, 57 bp, Artificial
  Synthetic oligonucleotide
caacagtgacgggagacataaacttcagtctggcagaacaacccgcgaacgagacca

SEQ ID NO: 339944 - DNA, 50 bp, Artificial
  Synthetic oligonucleotide
caacagtggagcatagacaagcacttgtgcggaaaagctgtgagcgtctc

SEQ ID NO: 339945 - DNA, 54 bp, Artificial
  Synthetic oligonucleotide
caacagtggtagcaagatactagcacacattgacttggcttttgggcacaagtg

SEQ ID NO: 339946 - DNA, 59 bp, Artificial
  Synthetic oligonucleotide
caacagtggtgtacgtggaaaagcggttgtagacgcttatacagcgtccgcagaagcaa

SEQ ID NO: 339947 - DNA, 54 bp, Artificial
  Synthetic oligonucleotide
caacagtgtaagtgtgtgttaacaaacattcccctgtgggcggcctttaacggc

SEQ ID NO: 339948 - DNA, 60 bp, Artificial
  Synthetic oligonucleotide
caacagttaataagtatggagtacctagacacaatgcaaaatatagatatgagtacgagg

SEQ ID NO: 339949 - DNA, 55 bp, Artificial
  Synthetic oligonucleotide
caacagttagaaccagctctcaagacagggtcagaagacctgaagtcactctgga

SEQ ID NO: 339950 - DNA, 55 bp, Artificial
  Synthetic oligonucleotide
caacagttagcagataaagaaccagaagaaatagcagacattttggatgagtcag

SEQ ID NO: 339951 - DNA, 57 bp, Artificial
  Synthetic oligonucleotide
caacagttagggtgtgattggtacgagaagcctaaggatttgattagttgtaggcga

SEQ ID NO: 339952 - DNA, 54 bp, Artificial
  Synthetic oligonucleotide
caacagttagtaggaaaattaaactgggctagccagatctacccagggattaaa

SEQ ID NO: 339953 - DNA, 52 bp, Artificial
  Synthetic oligonucleotide
caacagttccgagacgatctggagaccgacttgggcgccttctactcgacgc

SEQ ID NO: 339954 - DNA, 55 bp, Artificial
  Synthetic oligonucleotide
caacagttcttccaataacaattgctgcatctcagaaaggcactgtccatccagt

SEQ ID NO: 339955 - DNA, 60 bp, Artificial
  Synthetic oligonucleotide
caacagttggacttacgttacgtattgaatctgcagtttgtgaatcagtgcttgcggatg

SEQ ID NO: 339956 - DNA, 53 bp, Artificial
  Synthetic oligonucleotide
caacagtttattacaaagacgtaattgttagtacctcttgggccggtagttca

SEQ ID NO: 339957 - DNA, 60 bp, Artificial
  Synthetic oligonucleotide
caacagtttggtgaatgatttggcttctcgtcatgtgtatgacaacgcggttgaggagct

SEQ ID NO: 339958 - DNA, 51 bp, Artificial
  Synthetic oligonucleotide
caacataaagtcgctagaaaggtttatatccgggtgtactcaggggctatt

SEQ ID NO: 339959 - DNA, 55 bp, Artificial
  Synthetic oligonucleotide
caacataacagtatcccaggatcatacaaatgatcgccctggaattaaagagctg

SEQ ID NO: 339960 - DNA, 58 bp, Artificial
  Synthetic oligonucleotide
caacataagctgaccttatctgaggtaactggacagggaagatgtctaggaacggttc

SEQ ID NO: 339961 - DNA, 59 bp, Artificial
  Synthetic oligonucleotide
caacatacaacaatttgaacatatagttcagctccgtagagtattaacaacggctacga

SEQ ID NO: 339962 - DNA, 60 bp, Artificial
  Synthetic oligonucleotide
caacataccctgaggccactcagtatgaaggacgtgctcaagataacttcaacatcacgg

SEQ ID NO: 339963 - DNA, 55 bp, Artificial
  Synthetic oligonucleotide
caacataccgaaacctcggttggtcaatgcgggtggtcaccaatggagggcggct

SEQ ID NO: 339964 - DNA, 55 bp, Artificial
  Synthetic oligonucleotide
caacatagacaacccgcagtggtgcattaagagactcgtgaaaggagtgtacaga

SEQ ID NO: 339965 - DNA, 60 bp, Artificial
  Synthetic oligonucleotide
caacatagactagatgacggcataactcagatgacattcacccccgcatctctttacagg

SEQ ID NO: 339966 - DNA, 55 bp, Artificial
  Synthetic oligonucleotide
caacatagcctctaacgcaacaataaagcttacgtacatgcctgtggcgcacgtg

SEQ ID NO: 339967 - DNA, 60 bp, Artificial
  Synthetic oligonucleotide
caacataggaatgaagaaggtacagggattgctgcagacaaagagtcaacccagaaagca

SEQ ID NO: 339968 - DNA, 60 bp, Artificial
  Synthetic oligonucleotide
caacatagtgcacggcgtgaggtcagacccgctaatggcagaaaggtgtgcgagttgggt

SEQ ID NO: 339969 - DNA, 60 bp, Artificial
  Synthetic oligonucleotide
caacatatatgacagcgagcctagtacagctactgtgaagaacgatcttcgtgatcgtta

SEQ ID NO: 339970 - DNA, 55 bp, Artificial
  Synthetic oligonucleotide
caacatatcagggtaaggttacatttatgggtgggaattattactcagagggtgg

SEQ ID NO: 339971 - DNA, 57 bp, Artificial
  Synthetic oligonucleotide
caacatatggctacgattggtgtgctagcaacaccggaaataccttttacgacggaa

SEQ ID NO: 339972 - DNA, 55 bp, Artificial
  Synthetic oligonucleotide
caacatatgttgccacatccgcttcgtacgttggtgttagcctcgttttccaagc

SEQ ID NO: 339973 - DNA, 55 bp, Artificial
  Synthetic oligonucleotide
caacatattagggcgagaatacatttatgggtgggaattattacttagagggtgg

SEQ ID NO: 339974 - DNA, 50 bp, Artificial
  Synthetic oligonucleotide
caacatatttgttaacgcgttcattctcggggtatcggttggaaggtgtg

SEQ ID NO: 339975 - DNA, 53 bp, Artificial
  Synthetic oligonucleotide
caacatcaacactaaggtcattgccgacaacgtttacaatacattcgttacag

SEQ ID NO: 339976 - DNA, 53 bp, Artificial
  Synthetic oligonucleotide
caacatcaatgcagtccattacattgacaataaaggcaaattgcgatatgtaa

SEQ ID NO: 339977 - DNA, 56 bp, Artificial
  Synthetic oligonucleotide
caacatcaatttatgaggttactttactttacagagactactggaccaaactcgag

SEQ ID NO: 339978 - DNA, 55 bp, Artificial
  Synthetic oligonucleotide
caacatcacattcagcatgcctcagatgatgtacaatccactggtcagaagcaga

SEQ ID NO: 339979 - DNA, 60 bp, Artificial
  Synthetic oligonucleotide
caacatcatagcacaggctgaatcatttcctcacatcatgctacctacacaactaagcta

SEQ ID NO: 339980 - DNA, 55 bp, Artificial
  Synthetic oligonucleotide
caacatcccagctaattgaattcgttcattcaggtttggaatccgaaatgaaaac

SEQ ID NO: 339981 - DNA, 50 bp, Artificial
  Synthetic oligonucleotide
caacatcccccctatacttcgcagtaacccctgccccaaacgatctaact

SEQ ID NO: 339982 - DNA, 57 bp, Artificial
  Synthetic oligonucleotide
caacatcccgcaaaatcaatggacactcggagagtagaaggaggagaacttttgtta

SEQ ID NO: 339983 - DNA, 56 bp, Artificial
  Synthetic oligonucleotide
caacatccgccgacttagttgaatggaagactgttcgcctgcccctttccacccta

SEQ ID NO: 339984 - DNA, 55 bp, Artificial
  Synthetic oligonucleotide
caacatccttagatctataacgtgatttctcttgatcctgtttcaaacacgcaca

SEQ ID NO: 339985 - DNA, 54 bp, Artificial
  Synthetic oligonucleotide
caacatccttgtctacgtgtcaagctacaatgaagtggatcaactttcaaagtt

SEQ ID NO: 339986 - DNA, 58 bp, Artificial
  Synthetic oligonucleotide
caacatcgatcttcgataaagcgagtgaaatttggggattgatatcagaggtaaaaaa

SEQ ID NO: 339987 - DNA, 60 bp, Artificial
  Synthetic oligonucleotide
caacatcgatgagcttaatgtctcttctattctgtgaatctaaaagctttctgatgtcat

SEQ ID NO: 339988 - DNA, 57 bp, Artificial
  Synthetic oligonucleotide
caacatcgccacgactatagccaagagcatagagagagggtttgacaggtaccttgc

SEQ ID NO: 339989 - DNA, 60 bp, Artificial
  Synthetic oligonucleotide
caacatcgcggattagtacagccattcaagctggtgatgatctgagaacagtagcggacg

SEQ ID NO: 339990 - DNA, 60 bp, Artificial
  Synthetic oligonucleotide
caacatcggatctagaccgtgggtcaggggtcaatcaggcaggataagcatatactggac

SEQ ID NO: 339991 - DNA, 57 bp, Artificial
  Synthetic oligonucleotide
caacatcgggggtctcaacaagtcgttggtgtgccctactgactgcttccgaaaaca

SEQ ID NO: 339992 - DNA, 55 bp, Artificial
  Synthetic oligonucleotide
caacatctaggtccgatcaggtgtcctcattcaggtacgcttccatgaacgtggg

SEQ ID NO: 339993 - DNA, 58 bp, Artificial
  Synthetic oligonucleotide
caacatctcagttttcgatgggataaacctacggctcagaatatgactttcgtttgaa

SEQ ID NO: 339994 - DNA, 54 bp, Artificial
  Synthetic oligonucleotide
caacatctgatgacttacttggcctctacgaacaatgctattgtgataaatggt

SEQ ID NO: 339995 - DNA, 53 bp, Artificial
  Synthetic oligonucleotide
caacatctgcctgcagggacaatacggggaccaacagtttttatcgaaatcta

SEQ ID NO: 339996 - DNA, 60 bp, Artificial
  Synthetic oligonucleotide
caacatctgctcgcacgattgggtgtatggggccagtgttgtttcgggtatggaattcaa

SEQ ID NO: 339997 - DNA, 57 bp, Artificial
  Synthetic oligonucleotide
caacatcttactatatgatatccagttgtttccttgagtcgtttattgtcctgttcc

SEQ ID NO: 339998 - DNA, 55 bp, Artificial
  Synthetic oligonucleotide
caacatcttgagtccatttatgccgctgttacccattttcttctgtctttgggta

SEQ ID NO: 339999 - DNA, 58 bp, Artificial
  Synthetic oligonucleotide
caacatgaactttgccagggcctaccaagacgtcacatacaaccccaactgtgacagg

SEQ ID NO: 340000 - DNA, 51 bp, Artificial
  Synthetic oligonucleotide
caacatgacagcatagttggtgcaacagaatggatgttgactggtatcgag

SEQ ID NO: 340001 - DNA, 55 bp, Artificial
  Synthetic oligonucleotide
caacatgaggccaggttacaaggtgcaagtttcaggaccatgggatgagagagac

SEQ ID NO: 340002 - DNA, 60 bp, Artificial
  Synthetic oligonucleotide
caacatgaggctatcgtaagatcctcattcatatctgaatcaaaatgatctttaagtact

SEQ ID NO: 340003 - DNA, 55 bp, Artificial
  Synthetic oligonucleotide
caacatgataagagaggcggcggagatagggtatcgccactttaaccgcgccacc

SEQ ID NO: 340004 - DNA, 60 bp, Artificial
  Synthetic oligonucleotide
caacatgcgccttattgacggttctgatgttagtcatgccaccatcaaccggtatgctct

SEQ ID NO: 340005 - DNA, 55 bp, Artificial
  Synthetic oligonucleotide
caacatgcggtacgctcatggactgtgcgtccaagtacagctgaatcagtaacat

SEQ ID NO: 340006 - DNA, 59 bp, Artificial
  Synthetic oligonucleotide
caacatgcttgtttattgcagggattgctgagttgggggcatttttctcggtcttacag

SEQ ID NO: 340007 - DNA, 55 bp, Artificial
  Synthetic oligonucleotide
caacatggagagtatacttgagatctcatgattttgaggcatgcatactatatcc

SEQ ID NO: 340008 - DNA, 58 bp, Artificial
  Synthetic oligonucleotide
caacatggagggtgaactagaagcaggtacagacccgcaggaaggttgtagtggtcat

SEQ ID NO: 340009 - DNA, 60 bp, Artificial
  Synthetic oligonucleotide
caacatggcattaagaatgcagacattagcaacagtaccgtatgacaatttggatctgga

SEQ ID NO: 340010 - DNA, 55 bp, Artificial
  Synthetic oligonucleotide
caacatggcgaagattgggccaaacaaggagcagcaccagaaaggtacacatggg

SEQ ID NO: 340011 - DNA, 59 bp, Artificial
  Synthetic oligonucleotide
caacatgggatcagatgataacctcaatcgtaccattcgtcgtactaacagtaaaccac

SEQ ID NO: 340012 - DNA, 55 bp, Artificial
  Synthetic oligonucleotide
caacatgggccacaaagtcctaatcttaaacccgtcggtcgctactgtgagggcc

SEQ ID NO: 340013 - DNA, 57 bp, Artificial
  Synthetic oligonucleotide
caacatggtatttcaatccagtcgtactacgaccaaacaatgtagaagtggaatttc

SEQ ID NO: 340014 - DNA, 50 bp, Artificial
  Synthetic oligonucleotide
caacatggttatatactttttgaacaacgtatgcggccaaaaaacggaaa

SEQ ID NO: 340015 - DNA, 60 bp, Artificial
  Synthetic oligonucleotide
caacatgtaacattcaatccaagttctcgtgctcatatcattaaggtactgaaggactgc

SEQ ID NO: 340016 - DNA, 60 bp, Artificial
  Synthetic oligonucleotide
caacatgtatgacaacgagcccagcacagctactgtgaagaacgatttgcgtgatcgtta

SEQ ID NO: 340017 - DNA, 60 bp, Artificial
  Synthetic oligonucleotide
caacatgtatgacaacgagcccagtactgccaccgtcaagaacgatctccgtgatcgatt

SEQ ID NO: 340018 - DNA, 58 bp, Artificial
  Synthetic oligonucleotide
caacatgtccgagttcggaggagacctagaaggaatcacactatccaaacccctcaca

SEQ ID NO: 340019 - DNA, 60 bp, Artificial
  Synthetic oligonucleotide
caacatgtggacctacctgcaaactgtcaatgcactccagagcgccactggtacacaaac

SEQ ID NO: 340020 - DNA, 60 bp, Artificial
  Synthetic oligonucleotide
caacatgtgggggtagaagcactccaatgggagcactcaatctataacggtgcattcaat

SEQ ID NO: 340021 - DNA, 60 bp, Artificial
  Synthetic oligonucleotide
caacatgttcgataacgagcccagtactgccacggtgaagaacgatctacgcgatcgtta

SEQ ID NO: 340022 - DNA, 60 bp, Artificial
  Synthetic oligonucleotide
caacattaagcagtcatgaaattgaattcctcctaccagctgtcaaaccatcattcgatt

SEQ ID NO: 340023 - DNA, 60 bp, Artificial
  Synthetic oligonucleotide
caacattacagttcacacaaatgaaccaacctagtttaggccatggtgagacgcctgcga

SEQ ID NO: 340024 - DNA, 55 bp, Artificial
  Synthetic oligonucleotide
caacattcaacacgctatgaaatacaagacgctatgacaaatgtacgggtatctg

SEQ ID NO: 340025 - DNA, 51 bp, Artificial
  Synthetic oligonucleotide
caacattcaacttcgggagattgttgtgtgatacaggtgacgtctactacc

SEQ ID NO: 340026 - DNA, 58 bp, Artificial
  Synthetic oligonucleotide
caacattcgacctctagaggattcgaggactcgtggattcgagtccccgagtattcta

SEQ ID NO: 340027 - DNA, 60 bp, Artificial
  Synthetic oligonucleotide
caacattgcgcatgcgtggaaatagtgtatttggttcgtctccaatctccgttatgacta

SEQ ID NO: 340028 - DNA, 55 bp, Artificial
  Synthetic oligonucleotide
caacattggatataaatcctcaacctctctcactagaagaaagtgtgtttgggat

SEQ ID NO: 340029 - DNA, 55 bp, Artificial
  Synthetic oligonucleotide
caacattggcgacccatagttcgagttgagctgtgtacgtggaaaatcccttgac

SEQ ID NO: 340030 - DNA, 51 bp, Artificial
  Synthetic oligonucleotide
caacattggtattatccaggccgtaccccagtggggataaccgacggggtt

SEQ ID NO: 340031 - DNA, 55 bp, Artificial
  Synthetic oligonucleotide
caacattgttgttggagttataatgttcaagagcgggtccggttctttgaagcga

SEQ ID NO: 340032 - DNA, 59 bp, Artificial
  Synthetic oligonucleotide
caacatttataggaggtggatccaattagggctgcagaaatgtgtaagaatgtataacc

SEQ ID NO: 340033 - DNA, 60 bp, Artificial
  Synthetic oligonucleotide
caacatttggatagagggtggaccatattaccctagcagataccaatcaggtgttatgaa

SEQ ID NO: 340034 - DNA, 60 bp, Artificial
  Synthetic oligonucleotide
caacatttgggcagtgatgttctcccagtagttgtgtggttgaggtaccaatacttgctg

SEQ ID NO: 340035 - DNA, 57 bp, Artificial
  Synthetic oligonucleotide
caaccaaaacaggacaatgtggaggagtcttatgctccacaggcaaaatttttggaa

SEQ ID NO: 340036 - DNA, 58 bp, Artificial
  Synthetic oligonucleotide
caaccaaaattattacctacaattatagctgattcagtggataagtttataccatcaa

SEQ ID NO: 340037 - DNA, 58 bp, Artificial
  Synthetic oligonucleotide
caaccaaactctagttgatgcgcagcgggctagaccaggtgttgtcgtccctttccaa

SEQ ID NO: 340038 - DNA, 57 bp, Artificial
  Synthetic oligonucleotide
caaccaaacttctcatgtagggtattaaaggatcgcccagatatgaaccagaccgcg

SEQ ID NO: 340039 - DNA, 51 bp, Artificial
  Synthetic oligonucleotide
caaccaacaacttctaaaaagagagggtagtggtcctaacattttttcaac

SEQ ID NO: 340040 - DNA, 55 bp, Artificial
  Synthetic oligonucleotide
caaccaacaatgcggttggtgtgtatgctctacacgccgctccgtactggtgggg

SEQ ID NO: 340041 - DNA, 58 bp, Artificial
  Synthetic oligonucleotide
caaccaaccacgttccgcctgacgagtctacataataatgacttggtgactaagtgtg

SEQ ID NO: 340042 - DNA, 55 bp, Artificial
  Synthetic oligonucleotide
caaccaaccgtcattggttgatggtgcggccaaaacccgcactcctgtataccgg

SEQ ID NO: 340043 - DNA, 54 bp, Artificial
  Synthetic oligonucleotide
caaccaacgataacgcaaagcctcccttttttctatttccgaacagtctatgta

SEQ ID NO: 340044 - DNA, 56 bp, Artificial
  Synthetic oligonucleotide
caaccaagaaatcttggttcattaacgcccacctgtttcacgatcggtcaacagtc

SEQ ID NO: 340045 - DNA, 54 bp, Artificial
  Synthetic oligonucleotide
caaccaagaagggatgaacaagcaagacgaggaaacgccggccctatgttttaa

SEQ ID NO: 340046 - DNA, 55 bp, Artificial
  Synthetic oligonucleotide
caaccaagtacttgttgtgacattggagacagaatcattaaacaatgacgggacc

SEQ ID NO: 340047 - DNA, 57 bp, Artificial
  Synthetic oligonucleotide
caaccaagtctcctattggcaacagggatgaggaatgttccagaaaaaccaaagaca

SEQ ID NO: 340048 - DNA, 55 bp, Artificial
  Synthetic oligonucleotide
caaccaataccagccaatcccgagaagctctgggccagcctagtcacaccctgtc

SEQ ID NO: 340049 - DNA, 60 bp, Artificial
  Synthetic oligonucleotide
caaccaatgcatgacaatttaatgggaaccatgtggcttaacgctggatcagaaattcaa

SEQ ID NO: 340050 - DNA, 55 bp, Artificial
  Synthetic oligonucleotide
caaccaatgcctcttcgcaacccctacgcgccacctagaagaccgtggtttccta

SEQ ID NO: 340051 - DNA, 54 bp, Artificial
  Synthetic oligonucleotide
caaccaattcaaattaacagaaatggtgcaatgggcatatgataatgacttttg

SEQ ID NO: 340052 - DNA, 60 bp, Artificial
  Synthetic oligonucleotide
caaccaattttgtatcaaagtattgaacccgtacatgccaactgtgattgagcacctaga

SEQ ID NO: 340053 - DNA, 54 bp, Artificial
  Synthetic oligonucleotide
caaccacaagtgctataacggtgtgccaacactcggatgaccccatagaaacta

SEQ ID NO: 340054 - DNA, 54 bp, Artificial
  Synthetic oligonucleotide
caaccacaatcgtctgtaaaaaaagttgctcactacttcggtcgggagcgaccg

SEQ ID NO: 340055 - DNA, 55 bp, Artificial
  Synthetic oligonucleotide
caaccacacaaatctcgaattattgcgaagtttaacgacgattgaggcattccac

SEQ ID NO: 340056 - DNA, 60 bp, Artificial
  Synthetic oligonucleotide
caaccacactcgagcaaggctggacatccatgatgagacacgctgacagctgcctgcaag

SEQ ID NO: 340057 - DNA, 60 bp, Artificial
  Synthetic oligonucleotide
caaccacagaattaagagataggatacagaaagtgtctgcacttttttatagacctgatc

SEQ ID NO: 340058 - DNA, 55 bp, Artificial
  Synthetic oligonucleotide
caaccacatacgcgaccctgcgaactccgggatcttggtccagggcggatcggat

SEQ ID NO: 340059 - DNA, 60 bp, Artificial
  Synthetic oligonucleotide
caaccacatctgacactgattccgttgaacgattacttgaattggctaagatcttgcatg

SEQ ID NO: 340060 - DNA, 56 bp, Artificial
  Synthetic oligonucleotide
caaccacatttgaatctccaaggttgcatttcacgtgtttaacgggcaacaacaaa

SEQ ID NO: 340061 - DNA, 59 bp, Artificial
  Synthetic oligonucleotide
caaccaccaagaggctggcaagtacgagaatcacacggagaacgccctgttattgtata

SEQ ID NO: 340062 - DNA, 55 bp, Artificial
  Synthetic oligonucleotide
caaccacccatttctgcgcgtgccacgaaacgaaaagctcaaccaccaacacccg

SEQ ID NO: 340063 - DNA, 55 bp, Artificial
  Synthetic oligonucleotide
caaccaccccattgttactacggtcgacgtagctggcctcccagcggcttgcgtc

SEQ ID NO: 340064 - DNA, 55 bp, Artificial
  Synthetic oligonucleotide
caaccaccgacgcattgggatcagacagttaatggtacgaagatggtcctaaata

SEQ ID NO: 340065 - DNA, 57 bp, Artificial
  Synthetic oligonucleotide
caaccacctatgtttccgttggaacatcaacactgaaccagagatcggttccagaaa

SEQ ID NO: 340066 - DNA, 58 bp, Artificial
  Synthetic oligonucleotide
caaccaccttttcacataaccaaatggacatacatgtcaatacacccacaaatgctac

SEQ ID NO: 340067 - DNA, 57 bp, Artificial
  Synthetic oligonucleotide
caaccacgactcccctgacgccgaactcatagaggctaacctcctatggaggcaagc

SEQ ID NO: 340068 - DNA, 60 bp, Artificial
  Synthetic oligonucleotide
caaccacgtcttctaactttgactttgagtgtcctgtggtatcacagctcatatctagca

SEQ ID NO: 340069 - DNA, 56 bp, Artificial
  Synthetic oligonucleotide
caaccactacctcattaatttgcttcctgaatgtctttttagggagcctactacta

SEQ ID NO: 340070 - DNA, 51 bp, Artificial
  Synthetic oligonucleotide
caaccactcagacagttccttccggctctctgattatccgaggtaagattc

SEQ ID NO: 340071 - DNA, 55 bp, Artificial
  Synthetic oligonucleotide
caaccactcatcgatagtttattacaaactaattcagttgccctcaagggagtta

SEQ ID NO: 340072 - DNA, 55 bp, Artificial
  Synthetic oligonucleotide
caaccactcggtctgccaccacccggtctaggtccccgtcgctcgccaagactgg

SEQ ID NO: 340073 - DNA, 60 bp, Artificial
  Synthetic oligonucleotide
caaccactctgcagtcaattgacagtgcttaacccccgtttaaccactgacgcattgcat

SEQ ID NO: 340074 - DNA, 55 bp, Artificial
  Synthetic oligonucleotide
caaccactgatccatggcaaatagaagcaatgctatcgaagtcaacggtgtgtgg

SEQ ID NO: 340075 - DNA, 60 bp, Artificial
  Synthetic oligonucleotide
caaccactttcatctgggtgatgatatggaccctgaactcagaacacttgcacaaagtct

SEQ ID NO: 340076 - DNA, 59 bp, Artificial
  Synthetic oligonucleotide
caaccagaacagcctccattgctgcaccccttttgggggtgcagcaatggaggccctct

SEQ ID NO: 340077 - DNA, 59 bp, Artificial
  Synthetic oligonucleotide
caaccagaggtctgtttggtgcaattgctggctttatagagaacggctggcaaggttta

SEQ ID NO: 340078 - DNA, 55 bp, Artificial
  Synthetic oligonucleotide
caaccagcaagaggctgggaagtacgagaatcattccgagaacgccttaatgttg

SEQ ID NO: 340079 - DNA, 60 bp, Artificial
  Synthetic oligonucleotide
caaccagcaggaagcaggaaaatacgagaatcataccgagaatgcgttgatgctttatat

SEQ ID NO: 340080 - DNA, 60 bp, Artificial
  Synthetic oligonucleotide
caaccagcagttccccgcctcctggcgcagtccgatgaccagatcacaaatctggaaacc

SEQ ID NO: 340081 - DNA, 55 bp, Artificial
  Synthetic oligonucleotide
caaccagcatagtgttccagcacatgatgaccccgaagcttgagactgaagaccg

SEQ ID NO: 340082 - DNA, 58 bp, Artificial
  Synthetic oligonucleotide
caaccagccgactacatgtctggaagcaccaggtttatttataaaacctgaacatagc

SEQ ID NO: 340083 - DNA, 60 bp, Artificial
  Synthetic oligonucleotide
caaccagctcacgacaacttgatgggtacaatgtggctaaatgcgggatcagaaattcag

SEQ ID NO: 340084 - DNA, 55 bp, Artificial
  Synthetic oligonucleotide
caaccagctggtgaccaaaggagtcaccgtcctgaatctaccaacagggttcgac

SEQ ID NO: 340085 - DNA, 60 bp, Artificial
  Synthetic oligonucleotide
caaccaggacgtcctattggtaacaggcgtccgtcactgcaggtcgcagagtatctgtgg

SEQ ID NO: 340086 - DNA, 56 bp, Artificial
  Synthetic oligonucleotide
caaccaggatacgaccaaacatcacctactctggggaaacgagataatgaaaggcg

SEQ ID NO: 340087 - DNA, 56 bp, Artificial
  Synthetic oligonucleotide
caaccaggcacccgaccaagggataagggtaataacacataaagaatgtcaagtga

SEQ ID NO: 340088 - DNA, 60 bp, Artificial
  Synthetic oligonucleotide
caaccaggctttgactgaaaaagaggccatttgtggcattcctggccttgacaagatgga

SEQ ID NO: 340089 - DNA, 55 bp, Artificial
  Synthetic oligonucleotide
caaccagggaacggctggcagcgccctagttgtctacaaaccaaaaccagtagta

SEQ ID NO: 340090 - DNA, 55 bp, Artificial
  Synthetic oligonucleotide
caaccagggtgcaggggcagccaatgtatggaatgaatgctcaagtggaggaggt

SEQ ID NO: 340091 - DNA, 55 bp, Artificial
  Synthetic oligonucleotide
caaccaggttcatcaccaactattgccaggagaggcacgtcgtgccaacccacac

SEQ ID NO: 340092 - DNA, 55 bp, Artificial
  Synthetic oligonucleotide
caaccagtaaaattggctcaaaagtaataaagtggctgcttagaatagtttcggc

SEQ ID NO: 340093 - DNA, 56 bp, Artificial
  Synthetic oligonucleotide
caaccagtacaccgcgccactagcgcaccccggcatgcttatgaggagcaagtaca

SEQ ID NO: 340094 - DNA, 60 bp, Artificial
  Synthetic oligonucleotide
caaccagtcatggacgtgctaaaggaaatggcccccccgctgcaatctccatcagctgag

SEQ ID NO: 340095 - DNA, 60 bp, Artificial
  Synthetic oligonucleotide
caaccagtctatatcacagagcaaatagaattctgccaaatgaagccagtttttgacgga

SEQ ID NO: 340096 - DNA, 55 bp, Artificial
  Synthetic oligonucleotide
caaccatacatgcggaatgattttgatcggagtgaaatgcctgatctaccaggtg

SEQ ID NO: 340097 - DNA, 55 bp, Artificial
  Synthetic oligonucleotide
caaccataccaactcgctgtgacctggcagggctcaaactcgaccgtgacgggcc

SEQ ID NO: 340098 - DNA, 60 bp, Artificial
  Synthetic oligonucleotide
caaccatacgaagaggatatcgaagggaagatgaagcggtgcggggtgcaactgctcgaa

SEQ ID NO: 340099 - DNA, 55 bp, Artificial
  Synthetic oligonucleotide
caaccatatacagcatttaccttaccaaaagttaataatcagggaccaggagaga

SEQ ID NO: 340100 - DNA, 60 bp, Artificial
  Synthetic oligonucleotide
caaccatatgacagctctactcaaggataaggacagccttgcaacctacatgaggactct

SEQ ID NO: 340101 - DNA, 51 bp, Artificial
  Synthetic oligonucleotide
caaccatctctgagaagaaactagcagtgcagacagagatgaggactggat

SEQ ID NO: 340102 - DNA, 60 bp, Artificial
  Synthetic oligonucleotide
caaccatctgctttcactatgggattacccagtctactagtggaaggcgttattggatgc

SEQ ID NO: 340103 - DNA, 60 bp, Artificial
  Synthetic oligonucleotide
caaccatcttcttagcacccttgtgctagaccagtggaacttgatgaagcaacctagtcc

SEQ ID NO: 340104 - DNA, 59 bp, Artificial
  Synthetic oligonucleotide
caaccatgcacaggttgtcccaaaccagcacactataaaacgtgctgtcctttgttgtg

SEQ ID NO: 340105 - DNA, 60 bp, Artificial
  Synthetic oligonucleotide
caaccatgcatctccttgaatcagtattcctgggaaagcattgtgattactataaagctt

SEQ ID NO: 340106 - DNA, 56 bp, Artificial
  Synthetic oligonucleotide
caaccatggcgattgtgaattagtcctatatagcccaataatcaaatatacccttg

SEQ ID NO: 340107 - DNA, 56 bp, Artificial
  Synthetic oligonucleotide
caaccatggtgattgtgaattagtactacccaataatcaaatgtgcccttgtattg

SEQ ID NO: 340108 - DNA, 60 bp, Artificial
  Synthetic oligonucleotide
caaccatgtcacttacaatcatcaagaggctgcgaagtatgataaccatacagagaacgc

SEQ ID NO: 340109 - DNA, 60 bp, Artificial
  Synthetic oligonucleotide
caaccattacgcttactcgcatgtgcattgagtggtgcatgtgttgaacaaacagctaca

SEQ ID NO: 340110 - DNA, 51 bp, Artificial
  Synthetic oligonucleotide
caaccattactcagttgttcagtggaatatccaacgttatcaagtcgtctg

SEQ ID NO: 340111 - DNA, 60 bp, Artificial
  Synthetic oligonucleotide
caaccattatggcggcattcacggggaatactgaaggcagaacttcagacatgagaactg

SEQ ID NO: 340112 - DNA, 54 bp, Artificial
  Synthetic oligonucleotide
caaccattcccaagattctcgctaccttttctaggcatagcttcagcatattac

SEQ ID NO: 340113 - DNA, 55 bp, Artificial
  Synthetic oligonucleotide
caaccattcgagcatcatgccacagtaggcctaacgttgcgtatcgagtctgcgg

SEQ ID NO: 340114 - DNA, 56 bp, Artificial
  Synthetic oligonucleotide
caaccattcgtcagggtcaagcttatccagctaactacccataccccctaattgga

SEQ ID NO: 340115 - DNA, 55 bp, Artificial
  Synthetic oligonucleotide
caacccaacaatgaacgtgtagttcttgtactgtaactcgaccaatgcctacggc

SEQ ID NO: 340116 - DNA, 59 bp, Artificial
  Synthetic oligonucleotide
caacccaactgaagctactgagtctgccctacaggctcattttaaagtctgtaagttga

SEQ ID NO: 340117 - DNA, 56 bp, Artificial
  Synthetic oligonucleotide
caacccaagttagtaagttacctacaactagtggaattagttcagcaggagctata

SEQ ID NO: 340118 - DNA, 56 bp, Artificial
  Synthetic oligonucleotide
caacccacacaaccagacgtggcaacatgcaggttctacaccttggagtccgttga

SEQ ID NO: 340119 - DNA, 60 bp, Artificial
  Synthetic oligonucleotide
caacccacaccatcaatgagctcgatgttatgcaaccgatattcttgcgaacccaagaca

SEQ ID NO: 340120 - DNA, 59 bp, Artificial
  Synthetic oligonucleotide
caacccacccgtcatcgcctagtgcctcaatctgtgtacaacgctctgtttacttacac

SEQ ID NO: 340121 - DNA, 49 bp, Artificial
  Synthetic oligonucleotide
caacccacctaggaccaactaccccgggcggtttacaaacttgttggac

SEQ ID NO: 340122 - DNA, 55 bp, Artificial
  Synthetic oligonucleotide
caacccactcttagacaaaggagagggcaacagaatatggttccaataccacact

SEQ ID NO: 340123 - DNA, 55 bp, Artificial
  Synthetic oligonucleotide
caacccactgacctgcattgctacgaagaattgacagaagagcctgcagaggagg

SEQ ID NO: 340124 - DNA, 55 bp, Artificial
  Synthetic oligonucleotide
caacccagatgccagcaccaaactacccatcacagttacaatagcacctatgtgt

SEQ ID NO: 340125 - DNA, 60 bp, Artificial
  Synthetic oligonucleotide
caacccagcaacccgagagcaacatcctggacatagatctacgtcctgcatcagcatgga

SEQ ID NO: 340126 - DNA, 55 bp, Artificial
  Synthetic oligonucleotide
caacccagcactcaatctcctctgggacttgatcaaaggacgatgataagaatgg

SEQ ID NO: 340127 - DNA, 57 bp, Artificial
  Synthetic oligonucleotide
caacccaggctgaaagggtggctaataacaccagcaaggaaatacaaatgtaccgca

SEQ ID NO: 340128 - DNA, 56 bp, Artificial
  Synthetic oligonucleotide
caacccagttgaaaggcgctttgatccagtcccacaatgtggctattcctgtatca

SEQ ID NO: 340129 - DNA, 57 bp, Artificial
  Synthetic oligonucleotide
caacccatacacgttggtatctaccagttcatggagtaggaaatacaacttagagac

SEQ ID NO: 340130 - DNA, 51 bp, Artificial
  Synthetic oligonucleotide
caacccatataccccaccaccgccctccgacctgggtaacattataaaagg

SEQ ID NO: 340131 - DNA, 51 bp, Artificial
  Synthetic oligonucleotide
caacccatcgaataatcaagtggtgccatgtgaaccgatcataatagagag

SEQ ID NO: 340132 - DNA, 55 bp, Artificial
  Synthetic oligonucleotide
caacccatcttgcttatttgttcatacttccctaaagagcactagaaacgaagct

SEQ ID NO: 340133 - DNA, 58 bp, Artificial
  Synthetic oligonucleotide
caaccccaaaacactcattgcgtagccacagggtcccagagccacgtgtacgtcgcac

SEQ ID NO: 340134 - DNA, 54 bp, Artificial
  Synthetic oligonucleotide
caaccccaacacagtttttgaactcagtcgtttataggaatctacaggcggaag

SEQ ID NO: 340135 - DNA, 57 bp, Artificial
  Synthetic oligonucleotide
caaccccacaggttcagaatttatggatggctatattgggcaggacattcatatcat

SEQ ID NO: 340136 - DNA, 60 bp, Artificial
  Synthetic oligonucleotide
caaccccagcaatagacctggcagatgaggctggacactccccactggtgacagtggtcc

SEQ ID NO: 340137 - DNA, 56 bp, Artificial
  Synthetic oligonucleotide
caaccccagttctcaccggggtcggcaatgacaacagatggaacggccaaatagtg

SEQ ID NO: 340138 - DNA, 53 bp, Artificial
  Synthetic oligonucleotide
caaccccattgtgcttcttacagaggtggccgaaatcagaccagacctgctcc

SEQ ID NO: 340139 - DNA, 56 bp, Artificial
  Synthetic oligonucleotide
caacccccattggttaaccgcaaaacacacctaatttgcatacagtgacgtcacaa

SEQ ID NO: 340140 - DNA, 55 bp, Artificial
  Synthetic oligonucleotide
caaccccccgctgatagagacgtggaaaaagcctgactacgaaccacctgtggtc

SEQ ID NO: 340141 - DNA, 52 bp, Artificial
  Synthetic oligonucleotide
caaccccccgttgctggagacatggaagaagccggactacgaaccacctgtg

SEQ ID NO: 340142 - DNA, 55 bp, Artificial
  Synthetic oligonucleotide
caacccccgcggtctgttcgcctgcgaaacttctacctgaaatcggggagagcga

SEQ ID NO: 340143 - DNA, 53 bp, Artificial
  Synthetic oligonucleotide
caaccccgctttcagtgcggaggggctcctagatgcctttgcatccaaacccc

SEQ ID NO: 340144 - DNA, 55 bp, Artificial
  Synthetic oligonucleotide
caaccccggtgccgctgtctgccaagctgtgattgatgtggagaagctccaccta

SEQ ID NO: 340145 - DNA, 52 bp, Artificial
  Synthetic oligonucleotide
caacccctcaagggttggtgaagagattctcaaccggacttttctccgggaa

SEQ ID NO: 340146 - DNA, 59 bp, Artificial
  Synthetic oligonucleotide
caacccctcactgagaggtttgagtaaggatgaaattgtctccagctttgagcgaccaa

SEQ ID NO: 340147 - DNA, 57 bp, Artificial
  Synthetic oligonucleotide
caacccctcttaccctcccagttatacatcttgtgatgagaccgattggtttgctgg

SEQ ID NO: 340148 - DNA, 55 bp, Artificial
  Synthetic oligonucleotide
caacccctggaatgcaaatacgaggatttgtgtactttgttgagacattggcgag

SEQ ID NO: 340149 - DNA, 55 bp, Artificial
  Synthetic oligonucleotide
caacccgaatggtttaggaatgttttgagcatcgcacctataatgttctcgaata

SEQ ID NO: 340150 - DNA, 55 bp, Artificial
  Synthetic oligonucleotide
caacccgagaaaccttgccaacgcactcggaatctactcagagaaacccggcaac

SEQ ID NO: 340151 - DNA, 60 bp, Artificial
  Synthetic oligonucleotide
caacccgcgctctatcacagagagtagcgtagagtgggcttgccatgagctagccctcca

SEQ ID NO: 340152 - DNA, 55 bp, Artificial
  Synthetic oligonucleotide
caacccggaaggtggatgacccttggaacaatcgagcggttcatgggtacattaa

SEQ ID NO: 340153 - DNA, 56 bp, Artificial
  Synthetic oligonucleotide
caacccggaggtgggcactctgttgttggcccaaactggactaatctatagacttg

SEQ ID NO: 340154 - DNA, 56 bp, Artificial
  Synthetic oligonucleotide
caacccggattaatcaggttttctgagtatatacccgttagtactcaatggataca

SEQ ID NO: 340155 - DNA, 55 bp, Artificial
  Synthetic oligonucleotide
caacccggggacgatccactcctgggaaacaagtctctactcgagactcacccac

SEQ ID NO: 340156 - DNA, 55 bp, Artificial
  Synthetic oligonucleotide
caacccgtacacaaaacatcttgctcaaatgtttgccgggtgggggggagcaatg

SEQ ID NO: 340157 - DNA, 55 bp, Artificial
  Synthetic oligonucleotide
caaccctaatgtcaccactgtgagagaagcaggggtattggtgacggcggctacg

SEQ ID NO: 340158 - DNA, 55 bp, Artificial
  Synthetic oligonucleotide
caaccctactacacacaaggaccatcaggtcatgtacgtgtgagccgtttagggc

SEQ ID NO: 340159 - DNA, 55 bp, Artificial
  Synthetic oligonucleotide
caaccctagaacagtggggagatgccctcgatatgtcaaacagacaagcctcctt

SEQ ID NO: 340160 - DNA, 59 bp, Artificial
  Synthetic oligonucleotide
caaccctcagatacattattattcttaggcccacttgagcaaggtggattaatattcaa

SEQ ID NO: 340161 - DNA, 56 bp, Artificial
  Synthetic oligonucleotide
caaccctctattgtgtgcataaaaggatagaggtaaaagatactaaggaagcttta

SEQ ID NO: 340162 - DNA, 60 bp, Artificial
  Synthetic oligonucleotide
caaccctctattgtgtgcatcaaaatatagaggtaagagacaccaaggaagctttagata

SEQ ID NO: 340163 - DNA, 55 bp, Artificial
  Synthetic oligonucleotide
caaccctctcaaggcgcaagttcagtccgattgtgtctgatctcaatagggtgtc

SEQ ID NO: 340164 - DNA, 59 bp, Artificial
  Synthetic oligonucleotide
caaccctgagaacggccaagataaccaacggttttagcacagatctagtcatagccaca

SEQ ID NO: 340165 - DNA, 53 bp, Artificial
  Synthetic oligonucleotide
caaccctggaagagtgaccgtttctaccaaaactagtcaaacaagtgtaatac

SEQ ID NO: 340166 - DNA, 55 bp, Artificial
  Synthetic oligonucleotide
caaccctgggcgagtcactgtgtctactaaaactagccaaacaagtgtggttccc

SEQ ID NO: 340167 - DNA, 54 bp, Artificial
  Synthetic oligonucleotide
caacccttacaacatgtaccatcctctttaccacataccactgttttaacatca

SEQ ID NO: 340168 - DNA, 57 bp, Artificial
  Synthetic oligonucleotide
caacccttatcccaagggaagtaggatagttattaacagagaacatcttatgattga

SEQ ID NO: 340169 - DNA, 60 bp, Artificial
  Synthetic oligonucleotide
caacccttgctcaactcacttccatttatcgcatggcctccatcgttgaatgcgaagcgg

SEQ ID NO: 340170 - DNA, 59 bp, Artificial
  Synthetic oligonucleotide
caaccctttcagtatcacgcaacagttggacttacattacgtattgaatctgcagtttg

SEQ ID NO: 340171 - DNA, 60 bp, Artificial
  Synthetic oligonucleotide
caacccttttcgatttacatatctaatcgtcatatcgtgtatgaattgttagaattcata

SEQ ID NO: 340172 - DNA, 55 bp, Artificial
  Synthetic oligonucleotide
caacccttttgccgagtgggacaatctgttagcaaacctgcagccttataacttg

SEQ ID NO: 340173 - DNA, 56 bp, Artificial
  Synthetic oligonucleotide
caaccgagggtggagattccatcgccacctcctgttcccacttacactctttacag

SEQ ID NO: 340174 - DNA, 55 bp, Artificial
  Synthetic oligonucleotide
caaccgattttgagacaactaatgctatagtaacttcatatgatggatgcctggg

SEQ ID NO: 340175 - DNA, 56 bp, Artificial
  Synthetic oligonucleotide
caaccgattttgttgacaatatcgtgaatcaacaaaccgaaacgaacatcaattac

SEQ ID NO: 340176 - DNA, 59 bp, Artificial
  Synthetic oligonucleotide
caaccgcacaacccgcaaacactggcaaggtggcaatgtctcaccataatccgggcgtg

SEQ ID NO: 340177 - DNA, 58 bp, Artificial
  Synthetic oligonucleotide
caaccgccaacaactatgccactcactccgacgatatgctaagcaaaggaccgtacgg

SEQ ID NO: 340178 - DNA, 60 bp, Artificial
  Synthetic oligonucleotide
caaccgctagtgatcaaattctaattgagaatgcagccggccatcgtgttgctatttcta

SEQ ID NO: 340179 - DNA, 60 bp, Artificial
  Synthetic oligonucleotide
caaccgctggtctaacccatatgatgatctggcattccaatctgaatgatgccacatatc

SEQ ID NO: 340180 - DNA, 55 bp, Artificial
  Synthetic oligonucleotide
caaccggatcattactggtaccctcaatgtcaatccatgttgtcagagttgggtc

SEQ ID NO: 340181 - DNA, 57 bp, Artificial
  Synthetic oligonucleotide
caaccggccacagctaattactacattgtaacgtgttgttacacttgtggcaccacg

SEQ ID NO: 340182 - DNA, 55 bp, Artificial
  Synthetic oligonucleotide
caaccggtaaaggcgctcctggactcctcacgcggacctagtggcacgggctata

SEQ ID NO: 340183 - DNA, 60 bp, Artificial
  Synthetic oligonucleotide
caaccgtatcagcagatccactggcatcactactggagatgtgccacagcacacagatcg

SEQ ID NO: 340184 - DNA, 57 bp, Artificial
  Synthetic oligonucleotide
caaccgtggcgtgaacgctttctacgtgtctaactacttgttgaggtctcaagagac

SEQ ID NO: 340185 - DNA, 56 bp, Artificial
  Synthetic oligonucleotide
caaccgtgttgaggaagaatgtaacagaggtggattacttgtatttggcattttat

SEQ ID NO: 340186 - DNA, 53 bp, Artificial
  Synthetic oligonucleotide
caaccgttccgctattttccaggctgttcgcattttcttttcccctacttcga

SEQ ID NO: 340187 - DNA, 52 bp, Artificial
  Synthetic oligonucleotide
caaccgttttgcgcgggagacgccgtgattggtcgggctttctcgctgcgac

SEQ ID NO: 340188 - DNA, 50 bp, Artificial
  Synthetic oligonucleotide
caacctaaaaaaatcaccgtggggaaaatccgcggagaaaaagtgctaac

SEQ ID NO: 340189 - DNA, 55 bp, Artificial
  Synthetic oligonucleotide
caacctaaaatcagagatcgcttcgctgtttatgcccctggttggcttagacgtc

SEQ ID NO: 340190 - DNA, 52 bp, Artificial
  Synthetic oligonucleotide
caacctaaccgttgaactgtgtcgcgcaaaccccgctaaagtgttcgtattt

SEQ ID NO: 340191 - DNA, 60 bp, Artificial
  Synthetic oligonucleotide
caacctaaccttctctgatgcacaaggtgccatcaatcaatgtggaaccttcagaggtag

SEQ ID NO: 340192 - DNA, 52 bp, Artificial
  Synthetic oligonucleotide
caacctacgaagacctaggcggtccacggttcctaaccctaatgcctctcac

SEQ ID NO: 340193 - DNA, 59 bp, Artificial
  Synthetic oligonucleotide
caacctacttcattatattcgtaatgcttgaaattgctattgcttcattcactctgtcc

SEQ ID NO: 340194 - DNA, 60 bp, Artificial
  Synthetic oligonucleotide
caacctagacaaaggttcagcaaccatgataacatcacccaatttttctgtagctctgga

SEQ ID NO: 340195 - DNA, 55 bp, Artificial
  Synthetic oligonucleotide
caacctagccatacttatgatatagtgaccatgatggtacggtgttttctggtcg

SEQ ID NO: 340196 - DNA, 60 bp, Artificial
  Synthetic oligonucleotide
caacctagctccagtgcaggcctgaaggatgatcttattgaaaatttgcaggcataccag

SEQ ID NO: 340197 - DNA, 55 bp, Artificial
  Synthetic oligonucleotide
caacctataagccaggccatgaggtcaccccacccctcctcactttacctaactc

SEQ ID NO: 340198 - DNA, 56 bp, Artificial
  Synthetic oligonucleotide
caacctatacaagaacaatcctggaagagtcactgtgtctaccaaaactagtcaaa

SEQ ID NO: 340199 - DNA, 57 bp, Artificial
  Synthetic oligonucleotide
caacctatggcatgtgtacagaaaaattctcgttcgcgaaaaatccggcggacactg

SEQ ID NO: 340200 - DNA, 60 bp, Artificial
  Synthetic oligonucleotide
caacctattggcatgcaatgcagattctgaatcttcaaattcctctaagactctgctagt

SEQ ID NO: 340201 - DNA, 56 bp, Artificial
  Synthetic oligonucleotide
caacctattgggccttaagcccaggagaaagggcctggcatttaggccatggagtc

SEQ ID NO: 340202 - DNA, 52 bp, Artificial
  Synthetic oligonucleotide
caacctcaaccctctggccaactttcgccacatgaggcagcccggttatctc

SEQ ID NO: 340203 - DNA, 55 bp, Artificial
  Synthetic oligonucleotide
caacctcacgttaggtggcggaacttatgttattcatgagatgtgtctcactcca

SEQ ID NO: 340204 - DNA, 60 bp, Artificial
  Synthetic oligonucleotide
caacctcagacgctgaagggcctggatcgagagttgcatcttgtagctgatgcaaatgtc

SEQ ID NO: 340205 - DNA, 55 bp, Artificial
  Synthetic oligonucleotide
caacctcgagttgaatatggatgaactccacaagacgagccttcctggagtcact

SEQ ID NO: 340206 - DNA, 59 bp, Artificial
  Synthetic oligonucleotide
caacctcgatctcttgtagatctgttctctaaacgaactttaaaatctgtgtagctgtc

SEQ ID NO: 340207 - DNA, 53 bp, Artificial
  Synthetic oligonucleotide
caacctcgccgacgcgttaataatcgccggcttggtagtaagggtgacgcccc

SEQ ID NO: 340208 - DNA, 60 bp, Artificial
  Synthetic oligonucleotide
caacctctctgtcgtctggttcccagatgcatcagaaggacccacctccctccaagctac

SEQ ID NO: 340209 - DNA, 60 bp, Artificial
  Synthetic oligonucleotide
caacctctgaggctcgggaaatgttggtggatctgggagtgatctaggtcagtgcaggag

SEQ ID NO: 340210 - DNA, 51 bp, Artificial
  Synthetic oligonucleotide
caacctcttagaaataaacgagtttgtgtatgcggtatagatccgtatcct

SEQ ID NO: 340211 - DNA, 60 bp, Artificial
  Synthetic oligonucleotide
caacctgaatgatgctacatatcagagaacaagagcccttgtgcgtactgggatggaccc

SEQ ID NO: 340212 - DNA, 60 bp, Artificial
  Synthetic oligonucleotide
caacctgagctgcaatgggcctttaccaatatgccattatttagtccggctgctctttgt

SEQ ID NO: 340213 - DNA, 55 bp, Artificial
  Synthetic oligonucleotide
caacctgagtggttcagaaatgttttgagcattgcacctataatgttctcaaaca

SEQ ID NO: 340214 - DNA, 60 bp, Artificial
  Synthetic oligonucleotide
caacctgatactgctactgcacaactgatcaaaacatattcaaacccaaaacagcgtgga

SEQ ID NO: 340215 - DNA, 57 bp, Artificial
  Synthetic oligonucleotide
caacctgcaacaccactgaggtttacaatgaaactgtaaggctggaaactataacaa

SEQ ID NO: 340216 - DNA, 55 bp, Artificial
  Synthetic oligonucleotide
caacctgcccaatgggaccaagacgcaaacgaacaggaaaggtccctttgctatg

SEQ ID NO: 340217 - DNA, 55 bp, Artificial
  Synthetic oligonucleotide
caacctgctattcggatggaatttgaggggaggggcgttacgcaattattcgctg

SEQ ID NO: 340218 - DNA, 54 bp, Artificial
  Synthetic oligonucleotide
caacctggtagagaagcccgttacaatccctcaatccaaattacccctaccaga

SEQ ID NO: 340219 - DNA, 56 bp, Artificial
  Synthetic oligonucleotide
caacctggtgtctgtaacgaggttcgccaagggacttggagtgcgaacggagtgga

SEQ ID NO: 340220 - DNA, 60 bp, Artificial
  Synthetic oligonucleotide
caacctgtgagccaagatctgtatttctgtagagcagtaaatcattatgatgatgaaatc

SEQ ID NO: 340221 - DNA, 55 bp, Artificial
  Synthetic oligonucleotide
caaccttaatcatgagtcggagttctgtgacatgcttaggctcttcgacttcaac

SEQ ID NO: 340222 - DNA, 52 bp, Artificial
  Synthetic oligonucleotide
caaccttacaagtggtcagtgctaccgaatatcctcacgtgttacatcagca

SEQ ID NO: 340223 - DNA, 50 bp, Artificial
  Synthetic oligonucleotide
caaccttacctacaaccctgcattgttcgttacatggcattattgggaac

SEQ ID NO: 340224 - DNA, 60 bp, Artificial
  Synthetic oligonucleotide
caaccttatctagtatttgtgaatacgactgtgcgctactgccatccatcaacgctatta

SEQ ID NO: 340225 - DNA, 55 bp, Artificial
  Synthetic oligonucleotide
caaccttcaaaacactgataggcagtccagagtcagggtatatgactgatttcgt

SEQ ID NO: 340226 - DNA, 58 bp, Artificial
  Synthetic oligonucleotide
caaccttcaagtggcccttctccaatgagaggagtagcgaatattattcgtgaatact

SEQ ID NO: 340227 - DNA, 58 bp, Artificial
  Synthetic oligonucleotide
caaccttcaattggcagatctaaaacgaaagtatttgagtccagagaaagattcagta

SEQ ID NO: 340228 - DNA, 55 bp, Artificial
  Synthetic oligonucleotide
caaccttcctcctctgccagagggaacgatgaagaagaggcggccaccacctccg

SEQ ID NO: 340229 - DNA, 59 bp, Artificial
  Synthetic oligonucleotide
caaccttcggcctttatggattctcgaaacgtcataagcgctaccatctaattgagtca

SEQ ID NO: 340230 - DNA, 55 bp, Artificial
  Synthetic oligonucleotide
caaccttctgaatgataggacctgggacaataacaaagcccgagtcatatatgtg

SEQ ID NO: 340231 - DNA, 55 bp, Artificial
  Synthetic oligonucleotide
caaccttggggaccagactggggtgctattaaaatcactcgccggagccccactg

SEQ ID NO: 340232 - DNA, 55 bp, Artificial
  Synthetic oligonucleotide
caaccttgtccctggtttaagtttcattcagcttccgtctggaactaaacattgc

SEQ ID NO: 340233 - DNA, 58 bp, Artificial
  Synthetic oligonucleotide
caaccttgtccgacgcgggtaagtttgcgaaggcagcacgtatgattgtgaagttcgc

SEQ ID NO: 340234 - DNA, 60 bp, Artificial
  Synthetic oligonucleotide
caacctttaagtcaagatcagtacttctgtagagcagtggcccactatgacgatgagatt

SEQ ID NO: 340235 - DNA, 55 bp, Artificial
  Synthetic oligonucleotide
caacctttacagtttgtgtaggccctgaggcttcgccatcagtagggtgcactgc

SEQ ID NO: 340236 - DNA, 55 bp, Artificial
  Synthetic oligonucleotide
caaccttttgctaatttggcgaaggaaggacaggcaccatacattgcagaatcgg

SEQ ID NO: 340237 - DNA, 55 bp, Artificial
  Synthetic oligonucleotide
caacgaaacataaactcactaacgtacaaaagctgatatctcgcattgcacagcg

SEQ ID NO: 340238 - DNA, 55 bp, Artificial
  Synthetic oligonucleotide
caacgaaacattttgtccgaacgtttttgcatgtctccggtgatgttgactctaa

SEQ ID NO: 340239 - DNA, 52 bp, Artificial
  Synthetic oligonucleotide
caacgaaatatatccgggtggacttaggtttgccccttacattgtggttggg

SEQ ID NO: 340240 - DNA, 60 bp, Artificial
  Synthetic oligonucleotide
caacgaaatggcatttcactcgccaaatatgagcacgggatgtggcttgcgtcctcagat

SEQ ID NO: 340241 - DNA, 55 bp, Artificial
  Synthetic oligonucleotide
caacgaacaacaagatgaacaggagttgaggcaagaccttttaatatcttcttgg

SEQ ID NO: 340242 - DNA, 59 bp, Artificial
  Synthetic oligonucleotide
caacgaacatgaagggaggctaattcagaacagcataacaatagagagaatggttctct

SEQ ID NO: 340243 - DNA, 54 bp, Artificial
  Synthetic oligonucleotide
caacgaaccagacggtttattagatccaatgtttaatacaatacgtctaacgtc

SEQ ID NO: 340244 - DNA, 60 bp, Artificial
  Synthetic oligonucleotide
caacgaaccatgtcacttgattttgtgactactaactacatgtcactaatctcaggcatg

SEQ ID NO: 340245 - DNA, 56 bp, Artificial
  Synthetic oligonucleotide
caacgaacgcgaatgcacagaatccggacaatctaacaggttcagacggaaaaaac

SEQ ID NO: 340246 - DNA, 60 bp, Artificial
  Synthetic oligonucleotide
caacgaacgctctatgttcagcgcgcacagaccgtttgccgcaactggcaacgtaatgcg

SEQ ID NO: 340247 - DNA, 54 bp, Artificial
  Synthetic oligonucleotide
caacgaacgttacagttaatccaggaccgttcgcgcagaccgggtacgctccag

SEQ ID NO: 340248 - DNA, 60 bp, Artificial
  Synthetic oligonucleotide
caacgaaggagagaacaactgcctgctgcaccctatgagccagcatggaatagatgatgg

SEQ ID NO: 340249 - DNA, 60 bp, Artificial
  Synthetic oligonucleotide
caacgaaggcggtacaatcccactttccattcctttcacgtgctgtgcgatgcctatcgc

SEQ ID NO: 340250 - DNA, 54 bp, Artificial
  Synthetic oligonucleotide
caacgaagtttgggtcgagagaaaggcgtttccgcgagcagggcccctccgcag

SEQ ID NO: 340251 - DNA, 58 bp, Artificial
  Synthetic oligonucleotide
caacgaatatcaagcttgcgtgtacctccttacaaatgtcacgacacgccagttttct

SEQ ID NO: 340252 - DNA, 60 bp, Artificial
  Synthetic oligonucleotide
caacgaatcaacgagaaagaagatcgagaaaataagacctctactaatagatggcacagc

SEQ ID NO: 340253 - DNA, 50 bp, Artificial
  Synthetic oligonucleotide
caacgaatggctcaatctgtgcagtctagtagtcaacgcatgattcaaat

SEQ ID NO: 340254 - DNA, 59 bp, Artificial
  Synthetic oligonucleotide
caacgaattagatattcctgaagggtatgacattgtttcagtaggctacgatgaaaaga

SEQ ID NO: 340255 - DNA, 54 bp, Artificial
  Synthetic oligonucleotide
caacgaattgtgggtcttttaggatttgctgctcctttcacacaatgtgggtat

SEQ ID NO: 340256 - DNA, 55 bp, Artificial
  Synthetic oligonucleotide
caacgacacagaggagacattcagacctggaggaggagatatgagggataactgg

SEQ ID NO: 340257 - DNA, 55 bp, Artificial
  Synthetic oligonucleotide
caacgacacggtacacttctgtctaaatcagacgaaattacgttgactaggctgt

SEQ ID NO: 340258 - DNA, 55 bp, Artificial
  Synthetic oligonucleotide
caacgacagtcggcggtctttgaacacttgaataaacaggacgatttcttcacgc

SEQ ID NO: 340259 - DNA, 56 bp, Artificial
  Synthetic oligonucleotide
caacgaccacatgtactattagaaattgtaaaaagttgggaccacgtgagaatgtc

SEQ ID NO: 340260 - DNA, 57 bp, Artificial
  Synthetic oligonucleotide
caacgacgaactggagacgctaacacatatttggggaacacattggtgacccttata

SEQ ID NO: 340261 - DNA, 58 bp, Artificial
  Synthetic oligonucleotide
caacgacggtgacaatattttgaagcgatcgttgtgaacatacaattggtctagaccg

SEQ ID NO: 340262 - DNA, 55 bp, Artificial
  Synthetic oligonucleotide
caacgactaaaggtttgagagtaattccgattgacgttttcaatagttcattagc

SEQ ID NO: 340263 - DNA, 60 bp, Artificial
  Synthetic oligonucleotide
caacgactaccgaacttagacagcgtcatcatgacgcaggcagatcatgtgtacaactac

SEQ ID NO: 340264 - DNA, 55 bp, Artificial
  Synthetic oligonucleotide
caacgactatgaggggttgcctggatacctccgattcaatgggagcggatggatg

SEQ ID NO: 340265 - DNA, 55 bp, Artificial
  Synthetic oligonucleotide
caacgactcttgatgtgattggagccccaatagtaatgatgtttcctcagcgata

SEQ ID NO: 340266 - DNA, 55 bp, Artificial
  Synthetic oligonucleotide
caacgactgacaagccaccagcctcaatgcggataccatttatgtgccctgcctc

SEQ ID NO: 340267 - DNA, 55 bp, Artificial
  Synthetic oligonucleotide
caacgactgctatgaccactggatgctgtgggcgcagatagcacatgcagacgta

SEQ ID NO: 340268 - DNA, 56 bp, Artificial
  Synthetic oligonucleotide
caacgacttttaatccacctacaggttattggatgcttttatcacctttggaggca

SEQ ID NO: 340269 - DNA, 57 bp, Artificial
  Synthetic oligonucleotide
caacgagaaacgagtatctagagcagtagccgacaccggccggagaatagtaaagta

SEQ ID NO: 340270 - DNA, 60 bp, Artificial
  Synthetic oligonucleotide
caacgagaaagaaaatcgagaagataagaccactcctaatagatggcacagcttcattga

SEQ ID NO: 340271 - DNA, 59 bp, Artificial
  Synthetic oligonucleotide
caacgagactatactggaaacagggtatgtgtgtagtaaattccactcagacactccca

SEQ ID NO: 340272 - DNA, 60 bp, Artificial
  Synthetic oligonucleotide
caacgagactatactggagacaggatatgtgtgcagtaaatttcattcggacactcccag

SEQ ID NO: 340273 - DNA, 60 bp, Artificial
  Synthetic oligonucleotide
caacgagactatagtagaaacaggatatgtgtgcagcaaatttcactcagacactcccag

SEQ ID NO: 340274 - DNA, 54 bp, Artificial
  Synthetic oligonucleotide
caacgagactcgctactatagagggaacctttctaattggtgtagttcaaaagg

SEQ ID NO: 340275 - DNA, 55 bp, Artificial
  Synthetic oligonucleotide
caacgagacttaccacgatgaaactgaccacatctccggtagctcacttgtcgag

SEQ ID NO: 340276 - DNA, 55 bp, Artificial
  Synthetic oligonucleotide
caacgagagagttcaatacgcatgctggcaacatgagagagtgtcccacgaccat

SEQ ID NO: 340277 - DNA, 59 bp, Artificial
  Synthetic oligonucleotide
caacgagagtgttaatcttggaaacaatcttgggagactgctgggtatacagcacaaaa

SEQ ID NO: 340278 - DNA, 60 bp, Artificial
  Synthetic oligonucleotide
caacgagatgttacgaatgctggttgctgcagggaaagattctgaagcggcgtactttcg

SEQ ID NO: 340279 - DNA, 54 bp, Artificial
  Synthetic oligonucleotide
caacgagcctagcactgctactgtcaaaaacgatctacgcgatcgttaccaggt

SEQ ID NO: 340280 - DNA, 52 bp, Artificial
  Synthetic oligonucleotide
caacgagccttcagccgctgcactttctgtgtgcaattcgattggtaggaag

SEQ ID NO: 340281 - DNA, 50 bp, Artificial
  Synthetic oligonucleotide
caacgagccttctacggctactgtgaagaacgatcaacgtgatcggtttc

SEQ ID NO: 340282 - DNA, 58 bp, Artificial
  Synthetic oligonucleotide
caacgaggaaatgtactattgtcacctgaagaggtcagcgaaacacaaggaacggaga

SEQ ID NO: 340283 - DNA, 58 bp, Artificial
  Synthetic oligonucleotide
caacgaggaatgatggtatagtggtaccgaggctgttggatatcaccctaaaggctta

SEQ ID NO: 340284 - DNA, 60 bp, Artificial
  Synthetic oligonucleotide
caacgaggacgtccatcttatgcgattcggggatcgatggcagcatctcttccatcagcc

SEQ ID NO: 340285 - DNA, 60 bp, Artificial
  Synthetic oligonucleotide
caacgaggcagtgagagatgtaactaatggcgtgtcgcagttaactatcgctgtaggtaa

SEQ ID NO: 340286 - DNA, 55 bp, Artificial
  Synthetic oligonucleotide
caacgaggcctactgctcaaaagaaggagacgtgatacttaccctcggcataccg

SEQ ID NO: 340287 - DNA, 54 bp, Artificial
  Synthetic oligonucleotide
caacgaggcgtacccatccctgtctgtcccgtagacgaccggaagcccgtagag

SEQ ID NO: 340288 - DNA, 57 bp, Artificial
  Synthetic oligonucleotide
caacgagtcacgactactcgtcgttaggatcaatattggttcctgaaaacaccgtca

SEQ ID NO: 340289 - DNA, 55 bp, Artificial
  Synthetic oligonucleotide
caacgagtccttgccaatccaactgctgtggtagccttcgtcgtatgcgcgatct

SEQ ID NO: 340290 - DNA, 55 bp, Artificial
  Synthetic oligonucleotide
caacgagtggtaatagcactactggttctagcggttggtccagcgtactctgccc

SEQ ID NO: 340291 - DNA, 60 bp, Artificial
  Synthetic oligonucleotide
caacgataaccaacaaccagggctctcagatttatattgcaccgagacaatacatcttgc

SEQ ID NO: 340292 - DNA, 57 bp, Artificial
  Synthetic oligonucleotide
caacgatacagttaatacattctcaactaaagatgatgaggcactaaacgtttacgg

SEQ ID NO: 340293 - DNA, 55 bp, Artificial
  Synthetic oligonucleotide
caacgatagcagaaactatcgagatcgatgcgcataataatgaagaagagggctg

SEQ ID NO: 340294 - DNA, 55 bp, Artificial
  Synthetic oligonucleotide
caacgataggagaacataaccgataacgctacggtttaaacggcttgcgtacatg

SEQ ID NO: 340295 - DNA, 60 bp, Artificial
  Synthetic oligonucleotide
caacgatatcaaagaccaagttgtagcagaacgtttagcactccatggtgtggcatgggc

SEQ ID NO: 340296 - DNA, 58 bp, Artificial
  Synthetic oligonucleotide
caacgatgtaccaacaaatggttagggggaatatcatggacgcataacacatttacca

SEQ ID NO: 340297 - DNA, 55 bp, Artificial
  Synthetic oligonucleotide
caacgattcttggcataggcacggtcttagaccaagcggagaccgctggagtgcg

SEQ ID NO: 340298 - DNA, 56 bp, Artificial
  Synthetic oligonucleotide
caacgattggctagaggagtacactagttgcaagttccgggacagacccccgagaa

SEQ ID NO: 340299 - DNA, 54 bp, Artificial
  Synthetic oligonucleotide
caacgcaactcacaggaacaaccaggacctagcgaacgccttgggggtttactc

SEQ ID NO: 340300 - DNA, 55 bp, Artificial
  Synthetic oligonucleotide
caacgcaactgtcaaggctctcaatgtactcactagtattgcagttccaaaggtg

SEQ ID NO: 340301 - DNA, 58 bp, Artificial
  Synthetic oligonucleotide
caacgcaagaaagataccctttctgcctatataaggacttagtttagctcattgctaa

SEQ ID NO: 340302 - DNA, 55 bp, Artificial
  Synthetic oligonucleotide
caacgcaagcaagatacccttagtgctcaaagctgctgaggaagtgtctaggatg

SEQ ID NO: 340303 - DNA, 53 bp, Artificial
  Synthetic oligonucleotide
caacgcaatcggtcttataaatgaggggtcaaaacatttagtcttaacagctg

SEQ ID NO: 340304 - DNA, 59 bp, Artificial
  Synthetic oligonucleotide
caacgcaatctttcttggcgacctgtgtcaacggcgtgtgttggactgtttaccatggc

SEQ ID NO: 340305 - DNA, 55 bp, Artificial
  Synthetic oligonucleotide
caacgcaattagggagatgttatcctatctacaatgtcaaaccagatatgccacg

SEQ ID NO: 340306 - DNA, 58 bp, Artificial
  Synthetic oligonucleotide
caacgcacccagcgtatcgtcacaacaacaacccaaacagcccctgttccgcaacaga

SEQ ID NO: 340307 - DNA, 53 bp, Artificial
  Synthetic oligonucleotide
caacgcacttccaaagaaaaagaagggttagggacaatatgaccaagaaaatg

SEQ ID NO: 340308 - DNA, 59 bp, Artificial
  Synthetic oligonucleotide
caacgcagcaatgggggttggagtgggcaacctgacaatattcccccatcagtggataa

SEQ ID NO: 340309 - DNA, 55 bp, Artificial
  Synthetic oligonucleotide
caacgcagcattggggagcccaggatgcgatcacttgggtggcacagagtgggac

SEQ ID NO: 340310 - DNA, 56 bp, Artificial
  Synthetic oligonucleotide
caacgcaggggccgtaaggtctacgttcggaatgtactgagcgtaaaggattctga

SEQ ID NO: 340311 - DNA, 55 bp, Artificial
  Synthetic oligonucleotide
caacgcaggtttcaaccgaatggactaacattcactatacagaaacccttagttc

SEQ ID NO: 340312 - DNA, 60 bp, Artificial
  Synthetic oligonucleotide
caacgcagtgctctgctcaggctgttctgtttcgtgtgttatggatatgcgccacgtgca

SEQ ID NO: 340313 - DNA, 60 bp, Artificial
  Synthetic oligonucleotide
caacgcatcgcagcgtatccgaccatcaccccgatacgtgttgacgcatcaacacggtgt

SEQ ID NO: 340314 - DNA, 56 bp, Artificial
  Synthetic oligonucleotide
caacgcccaaagtattgttaccgatcgattcagcaaaccgtctgtttggtcttgcg

SEQ ID NO: 340315 - DNA, 55 bp, Artificial
  Synthetic oligonucleotide
caacgcccgtatcgaaagtacgccgtcgtctcaacttcgacagcccctttggagc

SEQ ID NO: 340316 - DNA, 58 bp, Artificial
  Synthetic oligonucleotide
caacgcccttactgctggcactaccccccaagaccatgcggtattgtgcccgcaagga

SEQ ID NO: 340317 - DNA, 57 bp, Artificial
  Synthetic oligonucleotide
caacgccgatcgcggttgtaacgtgggttgtgacgactctgtggcgcatgaactgaa

SEQ ID NO: 340318 - DNA, 60 bp, Artificial
  Synthetic oligonucleotide
caacgccgtgggagagtcggaagacaggagggaagaacagatgaatacatatactctgga

SEQ ID NO: 340319 - DNA, 53 bp, Artificial
  Synthetic oligonucleotide
caacgcctacacgtttggtaacatatgataatcctgcctttgagggcctgcaa

SEQ ID NO: 340320 - DNA, 60 bp, Artificial
  Synthetic oligonucleotide
caacgcctctaacggatttgtctatgaccatagattggtatctgagctctgaagaaagtg

SEQ ID NO: 340321 - DNA, 54 bp, Artificial
  Synthetic oligonucleotide
caacgcctggcgagtattcggtataggggcagatgcgagaggacgatgttatcg

SEQ ID NO: 340322 - DNA, 55 bp, Artificial
  Synthetic oligonucleotide
caacgcgaaggagaagcgttcgtgatgcttaagatgctgctcgctacgcaaggtc

SEQ ID NO: 340323 - DNA, 52 bp, Artificial
  Synthetic oligonucleotide
caacgcgattagtgcatggattcttagcactcgtctgggacgacctgaggag

SEQ ID NO: 340324 - DNA, 60 bp, Artificial
  Synthetic oligonucleotide
caacgcgccttcctagtggtagtcaacaatttatgacaactgaagatgagcagtcaccca

SEQ ID NO: 340325 - DNA, 51 bp, Artificial
  Synthetic oligonucleotide
caacgcggtgtgcttaatcgcctatctcaagagtcgccattgttgcttcga

SEQ ID NO: 340326 - DNA, 55 bp, Artificial
  Synthetic oligonucleotide
caacgcgtatgggtacgccgaacgtgtcaaagatatgcaattttgtcgcatcttg

SEQ ID NO: 340327 - DNA, 55 bp, Artificial
  Synthetic oligonucleotide
caacgcgtctgcatatacctgagctaaatgctggccctcccctcttgcacttctg

SEQ ID NO: 340328 - DNA, 50 bp, Artificial
  Synthetic oligonucleotide
caacgcgtgggagacagactgtgaaggaaaacaaggggacacgcataagg

SEQ ID NO: 340329 - DNA, 60 bp, Artificial
  Synthetic oligonucleotide
caacgcgttagacacgaccttacagttgactcacgtcttgcatcctgtgagagctctaac

SEQ ID NO: 340330 - DNA, 55 bp, Artificial
  Synthetic oligonucleotide
caacgcgttggggtgtgagtacttagttgtacgtcatggactcgggatgcacgtg

SEQ ID NO: 340331 - DNA, 54 bp, Artificial
  Synthetic oligonucleotide
caacgcgttttataaagaacaaattacatttggacagtcaagaatgtttattcc

SEQ ID NO: 340332 - DNA, 55 bp, Artificial
  Synthetic oligonucleotide
caacgctacagcaacggtttactataacagaaggctaaccactaccattaagacc

SEQ ID NO: 340333 - DNA, 60 bp, Artificial
  Synthetic oligonucleotide
caacgctagatggaccgtatcagcccaccacatttaacctgccaatcgactattggatgc

SEQ ID NO: 340334 - DNA, 55 bp, Artificial
  Synthetic oligonucleotide
caacgctattagcggaggctccaacgagggttccacggacacaactttcacccac

SEQ ID NO: 340335 - DNA, 50 bp, Artificial
  Synthetic oligonucleotide
caacgctgaaaaccaaacgttttacgactcaaacggtcctttgaacaacc

SEQ ID NO: 340336 - DNA, 60 bp, Artificial
  Synthetic oligonucleotide
caacgctgtgcctgggacatcatgcggtgccaaacggaacgctagtgaaaacaatcacgg

SEQ ID NO: 340337 - DNA, 60 bp, Artificial
  Synthetic oligonucleotide
caacgcttagctttattgcacctagcaaaagaccatgtatttcaagtaatgccattgtgg

SEQ ID NO: 340338 - DNA, 59 bp, Artificial
  Synthetic oligonucleotide
caacgcttccactggtacacgcatcaatcgtgaaatcgcgagcaagtccgatgggggta

SEQ ID NO: 340339 - DNA, 50 bp, Artificial
  Synthetic oligonucleotide
caacgcttgtagaaaaacacgatgattattcttacaatagaactgacgct

SEQ ID NO: 340340 - DNA, 53 bp, Artificial
  Synthetic oligonucleotide
caacgctttcggttacgctggcgtttaaaaactgtaattcgttgatcacggcc

SEQ ID NO: 340341 - DNA, 59 bp, Artificial
  Synthetic oligonucleotide
caacgctttgttcacattagaccgttgacttattagacatttgctaatagtcgtctcta

SEQ ID NO: 340342 - DNA, 50 bp, Artificial
  Synthetic oligonucleotide
caacggaaactccaccgttattaaagtttaggtttcgggatattgaacgc

SEQ ID NO: 340343 - DNA, 58 bp, Artificial
  Synthetic oligonucleotide
caacggaaatatgccagtacttgcaccacagatacccatctcgtggtttgtccgttgg

SEQ ID NO: 340344 - DNA, 60 bp, Artificial
  Synthetic oligonucleotide
caacggaagcacggtaccattatagctgacattcatataccaaaggtgttcaatgatctt

SEQ ID NO: 340345 - DNA, 54 bp, Artificial
  Synthetic oligonucleotide
caacggagcgccagactaccgactgtgtttactgtaagcagaacggtattttga

SEQ ID NO: 340346 - DNA, 51 bp, Artificial
  Synthetic oligonucleotide
caacggaggaacaagccgtagacatatgcaaggcagcaatggggctgagga

SEQ ID NO: 340347 - DNA, 59 bp, Artificial
  Synthetic oligonucleotide
caacggatactgcaatgacacctgttgcgtaccccccagcccaaaatatagccagccca

SEQ ID NO: 340348 - DNA, 55 bp, Artificial
  Synthetic oligonucleotide
caacggatctagtggatatagatctcttacgtgatgttcccgtaaataattggcg

SEQ ID NO: 340349 - DNA, 60 bp, Artificial
  Synthetic oligonucleotide
caacggatctggcttagagatgacattcactaacgattcacttcttaaccacaaattctg

SEQ ID NO: 340350 - DNA, 55 bp, Artificial
  Synthetic oligonucleotide
caacggcagatccgttcgattagtgagcggattcttgcctcttgcctgggacgac

SEQ ID NO: 340351 - DNA, 55 bp, Artificial
  Synthetic oligonucleotide
caacggccctcccgcccattactccgagctcccccgcctctccggcgcctctcga

SEQ ID NO: 340352 - DNA, 54 bp, Artificial
  Synthetic oligonucleotide
caacggcgactggcagctacacggaattcgggctgtttgacgcctcttccgggg

SEQ ID NO: 340353 - DNA, 55 bp, Artificial
  Synthetic oligonucleotide
caacggcgtcacgctgtgaacgcgcgagcagccttgccccacaactgaatagagg

SEQ ID NO: 340354 - DNA, 58 bp, Artificial
  Synthetic oligonucleotide
caacggcgtgtgttggactgtctttcatggtgccggctcgaagaccttagccggccca

SEQ ID NO: 340355 - DNA, 52 bp, Artificial
  Synthetic oligonucleotide
caacggctccggcgtggagttccggggaccggctggtcccaccggctcacaa

SEQ ID NO: 340356 - DNA, 52 bp, Artificial
  Synthetic oligonucleotide
caacgggaaattatgtagattaaaagggatagccccactacaattggggaaa

SEQ ID NO: 340357 - DNA, 55 bp, Artificial
  Synthetic oligonucleotide
caacgggacgctgtcgttagatctccggtacgaatggcggaagagaacccctctg

SEQ ID NO: 340358 - DNA, 56 bp, Artificial
  Synthetic oligonucleotide
caacgggagaaccactagatttccgaataggacgtgggcagtatgattgtaacgct

SEQ ID NO: 340359 - DNA, 60 bp, Artificial
  Synthetic oligonucleotide
caacgggagagatcaccgcttgcttatagccttgaagctcaataaagcatgccagttagt

SEQ ID NO: 340360 - DNA, 59 bp, Artificial
  Synthetic oligonucleotide
caacgggatatagtctttgaactaaaagagatgactagattttatcaggtttgctatga

SEQ ID NO: 340361 - DNA, 60 bp, Artificial
  Synthetic oligonucleotide
caacgggcacaactagattgcatcttaaatagggactgctgcttagaggctgatggggtg

SEQ ID NO: 340362 - DNA, 55 bp, Artificial
  Synthetic oligonucleotide
caacgggcacctggaaaatgcatcggccgctaggtggcgtgagaacccttttcgt

SEQ ID NO: 340363 - DNA, 54 bp, Artificial
  Synthetic oligonucleotide
caacgggccctttattaaagtacttgccctatactcaaataccatcgattgtgg

SEQ ID NO: 340364 - DNA, 60 bp, Artificial
  Synthetic oligonucleotide
caacgggcctaattttacaagtgcaaccatgaaagctgcatgttggtggaccaacataca

SEQ ID NO: 340365 - DNA, 53 bp, Artificial
  Synthetic oligonucleotide
caacggggaccgaggtggctttgcccgggccttatcagcccactaagggctgt

SEQ ID NO: 340366 - DNA, 55 bp, Artificial
  Synthetic oligonucleotide
caacggggataagtgaggaagtagttctttgcgtatatagcaaaacgaccgagtc

SEQ ID NO: 340367 - DNA, 53 bp, Artificial
  Synthetic oligonucleotide
caacgggggaacgtactattgtcacccgaagaagttagcgagacacaaggaac

SEQ ID NO: 340368 - DNA, 60 bp, Artificial
  Synthetic oligonucleotide
caacgggtacttgaacaaacataaggatgaggttgataaagcaagtgccgacagcatgat

SEQ ID NO: 340369 - DNA, 56 bp, Artificial
  Synthetic oligonucleotide
caacgggtcgtcggtctgaatccgattaacggcgagcccatagagtgttacggcga

SEQ ID NO: 340370 - DNA, 55 bp, Artificial
  Synthetic oligonucleotide
caacgggtgaacagtggtgaacagacggtgaacagtcattactgcgattgttcac

SEQ ID NO: 340371 - DNA, 53 bp, Artificial
  Synthetic oligonucleotide
caacggtaaactaacgagaaccctacaaaagatgtcttcgtattacgcagaac

SEQ ID NO: 340372 - DNA, 55 bp, Artificial
  Synthetic oligonucleotide
caacggtacgtgacgttagctccatgagtaacttacaaagtggcgtgcagtcacg

SEQ ID NO: 340373 - DNA, 55 bp, Artificial
  Synthetic oligonucleotide
caacggtagcttttgctttactgtgcgttctagcgcgtctgaagggcgccgcgtg

SEQ ID NO: 340374 - DNA, 55 bp, Artificial
  Synthetic oligonucleotide
caacggtatgacggaaggcaccggcaggtatggattcccgtaggtgagtacaaac

SEQ ID NO: 340375 - DNA, 53 bp, Artificial
  Synthetic oligonucleotide
caacggtccaagcccaggaaccggaacccaagtactagtgtcaagacggtgac

SEQ ID NO: 340376 - DNA, 55 bp, Artificial
  Synthetic oligonucleotide
caacggtctagacgtttccgctcaagtacagcactacaagaatttaggtgaattg

SEQ ID NO: 340377 - DNA, 53 bp, Artificial
  Synthetic oligonucleotide
caacggtctcagactgacaaccaactggcagtcttcctaatatgcatcatgac

SEQ ID NO: 340378 - DNA, 55 bp, Artificial
  Synthetic oligonucleotide
caacggtggatttagtgcccaaagtcctgccaaattgaccagaatcatgaccacc

SEQ ID NO: 340379 - DNA, 54 bp, Artificial
  Synthetic oligonucleotide
caacggttgaaccagtgttagacggaccatatcaacaaacgacctttaatccac

SEQ ID NO: 340380 - DNA, 57 bp, Artificial
  Synthetic oligonucleotide
caacggttgtatttcaagacccagagaaacacttcagacttccgttgccattatgcc

SEQ ID NO: 340381 - DNA, 57 bp, Artificial
  Synthetic oligonucleotide
caacgtaaactctgtgttggacgcgcccgtgtctatacacgtgatcccgcccaactc

SEQ ID NO: 340382 - DNA, 60 bp, Artificial
  Synthetic oligonucleotide
caacgtaaagaatctgtatgacaaggtcagaatgcagttgagagacaatgccaaggaaat

SEQ ID NO: 340383 - DNA, 55 bp, Artificial
  Synthetic oligonucleotide
caacgtaaaggagtatactggtcatatccagatacactactcaaggcaggacctt

SEQ ID NO: 340384 - DNA, 52 bp, Artificial
  Synthetic oligonucleotide
caacgtaacaaggaaaatagggtacatatggtacacgaacaattgcaccccg

SEQ ID NO: 340385 - DNA, 55 bp, Artificial
  Synthetic oligonucleotide
caacgtaagtggctccgaccaacgcccctactgctggcactaccctccaagaccc

SEQ ID NO: 340386 - DNA, 59 bp, Artificial
  Synthetic oligonucleotide
caacgtaccggattcgtgtttcataaacctaatatacttccatattcagcatcattcac

SEQ ID NO: 340387 - DNA, 57 bp, Artificial
  Synthetic oligonucleotide
caacgtagaatattacgaaatagccggcagattttcactgatatctttagtaccaac

SEQ ID NO: 340388 - DNA, 55 bp, Artificial
  Synthetic oligonucleotide
caacgtagcaaacggcgccaacgtcgttgctaatattcgagtgcctacagacgcc

SEQ ID NO: 340389 - DNA, 54 bp, Artificial
  Synthetic oligonucleotide
caacgtatcaaagacaactcgattttaaagatgattttcgttcttggcctaaat

SEQ ID NO: 340390 - DNA, 57 bp, Artificial
  Synthetic oligonucleotide
caacgtatcaagttgttcgtgtggttttaccatttgatgcgcagtaaatggtaagta

SEQ ID NO: 340391 - DNA, 55 bp, Artificial
  Synthetic oligonucleotide
caacgtattcggagacggtttcacaagttcgttacttaacgccatgaacacaaca

SEQ ID NO: 340392 - DNA, 55 bp, Artificial
  Synthetic oligonucleotide
caacgtcaagattgcctaaatcgacaaaagctttaattggtgggctggtagattc

SEQ ID NO: 340393 - DNA, 55 bp, Artificial
  Synthetic oligonucleotide
caacgtccaaccacttaagtggcacggcaatggacctgaactggaatagtcaccc

SEQ ID NO: 340394 - DNA, 54 bp, Artificial
  Synthetic oligonucleotide
caacgtccagacaacaccaggagtgtttaagaccccgttcgggaccattggagc

SEQ ID NO: 340395 - DNA, 60 bp, Artificial
  Synthetic oligonucleotide
caacgtccattttcgtaatgggcagtggatgcgtagagtccctgatgggatccactactc

SEQ ID NO: 340396 - DNA, 56 bp, Artificial
  Synthetic oligonucleotide
caacgtcgtaaacaccatactgccagctaggctagctgtgcggtcgtcgattaaac

SEQ ID NO: 340397 - DNA, 58 bp, Artificial
  Synthetic oligonucleotide
caacgtctacaaaatactatcaatttacagctgcattgcaagcagtcttgtgttagca

SEQ ID NO: 340398 - DNA, 52 bp, Artificial
  Synthetic oligonucleotide
caacgtctcgcagcactttgggtctgcagtaaggggtgccggtgtcgctaat

SEQ ID NO: 340399 - DNA, 57 bp, Artificial
  Synthetic oligonucleotide
caacgtgaaacagattcttactcgtgaactgccattttcctcggatttaatcaacta

SEQ ID NO: 340400 - DNA, 60 bp, Artificial
  Synthetic oligonucleotide
caacgtgaagcagattctcactcgtgaactaccatttccatcggatctaatcaattacgc

SEQ ID NO: 340401 - DNA, 60 bp, Artificial
  Synthetic oligonucleotide
caacgtgagtcgcaggcacgcgttgcgtctatcctcgccaacactgacctcacgactaaa

SEQ ID NO: 340402 - DNA, 59 bp, Artificial
  Synthetic oligonucleotide
caacgtgataaactggaccagagactccataacagaagtgtggtcctataatgccgaac

SEQ ID NO: 340403 - DNA, 55 bp, Artificial
  Synthetic oligonucleotide
caacgtgcacagcgtactcgtttcttagcacggttccgatcagcatagcatgatg

SEQ ID NO: 340404 - DNA, 55 bp, Artificial
  Synthetic oligonucleotide
caacgtgcagtaatagcgccgactattttgttgtggtgaactcgtgtccgggagg

SEQ ID NO: 340405 - DNA, 56 bp, Artificial
  Synthetic oligonucleotide
caacgtgcccaccgggtgaatttctacaggtttcgatccaggacactagaaatgcg

SEQ ID NO: 340406 - DNA, 50 bp, Artificial
  Synthetic oligonucleotide
caacgtgcccatcgggtttgccggaaccatgcccaatttcaatgcaacca

SEQ ID NO: 340407 - DNA, 60 bp, Artificial
  Synthetic oligonucleotide
caacgtgccctccgagatcatcgagggatacatttacatcaagcttaacgcggccatctt

SEQ ID NO: 340408 - DNA, 52 bp, Artificial
  Synthetic oligonucleotide
caacgtgcctagccttcctttccgtaacgtgctgcaggacattaagtactgc

SEQ ID NO: 340409 - DNA, 56 bp, Artificial
  Synthetic oligonucleotide
caacgtgcctagtcttcctattcgtgacgtgttacaggaaattaagtactgctacc

SEQ ID NO: 340410 - DNA, 53 bp, Artificial
  Synthetic oligonucleotide
caacgtgcgggctcccctctcccacgtaatcggggaaaccagacacgatcccc

SEQ ID NO: 340411 - DNA, 58 bp, Artificial
  Synthetic oligonucleotide
caacgtgcttctaccacaagttgctgttaatctttcaaactgccatgttttaattgaa

SEQ ID NO: 340412 - DNA, 55 bp, Artificial
  Synthetic oligonucleotide
caacgtggataaagacctagtaggctggccctctccccaaggtgcccgctcattg

SEQ ID NO: 340413 - DNA, 51 bp, Artificial
  Synthetic oligonucleotide
caacgtggatggtacggtgtgggcttctcgactacgactcacgtcgtggtc

SEQ ID NO: 340414 - DNA, 60 bp, Artificial
  Synthetic oligonucleotide
caacgtggcaccacgatgagaaccacccatatagaacctggaactatcacggcagttatg

SEQ ID NO: 340415 - DNA, 60 bp, Artificial
  Synthetic oligonucleotide
caacgtggcactggacagacagtaactgcaaaaaggccatagtaactgttacatattgca

SEQ ID NO: 340416 - DNA, 53 bp, Artificial
  Synthetic oligonucleotide
caacgtggtaagagtgttgtatggcttagtcaagacttctccactcttagttc

SEQ ID NO: 340417 - DNA, 60 bp, Artificial
  Synthetic oligonucleotide
caacgtgtcaggtgtcgtggctgtgtgcgtcaactttaccagctacgtccaacacgccaa

SEQ ID NO: 340418 - DNA, 56 bp, Artificial
  Synthetic oligonucleotide
caacgtgtgtagatgcttgcggattgcagccggtacctctgtcgggtgaacgacgt

SEQ ID NO: 340419 - DNA, 55 bp, Artificial
  Synthetic oligonucleotide
caacgtgttattctggttagttagagatagacgtcccggttcaacgccttatggc

SEQ ID NO: 340420 - DNA, 57 bp, Artificial
  Synthetic oligonucleotide
caacgttaagcttagtggattcgcaggtggtgataggacatgtcctgagatttgtcg

SEQ ID NO: 340421 - DNA, 55 bp, Artificial
  Synthetic oligonucleotide
caacgttagctgttcaaatcagattccttgtcgtgacgataacaatcacttgagt

SEQ ID NO: 340422 - DNA, 56 bp, Artificial
  Synthetic oligonucleotide
caacgttattttcagcccagtctgtcataacagacggcacttgactaaagtcgcct

SEQ ID NO: 340423 - DNA, 60 bp, Artificial
  Synthetic oligonucleotide
caacgttgaagccttctcccgattcatcgagcaactccctgacgtgcttggcgcataccc

SEQ ID NO: 340424 - DNA, 60 bp, Artificial
  Synthetic oligonucleotide
caacgtttgtctgatgagttattagatattgcgcaacgtcttgaatatgttgaagctcaa

SEQ ID NO: 340425 - DNA, 58 bp, Artificial
  Synthetic oligonucleotide
caactaaacatcaaaatggcaagattctatacaatggaaacgccagaagaagaattaa

SEQ ID NO: 340426 - DNA, 58 bp, Artificial
  Synthetic oligonucleotide
caactaaaggatgtggcacgttagcaatcttaccaacaggaagtggagtcaaatcacc

SEQ ID NO: 340427 - DNA, 55 bp, Artificial
  Synthetic oligonucleotide
caactaacatgtagtctattagtaaacgtgcgacatagaatagggacaaactgtg

SEQ ID NO: 340428 - DNA, 53 bp, Artificial
  Synthetic oligonucleotide
caactaacccctcaggaggagaaatcaacagtgacctaatacccccttcggaa

SEQ ID NO: 340429 - DNA, 60 bp, Artificial
  Synthetic oligonucleotide
caactaacgagcatggtcccagcatgattgtagggaattatgtactcgttagtgataaat

SEQ ID NO: 340430 - DNA, 54 bp, Artificial
  Synthetic oligonucleotide
caactaactccagtaatgttattcaactcccttttaaccctcaggatgttggta

SEQ ID NO: 340431 - DNA, 57 bp, Artificial
  Synthetic oligonucleotide
caactaagagatccaaggggaagtgacatagcaggaaccactagtacccttcaggaa

SEQ ID NO: 340432 - DNA, 52 bp, Artificial
  Synthetic oligonucleotide
caactaagatcgaaacttccttgtagtgatgtgttaaaatgtctaagaattc

SEQ ID NO: 340433 - DNA, 60 bp, Artificial
  Synthetic oligonucleotide
caactaaggattgaaactaggctgctattcagccacgtcgaccatgtactatatggatga

SEQ ID NO: 340434 - DNA, 59 bp, Artificial
  Synthetic oligonucleotide
caactaaggttgggcaaactgaattggtgcattcagcgcacaagaaactgacttttgac

SEQ ID NO: 340435 - DNA, 55 bp, Artificial
  Synthetic oligonucleotide
caactaagttcgcgcatcgttacacatgtcgtaagtacgctgataagattggtct

SEQ ID NO: 340436 - DNA, 60 bp, Artificial
  Synthetic oligonucleotide
caactaataagctatcaaagcacggtatagatgtagttgaggcaaaggatctaaatgagg

SEQ ID NO: 340437 - DNA, 57 bp, Artificial
  Synthetic oligonucleotide
caactaatatgcccttacggatgggtcggacgcgtggagtgcactactgtaagcaag

SEQ ID NO: 340438 - DNA, 60 bp, Artificial
  Synthetic oligonucleotide
caactaatgaggcctccaaatatgacacctgcagtcgcagctctatttccaaatgctcaa

SEQ ID NO: 340439 - DNA, 60 bp, Artificial
  Synthetic oligonucleotide
caactaatgcggcctccaaatatgacgccagctgtcgccgcactatttccaaatgctcaa

SEQ ID NO: 340440 - DNA, 60 bp, Artificial
  Synthetic oligonucleotide
caactaatggaagccttgatgcagctgtcacgacagcagtttccaacaatgcccgttgat

SEQ ID NO: 340441 - DNA, 59 bp, Artificial
  Synthetic oligonucleotide
caactaattcatctgcactattttgactgtttttcagactctgcaataaggaaggcatt

SEQ ID NO: 340442 - DNA, 57 bp, Artificial
  Synthetic oligonucleotide
caactaattctgttcgctaacgatgaattggagtcggacatcaagcattacagagtc

SEQ ID NO: 340443 - DNA, 55 bp, Artificial
  Synthetic oligonucleotide
caactacaaatgtttataataggctgtgccccatgtttaggagaacattgggaca

SEQ ID NO: 340444 - DNA, 54 bp, Artificial
  Synthetic oligonucleotide
caactacaacaacattcagcgcaactacgtcggggacgactccgtaccggaacg

SEQ ID NO: 340445 - DNA, 58 bp, Artificial
  Synthetic oligonucleotide
caactacacactcatggatccctaagaggaaccgttccattctcaataccagccaaag

SEQ ID NO: 340446 - DNA, 58 bp, Artificial
  Synthetic oligonucleotide
caactacacatgtcggtgtgagactatagttagttgcgacgggtacgtcgtaaagaga

SEQ ID NO: 340447 - DNA, 58 bp, Artificial
  Synthetic oligonucleotide
caactacactaaattctggtacatcaaccacactggttttaatgttcattcattacca

SEQ ID NO: 340448 - DNA, 60 bp, Artificial
  Synthetic oligonucleotide
caactacactctcgcaggtgccaccgtttttatgctcttctaccatgacgttggatcgga

SEQ ID NO: 340449 - DNA, 60 bp, Artificial
  Synthetic oligonucleotide
caactacattgaaagaagaagaataccacatataggaccagggagagcattttatacagc

SEQ ID NO: 340450 - DNA, 58 bp, Artificial
  Synthetic oligonucleotide
caactaccaccatgaaccagttatcatttatgacgatctaggggctatttcaaaagta

SEQ ID NO: 340451 - DNA, 52 bp, Artificial
  Synthetic oligonucleotide
caactacccatcagcccacgaaaggcaggtaccaagtttacagtttctagcc

SEQ ID NO: 340452 - DNA, 52 bp, Artificial
  Synthetic oligonucleotide
caactaccctacaaaatcaggatattgtggtggggtcttatacaaaataggc

SEQ ID NO: 340453 - DNA, 55 bp, Artificial
  Synthetic oligonucleotide
caactaccgcggccacacgtttcatgaaggacctgcatttcactgggacgaatgg

SEQ ID NO: 340454 - DNA, 59 bp, Artificial
  Synthetic oligonucleotide
caactacgggagactgatctcacggaaatacgacatccagagctcaacccttcccgctg

SEQ ID NO: 340455 - DNA, 60 bp, Artificial
  Synthetic oligonucleotide
caactacgtgcattggggagcactatcaatatccattgacgcactgttcagaaagaatgc

SEQ ID NO: 340456 - DNA, 55 bp, Artificial
  Synthetic oligonucleotide
caactactcacttcggttcgctctttcctaaattcttgtaaggtaacaccatggc

SEQ ID NO: 340457 - DNA, 59 bp, Artificial
  Synthetic oligonucleotide
caactactgaaatgttcagtagaaatcttctaaaaacaacttcagacgatggtctcaca

SEQ ID NO: 340458 - DNA, 55 bp, Artificial
  Synthetic oligonucleotide
caactactggaggagactcggaggactcgacagaggacttcagaaggccacccaa

SEQ ID NO: 340459 - DNA, 60 bp, Artificial
  Synthetic oligonucleotide
caactactgttgaccaatcacatcattgctgacgaggctatataactttggggcctactt

SEQ ID NO: 340460 - DNA, 60 bp, Artificial
  Synthetic oligonucleotide
caactactttgagaaattcggtctcgacatcattctctgtagtcacataatggacataat

SEQ ID NO: 340461 - DNA, 55 bp, Artificial
  Synthetic oligonucleotide
caactagaatcgttgctcatggagatacacaggttactaaaaccagaccagtgag

SEQ ID NO: 340462 - DNA, 54 bp, Artificial
  Synthetic oligonucleotide
caactagaattgaggtgtcctccttcaaacgtacgttgatgatgaattccattc

SEQ ID NO: 340463 - DNA, 60 bp, Artificial
  Synthetic oligonucleotide
caactagcatggatgacaagtaacccacctatcccagtgggagacatctataaaagatgg

SEQ ID NO: 340464 - DNA, 60 bp, Artificial
  Synthetic oligonucleotide
caactagcattggcctaatgcgtctacggacaacattgacctctacagtcctaggaagac

SEQ ID NO: 340465 - DNA, 60 bp, Artificial
  Synthetic oligonucleotide
caactagctttgcaagattcaggatcagaagtgaacatagtaacagactcacagtatgca

SEQ ID NO: 340466 - DNA, 57 bp, Artificial
  Synthetic oligonucleotide
caactaggaaatgctttcggtacagggttcactaaccagatctgtgaacaagtcaac

SEQ ID NO: 340467 - DNA, 55 bp, Artificial
  Synthetic oligonucleotide
caactaggggtgcctagaggaactcgctgggttttgcacgtctgtgcatagaggg

SEQ ID NO: 340468 - DNA, 60 bp, Artificial
  Synthetic oligonucleotide
caactagtctataagatactgcatctgtctgacccactgggaattcgagattctgatgga

SEQ ID NO: 340469 - DNA, 60 bp, Artificial
  Synthetic oligonucleotide
caactagtgatgaccattcagagggtattgagtgcttgaagttagttaggtcaatacagt

SEQ ID NO: 340470 - DNA, 55 bp, Artificial
  Synthetic oligonucleotide
caactagtggaagatcaggctttgagatcatcaaagttacggaggggtggatcaa

SEQ ID NO: 340471 - DNA, 58 bp, Artificial
  Synthetic oligonucleotide
caactagtggagaatcatttctaacttcaacgctatgtttatactatccaacagaagc

SEQ ID NO: 340472 - DNA, 55 bp, Artificial
  Synthetic oligonucleotide
caactagtgttttagcagaacactgtagtgcgctatcgaggtatggtacagagta

SEQ ID NO: 340473 - DNA, 60 bp, Artificial
  Synthetic oligonucleotide
caactagttgatttaactagattgttagcttataattatgaaacgctgatggcatgtatt

SEQ ID NO: 340474 - DNA, 54 bp, Artificial
  Synthetic oligonucleotide
caactataaacctcgctaacgactggaaagccaagttaccacaaatggaccctc

SEQ ID NO: 340475 - DNA, 55 bp, Artificial
  Synthetic oligonucleotide
caactataacaaggcaaccaaaagacttacagtcctcgggaaggacgcaggcgca

SEQ ID NO: 340476 - DNA, 55 bp, Artificial
  Synthetic oligonucleotide
caactataactacactcaaccgtttaccaataacatacagcctaacagttcactg

SEQ ID NO: 340477 - DNA, 55 bp, Artificial
  Synthetic oligonucleotide
caactatcaaattcactcccagacccttcactacgtcccggaaggccactccgcc

SEQ ID NO: 340478 - DNA, 54 bp, Artificial
  Synthetic oligonucleotide
caactatcaaccaaggaaaacgacctaacattggctaaatggattcaaaatccc

SEQ ID NO: 340479 - DNA, 60 bp, Artificial
  Synthetic oligonucleotide
caactatcaagaatggctggtttaagacaaaagtctctatagatctggacaacacatgtg

SEQ ID NO: 340480 - DNA, 55 bp, Artificial
  Synthetic oligonucleotide
caactatcagtgtgctagcagacctggctggaattgtttagttgaccacactagc

SEQ ID NO: 340481 - DNA, 55 bp, Artificial
  Synthetic oligonucleotide
caactatcctgacacagcgtacgaaaagtgtgaaacattcatacaaaagttctgc

SEQ ID NO: 340482 - DNA, 50 bp, Artificial
  Synthetic oligonucleotide
caactatgatttgcacatataggcatgcccctccagaaacagaaggagtg

SEQ ID NO: 340483 - DNA, 55 bp, Artificial
  Synthetic oligonucleotide
caactatgctctgcacccatccatcattcccactccgggttacagaggcactcgc

SEQ ID NO: 340484 - DNA, 60 bp, Artificial
  Synthetic oligonucleotide
caactatggatgtctgaacttgctgatagtcatgatatatggtgcagttgtgatactcca

SEQ ID NO: 340485 - DNA, 55 bp, Artificial
  Synthetic oligonucleotide
caactatgttgtctcttacggcgagtataccaccaaacacatggagtttgggtcc

SEQ ID NO: 340486 - DNA, 55 bp, Artificial
  Synthetic oligonucleotide
caactattatcatatggcgacgttacacgttttctttctaataacgctatggtgc

SEQ ID NO: 340487 - DNA, 57 bp, Artificial
  Synthetic oligonucleotide
caactattgtggtttcacatttcctggcttatgtttgggagagaaactgttctggaa

SEQ ID NO: 340488 - DNA, 53 bp, Artificial
  Synthetic oligonucleotide
caactatttaactactcccagtggttccttaacctctacagatggacaaattt

SEQ ID NO: 340489 - DNA, 60 bp, Artificial
  Synthetic oligonucleotide
caactatttcaaacttagtatccatgcacttcataatggtgcatgccctagaagatgttg

SEQ ID NO: 340490 - DNA, 55 bp, Artificial
  Synthetic oligonucleotide
caactatttgaaacttgttacgcaattcttgtaagccgaagagcggaatgtcgcg

SEQ ID NO: 340491 - DNA, 60 bp, Artificial
  Synthetic oligonucleotide
caactatttgttactgttgttgatactacacgcagtacaaatatgtcattatgtgctgcc

SEQ ID NO: 340492 - DNA, 55 bp, Artificial
  Synthetic oligonucleotide
caactcaaaaggcagtagaccagataacatccaaagtaaacaacatcgtcgacag

SEQ ID NO: 340493 - DNA, 55 bp, Artificial
  Synthetic oligonucleotide
caactcaactaaaagggctagatgccatatcggttttagatatccccatgatatc

SEQ ID NO: 340494 - DNA, 55 bp, Artificial
  Synthetic oligonucleotide
caactcaactcatgaggggtggagaatgatcaaaggcataaatagcacctccgag

SEQ ID NO: 340495 - DNA, 55 bp, Artificial
  Synthetic oligonucleotide
caactcacaaagcagcgtcggacgctatcgccggtctcggtgactggatcagtgt

SEQ ID NO: 340496 - DNA, 55 bp, Artificial
  Synthetic oligonucleotide
caactcacagctacgtgtcgataacaataaccgtcaacgccggtaatagtgccga

SEQ ID NO: 340497 - DNA, 55 bp, Artificial
  Synthetic oligonucleotide
caactcacatcatgtatccgagtgcaccctatggtctcaacaaggacggtgcaac

SEQ ID NO: 340498 - DNA, 55 bp, Artificial
  Synthetic oligonucleotide
caactcaccagcaaaactcaggccgtcattatgggcaacgcccgccgctctgacc

SEQ ID NO: 340499 - DNA, 60 bp, Artificial
  Synthetic oligonucleotide
caactcacctattgatctcgcgatcatagacaacaggataaaaacttctgattgtataat

SEQ ID NO: 340500 - DNA, 55 bp, Artificial
  Synthetic oligonucleotide
caactcagtcctgaataaagcatacctgattccttacataggcgacaccacctct

SEQ ID NO: 340501 - DNA, 60 bp, Artificial
  Synthetic oligonucleotide
caactcataatgaaaagagcaagccatgcaaactatggcattactgaatatacatgataa

SEQ ID NO: 340502 - DNA, 55 bp, Artificial
  Synthetic oligonucleotide
caactcatagttgacaataataattggtctgggtattctggcatcttctctgttg

SEQ ID NO: 340503 - DNA, 50 bp, Artificial
  Synthetic oligonucleotide
caactcatataagtccagatacgttaccagacataataaccgagtcatct

SEQ ID NO: 340504 - DNA, 60 bp, Artificial
  Synthetic oligonucleotide
caactcatatacatacttgtgagtcttagctcctcactatacaaacatagaaacatgaga

SEQ ID NO: 340505 - DNA, 50 bp, Artificial
  Synthetic oligonucleotide
caactcatctcacagtagcccccgttcttggaccagttcaagtatgggct

SEQ ID NO: 340506 - DNA, 60 bp, Artificial
  Synthetic oligonucleotide
caactcattttgtggatcttattgaggacttctggcagactacacagggtatgcatgaaa

SEQ ID NO: 340507 - DNA, 60 bp, Artificial
  Synthetic oligonucleotide
caactccaagcatgaccccacgcttctgcccgcgtccatagccaagagactgcggttccg

SEQ ID NO: 340508 - DNA, 60 bp, Artificial
  Synthetic oligonucleotide
caactccaccctgtgggttttgactctcattgctacgtttttgacatcatgcctcagacc

SEQ ID NO: 340509 - DNA, 58 bp, Artificial
  Synthetic oligonucleotide
caactccaggttcagagtaatattcaacaggatcgaatgtcgtgtttgatcccgttat

SEQ ID NO: 340510 - DNA, 55 bp, Artificial
  Synthetic oligonucleotide
caactccagtcgtatcacaccacccacagtagctcacagtgacgcgctggcccgg

SEQ ID NO: 340511 - DNA, 56 bp, Artificial
  Synthetic oligonucleotide
caactcccagggagtggttgtggggctgtatgggaacggactgaagaccaatgaaa

SEQ ID NO: 340512 - DNA, 60 bp, Artificial
  Synthetic oligonucleotide
caactcccccacagtagaggagtgcggatacagtgacagggtgagatcaatcacactagg

SEQ ID NO: 340513 - DNA, 59 bp, Artificial
  Synthetic oligonucleotide
caactcccctgcaatcaaccaagtgaccccgtgtgaaccaatcatagtggagaggaaca

SEQ ID NO: 340514 - DNA, 51 bp, Artificial
  Synthetic oligonucleotide
caactcccctttagtcccgcgcaacgctgaactcggggaccgtaaaggaaa

SEQ ID NO: 340515 - DNA, 55 bp, Artificial
  Synthetic oligonucleotide
caactcccgtcaccacgcgtttccccgtgatgccccgtatgattcacgtccctgg

SEQ ID NO: 340516 - DNA, 55 bp, Artificial
  Synthetic oligonucleotide
caactccgaacagcttaagctaccacagacaatacaaacagctgtcaccgcacac

SEQ ID NO: 340517 - DNA, 57 bp, Artificial
  Synthetic oligonucleotide
caactccgtattgttccagaggataaggagggtaaatggtttcctgtcatgtatcca

SEQ ID NO: 340518 - DNA, 58 bp, Artificial
  Synthetic oligonucleotide
caactcctatggggtggcggcggggttgccagtggaggcaggaccaataccagctcaa

SEQ ID NO: 340519 - DNA, 51 bp, Artificial
  Synthetic oligonucleotide
caactcctgtttaattagttcagacatcaataatatcctcgtcttctcgaa

SEQ ID NO: 340520 - DNA, 60 bp, Artificial
  Synthetic oligonucleotide
caactcctttcgctttcgctatctctcagctaggagtcgtagaagttagcagtttatcca

SEQ ID NO: 340521 - DNA, 51 bp, Artificial
  Synthetic oligonucleotide
caactccttttagttccattagttatacaaggaaaaacaattaatagggac

SEQ ID NO: 340522 - DNA, 54 bp, Artificial
  Synthetic oligonucleotide
caactcgatttgtcaaatatgttggactcccgagtccaacaaacgcgacattcg

SEQ ID NO: 340523 - DNA, 55 bp, Artificial
  Synthetic oligonucleotide
caactcgccacactgtgatttcccaatgtctcacaatcaatctatgacatcgcgc

SEQ ID NO: 340524 - DNA, 60 bp, Artificial
  Synthetic oligonucleotide
caactcgcctcgttgactgttcgaaccgcatcgttgcgtcagcagctgtcggttggggca

SEQ ID NO: 340525 - DNA, 60 bp, Artificial
  Synthetic oligonucleotide
caactcgctattgcaaatttgctaaccctctcactcagttttctatgtttaatctggctg

SEQ ID NO: 340526 - DNA, 56 bp, Artificial
  Synthetic oligonucleotide
caactcgtaaaagagaacatctgcgacccaatacggctcttcgttaaacaagagcc

SEQ ID NO: 340527 - DNA, 55 bp, Artificial
  Synthetic oligonucleotide
caactcgtgacttccagacagaagctcaaagatgcagaaagagcggtggaattgg

SEQ ID NO: 340528 - DNA, 55 bp, Artificial
  Synthetic oligonucleotide
caactcgtgttggagatgtattcgttagtgacgttgatcctttaccacccggcct

SEQ ID NO: 340529 - DNA, 60 bp, Artificial
  Synthetic oligonucleotide
caactctactattccactattggatgaaaatggcattggtatactttgcttgcagggaag

SEQ ID NO: 340530 - DNA, 55 bp, Artificial
  Synthetic oligonucleotide
caactctccgtcgtctggttgtcctcttggctattcggtgttgcaccttgatagg

SEQ ID NO: 340531 - DNA, 55 bp, Artificial
  Synthetic oligonucleotide
caactctcgggccttgtctcgatggccgaacccacgtgtctctgcttgggacccc

SEQ ID NO: 340532 - DNA, 57 bp, Artificial
  Synthetic oligonucleotide
caactctctctatgtaattggtgtctggggtcctatatataggtaagaccctaaatg

SEQ ID NO: 340533 - DNA, 55 bp, Artificial
  Synthetic oligonucleotide
caactctcttcaacatggaagctaaggtgatggaacctgcagtaccatacatttg

SEQ ID NO: 340534 - DNA, 55 bp, Artificial
  Synthetic oligonucleotide
caactctgaaaggctgacttattgattgcctctgatagtaacttctgtgcacccc

SEQ ID NO: 340535 - DNA, 54 bp, Artificial
  Synthetic oligonucleotide
caactctgaactttacgatagctcagcgttacttagacatgatgttccgagtac

SEQ ID NO: 340536 - DNA, 60 bp, Artificial
  Synthetic oligonucleotide
caactctgctcaatggcagtgcattccagatggtatgcccttttgggtggactggacaag

SEQ ID NO: 340537 - DNA, 56 bp, Artificial
  Synthetic oligonucleotide
caactctggaaccagcatagaccctatcacagggaaggaggttaaaggaaaggagc

SEQ ID NO: 340538 - DNA, 55 bp, Artificial
  Synthetic oligonucleotide
caactctggaagggacctggtgagctattgtggaaaggggaaggagcagtcatcg

SEQ ID NO: 340539 - DNA, 59 bp, Artificial
  Synthetic oligonucleotide
caactctggcgattcaaagtacctagaccttccagttctcaatgaagagaaaatgtata

SEQ ID NO: 340540 - DNA, 60 bp, Artificial
  Synthetic oligonucleotide
caactctggctgatgtctatactgtactgcgaccggagtttgctatacatggtgtaaatc

SEQ ID NO: 340541 - DNA, 55 bp, Artificial
  Synthetic oligonucleotide
caactctgggcatgccgtctcaagagggacggccaagctggcatggatggctgag

SEQ ID NO: 340542 - DNA, 53 bp, Artificial
  Synthetic oligonucleotide
caactctggttcgtgtccacagcccaaccccggacccaacaaccgttgcgacc

SEQ ID NO: 340543 - DNA, 60 bp, Artificial
  Synthetic oligonucleotide
caactctttcaactacagatattaacagagcggaggttttatcctcatatcaatctacaa

SEQ ID NO: 340544 - DNA, 59 bp, Artificial
  Synthetic oligonucleotide
caactctttgtctctacatacttgttattaacaactgcgcctgaataattctccattat

SEQ ID NO: 340545 - DNA, 59 bp, Artificial
  Synthetic oligonucleotide
caactgaaaagggagagtttacaggtctaggtatctatgaccgtgtgtgtgtcatacca

SEQ ID NO: 340546 - DNA, 57 bp, Artificial
  Synthetic oligonucleotide
caactgaaacagtggagcgaacaaacattcccaggatctgctcaaaagggaaaagga

SEQ ID NO: 340547 - DNA, 60 bp, Artificial
  Synthetic oligonucleotide
caactgaagcagcaactcaaatcagtgatgattcatggaaggatacactatctcagctat

SEQ ID NO: 340548 - DNA, 56 bp, Artificial
  Synthetic oligonucleotide
caactgaagcccttactagatttgccgcctcaagcggctttacagttaaagcccac

SEQ ID NO: 340549 - DNA, 55 bp, Artificial
  Synthetic oligonucleotide
caactgaaggtacttagacatgtcctcatgcacgattttcaagtaaatatcgcgg

SEQ ID NO: 340550 - DNA, 58 bp, Artificial
  Synthetic oligonucleotide
caactgaataaatcctatggtatgctaccagcaaaccagtttggtactttttgtatga

SEQ ID NO: 340551 - DNA, 59 bp, Artificial
  Synthetic oligonucleotide
caactgaatatgcttcatggcaattatacgtcatacatcccgttcaaggttcattaggt

SEQ ID NO: 340552 - DNA, 60 bp, Artificial
  Synthetic oligonucleotide
caactgacacgcaatagcttgaccagtacatggacgcgacatgagcggttgctcataggc

SEQ ID NO: 340553 - DNA, 55 bp, Artificial
  Synthetic oligonucleotide
caactgacactgttgatacagtactagaaaagaatgtaacggtaacacactctgt

SEQ ID NO: 340554 - DNA, 54 bp, Artificial
  Synthetic oligonucleotide
caactgacgcagaacaaaccaaattatataagaacaaccctggaagagttaccg

SEQ ID NO: 340555 - DNA, 55 bp, Artificial
  Synthetic oligonucleotide
caactgactactccccgtttgaccgcaaagtagtccgtatcggcgaagaggtcta

SEQ ID NO: 340556 - DNA, 59 bp, Artificial
  Synthetic oligonucleotide
caactgactggattggcgtatgaattactcgttccgggtcaactcccatggatcgcaaa

SEQ ID NO: 340557 - DNA, 60 bp, Artificial
  Synthetic oligonucleotide
caactgagcaaggtcacgctgttgtggcaaacttatgttccggtgtcgtcttaatgagac

SEQ ID NO: 340558 - DNA, 60 bp, Artificial
  Synthetic oligonucleotide
caactgagccttctgagccgcgttcatatttcttcctatcattgtcattggtttcacgag

SEQ ID NO: 340559 - DNA, 60 bp, Artificial
  Synthetic oligonucleotide
caactgagctcctagcagcgattaaaccggttcttgaggttgagcgcagtgaactcactc

SEQ ID NO: 340560 - DNA, 55 bp, Artificial
  Synthetic oligonucleotide
caactgaggacctacttaaggaggaagtgagaagatttgggccatatgacctttt

SEQ ID NO: 340561 - DNA, 60 bp, Artificial
  Synthetic oligonucleotide
caactgatataatgagagacgatacgattgttacttcgtatgatggatacgctgctatgc

SEQ ID NO: 340562 - DNA, 60 bp, Artificial
  Synthetic oligonucleotide
caactgatgaggcatggatcgatgccctcatacccttcatcggatggtgctgcaacaatg

SEQ ID NO: 340563 - DNA, 59 bp, Artificial
  Synthetic oligonucleotide
caactgatgagttgtaaataatccgtgatgcagtgttgccctaatcccttaagccttcc

SEQ ID NO: 340564 - DNA, 55 bp, Artificial
  Synthetic oligonucleotide
caactgattgctacaacagccaaatcctcatgaccactcaaaggcttgctgaggg

SEQ ID NO: 340565 - DNA, 55 bp, Artificial
  Synthetic oligonucleotide
caactgcaaagggcactctgtactttggtaaaaattctcgccgttggtctattaa

SEQ ID NO: 340566 - DNA, 55 bp, Artificial
  Synthetic oligonucleotide
caactgcacgtgtgggttccccccatcaacgtccggggggggcgtgacgctatca

SEQ ID NO: 340567 - DNA, 55 bp, Artificial
  Synthetic oligonucleotide
caactgcagtgacaccctcatcattgcaacaagaaataacgctgttgtgtggaga

SEQ ID NO: 340568 - DNA, 56 bp, Artificial
  Synthetic oligonucleotide
caactgcagtggggcggaggactggtgaggacccctttctcgaggaactcaaccca

SEQ ID NO: 340569 - DNA, 60 bp, Artificial
  Synthetic oligonucleotide
caactgccacaggaaacagcagtcaaaattaccccatagtgcaaaatgcacaagggcaaa

SEQ ID NO: 340570 - DNA, 55 bp, Artificial
  Synthetic oligonucleotide
caactgccagaggacattgaacaaatggcgaatggaatagctctggggctcatgg

SEQ ID NO: 340571 - DNA, 59 bp, Artificial
  Synthetic oligonucleotide
caactgccccgccagcagagagcttcaggttcgaggagacaacccctgctccaaagcag

SEQ ID NO: 340572 - DNA, 52 bp, Artificial
  Synthetic oligonucleotide
caactgcgacaggttcgggccccatacgccgagggtgatgcaccaggacaac

SEQ ID NO: 340573 - DNA, 57 bp, Artificial
  Synthetic oligonucleotide
caactgcgatcgttatccgcaaagcgcctacgcaaagcctagtaacacctttgaaat

SEQ ID NO: 340574 - DNA, 55 bp, Artificial
  Synthetic oligonucleotide
caactgcgtctactaggtgccataatccgtgaccctatcatgaccttcagttggc

SEQ ID NO: 340575 - DNA, 51 bp, Artificial
  Synthetic oligonucleotide
caactgctacatcgaacaggcaatgacatattggattgtcaagaatcaagg

SEQ ID NO: 340576 - DNA, 57 bp, Artificial
  Synthetic oligonucleotide
caactgctatttacccattttagaattggatgtcaacatagtagaataggaattaac

SEQ ID NO: 340577 - DNA, 60 bp, Artificial
  Synthetic oligonucleotide
caactgctcaatctacaatgaaggcagaggaacttacacctgggcgatttcggacaatag

SEQ ID NO: 340578 - DNA, 56 bp, Artificial
  Synthetic oligonucleotide
caactgcttactgcaccctatatgtcagcatggaatggaggatgaaagtaaagaag

SEQ ID NO: 340579 - DNA, 51 bp, Artificial
  Synthetic oligonucleotide
caactgcttagaccggaggtggacacactgtggacaatgccagtagcatgt

SEQ ID NO: 340580 - DNA, 57 bp, Artificial
  Synthetic oligonucleotide
caactggaagtgagagaggaatggccaacaattacgaacaatcaaggaacgaagatt

SEQ ID NO: 340581 - DNA, 51 bp, Artificial
  Synthetic oligonucleotide
caactggaatgcgcaacatccctggcaaacaggcaaagggcttatttgggg

SEQ ID NO: 340582 - DNA, 55 bp, Artificial
  Synthetic oligonucleotide
caactggacatgtccgaattagcagatttgatacttaatgagtggttgtgtaatc

SEQ ID NO: 340583 - DNA, 54 bp, Artificial
  Synthetic oligonucleotide
caactggaccagaagatcataatcctttacatgctatcatggggtaaagaagct

SEQ ID NO: 340584 - DNA, 60 bp, Artificial
  Synthetic oligonucleotide
caactggactcgaggagagcgttgcaacttggaggacagggatagatcagagctcagtcc

SEQ ID NO: 340585 - DNA, 55 bp, Artificial
  Synthetic oligonucleotide
caactggagaagtgaattatataagtacaaggtggtagaaattaagccattaggg

SEQ ID NO: 340586 - DNA, 57 bp, Artificial
  Synthetic oligonucleotide
caactggagaggtctgccaagtcaaaaaaggaaatccgagtggacaatattcaacaa

SEQ ID NO: 340587 - DNA, 60 bp, Artificial
  Synthetic oligonucleotide
caactggagtcaacaaggctttaccagattttggcgatctattcaactgccgccagttca

SEQ ID NO: 340588 - DNA, 60 bp, Artificial
  Synthetic oligonucleotide
caactggatcttgaccaagcacttctgttaccccggactgagtatcaataagctgcttac

SEQ ID NO: 340589 - DNA, 55 bp, Artificial
  Synthetic oligonucleotide
caactggcatactatgaggaccacctttgctatgcacctgatgggaacttcgctg

SEQ ID NO: 340590 - DNA, 55 bp, Artificial
  Synthetic oligonucleotide
caactggcctccaagccagtgcaccacatttggataaagtaaatggtatctctga

SEQ ID NO: 340591 - DNA, 59 bp, Artificial
  Synthetic oligonucleotide
caactggctagaccgattccgaggcagttgacaaatcgctggttatcaagctttgtaag

SEQ ID NO: 340592 - DNA, 56 bp, Artificial
  Synthetic oligonucleotide
caactggggtgtgtttctattgctgctaataaggtttaaatgtggcaagaacaggt

SEQ ID NO: 340593 - DNA, 60 bp, Artificial
  Synthetic oligonucleotide
caactgggtgtctgcatacgttcgacgagctattcggtgccaggatccacagccatggta

SEQ ID NO: 340594 - DNA, 60 bp, Artificial
  Synthetic oligonucleotide
caactggtacgacaacaaagcatatcgagacgctcctccgtttagtcgacatcactggta

SEQ ID NO: 340595 - DNA, 60 bp, Artificial
  Synthetic oligonucleotide
caactggtgttgaggtttagagtgagaggcagcaatacacaacagagaactgcgtcagcc

SEQ ID NO: 340596 - DNA, 55 bp, Artificial
  Synthetic oligonucleotide
caactggttgaatagcgacaggaccaatgttgttgtgggtaatacaccccgggtc

SEQ ID NO: 340597 - DNA, 52 bp, Artificial
  Synthetic oligonucleotide
caactggtttcttcaggccctaccaagattggaataggaaacccctccccac

SEQ ID NO: 340598 - DNA, 51 bp, Artificial
  Synthetic oligonucleotide
caactgtaccttccttaagtctcgttctagctttaacggtgctaagctacc

SEQ ID NO: 340599 - DNA, 53 bp, Artificial
  Synthetic oligonucleotide
caactgtataatgttaaactagggtttctggcccatttgtttgatttactttc

SEQ ID NO: 340600 - DNA, 55 bp, Artificial
  Synthetic oligonucleotide
caactgtcaatctcttcagtacctcgaggcaatagtcagggcagagattccgaat

SEQ ID NO: 340601 - DNA, 60 bp, Artificial
  Synthetic oligonucleotide
caactgtcacactcgtctgccctcactgcggggtgagtgaacaagcgacgttcccgacca

SEQ ID NO: 340602 - DNA, 53 bp, Artificial
  Synthetic oligonucleotide
caactgtcactgttttctacatgctaaagggcaacttgatgaatacagaaccg

SEQ ID NO: 340603 - DNA, 59 bp, Artificial
  Synthetic oligonucleotide
caactgtcatagtgtctggtggctctgagtcttctatggaggtcgttagcctggacacc

SEQ ID NO: 340604 - DNA, 60 bp, Artificial
  Synthetic oligonucleotide
caactgtccaccagaggagtccaaatcgcatcaaatgagaacatggaaacaatggactct

SEQ ID NO: 340605 - DNA, 55 bp, Artificial
  Synthetic oligonucleotide
caactgtcgacatcccaagcatcaacgttgcaaccgtcgacatcgcaagcatcaa

SEQ ID NO: 340606 - DNA, 56 bp, Artificial
  Synthetic oligonucleotide
caactgtgaagttcctaattctggttcggcttttattcgctcagtgtacagctacg

SEQ ID NO: 340607 - DNA, 60 bp, Artificial
  Synthetic oligonucleotide
caactgtggtacggacatatagaaggtctaaaccattccctcataggcaaggctgtatca

SEQ ID NO: 340608 - DNA, 55 bp, Artificial
  Synthetic oligonucleotide
caactgtgtttaggtgggtagacttagataataacagtagaatgctttttgcttt

SEQ ID NO: 340609 - DNA, 56 bp, Artificial
  Synthetic oligonucleotide
caactgttacatggaatgaaacttccagacaccgtactttagttgcatatttaaaa

SEQ ID NO: 340610 - DNA, 58 bp, Artificial
  Synthetic oligonucleotide
caactgttagtgggtctcttgtaacatctgatgctcagttatttaatagaccattttg

SEQ ID NO: 340611 - DNA, 55 bp, Artificial
  Synthetic oligonucleotide
caactgttcctcgagctggagaccggaggcgagcacaacgctctgcaccaggtct

SEQ ID NO: 340612 - DNA, 60 bp, Artificial
  Synthetic oligonucleotide
caactgttctatctaccccggccatataacgggtcaccgcatggcatgggatatgatgat

SEQ ID NO: 340613 - DNA, 57 bp, Artificial
  Synthetic oligonucleotide
caactgtttaaatctaattaaataagtcgacccagaagctgtcagagaagtcgtcca

SEQ ID NO: 340614 - DNA, 58 bp, Artificial
  Synthetic oligonucleotide
caactgtttaatagtacttggaatgatactggtacttggaatgatactacaggaaata

SEQ ID NO: 340615 - DNA, 56 bp, Artificial
  Synthetic oligonucleotide
caactgtttaatagtacttggacaggaaatgaaaccatggaggggagtaatggcac

SEQ ID NO: 340616 - DNA, 58 bp, Artificial
  Synthetic oligonucleotide
caactgtttaatagtacttggacttggaatgatactagtacttggaatgatactacag

SEQ ID NO: 340617 - DNA, 55 bp, Artificial
  Synthetic oligonucleotide
caactgtttatgctagatattaacccagagcccatatccttggaacaagctgtgt

SEQ ID NO: 340618 - DNA, 56 bp, Artificial
  Synthetic oligonucleotide
caacttaaaaatgcacgtgactgatatatatgataaaacggtttattgaaccgtta

SEQ ID NO: 340619 - DNA, 59 bp, Artificial
  Synthetic oligonucleotide
caacttacatcctagcaggattctcaaccaactcacaaaagcaatacgctaaagccacc

SEQ ID NO: 340620 - DNA, 58 bp, Artificial
  Synthetic oligonucleotide
caacttacgaatgcacgtgactgatatatacaacataacggttcgtcgaaccggtata

SEQ ID NO: 340621 - DNA, 51 bp, Artificial
  Synthetic oligonucleotide
caacttacgtgcgcttatggaagcaaatgtaaccgccgatgacagaataaa

SEQ ID NO: 340622 - DNA, 55 bp, Artificial
  Synthetic oligonucleotide
caacttagttggggatgtagactcatacataaggaacaccgggcttaccgcattc

SEQ ID NO: 340623 - DNA, 58 bp, Artificial
  Synthetic oligonucleotide
caacttatacggattcatcataaaaggaagatcccacttaagaaatgacactgacgtg

SEQ ID NO: 340624 - DNA, 60 bp, Artificial
  Synthetic oligonucleotide
caacttatattacacttgatcaaacatgtgagcatcttaaagtatcatgcggaccaaaat

SEQ ID NO: 340625 - DNA, 60 bp, Artificial
  Synthetic oligonucleotide
caacttatcattcctatcagtgacatccgcaagctaccacatatccccttcccagaggaa

SEQ ID NO: 340626 - DNA, 50 bp, Artificial
  Synthetic oligonucleotide
caacttatccacatttcgtaacaaggtttccccgaagagcacaattaact

SEQ ID NO: 340627 - DNA, 60 bp, Artificial
  Synthetic oligonucleotide
caacttatcttgtttgcaaatgatgagttggactctgatataaaacactacagagttggc

SEQ ID NO: 340628 - DNA, 60 bp, Artificial
  Synthetic oligonucleotide
caacttatgtcaacagacgcttactcccacaggggaggcagaactgggaggtggcaatca

SEQ ID NO: 340629 - DNA, 55 bp, Artificial
  Synthetic oligonucleotide
caacttattgaggtcttcttccccccttttggtctttctgagtgcccgctgcacc

SEQ ID NO: 340630 - DNA, 60 bp, Artificial
  Synthetic oligonucleotide
caacttattttgagtcaatcatccaacctcttctacacaaaacatagtttattgcatatc

SEQ ID NO: 340631 - DNA, 54 bp, Artificial
  Synthetic oligonucleotide
caacttcaagcgtcatcggaagacactcgtcgcgtcacctacgatacccaagct

SEQ ID NO: 340632 - DNA, 57 bp, Artificial
  Synthetic oligonucleotide
caacttcaccgaactgcacaattacagattgacctctaaggactccacccggtatcc

SEQ ID NO: 340633 - DNA, 55 bp, Artificial
  Synthetic oligonucleotide
caacttcatacaatcactcagaggagcggtaaggttggaagggaggtcagtaacc

SEQ ID NO: 340634 - DNA, 55 bp, Artificial
  Synthetic oligonucleotide
caacttcatcacaaccagaacgtgcacagttctcaaacacgctgacagtgcaagc

SEQ ID NO: 340635 - DNA, 56 bp, Artificial
  Synthetic oligonucleotide
caacttccagattctggggcaccagtacaaaaaccaccttagtattagctccacaa

SEQ ID NO: 340636 - DNA, 56 bp, Artificial
  Synthetic oligonucleotide
caacttcccaacgagagcaggtcagtgcggtggcgtccttatgtccaccggtaagg

SEQ ID NO: 340637 - DNA, 52 bp, Artificial
  Synthetic oligonucleotide
caacttccggccacgtgaacttccggtgacgtatttccgcttccggtcccgc

SEQ ID NO: 340638 - DNA, 55 bp, Artificial
  Synthetic oligonucleotide
caacttcgagcactgaatagtaagaatgagctcatagatgagtacgacttagaac

SEQ ID NO: 340639 - DNA, 58 bp, Artificial
  Synthetic oligonucleotide
caacttctcctggaggaacattgggtacattagcataaggaaattctgttggagtatg

SEQ ID NO: 340640 - DNA, 57 bp, Artificial
  Synthetic oligonucleotide
caacttctgagtaaagagtttgtcgtgtgcgctaacttttcagaacgtcttgtaagc

SEQ ID NO: 340641 - DNA, 55 bp, Artificial
  Synthetic oligonucleotide
caacttctgcgaggacctttagatcttctgtgtcctcactgcgcatcccgctgct

SEQ ID NO: 340642 - DNA, 60 bp, Artificial
  Synthetic oligonucleotide
caacttcttctatgtaattggtgtctggagtcctttatataggtaagacaccatatggca

SEQ ID NO: 340643 - DNA, 55 bp, Artificial
  Synthetic oligonucleotide
caacttgacattaacatgtgtaaggccaggaaataagacctaccgagccatacac

SEQ ID NO: 340644 - DNA, 55 bp, Artificial
  Synthetic oligonucleotide
caacttgaccattacggcaaagtatggagcttcatggctcgggattgcttgagtc

SEQ ID NO: 340645 - DNA, 55 bp, Artificial
  Synthetic oligonucleotide
caacttgacgcaatgctaatgggctgatagtcttatcttacaggtcatctacggg

SEQ ID NO: 340646 - DNA, 59 bp, Artificial
  Synthetic oligonucleotide
caacttgatcatcaggacactcttactgaaaacctacaagggcatagacttagaccacc

SEQ ID NO: 340647 - DNA, 59 bp, Artificial
  Synthetic oligonucleotide
caacttgcagacccatagattacaacacaaactgtgctggatttgaccatatggtaagg

SEQ ID NO: 340648 - DNA, 52 bp, Artificial
  Synthetic oligonucleotide
caacttgccagaaggattaagggacaaagagggtctttaaggagcaactgga

SEQ ID NO: 340649 - DNA, 52 bp, Artificial
  Synthetic oligonucleotide
caacttgccgtcttggttcgccatcttccgtgcaaacctcgacatcaactgt

SEQ ID NO: 340650 - DNA, 51 bp, Artificial
  Synthetic oligonucleotide
caacttgcggcagccaggggaacccactgacggacgctggttcatggatga

SEQ ID NO: 340651 - DNA, 60 bp, Artificial
  Synthetic oligonucleotide
caacttgcggctcagctcagaaatcccaaggttgctccctttcatcgactactactgtta

SEQ ID NO: 340652 - DNA, 54 bp, Artificial
  Synthetic oligonucleotide
caacttggaagggaaggcgtggaagaatttggcgacgcctttgtgaccgccgag

SEQ ID NO: 340653 - DNA, 55 bp, Artificial
  Synthetic oligonucleotide
caacttggaagtgaatcagaaacctcccttggaagtgttggaaacagtaatgaca

SEQ ID NO: 340654 - DNA, 57 bp, Artificial
  Synthetic oligonucleotide
caacttggcaacgcctttggatcggggttcactaaccagatatgtgaacaggtcaac

SEQ ID NO: 340655 - DNA, 50 bp, Artificial
  Synthetic oligonucleotide
caacttgggcccgcctccgggcagatagcaacctcgggaagccctcaggg

SEQ ID NO: 340656 - DNA, 60 bp, Artificial
  Synthetic oligonucleotide
caacttggtcagagacaaacatattgagctttctcttggccccaagaactgctttcagga

SEQ ID NO: 340657 - DNA, 59 bp, Artificial
  Synthetic oligonucleotide
caacttgtcatgggataagcattggttttgggaaccaagcaagatagcatggggctctt

SEQ ID NO: 340658 - DNA, 60 bp, Artificial
  Synthetic oligonucleotide
caacttgtgcgttctgaaactgctgctagatctgctcagttggctagtgacaaagtcaac

SEQ ID NO: 340659 - DNA, 60 bp, Artificial
  Synthetic oligonucleotide
caactttagatggacacctacttgcatttgattacaccaattatgatggtagtctacacc

SEQ ID NO: 340660 - DNA, 55 bp, Artificial
  Synthetic oligonucleotide
caactttagcaaagttggtgtcatctccaatgtcaattttagtcgctttagtgga

SEQ ID NO: 340661 - DNA, 60 bp, Artificial
  Synthetic oligonucleotide
caactttagctgatgtatatactgtattgcgaccagaatttgctatacatggtgtaaatc

SEQ ID NO: 340662 - DNA, 54 bp, Artificial
  Synthetic oligonucleotide
caactttatagcttcactcctgccagatttccatctacagggccccgaggacct

SEQ ID NO: 340663 - DNA, 60 bp, Artificial
  Synthetic oligonucleotide
caactttatatcaatattatgacatgtaccatgagaaaccagtcatatatatgataggat

SEQ ID NO: 340664 - DNA, 55 bp, Artificial
  Synthetic oligonucleotide
caactttatgccttttataagtttccgtcttgtgacgtcgtacaaataaacatca

SEQ ID NO: 340665 - DNA, 54 bp, Artificial
  Synthetic oligonucleotide
caactttgatcttcgtcgtacaaaccgtttcaatttcagtgtaagttctcgtaa

SEQ ID NO: 340666 - DNA, 55 bp, Artificial
  Synthetic oligonucleotide
caactttgctcgtaagactccgtatcagattgcctgcgaccgtgccaataccagg

SEQ ID NO: 340667 - DNA, 56 bp, Artificial
  Synthetic oligonucleotide
caactttggcgaaattagtatcatctccaatgtcaattttagttgctttggtggac

SEQ ID NO: 340668 - DNA, 60 bp, Artificial
  Synthetic oligonucleotide
caactttgtatcactactacgacatgtatcataagaagccaataatatacatgataggat

SEQ ID NO: 340669 - DNA, 52 bp, Artificial
  Synthetic oligonucleotide
caactttgtgaacgcgaaacgtcggtccacaactttgtgaacgcgaaacgtt

SEQ ID NO: 340670 - DNA, 58 bp, Artificial
  Synthetic oligonucleotide
caactttgttgtctaatttaggcccgtttctggtgcctgtgaaatgtcaatatgagaa

SEQ ID NO: 340671 - DNA, 58 bp, Artificial
  Synthetic oligonucleotide
caactttgtttggagataatacggttgaattaacaccatatgatatgtcacaacctta

SEQ ID NO: 340672 - DNA, 60 bp, Artificial
  Synthetic oligonucleotide
caacttttgtcattcgctgagcatatacaacaaactctggcaccattgctccaaactctg

SEQ ID NO: 340673 - DNA, 54 bp, Artificial
  Synthetic oligonucleotide
caacttttgtcgctggagtattcaccagttacgcttgggtacgagttaatacgg

SEQ ID NO: 340674 - DNA, 55 bp, Artificial
  Synthetic oligonucleotide
caacttttgtgcacctcttgtgaacttactgcagagcttattttgtaatgtcttg

SEQ ID NO: 340675 - DNA, 54 bp, Artificial
  Synthetic oligonucleotide
caagaaaaaaccaagacaatggacgtagacactactcctgtaagcagacgtggt

SEQ ID NO: 340676 - DNA, 53 bp, Artificial
  Synthetic oligonucleotide
caagaaaacactacgagtttgcgggccagatgagaagtggatcagcttcatga

SEQ ID NO: 340677 - DNA, 55 bp, Artificial
  Synthetic oligonucleotide
caagaaaagtaagagtaatcggagacgatttcagggagcgagacgcatggtaacc

SEQ ID NO: 340678 - DNA, 54 bp, Artificial
  Synthetic oligonucleotide
caagaaacaagtcaaaagctcaagccttaagaaagtggtatcaaggaaaaattg

SEQ ID NO: 340679 - DNA, 60 bp, Artificial
  Synthetic oligonucleotide
caagaaacatttgacactacaggcctctgtagcatatatgctgctgcctgtgacctaaac

SEQ ID NO: 340680 - DNA, 60 bp, Artificial
  Synthetic oligonucleotide
caagaaaccaacctgaatggttcagaaatgtcttgagcattgcccctataatgttctcaa

SEQ ID NO: 340681 - DNA, 60 bp, Artificial
  Synthetic oligonucleotide
caagaaaccgcagcatggtggtctgagagagatatatgttcttggatttgaagagagagt

SEQ ID NO: 340682 - DNA, 55 bp, Artificial
  Synthetic oligonucleotide
caagaaaccgcgtatgccgctacgagactcgggccgacacgagacatcgatggcc

SEQ ID NO: 340683 - DNA, 59 bp, Artificial
  Synthetic oligonucleotide
caagaaacctaacatcgcttggctcaaggtctcagaagttgcgccccctcagaggacat

SEQ ID NO: 340684 - DNA, 54 bp, Artificial
  Synthetic oligonucleotide
caagaaagacttccgaaggaatgaaagggtttgtgcatacgcgagtggaaagtt

SEQ ID NO: 340685 - DNA, 54 bp, Artificial
  Synthetic oligonucleotide
caagaaagatgcagctggttgccgaatggagtggctgcgttgaatggtatccgg

SEQ ID NO: 340686 - DNA, 56 bp, Artificial
  Synthetic oligonucleotide
caagaaaggacgtggtcggaggaacaattacaacgccttctcccgcagaggactca

SEQ ID NO: 340687 - DNA, 57 bp, Artificial
  Synthetic oligonucleotide
caagaaagtggcgggaactgagagggcggagacttctagaaaacgcccactggatga

SEQ ID NO: 340688 - DNA, 56 bp, Artificial
  Synthetic oligonucleotide
caagaaagtggctacatattgtgtatggaaggaagactactatgaatgatcggaat

SEQ ID NO: 340689 - DNA, 56 bp, Artificial
  Synthetic oligonucleotide
caagaaagttagatttatacgcggaaaaggatccttcatattacacgacatcccaa

SEQ ID NO: 340690 - DNA, 60 bp, Artificial
  Synthetic oligonucleotide
caagaaataccagagaatcttcgacaacgctgaccggccacctaacatctactcacactg

SEQ ID NO: 340691 - DNA, 55 bp, Artificial
  Synthetic oligonucleotide
caagaaataggattggtagtgggaagaatgtgttaacaggaataacttctccgac

SEQ ID NO: 340692 - DNA, 54 bp, Artificial
  Synthetic oligonucleotide
caagaaatcacctacaagttttggtctaaaccccagagaggcgcaccgaggaac

SEQ ID NO: 340693 - DNA, 50 bp, Artificial
  Synthetic oligonucleotide
caagaaattatggacgtgttcctagtgatcaacatgagacccactaggcc

SEQ ID NO: 340694 - DNA, 55 bp, Artificial
  Synthetic oligonucleotide
caagaacaaaattcgtcttggtggattgaagaagaaatttggtaatcgagctcac

SEQ ID NO: 340695 - DNA, 56 bp, Artificial
  Synthetic oligonucleotide
caagaacaactcatgacctcatccttttttgactctgatttgcgtcccgaagacag

SEQ ID NO: 340696 - DNA, 59 bp, Artificial
  Synthetic oligonucleotide
caagaacaagtataagtataggaccaggacaagtattctatagaacaggagacataaca

SEQ ID NO: 340697 - DNA, 59 bp, Artificial
  Synthetic oligonucleotide
caagaacaccaaacacttccacaaaccttctgtcagtcgtgtcagctagatggccaaaa

SEQ ID NO: 340698 - DNA, 55 bp, Artificial
  Synthetic oligonucleotide
caagaacacctccctgcttcttgaatgaccataactaaacgctctgatcatatgg

SEQ ID NO: 340699 - DNA, 60 bp, Artificial
  Synthetic oligonucleotide
caagaacacgttttatcactgtgtcaccttatgtggcataatgggaaagatgtatacaag

SEQ ID NO: 340700 - DNA, 58 bp, Artificial
  Synthetic oligonucleotide
caagaacagcgccagggtccgtcgttccagtcctttctaagtgactctgcttgtggta

SEQ ID NO: 340701 - DNA, 55 bp, Artificial
  Synthetic oligonucleotide
caagaacaggctaaatatgagaaccatactgagaacgcattaatattgtatatgg

SEQ ID NO: 340702 - DNA, 60 bp, Artificial
  Synthetic oligonucleotide
caagaacagtaggtcaatgtcccaaatacgtgaataagaagagtttgatgcttgcaacag

SEQ ID NO: 340703 - DNA, 55 bp, Artificial
  Synthetic oligonucleotide
caagaacagttcaggacgcaagaggtggagcggaagaaatccgatatgggtgagg

SEQ ID NO: 340704 - DNA, 55 bp, Artificial
  Synthetic oligonucleotide
caagaaccactcaacgcagaatggaaggcaaaagtccagaagcgactcaggggcg

SEQ ID NO: 340705 - DNA, 55 bp, Artificial
  Synthetic oligonucleotide
caagaaccactcaacggagactggaaagcaatggttcagagaaagctcaaaggcg

SEQ ID NO: 340706 - DNA, 59 bp, Artificial
  Synthetic oligonucleotide
caagaaccccggtgttgtgacaggatcagctgtcgggtgtgacccagatctgttctgga

SEQ ID NO: 340707 - DNA, 56 bp, Artificial
  Synthetic oligonucleotide
caagaaccttggtaaagagcaagacccaacaggagtcgagccaggggaccatctta

SEQ ID NO: 340708 - DNA, 55 bp, Artificial
  Synthetic oligonucleotide
caagaacgatctccgtgatcgtcatcaggttatgcacaggttctatggtaaggtc

SEQ ID NO: 340709 - DNA, 60 bp, Artificial
  Synthetic oligonucleotide
caagaactaaatacagtatatcggcgccattagcttggagcgaatcagcatggccaacaa

SEQ ID NO: 340710 - DNA, 60 bp, Artificial
  Synthetic oligonucleotide
caagaactcacacaatgcgcgcgctgagcagcaggagatgatgacgcagtcgctgcaata

SEQ ID NO: 340711 - DNA, 55 bp, Artificial
  Synthetic oligonucleotide
caagaactccgaaaagtctcaatcgcgaaagagagttgaccgaaagagacactcg

SEQ ID NO: 340712 - DNA, 55 bp, Artificial
  Synthetic oligonucleotide
caagaacttcagaacagaaagagaagatggaaagtatagctgcttatcttgctac

SEQ ID NO: 340713 - DNA, 56 bp, Artificial
  Synthetic oligonucleotide
caagaagaaatactgaacttgttaggatgtcctgttgatgtatctaaatggtggtg

SEQ ID NO: 340714 - DNA, 57 bp, Artificial
  Synthetic oligonucleotide
caagaagagcaaaggctgctacgttttaatggttgttctaggagtgctattaaaaga

SEQ ID NO: 340715 - DNA, 56 bp, Artificial
  Synthetic oligonucleotide
caagaagagcttgtttgaaatgtcgaacgtatttcacttgcttggagacaaatttg

SEQ ID NO: 340716 - DNA, 60 bp, Artificial
  Synthetic oligonucleotide
caagaagaggagacgcacagaagaaagtaccacaagccaagcaagcgacgactcctcaag

SEQ ID NO: 340717 - DNA, 58 bp, Artificial
  Synthetic oligonucleotide
caagaagaggagtctccgacgacgaaacgtcgccaccttcaaggatacctgcaattga

SEQ ID NO: 340718 - DNA, 55 bp, Artificial
  Synthetic oligonucleotide
caagaagatccaaactctcacagtaatgctcgttcagtctgaagaagagtggtat

SEQ ID NO: 340719 - DNA, 52 bp, Artificial
  Synthetic oligonucleotide
caagaagattctgggcttccattcagccggctccatgggcgttgcagccgcg

SEQ ID NO: 340720 - DNA, 55 bp, Artificial
  Synthetic oligonucleotide
caagaagcctcaatagaactctcaatctcgttcgcacacgtggcggccatccgct

SEQ ID NO: 340721 - DNA, 60 bp, Artificial
  Synthetic oligonucleotide
caagaagcgattgagcgcgcttaagaaaatgctgccgcgagctcattttgagcgcgctaa

SEQ ID NO: 340722 - DNA, 55 bp, Artificial
  Synthetic oligonucleotide
caagaaggaacactttattggttttggacctcatcatgtacaacatcttgtgtga

SEQ ID NO: 340723 - DNA, 55 bp, Artificial
  Synthetic oligonucleotide
caagaaggaaggatcaaatgaagaaacaattgtgagtctgactccgcatcgatcg

SEQ ID NO: 340724 - DNA, 56 bp, Artificial
  Synthetic oligonucleotide
caagaaggaatagttagtttgggaaagacataggaagaatgagaatgatgtcgggt

SEQ ID NO: 340725 - DNA, 55 bp, Artificial
  Synthetic oligonucleotide
caagaaggcctgtgagagcctggacaagaacaccagcagtgggcacccctaccac

SEQ ID NO: 340726 - DNA, 55 bp, Artificial
  Synthetic oligonucleotide
caagaagggagaattaactactactggactctgctggaaccaggggacacaataa

SEQ ID NO: 340727 - DNA, 59 bp, Artificial
  Synthetic oligonucleotide
caagaagggggtcatcataggcccccatttgctgtggtccaggctataagatagaaggc

SEQ ID NO: 340728 - DNA, 59 bp, Artificial
  Synthetic oligonucleotide
caagaagggtcatcagctaccggagattatgaacagactgcgcttattcttcactgacg

SEQ ID NO: 340729 - DNA, 57 bp, Artificial
  Synthetic oligonucleotide
caagaagtagaacgatcttcaatgtcagtcaattggcgggaaacgttcaatgaggaa

SEQ ID NO: 340730 - DNA, 55 bp, Artificial
  Synthetic oligonucleotide
caagaagtccgaattcggcaactcactcaatggtcgtgaagtcctatcctaccgc

SEQ ID NO: 340731 - DNA, 58 bp, Artificial
  Synthetic oligonucleotide
caagaagtgggtcgttggtgcttcgttgcaaccgtcaacgagaacactccattacaca

SEQ ID NO: 340732 - DNA, 59 bp, Artificial
  Synthetic oligonucleotide
caagaataatcaggcctcgaatggaccgggttgcctatgtacaggaagcccaggatcta

SEQ ID NO: 340733 - DNA, 58 bp, Artificial
  Synthetic oligonucleotide
caagaatactcaaggtcagacttagatgggggttcaacacctaacagctcacaaagat

SEQ ID NO: 340734 - DNA, 60 bp, Artificial
  Synthetic oligonucleotide
caagaatagcaattggagattgccccaagtatgtcaaacagggctctctgaaacttgcaa

SEQ ID NO: 340735 - DNA, 60 bp, Artificial
  Synthetic oligonucleotide
caagaatattatgagatagctggacggttctcactcatttcactagtgccttcgaatgat

SEQ ID NO: 340736 - DNA, 59 bp, Artificial
  Synthetic oligonucleotide
caagaatattgcgataaactccgttatctaggcggtattcggcccttgtgacatcacca

SEQ ID NO: 340737 - DNA, 52 bp, Artificial
  Synthetic oligonucleotide
caagaatccgttggctcaacttactaatggagaggccgacccatggcaactt

SEQ ID NO: 340738 - DNA, 52 bp, Artificial
  Synthetic oligonucleotide
caagaatgacatcaagactttgtgtgctttgagtcatacgagattgccctat

SEQ ID NO: 340739 - DNA, 60 bp, Artificial
  Synthetic oligonucleotide
caagaatgagaacatacgcgacgtcgtcgaatatacagcgaatgctctaagtaaaggatt

SEQ ID NO: 340740 - DNA, 52 bp, Artificial
  Synthetic oligonucleotide
caagaatggaggttgaattcctaaagcgaaaacccggttatttcccagagtc

SEQ ID NO: 340741 - DNA, 51 bp, Artificial
  Synthetic oligonucleotide
caagaatggcaccactctctgatgctatattcgatgatctacaaggaacac

SEQ ID NO: 340742 - DNA, 55 bp, Artificial
  Synthetic oligonucleotide
caagaatgggttgaaacccatgacattgacttggaagtcacgagttgcgacctcg

SEQ ID NO: 340743 - DNA, 55 bp, Artificial
  Synthetic oligonucleotide
caagaatgtgataaatctacttttgaaccaattcccatcagatactgtgctccag

SEQ ID NO: 340744 - DNA, 57 bp, Artificial
  Synthetic oligonucleotide
caagaatgtgtcgtttggtgcaagttatattttgtgactaatatttttacagacctg

SEQ ID NO: 340745 - DNA, 54 bp, Artificial
  Synthetic oligonucleotide
caagaattactattcttgtgggcccctcttggtaattcctagagggctttcctc

SEQ ID NO: 340746 - DNA, 55 bp, Artificial
  Synthetic oligonucleotide
caagaattagacgatgaaactacaatgttaagcttattcggacccttcgtagaaa

SEQ ID NO: 340747 - DNA, 56 bp, Artificial
  Synthetic oligonucleotide
caagaattaggaatacggataaactttgacaaaacgactccgtctccagtcactga

SEQ ID NO: 340748 - DNA, 55 bp, Artificial
  Synthetic oligonucleotide
caagaattgctgccaataacaccaaacagcgtttaagacggattgcatgtcgaac

SEQ ID NO: 340749 - DNA, 58 bp, Artificial
  Synthetic oligonucleotide
caagaattggttacatcactccgtctactgcttgttgccacccaaaagtcaactacta

SEQ ID NO: 340750 - DNA, 60 bp, Artificial
  Synthetic oligonucleotide
caagaattgttgttctacctttgagaaaccttatgaatatggatgcaagccatcttattc

SEQ ID NO: 340751 - DNA, 60 bp, Artificial
  Synthetic oligonucleotide
caagacaatcgtgtttgttgccacacaacaccaggccacgtctctagcgagagatttgaa

SEQ ID NO: 340752 - DNA, 60 bp, Artificial
  Synthetic oligonucleotide
caagacaattgagcctcctggagctgtggtcaagataggcagagacacccagcattattg

SEQ ID NO: 340753 - DNA, 51 bp, Artificial
  Synthetic oligonucleotide
caagacaattgctatcgaaggaaaaaccaaggctgaggtgagacgtaacgg

SEQ ID NO: 340754 - DNA, 54 bp, Artificial
  Synthetic oligonucleotide
caagacacacttacctcgggaagaattggagtccgttcgggctaagtgggtcca

SEQ ID NO: 340755 - DNA, 58 bp, Artificial
  Synthetic oligonucleotide
caagacaccctcacccaaatgaaacgctttcccgtcgacatcaccatccagcaccaaa

SEQ ID NO: 340756 - DNA, 55 bp, Artificial
  Synthetic oligonucleotide
caagacactctatcggttcttgagtcatcatcctgcagatccgaagtattcggag

SEQ ID NO: 340757 - DNA, 59 bp, Artificial
  Synthetic oligonucleotide
caagacacttggcagtacattttcttggaacacagcaccgataacggtaagattatatc

SEQ ID NO: 340758 - DNA, 57 bp, Artificial
  Synthetic oligonucleotide
caagacagactaaatttacatgacaacttcgaatctttatgggatacgataacaact

SEQ ID NO: 340759 - DNA, 60 bp, Artificial
  Synthetic oligonucleotide
caagacagggtgagaagacctgagtgtgctacagatgagtcctccggcccctgaatgcgg

SEQ ID NO: 340760 - DNA, 58 bp, Artificial
  Synthetic oligonucleotide
caagacagtacaaggtgtggttaacttcatttcaagagctggtgttagatcaagagtc

SEQ ID NO: 340761 - DNA, 60 bp, Artificial
  Synthetic oligonucleotide
caagacagtccgactaatcaaagatctctatcagctcagtaagtagtatatgtgatgcaa

SEQ ID NO: 340762 - DNA, 60 bp, Artificial
  Synthetic oligonucleotide
caagacagtgaggcttatcaagcatctctaccaaagcagtaagtagtacatgtaatgcaa

SEQ ID NO: 340763 - DNA, 58 bp, Artificial
  Synthetic oligonucleotide
caagacagtgggtatggcaatacgcaggtggatattggaacgtccgaaagccaggtac

SEQ ID NO: 340764 - DNA, 55 bp, Artificial
  Synthetic oligonucleotide
caagacataatcccagtcttttaaagctatatgaggaaacaagggatcagaaggc

SEQ ID NO: 340765 - DNA, 53 bp, Artificial
  Synthetic oligonucleotide
caagacatactaaacacccctttaatactatttaccacatcatcctgctcttt

SEQ ID NO: 340766 - DNA, 58 bp, Artificial
  Synthetic oligonucleotide
caagacatcctccactcataaccaatggcacatcagaaaattcgggacccacgatttc

SEQ ID NO: 340767 - DNA, 55 bp, Artificial
  Synthetic oligonucleotide
caagacatgaaggggaaataacggcatgtggccttacgtacagatctacaacttg

SEQ ID NO: 340768 - DNA, 51 bp, Artificial
  Synthetic oligonucleotide
caagaccactaccttattttacagctagagaaattatgggattagatttga

SEQ ID NO: 340769 - DNA, 58 bp, Artificial
  Synthetic oligonucleotide
caagaccagagggaattctcaaaaaccctccatgatcagaaacccagcatacatttta

SEQ ID NO: 340770 - DNA, 56 bp, Artificial
  Synthetic oligonucleotide
caagaccatcctctgtactagatattagacagggaagtaaagaggattttaaaagc

SEQ ID NO: 340771 - DNA, 54 bp, Artificial
  Synthetic oligonucleotide
caagaccattacgaaagaagttgttattaccggcatgtggccaaccaacgttgg

SEQ ID NO: 340772 - DNA, 60 bp, Artificial
  Synthetic oligonucleotide
caagaccattgaaacccatctcctccatgagcattgggccaaccgtgcgactctcccgtc

SEQ ID NO: 340773 - DNA, 60 bp, Artificial
  Synthetic oligonucleotide
caagacccaaagtaagagatcaagcagggagaatgaactattactggacactagtagagc

SEQ ID NO: 340774 - DNA, 58 bp, Artificial
  Synthetic oligonucleotide
caagaccccacaatgctatacaataagatggagtttgaaccgttccaatccctggtgc

SEQ ID NO: 340775 - DNA, 55 bp, Artificial
  Synthetic oligonucleotide
caagacccggcaacaatacaagaaggagtatatctatgggaccagggagagcaat

SEQ ID NO: 340776 - DNA, 60 bp, Artificial
  Synthetic oligonucleotide
caagaccggactgttccgtcacatgtagaggcgactgctgcaggtcatatggaagctaaa

SEQ ID NO: 340777 - DNA, 50 bp, Artificial
  Synthetic oligonucleotide
caagaccgtcgtaccagagggctggacgtgcgccactccggcgtctatca

SEQ ID NO: 340778 - DNA, 60 bp, Artificial
  Synthetic oligonucleotide
caagacctacatgtgcagtcacattgacaggcagccgatcactcactatctcagaaaggc

SEQ ID NO: 340779 - DNA, 60 bp, Artificial
  Synthetic oligonucleotide
caagacctcaggtcaatggacaaagcgggcgaattgatttccactggacattagtacagc

SEQ ID NO: 340780 - DNA, 60 bp, Artificial
  Synthetic oligonucleotide
caagacctcccagggaccgacaacagcacagcaacactgtgcctgggacatcacgcagtg

SEQ ID NO: 340781 - DNA, 60 bp, Artificial
  Synthetic oligonucleotide
caagacctctcggacagccccagctcagacgatccatcaagatggaaagtccaacgcacc

SEQ ID NO: 340782 - DNA, 58 bp, Artificial
  Synthetic oligonucleotide
caagaccttaaaactcctttcacgattagtggaagctccgatgtgaagggcatcgaga

SEQ ID NO: 340783 - DNA, 60 bp, Artificial
  Synthetic oligonucleotide
caagaccttccaggaaatgacgacagcaccgcaacactgtgtctgggacatcatgcagtg

SEQ ID NO: 340784 - DNA, 55 bp, Artificial
  Synthetic oligonucleotide
caagacctttgaaaaggactactccagagtgagagatgagaaacccgacttcgtg

SEQ ID NO: 340785 - DNA, 60 bp, Artificial
  Synthetic oligonucleotide
caagacgaaattgtatgaggcagcccattcagatgttcgagagtctctagctaggttcat

SEQ ID NO: 340786 - DNA, 55 bp, Artificial
  Synthetic oligonucleotide
caagacgagggctatgtcccggagacaatcgaacaaatcatgaactggctccgcg

SEQ ID NO: 340787 - DNA, 55 bp, Artificial
  Synthetic oligonucleotide
caagacgatataacatagggaatgtcatcgaggcactctttcaaggaccgcccgc

SEQ ID NO: 340788 - DNA, 60 bp, Artificial
  Synthetic oligonucleotide
caagacgcacaggacaattggtacaaggcccgtggacaggtatctgcagacggcctgtac

SEQ ID NO: 340789 - DNA, 51 bp, Artificial
  Synthetic oligonucleotide
caagacgcacttcccggtggaaaacacatcgtgcgcgctcggggcttacat

SEQ ID NO: 340790 - DNA, 60 bp, Artificial
  Synthetic oligonucleotide
caagacgcctgtaaggattcatcgtcagtcatcctcttatcatggatctctacaatcacc

SEQ ID NO: 340791 - DNA, 59 bp, Artificial
  Synthetic oligonucleotide
caagacggtgtctgaaaccggtaatactaaaagatggtccagagcgtgtcatcttagca

SEQ ID NO: 340792 - DNA, 54 bp, Artificial
  Synthetic oligonucleotide
caagacgtatacgtaatgaagtacctagacgttcattatagttaggaagaagtt

SEQ ID NO: 340793 - DNA, 55 bp, Artificial
  Synthetic oligonucleotide
caagacgtcgtaaacaagctaaaacatacgccaattgttgctgaacgtcccaacc

SEQ ID NO: 340794 - DNA, 60 bp, Artificial
  Synthetic oligonucleotide
caagacgtctatactggttactccttgccggttgcgagaatcatcacacatagtgtgaat

SEQ ID NO: 340795 - DNA, 57 bp, Artificial
  Synthetic oligonucleotide
caagacgtctgacttgacagtctgagtgaattgactcaaacctctccttagggactg

SEQ ID NO: 340796 - DNA, 60 bp, Artificial
  Synthetic oligonucleotide
caagacgtgcattgcggactgcataacgcagtaccggcttacggactacggctgtcacac

SEQ ID NO: 340797 - DNA, 60 bp, Artificial
  Synthetic oligonucleotide
caagacgttccatgagagcacgttcctgaagcggtacgaactgagacatgatctcgtttg

SEQ ID NO: 340798 - DNA, 60 bp, Artificial
  Synthetic oligonucleotide
caagacgtttaatctatctatgcatacgttgcaaattaattgtgtgttttgcaagaatgc

SEQ ID NO: 340799 - DNA, 58 bp, Artificial
  Synthetic oligonucleotide
caagactaagctggaacccagcgccttccattacatcttcgaaggcgtgaaagagccc

SEQ ID NO: 340800 - DNA, 55 bp, Artificial
  Synthetic oligonucleotide
caagactaccagtactaacagtagctgtaatgctaccaaggataccagtagtgat

SEQ ID NO: 340801 - DNA, 51 bp, Artificial
  Synthetic oligonucleotide
caagactacgtctacatgtttgactggtctggtttcgatgcctcagtacaa

SEQ ID NO: 340802 - DNA, 55 bp, Artificial
  Synthetic oligonucleotide
caagactactcatctatggttaactttgcacgttgcaagtgcctaggtgctaacg

SEQ ID NO: 340803 - DNA, 60 bp, Artificial
  Synthetic oligonucleotide
caagactcaaatatgctcaggaagagttgtcaaatgaagtgcttccacctcctaggaaaa

SEQ ID NO: 340804 - DNA, 60 bp, Artificial
  Synthetic oligonucleotide
caagactcacctggtcttaattcaattgggccctgaagcccatatcttgataaagatgcg

SEQ ID NO: 340805 - DNA, 59 bp, Artificial
  Synthetic oligonucleotide
caagactcgaacgttcacagctgccccaattgacacattgctcggggcgaaggtgtgtg

SEQ ID NO: 340806 - DNA, 60 bp, Artificial
  Synthetic oligonucleotide
caagactctacgaacacaacctgcagcttcgaacgtagagctaacctcctaccattgcac

SEQ ID NO: 340807 - DNA, 60 bp, Artificial
  Synthetic oligonucleotide
caagactgacgatgaagtgaactctgagccagtcaagcccgtggagaaaccacacgctga

SEQ ID NO: 340808 - DNA, 55 bp, Artificial
  Synthetic oligonucleotide
caagactgacgtgatgtcaattcaacgaacgatacacataattgatgcgttgatt

SEQ ID NO: 340809 - DNA, 60 bp, Artificial
  Synthetic oligonucleotide
caagactggccgtggaatacttatcattggccattatggcaaatggataatgtagtacaa

SEQ ID NO: 340810 - DNA, 60 bp, Artificial
  Synthetic oligonucleotide
caagactggttgctaagacattctctaagatgaccagagacacccatctgatgatatact

SEQ ID NO: 340811 - DNA, 58 bp, Artificial
  Synthetic oligonucleotide
caagactgtaagattgctcccttaatggttgcatacatgttggaaagggaactggtcc

SEQ ID NO: 340812 - DNA, 56 bp, Artificial
  Synthetic oligonucleotide
caagactgtagttagggtaagaagtaaatctaatacagagactatcattgtgcagc

SEQ ID NO: 340813 - DNA, 54 bp, Artificial
  Synthetic oligonucleotide
caagacttagacaactacaagacgaggctcgggatcccccccttattctcttaa

SEQ ID NO: 340814 - DNA, 60 bp, Artificial
  Synthetic oligonucleotide
caagacttccagaagaggcggtgtgtcaaagccaagacgccgatcttacagcgcgaagaa

SEQ ID NO: 340815 - DNA, 55 bp, Artificial
  Synthetic oligonucleotide
caagagaacaatttgacgtgcacaaccattacccaaaacaacactactgtagtgg

SEQ ID NO: 340816 - DNA, 60 bp, Artificial
  Synthetic oligonucleotide
caagagaaccttacgtgtcatgtgacaccagtaaatgctatcaatttgcacttgggcaag

SEQ ID NO: 340817 - DNA, 52 bp, Artificial
  Synthetic oligonucleotide
caagagaatgcccacagtgtcagtcacccgttggggctggtaagtcccccct

SEQ ID NO: 340818 - DNA, 51 bp, Artificial
  Synthetic oligonucleotide
caagagacggcgaacccctcatgatagtagcgaaacacgaaagggggagac

SEQ ID NO: 340819 - DNA, 55 bp, Artificial
  Synthetic oligonucleotide
caagagacggtgggtctgaaagtaacggtacagaggtcttcagacctggaggagg

SEQ ID NO: 340820 - DNA, 53 bp, Artificial
  Synthetic oligonucleotide
caagagactaacgtggctatgtctttcatttggcagtctgccccagatattgg

SEQ ID NO: 340821 - DNA, 50 bp, Artificial
  Synthetic oligonucleotide
caagagactgacaacaatatctatgtctggggttccgcggtataatgagg

SEQ ID NO: 340822 - DNA, 55 bp, Artificial
  Synthetic oligonucleotide
caagagactgctttgcttttattgcttactggggacaagaacttaagcaaagtgc

SEQ ID NO: 340823 - DNA, 55 bp, Artificial
  Synthetic oligonucleotide
caagagactgttatgctgtatggcaccatggcacgctacctccgtaagatgcggc

SEQ ID NO: 340824 - DNA, 55 bp, Artificial
  Synthetic oligonucleotide
caagagactgtttaaccattctggctaccttgagggtgtatagcaggttggcttt

SEQ ID NO: 340825 - DNA, 52 bp, Artificial
  Synthetic oligonucleotide
caagagacttgcaagtggacaacactggaatatatgcacaaggagacgaaaa

SEQ ID NO: 340826 - DNA, 58 bp, Artificial
  Synthetic oligonucleotide
caagagagaactagtcgttggggatgcgaagaatttgggtgccttgctgtaaatacag

SEQ ID NO: 340827 - DNA, 52 bp, Artificial
  Synthetic oligonucleotide
caagagagatggctcggtaagagactgtcgcaatttgacatcggacagtata

SEQ ID NO: 340828 - DNA, 60 bp, Artificial
  Synthetic oligonucleotide
caagagaggaacgtcatatttgcgcaaaagagccagcgtaatgatcaggatcggttctat

SEQ ID NO: 340829 - DNA, 55 bp, Artificial
  Synthetic oligonucleotide
caagagagtgcgaagtgaatccaaggcgtactgtggctcaagggtacattcagga

SEQ ID NO: 340830 - DNA, 57 bp, Artificial
  Synthetic oligonucleotide
caagagatactaacttacacaagcaaagtggacctattgagcaaaaccctgtggaaa

SEQ ID NO: 340831 - DNA, 57 bp, Artificial
  Synthetic oligonucleotide
caagagatcagctccttcggtctctccactgatcacctcacagctttgtgcttcaga

SEQ ID NO: 340832 - DNA, 60 bp, Artificial
  Synthetic oligonucleotide
caagagatgacttacatatggaaggaaggagagtacagctcaccatttgtacaaaggtgg

SEQ ID NO: 340833 - DNA, 59 bp, Artificial
  Synthetic oligonucleotide
caagagatgataaaccagcaatttctagtactgcccaccaggcaaaaaatctcacaggg

SEQ ID NO: 340834 - DNA, 57 bp, Artificial
  Synthetic oligonucleotide
caagagatggaggtagggagaacaataccaacgagaccgagaccttcagacctggag

SEQ ID NO: 340835 - DNA, 53 bp, Artificial
  Synthetic oligonucleotide
caagagatggcactccctacagctacactgggggttcccacgtgtccagagga

SEQ ID NO: 340836 - DNA, 54 bp, Artificial
  Synthetic oligonucleotide
caagagatggggctacacccttaacttcatgggttatgtaattggtagttgggg

SEQ ID NO: 340837 - DNA, 55 bp, Artificial
  Synthetic oligonucleotide
caagagatggtgggctaaatagtacaaatgagaccttcagacctacaggaggaga

SEQ ID NO: 340838 - DNA, 55 bp, Artificial
  Synthetic oligonucleotide
caagagatggtggggataataacagaagcaccgagacctttagacctggaggagg

SEQ ID NO: 340839 - DNA, 60 bp, Artificial
  Synthetic oligonucleotide
caagagatggtggtaacaatgggactaatgagaccttcagacctggaggaggagatatga

SEQ ID NO: 340840 - DNA, 55 bp, Artificial
  Synthetic oligonucleotide
caagagatggtggtaacagaactgatagtaaccagaccgagacattcagacctga

SEQ ID NO: 340841 - DNA, 55 bp, Artificial
  Synthetic oligonucleotide
caagagatggtggtaacgaaactgagaacgggtatgataccttcagacctggagg

SEQ ID NO: 340842 - DNA, 59 bp, Artificial
  Synthetic oligonucleotide
caagagatggtggtaaggacacggacacgaacgacaccgagatcttcagacctggagga

SEQ ID NO: 340843 - DNA, 52 bp, Artificial
  Synthetic oligonucleotide
caagagatggtggtaattataataaaaccgggaatataaccgggaataagac

SEQ ID NO: 340844 - DNA, 59 bp, Artificial
  Synthetic oligonucleotide
caagagattcagttgtatttagtttcattgggcgttcctaaaatagatgcagatactta

SEQ ID NO: 340845 - DNA, 60 bp, Artificial
  Synthetic oligonucleotide
caagagattttggcaacgacctgtgttggaatttgggcaatgtttggatgatctaccaga

SEQ ID NO: 340846 - DNA, 55 bp, Artificial
  Synthetic oligonucleotide
caagagcaagagtgacttctggtgcacggttcactccagcatgcccgctggcgag

SEQ ID NO: 340847 - DNA, 60 bp, Artificial
  Synthetic oligonucleotide
caagagcaattgaagcggccagtctgaatgatacagtccaatttagaatgatatttggga

SEQ ID NO: 340848 - DNA, 58 bp, Artificial
  Synthetic oligonucleotide
caagagccaacctaagcagaagttagacttaagtatccaggacgaatatcctgcctta

SEQ ID NO: 340849 - DNA, 58 bp, Artificial
  Synthetic oligonucleotide
caagagccaccaagtatatgcccacggttaccgatttcaaaggcaactatctcgttgc

SEQ ID NO: 340850 - DNA, 52 bp, Artificial
  Synthetic oligonucleotide
caagagccatttgcacaattggcagcagaagggagggccccttacatcagtg

SEQ ID NO: 340851 - DNA, 60 bp, Artificial
  Synthetic oligonucleotide
caagagcccttgtccgcaccggaatggatcccaggatgtgctctttgatgcaaggttcaa

SEQ ID NO: 340852 - DNA, 53 bp, Artificial
  Synthetic oligonucleotide
caagagcgctggttatccacttaacaaatttggtaaggctagcctgtattacg

SEQ ID NO: 340853 - DNA, 51 bp, Artificial
  Synthetic oligonucleotide
caagagcgtacggttcaacccctgcctcccctgtaaaactaccctttgaaa

SEQ ID NO: 340854 - DNA, 55 bp, Artificial
  Synthetic oligonucleotide
caagagcgtacggttcaacccctgcctcctctgtaagactccctagactttctag

SEQ ID NO: 340855 - DNA, 60 bp, Artificial
  Synthetic oligonucleotide
caagagctaggaatacgcatcaacttcgacaaaactacgccatctccagtaaatgagata

SEQ ID NO: 340856 - DNA, 58 bp, Artificial
  Synthetic oligonucleotide
caagagctcaacaacctcaaatccacgtgtatagtgctccatgggactcggacgacgt

SEQ ID NO: 340857 - DNA, 55 bp, Artificial
  Synthetic oligonucleotide
caagagctcagaattatgggattaacttaccgataacaggatcaatggacactgc

SEQ ID NO: 340858 - DNA, 60 bp, Artificial
  Synthetic oligonucleotide
caagagctccagctcatcagactccgaaggaaacaacgactcctcaagcagcgaatcctc

SEQ ID NO: 340859 - DNA, 60 bp, Artificial
  Synthetic oligonucleotide
caagagctgactttgcatcatgtgtggatgagaaaactgtaacgtggaattgcactgggc

SEQ ID NO: 340860 - DNA, 50 bp, Artificial
  Synthetic oligonucleotide
caagagcttgagcttactctcttgtgagggacagaaatacaatcagggac

SEQ ID NO: 340861 - DNA, 60 bp, Artificial
  Synthetic oligonucleotide
caagaggaaattagagcaacaattattgatagagaactaatttcaaagcttgcgatgaat

SEQ ID NO: 340862 - DNA, 60 bp, Artificial
  Synthetic oligonucleotide
caagaggaaccgctccatcctcaacacaagtcaaaggggaatcctcgaagatgagcagat

SEQ ID NO: 340863 - DNA, 59 bp, Artificial
  Synthetic oligonucleotide
caagaggaagagtctcccacgactcgacgacgccacttgcaggggtatctccagttgaa

SEQ ID NO: 340864 - DNA, 60 bp, Artificial
  Synthetic oligonucleotide
caagaggaagctttaaagcatttcgataggcgcttgctacatgcagtaggctcatgggtg

SEQ ID NO: 340865 - DNA, 52 bp, Artificial
  Synthetic oligonucleotide
caagaggaagtagaattcccagtgagaccacagagaccactttgtaagccaa

SEQ ID NO: 340866 - DNA, 55 bp, Artificial
  Synthetic oligonucleotide
caagaggaagtgattaagtatcctgtaaaggaacttcaaactacctctgaaggtg

SEQ ID NO: 340867 - DNA, 59 bp, Artificial
  Synthetic oligonucleotide
caagaggaatgaatttcgaaacgcaaatgttcactaaggtggcgaccttgatatgtgaa

SEQ ID NO: 340868 - DNA, 60 bp, Artificial
  Synthetic oligonucleotide
caagaggacagctttccaccagaggggttcagattgcttccaatgagaacatggagacta

SEQ ID NO: 340869 - DNA, 55 bp, Artificial
  Synthetic oligonucleotide
caagaggatacgagagttggcagaacggagaagccaatttgctgattacacgtgg

SEQ ID NO: 340870 - DNA, 55 bp, Artificial
  Synthetic oligonucleotide
caagaggatcatctatcagatcagtaggatcatcagtttcagcatggacagacgt

SEQ ID NO: 340871 - DNA, 60 bp, Artificial
  Synthetic oligonucleotide
caagaggatgatgacagagttagaagatcgcttcaggaagctatttggcacgacttctac

SEQ ID NO: 340872 - DNA, 60 bp, Artificial
  Synthetic oligonucleotide
caagaggctgggaaattcgagaatcatacggagaatgctatactgttgtatatggcatgt

SEQ ID NO: 340873 - DNA, 59 bp, Artificial
  Synthetic oligonucleotide
caagaggcttacggttcttgggaaggatgctggtgcgttgaccgaagatcctgatgaag

SEQ ID NO: 340874 - DNA, 56 bp, Artificial
  Synthetic oligonucleotide
caagagggatgaattttgatactgaaatgtatgataaagtagctgatttgataact

SEQ ID NO: 340875 - DNA, 55 bp, Artificial
  Synthetic oligonucleotide
caagagggcaaaacacagtcaaagtatcagggaaaggcgggcatagtggctcaac

SEQ ID NO: 340876 - DNA, 60 bp, Artificial
  Synthetic oligonucleotide
caagagggcaactgtccaccagaggggttcagattgcctcaaatgagaacatggagacaa

SEQ ID NO: 340877 - DNA, 55 bp, Artificial
  Synthetic oligonucleotide
caagagggcgtccggtatcccctacgacaggaaagtggtatgttcgtgcactggg

SEQ ID NO: 340878 - DNA, 60 bp, Artificial
  Synthetic oligonucleotide
caagagggctaaagcaaaagggttgatgtctatgtgtgctgctaggtcttatgactattt

SEQ ID NO: 340879 - DNA, 58 bp, Artificial
  Synthetic oligonucleotide
caagaggggaggatgcccaatttactggttcatgcactagccccatggggaatcaggg

SEQ ID NO: 340880 - DNA, 57 bp, Artificial
  Synthetic oligonucleotide
caagaggtacaaaacctgcagacagtccctttagaacccgatagtcagccaatagac

SEQ ID NO: 340881 - DNA, 55 bp, Artificial
  Synthetic oligonucleotide
caagaggtatgaactatgaaacttcaatgtttaacaaggtggcggttttgatttg

SEQ ID NO: 340882 - DNA, 58 bp, Artificial
  Synthetic oligonucleotide
caagaggtcctttaatctggtagaggacagggttagaccagctatttctgagaagaca

SEQ ID NO: 340883 - DNA, 52 bp, Artificial
  Synthetic oligonucleotide
caagaggtcggcgtgttagacgccaaggaactagtggacaaggatggcacta

SEQ ID NO: 340884 - DNA, 60 bp, Artificial
  Synthetic oligonucleotide
caagaggtctgtttggagcaatagcaggattcatagaagggggatggcaaggaatggtag

SEQ ID NO: 340885 - DNA, 55 bp, Artificial
  Synthetic oligonucleotide
caagaggtgtccctctctttaagtgcacttttgaccaatcagtctcatgaacttc

SEQ ID NO: 340886 - DNA, 51 bp, Artificial
  Synthetic oligonucleotide
caagagtaagttcagaagtacacataccactaggggatgctaacttggtaa

SEQ ID NO: 340887 - DNA, 60 bp, Artificial
  Synthetic oligonucleotide
caagagtaatgatgaggttcaaagtgccacggtcgcaacagccgcaaatacacatatata

SEQ ID NO: 340888 - DNA, 57 bp, Artificial
  Synthetic oligonucleotide
caagagtacccctcactaacaagataataacgatagtatccctaactatcgtgacga

SEQ ID NO: 340889 - DNA, 57 bp, Artificial
  Synthetic oligonucleotide
caagagtactcaggcagctatcgaccaaatcactggaaagctgaacaggttgattga

SEQ ID NO: 340890 - DNA, 60 bp, Artificial
  Synthetic oligonucleotide
caagagtagatgttatatcttcacaatgtgggtgttcttattggttcttgaatctatact

SEQ ID NO: 340891 - DNA, 60 bp, Artificial
  Synthetic oligonucleotide
caagagtagattatagaataggggtaggagcattgacagtagcactgattatagcaatag

SEQ ID NO: 340892 - DNA, 55 bp, Artificial
  Synthetic oligonucleotide
caagagtagattatagattaggagtagcagcactggtaatagcattcatcatagc

SEQ ID NO: 340893 - DNA, 55 bp, Artificial
  Synthetic oligonucleotide
caagagtatgcgattcctgttggaccagtatttcctgctggtatgaattggaccg

SEQ ID NO: 340894 - DNA, 60 bp, Artificial
  Synthetic oligonucleotide
caagagtatggtggacatcaaacagtatcgtcgtgttttgtggcacttcaggtacctatg

SEQ ID NO: 340895 - DNA, 51 bp, Artificial
  Synthetic oligonucleotide
caagagtattagatcctgggcagatgatgtgggcgcaaaaaacaatctaga

SEQ ID NO: 340896 - DNA, 60 bp, Artificial
  Synthetic oligonucleotide
caagagtcagaatgccagtgcttacacggaacttgtgttgtagcagtgacagatggacca

SEQ ID NO: 340897 - DNA, 51 bp, Artificial
  Synthetic oligonucleotide
caagagtccggacttcggggacctacacgccgccggttgggcccctgggag

SEQ ID NO: 340898 - DNA, 60 bp, Artificial
  Synthetic oligonucleotide
caagagtcgatttaaagtggaggatcgtaaatgagcacactacctagctattgccagctt

SEQ ID NO: 340899 - DNA, 60 bp, Artificial
  Synthetic oligonucleotide
caagagtcgcaaagaggcaatgcttgggacacatgtaatatgggacattgggttgcagtc

SEQ ID NO: 340900 - DNA, 60 bp, Artificial
  Synthetic oligonucleotide
caagagtctgaatgtcaatgcattgatgggacctgtgttgtcgctgttacagatggtcct

SEQ ID NO: 340901 - DNA, 55 bp, Artificial
  Synthetic oligonucleotide
caagagtctgatacagctgagagtgaggaaagcgtcttcaacgtggctctttccg

SEQ ID NO: 340902 - DNA, 59 bp, Artificial
  Synthetic oligonucleotide
caagagtgacgctggctttggaaaactcacaagtgtaaatgcgacgaaggttagctaca

SEQ ID NO: 340903 - DNA, 55 bp, Artificial
  Synthetic oligonucleotide
caagagtgatcccttctacaagaacccaacacttcgcatgagaggaacaacgagc

SEQ ID NO: 340904 - DNA, 55 bp, Artificial
  Synthetic oligonucleotide
caagagtgatctcaattttggcaaggataagaaagctagaagcatgagagggcag

SEQ ID NO: 340905 - DNA, 56 bp, Artificial
  Synthetic oligonucleotide
caagagtgcctgagcaagtatggaattgatctccccctaatcacatatatcaagga

SEQ ID NO: 340906 - DNA, 57 bp, Artificial
  Synthetic oligonucleotide
caagagtggacaaactaacacaaggccgacaaacttatgattggaccttgaatagga

SEQ ID NO: 340907 - DNA, 58 bp, Artificial
  Synthetic oligonucleotide
caagagtggacaaactgacccaaggtcgtcagacctatgattggacattaaacaggaa

SEQ ID NO: 340908 - DNA, 58 bp, Artificial
  Synthetic oligonucleotide
caagagtgggtggaaacccacgatatagatcttgaggttaccaattgtgatcttgatt

SEQ ID NO: 340909 - DNA, 54 bp, Artificial
  Synthetic oligonucleotide
caagagtgtattgacaaatacggtcttaacctacccatggttacttacgtgaag

SEQ ID NO: 340910 - DNA, 55 bp, Artificial
  Synthetic oligonucleotide
caagagtgtgccgctgaagtacgagaggcaactaacgcgatggactttacgcgcc

SEQ ID NO: 340911 - DNA, 55 bp, Artificial
  Synthetic oligonucleotide
caagagtgttcctatgattttgggagtggtagggataatcatgcagtctcgttgc

SEQ ID NO: 340912 - DNA, 58 bp, Artificial
  Synthetic oligonucleotide
caagagttagggatacgaattaactttgacaaaactactccatcacctgtcaatgaga

SEQ ID NO: 340913 - DNA, 55 bp, Artificial
  Synthetic oligonucleotide
caagagttatagctatggaaacatcacccactctgcacaggcatggcccgaggca

SEQ ID NO: 340914 - DNA, 57 bp, Artificial
  Synthetic oligonucleotide
caagagttatggacgcgagtgatacttttaggaacacaggggatcccacgattatta

SEQ ID NO: 340915 - DNA, 55 bp, Artificial
  Synthetic oligonucleotide
caagagttcgcctgcgagggcctttccctgtgcaatgactacacgtctttcgacc

SEQ ID NO: 340916 - DNA, 51 bp, Artificial
  Synthetic oligonucleotide
caagagttggggttcttccttagcgtcctccttaacgggaggaacgcttaa

SEQ ID NO: 340917 - DNA, 60 bp, Artificial
  Synthetic oligonucleotide
caagagttgttcgggcgaaaactacttccacgaagcatgcaaagctcactcattgatgat

SEQ ID NO: 340918 - DNA, 56 bp, Artificial
  Synthetic oligonucleotide
caagagttttggcggaagcaatgagccaagtaacaaattcagctaccgtaatgatg

SEQ ID NO: 340919 - DNA, 55 bp, Artificial
  Synthetic oligonucleotide
caagataaatcttaggtccatgaccgatgtggtagactccattccatcgctctta

SEQ ID NO: 340920 - DNA, 55 bp, Artificial
  Synthetic oligonucleotide
caagataacactgttgttatcagactttgcaatgtccataagaggacctctgtac

SEQ ID NO: 340921 - DNA, 51 bp, Artificial
  Synthetic oligonucleotide
caagataacgtttatcacgaattgcaatgtcaccagtagcatagaagcagt

SEQ ID NO: 340922 - DNA, 55 bp, Artificial
  Synthetic oligonucleotide
caagataataacgatagtatccctaactatcgtgacgactggcaatgagaccacc

SEQ ID NO: 340923 - DNA, 55 bp, Artificial
  Synthetic oligonucleotide
caagatacgatggacggctacacagagatagaatgtatagcgtcttatcttgctg

SEQ ID NO: 340924 - DNA, 55 bp, Artificial
  Synthetic oligonucleotide
caagatacgtatcccggggctctctgccgggtgcaacaagataatcctcatgagg

SEQ ID NO: 340925 - DNA, 51 bp, Artificial
  Synthetic oligonucleotide
caagatactagagtatactgtccaagctacagactttaggagtcaagagtt

SEQ ID NO: 340926 - DNA, 58 bp, Artificial
  Synthetic oligonucleotide
caagatactggagcccaaacctcaccacattacgtaggatactgcccgtggggatgcc

SEQ ID NO: 340927 - DNA, 55 bp, Artificial
  Synthetic oligonucleotide
caagatagggagaaatttcgctttgagagcggctgcaactccggaaccgaaagga

SEQ ID NO: 340928 - DNA, 55 bp, Artificial
  Synthetic oligonucleotide
caagatagtatgctggtagatgagcgcagatgggtagttgcgctctccagagcta

SEQ ID NO: 340929 - DNA, 52 bp, Artificial
  Synthetic oligonucleotide
caagatatgcataggatacctaagcaataactcaacagataaagtagacaca

SEQ ID NO: 340930 - DNA, 59 bp, Artificial
  Synthetic oligonucleotide
caagatcacggtccctccgagccgaaaagaggcgacaaaccagatccagatcaacatcc

SEQ ID NO: 340931 - DNA, 60 bp, Artificial
  Synthetic oligonucleotide
caagatcacgtacactcattgtgtctacttgcatggcacaacggggaggaggtctatgag

SEQ ID NO: 340932 - DNA, 55 bp, Artificial
  Synthetic oligonucleotide
caagatcagagcttatagggcattatccagagatttgcctatcagccttgctgat

SEQ ID NO: 340933 - DNA, 60 bp, Artificial
  Synthetic oligonucleotide
caagatcaggaggaatctatgcgcctggtctgcatgctgtacacgccactccgcacaaat

SEQ ID NO: 340934 - DNA, 60 bp, Artificial
  Synthetic oligonucleotide
caagatcagtagtgttttgtttgagctttcatgaatgcaaaactgattgggcattaaatc

SEQ ID NO: 340935 - DNA, 50 bp, Artificial
  Synthetic oligonucleotide
caagatccagtatgtcatcagagcacaattgcatgttggggctaagcagg

SEQ ID NO: 340936 - DNA, 55 bp, Artificial
  Synthetic oligonucleotide
caagatcctaccctacacaacgtacaagctgaggagtctcattcaattgacacac

SEQ ID NO: 340937 - DNA, 55 bp, Artificial
  Synthetic oligonucleotide
caagatcgcttcagggaaaactaggtgcatagaagcctgtgaagttgattactgc

SEQ ID NO: 340938 - DNA, 55 bp, Artificial
  Synthetic oligonucleotide
caagatctattcctcaggatttatgaccgtgccggcaacaacggtagtgcgccgc

SEQ ID NO: 340939 - DNA, 55 bp, Artificial
  Synthetic oligonucleotide
caagatctcaggtcagactctccactacatcccggagaatcaccactccggctcg

SEQ ID NO: 340940 - DNA, 55 bp, Artificial
  Synthetic oligonucleotide
caagatcttgaacattgctttgcacaaacggcctacatttcttctccagaaaccc

SEQ ID NO: 340941 - DNA, 60 bp, Artificial
  Synthetic oligonucleotide
caagatgaccactgggaatacatcattagtgcgactagttcagtgctgtgcggtcttcag

SEQ ID NO: 340942 - DNA, 60 bp, Artificial
  Synthetic oligonucleotide
caagatgactttgtatttgcaaagcctgcagaaatccccttttgcaagccagccttggtc

SEQ ID NO: 340943 - DNA, 55 bp, Artificial
  Synthetic oligonucleotide
caagatgagagggattgttcaccaagaggacgctctgaagctttcagaagacgct

SEQ ID NO: 340944 - DNA, 54 bp, Artificial
  Synthetic oligonucleotide
caagatgagtcagcatacactggggatttgctcatacaggcagaagatacggag

SEQ ID NO: 340945 - DNA, 51 bp, Artificial
  Synthetic oligonucleotide
caagatgataacaaagatgtctgataaagggaagaaaattgttcaagggct

SEQ ID NO: 340946 - DNA, 58 bp, Artificial
  Synthetic oligonucleotide
caagatgatcacgttaaatcatacacgccgagattcatattcgatatttgatgtgtac

SEQ ID NO: 340947 - DNA, 55 bp, Artificial
  Synthetic oligonucleotide
caagatgatcctaacatagatgacagtacgatgataatagggaagaagacctttg

SEQ ID NO: 340948 - DNA, 57 bp, Artificial
  Synthetic oligonucleotide
caagatgattaggtacataatcctaggtttactcacccttgcgtcagcccacggtac

SEQ ID NO: 340949 - DNA, 55 bp, Artificial
  Synthetic oligonucleotide
caagatgccgctctaaccaattagagctaaggaaccatataagtcagaactagag

SEQ ID NO: 340950 - DNA, 55 bp, Artificial
  Synthetic oligonucleotide
caagatgcgagacacagagatctatgcgcccaacttccgtgatggagaacgggtt

SEQ ID NO: 340951 - DNA, 55 bp, Artificial
  Synthetic oligonucleotide
caagatgctgggtcattacacttagactttgggataccccgaactgcagctgagg

SEQ ID NO: 340952 - DNA, 55 bp, Artificial
  Synthetic oligonucleotide
caagatggccagagcttcggctaattacctcgcaggcatgaggggccgcgctgtg

SEQ ID NO: 340953 - DNA, 57 bp, Artificial
  Synthetic oligonucleotide
caagatggcgcaggggatattaaccttttgttattgcaggacaataaccgaagggca

SEQ ID NO: 340954 - DNA, 60 bp, Artificial
  Synthetic oligonucleotide
caagatggctgtgaagacgtgggttgctttggatggctcgatgttctctagggtttcaaa

SEQ ID NO: 340955 - DNA, 60 bp, Artificial
  Synthetic oligonucleotide
caagatggggatatggttgatacaggctttggagctatggattttactgctttacaagac

SEQ ID NO: 340956 - DNA, 55 bp, Artificial
  Synthetic oligonucleotide
caagatgggggttacctgatcaaatagactctgaccaaggaacgcacttcacggc

SEQ ID NO: 340957 - DNA, 60 bp, Artificial
  Synthetic oligonucleotide
caagatgtcagcccagcggatgcacgagaatcagttcggtccggactttgttatggccca

SEQ ID NO: 340958 - DNA, 60 bp, Artificial
  Synthetic oligonucleotide
caagatgtgggacgcgtaatgatctagagctgtgacccatgactcttgatccatctacga

SEQ ID NO: 340959 - DNA, 58 bp, Artificial
  Synthetic oligonucleotide
caagattaacttctatcatgattatgacggacgtttagatactccttttcccaatcaa

SEQ ID NO: 340960 - DNA, 54 bp, Artificial
  Synthetic oligonucleotide
caagattaggtgtggggtcaaagagtgatcccagtccggttcttttagaaccaa

SEQ ID NO: 340961 - DNA, 54 bp, Artificial
  Synthetic oligonucleotide
caagattatcacttggggggcagacactgcggcgtgcggggacatcatctcggg

SEQ ID NO: 340962 - DNA, 56 bp, Artificial
  Synthetic oligonucleotide
caagattatgttacctgacggttcattatacaagaagttccacggtattcctagtg

SEQ ID NO: 340963 - DNA, 57 bp, Artificial
  Synthetic oligonucleotide
caagattcccctataggcttgttggaaacacttgcagaaaagttaacaagtctgtgc

SEQ ID NO: 340964 - DNA, 55 bp, Artificial
  Synthetic oligonucleotide
caagattcctagaacgcagcaaccgcaaatccacatttatgcggctccgtgggat

SEQ ID NO: 340965 - DNA, 55 bp, Artificial
  Synthetic oligonucleotide
caagattcctcccagtggcgggcgggacaagcagtatctatgttgaggtgttgca

SEQ ID NO: 340966 - DNA, 57 bp, Artificial
  Synthetic oligonucleotide
caagattgactagatggtcacctcggtaggaccgagttgccgtacattagaggtaat

SEQ ID NO: 340967 - DNA, 59 bp, Artificial
  Synthetic oligonucleotide
caagattgactagatgtcgaaaatccgttttaacttcgacaagaattatatgattcgca

SEQ ID NO: 340968 - DNA, 57 bp, Artificial
  Synthetic oligonucleotide
caagattgagggataaggatttgattaagatcaattcaaggattaaggctttggtta

SEQ ID NO: 340969 - DNA, 58 bp, Artificial
  Synthetic oligonucleotide
caagattgggtgtgcgcgcgactcggaagacttcggagcggtcacaacctcgtggaag

SEQ ID NO: 340970 - DNA, 60 bp, Artificial
  Synthetic oligonucleotide
caagattgtaagattgctcctttaatggtggcatacatgttggaaagagaactagttcgc

SEQ ID NO: 340971 - DNA, 59 bp, Artificial
  Synthetic oligonucleotide
caagattgttcttaatcgctggatgggaaagctttcctttccacaaggcacggatgtca

SEQ ID NO: 340972 - DNA, 57 bp, Artificial
  Synthetic oligonucleotide
caagatttagaacgtcaacttaccgatttacgagaggaattcaattcattatcacaa

SEQ ID NO: 340973 - DNA, 60 bp, Artificial
  Synthetic oligonucleotide
caagatttattgtcagagacattgaagagacaatgcaccgatgagaccactgctatcggt

SEQ ID NO: 340974 - DNA, 55 bp, Artificial
  Synthetic oligonucleotide
caagatttcaaatctgtggttgcaagaccatatgaggcaatcagagggtgacttg

SEQ ID NO: 340975 - DNA, 55 bp, Artificial
  Synthetic oligonucleotide
caagatttcgttaccaaccagctcaagtctgatgttgatgttgtgtactttgacg

SEQ ID NO: 340976 - DNA, 60 bp, Artificial
  Synthetic oligonucleotide
caagatttgagtgataacccttgtaaagtagacttacacacacagtctatagatggtgca

SEQ ID NO: 340977 - DNA, 55 bp, Artificial
  Synthetic oligonucleotide
caagatttgctcgttggcgcgaacagaggtgaatatgtgaaggatgcgaaggagc

SEQ ID NO: 340978 - DNA, 54 bp, Artificial
  Synthetic oligonucleotide
caagatttgtgcagacatcacaaactagagatgaaatgagcatagagagtttct

SEQ ID NO: 340979 - DNA, 59 bp, Artificial
  Synthetic oligonucleotide
caagattttcagtgattatttgtgattgttagtccgatgatgttgttttacttatcgta

SEQ ID NO: 340980 - DNA, 55 bp, Artificial
  Synthetic oligonucleotide
caagcaaacaaacgatcgaaccttcaaacaatcgaaagcataaacacattcatac

SEQ ID NO: 340981 - DNA, 60 bp, Artificial
  Synthetic oligonucleotide
caagcaaagcatgttcagattcattctacaggagcatgagatggttgactcaaaaggaca

SEQ ID NO: 340982 - DNA, 55 bp, Artificial
  Synthetic oligonucleotide
caagcaaccaaactttctttaaactctctctcttaaactcttcctaaatctcgca

SEQ ID NO: 340983 - DNA, 55 bp, Artificial
  Synthetic oligonucleotide
caagcaacgtcaatggaggacccggagtgaagggatttggtttcaaagccggcaa

SEQ ID NO: 340984 - DNA, 59 bp, Artificial
  Synthetic oligonucleotide
caagcaacgtgctatctacgggacggatctacgaagtacactgataactaactttgcaa

SEQ ID NO: 340985 - DNA, 57 bp, Artificial
  Synthetic oligonucleotide
caagcaactctttggaaaagaatctatcaatactagaaatcatttggtgctcctgag

SEQ ID NO: 340986 - DNA, 58 bp, Artificial
  Synthetic oligonucleotide
caagcaactgaccccagtcagaacgtaggtagtattgtgcgtacccccgatgggcaca

SEQ ID NO: 340987 - DNA, 60 bp, Artificial
  Synthetic oligonucleotide
caagcaagctgtaagaagaatgctgtcaatgaatattgagggacgtgatgcagatgtcaa

SEQ ID NO: 340988 - DNA, 57 bp, Artificial
  Synthetic oligonucleotide
caagcaatacgcaggtaagattttgtaccatcaaccccggaaaactgcgtatatgaa

SEQ ID NO: 340989 - DNA, 55 bp, Artificial
  Synthetic oligonucleotide
caagcaatctccattccagaacgcctataacgtcaagggcaatgccaccagtgcc

SEQ ID NO: 340990 - DNA, 60 bp, Artificial
  Synthetic oligonucleotide
caagcacaaattgatagccagcgtcgcgctgtaaccatcactgaagcatccaatcttaga

SEQ ID NO: 340991 - DNA, 57 bp, Artificial
  Synthetic oligonucleotide
caagcacactgtaaaattaatagaacaagctggaatgagactttacataaggtaagg

SEQ ID NO: 340992 - DNA, 60 bp, Artificial
  Synthetic oligonucleotide
caagcacagtagatgaacagatccagtggatgtttaggccacaaaatcccgtaccagtgg

SEQ ID NO: 340993 - DNA, 60 bp, Artificial
  Synthetic oligonucleotide
caagcacattgatgatgataggttcgttcagactgaaacaaagttttatccaataaatcc

SEQ ID NO: 340994 - DNA, 56 bp, Artificial
  Synthetic oligonucleotide
caagcacattgtaacattagtaaaagggcatggaatgagactttaggacaggtagt

SEQ ID NO: 340995 - DNA, 57 bp, Artificial
  Synthetic oligonucleotide
caagcacattgtaacattagtaatagtaattggaacagcactttacaacaggtagcg

SEQ ID NO: 340996 - DNA, 56 bp, Artificial
  Synthetic oligonucleotide
caagcacattgtaacattagtagagaacaatggaatgacactttaagacaagtggc

SEQ ID NO: 340997 - DNA, 60 bp, Artificial
  Synthetic oligonucleotide
caagcacattgtaatcttagtagtgcagaatgggaaaacactttagaacagatagttata

SEQ ID NO: 340998 - DNA, 59 bp, Artificial
  Synthetic oligonucleotide
caagcacatttatgtacatggcgttggaatcaaccattttagaagcggacattttggat

SEQ ID NO: 340999 - DNA, 60 bp, Artificial
  Synthetic oligonucleotide
caagcaccgaaatgtcaatgagaggagtgagagtcagcaaaatgggtgtagatgaatact

SEQ ID NO: 341000 - DNA, 52 bp, Artificial
  Synthetic oligonucleotide
caagcaccgaggcaaacaatccatgtgcaaagacaattgtcaagttgtttga

SEQ ID NO: 341001 - DNA, 55 bp, Artificial
  Synthetic oligonucleotide
caagcactcctgtttccccggagcgaggtataggctgtacccacgaccgaaagcc

SEQ ID NO: 341002 - DNA, 60 bp, Artificial
  Synthetic oligonucleotide
caagcactcgcatgttcctgaggattcgggaaacgaacacaacggaatgtgactctaaga

SEQ ID NO: 341003 - DNA, 60 bp, Artificial
  Synthetic oligonucleotide
caagcacttcacttcttgacctgatctgccttgcatgctagcacgatacaaacttgctgc

SEQ ID NO: 341004 - DNA, 58 bp, Artificial
  Synthetic oligonucleotide
caagcacttctgtttccccggctctcgttgatatgctccaacagggcaaaaacaattg

SEQ ID NO: 341005 - DNA, 60 bp, Artificial
  Synthetic oligonucleotide
caagcagacgaaatctgtattggatacctgagcaacaactcaacggagaaggtggacaca

SEQ ID NO: 341006 - DNA, 60 bp, Artificial
  Synthetic oligonucleotide
caagcagcatctgcataacacaatccatcttgagaaggcaaatggatccgacgaagataa

SEQ ID NO: 341007 - DNA, 60 bp, Artificial
  Synthetic oligonucleotide
caagcagcgaccggagtatttgcagaaactggaaaccgttatgatgtccacgatccaaga

SEQ ID NO: 341008 - DNA, 55 bp, Artificial
  Synthetic oligonucleotide
caagcagcggaggattggttcaagactcatgtgccaataatggggctcgaggctg

SEQ ID NO: 341009 - DNA, 51 bp, Artificial
  Synthetic oligonucleotide
caagcagcggtggcttcacaatcaactcgtaggaggtctcatggtagaacg

SEQ ID NO: 341010 - DNA, 59 bp, Artificial
  Synthetic oligonucleotide
caagcagctgagatgctatgtctgttgcgtctgtggggccacccactacttgagtcccg

SEQ ID NO: 341011 - DNA, 55 bp, Artificial
  Synthetic oligonucleotide
caagcagctttaaaagattggacagataaaatggtagcggatagagcggcagtcg

SEQ ID NO: 341012 - DNA, 60 bp, Artificial
  Synthetic oligonucleotide
caagcagggtaacatacttgggttccatgtggcagggaatgcgcgacttcggcagggata

SEQ ID NO: 341013 - DNA, 60 bp, Artificial
  Synthetic oligonucleotide
caagcaggtctagagtacatagaacagttgctgcatcaggagtcagaaagaggcaatctg

SEQ ID NO: 341014 - DNA, 58 bp, Artificial
  Synthetic oligonucleotide
caagcaggtgatgtagaggagaacccagggccatctttatctaaattgtaccagattt

SEQ ID NO: 341015 - DNA, 55 bp, Artificial
  Synthetic oligonucleotide
caagcagtattgtattggtaggactcatacttacattcatcatgtgggcatgcag

SEQ ID NO: 341016 - DNA, 52 bp, Artificial
  Synthetic oligonucleotide
caagcagtgaggatcatcaaaaccttgtatcaaagcagtaagtactacatag

SEQ ID NO: 341017 - DNA, 60 bp, Artificial
  Synthetic oligonucleotide
caagcagtgttacactggagtgttggccgagcaccttgctaaggcctgggacgcggccaa

SEQ ID NO: 341018 - DNA, 55 bp, Artificial
  Synthetic oligonucleotide
caagcagtgttgttctggtaggactcatactcgcatttatactgtgggcatgcag

SEQ ID NO: 341019 - DNA, 55 bp, Artificial
  Synthetic oligonucleotide
caagcagttaccaatatattgaaccgtgtaggttgtcgtataaatacttggtgtg

SEQ ID NO: 341020 - DNA, 55 bp, Artificial
  Synthetic oligonucleotide
caagcagttgatagcgaggaagtcagagaatactgcagatcaaagggctggattg

SEQ ID NO: 341021 - DNA, 55 bp, Artificial
  Synthetic oligonucleotide
caagcataacgggaaactatgtaaactaagaggagtagccccattgcatttgggt

SEQ ID NO: 341022 - DNA, 58 bp, Artificial
  Synthetic oligonucleotide
caagcataagagctggaaatgacatagcagcctgcttaaggaaaaacgggaaaagagt

SEQ ID NO: 341023 - DNA, 55 bp, Artificial
  Synthetic oligonucleotide
caagcatacagacgatcatcaggctgaccactctgcatgttcatttggatatgtg

SEQ ID NO: 341024 - DNA, 54 bp, Artificial
  Synthetic oligonucleotide
caagcatacggggagttgggacacaaggtttcaacctacgccgggtgtcaagga

SEQ ID NO: 341025 - DNA, 58 bp, Artificial
  Synthetic oligonucleotide
caagcatagttccatacaatccacaaagaagagtggtttaatcttgcgtcgcttaact

SEQ ID NO: 341026 - DNA, 50 bp, Artificial
  Synthetic oligonucleotide
caagcatattgtaacatcagtgaaggcaaatggaataacactctacaaag

SEQ ID NO: 341027 - DNA, 60 bp, Artificial
  Synthetic oligonucleotide
caagcatcacttcaacataagacgcatcataacagttaaacgtaatggtaatgaatacgt

SEQ ID NO: 341028 - DNA, 57 bp, Artificial
  Synthetic oligonucleotide
caagcatcagggaaagtaacagtttctaccaagagaagtcaacaaaccataatccca

SEQ ID NO: 341029 - DNA, 60 bp, Artificial
  Synthetic oligonucleotide
caagcatccccattgatgtcttaggccctttagatgtaggaccagtacttgaatctgtcc

SEQ ID NO: 341030 - DNA, 60 bp, Artificial
  Synthetic oligonucleotide
caagcatcgtctctacgaaagcgttgctttacgaaacatatctgtcttctatatgtggtg

SEQ ID NO: 341031 - DNA, 55 bp, Artificial
  Synthetic oligonucleotide
caagcatctctaccaaagcagtaagtagtacatgtaatgcaacccttagccatag

SEQ ID NO: 341032 - DNA, 51 bp, Artificial
  Synthetic oligonucleotide
caagcatgagagagcaagccaagaatagaataatcatccgaggagtgaacg

SEQ ID NO: 341033 - DNA, 60 bp, Artificial
  Synthetic oligonucleotide
caagcatgagcgctgaaatattagaagcagcctcagaagaggtaccattttttggggcag

SEQ ID NO: 341034 - DNA, 55 bp, Artificial
  Synthetic oligonucleotide
caagcatgcatgatacagtcatacgtactattagatggccatactcacatattcg

SEQ ID NO: 341035 - DNA, 57 bp, Artificial
  Synthetic oligonucleotide
caagcatgcctatagttggcctaaactaccatttctttgctgttgggggagaaccta

SEQ ID NO: 341036 - DNA, 59 bp, Artificial
  Synthetic oligonucleotide
caagcattactggactactattaacaagagatggaggaagtaatagtagtacaaatgaa

SEQ ID NO: 341037 - DNA, 60 bp, Artificial
  Synthetic oligonucleotide
caagcattcaacaataatagtcaatctttattgcaatgttttgggctgagaagccttaca

SEQ ID NO: 341038 - DNA, 59 bp, Artificial
  Synthetic oligonucleotide
caagcattccattaaatgtaatacctggaacaaaaatcactgtggcttacttgaatgaa

SEQ ID NO: 341039 - DNA, 60 bp, Artificial
  Synthetic oligonucleotide
caagcattcccattgatgtaataggtcctgcagatgtaggccctgtactagaatctgtcc

SEQ ID NO: 341040 - DNA, 60 bp, Artificial
  Synthetic oligonucleotide
caagcattggctgagagaatgattcctcaatgtctctcttggaggcccctcggaggttca

SEQ ID NO: 341041 - DNA, 60 bp, Artificial
  Synthetic oligonucleotide
caagcatttaatctgctaagatccgatccaagagtattacgtgaatttatcaatcaagac

SEQ ID NO: 341042 - DNA, 60 bp, Artificial
  Synthetic oligonucleotide
caagcatttgcctctttgtactgggaagtatcttgtttatagtctcttgtctgatgaaag

SEQ ID NO: 341043 - DNA, 54 bp, Artificial
  Synthetic oligonucleotide
caagccaaagatgtaaaattggaacgactccgaaaggataggcaacgaacgttc

SEQ ID NO: 341044 - DNA, 59 bp, Artificial
  Synthetic oligonucleotide
caagccaattgaagtgggcactcggtgagaatatggcaccggagaaagtggactttgag

SEQ ID NO: 341045 - DNA, 55 bp, Artificial
  Synthetic oligonucleotide
caagccaatttcagatgtatacattaaagaactcgtcgctgagttaagatggcag

SEQ ID NO: 341046 - DNA, 60 bp, Artificial
  Synthetic oligonucleotide
caagccacaacaacaagacatttcaaacaccagagccacacgggatgagttcgataggtg

SEQ ID NO: 341047 - DNA, 59 bp, Artificial
  Synthetic oligonucleotide
caagccacacagaatttttgattagaggtgcagttggctcagggaaatcaacaggttta

SEQ ID NO: 341048 - DNA, 55 bp, Artificial
  Synthetic oligonucleotide
caagccaccaagcattgtcacaactgaagctgccttctattgcttcgcatatggg

SEQ ID NO: 341049 - DNA, 54 bp, Artificial
  Synthetic oligonucleotide
caagccacgttagagattatatagctgagaaattctctccttacaccaaaacac

SEQ ID NO: 341050 - DNA, 52 bp, Artificial
  Synthetic oligonucleotide
caagccactctcacaggaggtcagtacgcgtgcaaggagcaggtaatggtga

SEQ ID NO: 341051 - DNA, 51 bp, Artificial
  Synthetic oligonucleotide
caagccagaacatagaaaaaaccgcaaatctgaacgaccatgacacaacta

SEQ ID NO: 341052 - DNA, 55 bp, Artificial
  Synthetic oligonucleotide
caagccagacttgataggaacagagaggagagcttgaacatggttaaggacttcg

SEQ ID NO: 341053 - DNA, 60 bp, Artificial
  Synthetic oligonucleotide
caagccagctctgataatttggggagttcatcactctggatcggctaatgagcagaccag

SEQ ID NO: 341054 - DNA, 59 bp, Artificial
  Synthetic oligonucleotide
caagccaggaccggtctattaccaggattatgcaggtcccgtgtatcacagagccccac

SEQ ID NO: 341055 - DNA, 60 bp, Artificial
  Synthetic oligonucleotide
caagccaggtttgaagctgtagcgtggtcagcgaccgcctgccatgatgggaagaagtgg

SEQ ID NO: 341056 - DNA, 56 bp, Artificial
  Synthetic oligonucleotide
caagccagtggtttccgtggcgtacgaacaaaagttcattacgtcattgatcttcc

SEQ ID NO: 341057 - DNA, 60 bp, Artificial
  Synthetic oligonucleotide
caagccatcttggacatgatcgctggtgcccactggggagtcctggcgggcatagcgtac

SEQ ID NO: 341058 - DNA, 59 bp, Artificial
  Synthetic oligonucleotide
caagccattatagataaatcttaatcttaggggcagcaaaacataattatctactcgac

SEQ ID NO: 341059 - DNA, 60 bp, Artificial
  Synthetic oligonucleotide
caagccatttatgcccctcccatcgcaggatacattacatgcacatcagacattacagga

SEQ ID NO: 341060 - DNA, 57 bp, Artificial
  Synthetic oligonucleotide
caagccccggaccccgccataagggcggcgctgcaaagccagccgtccggtatagca

SEQ ID NO: 341061 - DNA, 60 bp, Artificial
  Synthetic oligonucleotide
caagccctagacgatttatatacctcatggctcgatgtgatttactatttccgagattcc

SEQ ID NO: 341062 - DNA, 58 bp, Artificial
  Synthetic oligonucleotide
caagccctatggacatatttagatataacaaagaacaacaaagattagtttatcatac

SEQ ID NO: 341063 - DNA, 60 bp, Artificial
  Synthetic oligonucleotide
caagccctgtggccagcagagatgtgagtaccacagtcgctagagttgtggacacattag

SEQ ID NO: 341064 - DNA, 55 bp, Artificial
  Synthetic oligonucleotide
caagcccttcttgactggaacctctactggtaaaattgaggtttatcttagcctg

SEQ ID NO: 341065 - DNA, 60 bp, Artificial
  Synthetic oligonucleotide
caagccgaagcagcactagagaagttggtcgtcttgcatgctgcgagcacagctagctgc

SEQ ID NO: 341066 - DNA, 56 bp, Artificial
  Synthetic oligonucleotide
caagccgctcagtgccttttacgtcgacccgtcagcgcccgacacgcaaggggact

SEQ ID NO: 341067 - DNA, 58 bp, Artificial
  Synthetic oligonucleotide
caagccgggaaaacccgtgtcattgatgtggcagggtttgggcatgcaatagttggcc

SEQ ID NO: 341068 - DNA, 55 bp, Artificial
  Synthetic oligonucleotide
caagccgttagccctagaggttttgcctgaccatgtccacgtgtttgcattatgc

SEQ ID NO: 341069 - DNA, 54 bp, Artificial
  Synthetic oligonucleotide
caagccgtttgtgacagcatgctccccacgcatgtcaactatgacgacacttat

SEQ ID NO: 341070 - DNA, 57 bp, Artificial
  Synthetic oligonucleotide
caagcctacgggtgaactgatatgcccaatcactgaaattaaaacagttccccacat

SEQ ID NO: 341071 - DNA, 55 bp, Artificial
  Synthetic oligonucleotide
caagcctcaccgcaccccagaccattaattgaatacgaagaacgactagccgacg

SEQ ID NO: 341072 - DNA, 58 bp, Artificial
  Synthetic oligonucleotide
caagcctcacgcaaggcagactatacctgtcgcgtgttcggaggtgtctacccattta

SEQ ID NO: 341073 - DNA, 55 bp, Artificial
  Synthetic oligonucleotide
caagcctcactgatattcgaatcgaccacaccggaacagttgccatgccggactc

SEQ ID NO: 341074 - DNA, 60 bp, Artificial
  Synthetic oligonucleotide
caagcctccaaaagtgtcacagtcagcttacatttggattccgcgctctcaaagggacaa

SEQ ID NO: 341075 - DNA, 52 bp, Artificial
  Synthetic oligonucleotide
caagcctcgagggaatttcgaattttatggccggacgtgctttaaagtttaa

SEQ ID NO: 341076 - DNA, 59 bp, Artificial
  Synthetic oligonucleotide
caagcctctctatatattgagcgcacataccggtcggcagtaggtatacgcaaggcggt

SEQ ID NO: 341077 - DNA, 60 bp, Artificial
  Synthetic oligonucleotide
caagcctgcacccgacccagtcggtactgcttgtgagtttgattcgccagagtgtagaga

SEQ ID NO: 341078 - DNA, 55 bp, Artificial
  Synthetic oligonucleotide
caagcctggcacgatgcttatgcaggtatcgtggtgaatcgcagtcagttggagc

SEQ ID NO: 341079 - DNA, 55 bp, Artificial
  Synthetic oligonucleotide
caagcctgtagtaaccactcaactactggtcaatggtagcctagcagaagaggag

SEQ ID NO: 341080 - DNA, 55 bp, Artificial
  Synthetic oligonucleotide
caagccttactggctgcggagggcccagggacataacaatggcatgtgctggggc

SEQ ID NO: 341081 - DNA, 59 bp, Artificial
  Synthetic oligonucleotide
caagccttattcactgaatgagcagctttgttacgttgatttgggtaatgaatatccgg

SEQ ID NO: 341082 - DNA, 55 bp, Artificial
  Synthetic oligonucleotide
caagccttgcatgcctgtaaatggttgcgtcattagggccattgcttctgcttta

SEQ ID NO: 341083 - DNA, 60 bp, Artificial
  Synthetic oligonucleotide
caagcgaatggcaagacgataatatttgttcccacgcagcaccaggctaacactttggct

SEQ ID NO: 341084 - DNA, 58 bp, Artificial
  Synthetic oligonucleotide
caagcgaccgaggtgacccaaccgcaggcatccgactccctagacagatcctctcccc

SEQ ID NO: 341085 - DNA, 55 bp, Artificial
  Synthetic oligonucleotide
caagcgacgctcttgaagcggttcagtcaacctcagtgtacactcccaagtaccc

SEQ ID NO: 341086 - DNA, 56 bp, Artificial
  Synthetic oligonucleotide
caagcgagaaccaagataacgtggtgaaaactctgtccacaagttttctcgcaagt

SEQ ID NO: 341087 - DNA, 57 bp, Artificial
  Synthetic oligonucleotide
caagcgaggtagttgcaacggcggctggagtactggtagtcccagtgtgcgtcaagt

SEQ ID NO: 341088 - DNA, 55 bp, Artificial
  Synthetic oligonucleotide
caagcgagtccccccgtgggagacgtcgcaagagagccaaagcgaggaagaaacc

SEQ ID NO: 341089 - DNA, 54 bp, Artificial
  Synthetic oligonucleotide
caagcgcaagaggaggataatggggatgtaggctttccagtcagacctcaagtg

SEQ ID NO: 341090 - DNA, 55 bp, Artificial
  Synthetic oligonucleotide
caagcgcaagtctgggatcttgctgtgcaatcgcaacaaaccgcaagttgggtaa

SEQ ID NO: 341091 - DNA, 60 bp, Artificial
  Synthetic oligonucleotide
caagcgcacaaattctctagtctgttattctgggcacccattgaatccattcttgtgtct

SEQ ID NO: 341092 - DNA, 52 bp, Artificial
  Synthetic oligonucleotide
caagcgcattggtggtgatgaatgataaacctctgcaaacccaatcatcatg

SEQ ID NO: 341093 - DNA, 60 bp, Artificial
  Synthetic oligonucleotide
caagcgcattgtaacattagtaaaggagaatggaatggcactttaagcaagatagttaca

SEQ ID NO: 341094 - DNA, 55 bp, Artificial
  Synthetic oligonucleotide
caagcgcgattgggcagaattaagaaccagtgtggggaaacgtcttgcgtctatg

SEQ ID NO: 341095 - DNA, 60 bp, Artificial
  Synthetic oligonucleotide
caagcgctttcccggtttcgtatctcctcgcaaactcgcatgtgcaatcgtgaacaccgc

SEQ ID NO: 341096 - DNA, 60 bp, Artificial
  Synthetic oligonucleotide
caagcggaactgtcattgacagcataatcacagctcagggcagaccagtggagactgtag

SEQ ID NO: 341097 - DNA, 60 bp, Artificial
  Synthetic oligonucleotide
caagcggacaccaatacccgctctgatattgtcgaaagggacccaagcagtcatgaggct

SEQ ID NO: 341098 - DNA, 56 bp, Artificial
  Synthetic oligonucleotide
caagcggacctacgatacggccttccctaccccgatatcgaatgcacggaggagat

SEQ ID NO: 341099 - DNA, 57 bp, Artificial
  Synthetic oligonucleotide
caagcggattaactgttgggcatcgtttagggatttagagcgtgattcatgtaacgg

SEQ ID NO: 341100 - DNA, 55 bp, Artificial
  Synthetic oligonucleotide
caagcggcagctgacacaggggccagtcaaaacaaaggggtcagtcaaaattacc

SEQ ID NO: 341101 - DNA, 58 bp, Artificial
  Synthetic oligonucleotide
caagcggccttttcaatagccagaataactatacaccccattgctgcttggtggaggg

SEQ ID NO: 341102 - DNA, 57 bp, Artificial
  Synthetic oligonucleotide
caagcggctaatactgcagcccagacacaagttgtcaacaaccagggagccttacct

SEQ ID NO: 341103 - DNA, 60 bp, Artificial
  Synthetic oligonucleotide
caagcgggagtggccgtcagcattggtggcgtgaatattagagcaggaaggataacagcc

SEQ ID NO: 341104 - DNA, 60 bp, Artificial
  Synthetic oligonucleotide
caagcggggagcaaatgctgataatttggggaatacatcatcccaatgatgatacagaac

SEQ ID NO: 341105 - DNA, 51 bp, Artificial
  Synthetic oligonucleotide
caagcggggtttccctgagggaaatcccccgccgcactacgaccaccgtaa

SEQ ID NO: 341106 - DNA, 55 bp, Artificial
  Synthetic oligonucleotide
caagcggtgttggatgttctcaagtctgaattggacccaagctctgcgattgtgc

SEQ ID NO: 341107 - DNA, 55 bp, Artificial
  Synthetic oligonucleotide
caagcgtaacctcactttggagatggatgctcgcgccagcgtagtggaggacgct

SEQ ID NO: 341108 - DNA, 53 bp, Artificial
  Synthetic oligonucleotide
caagcgtaatagttgagtgttacgagaccgactcccatcgagacattcccttg

SEQ ID NO: 341109 - DNA, 60 bp, Artificial
  Synthetic oligonucleotide
caagcgtagcgatacgctttgcttctcggagattttgctaccccgtgattttgtgcagag

SEQ ID NO: 341110 - DNA, 53 bp, Artificial
  Synthetic oligonucleotide
caagcgtcgccaatggtattaaggttgggattgacatagcagacagtgttgct

SEQ ID NO: 341111 - DNA, 60 bp, Artificial
  Synthetic oligonucleotide
caagcgtctgctcttggaacgcggctttgagagaactaatcgtcctatcactggccctat

SEQ ID NO: 341112 - DNA, 55 bp, Artificial
  Synthetic oligonucleotide
caagcgtgataaagctgtgttagacggccgcaagagttggggttcttccttagcg

SEQ ID NO: 341113 - DNA, 56 bp, Artificial
  Synthetic oligonucleotide
caagcgtgatagagccattgtttgatatgcctgatataacatctatgcaattatgg

SEQ ID NO: 341114 - DNA, 55 bp, Artificial
  Synthetic oligonucleotide
caagcgtggccgggtgatcgctgttgaggttcgtgcctgatgacgaccaagcgag

SEQ ID NO: 341115 - DNA, 55 bp, Artificial
  Synthetic oligonucleotide
caagcgtgtgccgctaaagccgaaccacaatgtgcggtttatggaggaagcactg

SEQ ID NO: 341116 - DNA, 60 bp, Artificial
  Synthetic oligonucleotide
caagcgtgttgtagattctctccgcgccatttgtgctgatctagaagggtcgagctctcc

SEQ ID NO: 341117 - DNA, 52 bp, Artificial
  Synthetic oligonucleotide
caagcgttcttacgccgtgagacgcaccgatcgtaaacatcggtcgagtact

SEQ ID NO: 341118 - DNA, 60 bp, Artificial
  Synthetic oligonucleotide
caagcgtttctgcgtcaagtctgcatacgttttgggtaagatatggatggacgagaatat

SEQ ID NO: 341119 - DNA, 55 bp, Artificial
  Synthetic oligonucleotide
caagcgtttctggaggttgaatcatcatgtcacctacaatcaccaggaggctgct

SEQ ID NO: 341120 - DNA, 50 bp, Artificial
  Synthetic oligonucleotide
caagcgtttgcggcttaccgatgaatgtagacgcgagcgcacgacccacg

SEQ ID NO: 341121 - DNA, 55 bp, Artificial
  Synthetic oligonucleotide
caagctaaacagtctcaacatatctggcacatttgctgttcgcacatctgacatg

SEQ ID NO: 341122 - DNA, 60 bp, Artificial
  Synthetic oligonucleotide
caagctaaagaccttgacagtagaactagatatctgtttgattatggtgtcacaccttaa

SEQ ID NO: 341123 - DNA, 60 bp, Artificial
  Synthetic oligonucleotide
caagctaataccaagacaccaatcacggacctcacaaacatcacagatgctcagggtcga

SEQ ID NO: 341124 - DNA, 60 bp, Artificial
  Synthetic oligonucleotide
caagctacagatcactttacctgcgttgggtgaacgccgtgtgcggtgacgcataatccc

SEQ ID NO: 341125 - DNA, 59 bp, Artificial
  Synthetic oligonucleotide
caagctaccggatgggccaccctgctctcagaggtccaaatttctactgatggacgctt

SEQ ID NO: 341126 - DNA, 55 bp, Artificial
  Synthetic oligonucleotide
caagctactccacagctggttacgattataaacaaatagttgaagcgctcaatgc

SEQ ID NO: 341127 - DNA, 55 bp, Artificial
  Synthetic oligonucleotide
caagctagacttgatgcgttgccaaacaaccaagccaggattatacaagctggtt

SEQ ID NO: 341128 - DNA, 55 bp, Artificial
  Synthetic oligonucleotide
caagctagtagaagatccaacctctctgaacatcgctatgggaatgagtccagcg

SEQ ID NO: 341129 - DNA, 51 bp, Artificial
  Synthetic oligonucleotide
caagctagtatgatcattaacacaatattaatgtttgtcagtacattaggt

SEQ ID NO: 341130 - DNA, 60 bp, Artificial
  Synthetic oligonucleotide
caagctagtgctggtaccagcacccctgtgtgtgttccctgtgctcctcaggtacaggcg

SEQ ID NO: 341131 - DNA, 55 bp, Artificial
  Synthetic oligonucleotide
caagctataacaattgagggagataaggcagaggtatacaatggtaacacaggag

SEQ ID NO: 341132 - DNA, 60 bp, Artificial
  Synthetic oligonucleotide
caagctatgatcaagcgtttctggaggttgaatcatcatgtcacttataatcaccaggag

SEQ ID NO: 341133 - DNA, 60 bp, Artificial
  Synthetic oligonucleotide
caagctatgcaaactatggccactggtgaatgttgggaggtctcaaagaatggtagagat

SEQ ID NO: 341134 - DNA, 56 bp, Artificial
  Synthetic oligonucleotide
caagctcaagcaacaactttagcaagtatttcatcaatagtaggtgcattaccaac

SEQ ID NO: 341135 - DNA, 55 bp, Artificial
  Synthetic oligonucleotide
caagctcatcttcggttacaatcctgggagcgggagtctggaggtgatctccaac

SEQ ID NO: 341136 - DNA, 60 bp, Artificial
  Synthetic oligonucleotide
caagctcatttacaggcactctacctggtccagcacgaagtctggagaccgttggcggca

SEQ ID NO: 341137 - DNA, 55 bp, Artificial
  Synthetic oligonucleotide
caagctcgctcatgaaggaataagctccgtacttgtgcaagccgtacggagccct

SEQ ID NO: 341138 - DNA, 60 bp, Artificial
  Synthetic oligonucleotide
caagctctactctcttcgtacgctcctgatacagtcggatacgagtaccttcgtgatctg

SEQ ID NO: 341139 - DNA, 60 bp, Artificial
  Synthetic oligonucleotide
caagctctagagttgattcagttggagttagagttacaccgtatgatcatgtgtcgcggc

SEQ ID NO: 341140 - DNA, 55 bp, Artificial
  Synthetic oligonucleotide
caagctctatagcgacggttacatcgccctatcctattcaggctcaggaccgctc

SEQ ID NO: 341141 - DNA, 55 bp, Artificial
  Synthetic oligonucleotide
caagctctgaagaaaccacgcggcaagcgtggctcaaagaaacggcccgcagctg

SEQ ID NO: 341142 - DNA, 51 bp, Artificial
  Synthetic oligonucleotide
caagctctgcaatcgggtttgtcccatccgaccatgaatcatccagaaatg

SEQ ID NO: 341143 - DNA, 60 bp, Artificial
  Synthetic oligonucleotide
caagctgaaccaaagtagtgacccgacaatgtgccaccaacatgaccccagataacatcc

SEQ ID NO: 341144 - DNA, 50 bp, Artificial
  Synthetic oligonucleotide
caagctgaggtgcctgacagagcctggagtagtgggtttgagtggataac

SEQ ID NO: 341145 - DNA, 55 bp, Artificial
  Synthetic oligonucleotide
caagctgatgtaactcatagggtactggctagcttttcgaaatgcacaccgcttc

SEQ ID NO: 341146 - DNA, 60 bp, Artificial
  Synthetic oligonucleotide
caagctgcatcattgagtctttaagagtcatcagctgtgaataagtcaaccctgttggaa

SEQ ID NO: 341147 - DNA, 55 bp, Artificial
  Synthetic oligonucleotide
caagctgcctctcccggcagacgtaccgctgaagacggaaatgcctgctaagatc

SEQ ID NO: 341148 - DNA, 60 bp, Artificial
  Synthetic oligonucleotide
caagctggatagagcttgatgaaattggagaagatgttgccccaattgagcacattgcaa

SEQ ID NO: 341149 - DNA, 60 bp, Artificial
  Synthetic oligonucleotide
caagctggtaaactgggttagatgtgaagctatgatgctggcacagcgaggcttctggcg

SEQ ID NO: 341150 - DNA, 52 bp, Artificial
  Synthetic oligonucleotide
caagctggtagtgctgtgtatagtcccacgcccagtgggtccatggtaacat

SEQ ID NO: 341151 - DNA, 55 bp, Artificial
  Synthetic oligonucleotide
caagctgtatccggagtactacaagaactgatgacattgagctatctacagggac

SEQ ID NO: 341152 - DNA, 60 bp, Artificial
  Synthetic oligonucleotide
caagctgtccagctacacctatgctttcaaagctagtactctccagcatgttccgtggta

SEQ ID NO: 341153 - DNA, 60 bp, Artificial
  Synthetic oligonucleotide
caagctgtcctacaaaatcaaccagcagacaactatcggcaatgcagcaacgcttggacc

SEQ ID NO: 341154 - DNA, 60 bp, Artificial
  Synthetic oligonucleotide
caagctgtgaagtaatgatacctaagggcacaggtgacatctcagtagactgttcaggag

SEQ ID NO: 341155 - DNA, 60 bp, Artificial
  Synthetic oligonucleotide
caagctgttagatttgttgctgcgtagtaaacgtattcggtgccacgcactaggcatggc

SEQ ID NO: 341156 - DNA, 59 bp, Artificial
  Synthetic oligonucleotide
caagctgttgtgctgttaagttccccatgtagactccagaagttagaggcctttcagac

SEQ ID NO: 341157 - DNA, 55 bp, Artificial
  Synthetic oligonucleotide
caagcttatgtgtatggcgcaaggaccgtacactgggtttgtccaaccggcaggg

SEQ ID NO: 341158 - DNA, 55 bp, Artificial
  Synthetic oligonucleotide
caagcttcatcagaggaacaagagtggccccaaggggacaactatctaccagagg

SEQ ID NO: 341159 - DNA, 55 bp, Artificial
  Synthetic oligonucleotide
caagcttgaagcattaccgtgttggcggcacaaagtgggaagatgtacatggagc

SEQ ID NO: 341160 - DNA, 60 bp, Artificial
  Synthetic oligonucleotide
caagcttgaggaccaaatattgcattggcactatgtgcgtctggaacatgcaatgttatt

SEQ ID NO: 341161 - DNA, 57 bp, Artificial
  Synthetic oligonucleotide
caagcttgcactaagcacttcgccaatcgacctggttaacaccaggccggcggcgtt

SEQ ID NO: 341162 - DNA, 60 bp, Artificial
  Synthetic oligonucleotide
caagcttggcatctgggtaatggggtctccatagagtggaggcagggaagatatagcaca

SEQ ID NO: 341163 - DNA, 54 bp, Artificial
  Synthetic oligonucleotide
caagcttgggtttgagatagaatctgcaaaagaggaggatacagagcttatttt

SEQ ID NO: 341164 - DNA, 55 bp, Artificial
  Synthetic oligonucleotide
caagcttggtggcatataaaagacgcagccaacaaaccattactcaaatggagag

SEQ ID NO: 341165 - DNA, 51 bp, Artificial
  Synthetic oligonucleotide
caagcttgtatgcacaatggtctacccccctgaactcttagttggtgctaa

SEQ ID NO: 341166 - DNA, 55 bp, Artificial
  Synthetic oligonucleotide
caagcttgtcttagatgttcagacggcgttggatgaaaggggtttcagagctgtg

SEQ ID NO: 341167 - DNA, 59 bp, Artificial
  Synthetic oligonucleotide
caagcttgttccactgtatgccgttgtttctgaggaaccaatctacatagtcaccgaat

SEQ ID NO: 341168 - DNA, 50 bp, Artificial
  Synthetic oligonucleotide
caagctttccacactatcctagtcctcggctcaggaactttcctcttggc

SEQ ID NO: 341169 - DNA, 53 bp, Artificial
  Synthetic oligonucleotide
caagctttcgtctctaactcccctcgcgacgcctcgctctttccgatcgagcc

SEQ ID NO: 341170 - DNA, 55 bp, Artificial
  Synthetic oligonucleotide
caagctttctgattgacccacctagaacaaccaaatgcttcattccacctatctc

SEQ ID NO: 341171 - DNA, 60 bp, Artificial
  Synthetic oligonucleotide
caagctttgaagagaagaagatagtggctgctcacttggggctcaagatgaaatgtataa

SEQ ID NO: 341172 - DNA, 54 bp, Artificial
  Synthetic oligonucleotide
caagcttttagagattgctcctaattgttatggcaacatccctctgatgaaagc

SEQ ID NO: 341173 - DNA, 60 bp, Artificial
  Synthetic oligonucleotide
caagcttttaggactggtgtgtgtcttgatccagatgttggtgaaacattaaagccacaa

SEQ ID NO: 341174 - DNA, 60 bp, Artificial
  Synthetic oligonucleotide
caagctttttcagatccgcatttgcgcttggtggcaatcacgagacataggaagctttta

SEQ ID NO: 341175 - DNA, 52 bp, Artificial
  Synthetic oligonucleotide
caaggaaaaggtctacctatcatgggtaccagcacacaaagggattggagga

SEQ ID NO: 341176 - DNA, 57 bp, Artificial
  Synthetic oligonucleotide
caaggaaaagtgtggggataggaccaggacaaacaatctatgcaacaggacaaataa

SEQ ID NO: 341177 - DNA, 59 bp, Artificial
  Synthetic oligonucleotide
caaggaaactggtagactgaacatcaatggaccaacacgcactaagctggaacccagtg

SEQ ID NO: 341178 - DNA, 55 bp, Artificial
  Synthetic oligonucleotide
caaggaaagaagcgtaaggtccagaaactgaaatttagagatgctcgagatagaa

SEQ ID NO: 341179 - DNA, 58 bp, Artificial
  Synthetic oligonucleotide
caaggaaagacatagttgtgaggaaatgttacgaaaatcactattattcatgcgctac

SEQ ID NO: 341180 - DNA, 59 bp, Artificial
  Synthetic oligonucleotide
caaggaaagtcacgcactggtaagagtttgctgatgagtcaggttacaaaggattttca

SEQ ID NO: 341181 - DNA, 60 bp, Artificial
  Synthetic oligonucleotide
caaggaacaagatggtatcagctggctgtagctttgaaacagtgcctaccatgcacactt

SEQ ID NO: 341182 - DNA, 56 bp, Artificial
  Synthetic oligonucleotide
caaggaaccagccaaaatggtttcggaatgtcttaagcattgcccctataatgttc

SEQ ID NO: 341183 - DNA, 54 bp, Artificial
  Synthetic oligonucleotide
caaggaacccctgctggtgtagaaggttcccaaatgtacttttgggcctgtgga

SEQ ID NO: 341184 - DNA, 55 bp, Artificial
  Synthetic oligonucleotide
caaggaagattcctgtagaatgtaaattagagttacctcaaggaacagtaggatt

SEQ ID NO: 341185 - DNA, 60 bp, Artificial
  Synthetic oligonucleotide
caaggaagcctgagtgagttgactgactacagctacaacgggctgatgtcagccactgca

SEQ ID NO: 341186 - DNA, 60 bp, Artificial
  Synthetic oligonucleotide
caaggaaggacaccactgtcattggtggatgtatgtttttggagcacattgttttatgtc

SEQ ID NO: 341187 - DNA, 53 bp, Artificial
  Synthetic oligonucleotide
caaggaagtactcatcccatgtcggtctcacagagggaccaattcctttccgt

SEQ ID NO: 341188 - DNA, 57 bp, Artificial
  Synthetic oligonucleotide
caaggaagtcccagcgttaacggcagttgaaactggcgccacgaatcctctagagcc

SEQ ID NO: 341189 - DNA, 55 bp, Artificial
  Synthetic oligonucleotide
caaggaagttcagataaagatcaacagttaaagatcaaggctgaataacactggg

SEQ ID NO: 341190 - DNA, 60 bp, Artificial
  Synthetic oligonucleotide
caaggaatatcatatagatattcagttggacaaccaatgggagcgtatactagttgagct

SEQ ID NO: 341191 - DNA, 56 bp, Artificial
  Synthetic oligonucleotide
caaggaatcctatgggcaggtaaaaagattatgaaggctaataagggatggtcaac

SEQ ID NO: 341192 - DNA, 57 bp, Artificial
  Synthetic oligonucleotide
caaggaattctctttcacattctttaataagggccaaaagacagctaaagatagaga

SEQ ID NO: 341193 - DNA, 55 bp, Artificial
  Synthetic oligonucleotide
caaggaattggtagagctatctacaacatacccagaagaataaggcagggctttg

SEQ ID NO: 341194 - DNA, 60 bp, Artificial
  Synthetic oligonucleotide
caaggacaaaccctctggagcaaaacaaacgatgctggatcggaccgcgtgatggtatca

SEQ ID NO: 341195 - DNA, 55 bp, Artificial
  Synthetic oligonucleotide
caaggacacttcaccatgttgggggtacgagaccgcctggctattctgccacgcc

SEQ ID NO: 341196 - DNA, 56 bp, Artificial
  Synthetic oligonucleotide
caaggacagaaccccgtacaggtccctaatcagattcccaatcggaacagctcctg

SEQ ID NO: 341197 - DNA, 60 bp, Artificial
  Synthetic oligonucleotide
caaggacagatgccgaatctcctgggtccaggattggcgtgcccaatctgtctaggtgcc

SEQ ID NO: 341198 - DNA, 59 bp, Artificial
  Synthetic oligonucleotide
caaggacaggacactgttaccgggatcacttttccattatctaatgttctcatatgtcc

SEQ ID NO: 341199 - DNA, 55 bp, Artificial
  Synthetic oligonucleotide
caaggacatgcagattggcccagcagctgcattcggaaggctaatatgtgccgac

SEQ ID NO: 341200 - DNA, 55 bp, Artificial
  Synthetic oligonucleotide
caaggacattatgtcacaaaatttgccctgatgctatgtgaattcactcctcaag

SEQ ID NO: 341201 - DNA, 55 bp, Artificial
  Synthetic oligonucleotide
caaggaccagaagaagtgatcgaattggtcaataacgtggaggagcacctggtac

SEQ ID NO: 341202 - DNA, 54 bp, Artificial
  Synthetic oligonucleotide
caaggaccataaaacttatggtgattctactatatacgaagtaaaccgaacgac

SEQ ID NO: 341203 - DNA, 59 bp, Artificial
  Synthetic oligonucleotide
caaggaccataaacccaagaaatcgagggctgtctgtgtctgaggtggcaagcaccttc

SEQ ID NO: 341204 - DNA, 60 bp, Artificial
  Synthetic oligonucleotide
caaggacccaacccctatccatgagtctgatgacaattccaccgctgatgacaagtgctt

SEQ ID NO: 341205 - DNA, 56 bp, Artificial
  Synthetic oligonucleotide
caaggaccctcaatatcccgtttgggagttgactattagagtttggtctgagctaa

SEQ ID NO: 341206 - DNA, 56 bp, Artificial
  Synthetic oligonucleotide
caaggaccctcgcatcacccaagggtcctgttatccagatgtacaccaatatagac

SEQ ID NO: 341207 - DNA, 55 bp, Artificial
  Synthetic oligonucleotide
caaggaccgtatgaaacatgcccctcctatgagtcatggctccaaacacagtatg

SEQ ID NO: 341208 - DNA, 60 bp, Artificial
  Synthetic oligonucleotide
caaggacctagcaagccatttggatgcccagtctatattattaagggtgacatgtcagat

SEQ ID NO: 341209 - DNA, 60 bp, Artificial
  Synthetic oligonucleotide
caaggacctcaggaccgtcatgcactgacgactctttctaatttgctccgctggtacaca

SEQ ID NO: 341210 - DNA, 59 bp, Artificial
  Synthetic oligonucleotide
caaggacctgaacatgaatttattagagccttgattaagaggaactgccatattgtaac

SEQ ID NO: 341211 - DNA, 60 bp, Artificial
  Synthetic oligonucleotide
caaggacggagctcgtctggatgtctggcgcggccctgctactatgtcgcagggtttgtt

SEQ ID NO: 341212 - DNA, 57 bp, Artificial
  Synthetic oligonucleotide
caaggacggattctgtagctcgggtggagaatccctcctactacgtgcgtctcccta

SEQ ID NO: 341213 - DNA, 55 bp, Artificial
  Synthetic oligonucleotide
caaggactaagaactgctgacatagaagttgctgacagggactttccgctgggga

SEQ ID NO: 341214 - DNA, 55 bp, Artificial
  Synthetic oligonucleotide
caaggactatcagattcctcttgcatggggcgtcttaggatctcaagtcactcag

SEQ ID NO: 341215 - DNA, 55 bp, Artificial
  Synthetic oligonucleotide
caaggacttgaactcgccctcttatgagggacgcatgccccaaggacaaaagggg

SEQ ID NO: 341216 - DNA, 59 bp, Artificial
  Synthetic oligonucleotide
caaggagaaaacgaaacaactcgaagaactccagcatcgtattgacaatatggtggata

SEQ ID NO: 341217 - DNA, 60 bp, Artificial
  Synthetic oligonucleotide
caaggagaaccgattcattgaaattggagtgacacggagagaagttcacatatactatct

SEQ ID NO: 341218 - DNA, 57 bp, Artificial
  Synthetic oligonucleotide
caaggagacatccagaggtgtgcagaggcaatggttgggtacgcacagcaaggggtg

SEQ ID NO: 341219 - DNA, 60 bp, Artificial
  Synthetic oligonucleotide
caaggagatgtgatgtatgatggcatgcaagattgggccagtggtcagttggactggact

SEQ ID NO: 341220 - DNA, 60 bp, Artificial
  Synthetic oligonucleotide
caaggagcaaatacccttcatttcaaggtgtgattctataagattcacacatgagaaatt

SEQ ID NO: 341221 - DNA, 60 bp, Artificial
  Synthetic oligonucleotide
caaggagcaaggaactgttgtagagtatctaggacaactgtcatatgtcatgcaccattc

SEQ ID NO: 341222 - DNA, 60 bp, Artificial
  Synthetic oligonucleotide
caaggagcagtcttcccacgagcagtcactactgacggctatgtttgggccgactcgcag

SEQ ID NO: 341223 - DNA, 60 bp, Artificial
  Synthetic oligonucleotide
caaggagcattgctagggactaaacatagcaatgggaccattaaagacagaacaccatat

SEQ ID NO: 341224 - DNA, 60 bp, Artificial
  Synthetic oligonucleotide
caaggagccgtgccctgcgtctgatactggtgagccccttttctttattactgatgctga

SEQ ID NO: 341225 - DNA, 60 bp, Artificial
  Synthetic oligonucleotide
caaggagcgattgggatcttggtcatggcacgatggggctgaaatcatctacttcaagta

SEQ ID NO: 341226 - DNA, 55 bp, Artificial
  Synthetic oligonucleotide
caaggagcgtgactaaacgttgcccggcggatgtgaccgtttatctcagttcaca

SEQ ID NO: 341227 - DNA, 56 bp, Artificial
  Synthetic oligonucleotide
caaggagcttgaaacccacaaaaaaagttgttgtgacgggcagtgcccatattgta

SEQ ID NO: 341228 - DNA, 55 bp, Artificial
  Synthetic oligonucleotide
caaggaggaatcatccttaaacaatggtgcacaacatcatgtgcatttggggacc

SEQ ID NO: 341229 - DNA, 50 bp, Artificial
  Synthetic oligonucleotide
caaggaggagtaccagtaggggacatctataaaagatggataattatagg

SEQ ID NO: 341230 - DNA, 60 bp, Artificial
  Synthetic oligonucleotide
caaggaggcagctatcatccataaatgtctccaagccgagtgtgccgtcgtcagcgaggt

SEQ ID NO: 341231 - DNA, 55 bp, Artificial
  Synthetic oligonucleotide
caaggaggcgatcttcagttacatttcccgcctagataggcagagacgtccggtc

SEQ ID NO: 341232 - DNA, 55 bp, Artificial
  Synthetic oligonucleotide
caaggaggcgtggcctgagtgactaagttccgttggggactttccaaggaggcgc

SEQ ID NO: 341233 - DNA, 55 bp, Artificial
  Synthetic oligonucleotide
caaggagggcgcatgttgaccaagtcaattggagaaaacctcaactagagaaaac

SEQ ID NO: 341234 - DNA, 58 bp, Artificial
  Synthetic oligonucleotide
caaggagggtacgattgctattgttggtaccattgacggcgtacctgctacaattgaa

SEQ ID NO: 341235 - DNA, 60 bp, Artificial
  Synthetic oligonucleotide
caaggaggtgctcttcaaacgcagaatggtaaagacattgtgcgcgagtccctcactggg

SEQ ID NO: 341236 - DNA, 55 bp, Artificial
  Synthetic oligonucleotide
caaggaggtgtcactcagctactcaactggtgcacttgccagttgcatgggcccc

SEQ ID NO: 341237 - DNA, 55 bp, Artificial
  Synthetic oligonucleotide
caaggagtcgcaagcaaaggagttcacgaaagttgttagggacaaactagttggc

SEQ ID NO: 341238 - DNA, 60 bp, Artificial
  Synthetic oligonucleotide
caaggagtctacccagcgctccttagtggtcaatcatgtacggctgctccatttcatgac

SEQ ID NO: 341239 - DNA, 52 bp, Artificial
  Synthetic oligonucleotide
caaggagtctggataaacccgagtaacaacttagggttttgcaaagatccgg

SEQ ID NO: 341240 - DNA, 56 bp, Artificial
  Synthetic oligonucleotide
caaggagtcttcagctacagccgacacttcccggactcaccccgggtgaaaagcaa

SEQ ID NO: 341241 - DNA, 52 bp, Artificial
  Synthetic oligonucleotide
caaggagtggaccaagtgttcgaagtcccaaaacttaccgaggtccgtccta

SEQ ID NO: 341242 - DNA, 52 bp, Artificial
  Synthetic oligonucleotide
caaggagttgtacaatcgatgcattacggcagagtcgcgtgacttctgcaac

SEQ ID NO: 341243 - DNA, 54 bp, Artificial
  Synthetic oligonucleotide
caaggataaaagaggaccgctgggtttacaaatacaatgtcgaacaaacaagga

SEQ ID NO: 341244 - DNA, 60 bp, Artificial
  Synthetic oligonucleotide
caaggataagagccactcatactctcctcgtgggattgagttgaaatataattcagattt

SEQ ID NO: 341245 - DNA, 59 bp, Artificial
  Synthetic oligonucleotide
caaggatagaacatggacgataaccaagctacaaacggtgggcgcccatcacctcttca

SEQ ID NO: 341246 - DNA, 60 bp, Artificial
  Synthetic oligonucleotide
caaggatagcgcggagcagcctcacacacctttgatcctgagtactaaccatgacatcta

SEQ ID NO: 341247 - DNA, 55 bp, Artificial
  Synthetic oligonucleotide
caaggatataacccggaacggatacctcattaaaggctgcgggaagtacgctcgc

SEQ ID NO: 341248 - DNA, 55 bp, Artificial
  Synthetic oligonucleotide
caaggatatgacatgaccaaagcttgttttaagggagacagagtgaacagcccca

SEQ ID NO: 341249 - DNA, 55 bp, Artificial
  Synthetic oligonucleotide
caaggatatgatggcgacatctgagccatcattgaagcaagtcagccgtgctttc

SEQ ID NO: 341250 - DNA, 60 bp, Artificial
  Synthetic oligonucleotide
caaggatattacatctgcattgtggggggaaactctgcaccaatatatgtaccaacactt

SEQ ID NO: 341251 - DNA, 55 bp, Artificial
  Synthetic oligonucleotide
caaggatatttccgaaaagctttctgtacctctcaacacattgaagtcatggaga

SEQ ID NO: 341252 - DNA, 55 bp, Artificial
  Synthetic oligonucleotide
caaggatcattggccagaggcaaatcaggccggagtgggatcattcgggccgggg

SEQ ID NO: 341253 - DNA, 56 bp, Artificial
  Synthetic oligonucleotide
caaggatctgttggaacaacctattgttactccaaaccggatggtagaccaccatc

SEQ ID NO: 341254 - DNA, 56 bp, Artificial
  Synthetic oligonucleotide
caaggatgcgggatacccgaccatcaatgcccccactaagaccaaacttcacccga

SEQ ID NO: 341255 - DNA, 56 bp, Artificial
  Synthetic oligonucleotide
caaggatggaactccctacctttacacaggcggttcgcatatttcgcaagggtggc

SEQ ID NO: 341256 - DNA, 56 bp, Artificial
  Synthetic oligonucleotide
caaggatggatattaagtcctttgatatatcagagtactttagataatatcctaca

SEQ ID NO: 341257 - DNA, 54 bp, Artificial
  Synthetic oligonucleotide
caaggatggcagcgcactatcagtcatacctgacagcagcaacccccgactact

SEQ ID NO: 341258 - DNA, 59 bp, Artificial
  Synthetic oligonucleotide
caaggatgtctccgtctttctccatgtaggtttggacatcgcttgagcttttagctccc

SEQ ID NO: 341259 - DNA, 60 bp, Artificial
  Synthetic oligonucleotide
caaggatgttggcgatttaaaacagtatgatagcgatgagccggagcctagatcgctagc

SEQ ID NO: 341260 - DNA, 53 bp, Artificial
  Synthetic oligonucleotide
caaggattcacgcttaggttacgaaaccttcaaggttattaatggttggtcca

SEQ ID NO: 341261 - DNA, 55 bp, Artificial
  Synthetic oligonucleotide
caaggattcatgactttaggtatagccaattggctaagttgggaataaaccctta

SEQ ID NO: 341262 - DNA, 58 bp, Artificial
  Synthetic oligonucleotide
caaggattgatcagtacctccatggtgcaacaagtcttgaagaatgcttgattaggct

SEQ ID NO: 341263 - DNA, 60 bp, Artificial
  Synthetic oligonucleotide
caaggattgcagcgcttgagaagacgtcgcaaatacactctgatactatcctcaggatca

SEQ ID NO: 341264 - DNA, 59 bp, Artificial
  Synthetic oligonucleotide
caaggattgtgaccgtgagaaaccatactggttagtgagtggtggcgcctggccccaga

SEQ ID NO: 341265 - DNA, 59 bp, Artificial
  Synthetic oligonucleotide
caaggattgtgatatgggtttgtcctaccataccagatcctacaggtaagctcttaata

SEQ ID NO: 341266 - DNA, 55 bp, Artificial
  Synthetic oligonucleotide
caaggatttactcgtacctcgttatcttaactagatgacgtctagacaatcccga

SEQ ID NO: 341267 - DNA, 55 bp, Artificial
  Synthetic oligonucleotide
caaggatttctgtttgaggatggctagagacacaaacctacattcccaaactgtc

SEQ ID NO: 341268 - DNA, 58 bp, Artificial
  Synthetic oligonucleotide
caaggattttcaaaatctgtttatcaatgggaatatcacaatgctgaacgatccgctg

SEQ ID NO: 341269 - DNA, 55 bp, Artificial
  Synthetic oligonucleotide
caaggcaaacagggataaacgattacaagacgatgatcagtattacatgcctaag

SEQ ID NO: 341270 - DNA, 55 bp, Artificial
  Synthetic oligonucleotide
caaggcaaacgtgaactttgaagccacggcggtcactgagacgcgtgataccatc

SEQ ID NO: 341271 - DNA, 53 bp, Artificial
  Synthetic oligonucleotide
caaggcaaaggagtgtgttccgtcttgtgttaagaaccttcaatccctttatt

SEQ ID NO: 341272 - DNA, 55 bp, Artificial
  Synthetic oligonucleotide
caaggcaaaggttatgaagtcagaattccaaataacgtttccaggactggtggtg

SEQ ID NO: 341273 - DNA, 55 bp, Artificial
  Synthetic oligonucleotide
caaggcaactggtttcaccacagctgctgaactcgcaaaacgtcaacctccggtc

SEQ ID NO: 341274 - DNA, 60 bp, Artificial
  Synthetic oligonucleotide
caaggcaagaaaaaatgtagatgttggatctgcgcagaagaaggccattacgccaatgaa

SEQ ID NO: 341275 - DNA, 59 bp, Artificial
  Synthetic oligonucleotide
caaggcaatctttcaggaccgatcccatccgttcggagccctccaacggaagcagcgca

SEQ ID NO: 341276 - DNA, 60 bp, Artificial
  Synthetic oligonucleotide
caaggcacaaacaggcgtcgatcatggacctaccggcccatgtatcgaaagcccaggatg

SEQ ID NO: 341277 - DNA, 60 bp, Artificial
  Synthetic oligonucleotide
caaggcacaacttatatatatgcgaatttacagtgcaatggctgaaccctatgataaagg

SEQ ID NO: 341278 - DNA, 57 bp, Artificial
  Synthetic oligonucleotide
caaggcacacatcacactataagaggtctgctgtcagttaccagcaccaagccagaa

SEQ ID NO: 341279 - DNA, 60 bp, Artificial
  Synthetic oligonucleotide
caaggcaccaaacgatcatatgaacagatggagactggtggggaacgccaggatgccaca

SEQ ID NO: 341280 - DNA, 60 bp, Artificial
  Synthetic oligonucleotide
caaggcactggtcaggctgcggattacaaaagtactcaagcagctatagatcaaataacc

SEQ ID NO: 341281 - DNA, 58 bp, Artificial
  Synthetic oligonucleotide
caaggcatctgctggctctagaagattgctgtccgaagagtctggtgacgactgcata

SEQ ID NO: 341282 - DNA, 60 bp, Artificial
  Synthetic oligonucleotide
caaggcatgacctactcttctccgactaccatcctcctcgaccgccacagcaccctgctt

SEQ ID NO: 341283 - DNA, 55 bp, Artificial
  Synthetic oligonucleotide
caaggcatggcggagttgtacgaccgtatgcgtggtctctacggtgacaccccag

SEQ ID NO: 341284 - DNA, 60 bp, Artificial
  Synthetic oligonucleotide
caaggcattatcaatatacagctgcattgcaagcagtgttgtgttagtaggactcatact

SEQ ID NO: 341285 - DNA, 60 bp, Artificial
  Synthetic oligonucleotide
caaggccagcaagaggcttacagtcctcggaaaagatgcaggtgcattaaccgaagatcc

SEQ ID NO: 341286 - DNA, 55 bp, Artificial
  Synthetic oligonucleotide
caaggcccggacttcgacaagaacgcaatcatgctcttcctgaaatctcagtggg

SEQ ID NO: 341287 - DNA, 52 bp, Artificial
  Synthetic oligonucleotide
caaggccgaccacacaaggccatcgggtcccacgttaagggtcacaacagtg

SEQ ID NO: 341288 - DNA, 58 bp, Artificial
  Synthetic oligonucleotide
caaggccgattaattcgatggcaaatgtggctgtcccactacacatttaatgtcaatc

SEQ ID NO: 341289 - DNA, 54 bp, Artificial
  Synthetic oligonucleotide
caaggccgctaatccccaacctcgccgacgcgttaataatcgccggcttggtag

SEQ ID NO: 341290 - DNA, 59 bp, Artificial
  Synthetic oligonucleotide
caaggccgctacggaatgtgcaacgtttaaccgatcgagtacgtgatacattctcacat

SEQ ID NO: 341291 - DNA, 58 bp, Artificial
  Synthetic oligonucleotide
caaggccgctgaatgggttaacaggcccatgtacaggaagcccaggatatatcggacg

SEQ ID NO: 341292 - DNA, 55 bp, Artificial
  Synthetic oligonucleotide
caaggccggagtaagaaaattcccatgattattttaagccagcggcccgtatggc

SEQ ID NO: 341293 - DNA, 55 bp, Artificial
  Synthetic oligonucleotide
caaggccgtcgtttgatcgataggtggagagagagtgaagcgaggtagcaaacgc

SEQ ID NO: 341294 - DNA, 58 bp, Artificial
  Synthetic oligonucleotide
caaggcctacttcccgaagcttacgtacattgtcttccaactcgagcgcatcactacc

SEQ ID NO: 341295 - DNA, 60 bp, Artificial
  Synthetic oligonucleotide
caaggcctatggaagcgggacctacatgggacaagcaactcggcttgtggccatgaaaga

SEQ ID NO: 341296 - DNA, 55 bp, Artificial
  Synthetic oligonucleotide
caaggccttcacaaaatgtggtcacgtcaaacaagatgggacttcttctggccta

SEQ ID NO: 341297 - DNA, 54 bp, Artificial
  Synthetic oligonucleotide
caaggcctttctgtgttcacaatatctgaacctttaccccgttgcccggcaacg

SEQ ID NO: 341298 - DNA, 60 bp, Artificial
  Synthetic oligonucleotide
caaggcgaaagaccatctgggatgtttgacactgtcgtcctctgcgaggcctatgacacc

SEQ ID NO: 341299 - DNA, 55 bp, Artificial
  Synthetic oligonucleotide
caaggcgaattaggaattgagctagacacgggtcgtattaagatcggtgatggtg

SEQ ID NO: 341300 - DNA, 55 bp, Artificial
  Synthetic oligonucleotide
caaggcgagaatacagagcgggcagcgtgggaggtttatgtatgagcttgtagca

SEQ ID NO: 341301 - DNA, 60 bp, Artificial
  Synthetic oligonucleotide
caaggcgcacctactatgaatctgttgtgcgcccccaacaggagatcgtatcatcagtct

SEQ ID NO: 341302 - DNA, 55 bp, Artificial
  Synthetic oligonucleotide
caaggcgcacttgaattgacactcatcagggtggatcgcccaaccaagtacagag

SEQ ID NO: 341303 - DNA, 60 bp, Artificial
  Synthetic oligonucleotide
caaggcgccttgggccatggcaattcactcaatttccgatattcccatcacgacagtggt

SEQ ID NO: 341304 - DNA, 55 bp, Artificial
  Synthetic oligonucleotide
caaggcgggctatggatcgtccatggagccttgcaggtttctgcgtgcgctcagg

SEQ ID NO: 341305 - DNA, 50 bp, Artificial
  Synthetic oligonucleotide
caaggcgtagactctactaagaaagagtgtggcgttgctctggaagccgt

SEQ ID NO: 341306 - DNA, 55 bp, Artificial
  Synthetic oligonucleotide
caaggcgtggttgaactattcaaccgtatgaaaatcgcctatggaaggacaccgg

SEQ ID NO: 341307 - DNA, 55 bp, Artificial
  Synthetic oligonucleotide
caaggctcacttgggttacacaaggaggttctaatagtgaacaattaatccggcc

SEQ ID NO: 341308 - DNA, 60 bp, Artificial
  Synthetic oligonucleotide
caaggctccaattgaaacgttcttattaccactcatcgcggtccatgcttatgacttatc

SEQ ID NO: 341309 - DNA, 55 bp, Artificial
  Synthetic oligonucleotide
caaggctcctagttgacaaacaatatcgggtcactaaagtggatgggcgttcaat

SEQ ID NO: 341310 - DNA, 51 bp, Artificial
  Synthetic oligonucleotide
caaggctcgctttacgctggctgtgggggacaatcgcgtgcttgacatggc

SEQ ID NO: 341311 - DNA, 57 bp, Artificial
  Synthetic oligonucleotide
caaggctcttggaatcaagaatgtggcggggacttcggagtctgaaagaaaagctct

SEQ ID NO: 341312 - DNA, 56 bp, Artificial
  Synthetic oligonucleotide
caaggctgacttaggccagcttctctggaaacccacggaggaagccgataggggag

SEQ ID NO: 341313 - DNA, 60 bp, Artificial
  Synthetic oligonucleotide
caaggcttctgcggcagcgtcgttagctgtttggcaaccgcctctagcacttcttccgtc

SEQ ID NO: 341314 - DNA, 55 bp, Artificial
  Synthetic oligonucleotide
caaggcttgtgaattgactgactcaagttggatagaactcgatgagataggggag

SEQ ID NO: 341315 - DNA, 60 bp, Artificial
  Synthetic oligonucleotide
caagggaacagcgtaaattgatctggtgtgattcaggattaatgttgtgtgctattaatc

SEQ ID NO: 341316 - DNA, 58 bp, Artificial
  Synthetic oligonucleotide
caagggaacatgtacactgacacatagaatggttgaagaatcttaccgaaacagaaaa

SEQ ID NO: 341317 - DNA, 59 bp, Artificial
  Synthetic oligonucleotide
caagggaagagaaatgatctacaatccgtcgtggataccatccaggctgggaatgggtc

SEQ ID NO: 341318 - DNA, 56 bp, Artificial
  Synthetic oligonucleotide
caagggaataacactggtaatgaaagtagatgttacatgaaccactgtaacacttc

SEQ ID NO: 341319 - DNA, 50 bp, Artificial
  Synthetic oligonucleotide
caagggaattatgaattcatgaataaatggccgcgctagcggaaatggca

SEQ ID NO: 341320 - DNA, 54 bp, Artificial
  Synthetic oligonucleotide
caagggaattatgaattcatgaataattggccgcgccagcggaagtaacaacga

SEQ ID NO: 341321 - DNA, 60 bp, Artificial
  Synthetic oligonucleotide
caagggaattctgcggaattgtttgcacaacaagaggctttcgagttcgaggagcacata

SEQ ID NO: 341322 - DNA, 55 bp, Artificial
  Synthetic oligonucleotide
caagggacagattgctctcagcaggggctacaagcaagcgcaccacacctagaca

SEQ ID NO: 341323 - DNA, 60 bp, Artificial
  Synthetic oligonucleotide
caagggacagcagacttatgctgttcctgcgtaccagtctggtgccaccagcaagcgtgt

SEQ ID NO: 341324 - DNA, 55 bp, Artificial
  Synthetic oligonucleotide
caagggacgataaaactgtatgtgaggaacctgggtgcttagacaactaacgtgt

SEQ ID NO: 341325 - DNA, 59 bp, Artificial
  Synthetic oligonucleotide
caagggacgatggcagcacaagttattttctcgtatcttaagagcggcagtggagttac

SEQ ID NO: 341326 - DNA, 60 bp, Artificial
  Synthetic oligonucleotide
caagggacggagaagcttacaataacttattcatcgtcaatgatgtgggagatcaatggt

SEQ ID NO: 341327 - DNA, 55 bp, Artificial
  Synthetic oligonucleotide
caagggacgtatgccttaaccatatatatcaaccggcttaggtatcgttacagcg

SEQ ID NO: 341328 - DNA, 55 bp, Artificial
  Synthetic oligonucleotide
caagggactgagactagtgagggaagccctccaatacctgggagctctggcggtg

SEQ ID NO: 341329 - DNA, 60 bp, Artificial
  Synthetic oligonucleotide
caagggagaacgtagcagttatacaggttggtggcccagatgtacttgacataactgctg

SEQ ID NO: 341330 - DNA, 58 bp, Artificial
  Synthetic oligonucleotide
caagggagatcaactcgacgtcgtctggttgccttcttggcgttgcggtgttgcacct

SEQ ID NO: 341331 - DNA, 55 bp, Artificial
  Synthetic oligonucleotide
caagggagatgtatagtgaacagccgcaacgcagatcaaccctccgtctgcgagg

SEQ ID NO: 341332 - DNA, 55 bp, Artificial
  Synthetic oligonucleotide
caagggagcacatggtatgcacatggagaaatagtgggagatataagacaagcac

SEQ ID NO: 341333 - DNA, 60 bp, Artificial
  Synthetic oligonucleotide
caagggagctgtacctgggagcatgcaggggagacgtgagagtgacgcctacatttgtgg

SEQ ID NO: 341334 - DNA, 60 bp, Artificial
  Synthetic oligonucleotide
caagggagctgtcttcaaatcaaaccttccaattgaagattgtgacactgcctgtcagac

SEQ ID NO: 341335 - DNA, 55 bp, Artificial
  Synthetic oligonucleotide
caagggagtgtgctcgtaacaggggtgtccatacacaccaatgagcgtaggtggc

SEQ ID NO: 341336 - DNA, 57 bp, Artificial
  Synthetic oligonucleotide
caagggattctaagctgactacttcgtctaataaagttgaacaaacatagcccattg

SEQ ID NO: 341337 - DNA, 55 bp, Artificial
  Synthetic oligonucleotide
caagggattggtgctgatgtccatcatcttgggcattggtatgacgcacgcctga

SEQ ID NO: 341338 - DNA, 58 bp, Artificial
  Synthetic oligonucleotide
caagggcatggtagacaggtatgggctgtgcgagtctgacaccgagaagccagccccc

SEQ ID NO: 341339 - DNA, 50 bp, Artificial
  Synthetic oligonucleotide
caagggccaaaggaaccttttagagactatgtagaccggttctttaaaac

SEQ ID NO: 341340 - DNA, 60 bp, Artificial
  Synthetic oligonucleotide
caagggccacagagggagccacacaatgaatggacattagagctattagaggaacttaag

SEQ ID NO: 341341 - DNA, 55 bp, Artificial
  Synthetic oligonucleotide
caagggcccagtttagacttcgctttgtctctcttgagacgcaatatcaggcagg

SEQ ID NO: 341342 - DNA, 59 bp, Artificial
  Synthetic oligonucleotide
caagggccccagagagaaccatacaatgagtggatgttggaactgttagaagatcttaa

SEQ ID NO: 341343 - DNA, 59 bp, Artificial
  Synthetic oligonucleotide
caagggccgcagagggaaccatacaatgaatgggcactagagcttttagaggagcttaa

SEQ ID NO: 341344 - DNA, 55 bp, Artificial
  Synthetic oligonucleotide
caagggcgagtttggaaagatggatcggaaagcaagaaaagtcgacgattggcca

SEQ ID NO: 341345 - DNA, 60 bp, Artificial
  Synthetic oligonucleotide
caagggcggttgtcctgtaaggaagactacaggtatgcgatatcatcaaccaatgagata

SEQ ID NO: 341346 - DNA, 52 bp, Artificial
  Synthetic oligonucleotide
caagggcgttaaggcggtagtcgtaaagattactgagggttctaatccagga

SEQ ID NO: 341347 - DNA, 55 bp, Artificial
  Synthetic oligonucleotide
caagggctgtaagtgccaacctctcatggctagggccgcgaagtctgtcggagtg

SEQ ID NO: 341348 - DNA, 55 bp, Artificial
  Synthetic oligonucleotide
caagggcttcgaagggagtaccaaagcttgtggttgtcggccttctccgctctcc

SEQ ID NO: 341349 - DNA, 57 bp, Artificial
  Synthetic oligonucleotide
caaggggatgtgagggtccctgtaaggtacagtcgtttgaatctcgacacgatgtcg

SEQ ID NO: 341350 - DNA, 60 bp, Artificial
  Synthetic oligonucleotide
caaggggcaattagagaaatgctaggagacggaacatcagagacaactagtgtgaacgtc

SEQ ID NO: 341351 - DNA, 57 bp, Artificial
  Synthetic oligonucleotide
caaggggcatcgtgattttgcgtaaggcttgatccgtataaccatacggcaacctta

SEQ ID NO: 341352 - DNA, 60 bp, Artificial
  Synthetic oligonucleotide
caaggggcgtccacattgtgagacgacgtcttgacacgtcggataggatcgtgaacggca

SEQ ID NO: 341353 - DNA, 55 bp, Artificial
  Synthetic oligonucleotide
caaggggctttacaagtgctaaaggaagtaatcaatgaggaagcatcggagtggg

SEQ ID NO: 341354 - DNA, 52 bp, Artificial
  Synthetic oligonucleotide
caagggggcttctccctccctacccgcaagggtgtttatgtcgctcccaccg

SEQ ID NO: 341355 - DNA, 55 bp, Artificial
  Synthetic oligonucleotide
caaggggtatgaactatgaaactccaatgtttagtaaggtggcagctctgatttg

SEQ ID NO: 341356 - DNA, 60 bp, Artificial
  Synthetic oligonucleotide
caaggggtggagaattctgatggagtggattcagcatatataactgctagtatgccagct

SEQ ID NO: 341357 - DNA, 60 bp, Artificial
  Synthetic oligonucleotide
caaggggttgtgctgaggcggaagatcgccaactgcgatcatcggactgaaagcgtcaag

SEQ ID NO: 341358 - DNA, 57 bp, Artificial
  Synthetic oligonucleotide
caagggtacgtcagatcacaggtgcaaacgatggtcactaaagtgagtagaggtttt

SEQ ID NO: 341359 - DNA, 59 bp, Artificial
  Synthetic oligonucleotide
caagggtacgtgggaggaatcgacgatgtggatcgccccagcacgcagcctgtacgtcg

SEQ ID NO: 341360 - DNA, 55 bp, Artificial
  Synthetic oligonucleotide
caagggtactcagggatggctgacccactaggaggtcgacgtgccaactgatgtc

SEQ ID NO: 341361 - DNA, 54 bp, Artificial
  Synthetic oligonucleotide
caagggtcaatgacccttcacttttcgaccgccagtatacacccagagtttaaa

SEQ ID NO: 341362 - DNA, 57 bp, Artificial
  Synthetic oligonucleotide
caagggtcagcatgctaccggagcccggctccgtgtacacgttgcccatggagtaca

SEQ ID NO: 341363 - DNA, 56 bp, Artificial
  Synthetic oligonucleotide
caagggtcttagcgggcgatgttgtgcgagcgttatataataagagtctcactgac

SEQ ID NO: 341364 - DNA, 59 bp, Artificial
  Synthetic oligonucleotide
caagggtcttcatgtcgagagaatttgattcgctttaggtttacagcagttgagcgtct

SEQ ID NO: 341365 - DNA, 54 bp, Artificial
  Synthetic oligonucleotide
caagggtgacgaagatcgcattttttaaagcccacgcttttaaagctgagttct

SEQ ID NO: 341366 - DNA, 57 bp, Artificial
  Synthetic oligonucleotide
caagggtgacgacattaacccgaaatggttggaagctggcaagcctagtgcaattga

SEQ ID NO: 341367 - DNA, 56 bp, Artificial
  Synthetic oligonucleotide
caagggtgagaagcaaatcattacagatctccaatatacagctatgttagatcaag

SEQ ID NO: 341368 - DNA, 58 bp, Artificial
  Synthetic oligonucleotide
caagggtgtgaagtcgtaaaaccaagcattttaatggacgcacatcattccgcacgta

SEQ ID NO: 341369 - DNA, 50 bp, Artificial
  Synthetic oligonucleotide
caagggtgttaaccgtttgggtgttcgtatagacgaataccaaccctacc

SEQ ID NO: 341370 - DNA, 60 bp, Artificial
  Synthetic oligonucleotide
caagggttatcaatctgacttgtgctgctgcaatatgagttgggccacagatgaggatga

SEQ ID NO: 341371 - DNA, 60 bp, Artificial
  Synthetic oligonucleotide
caagggttattgaagctagcagtatcaatgatacagtagcttttagaatggtttatggta

SEQ ID NO: 341372 - DNA, 60 bp, Artificial
  Synthetic oligonucleotide
caagggttcagattatgcttgacaacacttgcgaagacgtccatataacatgtggccata

SEQ ID NO: 341373 - DNA, 52 bp, Artificial
  Synthetic oligonucleotide
caagggttgtaccggcattaggtcatccactctcttcgcgggactttctagc

SEQ ID NO: 341374 - DNA, 60 bp, Artificial
  Synthetic oligonucleotide
caagggttgtatctggagatcaacctatggataatgacatttatcgccgcggaatgttcg

SEQ ID NO: 341375 - DNA, 60 bp, Artificial
  Synthetic oligonucleotide
caagggttgtcactcaagtcctgaaaggaaacatctcggttcaacacgagattcacatga

SEQ ID NO: 341376 - DNA, 53 bp, Artificial
  Synthetic oligonucleotide
caagggtttagtggtgcaatctttccccgaactgttattcgggaagtgtgtcg

SEQ ID NO: 341377 - DNA, 60 bp, Artificial
  Synthetic oligonucleotide
caaggtaaacttagttcattagtatcatcagttgaatggtatctgagatctatggaacta

SEQ ID NO: 341378 - DNA, 56 bp, Artificial
  Synthetic oligonucleotide
caaggtaacagatacgctcaacggggagagggtctcttttcccgtctgcacgtatg

SEQ ID NO: 341379 - DNA, 54 bp, Artificial
  Synthetic oligonucleotide
caaggtaatctgtttgtctgacgttacccgtggtattgggcttacccatcgagt

SEQ ID NO: 341380 - DNA, 55 bp, Artificial
  Synthetic oligonucleotide
caaggtaccagtaggactttaactcaacagtcctcagcggctacgtctgacgatc

SEQ ID NO: 341381 - DNA, 59 bp, Artificial
  Synthetic oligonucleotide
caaggtagacgtacctttgaagacacacctatcactaatcatagtaggatgtcctactg

SEQ ID NO: 341382 - DNA, 55 bp, Artificial
  Synthetic oligonucleotide
caaggtaggagatacagctaggtttagtgttccattcgtgggactcgcttcagca

SEQ ID NO: 341383 - DNA, 59 bp, Artificial
  Synthetic oligonucleotide
caaggtagtaaggatatcaaaatccagattaattcatgggaagataataaacagctcca

SEQ ID NO: 341384 - DNA, 60 bp, Artificial
  Synthetic oligonucleotide
caaggtatcgtgatattcttataaggttcaaagattgggcatatgttactgatcctccat

SEQ ID NO: 341385 - DNA, 52 bp, Artificial
  Synthetic oligonucleotide
caaggtattcgaaacaacacgcgctattttaacgcactatgattttgtattg

SEQ ID NO: 341386 - DNA, 55 bp, Artificial
  Synthetic oligonucleotide
caaggtattctttcgaaattgaggaggctacaccaccacgtaaaatcagcacacc

SEQ ID NO: 341387 - DNA, 56 bp, Artificial
  Synthetic oligonucleotide
caaggtattgctttttcaggtagtcctctttatacatctacaggggttttgacagc

SEQ ID NO: 341388 - DNA, 60 bp, Artificial
  Synthetic oligonucleotide
caaggtattgtctgcatgtggaaactccggatacgacgtgataaagctgctagagcctta

SEQ ID NO: 341389 - DNA, 60 bp, Artificial
  Synthetic oligonucleotide
caaggtcaacagcgcagaggactacgtcggtcagcttgtgccattggtcgccgatgtgcc

SEQ ID NO: 341390 - DNA, 59 bp, Artificial
  Synthetic oligonucleotide
caaggtcaacttggaaattccatgtatttcccaactgtgagtggatcattagtatcgag

SEQ ID NO: 341391 - DNA, 58 bp, Artificial
  Synthetic oligonucleotide
caaggtcaataacatatcaacgtgcccaagcgaatgaagacattatagtatccaagac

SEQ ID NO: 341392 - DNA, 60 bp, Artificial
  Synthetic oligonucleotide
caaggtcataacaatggcatatgctggtttaatcagctatttgtcacagtagtagacaac

SEQ ID NO: 341393 - DNA, 59 bp, Artificial
  Synthetic oligonucleotide
caaggtcatgaaaccgtacgccttcagggccccagtcatccaaggaatcaccgtctgca

SEQ ID NO: 341394 - DNA, 60 bp, Artificial
  Synthetic oligonucleotide
caaggtcatgcctgaggatatagtgggcaaagggttcagattggcatcggtacctgtggt

SEQ ID NO: 341395 - DNA, 55 bp, Artificial
  Synthetic oligonucleotide
caaggtcattttgtaacgaaatttgccctcatgctctgcgaattcacaatgccaa

SEQ ID NO: 341396 - DNA, 60 bp, Artificial
  Synthetic oligonucleotide
caaggtccaatcctatgaacagcgacatgatatctctcatgttggtaaggtgatgtgtat

SEQ ID NO: 341397 - DNA, 58 bp, Artificial
  Synthetic oligonucleotide
caaggtccccaagggagtgcttccagtatcgagtgttgacgttgcgaatcgaatcgcg

SEQ ID NO: 341398 - DNA, 56 bp, Artificial
  Synthetic oligonucleotide
caaggtcctatatcaatggacaaacccccaccaccggccataacagatctattacg

SEQ ID NO: 341399 - DNA, 57 bp, Artificial
  Synthetic oligonucleotide
caaggtcgccaaacctatgactggacattgaaaagaaaccagccggctgcaaccgct

SEQ ID NO: 341400 - DNA, 60 bp, Artificial
  Synthetic oligonucleotide
caaggtcgccagacctatgattggacactaaacaggaatcagccggctgcaactgcatta

SEQ ID NO: 341401 - DNA, 60 bp, Artificial
  Synthetic oligonucleotide
caaggtcgtcagacctatgactggacattaaacagaaatcaaccggccgcaactgcatta

SEQ ID NO: 341402 - DNA, 55 bp, Artificial
  Synthetic oligonucleotide
caaggtcttacaacattaggacgttaaaagtctcggaggctttgtggctacgcca

SEQ ID NO: 341403 - DNA, 58 bp, Artificial
  Synthetic oligonucleotide
caaggtgaccacataaatagttatgtggacccagagacctggcccacatggtcttccc

SEQ ID NO: 341404 - DNA, 60 bp, Artificial
  Synthetic oligonucleotide
caaggtgacggtgccgcatctgcagacgacgtgaaagagaaactcaacggaataatcgac

SEQ ID NO: 341405 - DNA, 57 bp, Artificial
  Synthetic oligonucleotide
caaggtgagaaagtgtaacactgtagaccgcggtcgttacttatcctgttaatgtga

SEQ ID NO: 341406 - DNA, 60 bp, Artificial
  Synthetic oligonucleotide
caaggtgatccgagcaagcaaaagtagacatcgcacaaccgcgttcattgtctactcagg

SEQ ID NO: 341407 - DNA, 55 bp, Artificial
  Synthetic oligonucleotide
caaggtgatcgaaacgtttttactcttcaatcattggagtcacctggcatctctt

SEQ ID NO: 341408 - DNA, 55 bp, Artificial
  Synthetic oligonucleotide
caaggtgccaccaacgtggaactccccaacaccggcttctcattggctctcggag

SEQ ID NO: 341409 - DNA, 55 bp, Artificial
  Synthetic oligonucleotide
caaggtgcttagataatccatagtgttcaaaactgagtcccaccacagacaggca

SEQ ID NO: 341410 - DNA, 50 bp, Artificial
  Synthetic oligonucleotide
caaggtgcttccgaatgaatcacttatacctttgaccctgcacctgaaac

SEQ ID NO: 341411 - DNA, 55 bp, Artificial
  Synthetic oligonucleotide
caaggtggaagggaccaccattgcagatcaaattctgcggtatggcagcatgggg

SEQ ID NO: 341412 - DNA, 57 bp, Artificial
  Synthetic oligonucleotide
caaggtggaatacccagccgccaagaggctaaagttggacagtggcagggtcctcaa

SEQ ID NO: 341413 - DNA, 60 bp, Artificial
  Synthetic oligonucleotide
caaggtggactcgcgcgtagacagcagggacgacgtggagactcagtctccgccgcggca

SEQ ID NO: 341414 - DNA, 55 bp, Artificial
  Synthetic oligonucleotide
caaggtgggcagaacacgacacaataattacagacgaattattattaaacccaca

SEQ ID NO: 341415 - DNA, 56 bp, Artificial
  Synthetic oligonucleotide
caaggtggtacctatgaaaatgtgattctggtccgtttgcaacggacacccaacga

SEQ ID NO: 341416 - DNA, 59 bp, Artificial
  Synthetic oligonucleotide
caaggtgtacctacttcggcagcacaagaaggagtagcgtcaagcataacagttcgaat

SEQ ID NO: 341417 - DNA, 60 bp, Artificial
  Synthetic oligonucleotide
caaggtgtagaagctatggcagttatcggggaagttatggcatctcctattcaagctaac

SEQ ID NO: 341418 - DNA, 60 bp, Artificial
  Synthetic oligonucleotide
caaggtgtcgagtctacgtattctccagatacgataggatacgatctcatacgtgatctt

SEQ ID NO: 341419 - DNA, 60 bp, Artificial
  Synthetic oligonucleotide
caaggtgtgaagagccgcgtgtgctaatagtgagtcctccggcccctgaatgcggctaat

SEQ ID NO: 341420 - DNA, 51 bp, Artificial
  Synthetic oligonucleotide
caaggtgtgcggccccgtgtactgcttcacgcctagccctgtggttgtcgg

SEQ ID NO: 341421 - DNA, 60 bp, Artificial
  Synthetic oligonucleotide
caaggtgtgctcggctatctcccaacatcggccgccgacgctattaaggatcctgagtca

SEQ ID NO: 341422 - DNA, 54 bp, Artificial
  Synthetic oligonucleotide
caaggtgttccctatcgagaacccatccgtgacacaagttacgttgggtggtaa

SEQ ID NO: 341423 - DNA, 51 bp, Artificial
  Synthetic oligonucleotide
caaggttaaatgccccgaatacccgcatagagatttagtaattgcagcaag

SEQ ID NO: 341424 - DNA, 59 bp, Artificial
  Synthetic oligonucleotide
caaggttagacgcaattggaaaggattgtgtagacattgtagggcgatagaatgattgg

SEQ ID NO: 341425 - DNA, 57 bp, Artificial
  Synthetic oligonucleotide
caaggttaggaaaaggatacatgttcgaaagtaagagcatgaagcttcggacacaaa

SEQ ID NO: 341426 - DNA, 55 bp, Artificial
  Synthetic oligonucleotide
caaggttagtcccaacctctttactgtcccaattaaggaagcaggcgaggactgc

SEQ ID NO: 341427 - DNA, 60 bp, Artificial
  Synthetic oligonucleotide
caaggttatcatcacctatagttttagatcagtgtgatcttgtcactcgtgcttgtggat

SEQ ID NO: 341428 - DNA, 53 bp, Artificial
  Synthetic oligonucleotide
caaggttccaccctccttctttcagtccgtgcggaggcacagcccctaccgca

SEQ ID NO: 341429 - DNA, 56 bp, Artificial
  Synthetic oligonucleotide
caaggttccccaatctgaaagaagccatatcctggcctcttggagaaccctccctg

SEQ ID NO: 341430 - DNA, 60 bp, Artificial
  Synthetic oligonucleotide
caaggttcctcccagtggctggtggaacaagcagtgtgtacattgaggtgttgcatctga

SEQ ID NO: 341431 - DNA, 60 bp, Artificial
  Synthetic oligonucleotide
caaggttctattcaaggtccttacttaccgtcaactattagctctgatcagtgtgataca

SEQ ID NO: 341432 - DNA, 55 bp, Artificial
  Synthetic oligonucleotide
caaggttcttgagactgtcaggcacatcatagacgaagagtgcaagcgttggggt

SEQ ID NO: 341433 - DNA, 55 bp, Artificial
  Synthetic oligonucleotide
caaggttgaacacaccaccattgcagataaaatattacaatggggcagcttaggt

SEQ ID NO: 341434 - DNA, 51 bp, Artificial
  Synthetic oligonucleotide
caaggttgaagtcctttaggccagtctacatgagctgttggtagctcatgt

SEQ ID NO: 341435 - DNA, 59 bp, Artificial
  Synthetic oligonucleotide
caaggttgactagagttggatggacagtaaggttcttccgatctgattcaaacatgaag

SEQ ID NO: 341436 - DNA, 55 bp, Artificial
  Synthetic oligonucleotide
caaggttgggagagggccatccactcaaaattatttatacaaacatgttgatcga

SEQ ID NO: 341437 - DNA, 58 bp, Artificial
  Synthetic oligonucleotide
caaggtttctcggttattaaacaaagatttcattctgttgaacagtatgtacatgcgc

SEQ ID NO: 341438 - DNA, 60 bp, Artificial
  Synthetic oligonucleotide
caagtaaaaatggagtcctatctggtagacacctatcagggcatcccttacacagcagct

SEQ ID NO: 341439 - DNA, 58 bp, Artificial
  Synthetic oligonucleotide
caagtaaacctggaactcactttagttacattggacatgaacgagaaattcagagaca

SEQ ID NO: 341440 - DNA, 58 bp, Artificial
  Synthetic oligonucleotide
caagtaacaaattcaaccgctaccataatgatgcagggaggcaagtttaggaacaaca

SEQ ID NO: 341441 - DNA, 55 bp, Artificial
  Synthetic oligonucleotide
caagtaacccacctattccagtaggagacatctataaaagatggatagttctggg

SEQ ID NO: 341442 - DNA, 55 bp, Artificial
  Synthetic oligonucleotide
caagtaacttctcctgatggaggttacgcagagaattctatttatgactattttg

SEQ ID NO: 341443 - DNA, 60 bp, Artificial
  Synthetic oligonucleotide
caagtaagtggtcagttagcaggtgttcgagttgtgagacagaaggatgtaacgacatta

SEQ ID NO: 341444 - DNA, 60 bp, Artificial
  Synthetic oligonucleotide
caagtacaagctgattatatgactgcaacacgagaggttgacttcacagtaccggatgta

SEQ ID NO: 341445 - DNA, 57 bp, Artificial
  Synthetic oligonucleotide
caagtacaggcggtataactattcaatatatgggtcaacactagaacgtagaactaa

SEQ ID NO: 341446 - DNA, 54 bp, Artificial
  Synthetic oligonucleotide
caagtacagggcagcaaccgtacactttgacgaggcacttatggcgcacgctgg

SEQ ID NO: 341447 - DNA, 50 bp, Artificial
  Synthetic oligonucleotide
caagtacatagtttacataacgtctggccgttgcgtaacgcacagctcta

SEQ ID NO: 341448 - DNA, 56 bp, Artificial
  Synthetic oligonucleotide
caagtaccactccagtgtgtattcacttcccccagacccagatcactttgatgggt

SEQ ID NO: 341449 - DNA, 57 bp, Artificial
  Synthetic oligonucleotide
caagtacccctacatcaagcagcactacggatccctgtccaaataccgacgaaagta

SEQ ID NO: 341450 - DNA, 56 bp, Artificial
  Synthetic oligonucleotide
caagtacgtggttcctacgttgaaatgcaccttcctggatcggaagtagacagttc

SEQ ID NO: 341451 - DNA, 55 bp, Artificial
  Synthetic oligonucleotide
caagtactggtacaaactacctcatgttaccacactacactcattttaacagcac

SEQ ID NO: 341452 - DNA, 60 bp, Artificial
  Synthetic oligonucleotide
caagtacttcatgggctgacacaaggtaacaaagatctggtccttgaccacatcttcgca

SEQ ID NO: 341453 - DNA, 55 bp, Artificial
  Synthetic oligonucleotide
caagtagactctctagcagaagtagtactacaaaacagaagaggattagatctgc

SEQ ID NO: 341454 - DNA, 60 bp, Artificial
  Synthetic oligonucleotide
caagtagactgcagcccagagatatggcagatggattgtacacatttagaaggcaaaatc

SEQ ID NO: 341455 - DNA, 55 bp, Artificial
  Synthetic oligonucleotide
caagtagaggtgccagtcgctagcaccaaagaatatttagatatgatgagagcct

SEQ ID NO: 341456 - DNA, 60 bp, Artificial
  Synthetic oligonucleotide
caagtagatacatcgacactatacaatacatgtcctagatcaggatacatgtccactgtt

SEQ ID NO: 341457 - DNA, 59 bp, Artificial
  Synthetic oligonucleotide
caagtagatactttaatcccaatgaacaatacccacaacaaggatgcagtgaaaagcta

SEQ ID NO: 341458 - DNA, 59 bp, Artificial
  Synthetic oligonucleotide
caagtagatagtcctaatcctcgagattacacttggagcctcattcgaggtaacgatgg

SEQ ID NO: 341459 - DNA, 60 bp, Artificial
  Synthetic oligonucleotide
caagtagatctgaatgatgctgttcaagccttaacggacttaggactaatctacacagca

SEQ ID NO: 341460 - DNA, 59 bp, Artificial
  Synthetic oligonucleotide
caagtagatggagttaccttgggagatttgtgggtcacatatgaggtcgagttatcgaa

SEQ ID NO: 341461 - DNA, 58 bp, Artificial
  Synthetic oligonucleotide
caagtagatggggatgtgaagaatttggttgcttggccatcaacacagggtgtgtttt

SEQ ID NO: 341462 - DNA, 60 bp, Artificial
  Synthetic oligonucleotide
caagtagcaatacagcagatactaatgctgactgcgcctggttagaagcacaggaagatg

SEQ ID NO: 341463 - DNA, 54 bp, Artificial
  Synthetic oligonucleotide
caagtagcactagaagtagtaaactactgtttcgacaacgggtcctcacccgaa

SEQ ID NO: 341464 - DNA, 60 bp, Artificial
  Synthetic oligonucleotide
caagtagctggggtggtattaacatttgatacaatatacggtgaagagaatatcttcaga

SEQ ID NO: 341465 - DNA, 60 bp, Artificial
  Synthetic oligonucleotide
caagtagctgttgaacagcaacttttttgtcaagaagttgtcgaactagctgctcaagaa

SEQ ID NO: 341466 - DNA, 60 bp, Artificial
  Synthetic oligonucleotide
caagtaggtggttctgacgtcatagacataacagcagatccaacaacgatcccacaaact

SEQ ID NO: 341467 - DNA, 55 bp, Artificial
  Synthetic oligonucleotide
caagtagtacagttagagcagcttgctggtgggcaggcatacaacaagagtttgg

SEQ ID NO: 341468 - DNA, 54 bp, Artificial
  Synthetic oligonucleotide
caagtagtgccatatgaaccaatcattactaccatagagaaggaaatttgtcct

SEQ ID NO: 341469 - DNA, 57 bp, Artificial
  Synthetic oligonucleotide
caagtataaagcagaccattccgtctacgtaaacagactgaatagggctgaggttcc

SEQ ID NO: 341470 - DNA, 57 bp, Artificial
  Synthetic oligonucleotide
caagtataacgttaaagtaccacatctcacatttggcgtgttaaatatttctgaaca

SEQ ID NO: 341471 - DNA, 55 bp, Artificial
  Synthetic oligonucleotide
caagtatacgtccgccatgtatgggctagggggggctcagataaagaacctcccc

SEQ ID NO: 341472 - DNA, 50 bp, Artificial
  Synthetic oligonucleotide
caagtataggtctctacatcgtaggtgacaaagagacgctcggtgcgagg

SEQ ID NO: 341473 - DNA, 58 bp, Artificial
  Synthetic oligonucleotide
caagtatcaatttgatgtcgaacatcttgaaggtgtaaaaaacgttttagcagattgc

SEQ ID NO: 341474 - DNA, 60 bp, Artificial
  Synthetic oligonucleotide
caagtatccagggatatcccagtcctctggaggggacataggggttcacatggcacacga

SEQ ID NO: 341475 - DNA, 53 bp, Artificial
  Synthetic oligonucleotide
caagtatcccaggggcatcaatacaacaaggtcaaactgtaaaaattaaaact

SEQ ID NO: 341476 - DNA, 55 bp, Artificial
  Synthetic oligonucleotide
caagtatcgtaagctgctgcctaaacagctgcagcgtaatactatacctgatggt

SEQ ID NO: 341477 - DNA, 55 bp, Artificial
  Synthetic oligonucleotide
caagtatcgttattttagtggcaaaatggatactgccgcctatagagaggctgct

SEQ ID NO: 341478 - DNA, 60 bp, Artificial
  Synthetic oligonucleotide
caagtatctcacataatgaccatgctcgcagtcttagcttcgaatgttagtgcatcaaaa

SEQ ID NO: 341479 - DNA, 55 bp, Artificial
  Synthetic oligonucleotide
caagtatctggggaatctcctgagatattggggtcgggagctgaaacttagtgct

SEQ ID NO: 341480 - DNA, 57 bp, Artificial
  Synthetic oligonucleotide
caagtatgagcctttgatggctcctcttgttaattgtattcatgtagtagttatgtc

SEQ ID NO: 341481 - DNA, 57 bp, Artificial
  Synthetic oligonucleotide
caagtatgtaagagaaagatcttggtcattatccaatatagtaggagtaacatcgcc

SEQ ID NO: 341482 - DNA, 57 bp, Artificial
  Synthetic oligonucleotide
caagtatgtcaaatcagacaaactggtccttgctacaggactaagaaacgtacccca

SEQ ID NO: 341483 - DNA, 57 bp, Artificial
  Synthetic oligonucleotide
caagtatgtccgagtgtacatttactcggacgacgtggttctaaccacgcccaatca

SEQ ID NO: 341484 - DNA, 59 bp, Artificial
  Synthetic oligonucleotide
caagtatgttaagcaaaacaccctgaagttggcaacaggaatgcggaatgtaccagaga

SEQ ID NO: 341485 - DNA, 53 bp, Artificial
  Synthetic oligonucleotide
caagtattggtgcttatgcgtcgtctcctgatgccgtgcgtggtaactctttt

SEQ ID NO: 341486 - DNA, 53 bp, Artificial
  Synthetic oligonucleotide
caagtcaaatagagtcgaatgatggtgacatattggcattacaagggaggttg

SEQ ID NO: 341487 - DNA, 60 bp, Artificial
  Synthetic oligonucleotide
caagtcaaatttaccaatcgagaactgtgatgccacatgccagactattgcaggagtcat

SEQ ID NO: 341488 - DNA, 56 bp, Artificial
  Synthetic oligonucleotide
caagtcaacacggacaagaagggaattgtcctcgttgatcttgacgtttatggtaa

SEQ ID NO: 341489 - DNA, 55 bp, Artificial
  Synthetic oligonucleotide
caagtcaactatgattaaacttctcactggattggagatttgtggtacgcgagta

SEQ ID NO: 341490 - DNA, 56 bp, Artificial
  Synthetic oligonucleotide
caagtcaagaatagcttattgtgagtataatcccaaggattgggaaaaggccttaa

SEQ ID NO: 341491 - DNA, 60 bp, Artificial
  Synthetic oligonucleotide
caagtcacagataaataggcaagtcatagttgacagtgataactggtctgggtattctgg

SEQ ID NO: 341492 - DNA, 55 bp, Artificial
  Synthetic oligonucleotide
caagtcacattgcatacaggctttgaacttgtccggtcttctggagcataggctg

SEQ ID NO: 341493 - DNA, 60 bp, Artificial
  Synthetic oligonucleotide
caagtcactagggaccagaagaaccacaacatataagggcaaaccacaccacacgcatgc

SEQ ID NO: 341494 - DNA, 58 bp, Artificial
  Synthetic oligonucleotide
caagtcactggggcatgctatggcgactttggggcaacccgttgcgaactaggccgcg

SEQ ID NO: 341495 - DNA, 56 bp, Artificial
  Synthetic oligonucleotide
caagtcagagacgtggccaattggagagtcccccaaaggggtggaagaaggatcca

SEQ ID NO: 341496 - DNA, 53 bp, Artificial
  Synthetic oligonucleotide
caagtcagatttacccagggattaaagtaagacaactctgtaaactccttagg

SEQ ID NO: 341497 - DNA, 53 bp, Artificial
  Synthetic oligonucleotide
caagtcagatttacccagggattcaaactaggcaactttgtaaacttcttagg

SEQ ID NO: 341498 - DNA, 58 bp, Artificial
  Synthetic oligonucleotide
caagtcagctgtccgcaacctgaacccggcagctttaatgtgacgggaaacctgcgac

SEQ ID NO: 341499 - DNA, 54 bp, Artificial
  Synthetic oligonucleotide
caagtcaggagctggctgaaaaggtcgacgctttacatttggctgaagaacctc

SEQ ID NO: 341500 - DNA, 59 bp, Artificial
  Synthetic oligonucleotide
caagtcagtgtctacggaacagacgctactagcttcaaacgcttatccggagtttgaga

SEQ ID NO: 341501 - DNA, 57 bp, Artificial
  Synthetic oligonucleotide
caagtcatgagggtaagcgtttaaagatggttttacatgcagggctaatagcgtacg

SEQ ID NO: 341502 - DNA, 53 bp, Artificial
  Synthetic oligonucleotide
caagtccacaagggagtacacagtttgattgagactcctgagcctctgtaaat

SEQ ID NO: 341503 - DNA, 55 bp, Artificial
  Synthetic oligonucleotide
caagtccatggagttttgatgaaccaggcagttcgcaacatcaaaaggaggaaga

SEQ ID NO: 341504 - DNA, 55 bp, Artificial
  Synthetic oligonucleotide
caagtcccagaagaccaggggccaccgagagagccatacaatcaatgggcactag

SEQ ID NO: 341505 - DNA, 60 bp, Artificial
  Synthetic oligonucleotide
caagtccctgaaagaggtcactccgcgtgatctttatgcgaaaatgagacagctgctccc

SEQ ID NO: 341506 - DNA, 55 bp, Artificial
  Synthetic oligonucleotide
caagtccgaagacgataaactacactctctctcttgcgagtgctaagttggcagc

SEQ ID NO: 341507 - DNA, 60 bp, Artificial
  Synthetic oligonucleotide
caagtccgcctcacctgatatcgtgggtacaatcaacgctctcctggcaaggattgcggc

SEQ ID NO: 341508 - DNA, 53 bp, Artificial
  Synthetic oligonucleotide
caagtccgctaatccccctgactagttaaaacaacggtccaccaatccgctaa

SEQ ID NO: 341509 - DNA, 55 bp, Artificial
  Synthetic oligonucleotide
caagtcctcagtcttatcagaccaaacgaaaatccagcacacaaaagtcagctgg

SEQ ID NO: 341510 - DNA, 55 bp, Artificial
  Synthetic oligonucleotide
caagtcctctatataaggacacaatgtaggctcttacaggcatcgagcaccaccc

SEQ ID NO: 341511 - DNA, 55 bp, Artificial
  Synthetic oligonucleotide
caagtcgaaatcgatcgcacacttgaagatccggattatgtctactccaccttcc

SEQ ID NO: 341512 - DNA, 60 bp, Artificial
  Synthetic oligonucleotide
caagtcgagatcaacgttactgatatcaggaataccaatcttaagctcgatgggatcaga

SEQ ID NO: 341513 - DNA, 55 bp, Artificial
  Synthetic oligonucleotide
caagtcgcgttgacgcctttcgaatattaggagtcacggaatgggatgctggtga

SEQ ID NO: 341514 - DNA, 54 bp, Artificial
  Synthetic oligonucleotide
caagtcggcatttcaccgaaaatttgaaacccgcaaaggccgcagatttcaacg

SEQ ID NO: 341515 - DNA, 60 bp, Artificial
  Synthetic oligonucleotide
caagtcggcgtaatgatggtgttgtgcagtatatgcggcttgtacaagccgagatcagtt

SEQ ID NO: 341516 - DNA, 59 bp, Artificial
  Synthetic oligonucleotide
caagtctacgatgttatatcactaatggagggatttgcatacggagctgtccagctgct

SEQ ID NO: 341517 - DNA, 60 bp, Artificial
  Synthetic oligonucleotide
caagtctactttacccatccttaatctttgacatcaccaagctactgattgcagtgctag

SEQ ID NO: 341518 - DNA, 54 bp, Artificial
  Synthetic oligonucleotide
caagtctatgaacacgacgttggtaaagattattacgaaaacgcatatttaatt

SEQ ID NO: 341519 - DNA, 50 bp, Artificial
  Synthetic oligonucleotide
caagtctatgcaggagacgactcagcactggattgcgtcccagaagtgaa

SEQ ID NO: 341520 - DNA, 52 bp, Artificial
  Synthetic oligonucleotide
caagtctcagcgttgggggagagctcgtgtttaaaacaaacgtccaaaacct

SEQ ID NO: 341521 - DNA, 52 bp, Artificial
  Synthetic oligonucleotide
caagtctccgagaaagtctccagctagatctccagctagatctccgagacgg

SEQ ID NO: 341522 - DNA, 55 bp, Artificial
  Synthetic oligonucleotide
caagtctcgaactatttcacatgcgttaaagttggaacgtctggtttcagtctga

SEQ ID NO: 341523 - DNA, 60 bp, Artificial
  Synthetic oligonucleotide
caagtctcgcgcattcaagcacttcaaaattgcggtgcccactgttgaattgcgcaacga

SEQ ID NO: 341524 - DNA, 55 bp, Artificial
  Synthetic oligonucleotide
caagtctcggttgttgtgtaatatagaggcgaaactgcgagtacttctcgacatc

SEQ ID NO: 341525 - DNA, 55 bp, Artificial
  Synthetic oligonucleotide
caagtctcgtgagggaatggtgacaaatgaaagagaagtgtcgtttcagggaggt

SEQ ID NO: 341526 - DNA, 60 bp, Artificial
  Synthetic oligonucleotide
caagtctcttacgccatgcacctgtggcgcttctgacttgtacttaatcaccaggcatgc

SEQ ID NO: 341527 - DNA, 59 bp, Artificial
  Synthetic oligonucleotide
caagtctgacttttccagcacagtactacaagattctggtgcactcaaaagaaggttcc

SEQ ID NO: 341528 - DNA, 54 bp, Artificial
  Synthetic oligonucleotide
caagtctggcctaaaaggcgggattcttaagatgtcggggtccagacttaacaa

SEQ ID NO: 341529 - DNA, 59 bp, Artificial
  Synthetic oligonucleotide
caagtctggcttgcacgggttgctatgcttgtagctctggcatctcctgtaaagttagg

SEQ ID NO: 341530 - DNA, 60 bp, Artificial
  Synthetic oligonucleotide
caagtgaaacgatgctagcaaatgtgacatctgttagacaagaatacgcgataccagttg

SEQ ID NO: 341531 - DNA, 57 bp, Artificial
  Synthetic oligonucleotide
caagtgaaactctgttggcaaacgtaacatccgttaggcaagaatacgcaataccag

SEQ ID NO: 341532 - DNA, 57 bp, Artificial
  Synthetic oligonucleotide
caagtgaactggtacaacgagcatactgcaacggacagatacaacccgtaattgggg

SEQ ID NO: 341533 - DNA, 57 bp, Artificial
  Synthetic oligonucleotide
caagtgaagacctgctgacagcaatcgtactaagccccctcgcttccttaccccgcc

SEQ ID NO: 341534 - DNA, 55 bp, Artificial
  Synthetic oligonucleotide
caagtgaagctattggactgctagaatcgtttggagtagatgctgggaccgacgc

SEQ ID NO: 341535 - DNA, 60 bp, Artificial
  Synthetic oligonucleotide
caagtgaagtggtatgtagagagggaaatagcttctggactagtcattacatgccagtct

SEQ ID NO: 341536 - DNA, 55 bp, Artificial
  Synthetic oligonucleotide
caagtgaatttctaagcgttgatactgtattactagacaatgagggcgacatcac

SEQ ID NO: 341537 - DNA, 55 bp, Artificial
  Synthetic oligonucleotide
caagtgacaaaaccaaatttgttggtagggccaagtgcggcgttgaactcgagga

SEQ ID NO: 341538 - DNA, 55 bp, Artificial
  Synthetic oligonucleotide
caagtgacactatggatctgatctggggccaaccacctctatcttggtgggttgg

SEQ ID NO: 341539 - DNA, 60 bp, Artificial
  Synthetic oligonucleotide
caagtgacactatggatctgatctggggccaggtacctctatcttggtgacctggttaaa

SEQ ID NO: 341540 - DNA, 57 bp, Artificial
  Synthetic oligonucleotide
caagtgaccttttaaccttcaacacagctttcagaatgtcctggatattcttggggc

SEQ ID NO: 341541 - DNA, 55 bp, Artificial
  Synthetic oligonucleotide
caagtgactgggttagaggtcaaaatgagatgcttggcccgttcatgagtggtgc

SEQ ID NO: 341542 - DNA, 55 bp, Artificial
  Synthetic oligonucleotide
caagtgaggctaatctgcccatacagtatcagaaatttatgccgactttgcctaa

SEQ ID NO: 341543 - DNA, 60 bp, Artificial
  Synthetic oligonucleotide
caagtgaggggtcacaagtcaaggatcgcagaaggggatattccaatcgctggagtgaaa

SEQ ID NO: 341544 - DNA, 58 bp, Artificial
  Synthetic oligonucleotide
caagtgatggcctaccacacgggaagcacgtgggaaagatttttgggaggcagcttca

SEQ ID NO: 341545 - DNA, 55 bp, Artificial
  Synthetic oligonucleotide
caagtgatgttccgtctttgaagcaatctaattataaagttggctcgtccatatc

SEQ ID NO: 341546 - DNA, 59 bp, Artificial
  Synthetic oligonucleotide
caagtgattaacgactcaatattccaggaattagataggttaagtgatgagttactaga

SEQ ID NO: 341547 - DNA, 59 bp, Artificial
  Synthetic oligonucleotide
caagtgattactttgaagatattgtgcgtcaaccattacaagaggttgtgattcgttgt

SEQ ID NO: 341548 - DNA, 60 bp, Artificial
  Synthetic oligonucleotide
caagtgcaacaactggcaatgtgacagctggttataagctcacacaccctggtgagcgcg

SEQ ID NO: 341549 - DNA, 54 bp, Artificial
  Synthetic oligonucleotide
caagtgcaaggcgcaggacaacatgcgcagtttttagtcttgtgcacaaagcgt

SEQ ID NO: 341550 - DNA, 56 bp, Artificial
  Synthetic oligonucleotide
caagtgcaagtgggtcaggtttttacactatggtggctttgtaccttgccacttta

SEQ ID NO: 341551 - DNA, 55 bp, Artificial
  Synthetic oligonucleotide
caagtgcacctcagattcttgcggagatggacaaggtacatctacccatgcactc

SEQ ID NO: 341552 - DNA, 58 bp, Artificial
  Synthetic oligonucleotide
caagtgcactacatcgagatggctaacaatcacttccagttggtagaacttaaaaatg

SEQ ID NO: 341553 - DNA, 55 bp, Artificial
  Synthetic oligonucleotide
caagtgcatgtcatgatggcatgggctggctaacaatcggaatttcaggtccaga

SEQ ID NO: 341554 - DNA, 59 bp, Artificial
  Synthetic oligonucleotide
caagtgcattgcggtttccgttgctaggtggcgcttagcaacccctctagataccagta

SEQ ID NO: 341555 - DNA, 55 bp, Artificial
  Synthetic oligonucleotide
caagtgccgccacatagctcctcactagtgggtacgtcgcaccacacgcgtctgc

SEQ ID NO: 341556 - DNA, 54 bp, Artificial
  Synthetic oligonucleotide
caagtgccgtggcctcaccagtcccaattgttgcgtgcggtgttgtgcacttgc

SEQ ID NO: 341557 - DNA, 60 bp, Artificial
  Synthetic oligonucleotide
caagtgcctgacatacctgaactgtcttatcagaaggaggcattactttctcaagtcgaa

SEQ ID NO: 341558 - DNA, 60 bp, Artificial
  Synthetic oligonucleotide
caagtgcgcaactccacagggctttaccatgtcaccaatgattgccctaactcgagcatt

SEQ ID NO: 341559 - DNA, 56 bp, Artificial
  Synthetic oligonucleotide
caagtgcgcccgtatctgccagtgcccgaaaacaccggcgacccctaacggattca

SEQ ID NO: 341560 - DNA, 59 bp, Artificial
  Synthetic oligonucleotide
caagtgcgcgagtaccttcggcttcaggacagcggggaccttgaccgatctgaggtagc

SEQ ID NO: 341561 - DNA, 57 bp, Artificial
  Synthetic oligonucleotide
caagtgcggcattacggtgtctcacttattggttaacaaatttgcggcgatttatcg

SEQ ID NO: 341562 - DNA, 55 bp, Artificial
  Synthetic oligonucleotide
caagtgcggtaactggagaaaccacctgtggacactatgcgctttagacgacgca

SEQ ID NO: 341563 - DNA, 55 bp, Artificial
  Synthetic oligonucleotide
caagtgcgtaactgccgcacatgtccttacgggtaactcagctagggtttccggg

SEQ ID NO: 341564 - DNA, 50 bp, Artificial
  Synthetic oligonucleotide
caagtgctcaagcaatgatgggaacatgggtacagggatcccacgcagag

SEQ ID NO: 341565 - DNA, 55 bp, Artificial
  Synthetic oligonucleotide
caagtgctcaatctcagcagctcccagttcgatgcaatgcagcctgtcaaccttc

SEQ ID NO: 341566 - DNA, 52 bp, Artificial
  Synthetic oligonucleotide
caagtgctcactgaaatgccagattatctattattaaaagatatggccgttg

SEQ ID NO: 341567 - DNA, 55 bp, Artificial
  Synthetic oligonucleotide
caagtgctggttacaaccatgatgtttccattctccgcgcctggattcgtacgac

SEQ ID NO: 341568 - DNA, 57 bp, Artificial
  Synthetic oligonucleotide
caagtggaagacgtctcatatcaggcgtacttaccataaagaattggttgcgttaac

SEQ ID NO: 341569 - DNA, 60 bp, Artificial
  Synthetic oligonucleotide
caagtggaagatgtacaaactggcgaatgtgtggtagcgaataatatttgcagccacgat

SEQ ID NO: 341570 - DNA, 55 bp, Artificial
  Synthetic oligonucleotide
caagtggacacaatattagagaagaatgtgacagtgacgcactcagtagagctcc

SEQ ID NO: 341571 - DNA, 60 bp, Artificial
  Synthetic oligonucleotide
caagtggaccatcaagctcttaaggagcttgctaaagtggtccacgatgccaaacttgaa

SEQ ID NO: 341572 - DNA, 56 bp, Artificial
  Synthetic oligonucleotide
caagtggactgactaattgggctaatggaccaacttgttgggcctaataatctggg

SEQ ID NO: 341573 - DNA, 55 bp, Artificial
  Synthetic oligonucleotide
caagtggacttcctaggagctacaattggaaattcacgcatccggctccagcctc

SEQ ID NO: 341574 - DNA, 51 bp, Artificial
  Synthetic oligonucleotide
caagtggatcaacgaagattgttccaccccgtgcgatacatcttggttacg

SEQ ID NO: 341575 - DNA, 50 bp, Artificial
  Synthetic oligonucleotide
caagtggattcattggaagtgggaaccgtgcggggacgttaacgtttggg

SEQ ID NO: 341576 - DNA, 60 bp, Artificial
  Synthetic oligonucleotide
caagtggcacttcaacagacctgcccacacaaatgatttcacagcgtttgaccaatctca

SEQ ID NO: 341577 - DNA, 54 bp, Artificial
  Synthetic oligonucleotide
caagtggcaggaccctcggttccttaatggggcctcggtgtccccagagcagtt

SEQ ID NO: 341578 - DNA, 54 bp, Artificial
  Synthetic oligonucleotide
caagtgggacttgaatagttcttccgcttagaaagtccgattccccgatacgaa

SEQ ID NO: 341579 - DNA, 50 bp, Artificial
  Synthetic oligonucleotide
caagtggggcatagaaagatacctccacataatatagccaccggtacagt

SEQ ID NO: 341580 - DNA, 55 bp, Artificial
  Synthetic oligonucleotide
caagtggggtgcagatatcaactctagcttagttactgttaatacggagtatacc

SEQ ID NO: 341581 - DNA, 55 bp, Artificial
  Synthetic oligonucleotide
caagtgggtcatctgtcaaaagagaggaagaagtgcttacaggcaacctccagac

SEQ ID NO: 341582 - DNA, 60 bp, Artificial
  Synthetic oligonucleotide
caagtggtatctaccgcaacacaatctttcctagcaacctgcatcaacggcgtgtgttgg

SEQ ID NO: 341583 - DNA, 55 bp, Artificial
  Synthetic oligonucleotide
caagtggtcaaaaagtagcctagttggatggcctaaggtaagggaaaggatagca

SEQ ID NO: 341584 - DNA, 56 bp, Artificial
  Synthetic oligonucleotide
caagtggtcgcatcgcacacgttcaccgcggggcaagcgccgtacgggtcggacta

SEQ ID NO: 341585 - DNA, 60 bp, Artificial
  Synthetic oligonucleotide
caagtggtctccaccgcaacacagtcatttctagcgacctgcattaacggcgtgtgttgg

SEQ ID NO: 341586 - DNA, 55 bp, Artificial
  Synthetic oligonucleotide
caagtgtaaagtgcaggatgttggtctcaaacccatcaacacaccagaacattca

SEQ ID NO: 341587 - DNA, 55 bp, Artificial
  Synthetic oligonucleotide
caagtgtaatttctgccgtaaagtatccaccacatgattttgctatattcggggt

SEQ ID NO: 341588 - DNA, 60 bp, Artificial
  Synthetic oligonucleotide
caagtgtactgttgtggatggccagtgtggagcctcatcggatagcggcctctatcatgc

SEQ ID NO: 341589 - DNA, 55 bp, Artificial
  Synthetic oligonucleotide
caagtgtagaggatgtaatcctgcctaacagagttaagttaaaaccttacagaac

SEQ ID NO: 341590 - DNA, 55 bp, Artificial
  Synthetic oligonucleotide
caagtgtagccggatctcctagtctagtttggtttcaagtagctggagacgacgc

SEQ ID NO: 341591 - DNA, 60 bp, Artificial
  Synthetic oligonucleotide
caagtgtagtgcccaacattgacagcagaccctgggtgagaggacaaagcggcagaataa

SEQ ID NO: 341592 - DNA, 55 bp, Artificial
  Synthetic oligonucleotide
caagtgtcacgtttattccaccaatggccgatttgccagataagggtaaaccatt

SEQ ID NO: 341593 - DNA, 60 bp, Artificial
  Synthetic oligonucleotide
caagtgtcatcaccagatgcgatggcggctacaggattgccacattcgaccgtacatgtc

SEQ ID NO: 341594 - DNA, 55 bp, Artificial
  Synthetic oligonucleotide
caagtgtgatgacgactgtatggccagtataagaaacaacacttatgatcacagc

SEQ ID NO: 341595 - DNA, 55 bp, Artificial
  Synthetic oligonucleotide
caagtgtgtacctatatctactattctgtgtatttcccgccgatttttaccttat

SEQ ID NO: 341596 - DNA, 60 bp, Artificial
  Synthetic oligonucleotide
caagtgtgtcaggctatacggaactgcccccactctcattgcaagaggcagaacagctag

SEQ ID NO: 341597 - DNA, 58 bp, Artificial
  Synthetic oligonucleotide
caagtgtgtggccgaggcttacgctagcgatttagaaatgagaaaatcgtccgtagac

SEQ ID NO: 341598 - DNA, 55 bp, Artificial
  Synthetic oligonucleotide
caagtgttacacaaatgcaacgcgtcggttactggtggtgtctatgcatcgaagg

SEQ ID NO: 341599 - DNA, 55 bp, Artificial
  Synthetic oligonucleotide
caagtgttacatttatacccccaatggctgatctacctgataaaggcaaaccttt

SEQ ID NO: 341600 - DNA, 51 bp, Artificial
  Synthetic oligonucleotide
caagtgttgttgcccgaaacatttgattggcgcgacaaacacggagtaaca

SEQ ID NO: 341601 - DNA, 53 bp, Artificial
  Synthetic oligonucleotide
caagtgtttcaccggtgggtctctggttttctcaaaaaagtcagacacaggaa

SEQ ID NO: 341602 - DNA, 60 bp, Artificial
  Synthetic oligonucleotide
caagttaatctgcaagctggctactcaagaaatgacagacgttgtatggaaacatacttc

SEQ ID NO: 341603 - DNA, 54 bp, Artificial
  Synthetic oligonucleotide
caagttaattctcgaggatactaccccaaagctcaggaacatattagacagtgt

SEQ ID NO: 341604 - DNA, 51 bp, Artificial
  Synthetic oligonucleotide
caagttacaattgattggttcatttcctctcaggagtgcgttcccagaacc

SEQ ID NO: 341605 - DNA, 57 bp, Artificial
  Synthetic oligonucleotide
caagttacacatatatgctatcggatgaagtatacgtagcaaacataagtggtgttc

SEQ ID NO: 341606 - DNA, 60 bp, Artificial
  Synthetic oligonucleotide
caagttaccctcttttgcggagttatttggaccttattctgctgcatatgcgaatatgca

SEQ ID NO: 341607 - DNA, 55 bp, Artificial
  Synthetic oligonucleotide
caagttacgcttgcaaaactgttcgtgaacgctgattagacctagattaacaatg

SEQ ID NO: 341608 - DNA, 55 bp, Artificial
  Synthetic oligonucleotide
caagttacggtagcaatgcgtgaaaagccgggagttatttcgacgtcctatggga

SEQ ID NO: 341609 - DNA, 56 bp, Artificial
  Synthetic oligonucleotide
caagttagaggtgatcaatcctgatatcacaatatccgataaacctctaaagcacg

SEQ ID NO: 341610 - DNA, 59 bp, Artificial
  Synthetic oligonucleotide
caagttagattgggatctgacaattttgttggtgacgaccctctgaaagtgttatctga

SEQ ID NO: 341611 - DNA, 54 bp, Artificial
  Synthetic oligonucleotide
caagttagtaccagtcgacccaagagacgtagaggagaacaccaaaggagaaaa

SEQ ID NO: 341612 - DNA, 53 bp, Artificial
  Synthetic oligonucleotide
caagttatacgatgccaggatcaaagtcacgaggacaatgagtcacaagattg

SEQ ID NO: 341613 - DNA, 59 bp, Artificial
  Synthetic oligonucleotide
caagttatgtccaagcgatcacgttccctaaattcagctgcattttattatcgagttta

SEQ ID NO: 341614 - DNA, 55 bp, Artificial
  Synthetic oligonucleotide
caagttcaatagagtcaccaagtatcagagggtccaccatgtagtcctcgagctc

SEQ ID NO: 341615 - DNA, 60 bp, Artificial
  Synthetic oligonucleotide
caagttcacaagaggtgcacagaagctattgtcagaggcaatcaataagtcagcctttca

SEQ ID NO: 341616 - DNA, 55 bp, Artificial
  Synthetic oligonucleotide
caagttcacgtacgtatgacgtgatgacccgctgcgcgcgctgcctacggcagtc

SEQ ID NO: 341617 - DNA, 58 bp, Artificial
  Synthetic oligonucleotide
caagttcactagtgggttgggagtgaggacgcagtggaagaacgtcacagacggtgga

SEQ ID NO: 341618 - DNA, 55 bp, Artificial
  Synthetic oligonucleotide
caagttcagaagtttatggatgtcctcgccggcactgttggtacgagtgccgagg

SEQ ID NO: 341619 - DNA, 60 bp, Artificial
  Synthetic oligonucleotide
caagttcattctgccagcaccacaccggttaaccaaggcagatgaaatagttcttggatc

SEQ ID NO: 341620 - DNA, 55 bp, Artificial
  Synthetic oligonucleotide
caagttccaggctactgtcactggtggacagtatgcgtccaaggaacaggctgtg

SEQ ID NO: 341621 - DNA, 55 bp, Artificial
  Synthetic oligonucleotide
caagttccgttcggttctctaacgtacgacatcggtggtaactttgcagcgcacc

SEQ ID NO: 341622 - DNA, 55 bp, Artificial
  Synthetic oligonucleotide
caagttcgaagggtggaccgctgggtagggcccatgtcagattacagagagggtc

SEQ ID NO: 341623 - DNA, 50 bp, Artificial
  Synthetic oligonucleotide
caagttcgcatcgacttgagatatgtaacgtttatggacgacatgacttg

SEQ ID NO: 341624 - DNA, 51 bp, Artificial
  Synthetic oligonucleotide
caagttcgcggagaatcacgacccgttggggcgcattcaccccacgatcaa

SEQ ID NO: 341625 - DNA, 60 bp, Artificial
  Synthetic oligonucleotide
caagttcggcgcccaagccgaattaacttccctgcgactgcaagctgacaggtggctcca

SEQ ID NO: 341626 - DNA, 59 bp, Artificial
  Synthetic oligonucleotide
caagttcggcttctcagacgcgaaaaacagcgtgaatatgagttagagtgtgttactag

SEQ ID NO: 341627 - DNA, 60 bp, Artificial
  Synthetic oligonucleotide
caagttcgtaaatatgatatcgcggagaatcaaacggtatcaatcattactattcgcgag

SEQ ID NO: 341628 - DNA, 55 bp, Artificial
  Synthetic oligonucleotide
caagttctaacgatgttcacgactgcagcgatgtagacattcgagattgttggct

SEQ ID NO: 341629 - DNA, 60 bp, Artificial
  Synthetic oligonucleotide
caagttcttaaatagtggcatgtttcatgatatatggacataactcataaacgtggttca

SEQ ID NO: 341630 - DNA, 58 bp, Artificial
  Synthetic oligonucleotide
caagttgaagcgttggcagatcagactcaacagtttaagagggacaagctcgaaacgt

SEQ ID NO: 341631 - DNA, 60 bp, Artificial
  Synthetic oligonucleotide
caagttgaatacatattgtgatagcgaatactatacctgtgttatgttagagaacttaga

SEQ ID NO: 341632 - DNA, 55 bp, Artificial
  Synthetic oligonucleotide
caagttgaatgaacgggccaggattattccttagcgtcgaagaaaggaatcttat

SEQ ID NO: 341633 - DNA, 55 bp, Artificial
  Synthetic oligonucleotide
caagttgacagacacagttgccgatcgtctcgtctagcgtgagaatagtacgcgt

SEQ ID NO: 341634 - DNA, 55 bp, Artificial
  Synthetic oligonucleotide
caagttgactcagactggggactcagtgattcaacaaacgtcacggtacgttcgg

SEQ ID NO: 341635 - DNA, 56 bp, Artificial
  Synthetic oligonucleotide
caagttgagcgaacatatacgttatttggacaacaagttcaagtaacggtatcaaa

SEQ ID NO: 341636 - DNA, 55 bp, Artificial
  Synthetic oligonucleotide
caagttgcaggatttgactactcatgcgcacttaatgctccagctaatactcaac

SEQ ID NO: 341637 - DNA, 59 bp, Artificial
  Synthetic oligonucleotide
caagttggaaaggaagctccggaggctcgatctgtccgtgggactcagtgatgtacttg

SEQ ID NO: 341638 - DNA, 55 bp, Artificial
  Synthetic oligonucleotide
caagttggaggttctgacatacttgatataacagctgatccgaccacagcaccac

SEQ ID NO: 341639 - DNA, 60 bp, Artificial
  Synthetic oligonucleotide
caagttggatagaactcgatgaaataggggaggatgttgccccaatcgaacacattgcaa

SEQ ID NO: 341640 - DNA, 55 bp, Artificial
  Synthetic oligonucleotide
caagttggcctactttctgttgacgctctgcagtctagctggactagtggccgcc

SEQ ID NO: 341641 - DNA, 60 bp, Artificial
  Synthetic oligonucleotide
caagttggggctgtaatccatctgactgccctggggtaggtacgggctgtacagcatgcg

SEQ ID NO: 341642 - DNA, 59 bp, Artificial
  Synthetic oligonucleotide
caagttgggttgctccaaacgcaggtgggagtgcatcgcaaccatcccatgcatcgggg

SEQ ID NO: 341643 - DNA, 55 bp, Artificial
  Synthetic oligonucleotide
caagttggtacaggcgctctatgctgcgaaacctaatatcaagacccgatattgc

SEQ ID NO: 341644 - DNA, 55 bp, Artificial
  Synthetic oligonucleotide
caagttggtgctatgtgatgtttctccctccggagtgggccgtttcatctatcgt

SEQ ID NO: 341645 - DNA, 55 bp, Artificial
  Synthetic oligonucleotide
caagttggtggtgctgacatccttgatataacatctgatcctacgactactccac

SEQ ID NO: 341646 - DNA, 55 bp, Artificial
  Synthetic oligonucleotide
caagttgtagcagaacgtttagcactccatggtgtggcatgggcccaacatgtcg

SEQ ID NO: 341647 - DNA, 60 bp, Artificial
  Synthetic oligonucleotide
caagttgtgactttgatccagtctatacccgaagtcctgcaggaggtcttcaatgtcgcc

SEQ ID NO: 341648 - DNA, 55 bp, Artificial
  Synthetic oligonucleotide
caagttgtggaagccggagtgtttgacgattggtgggttcacgtagaagcctgga

SEQ ID NO: 341649 - DNA, 55 bp, Artificial
  Synthetic oligonucleotide
caagttgtgttcagcccctactggccattactacagaatttaagttctttgaact

SEQ ID NO: 341650 - DNA, 57 bp, Artificial
  Synthetic oligonucleotide
caagtttaaattacccatacagaaagaaacatgggacacatggtggacagagtattg

SEQ ID NO: 341651 - DNA, 55 bp, Artificial
  Synthetic oligonucleotide
caagtttaacgaactgtcaagacccgatttgtgccaccatcgcgcagaagattgc

SEQ ID NO: 341652 - DNA, 57 bp, Artificial
  Synthetic oligonucleotide
caagtttacacctcagcatcagagggcacaccagctacaaggcagtgtcctgtgatt

SEQ ID NO: 341653 - DNA, 55 bp, Artificial
  Synthetic oligonucleotide
caagtttactttgctcagattgtagtgaacggctcgaacgagaaggctcttcgag

SEQ ID NO: 341654 - DNA, 58 bp, Artificial
  Synthetic oligonucleotide
caagtttagacatatattattcactaactaagtcacataggaattaagacatgaggat

SEQ ID NO: 341655 - DNA, 60 bp, Artificial
  Synthetic oligonucleotide
caagtttagcaaacgccatatctgatttaacaagccatatgtctgaagcggcatcttctg

SEQ ID NO: 341656 - DNA, 59 bp, Artificial
  Synthetic oligonucleotide
caagtttcatcagaggaacgagagtggtcccaagaggacaactatccaccagaggagtc

SEQ ID NO: 341657 - DNA, 57 bp, Artificial
  Synthetic oligonucleotide
caagtttctcactagaaggcttgcaggcacatttacttggactttgtcagactcttc

SEQ ID NO: 341658 - DNA, 55 bp, Artificial
  Synthetic oligonucleotide
caagtttgcacctcagtataaggggaaactccaactacaaagcagtgtcttgtga

SEQ ID NO: 341659 - DNA, 55 bp, Artificial
  Synthetic oligonucleotide
caagtttgcgaacgccataatcaaatctggaggtctaggatataagtggtctgag

SEQ ID NO: 341660 - DNA, 58 bp, Artificial
  Synthetic oligonucleotide
caagtttgggcccccctggataagtcagcaatcttctcatgtttgcattggcttaccc

SEQ ID NO: 341661 - DNA, 54 bp, Artificial
  Synthetic oligonucleotide
caagtttgttcagtattactgacgatagtgagtctgatcacgttagggacaatc

SEQ ID NO: 341662 - DNA, 52 bp, Artificial
  Synthetic oligonucleotide
caagttttatagaggaaggtggaattgagcctattcccatggaacttgctga

SEQ ID NO: 341663 - DNA, 55 bp, Artificial
  Synthetic oligonucleotide
caagttttggccgagtagctttagaggtcgatgccgcggtgtacgtgactctcac

SEQ ID NO: 341664 - DNA, 54 bp, Artificial
  Synthetic oligonucleotide
caagtttttagtagggttaggactaaagtgttaattgctaatactgatgtggat

SEQ ID NO: 341665 - DNA, 58 bp, Artificial
  Synthetic oligonucleotide
caagtttttgaggaatacttagttcagctaatagggaaagatggggatgatgctttga

SEQ ID NO: 341666 - DNA, 60 bp, Artificial
  Synthetic oligonucleotide
caataaaaaaccagatattgataatgtggtcaagattatagctgattcactcaatgagat

SEQ ID NO: 341667 - DNA, 58 bp, Artificial
  Synthetic oligonucleotide
caataaaacgatgtctgacttatcttctacgcttaacaattgtcgtgatatgaaagtt

SEQ ID NO: 341668 - DNA, 56 bp, Artificial
  Synthetic oligonucleotide
caataaaaggactcaagacttctgggaggtccaattaggaatacctcatcctgcgg

SEQ ID NO: 341669 - DNA, 55 bp, Artificial
  Synthetic oligonucleotide
caataaaagtgtgtccattgaatactcaaacactggggataggatgtcagaccac

SEQ ID NO: 341670 - DNA, 60 bp, Artificial
  Synthetic oligonucleotide
caataaaatcacgtcagagctgtttaaatcggctgaagaatacacggattcattgatgga

SEQ ID NO: 341671 - DNA, 54 bp, Artificial
  Synthetic oligonucleotide
caataaacactcgaaaaggtatttgccgtttgagtctttattcagttctgggat

SEQ ID NO: 341672 - DNA, 56 bp, Artificial
  Synthetic oligonucleotide
caataaacactcgaaaaggtatttgctgtctgagtccttattaagtactgggattg

SEQ ID NO: 341673 - DNA, 55 bp, Artificial
  Synthetic oligonucleotide
caataaaccggttgattcgtttcagttgaactttggtctcctgtgcttcttatct

SEQ ID NO: 341674 - DNA, 60 bp, Artificial
  Synthetic oligonucleotide
caataaagagcaagtgtatgttacaagacatgcccttgtggatgatgctgtatggctacg

SEQ ID NO: 341675 - DNA, 55 bp, Artificial
  Synthetic oligonucleotide
caataaagcactcacacaggcaatgcgaacttgtaagaaattggagtacttgccc

SEQ ID NO: 341676 - DNA, 55 bp, Artificial
  Synthetic oligonucleotide
caataaagctaggccgtgggactttcacttgtcggtgtctgcttataaaagtaac

SEQ ID NO: 341677 - DNA, 55 bp, Artificial
  Synthetic oligonucleotide
caataaaggagtcgggtatgccagtgacggaatgatcaaatataaggttgatggg

SEQ ID NO: 341678 - DNA, 58 bp, Artificial
  Synthetic oligonucleotide
caataaatgttatcaatttgcacttgggcagggaaccacgctagataacaaacactca

SEQ ID NO: 341679 - DNA, 53 bp, Artificial
  Synthetic oligonucleotide
caataaattacctttcctaaaatacccctatttctgtgtctggaaggtgcgtg

SEQ ID NO: 341680 - DNA, 52 bp, Artificial
  Synthetic oligonucleotide
caataaatttcgtactctttctgtcttcggccgtcgtgttgtacctcgtgta

SEQ ID NO: 341681 - DNA, 55 bp, Artificial
  Synthetic oligonucleotide
caataacaagtttgtacgctttaaatacagaagcggagaaatgacgtatggcaac

SEQ ID NO: 341682 - DNA, 55 bp, Artificial
  Synthetic oligonucleotide
caataacacgcacacgagtaagtcgattatacggattaccagccgtaaacccgaa

SEQ ID NO: 341683 - DNA, 52 bp, Artificial
  Synthetic oligonucleotide
caataacaggtctaccattggtaacacgattgaagctttgtttcaaggtcca

SEQ ID NO: 341684 - DNA, 59 bp, Artificial
  Synthetic oligonucleotide
caataacatactcgtgtatgttgcaagttacaacgaagtagacatgctttccaagttac

SEQ ID NO: 341685 - DNA, 59 bp, Artificial
  Synthetic oligonucleotide
caataaccatgtggtctacaaccaccaggaggctggcaaatacgagaaccacacggaga

SEQ ID NO: 341686 - DNA, 60 bp, Artificial
  Synthetic oligonucleotide
caataactgattggtcaggatatagcgggagttttgtccagcatccagaattaacaggac

SEQ ID NO: 341687 - DNA, 58 bp, Artificial
  Synthetic oligonucleotide
caataacttctacgccgccgttgacgtggcattcgctaccctgaacatcacatcgacc

SEQ ID NO: 341688 - DNA, 56 bp, Artificial
  Synthetic oligonucleotide
caataactttttggtcacactttgagcaagtactaggatttacagcaaattctttg

SEQ ID NO: 341689 - DNA, 59 bp, Artificial
  Synthetic oligonucleotide
caataagaaaccagtgtgtactacctatcatgaaggacaggatacatactccttaggga

SEQ ID NO: 341690 - DNA, 55 bp, Artificial
  Synthetic oligonucleotide
caataagacctgctgtaaacattgggtattggccatatatggtgcaaaagaagag

SEQ ID NO: 341691 - DNA, 55 bp, Artificial
  Synthetic oligonucleotide
caataagacgttcattgctattagggataaaccacaacatgtatgcgaacgagac

SEQ ID NO: 341692 - DNA, 55 bp, Artificial
  Synthetic oligonucleotide
caataagaggaccgaggcttactgattgtacctcagcacagatttcgttacgact

SEQ ID NO: 341693 - DNA, 50 bp, Artificial
  Synthetic oligonucleotide
caataagatgatgctgaccatcgtctcaatggcgggaatcgattgtcaat

SEQ ID NO: 341694 - DNA, 59 bp, Artificial
  Synthetic oligonucleotide
caataagattgatgaccaaatacaagacatatgggcatacaatgcagaattgctagtac

SEQ ID NO: 341695 - DNA, 51 bp, Artificial
  Synthetic oligonucleotide
caataaggaacccgcagtgctcagaaatggtgatccgcgactcaaagccaa

SEQ ID NO: 341696 - DNA, 60 bp, Artificial
  Synthetic oligonucleotide
caataaggataggagaggacgcccatatactagtcacaagagagccctacctgtcctgtg

SEQ ID NO: 341697 - DNA, 55 bp, Artificial
  Synthetic oligonucleotide
caataagggcatgggtatgagagcagcaatcattggcagtgcgtgggtctggaca

SEQ ID NO: 341698 - DNA, 60 bp, Artificial
  Synthetic oligonucleotide
caataaggtgctaaaattggcaatgagagctgtggaatacgaagggctgcacctcaaacc

SEQ ID NO: 341699 - DNA, 59 bp, Artificial
  Synthetic oligonucleotide
caataagtcccatcccatattggaataggcaaaatgagacagacccggactcaccattg

SEQ ID NO: 341700 - DNA, 54 bp, Artificial
  Synthetic oligonucleotide
caataagtctcgaaaagaaggtacttcatcgtttcgtagagaacctctttggtc

SEQ ID NO: 341701 - DNA, 55 bp, Artificial
  Synthetic oligonucleotide
caataagtgaccaatccattagcttcccaacttggctgagtccagcgtggattgg

SEQ ID NO: 341702 - DNA, 55 bp, Artificial
  Synthetic oligonucleotide
caataagttggtgcagagggttgtgtataacgcaggtatgggaataggagtgggg

SEQ ID NO: 341703 - DNA, 60 bp, Artificial
  Synthetic oligonucleotide
caataataaattggagcgtgatctgcaatcaaagattggatcagtcgtttcgtcaataga

SEQ ID NO: 341704 - DNA, 53 bp, Artificial
  Synthetic oligonucleotide
caataataaccagcccacatacacaaacaacagtggtggtgtcccgagtaatg

SEQ ID NO: 341705 - DNA, 58 bp, Artificial
  Synthetic oligonucleotide
caataataacgttcttcggcaggttcaatgctcgtggctgtagtgggttaccagaaga

SEQ ID NO: 341706 - DNA, 60 bp, Artificial
  Synthetic oligonucleotide
caataataagggagctgtcttcaaatcaaaccttccaattgaaaattgtgatgctgcatg

SEQ ID NO: 341707 - DNA, 57 bp, Artificial
  Synthetic oligonucleotide
caataatacaattcaattgataaaacccggccccgcaggggcagtgtgtttgatcca

SEQ ID NO: 341708 - DNA, 60 bp, Artificial
  Synthetic oligonucleotide
caataatagtaccatatgtaaatgcagtgccaatggattctatgcttaggcataataact

SEQ ID NO: 341709 - DNA, 52 bp, Artificial
  Synthetic oligonucleotide
caataatattatacgtagatataagagtgacatgttgttacttgattcaaca

SEQ ID NO: 341710 - DNA, 54 bp, Artificial
  Synthetic oligonucleotide
caataatatttaactcatccgcgggaggggacccagaaattacaacacacagtt

SEQ ID NO: 341711 - DNA, 55 bp, Artificial
  Synthetic oligonucleotide
caataatatttgcaccaccctcaggaggggacctggaagttacaacacatagctt

SEQ ID NO: 341712 - DNA, 55 bp, Artificial
  Synthetic oligonucleotide
caataatccctctccgtggtgtgtttgtgagttcttacttaataggcgtgcgcga

SEQ ID NO: 341713 - DNA, 59 bp, Artificial
  Synthetic oligonucleotide
caataatgaggtcagatgcacctattgacacctgcatttctgaatgcatcactccaaat

SEQ ID NO: 341714 - DNA, 56 bp, Artificial
  Synthetic oligonucleotide
caataatgatagaatagggcgtgctagaatgctattagcttttagctcaaatacac

SEQ ID NO: 341715 - DNA, 56 bp, Artificial
  Synthetic oligonucleotide
caataatggtatatgttggggtaatcaagtgtttctaactgttgtggatactaccc

SEQ ID NO: 341716 - DNA, 60 bp, Artificial
  Synthetic oligonucleotide
caataattaggaacagaatagagcaattgatactgcaatgtagagtttaacttgcagtag

SEQ ID NO: 341717 - DNA, 60 bp, Artificial
  Synthetic oligonucleotide
caataattccacagaaaaggtcgacacaattctagagcggaatgtcactgtgactcatgc

SEQ ID NO: 341718 - DNA, 60 bp, Artificial
  Synthetic oligonucleotide
caataattctggcaacactggagtgattaactataacgtttactccaattcatacacaga

SEQ ID NO: 341719 - DNA, 55 bp, Artificial
  Synthetic oligonucleotide
caataattgattacattaatacgattgttcaaacaatgaccccgagacatcgggc

SEQ ID NO: 341720 - DNA, 58 bp, Artificial
  Synthetic oligonucleotide
caatacaaaacaccaggaatgtagtaccagtgagcataacgtcaagggaaataaggca

SEQ ID NO: 341721 - DNA, 60 bp, Artificial
  Synthetic oligonucleotide
caatacaaacaggactacacagtgacattatgttctacacaatagaaaatgcagtaccaa

SEQ ID NO: 341722 - DNA, 59 bp, Artificial
  Synthetic oligonucleotide
caatacaaacgcgcaggccaaacacttgaaggactgcgccaccatggtcgcgcactata

SEQ ID NO: 341723 - DNA, 55 bp, Artificial
  Synthetic oligonucleotide
caatacaaacgtactgatacagagaggcaattttaaaggccctagaagaagtgtt

SEQ ID NO: 341724 - DNA, 60 bp, Artificial
  Synthetic oligonucleotide
caatacaaagcaaaactattagcagaagcaatggtaatgacacaacacagcttgggcatg

SEQ ID NO: 341725 - DNA, 53 bp, Artificial
  Synthetic oligonucleotide
caatacaacaattattagaaagagatagcaatatgagtgaacgagataacatg

SEQ ID NO: 341726 - DNA, 60 bp, Artificial
  Synthetic oligonucleotide
caatacaacacatctgtttaatggtaatggtacagaaagtgatataaacatcacactccc

SEQ ID NO: 341727 - DNA, 60 bp, Artificial
  Synthetic oligonucleotide
caatacaaggtatggagaactgttcacaaagctgtgcacgcatgttgaaaagaaattgct

SEQ ID NO: 341728 - DNA, 56 bp, Artificial
  Synthetic oligonucleotide
caatacaattatgcagcccactagcatttattgtccgtacatattgacttggtcaa

SEQ ID NO: 341729 - DNA, 55 bp, Artificial
  Synthetic oligonucleotide
caatacacaaggctatttccccgattggcagaattacacaccagggcctgggatc

SEQ ID NO: 341730 - DNA, 60 bp, Artificial
  Synthetic oligonucleotide
caatacacactaccaaaccaactgctctatcggcaatggagattggagcatcttctgatg

SEQ ID NO: 341731 - DNA, 55 bp, Artificial
  Synthetic oligonucleotide
caatacaggttggcattcacgcctacaccaaacccctcgcggccctacagttgga

SEQ ID NO: 341732 - DNA, 60 bp, Artificial
  Synthetic oligonucleotide
caatacagtggattcgtgaggacactgtttcagcagatgcgagatgtacttggaacattt

SEQ ID NO: 341733 - DNA, 60 bp, Artificial
  Synthetic oligonucleotide
caatacagtggattcgtgaggactctattccagcaaatgcgcgatgtgctggggacattt

SEQ ID NO: 341734 - DNA, 55 bp, Artificial
  Synthetic oligonucleotide
caatacagttgctcctaatctattgcatctcctgccctaccctgtgtcccctgcc

SEQ ID NO: 341735 - DNA, 60 bp, Artificial
  Synthetic oligonucleotide
caatacatcacgcctgtttaataatacttgcataaataataccatggaggagtgtaataa

SEQ ID NO: 341736 - DNA, 57 bp, Artificial
  Synthetic oligonucleotide
caatacatcaggactgtttaataagacctactcgctgtttaataatacctactcgtc

SEQ ID NO: 341737 - DNA, 57 bp, Artificial
  Synthetic oligonucleotide
caatacatcatggttcgaaaaccctcggtagttacttctaaggatgtcactagccta

SEQ ID NO: 341738 - DNA, 55 bp, Artificial
  Synthetic oligonucleotide
caatacatcggaactgtttaatagcacttgggataacagcttaaatcacacagag

SEQ ID NO: 341739 - DNA, 57 bp, Artificial
  Synthetic oligonucleotide
caatacatgatagaattcctcatcgaacccttttaatgaacgagttgggtgttccat

SEQ ID NO: 341740 - DNA, 55 bp, Artificial
  Synthetic oligonucleotide
caatacatgcaaagcgcatgattagatcacgaaccgtacaccccatctatttggg

SEQ ID NO: 341741 - DNA, 55 bp, Artificial
  Synthetic oligonucleotide
caatacatggtgtcggaagcggttacgtgcagcattcccattccgctgccatttg

SEQ ID NO: 341742 - DNA, 57 bp, Artificial
  Synthetic oligonucleotide
caatacattactatcggcggacccactactacaaaagtgtcaacaaattaataatgc

SEQ ID NO: 341743 - DNA, 60 bp, Artificial
  Synthetic oligonucleotide
caatacatttagtgttgattgcaagcacaaagcgcctttgcaactaaaatgcccgcctct

SEQ ID NO: 341744 - DNA, 56 bp, Artificial
  Synthetic oligonucleotide
caataccaaacccgagatccataggatggtatatcgtcatttcgtcagtagtcgcc

SEQ ID NO: 341745 - DNA, 55 bp, Artificial
  Synthetic oligonucleotide
caataccaccgacacaaaattcactgccagtggtgagaaaggctgtttcacctaa

SEQ ID NO: 341746 - DNA, 60 bp, Artificial
  Synthetic oligonucleotide
caataccactatcgctccacaagatactcaagaattacacacaccgcaacaccgatctga

SEQ ID NO: 341747 - DNA, 55 bp, Artificial
  Synthetic oligonucleotide
caataccagactctgtactttcttgggtttccctggtattttcctctgtgggatc

SEQ ID NO: 341748 - DNA, 55 bp, Artificial
  Synthetic oligonucleotide
caataccaggatgcctttccactatgtccatccttttaccattggggagtgcccc

SEQ ID NO: 341749 - DNA, 58 bp, Artificial
  Synthetic oligonucleotide
caataccatttattaagatcctgctaggatctttatcagatcttccagggttgggtta

SEQ ID NO: 341750 - DNA, 52 bp, Artificial
  Synthetic oligonucleotide
caataccccaattgatatcgggggctttgggtacccatagtttttactggac

SEQ ID NO: 341751 - DNA, 60 bp, Artificial
  Synthetic oligonucleotide
caataccccgtgcgaggaataaatggcgatggacgctctagagactacatcaagttattg

SEQ ID NO: 341752 - DNA, 55 bp, Artificial
  Synthetic oligonucleotide
caatacccgttcgggagaaactcggacaagtcgtcgacaagcggacgagtgttga

SEQ ID NO: 341753 - DNA, 54 bp, Artificial
  Synthetic oligonucleotide
caatacccttcttgtaaggggatgaagccaatttatccagtatatcctgaaacg

SEQ ID NO: 341754 - DNA, 52 bp, Artificial
  Synthetic oligonucleotide
caatacctaaaccccttgaaactattataaatcctttaggaacatttgataa

SEQ ID NO: 341755 - DNA, 50 bp, Artificial
  Synthetic oligonucleotide
caatacctcccgaggacatgtagacaggattttggcatgcttgtataaat

SEQ ID NO: 341756 - DNA, 57 bp, Artificial
  Synthetic oligonucleotide
caatacctgtacggcatagggtcggcagctgtctcctttgctatcaaatgggagtac

SEQ ID NO: 341757 - DNA, 60 bp, Artificial
  Synthetic oligonucleotide
caataccttgccggtctgtccaccttacccggcaaccctgccattgcatcgctcatgtca

SEQ ID NO: 341758 - DNA, 59 bp, Artificial
  Synthetic oligonucleotide
caataccttgtcaaggggcgtccacattgtgagacgacgtcttgacacgtcggatagga

SEQ ID NO: 341759 - DNA, 53 bp, Artificial
  Synthetic oligonucleotide
caatacgaacttggtgaacgaatttgttggcggaacgagactggagtttaacg

SEQ ID NO: 341760 - DNA, 51 bp, Artificial
  Synthetic oligonucleotide
caatacgaaggcacagaggacgtactattgtttgacacattctgcattgga

SEQ ID NO: 341761 - DNA, 55 bp, Artificial
  Synthetic oligonucleotide
caatacgagcagttctccgtacggaaacatattagaggatcgcgtgagttggcga

SEQ ID NO: 341762 - DNA, 58 bp, Artificial
  Synthetic oligonucleotide
caatacgagtcaaaggggaatccttgaggatgaacaaatgtaccagaagtgttgcaac

SEQ ID NO: 341763 - DNA, 51 bp, Artificial
  Synthetic oligonucleotide
caatacgcaggaagatagtgcgatttgctgatccaggcgttaaattttgga

SEQ ID NO: 341764 - DNA, 57 bp, Artificial
  Synthetic oligonucleotide
caatacgcaggtggatatcggaacatccgagagtcaggtaccagggggaaccactaa

SEQ ID NO: 341765 - DNA, 55 bp, Artificial
  Synthetic oligonucleotide
caatacgccagattcccttgttttaattaatccaacgtatacgatgaccaaggtc

SEQ ID NO: 341766 - DNA, 55 bp, Artificial
  Synthetic oligonucleotide
caatacgccttatactggtgcccttggcttgcttgatttcgcactcgagctcgag

SEQ ID NO: 341767 - DNA, 55 bp, Artificial
  Synthetic oligonucleotide
caatacgtagctcaaccttagtggcaatttcaaacctgcttgccgtcctttcacg

SEQ ID NO: 341768 - DNA, 60 bp, Artificial
  Synthetic oligonucleotide
caatacgtcatcgagcaattctcgcatccgggtgatggctgcctaccactgcggcgcaga

SEQ ID NO: 341769 - DNA, 55 bp, Artificial
  Synthetic oligonucleotide
caatacgtctgaccactgagaacgtcactcagtatgttaccaaacttaaggggcc

SEQ ID NO: 341770 - DNA, 55 bp, Artificial
  Synthetic oligonucleotide
caatacgtcttacactgactctctttctgacatgttcaatgggttacggtctatc

SEQ ID NO: 341771 - DNA, 57 bp, Artificial
  Synthetic oligonucleotide
caatactaagtccgaacgattcaatattctttgagagtactgggaactttatagctc

SEQ ID NO: 341772 - DNA, 58 bp, Artificial
  Synthetic oligonucleotide
caatactaatgacaattcaagaggtatgaactatgaaacttcaatgtttaacaaggtg

SEQ ID NO: 341773 - DNA, 60 bp, Artificial
  Synthetic oligonucleotide
caatactactagaattggtacgacaaccatacagcatgcggaggctaagcagaatattgt

SEQ ID NO: 341774 - DNA, 55 bp, Artificial
  Synthetic oligonucleotide
caatactatacagaggaccaaggtcactttcccttacaacatgcattgaggtctg

SEQ ID NO: 341775 - DNA, 58 bp, Artificial
  Synthetic oligonucleotide
caatactatcatattcttacgacaagtataacgctgttgaaagaaaattggtgaagta

SEQ ID NO: 341776 - DNA, 58 bp, Artificial
  Synthetic oligonucleotide
caatactatgggatacccatggctgaacgccagaataacgggtggcttaagaagttca

SEQ ID NO: 341777 - DNA, 55 bp, Artificial
  Synthetic oligonucleotide
caatactattgggtctccaaggccgcgcagcggaacccatcacgttctcggaaac

SEQ ID NO: 341778 - DNA, 60 bp, Artificial
  Synthetic oligonucleotide
caatactcaactacttggtgcaactaatacgattcctgaacagactctcaacctcgatat

SEQ ID NO: 341779 - DNA, 55 bp, Artificial
  Synthetic oligonucleotide
caatactccccaaagttgcagtgtaaaacatttcgtgaggaggagtggatatgag

SEQ ID NO: 341780 - DNA, 57 bp, Artificial
  Synthetic oligonucleotide
caatactccctctcttgttcgtgagaggtgggttaaacgcagtaaatgactttatga

SEQ ID NO: 341781 - DNA, 51 bp, Artificial
  Synthetic oligonucleotide
caatactccgaaaagggaaaatggacaacaaacacagaaaccggggcgccc

SEQ ID NO: 341782 - DNA, 56 bp, Artificial
  Synthetic oligonucleotide
caatactcttgaactaggacagatgcatcaaatcaacacatagtgctctaccatca

SEQ ID NO: 341783 - DNA, 60 bp, Artificial
  Synthetic oligonucleotide
caatactgacatggtgcgaagagcctactgagctaactggtattcctccggcccctgaat

SEQ ID NO: 341784 - DNA, 52 bp, Artificial
  Synthetic oligonucleotide
caatactgcagccgatcgtgcgagcataaccactacggactatgagggtggc

SEQ ID NO: 341785 - DNA, 55 bp, Artificial
  Synthetic oligonucleotide
caatactggaggagatccagagataacccagttgcattttaattgtcatggagag

SEQ ID NO: 341786 - DNA, 56 bp, Artificial
  Synthetic oligonucleotide
caatactggcagctcattggtttctctgcccgcgatttcaaaacggaggtttttgt

SEQ ID NO: 341787 - DNA, 55 bp, Artificial
  Synthetic oligonucleotide
caatactggcgtgatgaacagggcatgtcagaaagttatactaagtatagatatc

SEQ ID NO: 341788 - DNA, 55 bp, Artificial
  Synthetic oligonucleotide
caatactggcgtgggctcccacggtattttaacataaccctgaggaagagagctg

SEQ ID NO: 341789 - DNA, 60 bp, Artificial
  Synthetic oligonucleotide
caatacttctgaaagccctgtatatgctgactacaagagggagacagacaaccaaagata

SEQ ID NO: 341790 - DNA, 60 bp, Artificial
  Synthetic oligonucleotide
caatacttgacctataatgcagttgacttgggtgattctgcttatagagtcgaaaggaaa

SEQ ID NO: 341791 - DNA, 59 bp, Artificial
  Synthetic oligonucleotide
caatacttgagaagtatgatgagatatgtgacggtttctggtaatttgtcaccttttgg

SEQ ID NO: 341792 - DNA, 58 bp, Artificial
  Synthetic oligonucleotide
caatacttgggaagaggtaactggaatgtgaacactgtgcatgaaagtcagggaaaaa

SEQ ID NO: 341793 - DNA, 59 bp, Artificial
  Synthetic oligonucleotide
caatacttgggttaataggcccatgtacaggaagcccaggatatatcggatgtatagga

SEQ ID NO: 341794 - DNA, 58 bp, Artificial
  Synthetic oligonucleotide
caatacttgtatttttatacaagacctgtttacaagactgcataacgcagtggaggct

SEQ ID NO: 341795 - DNA, 54 bp, Artificial
  Synthetic oligonucleotide
caatagaagtagagggaagaaaagtacagggaacagtattggtaggacctactc

SEQ ID NO: 341796 - DNA, 59 bp, Artificial
  Synthetic oligonucleotide
caatagaatacagtatacggaacgtatactgacaaactaattaaatgataggcgaagca

SEQ ID NO: 341797 - DNA, 60 bp, Artificial
  Synthetic oligonucleotide
caatagacccattgatctcaaacatattggagacaatgtgtatgtagctcagagggttta

SEQ ID NO: 341798 - DNA, 60 bp, Artificial
  Synthetic oligonucleotide
caatagagagaatggtgctctcagcattcgatgaaagaaggaacaagtacttagaagagc

SEQ ID NO: 341799 - DNA, 57 bp, Artificial
  Synthetic oligonucleotide
caatagaggaagacttaaagttacaggtgagctgaaaagcaatccctacagacctaa

SEQ ID NO: 341800 - DNA, 60 bp, Artificial
  Synthetic oligonucleotide
caatagaggtggaacttactattcaatttcagctggaaatgttgtcattcaatctttaga

SEQ ID NO: 341801 - DNA, 59 bp, Artificial
  Synthetic oligonucleotide
caatagagtggagctgggcaggagacaaaaccttcaaatgaccttgatgtttcactccg

SEQ ID NO: 341802 - DNA, 58 bp, Artificial
  Synthetic oligonucleotide
caatagatacagtgacgtcgttgccaatgtctataacacgccggaggctaaacttcgg

SEQ ID NO: 341803 - DNA, 60 bp, Artificial
  Synthetic oligonucleotide
caatagatcagatcacaggcaaattgaatcgtctaattggcaaaacaaatcagcagtttg

SEQ ID NO: 341804 - DNA, 60 bp, Artificial
  Synthetic oligonucleotide
caatagatcatggtcctacattgcagaaacaccaaactctgagaatgggatatgttaccc

SEQ ID NO: 341805 - DNA, 52 bp, Artificial
  Synthetic oligonucleotide
caatagatgtaggacagatatacaggagatgggtcatcctaggcttacagag

SEQ ID NO: 341806 - DNA, 60 bp, Artificial
  Synthetic oligonucleotide
caatagatgttgagtatagagatccggccccttatgtgcatgcacaacgctacatacgtt

SEQ ID NO: 341807 - DNA, 59 bp, Artificial
  Synthetic oligonucleotide
caatagattttcctctgccaatgaaacggagggaactccgcttgataccaagatagcaa

SEQ ID NO: 341808 - DNA, 59 bp, Artificial
  Synthetic oligonucleotide
caatagcaaggctatcgaatcgcgtatttagagacaagctgtttaaaacactaacatta

SEQ ID NO: 341809 - DNA, 56 bp, Artificial
  Synthetic oligonucleotide
caatagcacagcctaactcaaaagataatttttctgctgggcagttaatattcaaa

SEQ ID NO: 341810 - DNA, 60 bp, Artificial
  Synthetic oligonucleotide
caatagcaggcataacgctccagttatgtctcgatcaagcacttctgtttccccggactg

SEQ ID NO: 341811 - DNA, 55 bp, Artificial
  Synthetic oligonucleotide
caatagcatgtaaggcagtgtaacgttagcctcaatagcgttactgaccggctga

SEQ ID NO: 341812 - DNA, 54 bp, Artificial
  Synthetic oligonucleotide
caatagcattgacacaggggaagacctagtagacttcatagatacaaggcgccc

SEQ ID NO: 341813 - DNA, 55 bp, Artificial
  Synthetic oligonucleotide
caatagccggatttatagaaggtgggtggccagggcttatcaatggatggtacgg

SEQ ID NO: 341814 - DNA, 60 bp, Artificial
  Synthetic oligonucleotide
caatagcctgcctgacacaaagccgagcggtccagcccactccaaggagatacctgcatt

SEQ ID NO: 341815 - DNA, 57 bp, Artificial
  Synthetic oligonucleotide
caatagcctttaggccacccataggaggggacccagaaattgtaatgcacagcttta

SEQ ID NO: 341816 - DNA, 55 bp, Artificial
  Synthetic oligonucleotide
caatagcggaaattctggagaagccgcacgtcgggacgccgaggaaagacgtcgc

SEQ ID NO: 341817 - DNA, 60 bp, Artificial
  Synthetic oligonucleotide
caatagcggtagcagaaggaacagataggattttagaattttgtagagctatcctcaaca

SEQ ID NO: 341818 - DNA, 54 bp, Artificial
  Synthetic oligonucleotide
caatagctcctcggctttggtggttaatgggggaatcacggggaacctgtacaa

SEQ ID NO: 341819 - DNA, 55 bp, Artificial
  Synthetic oligonucleotide
caataggacgtggccaatccaggccatgacggacaagcacttctgtctccccggg

SEQ ID NO: 341820 - DNA, 55 bp, Artificial
  Synthetic oligonucleotide
caataggagcttcaagcctaatattgggccaaggccactcgtgagaggacaacag

SEQ ID NO: 341821 - DNA, 53 bp, Artificial
  Synthetic oligonucleotide
caataggagggggtacaaaccagtgccaccacgaacaaacacttctgtttccc

SEQ ID NO: 341822 - DNA, 60 bp, Artificial
  Synthetic oligonucleotide
caataggcaatccctgctcaaacttgttgagatgcaagggccaaaaggacaagccaacat

SEQ ID NO: 341823 - DNA, 58 bp, Artificial
  Synthetic oligonucleotide
caataggccaggtatcaaggcccatgttcttgtatgttagaaccaatggaacttccaa

SEQ ID NO: 341824 - DNA, 53 bp, Artificial
  Synthetic oligonucleotide
caataggcgtagccggcgagttgacaaggaccagtgggggccgggggcttgga

SEQ ID NO: 341825 - DNA, 55 bp, Artificial
  Synthetic oligonucleotide
caataggcttagggtagctaaagctggacaaacccttgcttgctttcaacacgct

SEQ ID NO: 341826 - DNA, 59 bp, Artificial
  Synthetic oligonucleotide
caataggcttcagccacattaataggtacttctacaactttgtgaaggtgccatttcag

SEQ ID NO: 341827 - DNA, 55 bp, Artificial
  Synthetic oligonucleotide
caatagggaattcttaaatccagacgagcaaatgacctaccttaaccatgctgac

SEQ ID NO: 341828 - DNA, 60 bp, Artificial
  Synthetic oligonucleotide
caatagggacgatctgcaaccagtgaccctataagtggtcgcgctgttagtgtggtgaag

SEQ ID NO: 341829 - DNA, 55 bp, Artificial
  Synthetic oligonucleotide
caatagggacgcaacaaaactctatacccaaagtcatcgaaggcacctcgtggaa

SEQ ID NO: 341830 - DNA, 55 bp, Artificial
  Synthetic oligonucleotide
caatagggagcatcctcatgggtttctcattggacactgatcctgatacaacggc

SEQ ID NO: 341831 - DNA, 55 bp, Artificial
  Synthetic oligonucleotide
caatagggcaaaccagcggcttaaccccatgcatcaactcttgagacacttccag

SEQ ID NO: 341832 - DNA, 60 bp, Artificial
  Synthetic oligonucleotide
caatagggcagaatcgatctatgagcaagcttcactcattagtaatcacctgtctgagtt

SEQ ID NO: 341833 - DNA, 57 bp, Artificial
  Synthetic oligonucleotide
caataggtaaattgagtaccgatatatcggtactcaattagagtctcattttatacc

SEQ ID NO: 341834 - DNA, 60 bp, Artificial
  Synthetic oligonucleotide
caataggtgcaatttaaggagcattatttactggcgcatcgggcagatttctgtgtcatc

SEQ ID NO: 341835 - DNA, 53 bp, Artificial
  Synthetic oligonucleotide
caataggttggggattggaggccaggttggactggccttccggtccaaatagg

SEQ ID NO: 341836 - DNA, 59 bp, Artificial
  Synthetic oligonucleotide
caatagtaatggaaatctaatcgctcctcggggctacttcaagatgcgcactgggaaaa

SEQ ID NO: 341837 - DNA, 55 bp, Artificial
  Synthetic oligonucleotide
caatagtaatgggaacctaatcgctcctcgaggttatttcaaaatgcgcactggg

SEQ ID NO: 341838 - DNA, 55 bp, Artificial
  Synthetic oligonucleotide
caatagtagaacagtggggaaatgtccaagatatgttaagcaagaaagtttgcta

SEQ ID NO: 341839 - DNA, 57 bp, Artificial
  Synthetic oligonucleotide
caatagtagtattaagtctcgtctattggcgagactcaagggttcaggtggggctac

SEQ ID NO: 341840 - DNA, 51 bp, Artificial
  Synthetic oligonucleotide
caatagtcaagctaaatacgtgaaggattgtgcagtaatggtcaggcttta

SEQ ID NO: 341841 - DNA, 55 bp, Artificial
  Synthetic oligonucleotide
caatagtgcgaacactttcttaatgaacatgtgtgagagccgcgagactgacaaa

SEQ ID NO: 341842 - DNA, 60 bp, Artificial
  Synthetic oligonucleotide
caatagtggacgaggaaagagagattcccgaacgctcatggaattccggacatgaatgga

SEQ ID NO: 341843 - DNA, 55 bp, Artificial
  Synthetic oligonucleotide
caatagtgggggaggcttgggactttgtccccattgcattaatgtaggggcttgg

SEQ ID NO: 341844 - DNA, 60 bp, Artificial
  Synthetic oligonucleotide
caatagtgtgcctatggacaacatgtttcgtcattacaacttcacgctaatgatcatccc

SEQ ID NO: 341845 - DNA, 55 bp, Artificial
  Synthetic oligonucleotide
caatagttcgtgattctagtgttatggttggattgctgcaaggcgctagggatgg

SEQ ID NO: 341846 - DNA, 60 bp, Artificial
  Synthetic oligonucleotide
caatagttgtgtggatcatagcgtatatagaatataggaaattggtaagacaaagaagga

SEQ ID NO: 341847 - DNA, 59 bp, Artificial
  Synthetic oligonucleotide
caatagttgttaatcctagagagactagctggaatctaggagggtgggcttcaggacta

SEQ ID NO: 341848 - DNA, 60 bp, Artificial
  Synthetic oligonucleotide
caatagtttctcaatgaagcaagatatcgtagcaataactgattggtcaggatatagcgg

SEQ ID NO: 341849 - DNA, 55 bp, Artificial
  Synthetic oligonucleotide
caatataactaaacaatcagcatgtgttgccatgagcaaactcctcactgaactc

SEQ ID NO: 341850 - DNA, 60 bp, Artificial
  Synthetic oligonucleotide
caatataagaaatggtcacgtagttaaccagttgatggaggctctaatgcagttgtcgag

SEQ ID NO: 341851 - DNA, 53 bp, Artificial
  Synthetic oligonucleotide
caatataatgtcaacagtatctaccaatgccttgactgtggcacaacactctc

SEQ ID NO: 341852 - DNA, 55 bp, Artificial
  Synthetic oligonucleotide
caatataatgttgggccatgtatctgtccaagctgagttgaggcaagtatctgag

SEQ ID NO: 341853 - DNA, 53 bp, Artificial
  Synthetic oligonucleotide
caatatacagcaatttgaacatatagtccaactccgcagggtgttaacaacgg

SEQ ID NO: 341854 - DNA, 60 bp, Artificial
  Synthetic oligonucleotide
caatatacgcgtaaggaaatatgtgaaacacaggagggatcggagtatctgctgcacaac

SEQ ID NO: 341855 - DNA, 58 bp, Artificial
  Synthetic oligonucleotide
caatatacgcgtaaggaaatttctgaaactcagcagggttccgaatatgttcttcata

SEQ ID NO: 341856 - DNA, 60 bp, Artificial
  Synthetic oligonucleotide
caatatacgtggtgatggtaatgtgtttcgtccgacggcggatcaacgatctagtgctgt

SEQ ID NO: 341857 - DNA, 60 bp, Artificial
  Synthetic oligonucleotide
caatatagcacttagctggagttcagttgaacacaagggcaacaagatcttagtttcagg

SEQ ID NO: 341858 - DNA, 55 bp, Artificial
  Synthetic oligonucleotide
caatatagcatggggagattggctgcggaggaagacaagtacactagctgggaca

SEQ ID NO: 341859 - DNA, 55 bp, Artificial
  Synthetic oligonucleotide
caatatagccccacaaactgttacggaagattatcgagcgcttgtgctgggaagg

SEQ ID NO: 341860 - DNA, 60 bp, Artificial
  Synthetic oligonucleotide
caatatagggttcataagaacagccagtatatatttatatgttaagtctgaagcagacca

SEQ ID NO: 341861 - DNA, 57 bp, Artificial
  Synthetic oligonucleotide
caatataggttgtgaatttcatggtgggaatgcttatgttaaacttatccaacaaat

SEQ ID NO: 341862 - DNA, 59 bp, Artificial
  Synthetic oligonucleotide
caatatagtggatttgtaagaccgctattccaccaaatgcggtatgtgcttggaacatt

SEQ ID NO: 341863 - DNA, 60 bp, Artificial
  Synthetic oligonucleotide
caatatagtggatttgtgagaacgctattccagcaaatgcgtgatgtgttggggacattt

SEQ ID NO: 341864 - DNA, 56 bp, Artificial
  Synthetic oligonucleotide
caatatatacgtactaacaggtaaagatacctttggcgttctagaggcggagtaga

SEQ ID NO: 341865 - DNA, 60 bp, Artificial
  Synthetic oligonucleotide
caatatatactagaaggtcctatagaactttcaatcgtatccgctcacgtggcggccatc

SEQ ID NO: 341866 - DNA, 60 bp, Artificial
  Synthetic oligonucleotide
caatatatgatccataacaacacacgtatttcattaataaccacatgactagatttccat

SEQ ID NO: 341867 - DNA, 55 bp, Artificial
  Synthetic oligonucleotide
caatatatggcagattcctattaacatctgtgggtgattgtgcctatatagggcc

SEQ ID NO: 341868 - DNA, 60 bp, Artificial
  Synthetic oligonucleotide
caatatcacgtacgcacacattctcttgccgtacatccgattctacaagatcctaatcgt

SEQ ID NO: 341869 - DNA, 57 bp, Artificial
  Synthetic oligonucleotide
caatatcatatttccatgcagacaaagtgctcacttgaccgttataatatttgcgtc

SEQ ID NO: 341870 - DNA, 52 bp, Artificial
  Synthetic oligonucleotide
caatatcctgaccaacattggtaggcaccacgttaatattgggtgatccctc

SEQ ID NO: 341871 - DNA, 55 bp, Artificial
  Synthetic oligonucleotide
caatatcctgccacatcacatggtcgccttgtgtttggggagaggttcaataggg

SEQ ID NO: 341872 - DNA, 60 bp, Artificial
  Synthetic oligonucleotide
caatatcgacgagtgttccctctttcgcgcacgctccgtcttatcaacggtctatcgatc

SEQ ID NO: 341873 - DNA, 60 bp, Artificial
  Synthetic oligonucleotide
caatatcgcgctccatggcccgagtacgtgacacccttgacaggctccgtgatccgtcgg

SEQ ID NO: 341874 - DNA, 53 bp, Artificial
  Synthetic oligonucleotide
caatatcgttgtgcctaacctattcagttcgcgataggggtgtaacgcctcag

SEQ ID NO: 341875 - DNA, 55 bp, Artificial
  Synthetic oligonucleotide
caatatctacgttcatcaattatccccaactgggtaagactcagcccaatcgtac

SEQ ID NO: 341876 - DNA, 55 bp, Artificial
  Synthetic oligonucleotide
caatatctcacggattttttgaggttaaacaagatggaaacttatacggcgacac

SEQ ID NO: 341877 - DNA, 60 bp, Artificial
  Synthetic oligonucleotide
caatatgacagcgatgagccagaaccaagatctcttgcaagttggatccaaagtgaattc

SEQ ID NO: 341878 - DNA, 60 bp, Artificial
  Synthetic oligonucleotide
caatatgatggtaatgatataccagctaccacgcctgaggagctttctgtcatgtatgga

SEQ ID NO: 341879 - DNA, 60 bp, Artificial
  Synthetic oligonucleotide
caatatgattctagtttacatggcgacatctcaaaagctcatgctgaaggattacgcaaa

SEQ ID NO: 341880 - DNA, 50 bp, Artificial
  Synthetic oligonucleotide
caatatgccttataagggagaaaaaggcactgcacacggcgattggtgga

SEQ ID NO: 341881 - DNA, 55 bp, Artificial
  Synthetic oligonucleotide
caatatgcgtatcatgaacgagttgtaagcgccaaccccattgtggagatatgac

SEQ ID NO: 341882 - DNA, 60 bp, Artificial
  Synthetic oligonucleotide
caatatgcgtctaaggaacaagctgtcataaagaggttctggaagttgaatcaccatgtc

SEQ ID NO: 341883 - DNA, 55 bp, Artificial
  Synthetic oligonucleotide
caatatgctaaactagcacctgatgatgttaatgcaactgcctggttggcacata

SEQ ID NO: 341884 - DNA, 60 bp, Artificial
  Synthetic oligonucleotide
caatatgctaagatcgccatattcgtggttcgttaaaatgtggggtgtaggcgctgaaca

SEQ ID NO: 341885 - DNA, 50 bp, Artificial
  Synthetic oligonucleotide
caatatgcttcctcatgcagattgctatcctggcaactactgtgacactg

SEQ ID NO: 341886 - DNA, 55 bp, Artificial
  Synthetic oligonucleotide
caatatggaacaacttcagctagtgaatttggaaagactgtcttgactggtggtg

SEQ ID NO: 341887 - DNA, 60 bp, Artificial
  Synthetic oligonucleotide
caatatggtcctaccgctccatttaccattgctatgatagaaaatttaggcactcaagct

SEQ ID NO: 341888 - DNA, 60 bp, Artificial
  Synthetic oligonucleotide
caatatgtataggctaccatgcgaataactcaaccgacactgttgacacagtactcgaaa

SEQ ID NO: 341889 - DNA, 52 bp, Artificial
  Synthetic oligonucleotide
caatatgtatgagatgggtaagtccatgcgacccgtctatacagctgctctc

SEQ ID NO: 341890 - DNA, 59 bp, Artificial
  Synthetic oligonucleotide
caatatgtcagaacagacttcgtctggagttaagagaactttatgttctacagaatcct

SEQ ID NO: 341891 - DNA, 59 bp, Artificial
  Synthetic oligonucleotide
caatatgtcttacgatgtataggttcacgtacatatcaaattgaggacgacgggtcgaa

SEQ ID NO: 341892 - DNA, 59 bp, Artificial
  Synthetic oligonucleotide
caatatgtgggatccacttcttaatgaatttcctgaatctcttcacggatttcgttgta

SEQ ID NO: 341893 - DNA, 57 bp, Artificial
  Synthetic oligonucleotide
caatatgttacagtattttatggtataccagtatggcaaaattctagtgtacaagcc

SEQ ID NO: 341894 - DNA, 55 bp, Artificial
  Synthetic oligonucleotide
caatatgttataggagtcctacaaggattgcctgatcagagtgactcccccatag

SEQ ID NO: 341895 - DNA, 55 bp, Artificial
  Synthetic oligonucleotide
caatatgttatgggaataataacaggatgccctacagaatcagagagcaggctag

SEQ ID NO: 341896 - DNA, 57 bp, Artificial
  Synthetic oligonucleotide
caatattatatattcagggattatatgtgttagttgtttactaatcgattatacggg

SEQ ID NO: 341897 - DNA, 54 bp, Artificial
  Synthetic oligonucleotide
caatattcagtatatgtacgttccaccaggtagtggcatcccgactgatcatga

SEQ ID NO: 341898 - DNA, 50 bp, Artificial
  Synthetic oligonucleotide
caatattccagagtagcatgacaagaatcttagagccctacagagcaaaa

SEQ ID NO: 341899 - DNA, 55 bp, Artificial
  Synthetic oligonucleotide
caatattgtaaccttttgttgcaagtgtgactctacgcttcggttgtgcgtacaa

SEQ ID NO: 341900 - DNA, 53 bp, Artificial
  Synthetic oligonucleotide
caatattgtccaatagtgttccaagcttttagctgggtcaacaatatttggac

SEQ ID NO: 341901 - DNA, 57 bp, Artificial
  Synthetic oligonucleotide
caatattttctgaggcccaaatctcgagttcttctggaactcgatcaaacgaacaaa

SEQ ID NO: 341902 - DNA, 58 bp, Artificial
  Synthetic oligonucleotide
caatcaaaagctgccacgttgcgaaagtgacgtttggaaaatgggcggcgcaagtctc

SEQ ID NO: 341903 - DNA, 59 bp, Artificial
  Synthetic oligonucleotide
caatcaaaatttggagtatcgaataggatatatatgcagtggagttttcggagacaatc

SEQ ID NO: 341904 - DNA, 60 bp, Artificial
  Synthetic oligonucleotide
caatcaaagcatgtgattctgccatgtgttatggttcaagcacagctaatctagtaaggg

SEQ ID NO: 341905 - DNA, 60 bp, Artificial
  Synthetic oligonucleotide
caatcaaaggaccatccggagaagaactaaagctaggctgcagagtacaagcagacttct

SEQ ID NO: 341906 - DNA, 60 bp, Artificial
  Synthetic oligonucleotide
caatcaaattgccaatcgcgcgtgtctagtatttggcgtcagtgtgtagcagcatgccta

SEQ ID NO: 341907 - DNA, 60 bp, Artificial
  Synthetic oligonucleotide
caatcaacatttatcatttcagatatggatcaaacgaggatagcagatggtgctaatatt

SEQ ID NO: 341908 - DNA, 55 bp, Artificial
  Synthetic oligonucleotide
caatcaaccaccattggtttgataacctgctcgcatgctcccatcaatgggagtg

SEQ ID NO: 341909 - DNA, 55 bp, Artificial
  Synthetic oligonucleotide
caatcaaccagtgagacctgagctcaaggttaacgagcgaccccttgggctgggg

SEQ ID NO: 341910 - DNA, 60 bp, Artificial
  Synthetic oligonucleotide
caatcaacgaactccactgagactgttgatacactaatagagaccaatgtccctgtaaca

SEQ ID NO: 341911 - DNA, 53 bp, Artificial
  Synthetic oligonucleotide
caatcaacgcccttctggcgagaatcgccgctgcacgttctctggtgcaccga

SEQ ID NO: 341912 - DNA, 55 bp, Artificial
  Synthetic oligonucleotide
caatcaactctgcggtatccggtggtcaagctaacgtatcactggttgtggcggg

SEQ ID NO: 341913 - DNA, 60 bp, Artificial
  Synthetic oligonucleotide
caatcaagacaatccaataattcgtaacagaattgaacagttaataatgcagtgtagact

SEQ ID NO: 341914 - DNA, 55 bp, Artificial
  Synthetic oligonucleotide
caatcaagagtgcgtaactcagtcagctgtcggtcgattcccagtgtcgctctgg

SEQ ID NO: 341915 - DNA, 59 bp, Artificial
  Synthetic oligonucleotide
caatcaagcagttctcaaatggaccatatctggttaaagacacaattaaactaaagcaa

SEQ ID NO: 341916 - DNA, 51 bp, Artificial
  Synthetic oligonucleotide
caatcaaggacgactcgttcgttggcaattagaattcctacaatacccagc

SEQ ID NO: 341917 - DNA, 55 bp, Artificial
  Synthetic oligonucleotide
caatcaaggatcagaccgtgagttttagaatgtgtgatctttggtcgtcagtcac

SEQ ID NO: 341918 - DNA, 60 bp, Artificial
  Synthetic oligonucleotide
caatcaagttgtaggcaacttcttatccgccctatttattgctatcaactgatgcgtaca

SEQ ID NO: 341919 - DNA, 60 bp, Artificial
  Synthetic oligonucleotide
caatcaatacaaggaatagatgatagtgatgctatagaatgtattaaggattcggtggac

SEQ ID NO: 341920 - DNA, 60 bp, Artificial
  Synthetic oligonucleotide
caatcaatcattagtacagagaccctcgaaataatcacttggagctgtacgattaatcat

SEQ ID NO: 341921 - DNA, 52 bp, Artificial
  Synthetic oligonucleotide
caatcaatccacgcagactattcttcattcctgagcaagtatcatccgtgtc

SEQ ID NO: 341922 - DNA, 59 bp, Artificial
  Synthetic oligonucleotide
caatcaatcctggagggggtaggataactggcacaggcacggtcatgaggcctggtgtc

SEQ ID NO: 341923 - DNA, 55 bp, Artificial
  Synthetic oligonucleotide
caatcaatctgcaggtacacatcaaaacaggggttcagactgactctaaagggat

SEQ ID NO: 341924 - DNA, 60 bp, Artificial
  Synthetic oligonucleotide
caatcaatgaatcgttaataaaggttagcacgctctcgagtgaacatgttacaaaagcaa

SEQ ID NO: 341925 - DNA, 60 bp, Artificial
  Synthetic oligonucleotide
caatcaatggtagcaatgaaacatacaggctaataaattgtaatacctcaaccattacac

SEQ ID NO: 341926 - DNA, 53 bp, Artificial
  Synthetic oligonucleotide
caatcacaagtactaatctagcaagtgctagttgcagctggctggaagcacaa

SEQ ID NO: 341927 - DNA, 56 bp, Artificial
  Synthetic oligonucleotide
caatcacacaagttagggaagatgcacaacgattggaaacagcagtagctatggct

SEQ ID NO: 341928 - DNA, 57 bp, Artificial
  Synthetic oligonucleotide
caatcacacggttgaaatgtgtaatcgccgtaagagggacacattactgggtaggag

SEQ ID NO: 341929 - DNA, 60 bp, Artificial
  Synthetic oligonucleotide
caatcacaggacccgtacccgggatgggtttgtacgcgaattctatgcatgtgtctgaca

SEQ ID NO: 341930 - DNA, 59 bp, Artificial
  Synthetic oligonucleotide
caatcacatcccgcctgtcaagtctaggtaattgtgccttggtgaccaaggtgtgggcc

SEQ ID NO: 341931 - DNA, 55 bp, Artificial
  Synthetic oligonucleotide
caatcacatgttgtctgtggtgactagttattatagcttggtgcataagtgtggt

SEQ ID NO: 341932 - DNA, 60 bp, Artificial
  Synthetic oligonucleotide
caatcacattgggccagcagttgtctgtgcccctgtcgttttggtaattcgcgcaggata

SEQ ID NO: 341933 - DNA, 60 bp, Artificial
  Synthetic oligonucleotide
caatcacccagtgttgaagcatgtggttattcagataggatcatgcaaataacacgaggg

SEQ ID NO: 341934 - DNA, 55 bp, Artificial
  Synthetic oligonucleotide
caatcaccgatttatcagatggtatgcaactcaacgcttttatcacagcgagtgg

SEQ ID NO: 341935 - DNA, 55 bp, Artificial
  Synthetic oligonucleotide
caatcacctccgaaaacacacccaactccacacaaatacccacagcaaccgaggc

SEQ ID NO: 341936 - DNA, 55 bp, Artificial
  Synthetic oligonucleotide
caatcacgctaagatcaaatgccattccatacactaatgtgcatcattggatgag

SEQ ID NO: 341937 - DNA, 60 bp, Artificial
  Synthetic oligonucleotide
caatcacgttcgggccgagtctatcagactgcccggcattcgctgatggaatgctcaagg

SEQ ID NO: 341938 - DNA, 58 bp, Artificial
  Synthetic oligonucleotide
caatcactacttccaagggagagttcacagcattaggggttcatgatagggtttgtgt

SEQ ID NO: 341939 - DNA, 60 bp, Artificial
  Synthetic oligonucleotide
caatcactccctgagcatgacaaagaggtatttgttgtgaggggaaggttagatggatcc

SEQ ID NO: 341940 - DNA, 59 bp, Artificial
  Synthetic oligonucleotide
caatcactgctggagacacatccgcgataccagaatcccgagccagcggttcctgtcat

SEQ ID NO: 341941 - DNA, 60 bp, Artificial
  Synthetic oligonucleotide
caatcactggagcctcgtgcatcatcaggatatcaatagtctcgaccatgtcttcttgcc

SEQ ID NO: 341942 - DNA, 60 bp, Artificial
  Synthetic oligonucleotide
caatcactggctccatggatacggcatatgcaaacttatcacagcaagagacatttttaa

SEQ ID NO: 341943 - DNA, 60 bp, Artificial
  Synthetic oligonucleotide
caatcagacaaaggaggcgaggttgggagacacttgattgcatctcttgcccagataatt

SEQ ID NO: 341944 - DNA, 55 bp, Artificial
  Synthetic oligonucleotide
caatcagacggaatccaaatggtcaaagaaagctagctattggttctctggtcgt

SEQ ID NO: 341945 - DNA, 60 bp, Artificial
  Synthetic oligonucleotide
caatcagagatgttagtaacagtagtgacgatacagtcagtagttacatacatcgagatc

SEQ ID NO: 341946 - DNA, 60 bp, Artificial
  Synthetic oligonucleotide
caatcagatggacaaaagatcccagaaacactcaggatcatgttcgctcattgtgcctat

SEQ ID NO: 341947 - DNA, 51 bp, Artificial
  Synthetic oligonucleotide
caatcagattgcgcatagtgctgatagtgaatttctaatacgtggggcagt

SEQ ID NO: 341948 - DNA, 58 bp, Artificial
  Synthetic oligonucleotide
caatcagcaaggattctcgctcaggttatgagactttcagggtcattggcggctggac

SEQ ID NO: 341949 - DNA, 60 bp, Artificial
  Synthetic oligonucleotide
caatcaggtggcaaccacattagcctggatggtgtgggtctcttacctctagatccactt

SEQ ID NO: 341950 - DNA, 54 bp, Artificial
  Synthetic oligonucleotide
caatcagtaaatatgtacgttttaaagacggagcaatgaaagaacactttacat

SEQ ID NO: 341951 - DNA, 60 bp, Artificial
  Synthetic oligonucleotide
caatcagtcaggatcgctctaaaggtgtagtattcttaactcatgataactgtggactca

SEQ ID NO: 341952 - DNA, 60 bp, Artificial
  Synthetic oligonucleotide
caatcagtgccaggtcatcattgatggtgcagccatagttataacaaattgtccaaacac

SEQ ID NO: 341953 - DNA, 55 bp, Artificial
  Synthetic oligonucleotide
caatcagttagaaccccagaggttattaaatactgtgaggggaataagtggataa

SEQ ID NO: 341954 - DNA, 56 bp, Artificial
  Synthetic oligonucleotide
caatcagtttcctttccttgaccgcgagttctccctctcttgtcaaccctcgtctc

SEQ ID NO: 341955 - DNA, 57 bp, Artificial
  Synthetic oligonucleotide
caatcataaccatccctcaaagcttagttatgaggtggtatcctataaaacgtggtc

SEQ ID NO: 341956 - DNA, 60 bp, Artificial
  Synthetic oligonucleotide
caatcatactgaagggcgctattccgtacgttaccaattcatcagtaatagatgttctat

SEQ ID NO: 341957 - DNA, 54 bp, Artificial
  Synthetic oligonucleotide
caatcatagctagaaattttgacacgatcagattgtcttttcagttgatgagac

SEQ ID NO: 341958 - DNA, 59 bp, Artificial
  Synthetic oligonucleotide
caatcatagtaggatgtcctactgggaatcattcggagttgaccctaagatacaacaaa

SEQ ID NO: 341959 - DNA, 55 bp, Artificial
  Synthetic oligonucleotide
caatcatagttaagctcctcccgaatctgcccaaggataaggaggcatgtgcgaa

SEQ ID NO: 341960 - DNA, 60 bp, Artificial
  Synthetic oligonucleotide
caatcatatgactcatatcaagatattggacacttctgcctatctccaaggtgttcaaca

SEQ ID NO: 341961 - DNA, 58 bp, Artificial
  Synthetic oligonucleotide
caatcatcaactccgtactgtcgttacggtcacgtttgactcttccgacatacaggta

SEQ ID NO: 341962 - DNA, 55 bp, Artificial
  Synthetic oligonucleotide
caatcatcaagaggctgcgaagtacgataaccacacagaaaatgccttgttgttg

SEQ ID NO: 341963 - DNA, 55 bp, Artificial
  Synthetic oligonucleotide
caatcatcaagaggctgcgaagtatgataaccatacagagaacgctttactgttg

SEQ ID NO: 341964 - DNA, 57 bp, Artificial
  Synthetic oligonucleotide
caatcatcaagtgctacatgcagccttatctctgtttccattgtctagcgatccatc

SEQ ID NO: 341965 - DNA, 58 bp, Artificial
  Synthetic oligonucleotide
caatcatccaacctcttctacacaaaacatagtttattgcatatcatgtagtctcacc

SEQ ID NO: 341966 - DNA, 60 bp, Artificial
  Synthetic oligonucleotide
caatcatctcttttatcatgctccagtgctgtcataagtctgatcaattgtatgtaggcg

SEQ ID NO: 341967 - DNA, 59 bp, Artificial
  Synthetic oligonucleotide
caatcatgaaaagtgaactggagtatggtaattgtgataccaaatgtcagaccccggtg

SEQ ID NO: 341968 - DNA, 55 bp, Artificial
  Synthetic oligonucleotide
caatcatgagaacacactatcgggatggattgtcacactcacagcaatcatggag

SEQ ID NO: 341969 - DNA, 59 bp, Artificial
  Synthetic oligonucleotide
caatcatgaggtaaattgggatgtcattaatttattagttcagagtgttgataaagtac

SEQ ID NO: 341970 - DNA, 60 bp, Artificial
  Synthetic oligonucleotide
caatcatgatcggaagtgtggcgatttctgtgccaaacactcacatctcttgtgtatcga

SEQ ID NO: 341971 - DNA, 60 bp, Artificial
  Synthetic oligonucleotide
caatcatggaagactctcaaccaattaaagtgcgccaaccctccatctctgctcctggga

SEQ ID NO: 341972 - DNA, 60 bp, Artificial
  Synthetic oligonucleotide
caatcatggaaggaggcacagaccctcaaggttgatcacaacattcggcccgttccactc

SEQ ID NO: 341973 - DNA, 58 bp, Artificial
  Synthetic oligonucleotide
caatcatgggccacgggtgttcagagttggatgttggagatcactatctcgcaattgg

SEQ ID NO: 341974 - DNA, 57 bp, Artificial
  Synthetic oligonucleotide
caatcatgtaacgcctgacgagtctagatattttaaacaacttggccctaagttgta

SEQ ID NO: 341975 - DNA, 60 bp, Artificial
  Synthetic oligonucleotide
caatcatgtagtgtataatcatcaagaggctgcgaaatatgagaatcacacagagaatgc

SEQ ID NO: 341976 - DNA, 60 bp, Artificial
  Synthetic oligonucleotide
caatcatgtgcatgctgtgagggagtgcacacctggtcgtattagcgcaaccttccgtag

SEQ ID NO: 341977 - DNA, 55 bp, Artificial
  Synthetic oligonucleotide
caatcatgtgggcagctagcgcatcagaaaatgttttggagccaagctggaatga

SEQ ID NO: 341978 - DNA, 55 bp, Artificial
  Synthetic oligonucleotide
caatcatgttggtaattagttcacgaactacggcacgtaccttattactataaag

SEQ ID NO: 341979 - DNA, 55 bp, Artificial
  Synthetic oligonucleotide
caatcattcctcttagtgagtcggcagttccatacagggcatctagtgaatggct

SEQ ID NO: 341980 - DNA, 52 bp, Artificial
  Synthetic oligonucleotide
caatccaaaagcacttgacagcaactatctatgtaaatcaacgtatgttgat

SEQ ID NO: 341981 - DNA, 50 bp, Artificial
  Synthetic oligonucleotide
caatccaaactacttatttggtggggcttttctgtgggctgacgttgccc

SEQ ID NO: 341982 - DNA, 60 bp, Artificial
  Synthetic oligonucleotide
caatccaacaacatatggcattgggatgacttatcattgctacaacgagatgttacgaat

SEQ ID NO: 341983 - DNA, 51 bp, Artificial
  Synthetic oligonucleotide
caatccaataactggaagtcccagtgctccgggagtaaaggggttcgggtt

SEQ ID NO: 341984 - DNA, 56 bp, Artificial
  Synthetic oligonucleotide
caatccaatctgtcatcgtgtttaaccgctcctttttcacggcacatacgagacat

SEQ ID NO: 341985 - DNA, 54 bp, Artificial
  Synthetic oligonucleotide
caatccaatgcccgagttgacttctgttaagaactatttattaaccttccctta

SEQ ID NO: 341986 - DNA, 57 bp, Artificial
  Synthetic oligonucleotide
caatccaattcgtcgtacatacctacgtgtttgtttctgcacgcggaccccaacagc

SEQ ID NO: 341987 - DNA, 55 bp, Artificial
  Synthetic oligonucleotide
caatccacacacttgtctaaaatacactgagcgctgtggcgctccgagaactcaa

SEQ ID NO: 341988 - DNA, 51 bp, Artificial
  Synthetic oligonucleotide
caatccacacttagcctatacaccaggctgggaaatggctcgtcagcaatt

SEQ ID NO: 341989 - DNA, 55 bp, Artificial
  Synthetic oligonucleotide
caatccacatctagataaaggttcttcaagatgctattcctgctcatactagcct

SEQ ID NO: 341990 - DNA, 57 bp, Artificial
  Synthetic oligonucleotide
caatccacatgacctacctttgttatgtaccttaaacaagagccatctttacattaa

SEQ ID NO: 341991 - DNA, 55 bp, Artificial
  Synthetic oligonucleotide
caatccacctcttatacaagcatggcaaatgcccgggtacgagcctccagtcgtg

SEQ ID NO: 341992 - DNA, 53 bp, Artificial
  Synthetic oligonucleotide
caatccacggaggaagggggccagttcgtcaccctttcccccccatgccctga

SEQ ID NO: 341993 - DNA, 60 bp, Artificial
  Synthetic oligonucleotide
caatccacggtttcacacggaagagcagcgtaagagatgtccgatcatccgtcgcagttg

SEQ ID NO: 341994 - DNA, 54 bp, Artificial
  Synthetic oligonucleotide
caatccagaagtatcttcaaaagatagaaacttcgaaagaataggaggatcata

SEQ ID NO: 341995 - DNA, 60 bp, Artificial
  Synthetic oligonucleotide
caatccagaatctcagcccaagctgtgctgactctagctaatgtggaaaaggacaaacac

SEQ ID NO: 341996 - DNA, 58 bp, Artificial
  Synthetic oligonucleotide
caatccagagagtggcttgtcgtaacgagcaagtctgtggcggaacccgactactttg

SEQ ID NO: 341997 - DNA, 57 bp, Artificial
  Synthetic oligonucleotide
caatccagatatgcccctatgacgcccaccagataatgtacatcccgcctggtggtc

SEQ ID NO: 341998 - DNA, 60 bp, Artificial
  Synthetic oligonucleotide
caatccagctaccactcagacgggattctactataaccagcagtcaagtgataattttgc

SEQ ID NO: 341999 - DNA, 55 bp, Artificial
  Synthetic oligonucleotide
caatccaggaagtggattggacattgcaccatagcccaactcactgatgctgcac

SEQ ID NO: 342000 - DNA, 57 bp, Artificial
  Synthetic oligonucleotide
caatccagtgtgtggctagtcgtaacgagcaattacgggatgggaccaactactttg

SEQ ID NO: 342001 - DNA, 60 bp, Artificial
  Synthetic oligonucleotide
caatccataaaaaattggagtgctcagtcaagacgtgaaaatccagtttatgaatataga

SEQ ID NO: 342002 - DNA, 60 bp, Artificial
  Synthetic oligonucleotide
caatccatagctatgatagcatcgctactatcagctttagccctgcgagtttcagcggca

SEQ ID NO: 342003 - DNA, 60 bp, Artificial
  Synthetic oligonucleotide
caatccatgcccaatagacctaactacattggcttcagagacaacttcattggtctcgca

SEQ ID NO: 342004 - DNA, 60 bp, Artificial
  Synthetic oligonucleotide
caatccattgcttaatacaatgaccacgagactgtcagacatgataaacaagcaatgcag

SEQ ID NO: 342005 - DNA, 60 bp, Artificial
  Synthetic oligonucleotide
caatcccaatgcccttattgtttcacccactgtgagcccacagaagctgcatttcaggcc

SEQ ID NO: 342006 - DNA, 58 bp, Artificial
  Synthetic oligonucleotide
caatcccacagactctgcttactatttggttacagaagttaagcaggtcggttgttca

SEQ ID NO: 342007 - DNA, 55 bp, Artificial
  Synthetic oligonucleotide
caatcccagttacagtgactattgctcccatgtatactgaattttcaggcatcag

SEQ ID NO: 342008 - DNA, 51 bp, Artificial
  Synthetic oligonucleotide
caatcccatacctgcacaggctcgtcgtcaaaagcatacgccgtgtgacac

SEQ ID NO: 342009 - DNA, 57 bp, Artificial
  Synthetic oligonucleotide
caatcccccccatctcaaacctgcatcaacagatgtagttaggagtggacccgaaac

SEQ ID NO: 342010 - DNA, 55 bp, Artificial
  Synthetic oligonucleotide
caatcccccctcgccattgcctgccactcactttaccccgatggggaaagtaata

SEQ ID NO: 342011 - DNA, 53 bp, Artificial
  Synthetic oligonucleotide
caatccccgaggctgggacaggttgccctacctcaacctaccctaccttccac

SEQ ID NO: 342012 - DNA, 55 bp, Artificial
  Synthetic oligonucleotide
caatccccgtgacatgtgggctgaactcaatcaggatataccccaatcacgcacc

SEQ ID NO: 342013 - DNA, 58 bp, Artificial
  Synthetic oligonucleotide
caatcccctacgaaacgtcctatggacagatgcttgataacgcgcgtagcttttcctc

SEQ ID NO: 342014 - DNA, 54 bp, Artificial
  Synthetic oligonucleotide
caatcccggatcctccgactacgcctggcgaacatttgtgttcgttaccttcgg

SEQ ID NO: 342015 - DNA, 60 bp, Artificial
  Synthetic oligonucleotide
caatcccggctatcatgatgcacaagatcatcaaagttgtccaaggagaacttaaaatat

SEQ ID NO: 342016 - DNA, 60 bp, Artificial
  Synthetic oligonucleotide
caatcccgtggctgatgaggaaatggatgactaccgagataggggtatgtcagcagttgt

SEQ ID NO: 342017 - DNA, 59 bp, Artificial
  Synthetic oligonucleotide
caatcccgttgtgcagacagtccacgccaccgtcgtactaccgcccgaagcgctccaca

SEQ ID NO: 342018 - DNA, 55 bp, Artificial
  Synthetic oligonucleotide
caatccctacaggcgcgggaaagcctggggacagcggaagaccaatctttgacaa

SEQ ID NO: 342019 - DNA, 55 bp, Artificial
  Synthetic oligonucleotide
caatccctctgtcgctgcaacactgggctttggtgcttacatgtccaaggcccac

SEQ ID NO: 342020 - DNA, 55 bp, Artificial
  Synthetic oligonucleotide
caatccctgacttgagaagcacactttaccacctaatgtctgacactgacactac

SEQ ID NO: 342021 - DNA, 60 bp, Artificial
  Synthetic oligonucleotide
caatccgaatatttcatttgtagcagccagtggtgacgacagtctcattggttctctaca

SEQ ID NO: 342022 - DNA, 54 bp, Artificial
  Synthetic oligonucleotide
caatccgacagggaaaagtcgtaggctccggcgctgcgggagggtaaactagcg

SEQ ID NO: 342023 - DNA, 55 bp, Artificial
  Synthetic oligonucleotide
caatccgactctacttttcttgaaggttccagcgcaaaatgccataagcaccacg

SEQ ID NO: 342024 - DNA, 60 bp, Artificial
  Synthetic oligonucleotide
caatccgatacatgctgctgtgataaccaagataatcctgactagatcgaagaaagtgcc

SEQ ID NO: 342025 - DNA, 56 bp, Artificial
  Synthetic oligonucleotide
caatccgcgaagggtgagggttcccagaccagaaatgctaagagagggacgacacc

SEQ ID NO: 342026 - DNA, 56 bp, Artificial
  Synthetic oligonucleotide
caatccgcgcgactgggacaggctcccctacctcaaccttccatacctcccaccca

SEQ ID NO: 342027 - DNA, 59 bp, Artificial
  Synthetic oligonucleotide
caatccgcgtcccaaagatggaaaaggcagctgtggtccagtgtatgttgatggagcaa

SEQ ID NO: 342028 - DNA, 55 bp, Artificial
  Synthetic oligonucleotide
caatccgctcaggtttttatacggtctgctggtcacggaacccagcccaatttcc

SEQ ID NO: 342029 - DNA, 55 bp, Artificial
  Synthetic oligonucleotide
caatccgctgcctagccgacatgatacttgtattgaacagtatctaccggtgggg

SEQ ID NO: 342030 - DNA, 56 bp, Artificial
  Synthetic oligonucleotide
caatccggtgccactagcaagcgtgttcatacacagcgtgaagcgctattagcagt

SEQ ID NO: 342031 - DNA, 60 bp, Artificial
  Synthetic oligonucleotide
caatccgtctggattagataggttggaggcgagcttaaatgttctgatgactgatgtacg

SEQ ID NO: 342032 - DNA, 55 bp, Artificial
  Synthetic oligonucleotide
caatccgtgccagagtgggtggagctatcagtatctcagacaaaccaacagctac

SEQ ID NO: 342033 - DNA, 57 bp, Artificial
  Synthetic oligonucleotide
caatccgtggcgcaatgtcggccactatgatgagttgtcgctttcttagtggtccca

SEQ ID NO: 342034 - DNA, 59 bp, Artificial
  Synthetic oligonucleotide
caatccgtgttgagtataagggtgggatgacgcagttcgttgccaagacccttatcata

SEQ ID NO: 342035 - DNA, 60 bp, Artificial
  Synthetic oligonucleotide
caatccgttagtgccttcggacaccgtgcaaacacgccatgtcattcagagacgaacacg

SEQ ID NO: 342036 - DNA, 55 bp, Artificial
  Synthetic oligonucleotide
caatcctaaagtgtatcggacgctgtcttgctcgagtaacgttcaccacgctccc

SEQ ID NO: 342037 - DNA, 60 bp, Artificial
  Synthetic oligonucleotide
caatcctaccctatctacctggtattgtgagtatgcttaccacatctcagccatttaatt

SEQ ID NO: 342038 - DNA, 60 bp, Artificial
  Synthetic oligonucleotide
caatcctacgagatgatactggtgactatcctacgtgaggagttgcactcacgcctcaat

SEQ ID NO: 342039 - DNA, 56 bp, Artificial
  Synthetic oligonucleotide
caatcctacggaatctgatgtctacgcttgacggtgtgatcacctcatgcaacaag

SEQ ID NO: 342040 - DNA, 59 bp, Artificial
  Synthetic oligonucleotide
caatcctatgttttgtttcggcctgcaatgacttctcggtgcgcctgttaagggataca

SEQ ID NO: 342041 - DNA, 55 bp, Artificial
  Synthetic oligonucleotide
caatcctcgcggtgttacgattagccgcgaaccaagcccctaatggaggacggaa

SEQ ID NO: 342042 - DNA, 60 bp, Artificial
  Synthetic oligonucleotide
caatcctcgttatgttgtcgctgattactatcagctcgtaaaccatgatatccacccaca

SEQ ID NO: 342043 - DNA, 53 bp, Artificial
  Synthetic oligonucleotide
caatcctctggaccaacattagcatccgtagaaacaattgttttttcacagaa

SEQ ID NO: 342044 - DNA, 56 bp, Artificial
  Synthetic oligonucleotide
caatcctgaagaagtgtcagacatatggatgtacaaatcaataattgatgcgatcg

SEQ ID NO: 342045 - DNA, 55 bp, Artificial
  Synthetic oligonucleotide
caatcctgaatcttggacagaaaaggtacatcaaaaccacatattggtgggacgg

SEQ ID NO: 342046 - DNA, 55 bp, Artificial
  Synthetic oligonucleotide
caatcctgacacttataagcgtgtgtgtgcgggcagacagaatatgcgtaggtta

SEQ ID NO: 342047 - DNA, 60 bp, Artificial
  Synthetic oligonucleotide
caatcctgtagattgtactatgacagcaaagactctgtacaattgctcattacaagaggg

SEQ ID NO: 342048 - DNA, 50 bp, Artificial
  Synthetic oligonucleotide
caatcctgtatcagaggggaggagcgatggacacccggcaactcccggca

SEQ ID NO: 342049 - DNA, 58 bp, Artificial
  Synthetic oligonucleotide
caatcctgtcggtattggcatggacgcctctcggtttgatcaacacgtttccaaggag

SEQ ID NO: 342050 - DNA, 55 bp, Artificial
  Synthetic oligonucleotide
caatccttactctggaaacagtattgatgagctgcagactttaattagctgctgc

SEQ ID NO: 342051 - DNA, 55 bp, Artificial
  Synthetic oligonucleotide
caatcctttgtgcatttacaaagttcgttggaagcggttccttcgcgggtgcctg

SEQ ID NO: 342052 - DNA, 54 bp, Artificial
  Synthetic oligonucleotide
caatcgaatgggaacgtattcctgaccatcgagagatagtcctccttgcaggta

SEQ ID NO: 342053 - DNA, 60 bp, Artificial
  Synthetic oligonucleotide
caatcgacgctattatcaacgcttatccacagtacggtgcctctactggtactgtacaaa

SEQ ID NO: 342054 - DNA, 55 bp, Artificial
  Synthetic oligonucleotide
caatcgactatagtgaatatgatacacacctaacgcgacataattttcgaaccgg

SEQ ID NO: 342055 - DNA, 52 bp, Artificial
  Synthetic oligonucleotide
caatcgactctgatcgcgaaggataacaagaatgtcgcggttggtaaatcgc

SEQ ID NO: 342056 - DNA, 55 bp, Artificial
  Synthetic oligonucleotide
caatcgataacagattgtcgatttcgtatagtctcagcatgtggctcaacgtcgg

SEQ ID NO: 342057 - DNA, 55 bp, Artificial
  Synthetic oligonucleotide
caatcgatactcactttcatttcctcctactagagacgatggctgcacaagtcac

SEQ ID NO: 342058 - DNA, 51 bp, Artificial
  Synthetic oligonucleotide
caatcgatatatgacctcttacgttacatatccatctaaaactagaacggg

SEQ ID NO: 342059 - DNA, 51 bp, Artificial
  Synthetic oligonucleotide
caatcgatcgttacctgcacctatctcggtgcggcttaggggcgcatcaat

SEQ ID NO: 342060 - DNA, 60 bp, Artificial
  Synthetic oligonucleotide
caatcgatgaggcactacatgcgaatcgacacgcagggatagggcttatattaagtacac

SEQ ID NO: 342061 - DNA, 60 bp, Artificial
  Synthetic oligonucleotide
caatcgatggaccactgcccgaagacaatgacccaagtggatatgcacaaacagactgtg

SEQ ID NO: 342062 - DNA, 55 bp, Artificial
  Synthetic oligonucleotide
caatcgatggagaaacagaagacctgatattccctgcttcgatcattcgagggtg

SEQ ID NO: 342063 - DNA, 60 bp, Artificial
  Synthetic oligonucleotide
caatcgcaacagtaggcatctcagagaagtgcgttagcagacggaacggtgattttgtgt

SEQ ID NO: 342064 - DNA, 55 bp, Artificial
  Synthetic oligonucleotide
caatcgcagcgacggatacacaaaagggtagagtgtggagaacaaatccgtatcc

SEQ ID NO: 342065 - DNA, 54 bp, Artificial
  Synthetic oligonucleotide
caatcgcccccgactgcgacaacttcgaaacgggtacccgcgtccacgcgcaac

SEQ ID NO: 342066 - DNA, 60 bp, Artificial
  Synthetic oligonucleotide
caatcgccgtttccagaagcggcagtatctaggattgtggtgcatacgagatgggcctct

SEQ ID NO: 342067 - DNA, 55 bp, Artificial
  Synthetic oligonucleotide
caatcgcgaatgtttataccacatattacgcttagtttcagcaacaaacagacgg

SEQ ID NO: 342068 - DNA, 60 bp, Artificial
  Synthetic oligonucleotide
caatcgctgataagtaccactccagcgtgtactcacttccaccagacccagaccaatttg

SEQ ID NO: 342069 - DNA, 60 bp, Artificial
  Synthetic oligonucleotide
caatcggaaaagctcgccacattgacaactggcgagcgagtgcaatatcaacgacttaaa

SEQ ID NO: 342070 - DNA, 56 bp, Artificial
  Synthetic oligonucleotide
caatcggaatattaacttgcggtttgtttcgttgcagtctgtgaaacaaattacaa

SEQ ID NO: 342071 - DNA, 57 bp, Artificial
  Synthetic oligonucleotide
caatcggactgggtgtttcagaaatttagcacccactccacaatcccgctactcatt

SEQ ID NO: 342072 - DNA, 60 bp, Artificial
  Synthetic oligonucleotide
caatcggatgatactcgctatgtgtggttacactggtactcatgctgctactgcacttgt

SEQ ID NO: 342073 - DNA, 60 bp, Artificial
  Synthetic oligonucleotide
caatcggattataagcttgtcaaagccacaacacctgtctcatgagaaacatgactaatc

SEQ ID NO: 342074 - DNA, 54 bp, Artificial
  Synthetic oligonucleotide
caatcggattccgataaattatggtccaacaggtcaacccctagactttcgtat

SEQ ID NO: 342075 - DNA, 55 bp, Artificial
  Synthetic oligonucleotide
caatcggcgataggcttcgagacacatagacatccgtagtcccaaatccagggtc

SEQ ID NO: 342076 - DNA, 60 bp, Artificial
  Synthetic oligonucleotide
caatcgggaaggcagcggagcggtttgcggaaagtgagattggatcagcgactatcgatg

SEQ ID NO: 342077 - DNA, 57 bp, Artificial
  Synthetic oligonucleotide
caatcggggaatgggtctcaatatatagtagaggaccttaatggcataattgtaaat

SEQ ID NO: 342078 - DNA, 53 bp, Artificial
  Synthetic oligonucleotide
caatcgggggacactcaaagtctctagcaatcgggggaaaggggggcaattta

SEQ ID NO: 342079 - DNA, 60 bp, Artificial
  Synthetic oligonucleotide
caatcggggtctcctcaactctctctatgtatcggttgtatttggagtcctataatatga

SEQ ID NO: 342080 - DNA, 60 bp, Artificial
  Synthetic oligonucleotide
caatcgggtttggtatagctaacgcaaatctggcacatctactcagtcaacatgtaacga

SEQ ID NO: 342081 - DNA, 52 bp, Artificial
  Synthetic oligonucleotide
caatcggtcgaattgatatgttggtaaacgtcaccggcgcgaattctccaga

SEQ ID NO: 342082 - DNA, 60 bp, Artificial
  Synthetic oligonucleotide
caatcggtgcaagaggatgcgttggaatatagattggacaattagcgatcctcacgtcat

SEQ ID NO: 342083 - DNA, 58 bp, Artificial
  Synthetic oligonucleotide
caatcggtgtattggtgtcctatatatagttagacaccaaatggcataattgtaattc

SEQ ID NO: 342084 - DNA, 55 bp, Artificial
  Synthetic oligonucleotide
caatcgtaatctctctccttgtgtgtatgctcgtgcggacactcagcgcggatac

SEQ ID NO: 342085 - DNA, 52 bp, Artificial
  Synthetic oligonucleotide
caatcgtagccatcgggtggtgctgtcatccgagctgccgcagttaccggac

SEQ ID NO: 342086 - DNA, 58 bp, Artificial
  Synthetic oligonucleotide
caatcgtatgattcgaagtattcctgaagtagactcgtgacgggacaattgaactatt

SEQ ID NO: 342087 - DNA, 56 bp, Artificial
  Synthetic oligonucleotide
caatcgtcaagatggtcattaattccggtctagtatcagggcccacccgtggcggg

SEQ ID NO: 342088 - DNA, 60 bp, Artificial
  Synthetic oligonucleotide
caatcgtcagtctctttggtgataccgtggatcagtaacactcacttccgcactgccaag

SEQ ID NO: 342089 - DNA, 55 bp, Artificial
  Synthetic oligonucleotide
caatcgtcgttggaacacgtactgaataaaatggcaagcgtgtgtaaaataccgg

SEQ ID NO: 342090 - DNA, 58 bp, Artificial
  Synthetic oligonucleotide
caatcgtctataacgttagtggtgccgtggatctcctctggtcactttagaggtgtta

SEQ ID NO: 342091 - DNA, 60 bp, Artificial
  Synthetic oligonucleotide
caatcgtctctgagacgttctcagcgctaatgcaggctatgctgccgtagtatcgggcac

SEQ ID NO: 342092 - DNA, 60 bp, Artificial
  Synthetic oligonucleotide
caatcgtcttcagcgaatgaatatgactcctaatgagattgctgatgcgttgtcacggtg

SEQ ID NO: 342093 - DNA, 60 bp, Artificial
  Synthetic oligonucleotide
caatcgtgaaataattggcatcgcgcaaattatctaaagtcaattgaggtgacatttgct

SEQ ID NO: 342094 - DNA, 55 bp, Artificial
  Synthetic oligonucleotide
caatcgtgtgtatttgacgccggctcacgacttttaccagggttgaataaggccc

SEQ ID NO: 342095 - DNA, 55 bp, Artificial
  Synthetic oligonucleotide
caatcgttatgtaacaagcgcagacagaacaaggtaccccaacgatttccacctg

SEQ ID NO: 342096 - DNA, 55 bp, Artificial
  Synthetic oligonucleotide
caatcgtttgctgggtatatccgctttaacaaccagtgtggttgtagggcccttg

SEQ ID NO: 342097 - DNA, 50 bp, Artificial
  Synthetic oligonucleotide
caatctaaaacaacaactctatgcataactatactccatagtccagatgg

SEQ ID NO: 342098 - DNA, 55 bp, Artificial
  Synthetic oligonucleotide
caatctaaatgaggatctaacctgtggaaatatactaatgtgggaggctgtgacc

SEQ ID NO: 342099 - DNA, 60 bp, Artificial
  Synthetic oligonucleotide
caatctaacaatgactacatgagcattcacaaatggctgccaagtgccactggcaacatg

SEQ ID NO: 342100 - DNA, 52 bp, Artificial
  Synthetic oligonucleotide
caatctaactggaaacggcggggtgcgctatatgtatcaagcaatgtactgc

SEQ ID NO: 342101 - DNA, 56 bp, Artificial
  Synthetic oligonucleotide
caatctaagattgttatcatatagctgttggattggccatccggtgatttattgag

SEQ ID NO: 342102 - DNA, 60 bp, Artificial
  Synthetic oligonucleotide
caatctacaagattatgacaacagtcccagctccaccaattgcacacgacctcaattaca

SEQ ID NO: 342103 - DNA, 50 bp, Artificial
  Synthetic oligonucleotide
caatctacacagagacttggttcattgatggctgtctccccggatgttgg

SEQ ID NO: 342104 - DNA, 55 bp, Artificial
  Synthetic oligonucleotide
caatctacatccacgaagaatagtaggctgaaacaccttacgaacaccttcaaag

SEQ ID NO: 342105 - DNA, 60 bp, Artificial
  Synthetic oligonucleotide
caatctacatgggatcaatggattacaccgttagttatgatcagctcgtttctaacgcga

SEQ ID NO: 342106 - DNA, 54 bp, Artificial
  Synthetic oligonucleotide
caatctaggccgctcctcaaagcttaattattaaatggtcccctataaaactta

SEQ ID NO: 342107 - DNA, 59 bp, Artificial
  Synthetic oligonucleotide
caatctataaagttgtaaacaaaccactgatatcgtatcgacatatcgtgatgcaatcc

SEQ ID NO: 342108 - DNA, 60 bp, Artificial
  Synthetic oligonucleotide
caatctatgaggatgactcctcggagtcaattacatgctgtaactggattccacggaatc

SEQ ID NO: 342109 - DNA, 55 bp, Artificial
  Synthetic oligonucleotide
caatctatggagctgccttcagtggtgtttcatggactatgaaaatcctcatagg

SEQ ID NO: 342110 - DNA, 60 bp, Artificial
  Synthetic oligonucleotide
caatctcactacgagagtggacacagcggaacgtaacgttggatcattgaccactgagct

SEQ ID NO: 342111 - DNA, 50 bp, Artificial
  Synthetic oligonucleotide
caatctcagaatcacatgtaaaggaacttatcgccgaattgcgatggcag

SEQ ID NO: 342112 - DNA, 60 bp, Artificial
  Synthetic oligonucleotide
caatctcccgttatatctgcaatagttgattttgctactataaaagcaatacgtgatact

SEQ ID NO: 342113 - DNA, 60 bp, Artificial
  Synthetic oligonucleotide
caatctccctttccagaatatacacccagtcacaataggagagtgcccaaagtatgtcag

SEQ ID NO: 342114 - DNA, 55 bp, Artificial
  Synthetic oligonucleotide
caatctcctcttctccgctgtgctccttgatcggcgcctctcggtgcgctccctt

SEQ ID NO: 342115 - DNA, 60 bp, Artificial
  Synthetic oligonucleotide
caatctcggaagcggagctagacgagtacatccaccaacactccaattgacggtatgaag

SEQ ID NO: 342116 - DNA, 57 bp, Artificial
  Synthetic oligonucleotide
caatctctagcaacaatgtgtcctgcggatgtccctccagcaaacaaaccagatcct

SEQ ID NO: 342117 - DNA, 55 bp, Artificial
  Synthetic oligonucleotide
caatctctcagtgttggtaccgcagttgattgttactttacctttgaatgagtat

SEQ ID NO: 342118 - DNA, 55 bp, Artificial
  Synthetic oligonucleotide
caatctgaaacgcaatttctggccggtataaattcacaagcagcaaatgattgtt

SEQ ID NO: 342119 - DNA, 58 bp, Artificial
  Synthetic oligonucleotide
caatctgaaagaagccatatcctggcctcttggggaaccctcactggctttctttgac

SEQ ID NO: 342120 - DNA, 56 bp, Artificial
  Synthetic oligonucleotide
caatctgaacaacgattgaattttcctccttcaactttacatcaacgatgaactcc

SEQ ID NO: 342121 - DNA, 60 bp, Artificial
  Synthetic oligonucleotide
caatctgaatgacgcaacataccagagaacaagggctcttgtgcgtactggtatggatcc

SEQ ID NO: 342122 - DNA, 60 bp, Artificial
  Synthetic oligonucleotide
caatctgaatgatgcaacctaccagagaacgagggcacttgtgcgtactgggatggatcc

SEQ ID NO: 342123 - DNA, 55 bp, Artificial
  Synthetic oligonucleotide
caatctgacatctacagcgtttcagaaggtgaggaaggtcattcagaccttcatg

SEQ ID NO: 342124 - DNA, 60 bp, Artificial
  Synthetic oligonucleotide
caatctgcagccttgaagggccttgtgacacattccataataggatctcaattaaagcaa

SEQ ID NO: 342125 - DNA, 60 bp, Artificial
  Synthetic oligonucleotide
caatctgcatgtcaggacctaataacaatgcttcggcagtggtctggtacaagggaaggc

SEQ ID NO: 342126 - DNA, 58 bp, Artificial
  Synthetic oligonucleotide
caatctgccaatataggaagtgtagttccctacaaaggcaagcaaaatttgctagtct

SEQ ID NO: 342127 - DNA, 60 bp, Artificial
  Synthetic oligonucleotide
caatctgcgcagatgtagcagacgaattacatggaacacaaagcttattctgttggttac

SEQ ID NO: 342128 - DNA, 60 bp, Artificial
  Synthetic oligonucleotide
caatctggacatgtgaaaggcttccgctagctctgcagcagcctgacgctacgccggagg

SEQ ID NO: 342129 - DNA, 60 bp, Artificial
  Synthetic oligonucleotide
caatctggagacagttcatttcaacatgtcactgttgagctccatccctatggtctctga

SEQ ID NO: 342130 - DNA, 58 bp, Artificial
  Synthetic oligonucleotide
caatctggccaaacagaagattttgctggggttgataaagtagatccaaccacaacag

SEQ ID NO: 342131 - DNA, 60 bp, Artificial
  Synthetic oligonucleotide
caatctgtacaaggattgaagtgtcttcctgcaatttcacatctatgatgaattccaaac

SEQ ID NO: 342132 - DNA, 58 bp, Artificial
  Synthetic oligonucleotide
caatctgtataagaacaaccctgggcgagtcactgtgtctactaaaactagccaaaca

SEQ ID NO: 342133 - DNA, 60 bp, Artificial
  Synthetic oligonucleotide
caatctgtatggtagtcggaataattagcctaatattgcaaataggaaatataatctcaa

SEQ ID NO: 342134 - DNA, 57 bp, Artificial
  Synthetic oligonucleotide
caatctgtattggcgcccgtgaagattcccaggccaactttgacgttccaatccgta

SEQ ID NO: 342135 - DNA, 51 bp, Artificial
  Synthetic oligonucleotide
caatctgttaatcacacgtggcatgactggacgactatccaacacacctaa

SEQ ID NO: 342136 - DNA, 50 bp, Artificial
  Synthetic oligonucleotide
caatctgttggtcaccaatgactcaagagctggaaatgaataagttcaac

SEQ ID NO: 342137 - DNA, 56 bp, Artificial
  Synthetic oligonucleotide
caatcttacttacgtcggactcaatcaatgggaattcaacttgaccaaagaattat

SEQ ID NO: 342138 - DNA, 55 bp, Artificial
  Synthetic oligonucleotide
caatcttcacgagctacataaagaagtgtcggtgttacataaggctttgaaccaa

SEQ ID NO: 342139 - DNA, 51 bp, Artificial
  Synthetic oligonucleotide
caatcttccaaagcagcatgacaaaggttttagaccctttcagacagaaaa

SEQ ID NO: 342140 - DNA, 59 bp, Artificial
  Synthetic oligonucleotide
caatcttcgtcaattcaagaggtcgtgccaacgaagaccttcgctacagagcttcagtt

SEQ ID NO: 342141 - DNA, 56 bp, Artificial
  Synthetic oligonucleotide
caatcttctctggttagcttagcccccagggaatactgtcatagggcgaaataaca

SEQ ID NO: 342142 - DNA, 60 bp, Artificial
  Synthetic oligonucleotide
caatcttgcggcagtgggctgagattattcacagatactggcctaacccttcacagattc

SEQ ID NO: 342143 - DNA, 55 bp, Artificial
  Synthetic oligonucleotide
caatcttggggcatccctgaggaatgtgtatgacctcagaatagagtgtccacac

SEQ ID NO: 342144 - DNA, 54 bp, Artificial
  Synthetic oligonucleotide
caatctttcagtgttggtaccacagttaattgttactttacccttgaacgaata

SEQ ID NO: 342145 - DNA, 54 bp, Artificial
  Synthetic oligonucleotide
caatctttccaagcatcagatcatcatctattagcaagattgcgtatacgctga

SEQ ID NO: 342146 - DNA, 55 bp, Artificial
  Synthetic oligonucleotide
caatctttgaaggtgaaccaatctggaacaaaagacaatggcctcaacatgatgg

SEQ ID NO: 342147 - DNA, 55 bp, Artificial
  Synthetic oligonucleotide
caatctttgcaggtacagtgtgtatattgcaagaaaacattagaatgggcagatg

SEQ ID NO: 342148 - DNA, 58 bp, Artificial
  Synthetic oligonucleotide
caatctttggcgctggccaggcaaatgttgttgcgacgacacgcgcaatccaaggggg

SEQ ID NO: 342149 - DNA, 55 bp, Artificial
  Synthetic oligonucleotide
caatcttttaggtaaagctataactattgatcaggcgttaaatggaaaatttggc

SEQ ID NO: 342150 - DNA, 60 bp, Artificial
  Synthetic oligonucleotide
caatcttttctaatgctctggtggaggcaacacgtttctgtgctccaatctatgagtgtg

SEQ ID NO: 342151 - DNA, 55 bp, Artificial
  Synthetic oligonucleotide
caatcttttgggtaaagctgtgactattgaccaggcactaaatggaaagtttggt

SEQ ID NO: 342152 - DNA, 56 bp, Artificial
  Synthetic oligonucleotide
caatgaacatcatgtttgaagaagtgttcaacacggatttcggtttccacccaaac

SEQ ID NO: 342153 - DNA, 51 bp, Artificial
  Synthetic oligonucleotide
caatgaacattgtaaactacgcaatattttggttcaggccgttacactctc

SEQ ID NO: 342154 - DNA, 55 bp, Artificial
  Synthetic oligonucleotide
caatgaaccaagaaagcagaaaatcgctgacgagtctaatgttcgcactatagac

SEQ ID NO: 342155 - DNA, 55 bp, Artificial
  Synthetic oligonucleotide
caatgaaccagatttcccgttggttatggcattatactctgaatacctatcgctc

SEQ ID NO: 342156 - DNA, 57 bp, Artificial
  Synthetic oligonucleotide
caatgaaccgtcggctgccgctatttactgcgtttctaaatatccgcagtatgctta

SEQ ID NO: 342157 - DNA, 58 bp, Artificial
  Synthetic oligonucleotide
caatgaacgcttgacatgacgttaaaccttaattaccctgttgatcaataggatcacg

SEQ ID NO: 342158 - DNA, 60 bp, Artificial
  Synthetic oligonucleotide
caatgaagagtcaggacactgctcgctgataaatgtagaggatctagtgttatctgctct

SEQ ID NO: 342159 - DNA, 53 bp, Artificial
  Synthetic oligonucleotide
caatgaagagtggacattaagagacacatgcgaggaactatggcttactgaac

SEQ ID NO: 342160 - DNA, 60 bp, Artificial
  Synthetic oligonucleotide
caatgaagataaaccactttcagaatcccatataaaagagctcattgctgagttgcggtg

SEQ ID NO: 342161 - DNA, 60 bp, Artificial
  Synthetic oligonucleotide
caatgaagatgcacccgactgccatcgtctcgttcagtgataacgaatgccgggaaccaa

SEQ ID NO: 342162 - DNA, 60 bp, Artificial
  Synthetic oligonucleotide
caatgaagcaaaataccacagggattgtaacaaacggcacatcacagaagaagtgcttta

SEQ ID NO: 342163 - DNA, 55 bp, Artificial
  Synthetic oligonucleotide
caatgaagcacggttgcctagaaattgtcacaaaaggaaccagtgcgagaccaca

SEQ ID NO: 342164 - DNA, 60 bp, Artificial
  Synthetic oligonucleotide
caatgaagcattcagcatatgctaatcatttctgcggagattattctggtttcgacacca

SEQ ID NO: 342165 - DNA, 51 bp, Artificial
  Synthetic oligonucleotide
caatgaagcttgtagttaactggagcggtcgtgaatttcttcgcgaaactt

SEQ ID NO: 342166 - DNA, 53 bp, Artificial
  Synthetic oligonucleotide
caatgaaggagagaacactggcttgctacaccccatgagccaacatgggatgg

SEQ ID NO: 342167 - DNA, 60 bp, Artificial
  Synthetic oligonucleotide
caatgaaggctgaagagatcacacctgggaggttccgcaccatagtctgtggccttttcc

SEQ ID NO: 342168 - DNA, 55 bp, Artificial
  Synthetic oligonucleotide
caatgaaggctggaacccagacacaacagccttcagtgcagtggttgccggggtc

SEQ ID NO: 342169 - DNA, 55 bp, Artificial
  Synthetic oligonucleotide
caatgaatacaccagtgtatcctgttcctaaaccagatggaaggtggagaatggt

SEQ ID NO: 342170 - DNA, 60 bp, Artificial
  Synthetic oligonucleotide
caatgaatattgagggacgtgatgcagatgtcaaaggaaatctactcaagatgatgaatg

SEQ ID NO: 342171 - DNA, 60 bp, Artificial
  Synthetic oligonucleotide
caatgaatgacttcattggaatagatgaacaaagttcgatctacaaagatatgccgtcag

SEQ ID NO: 342172 - DNA, 55 bp, Artificial
  Synthetic oligonucleotide
caatgaatgccgttcttcagctagtgatttaggtttgaccattacatcccgctta

SEQ ID NO: 342173 - DNA, 58 bp, Artificial
  Synthetic oligonucleotide
caatgaatgggattggttgttcaccagctagtacggaaacatacgaagtattatcaaa

SEQ ID NO: 342174 - DNA, 60 bp, Artificial
  Synthetic oligonucleotide
caatgaatgggtcatcaggaatgacttcagcgaatcttgcctagagagtgactatgaagc

SEQ ID NO: 342175 - DNA, 51 bp, Artificial
  Synthetic oligonucleotide
caatgaatttttcaatgttggtgtgtttgagttcgtgtgggaaaagagcaa

SEQ ID NO: 342176 - DNA, 55 bp, Artificial
  Synthetic oligonucleotide
caatgacaaattctacttttgaaagtcagcagggggtaaccataacaaatggttc

SEQ ID NO: 342177 - DNA, 55 bp, Artificial
  Synthetic oligonucleotide
caatgacaagtgccctagcactggtgaggcccatttagctgaagagaatgagggg

SEQ ID NO: 342178 - DNA, 60 bp, Artificial
  Synthetic oligonucleotide
caatgacacatcacgtgaccgattcgactttctctttaagtcttacgctgatgtgggcca

SEQ ID NO: 342179 - DNA, 55 bp, Artificial
  Synthetic oligonucleotide
caatgacaccaccatgtgtactaaagaggttctctacacagccctttcacgggca

SEQ ID NO: 342180 - DNA, 57 bp, Artificial
  Synthetic oligonucleotide
caatgacaccacttaccagagaacaagggctcttgttcggactgggatggatcccag

SEQ ID NO: 342181 - DNA, 57 bp, Artificial
  Synthetic oligonucleotide
caatgacacctcctcgtggtattaacacttcaattatccaagtcgttgatcttaggt

SEQ ID NO: 342182 - DNA, 60 bp, Artificial
  Synthetic oligonucleotide
caatgacagtagtacgtaggcaatttgacagagcactttacgaagcctacgatacacctg

SEQ ID NO: 342183 - DNA, 56 bp, Artificial
  Synthetic oligonucleotide
caatgacatcccacggggcctttggtcaccagtccggagccgtctacgtaggcaac

SEQ ID NO: 342184 - DNA, 60 bp, Artificial
  Synthetic oligonucleotide
caatgacattcggatgatattgtgcaccgacccagttttcaccaggattggggctatgtt

SEQ ID NO: 342185 - DNA, 60 bp, Artificial
  Synthetic oligonucleotide
caatgacattggattgcgcgaacgcatcaaatgttcaggctgtgaaccgttctgcaacaa

SEQ ID NO: 342186 - DNA, 60 bp, Artificial
  Synthetic oligonucleotide
caatgaccaaagatgcagagagaggcaaattgaagaggcgggcaattgcaacacccggaa

SEQ ID NO: 342187 - DNA, 60 bp, Artificial
  Synthetic oligonucleotide
caatgaccaaagatgctgaaagaggcaaactaaagagaagagcaattgcaacacccggaa

SEQ ID NO: 342188 - DNA, 60 bp, Artificial
  Synthetic oligonucleotide
caatgaccagatagtcaacctggcaaatattatgtcaacggtgtcaactaatgccttgac

SEQ ID NO: 342189 - DNA, 57 bp, Artificial
  Synthetic oligonucleotide
caatgaccagatctggggggaatgaagtaggtggagacggagggtctggccaaataa

SEQ ID NO: 342190 - DNA, 60 bp, Artificial
  Synthetic oligonucleotide
caatgacccatacgagcaaatacttgtgttcaaagatcttaactgacacaagtcggccta

SEQ ID NO: 342191 - DNA, 60 bp, Artificial
  Synthetic oligonucleotide
caatgaccgcggaagagagtgacctcgagccctcgataccatcagagtacatgctcccca

SEQ ID NO: 342192 - DNA, 60 bp, Artificial
  Synthetic oligonucleotide
caatgacgaaagacaggtgaagaacgtcagggaagacgtcagagcgcaccatgggatggc

SEQ ID NO: 342193 - DNA, 60 bp, Artificial
  Synthetic oligonucleotide
caatgacgcaccttacgtccgctgattatgagctcttgcatagactttttgttatgtggt

SEQ ID NO: 342194 - DNA, 57 bp, Artificial
  Synthetic oligonucleotide
caatgactatgtattcatcgatttacgaaatcgggggaagccaccccctgagagtag

SEQ ID NO: 342195 - DNA, 55 bp, Artificial
  Synthetic oligonucleotide
caatgacttaactgcgtcgttacaggttgctttagatactaacaacatactgcca

SEQ ID NO: 342196 - DNA, 54 bp, Artificial
  Synthetic oligonucleotide
caatgacttcacggccttcgaccaatcacaggatggcgccatgcttcaattcga

SEQ ID NO: 342197 - DNA, 55 bp, Artificial
  Synthetic oligonucleotide
caatgagacacaaacgatctacaaggcgcaaacgtgcctctgcaacacaactata

SEQ ID NO: 342198 - DNA, 59 bp, Artificial
  Synthetic oligonucleotide
caatgagaccatattggagaccgggtatgtgtgtagcaaatttcattcggacaccccca

SEQ ID NO: 342199 - DNA, 54 bp, Artificial
  Synthetic oligonucleotide
caatgagactcgttattatggagggaacttttctaattggtgtgggtcaaaaag

SEQ ID NO: 342200 - DNA, 55 bp, Artificial
  Synthetic oligonucleotide
caatgagagacaaggatgtgaacgcaggctccaaaggaaaagttgtcccgcggct

SEQ ID NO: 342201 - DNA, 60 bp, Artificial
  Synthetic oligonucleotide
caatgagagggacgccatctacagctcagcactcattgaggccacccgattctgtgctcc

SEQ ID NO: 342202 - DNA, 55 bp, Artificial
  Synthetic oligonucleotide
caatgagatagggccgctaggggctgagggtctcaccaccacctggaaagaatac

SEQ ID NO: 342203 - DNA, 60 bp, Artificial
  Synthetic oligonucleotide
caatgagcaagaattgttagctctggataaatggtcaagcctgtggaattggttcgatat

SEQ ID NO: 342204 - DNA, 60 bp, Artificial
  Synthetic oligonucleotide
caatgagccaagtggatatgcacaaacagactgtgtccttgaagcaatggccttccttga

SEQ ID NO: 342205 - DNA, 60 bp, Artificial
  Synthetic oligonucleotide
caatgagctaccaagaagcaccaaacaacgtgcgaagggacctcgacaatctgcaggcct

SEQ ID NO: 342206 - DNA, 55 bp, Artificial
  Synthetic oligonucleotide
caatgagctccacttcactgtcctccatgtcacaaggcacattggtgctctctgc

SEQ ID NO: 342207 - DNA, 60 bp, Artificial
  Synthetic oligonucleotide
caatgagctgagcaatcttgcaaaaggagagaaggcgaatgtgctaattgggcaaggaga

SEQ ID NO: 342208 - DNA, 50 bp, Artificial
  Synthetic oligonucleotide
caatgagctggtgcctgcgatgggccaattatcgtgtgatatggtgggtc

SEQ ID NO: 342209 - DNA, 60 bp, Artificial
  Synthetic oligonucleotide
caatgaggaacgtgaacgttttcagttcaccaatggtccagatagcgtgatcacacgcat

SEQ ID NO: 342210 - DNA, 60 bp, Artificial
  Synthetic oligonucleotide
caatgaggaggctgcagactggaatagaacgcatccagtacatgcagggcctattgcacc

SEQ ID NO: 342211 - DNA, 58 bp, Artificial
  Synthetic oligonucleotide
caatgaggtagtggtgtacttcttactgctctacttaataataagagacgagcccata

SEQ ID NO: 342212 - DNA, 51 bp, Artificial
  Synthetic oligonucleotide
caatgatatgatttgatgggttgggcacaaattcacatagatgcatgaaaa

SEQ ID NO: 342213 - DNA, 50 bp, Artificial
  Synthetic oligonucleotide
caatgatcaaaatggtaacttctttaggccatctcgcgacagtatattag

SEQ ID NO: 342214 - DNA, 55 bp, Artificial
  Synthetic oligonucleotide
caatgatccaaaacctgaatcagaacgagatcgtgtacaccacgacagacagggt

SEQ ID NO: 342215 - DNA, 56 bp, Artificial
  Synthetic oligonucleotide
caatgatctgaaaaggcctcgaggctaagagattattggggggtgagtaagtactt

SEQ ID NO: 342216 - DNA, 55 bp, Artificial
  Synthetic oligonucleotide
caatgatggtgagtcggcaaaatgcccaattcatccggatgttgcgttcgttgcg

SEQ ID NO: 342217 - DNA, 56 bp, Artificial
  Synthetic oligonucleotide
caatgatggttgactttgaattcgcagaatgcttatttgtaactgatcctgatgag

SEQ ID NO: 342218 - DNA, 58 bp, Artificial
  Synthetic oligonucleotide
caatgatgtcgattttacgggaaattgttgccacgtcgcgcggtttctcgaatcagtg

SEQ ID NO: 342219 - DNA, 55 bp, Artificial
  Synthetic oligonucleotide
caatgattaaaatgtgggatccactgttaaacgagttcccagagactgtccatgg

SEQ ID NO: 342220 - DNA, 57 bp, Artificial
  Synthetic oligonucleotide
caatgattctaactattcaggctttatgcccaactgtagcaaggtagtagtatcctc

SEQ ID NO: 342221 - DNA, 60 bp, Artificial
  Synthetic oligonucleotide
caatgattgccccaattcgagtattgtgtacgagacagctggtgctatcctacacactcc

SEQ ID NO: 342222 - DNA, 60 bp, Artificial
  Synthetic oligonucleotide
caatgattgccctaactcgagtattgtgtacgagacgaccgatgccatcctacacgctcc

SEQ ID NO: 342223 - DNA, 60 bp, Artificial
  Synthetic oligonucleotide
caatgattgccctaactcgagtgttgtatacgagacgcacgatgccatcctgcacactcc

SEQ ID NO: 342224 - DNA, 55 bp, Artificial
  Synthetic oligonucleotide
caatgattgtgccctgggttagtgctagtcatttcagaaacaccacaccagacaa

SEQ ID NO: 342225 - DNA, 60 bp, Artificial
  Synthetic oligonucleotide
caatgatttcagtgtacggttactgcgcgacacaacgcacatttcgcagacggccatgcc

SEQ ID NO: 342226 - DNA, 60 bp, Artificial
  Synthetic oligonucleotide
caatgcaaagcggcgtagatttaggcggcagatacagcgagtcggtagtatcctcttacg

SEQ ID NO: 342227 - DNA, 54 bp, Artificial
  Synthetic oligonucleotide
caatgcaaatgtcatcagtaacacagttactttcgagtttaacgttgagagtag

SEQ ID NO: 342228 - DNA, 55 bp, Artificial
  Synthetic oligonucleotide
caatgcaacccctttccagtcagaagggaattctttagttgacaggcctcccttg

SEQ ID NO: 342229 - DNA, 60 bp, Artificial
  Synthetic oligonucleotide
caatgcaacttgagccacaccaaggtcttgctagagcccgaaagcatgtccaaggtgaac

SEQ ID NO: 342230 - DNA, 55 bp, Artificial
  Synthetic oligonucleotide
caatgcaagatttggctccagttgtaagagagtatatgatgctaggagccgacgg

SEQ ID NO: 342231 - DNA, 60 bp, Artificial
  Synthetic oligonucleotide
caatgcaattaatcagaaggtagaatatgatttcaacaaacaactccaattggcatcctt

SEQ ID NO: 342232 - DNA, 60 bp, Artificial
  Synthetic oligonucleotide
caatgcacattgttatgaggtgcttatatcctgaaataaaaccatggaaaaaggcaagcg

SEQ ID NO: 342233 - DNA, 60 bp, Artificial
  Synthetic oligonucleotide
caatgcaccagctattgtaccacaagtcgaaattgatcgcttagcttcaaaggctacggt

SEQ ID NO: 342234 - DNA, 60 bp, Artificial
  Synthetic oligonucleotide
caatgcaccccatagtctggctggggctttgagaattgccgaacactatgattgcatgga

SEQ ID NO: 342235 - DNA, 59 bp, Artificial
  Synthetic oligonucleotide
caatgcacctggacaaatgttggttagattaggaccaaacctaactgaccaatatgatc

SEQ ID NO: 342236 - DNA, 60 bp, Artificial
  Synthetic oligonucleotide
caatgcacggtcacctgtagaggagaatgcgcgcacggttagaggttatagtgctgacta

SEQ ID NO: 342237 - DNA, 60 bp, Artificial
  Synthetic oligonucleotide
caatgcacttcgtagaggcggaccctgaaaatgggtcttatgatgagtacatgcgtggcg

SEQ ID NO: 342238 - DNA, 55 bp, Artificial
  Synthetic oligonucleotide
caatgcagacagactagtaagtagcaagaccgggaataggtacatacccggagag

SEQ ID NO: 342239 - DNA, 55 bp, Artificial
  Synthetic oligonucleotide
caatgcagcatccctggccggaacgcacggtcttgtgtccttcctcgtattcttc

SEQ ID NO: 342240 - DNA, 60 bp, Artificial
  Synthetic oligonucleotide
caatgcagccggggaacacctgtcactgctccaaacacaaatgcgcgcctccgacgcgca

SEQ ID NO: 342241 - DNA, 55 bp, Artificial
  Synthetic oligonucleotide
caatgcagcttatcctaactcgagtaagtcaagactcgttactctgtatcgagtt

SEQ ID NO: 342242 - DNA, 55 bp, Artificial
  Synthetic oligonucleotide
caatgcagtcaaaactgaatatgagttggatgacgctcagatgaacgttgtcatg

SEQ ID NO: 342243 - DNA, 55 bp, Artificial
  Synthetic oligonucleotide
caatgcagttattcatggtaaagttgaggatcataaaggtgaaactgcaccaaac

SEQ ID NO: 342244 - DNA, 55 bp, Artificial
  Synthetic oligonucleotide
caatgcataacgagtcatagtaacagaactcccagtagagccgcgccaaaacgga

SEQ ID NO: 342245 - DNA, 60 bp, Artificial
  Synthetic oligonucleotide
caatgcatagcggaagaaccacaatacgagttggagaaagttgaattttgccagatgtcc

SEQ ID NO: 342246 - DNA, 58 bp, Artificial
  Synthetic oligonucleotide
caatgcataggatcgaggacgtatcaaatagaagatagtgggtcaaaatcatcgattt

SEQ ID NO: 342247 - DNA, 60 bp, Artificial
  Synthetic oligonucleotide
caatgcatattattaggaacagtaacagactatacaacaggaacccaactttcatccata

SEQ ID NO: 342248 - DNA, 58 bp, Artificial
  Synthetic oligonucleotide
caatgcatgaacgtaatgagcctcctctcaattgggttgctcttgggtatacagaaca

SEQ ID NO: 342249 - DNA, 53 bp, Artificial
  Synthetic oligonucleotide
caatgcatttgaccctgtatctagcacacaagaagtacccgctactggacctc

SEQ ID NO: 342250 - DNA, 55 bp, Artificial
  Synthetic oligonucleotide
caatgccaccacgcaataccaatgggggcaagtgcttctatggcggtcgtatatt

SEQ ID NO: 342251 - DNA, 54 bp, Artificial
  Synthetic oligonucleotide
caatgccacttggggccgaataacttttggtccagttgaaagagtgagaaaaag

SEQ ID NO: 342252 - DNA, 55 bp, Artificial
  Synthetic oligonucleotide
caatgccatacttcgaaatagcgacgactgtcgtgtgctgttgtgtcgtgtgtcc

SEQ ID NO: 342253 - DNA, 53 bp, Artificial
  Synthetic oligonucleotide
caatgcccatgagggtcaacttgtgatagcaaggcagaaagtaagagatgcag

SEQ ID NO: 342254 - DNA, 59 bp, Artificial
  Synthetic oligonucleotide
caatgccccagctgtcggagtaaagcatcacttaccacccttcgcgactcgcgccgact

SEQ ID NO: 342255 - DNA, 58 bp, Artificial
  Synthetic oligonucleotide
caatgcccttcgcgcacaaggagcacaaatagacactcccttttcagccttttactgg

SEQ ID NO: 342256 - DNA, 55 bp, Artificial
  Synthetic oligonucleotide
caatgccggagctttctaaagagtgatcctatcacgtctagtggccgaggtacgg

SEQ ID NO: 342257 - DNA, 53 bp, Artificial
  Synthetic oligonucleotide
caatgcctaaatggcctgtaaaacgaactcgggagggtagtataaatttggag

SEQ ID NO: 342258 - DNA, 60 bp, Artificial
  Synthetic oligonucleotide
caatgcctagaaccatctatgaactcaggatggaatgcccgcatactgtgggcttgggtc

SEQ ID NO: 342259 - DNA, 55 bp, Artificial
  Synthetic oligonucleotide
caatgcctctagttcttattctacaggagctgttgatcatttaccagttgatggg

SEQ ID NO: 342260 - DNA, 50 bp, Artificial
  Synthetic oligonucleotide
caatgcctgctgtttagtgggtactgtgtcttatataactagtaaacctg

SEQ ID NO: 342261 - DNA, 55 bp, Artificial
  Synthetic oligonucleotide
caatgccttcctgaggttgtgattgaaccggatctggatgtctatgactttccct

SEQ ID NO: 342262 - DNA, 55 bp, Artificial
  Synthetic oligonucleotide
caatgcctttagatgcaaagagcaaaatcggaggccctaacccttatcctcagca

SEQ ID NO: 342263 - DNA, 55 bp, Artificial
  Synthetic oligonucleotide
caatgcgataagaagaccctcccacttacatggacaggctttataactctaccag

SEQ ID NO: 342264 - DNA, 55 bp, Artificial
  Synthetic oligonucleotide
caatgcgcatttgcggcgccaaatataaatcgagcgagcccagctgtcctatgca

SEQ ID NO: 342265 - DNA, 55 bp, Artificial
  Synthetic oligonucleotide
caatgcggcatttccccaaatgactaagtcgtataggaatcccaggaacaaacca

SEQ ID NO: 342266 - DNA, 58 bp, Artificial
  Synthetic oligonucleotide
caatgcggtctcccgctttgacaaagtaaggcaagactccgttgttcactagcactac

SEQ ID NO: 342267 - DNA, 55 bp, Artificial
  Synthetic oligonucleotide
caatgcgtggtgtgcaaccagcacaaaagcggaaatctcgttccgtatcgcgtcg

SEQ ID NO: 342268 - DNA, 59 bp, Artificial
  Synthetic oligonucleotide
caatgctaaaaacataatagtacaacttaatgacactgtagaaattgtgtgtaccagac

SEQ ID NO: 342269 - DNA, 50 bp, Artificial
  Synthetic oligonucleotide
caatgctaatgagcaaagaccttacaaaagaccaatagaaccagttagat

SEQ ID NO: 342270 - DNA, 60 bp, Artificial
  Synthetic oligonucleotide
caatgctaccactaccggtagattcaaggtggtcgatcgtgttttgaacgatcacattga

SEQ ID NO: 342271 - DNA, 57 bp, Artificial
  Synthetic oligonucleotide
caatgctactgaaacggtggaaagcaaaagcctggacaaactttgcatgaaaagtcg

SEQ ID NO: 342272 - DNA, 60 bp, Artificial
  Synthetic oligonucleotide
caatgctatacaataaaatggaattcgagccatttcagtctctagtccctaaggccatta

SEQ ID NO: 342273 - DNA, 59 bp, Artificial
  Synthetic oligonucleotide
caatgctcacaacgacagatacacaaaatacgaactaccacaaaggaaccaatatacaa

SEQ ID NO: 342274 - DNA, 60 bp, Artificial
  Synthetic oligonucleotide
caatgctccttcgataaccctcaaacttggtgactacggagaagtcacgctggactgtga

SEQ ID NO: 342275 - DNA, 60 bp, Artificial
  Synthetic oligonucleotide
caatgctcgcaaatgttactgcagttcgtcaagagtacgctattccagttggacctgttt

SEQ ID NO: 342276 - DNA, 59 bp, Artificial
  Synthetic oligonucleotide
caatgctctcctcaggttgtggttgaaccgtatttggacgtggtagactctgctcgcgg

SEQ ID NO: 342277 - DNA, 60 bp, Artificial
  Synthetic oligonucleotide
caatgctctctgcattccacaaactcaatcatgacacatcttgtggaccttacttaggtg

SEQ ID NO: 342278 - DNA, 55 bp, Artificial
  Synthetic oligonucleotide
caatgctgaacggctagttgagtttggagctccacatgctgtgaaaatggatgtg

SEQ ID NO: 342279 - DNA, 60 bp, Artificial
  Synthetic oligonucleotide
caatgctgagactggcccggaacactagttcaggatttgctgcggagatactgatccaga

SEQ ID NO: 342280 - DNA, 55 bp, Artificial
  Synthetic oligonucleotide
caatgcttagttatggaaatgtattggatttgaaccacctggatattgatgagcc

SEQ ID NO: 342281 - DNA, 59 bp, Artificial
  Synthetic oligonucleotide
caatgcttatagccaactaaactcacagaccccacatgcactgaagggcggttaccatg

SEQ ID NO: 342282 - DNA, 51 bp, Artificial
  Synthetic oligonucleotide
caatgcttctagaaagaagaatagactggacctatatgtctagtacttggc

SEQ ID NO: 342283 - DNA, 60 bp, Artificial
  Synthetic oligonucleotide
caatgcttgcatagagtcaattagaaacgggacttatgaccatgatatatatcgagatga

SEQ ID NO: 342284 - DNA, 60 bp, Artificial
  Synthetic oligonucleotide
caatgcttggtacacatctaatatgggacgttggtctacagtccacagtgtcaatggtgg

SEQ ID NO: 342285 - DNA, 60 bp, Artificial
  Synthetic oligonucleotide
caatgctttagctcaaagtaacttcttgaatgtcgtaggtaatttccacgcttatatgca

SEQ ID NO: 342286 - DNA, 60 bp, Artificial
  Synthetic oligonucleotide
caatggaaatgatatttggatgggacgaacaatcaaagaggattcacgctcaggttatga

SEQ ID NO: 342287 - DNA, 55 bp, Artificial
  Synthetic oligonucleotide
caatggaaccctcatattccctaattatacaaatggaatcatcacactcccatgc

SEQ ID NO: 342288 - DNA, 55 bp, Artificial
  Synthetic oligonucleotide
caatggaagagacacatacaagcagtttgaggacaagatacgcagtgttagcgct

SEQ ID NO: 342289 - DNA, 60 bp, Artificial
  Synthetic oligonucleotide
caatggaagataacacgacgaaatgcttcagatacgtctcattatatagcaaaccgagaa

SEQ ID NO: 342290 - DNA, 60 bp, Artificial
  Synthetic oligonucleotide
caatggaatccagcactcttgaactgagaagcagatactgggctatacggaccaggagtg

SEQ ID NO: 342291 - DNA, 55 bp, Artificial
  Synthetic oligonucleotide
caatggaatcgctaacacttagttgctcggtgtgcttttgcgacgtcactatcga

SEQ ID NO: 342292 - DNA, 54 bp, Artificial
  Synthetic oligonucleotide
caatggaatctgtaatgagacggtagtgaaggaatacaatgagacagtcaggat

SEQ ID NO: 342293 - DNA, 60 bp, Artificial
  Synthetic oligonucleotide
caatggaatgctgtgtgcaacagatctggggcatcctctcattctagacacctgtactat

SEQ ID NO: 342294 - DNA, 52 bp, Artificial
  Synthetic oligonucleotide
caatggaatggtaaaacaggtaatagttacagtgttggaattccttgggggg

SEQ ID NO: 342295 - DNA, 55 bp, Artificial
  Synthetic oligonucleotide
caatggacaagactttgaatcaatacccctccctgacagcagagatatttaacgt

SEQ ID NO: 342296 - DNA, 60 bp, Artificial
  Synthetic oligonucleotide
caatggacataacgctctactattaccaacaaactgacgaggctaataagtggatatcta

SEQ ID NO: 342297 - DNA, 53 bp, Artificial
  Synthetic oligonucleotide
caatggactagtttgggaatatttttaggaggccttggaataggtactggtag

SEQ ID NO: 342298 - DNA, 55 bp, Artificial
  Synthetic oligonucleotide
caatggactcctattcaaggtgtcgttaacacagttgctggtaaacaaggtgacg

SEQ ID NO: 342299 - DNA, 60 bp, Artificial
  Synthetic oligonucleotide
caatggactctagcactctcgaattgaggagcagatactgggccataaggaccagaagtg

SEQ ID NO: 342300 - DNA, 54 bp, Artificial
  Synthetic oligonucleotide
caatggagagatgaagactctgtatgtgagcaactcaccttacatccccacttg

SEQ ID NO: 342301 - DNA, 60 bp, Artificial
  Synthetic oligonucleotide
caatggagcatttatagctcctgacagggcaagttttcttagaggagaatcactaggaat

SEQ ID NO: 342302 - DNA, 55 bp, Artificial
  Synthetic oligonucleotide
caatggagcgtacgacctacctatgtaccttacgataggaatagagaaagtgata

SEQ ID NO: 342303 - DNA, 60 bp, Artificial
  Synthetic oligonucleotide
caatggagctaatagtctgggctgctagtgctgaagttgttaatctcgagccaggatgga

SEQ ID NO: 342304 - DNA, 60 bp, Artificial
  Synthetic oligonucleotide
caatggaggaaacgccactactccagctgtaagagctgtatggaatatgcatgagagacc

SEQ ID NO: 342305 - DNA, 60 bp, Artificial
  Synthetic oligonucleotide
caatggaggacttttgtgagcttgctcttgacgagctcaagataaatcctttccaccaac

SEQ ID NO: 342306 - DNA, 60 bp, Artificial
  Synthetic oligonucleotide
caatggaggctattgatctgtggtggcatgttatggatcgttatgtgcgtaattacagag

SEQ ID NO: 342307 - DNA, 58 bp, Artificial
  Synthetic oligonucleotide
caatggaggtctgatagcgccgagtcgagttagcaaactaattggaaggggattggga

SEQ ID NO: 342308 - DNA, 60 bp, Artificial
  Synthetic oligonucleotide
caatggatattgctccacttgtactaagtgcattatatatgtgtactcctcctgaagtcg

SEQ ID NO: 342309 - DNA, 57 bp, Artificial
  Synthetic oligonucleotide
caatggatgccgcttacgttaattcaacaagtgaagaaacgtttttgacatcaacac

SEQ ID NO: 342310 - DNA, 55 bp, Artificial
  Synthetic oligonucleotide
caatggattaccaaactgaggttagtgaggataacgtgagcgtacgcggtcgggc

SEQ ID NO: 342311 - DNA, 55 bp, Artificial
  Synthetic oligonucleotide
caatggattagaagatacaatacgaggcgactacattgtggactgtgtgactgga

SEQ ID NO: 342312 - DNA, 55 bp, Artificial
  Synthetic oligonucleotide
caatggattatcaaactgatgtcagtgaggacaatgtgcaagttcgcggtcgggc

SEQ ID NO: 342313 - DNA, 55 bp, Artificial
  Synthetic oligonucleotide
caatggatttcgggcaggtgttcaacatgttcgataacgagcctagcactgccac

SEQ ID NO: 342314 - DNA, 56 bp, Artificial
  Synthetic oligonucleotide
caatggcaaacgtggatcgaatattcatagaaaggcccatgatgatggtaaaatgt

SEQ ID NO: 342315 - DNA, 55 bp, Artificial
  Synthetic oligonucleotide
caatggcagactgatcacagccaaccctgtggtgactaagaaggaggagcctgtc

SEQ ID NO: 342316 - DNA, 57 bp, Artificial
  Synthetic oligonucleotide
caatggcaggaattgtgttcggaagtttctctcctccaacactagagaagaaaactg

SEQ ID NO: 342317 - DNA, 57 bp, Artificial
  Synthetic oligonucleotide
caatggcatccataacgattggagcattctccgtgcctctggccattggagcaccga

SEQ ID NO: 342318 - DNA, 60 bp, Artificial
  Synthetic oligonucleotide
caatggcattagaagaccaaagcacttgtatgtgtccatgcctactgcccagtcaactat

SEQ ID NO: 342319 - DNA, 60 bp, Artificial
  Synthetic oligonucleotide
caatggcattcagtacaccgacagaaagtggtgttttgatgggccgcgcacgaatgccat

SEQ ID NO: 342320 - DNA, 53 bp, Artificial
  Synthetic oligonucleotide
caatggccccgaagttccatccggcaacgtccctcccgccaaccctcctggtc

SEQ ID NO: 342321 - DNA, 50 bp, Artificial
  Synthetic oligonucleotide
caatggccctctatctgcggaaaaagagggaaggtcaccaacccgacaac

SEQ ID NO: 342322 - DNA, 60 bp, Artificial
  Synthetic oligonucleotide
caatggcctcagttatgattggttcaatctccgtacctatcgcacaacctgcgcagtatg

SEQ ID NO: 342323 - DNA, 58 bp, Artificial
  Synthetic oligonucleotide
caatggcctgttctccaaactcaacagcaattttctggtactcgtccatttcagattt

SEQ ID NO: 342324 - DNA, 60 bp, Artificial
  Synthetic oligonucleotide
caatggcgagccgactgtaaaactatatacatctgttgagaatgcacagcaggacaaggg

SEQ ID NO: 342325 - DNA, 53 bp, Artificial
  Synthetic oligonucleotide
caatggcgccaaggaaacacaaacgtaaaaatgcaagggtacaccacgccttg

SEQ ID NO: 342326 - DNA, 55 bp, Artificial
  Synthetic oligonucleotide
caatggcgctatccagctaagaattgtaagttgacaagacaccacatgttctgcc

SEQ ID NO: 342327 - DNA, 58 bp, Artificial
  Synthetic oligonucleotide
caatggctactttagatttgactcctgggtcaaccaattctacacacttgcccccatg

SEQ ID NO: 342328 - DNA, 55 bp, Artificial
  Synthetic oligonucleotide
caatggctgatccagaaggtacagacggggagggcacggggtgtaacggctggtt

SEQ ID NO: 342329 - DNA, 55 bp, Artificial
  Synthetic oligonucleotide
caatggcttagtgaaccttgtaaactacttccagatacagcagcagtaagcctcc

SEQ ID NO: 342330 - DNA, 60 bp, Artificial
  Synthetic oligonucleotide
caatggcttagtggtaaaggttactcctgaattcaaagaatctatgatagctgattcgac

SEQ ID NO: 342331 - DNA, 56 bp, Artificial
  Synthetic oligonucleotide
caatggctttccttgaagaagcccacccagggatctttgaaaactcgtgtcttgaa

SEQ ID NO: 342332 - DNA, 57 bp, Artificial
  Synthetic oligonucleotide
caatggctttccttgaggagtcccaccctggtatctttggaaactcgtgtcttgaga

SEQ ID NO: 342333 - DNA, 55 bp, Artificial
  Synthetic oligonucleotide
caatgggaaattgaacagagtaattgaaaagacgaatgagaagttccaccaaatc

SEQ ID NO: 342334 - DNA, 55 bp, Artificial
  Synthetic oligonucleotide
caatgggaacctcaagttcgatcagatgctcctgactgcccagaacctaccggcc

SEQ ID NO: 342335 - DNA, 55 bp, Artificial
  Synthetic oligonucleotide
caatgggacgctaatggcgcacgtaaatatgaaactggtcttgaccgtggagtac

SEQ ID NO: 342336 - DNA, 52 bp, Artificial
  Synthetic oligonucleotide
caatgggagaaacacaatttagcctatctgtgttagtgcagtgggcatatga

SEQ ID NO: 342337 - DNA, 57 bp, Artificial
  Synthetic oligonucleotide
caatgggagctaccggacctcgcttaggactcctattcccatggagaaactcctaga

SEQ ID NO: 342338 - DNA, 56 bp, Artificial
  Synthetic oligonucleotide
caatgggatagagaaattagcaattacacaagtaaaatataccagttaattgaaaa

SEQ ID NO: 342339 - DNA, 55 bp, Artificial
  Synthetic oligonucleotide
caatgggatattgtgtgcaactgatctaggacatcccctcattctagacacctgc

SEQ ID NO: 342340 - DNA, 55 bp, Artificial
  Synthetic oligonucleotide
caatgggatcatcatgtactgtaaaagtgtgtccactgaatacacaaacgttagg

SEQ ID NO: 342341 - DNA, 58 bp, Artificial
  Synthetic oligonucleotide
caatgggatcatcttgtaccataaaagtatgtccattaaatacgcaaacattaggaat

SEQ ID NO: 342342 - DNA, 60 bp, Artificial
  Synthetic oligonucleotide
caatgggcaactcaaagatccagtttactcaaccaagctgtgccgacactattggatggg

SEQ ID NO: 342343 - DNA, 60 bp, Artificial
  Synthetic oligonucleotide
caatgggcactcaatccacaagatagaatcgcacctcaacacctcatggatgtcatggga

SEQ ID NO: 342344 - DNA, 57 bp, Artificial
  Synthetic oligonucleotide
caatgggcagcaggggagaattgactattattggtcagtattaaaaccaggtcaaac

SEQ ID NO: 342345 - DNA, 55 bp, Artificial
  Synthetic oligonucleotide
caatgggccaacagacgggtgagagtcacaaagctgcagagtttgtttgcccacc

SEQ ID NO: 342346 - DNA, 60 bp, Artificial
  Synthetic oligonucleotide
caatgggccttgttttcatgtgtgtaaagaatggaaacatgcggtgcaccatttgtatat

SEQ ID NO: 342347 - DNA, 58 bp, Artificial
  Synthetic oligonucleotide
caatgggcggagttctgcggctacctgatcaccccaaaaggcctgatcaaagacccac

SEQ ID NO: 342348 - DNA, 59 bp, Artificial
  Synthetic oligonucleotide
caatgggctcgtcttgcacagtaaaagtatgtccattaaatacacaaacgctcggtatc

SEQ ID NO: 342349 - DNA, 60 bp, Artificial
  Synthetic oligonucleotide
caatgggctctaagtgtaataatactgattcaaaagttcaaggctattacatatgtatag

SEQ ID NO: 342350 - DNA, 57 bp, Artificial
  Synthetic oligonucleotide
caatggggaagtacaatctaatcttgtcagagtatttgtcattcgtctataactcac

SEQ ID NO: 342351 - DNA, 57 bp, Artificial
  Synthetic oligonucleotide
caatggggctgagaattagctcgtctttcagctttggtggattcacctttaaaagaa

SEQ ID NO: 342352 - DNA, 55 bp, Artificial
  Synthetic oligonucleotide
caatggggtgcacaaccaactgctcagtatgctaggcaaaattcctggatcactc

SEQ ID NO: 342353 - DNA, 59 bp, Artificial
  Synthetic oligonucleotide
caatggggttcacatatagcggaataagaaccaatggggcaaccagtgcgtgtagaaga

SEQ ID NO: 342354 - DNA, 55 bp, Artificial
  Synthetic oligonucleotide
caatggggttggctatttcgctaattcgacttataatgatctattctcatggtac

SEQ ID NO: 342355 - DNA, 60 bp, Artificial
  Synthetic oligonucleotide
caatggggttttcatatgatacccgctgctttgactctacggtcactgagagcgatatcc

SEQ ID NO: 342356 - DNA, 50 bp, Artificial
  Synthetic oligonucleotide
caatgggtacccaatgagaggatttcctaatgctctgggtatcggtacat

SEQ ID NO: 342357 - DNA, 60 bp, Artificial
  Synthetic oligonucleotide
caatgggtgcacaagtctcatctcagaaggtaggggcacacgaaaacaccaacgtggcca

SEQ ID NO: 342358 - DNA, 60 bp, Artificial
  Synthetic oligonucleotide
caatggtaatggaactcatcaggatgataaagagaggagtcaatgaccgcaatttctgga

SEQ ID NO: 342359 - DNA, 60 bp, Artificial
  Synthetic oligonucleotide
caatggtagacatgagtatcagaattttgtcaaaggtatacgcagtgtgtccgctggtcg

SEQ ID NO: 342360 - DNA, 55 bp, Artificial
  Synthetic oligonucleotide
caatggtatactcgaagagagatctgatgcctatccatgccgggtgcaactgcgg

SEQ ID NO: 342361 - DNA, 58 bp, Artificial
  Synthetic oligonucleotide
caatggtatatactaaggcgctgaggcgtagagtgtccgcccatttgaggaaggttcg

SEQ ID NO: 342362 - DNA, 55 bp, Artificial
  Synthetic oligonucleotide
caatggtatatgctggtttaatcagctatttgtcactgtggtagacaacacacgc

SEQ ID NO: 342363 - DNA, 55 bp, Artificial
  Synthetic oligonucleotide
caatggtatgacctatggaattgagcgttgtgttatttacgctggcgtgatgact

SEQ ID NO: 342364 - DNA, 60 bp, Artificial
  Synthetic oligonucleotide
caatggtattctcacaggaggattgcatgataaaggcagtccgaggtgatttaaatttcg

SEQ ID NO: 342365 - DNA, 51 bp, Artificial
  Synthetic oligonucleotide
caatggtattgagggaagtagactgggacccgttgacccgtcacgagaaat

SEQ ID NO: 342366 - DNA, 60 bp, Artificial
  Synthetic oligonucleotide
caatggtcgatcttcatacaactccgactgagtcttgctgtgaattgtgacgccgttgac

SEQ ID NO: 342367 - DNA, 60 bp, Artificial
  Synthetic oligonucleotide
caatggtgacctatgcctctcaatggatcattcaaaatgggggcctttcatgagccccgc

SEQ ID NO: 342368 - DNA, 52 bp, Artificial
  Synthetic oligonucleotide
caatggtgatgatgcaacggctggtttgactcacattatgatctggcattcc

SEQ ID NO: 342369 - DNA, 58 bp, Artificial
  Synthetic oligonucleotide
caatggtgattgggcttgggagcccatacttgactgtggaagcggatcggatcaattt

SEQ ID NO: 342370 - DNA, 55 bp, Artificial
  Synthetic oligonucleotide
caatggtgcactgtcagattcaaatcgcgaagagtgggcttccgtgttggcgtta

SEQ ID NO: 342371 - DNA, 55 bp, Artificial
  Synthetic oligonucleotide
caatggtgccaaaaccagcgcgtttagtggaagaggaaaagagagcagctgaagc

SEQ ID NO: 342372 - DNA, 55 bp, Artificial
  Synthetic oligonucleotide
caatggtgccaaccgaccaatgggatgtgacacctgcctaagtgtccaccaaacc

SEQ ID NO: 342373 - DNA, 60 bp, Artificial
  Synthetic oligonucleotide
caatggtgcgctcactactgtcctagctgctggcgaccccaactcgggcaaaacaaatac

SEQ ID NO: 342374 - DNA, 60 bp, Artificial
  Synthetic oligonucleotide
caatggtggcgacagggtacagaagagcaagtactcctgactgggcaatgggactgcatt

SEQ ID NO: 342375 - DNA, 55 bp, Artificial
  Synthetic oligonucleotide
caatggtgttgtggcagctacattctcactgcgccttaaaggcaagcctgtcccg

SEQ ID NO: 342376 - DNA, 54 bp, Artificial
  Synthetic oligonucleotide
caatggttataccccaagaaatacgactatgaagtgggttacaacgattcgggc

SEQ ID NO: 342377 - DNA, 50 bp, Artificial
  Synthetic oligonucleotide
caatggttcatttgtaatggcggtttctggtagtgaccaatctaacattg

SEQ ID NO: 342378 - DNA, 59 bp, Artificial
  Synthetic oligonucleotide
caatggttctttgacttacccctaccatggacatcaggagctacagcagaaacaccaac

SEQ ID NO: 342379 - DNA, 57 bp, Artificial
  Synthetic oligonucleotide
caatggttggcaccaccaaagtttacaatttaaacagcgctcttgtgagttgtgtct

SEQ ID NO: 342380 - DNA, 60 bp, Artificial
  Synthetic oligonucleotide
caatggtttgtgaggtttgtcaatatgaatgtgagacagcaaaagaattagaatctcatc

SEQ ID NO: 342381 - DNA, 60 bp, Artificial
  Synthetic oligonucleotide
caatgtaactctagtaaatttcatcagggcactctcatagtagctatgataccagaacat

SEQ ID NO: 342382 - DNA, 55 bp, Artificial
  Synthetic oligonucleotide
caatgtagatcaggacctcgtgggttggcccgctccccaaggtgcacgctcactg

SEQ ID NO: 342383 - DNA, 57 bp, Artificial
  Synthetic oligonucleotide
caatgtaggtcatttattggagtcagctggtcatctgactcatgtaaaggttaagca

SEQ ID NO: 342384 - DNA, 55 bp, Artificial
  Synthetic oligonucleotide
caatgtagtagtgctatgctaatgaagtgtaaataactgtgggcgtcgtatcgct

SEQ ID NO: 342385 - DNA, 60 bp, Artificial
  Synthetic oligonucleotide
caatgtagtccaggctttcggaatgagaggtcctggtccgctgcagagtaactttggtga

SEQ ID NO: 342386 - DNA, 60 bp, Artificial
  Synthetic oligonucleotide
caatgtataccgctcccattgcaggaaacattacctgtagatcaaatattacaggtctac

SEQ ID NO: 342387 - DNA, 58 bp, Artificial
  Synthetic oligonucleotide
caatgtatatttacctgatgtagcatttttaataagtaactgttcactttctggactc

SEQ ID NO: 342388 - DNA, 55 bp, Artificial
  Synthetic oligonucleotide
caatgtatccacatgggcgtttaccagagggagttattgctgttaattggccagt

SEQ ID NO: 342389 - DNA, 53 bp, Artificial
  Synthetic oligonucleotide
caatgtatctcattcagtaacaggtagaaaagagatggtagcaacgttttcaa

SEQ ID NO: 342390 - DNA, 60 bp, Artificial
  Synthetic oligonucleotide
caatgtatgcccctcccatcagaggagaaattagatgtttatcaaatattacagggctaa

SEQ ID NO: 342391 - DNA, 57 bp, Artificial
  Synthetic oligonucleotide
caatgtatgccgcccccattgaaggaataattacctgtaactcaagtattacaggtc

SEQ ID NO: 342392 - DNA, 54 bp, Artificial
  Synthetic oligonucleotide
caatgtcaacaaccaacattgagacatacttcaaagactgtgtatttaaggact

SEQ ID NO: 342393 - DNA, 50 bp, Artificial
  Synthetic oligonucleotide
caatgtcaacagtgaggatgattatccagaagacagcctacagttcagtc

SEQ ID NO: 342394 - DNA, 60 bp, Artificial
  Synthetic oligonucleotide
caatgtcaacttggtgctgactgccctcctgatgtacgaaataaagtagaaggaaccaca

SEQ ID NO: 342395 - DNA, 60 bp, Artificial
  Synthetic oligonucleotide
caatgtcagaccactgtgaaggatagattgaacggtataacagcttacttgttgtatcaa

SEQ ID NO: 342396 - DNA, 58 bp, Artificial
  Synthetic oligonucleotide
caatgtccaaaagatctaggtcgctaaactcatcagcattctactacagagtgtagat

SEQ ID NO: 342397 - DNA, 60 bp, Artificial
  Synthetic oligonucleotide
caatgtcccggttggtggttcatccggatgtgcagaagaccttcgagattcttctcgagc

SEQ ID NO: 342398 - DNA, 60 bp, Artificial
  Synthetic oligonucleotide
caatgtccgcaatctgaatgtgaggactatttggaaagataccggtggtggcaagtatga

SEQ ID NO: 342399 - DNA, 55 bp, Artificial
  Synthetic oligonucleotide
caatgtcctcccgagttgatgatagcgactgtcgtaatcccacctgagttactcg

SEQ ID NO: 342400 - DNA, 55 bp, Artificial
  Synthetic oligonucleotide
caatgtcggcattaatccagcgttactacgcgattttacgcaggtgaattggttg

SEQ ID NO: 342401 - DNA, 53 bp, Artificial
  Synthetic oligonucleotide
caatgtctcaaaacctctgactgaccctttattctacccgccatttgatccca

SEQ ID NO: 342402 - DNA, 60 bp, Artificial
  Synthetic oligonucleotide
caatgtctcacgatggatcatctatccgcagtgccgcctcacaatttctgtcggttcccc

SEQ ID NO: 342403 - DNA, 57 bp, Artificial
  Synthetic oligonucleotide
caatgtctcatgctcaagaggacacgggtaacatgacatatatcgattgtaactctc

SEQ ID NO: 342404 - DNA, 55 bp, Artificial
  Synthetic oligonucleotide
caatgtctgtggagatgcaaagtttcacaccacctgtcatgatgagatcatagat

SEQ ID NO: 342405 - DNA, 50 bp, Artificial
  Synthetic oligonucleotide
caatgtctgttaaggtaggtatcgattttggaactacgttctcgacgatc

SEQ ID NO: 342406 - DNA, 60 bp, Artificial
  Synthetic oligonucleotide
caatgtgaaataaatgatcatgttagggtagcaatttcccactattcagcacagttgatg

SEQ ID NO: 342407 - DNA, 56 bp, Artificial
  Synthetic oligonucleotide
caatgtgataaattggaccagagactcaatgacagaaatatggtcatataatgctg

SEQ ID NO: 342408 - DNA, 54 bp, Artificial
  Synthetic oligonucleotide
caatgtgcagccagaagacatgatagaaacacgctatgtgttaaattcacaaac

SEQ ID NO: 342409 - DNA, 60 bp, Artificial
  Synthetic oligonucleotide
caatgtggctacgtctggtggtactgcagccaccaatgttggcaatctgatgataaagta

SEQ ID NO: 342410 - DNA, 54 bp, Artificial
  Synthetic oligonucleotide
caatgtggctatcctgccttaatgcccttgtatgcatgtatacaagctaaacgg

SEQ ID NO: 342411 - DNA, 54 bp, Artificial
  Synthetic oligonucleotide
caatgtggctttagataatggccttcccgaaggaacccccaaagatccaatcct

SEQ ID NO: 342412 - DNA, 55 bp, Artificial
  Synthetic oligonucleotide
caatgtgtaccgaacaataacaaggacctaccacaacaccaatgtagaagacctt

SEQ ID NO: 342413 - DNA, 56 bp, Artificial
  Synthetic oligonucleotide
caatgtgtacgtgaaattgtcaaataaacctcagcaatttctatgccctctttgtg

SEQ ID NO: 342414 - DNA, 55 bp, Artificial
  Synthetic oligonucleotide
caatgtgtccaagccgttgaatgaccccaagttttaccctccatcagacccaaaa

SEQ ID NO: 342415 - DNA, 52 bp, Artificial
  Synthetic oligonucleotide
caatgtgttaacggtgtgtcgtcacgtggagcctggccggacgtcagtcggg

SEQ ID NO: 342416 - DNA, 55 bp, Artificial
  Synthetic oligonucleotide
caatgtgttgtcccaggctctcccaacaatctgagatctcgacccaatgtaaggc

SEQ ID NO: 342417 - DNA, 55 bp, Artificial
  Synthetic oligonucleotide
caatgttaacctcatcaagctaaccgttgtcggtttagacttgcaaaaggcttgg

SEQ ID NO: 342418 - DNA, 53 bp, Artificial
  Synthetic oligonucleotide
caatgttaatttcagagggaccccttaaaatggaggagaaggctacctatgtt

SEQ ID NO: 342419 - DNA, 54 bp, Artificial
  Synthetic oligonucleotide
caatgttagtatcccttggacgcataaggtgggaaactttactgggctttattc

SEQ ID NO: 342420 - DNA, 59 bp, Artificial
  Synthetic oligonucleotide
caatgttatccttgctagactaagtaggactactcatttactatattccgggaagatgc

SEQ ID NO: 342421 - DNA, 55 bp, Artificial
  Synthetic oligonucleotide
caatgttcaacctttacgtgcaccaactattgcaaaccaagagaagtattctagc

SEQ ID NO: 342422 - DNA, 60 bp, Artificial
  Synthetic oligonucleotide
caatgttcaatcaaacatgggccacctttgcaatgaacattgcccctgctctagtggtag

SEQ ID NO: 342423 - DNA, 55 bp, Artificial
  Synthetic oligonucleotide
caatgttcctagttttgtcgaagacaaaactatgtttgtggacctctgtaaggat

SEQ ID NO: 342424 - DNA, 57 bp, Artificial
  Synthetic oligonucleotide
caatgttcgaccgaggaactaaaacaaagacagatccagattcatttagttgattgg

SEQ ID NO: 342425 - DNA, 59 bp, Artificial
  Synthetic oligonucleotide
caatgttctttgggtggctaccccacgctggctcatgagtacaaggcttttatcctgta

SEQ ID NO: 342426 - DNA, 60 bp, Artificial
  Synthetic oligonucleotide
caatgttgagcgacatctcaatagagcggtgctagtcatgcaatccatcgctactgtggt

SEQ ID NO: 342427 - DNA, 60 bp, Artificial
  Synthetic oligonucleotide
caatgttggatgcacctcctccaccccgaaaatgtcactctctgattattttagctcagt

SEQ ID NO: 342428 - DNA, 55 bp, Artificial
  Synthetic oligonucleotide
caatgtttgcgtgctatgagtgcaggagtccaagatgttatagtagcgtacagtc

SEQ ID NO: 342429 - DNA, 60 bp, Artificial
  Synthetic oligonucleotide
caatgttttggcttgtcaccagctggccatggttcttcgccagctgtcacgtaaggcttc

SEQ ID NO: 342430 - DNA, 55 bp, Artificial
  Synthetic oligonucleotide
caattaaactcctgggaaatatgcgaaatgtacgaatacatgtttactcggagct

SEQ ID NO: 342431 - DNA, 52 bp, Artificial
  Synthetic oligonucleotide
caattaaacttcagaagctgaaagtcgaagccttcaatgtcgacgaaaaaat

SEQ ID NO: 342432 - DNA, 58 bp, Artificial
  Synthetic oligonucleotide
caattaacttccgtcacatccttatgcatgttaattggaaataccacagtaattccaa

SEQ ID NO: 342433 - DNA, 60 bp, Artificial
  Synthetic oligonucleotide
caattaagatccatatcactcatagcagtcacagttacttcctcattgattcgggttttc

SEQ ID NO: 342434 - DNA, 59 bp, Artificial
  Synthetic oligonucleotide
caattaaggttactcaatctgatgttgcaaatgtcctttcaagagtagtttctgttaga

SEQ ID NO: 342435 - DNA, 57 bp, Artificial
  Synthetic oligonucleotide
caattaagtatttgcaagttgtagaaaatacgtactctccagatacattagggcacg

SEQ ID NO: 342436 - DNA, 55 bp, Artificial
  Synthetic oligonucleotide
caattacaaacgcattactccgtgatactccaatcatactgaagggcgctattcc

SEQ ID NO: 342437 - DNA, 52 bp, Artificial
  Synthetic oligonucleotide
caattacaacctgccactcataaacaagtaaccgcctgcgtttctaggacat

SEQ ID NO: 342438 - DNA, 55 bp, Artificial
  Synthetic oligonucleotide
caattacaagcaattcgtaactcaagccgccataagggtggaaaatccgaggcgg

SEQ ID NO: 342439 - DNA, 60 bp, Artificial
  Synthetic oligonucleotide
caattaccaaacgtgcttgggcacagggagttatgcctcttgagcatgccaccgcaatga

SEQ ID NO: 342440 - DNA, 55 bp, Artificial
  Synthetic oligonucleotide
caattaccctgtccccgtgtattctaccactcgcagtaatagattctcttcggca

SEQ ID NO: 342441 - DNA, 59 bp, Artificial
  Synthetic oligonucleotide
caattaccttgcgagcctgaaccggacgtggccgtgttaacgtccatgctcactgatcc

SEQ ID NO: 342442 - DNA, 59 bp, Artificial
  Synthetic oligonucleotide
caattacgcaacgtcatgttttaaagttgatgatggaggaagtcacacaagaattgtta

SEQ ID NO: 342443 - DNA, 55 bp, Artificial
  Synthetic oligonucleotide
caattacgtacgctatatcttcaagcggaacagttaccccaacggctggatggaa

SEQ ID NO: 342444 - DNA, 60 bp, Artificial
  Synthetic oligonucleotide
caattactatacttattggcctaaatggccgcgcagcttcactgagaacattattacaag

SEQ ID NO: 342445 - DNA, 60 bp, Artificial
  Synthetic oligonucleotide
caattactcatgtgatgtcattggttgtgatgccaatgataccttctgtatagaagatga

SEQ ID NO: 342446 - DNA, 54 bp, Artificial
  Synthetic oligonucleotide
caattactggagacaacaccaaatggaatgagaaccaaaaccctagggtgtttc

SEQ ID NO: 342447 - DNA, 55 bp, Artificial
  Synthetic oligonucleotide
caattacttattataccagtactacatgaaaacttagaacaaggaaaagtgcaat

SEQ ID NO: 342448 - DNA, 60 bp, Artificial
  Synthetic oligonucleotide
caattacttcacaggatgtggctaatgctgtggttggttatggtgtatggccacactatt

SEQ ID NO: 342449 - DNA, 59 bp, Artificial
  Synthetic oligonucleotide
caattacttcgagaaacctagtatcaccatgaaggttgcgtggcgtttcgctccgcaca

SEQ ID NO: 342450 - DNA, 55 bp, Artificial
  Synthetic oligonucleotide
caattacttgtgaaggtaggtaaggggcttagaaacctctcagactactattgag

SEQ ID NO: 342451 - DNA, 55 bp, Artificial
  Synthetic oligonucleotide
caattagaacatatcatctctcagatggcctatatcactggttcaactactggcc

SEQ ID NO: 342452 - DNA, 50 bp, Artificial
  Synthetic oligonucleotide
caattagaagaaacgttagcaggctttagaaggacttatgcgaagtgtga

SEQ ID NO: 342453 - DNA, 60 bp, Artificial
  Synthetic oligonucleotide
caattagaatggaggctgattcagtggctgtggtgtcagagaatcggttcgtgttggaac

SEQ ID NO: 342454 - DNA, 59 bp, Artificial
  Synthetic oligonucleotide
caattagatatctataatctggatctgcatcttcactgtttccatgtttacgacatgtg

SEQ ID NO: 342455 - DNA, 55 bp, Artificial
  Synthetic oligonucleotide
caattagatcggttccaattgggaaagcattagctataccaaatttcgagaacct

SEQ ID NO: 342456 - DNA, 60 bp, Artificial
  Synthetic oligonucleotide
caattagatggaccaaagatcctaggaacactcaggatcacgttcgctcgttatgcttat

SEQ ID NO: 342457 - DNA, 59 bp, Artificial
  Synthetic oligonucleotide
caattagatgttagacaactacgactaatgcgtgccagagtaccagaagtcgttgtaaa

SEQ ID NO: 342458 - DNA, 55 bp, Artificial
  Synthetic oligonucleotide
caattagcaatagtgaacacaataatatatccagcattcgggatgcaacgaatgc

SEQ ID NO: 342459 - DNA, 54 bp, Artificial
  Synthetic oligonucleotide
caattagtagatctacatccataagatcagtaggtagtaacacaacagtgcgaa

SEQ ID NO: 342460 - DNA, 58 bp, Artificial
  Synthetic oligonucleotide
caattagttgatttaactagactattagcttacaactatgaaacgttaatggcatgtg

SEQ ID NO: 342461 - DNA, 58 bp, Artificial
  Synthetic oligonucleotide
caattataacaaggcaaccaagaggcttacagtcctcgggaaggacgcaggtgcacta

SEQ ID NO: 342462 - DNA, 55 bp, Artificial
  Synthetic oligonucleotide
caattataatgccaagccagcccttggcatgttagagagagtcacagaccagacc

SEQ ID NO: 342463 - DNA, 60 bp, Artificial
  Synthetic oligonucleotide
caattataatgtggtcgatcttcatgcatcttcccaacagacgcacccttgtctgctcga

SEQ ID NO: 342464 - DNA, 59 bp, Artificial
  Synthetic oligonucleotide
caattataccaccatcactgaacctccaattccccaggcgatccactattcaagtggga

SEQ ID NO: 342465 - DNA, 54 bp, Artificial
  Synthetic oligonucleotide
caattatacccactcccggctatcgcggtcaaacatactacccgcgtcgaacta

SEQ ID NO: 342466 - DNA, 50 bp, Artificial
  Synthetic oligonucleotide
caattatagccagaaattttgatacaattaggttatcgtttcagttgatg

SEQ ID NO: 342467 - DNA, 60 bp, Artificial
  Synthetic oligonucleotide
caattatagctacggctgatgccaggggtctcatccagtcatcccgagctcatgctatag

SEQ ID NO: 342468 - DNA, 59 bp, Artificial
  Synthetic oligonucleotide
caattatatggttactggtgggcaatatgcgtctaaagaacaggcattagtgaagaaat

SEQ ID NO: 342469 - DNA, 60 bp, Artificial
  Synthetic oligonucleotide
caattatcagacctgctctggtcccagacaccattggtccatcagatattatacctgtgg

SEQ ID NO: 342470 - DNA, 55 bp, Artificial
  Synthetic oligonucleotide
caattatcggacgatttacccgagacgcttgattttacacgtcttggagggccag

SEQ ID NO: 342471 - DNA, 55 bp, Artificial
  Synthetic oligonucleotide
caattatgagggtcggtttgaaagtcattatgtcacgatttgaccccatctcaga

SEQ ID NO: 342472 - DNA, 55 bp, Artificial
  Synthetic oligonucleotide
caattatggattgactaaagccgcgtggccgatgcaatcctttgttaacggtggc

SEQ ID NO: 342473 - DNA, 55 bp, Artificial
  Synthetic oligonucleotide
caattatgttaaccaggttaaagacatgatgattggctccgacaccgtggttgag

SEQ ID NO: 342474 - DNA, 55 bp, Artificial
  Synthetic oligonucleotide
caattattaacttcggaaattatggtaccaaaagaatggccaataaagactgcaa

SEQ ID NO: 342475 - DNA, 55 bp, Artificial
  Synthetic oligonucleotide
caattattgtttacaggtctattactgaaacaaatcaggcattagccgatcgagc

SEQ ID NO: 342476 - DNA, 55 bp, Artificial
  Synthetic oligonucleotide
caattcaaaaaacgttacaacacgaatgataactcaagaggaatgaattacgaaa

SEQ ID NO: 342477 - DNA, 59 bp, Artificial
  Synthetic oligonucleotide
caattcaaaagaggtacactcgacatcttggatgagtacggccaactcccattcgccga

SEQ ID NO: 342478 - DNA, 59 bp, Artificial
  Synthetic oligonucleotide
caattcaaacaatccagactgggacttcaaccccaacaaggatcactggccacaagcca

SEQ ID NO: 342479 - DNA, 57 bp, Artificial
  Synthetic oligonucleotide
caattcaaacaatccagattgggacttcaaccccatcaaggacacctggccagacgc

SEQ ID NO: 342480 - DNA, 60 bp, Artificial
  Synthetic oligonucleotide
caattcaaaccacgcgctgtgacagaagcaatctttgtacactgtagcgcaactaaggcg

SEQ ID NO: 342481 - DNA, 55 bp, Artificial
  Synthetic oligonucleotide
caattcaaccgacactgttgacacagtactcgagaagaatgtgacagtgacacac

SEQ ID NO: 342482 - DNA, 55 bp, Artificial
  Synthetic oligonucleotide
caattcaaggacttagattgtctaacgtgaggtatgaagcaagacctgaaacatc

SEQ ID NO: 342483 - DNA, 52 bp, Artificial
  Synthetic oligonucleotide
caattcaatccggttttctgctggtggggacatttgggtaacaagggaacct

SEQ ID NO: 342484 - DNA, 50 bp, Artificial
  Synthetic oligonucleotide
caattcaattatttacacccctcccccctggaccgtacgtatacgtacgg

SEQ ID NO: 342485 - DNA, 60 bp, Artificial
  Synthetic oligonucleotide
caattcataactccgggaggcattgtgattcttgaatcatgtggcggtgcacgcatttgg

SEQ ID NO: 342486 - DNA, 56 bp, Artificial
  Synthetic oligonucleotide
caattccaaacaaatcatgtcacaactgaagtttcggacgctagtcaaaccttccc

SEQ ID NO: 342487 - DNA, 60 bp, Artificial
  Synthetic oligonucleotide
caattccatgctgtacacaatgtggggacgggtgtattaccagatggatgatggtagctg

SEQ ID NO: 342488 - DNA, 59 bp, Artificial
  Synthetic oligonucleotide
caattcccagaggaatttgcttatgaggcgaattcgtttttagaagcgcagtcgatgaa

SEQ ID NO: 342489 - DNA, 54 bp, Artificial
  Synthetic oligonucleotide
caattccctttggtcaatttcgggttcctttagtctctagaatgcttatcccga

SEQ ID NO: 342490 - DNA, 56 bp, Artificial
  Synthetic oligonucleotide
caattccgaaatctcacacaaccttgcagtagtttacgatcgtttgagtcttttta

SEQ ID NO: 342491 - DNA, 60 bp, Artificial
  Synthetic oligonucleotide
caattccgccattattaatagatatatgactgcagtagcagatgacgaggcgccagtgat

SEQ ID NO: 342492 - DNA, 55 bp, Artificial
  Synthetic oligonucleotide
caattccggagacttgtgttattagacaacgaggcagggcccctagaggaagaac

SEQ ID NO: 342493 - DNA, 60 bp, Artificial
  Synthetic oligonucleotide
caattcctatacattattgtgcccctgctggttttgcgatcctaaagtgtcaggatgagg

SEQ ID NO: 342494 - DNA, 51 bp, Artificial
  Synthetic oligonucleotide
caattcctatcattttgaaggctctatatatgttgtcaacacgtggaagac

SEQ ID NO: 342495 - DNA, 55 bp, Artificial
  Synthetic oligonucleotide
caattcctcccatgaggtctttcaacaacattgtttgactgtagctcaagcccac

SEQ ID NO: 342496 - DNA, 50 bp, Artificial
  Synthetic oligonucleotide
caattcctccctgcttgcaacgcaaatccaggcccagaaggatctcacaa

SEQ ID NO: 342497 - DNA, 60 bp, Artificial
  Synthetic oligonucleotide
caattcctggttgggaaacatcatagtctacgctcccacaatatgggtgcgcatgatatt

SEQ ID NO: 342498 - DNA, 60 bp, Artificial
  Synthetic oligonucleotide
caattccttggaagcacaggcattgttaaacgagcaggaggcggatgctcattatgcagc

SEQ ID NO: 342499 - DNA, 55 bp, Artificial
  Synthetic oligonucleotide
caattccttggagtgccagtccaggagacaggattgctcaattattactcctgcc

SEQ ID NO: 342500 - DNA, 54 bp, Artificial
  Synthetic oligonucleotide
caattcgaacgaccaagcgaaggcagttactcagacacttgtttccaataatga

SEQ ID NO: 342501 - DNA, 60 bp, Artificial
  Synthetic oligonucleotide
caattcgaagaaatttagaaagcacatcaggtggcattgcattacctgaccgaatcttag

SEQ ID NO: 342502 - DNA, 57 bp, Artificial
  Synthetic oligonucleotide
caattcgaattagcaaaagaatttcgcgatctgttaattaacgctcttgcctagatg

SEQ ID NO: 342503 - DNA, 59 bp, Artificial
  Synthetic oligonucleotide
caattcgcacttggacaggggaccacactagacaacaaacattcgaatggtacaataca

SEQ ID NO: 342504 - DNA, 56 bp, Artificial
  Synthetic oligonucleotide
caattcgctcctcgatacagacctacccatggtccattccgaaggaacttctaccc

SEQ ID NO: 342505 - DNA, 57 bp, Artificial
  Synthetic oligonucleotide
caattcggaacctacttcaatcccaattacgagacctatgcagctgcggactacggt

SEQ ID NO: 342506 - DNA, 59 bp, Artificial
  Synthetic oligonucleotide
caattcggctttctgcaggtggggccatttgggttacgagagaaccttatgtgtcatgc

SEQ ID NO: 342507 - DNA, 57 bp, Artificial
  Synthetic oligonucleotide
caattcgttagggagtgtttattagacatggatcggagtgatctgatcaagggaacc

SEQ ID NO: 342508 - DNA, 60 bp, Artificial
  Synthetic oligonucleotide
caattctaagcctgctgatgatagtccaactgagcctgaagcacctgttacacatttccc

SEQ ID NO: 342509 - DNA, 57 bp, Artificial
  Synthetic oligonucleotide
caattctacatgacgaatgcagggctgacaggacgatctatggacactgtgtcatac

SEQ ID NO: 342510 - DNA, 55 bp, Artificial
  Synthetic oligonucleotide
caattctaccaaccagagcgcgagaaggtacacaccatggacggggaataccgac

SEQ ID NO: 342511 - DNA, 58 bp, Artificial
  Synthetic oligonucleotide
caattctatgcattacacgtgtctcaattcagagtcagaatttgatagggcaatatgt

SEQ ID NO: 342512 - DNA, 50 bp, Artificial
  Synthetic oligonucleotide
caattctcaaggggatctacaacctagcgacatgtggactgctaggtctg

SEQ ID NO: 342513 - DNA, 55 bp, Artificial
  Synthetic oligonucleotide
caattctcagagggagtcaatatgacttgtattagaccaggaaacaatacagtgg

SEQ ID NO: 342514 - DNA, 55 bp, Artificial
  Synthetic oligonucleotide
caattctgacaacaacaaacagcttgatgatgttaacaatcagctcttgcagctc

SEQ ID NO: 342515 - DNA, 58 bp, Artificial
  Synthetic oligonucleotide
caattctttccctaacaatctagacaagtttggacttgaccagatgccggcacgcaac

SEQ ID NO: 342516 - DNA, 60 bp, Artificial
  Synthetic oligonucleotide
caattgaactaaataaggtcttaacatcaaaaagtcaagtcatctccaattcaatcatga

SEQ ID NO: 342517 - DNA, 54 bp, Artificial
  Synthetic oligonucleotide
caattgaagaaccgtgctctggatacggagcgtgacttcaactacgcgagactc

SEQ ID NO: 342518 - DNA, 60 bp, Artificial
  Synthetic oligonucleotide
caattgaagacgcattcgatctgctagacgtcagcaatgacgatcaatgggcaaggtcgt

SEQ ID NO: 342519 - DNA, 56 bp, Artificial
  Synthetic oligonucleotide
caattgaagagcgtcggacttacttccagaatttagggcctgcgcataaacttcgt

SEQ ID NO: 342520 - DNA, 55 bp, Artificial
  Synthetic oligonucleotide
caattgaagctaacaagctacttgggatctatcattctcatacagagtcaaaaaa

SEQ ID NO: 342521 - DNA, 60 bp, Artificial
  Synthetic oligonucleotide
caattgaaggcggttatatcgctggatctgtgcagcgtgcctgataaggtgccagcttta

SEQ ID NO: 342522 - DNA, 60 bp, Artificial
  Synthetic oligonucleotide
caattgaatatgggttcctcgcagtccaagaagcgatcagaagcttgggttcgctactcg

SEQ ID NO: 342523 - DNA, 57 bp, Artificial
  Synthetic oligonucleotide
caattgacaagccttcccgcccagacacatcttccaatagattttatactttaaaga

SEQ ID NO: 342524 - DNA, 52 bp, Artificial
  Synthetic oligonucleotide
caattgaccttgatacggacttttcgaaaacccaggtccaaagttcgaacta

SEQ ID NO: 342525 - DNA, 60 bp, Artificial
  Synthetic oligonucleotide
caattgacgaatatacacgatgtgttgccagcccaaccagatagtgggttttcagcccac

SEQ ID NO: 342526 - DNA, 51 bp, Artificial
  Synthetic oligonucleotide
caattgacgtatcacagaatggtcatgacgagagttgtattaatgttgacc

SEQ ID NO: 342527 - DNA, 60 bp, Artificial
  Synthetic oligonucleotide
caattgagagattgttaccatatagctattggattggccatccagtgacaaacagagcaa

SEQ ID NO: 342528 - DNA, 57 bp, Artificial
  Synthetic oligonucleotide
caattgagatccgtcattgataccacagtttattgtaggtttaccggtatagtctcg

SEQ ID NO: 342529 - DNA, 60 bp, Artificial
  Synthetic oligonucleotide
caattgagcacattgcaagtatgaggaggaactacttcacagcagaagtgtcccattgca

SEQ ID NO: 342530 - DNA, 59 bp, Artificial
  Synthetic oligonucleotide
caattgagccatgtgccccggatctaccaccttctactgatactaatacgcctacagcc

SEQ ID NO: 342531 - DNA, 51 bp, Artificial
  Synthetic oligonucleotide
caattgagccttatcgaaaggctaatcgtgcacccttatcattaatgctct

SEQ ID NO: 342532 - DNA, 56 bp, Artificial
  Synthetic oligonucleotide
caattgagcgtagagaagttaacagaacagaactttataggttagcaactttagga

SEQ ID NO: 342533 - DNA, 60 bp, Artificial
  Synthetic oligonucleotide
caattgatagtgagtgggagagacgagcagtcaatcgccgaagcgatcatagtggcaatg

SEQ ID NO: 342534 - DNA, 55 bp, Artificial
  Synthetic oligonucleotide
caattgatatgaggacaaaatctgtcagtccacaaaagtatgaccctaccaagcc

SEQ ID NO: 342535 - DNA, 60 bp, Artificial
  Synthetic oligonucleotide
caattgatggaccactacctgaggacaatgagccaagtggctatgcacagacagattgtg

SEQ ID NO: 342536 - DNA, 60 bp, Artificial
  Synthetic oligonucleotide
caattgatggaccattgcctgaggataatgaaccgagcgggtatgcacaaacagactgtg

SEQ ID NO: 342537 - DNA, 60 bp, Artificial
  Synthetic oligonucleotide
caattgcaaacacgcagatattatctatttatggcagtcctcagaagcggactggtatgt

SEQ ID NO: 342538 - DNA, 60 bp, Artificial
  Synthetic oligonucleotide
caattgcaaacccagcaatagacctggcagatgaggctggacattccccactggcgacag

SEQ ID NO: 342539 - DNA, 60 bp, Artificial
  Synthetic oligonucleotide
caattgcaacacccggtatgcagatcagagggttcgtgtactttgtcgaaacactagcga

SEQ ID NO: 342540 - DNA, 60 bp, Artificial
  Synthetic oligonucleotide
caattgcaaccatgagccagaactcttctgccgccgaacttgcgaggatcaacaatcttg

SEQ ID NO: 342541 - DNA, 55 bp, Artificial
  Synthetic oligonucleotide
caattgcacaaactatatgcctgttgacagttgagactgaatgtgggcgaacttc

SEQ ID NO: 342542 - DNA, 55 bp, Artificial
  Synthetic oligonucleotide
caattgcacacctaaccataccgctctcaggcaagctatcttgtgctggggtgag

SEQ ID NO: 342543 - DNA, 50 bp, Artificial
  Synthetic oligonucleotide
caattgcactgcattggacaatggttgggtgtggaatgtgcccttgcaaa

SEQ ID NO: 342544 - DNA, 55 bp, Artificial
  Synthetic oligonucleotide
caattgcagtgagaacagtggaacttctgggacgcagcagtctcaggggtctaca

SEQ ID NO: 342545 - DNA, 60 bp, Artificial
  Synthetic oligonucleotide
caattgcatgtggtctattccctgcacaagtcaaggcaaggagcattatcagtcctgtca

SEQ ID NO: 342546 - DNA, 60 bp, Artificial
  Synthetic oligonucleotide
caattgcgcttgaatacgctcctcgaaagggccccagatgatcgcactattttctgggtg

SEQ ID NO: 342547 - DNA, 57 bp, Artificial
  Synthetic oligonucleotide
caattgcggcttttatgcagcaaaccgtcatgctgtacggaactatggctagatact

SEQ ID NO: 342548 - DNA, 55 bp, Artificial
  Synthetic oligonucleotide
caattgcgtaggctttgctgcgtctctgaccaattttgtttcgggcttgtcgact

SEQ ID NO: 342549 - DNA, 55 bp, Artificial
  Synthetic oligonucleotide
caattgctaaaacgaaagtatatcagtcctacagctgttttgcagcttagtcctc

SEQ ID NO: 342550 - DNA, 53 bp, Artificial
  Synthetic oligonucleotide
caattgctacccatatgacgtccctgactatgcatcgctccggtctattgtgg

SEQ ID NO: 342551 - DNA, 60 bp, Artificial
  Synthetic oligonucleotide
caattgctcacagatgagacagtggtccatttgtatggatgtgtggggccgaggcctccc

SEQ ID NO: 342552 - DNA, 60 bp, Artificial
  Synthetic oligonucleotide
caattgctggggcaacacgcctgatggaattgccatattttccacttgtggtcagctatt

SEQ ID NO: 342553 - DNA, 53 bp, Artificial
  Synthetic oligonucleotide
caattggaacaaaggtttgaatcactaaagtccagggtaaatgaaaaatataa

SEQ ID NO: 342554 - DNA, 60 bp, Artificial
  Synthetic oligonucleotide
caattggaagggagcaaatagaccagtaatcactatagaccccgagatgatgacccatac

SEQ ID NO: 342555 - DNA, 60 bp, Artificial
  Synthetic oligonucleotide
caattggagacacctcggtggatgtctctacggaattggagacaatatatagtgtctcca

SEQ ID NO: 342556 - DNA, 53 bp, Artificial
  Synthetic oligonucleotide
caattggagactcttaaattacctttcctaaaatacccctatttctgtgtctg

SEQ ID NO: 342557 - DNA, 59 bp, Artificial
  Synthetic oligonucleotide
caattggagtctcctcataccactctaaaccctgcaatcctgcccagccagtttgttcg

SEQ ID NO: 342558 - DNA, 55 bp, Artificial
  Synthetic oligonucleotide
caattggcatgggtagagatgagaaattgtcatacgtagtcgacagctgcttcat

SEQ ID NO: 342559 - DNA, 55 bp, Artificial
  Synthetic oligonucleotide
caattggccgcccaacaatttggatacaattcttccctgcttgcaacgcaaattc

SEQ ID NO: 342560 - DNA, 60 bp, Artificial
  Synthetic oligonucleotide
caattggctctgtctctctgaccattgcaacagtatgtttcctcatgcagattgccatct

SEQ ID NO: 342561 - DNA, 60 bp, Artificial
  Synthetic oligonucleotide
caattggcttcctggtgcacattttggttccattttgctgacttctgatgcgcatgacaa

SEQ ID NO: 342562 - DNA, 60 bp, Artificial
  Synthetic oligonucleotide
caattggctttgctcctacagaagtggcaagatatcatctgccagaagctaggcagaaga

SEQ ID NO: 342563 - DNA, 51 bp, Artificial
  Synthetic oligonucleotide
caattgggcctttaatggtgggccgaattttatggacctcgtattttgggc

SEQ ID NO: 342564 - DNA, 54 bp, Artificial
  Synthetic oligonucleotide
caattggggacgcataaattgcctttcctaaaataccctcgcttttgtgtctaa

SEQ ID NO: 342565 - DNA, 56 bp, Artificial
  Synthetic oligonucleotide
caattggggactggggtcttatatatactagaaccctctatagaactttcaatctc

SEQ ID NO: 342566 - DNA, 55 bp, Artificial
  Synthetic oligonucleotide
caattggggcatgcggaagacaatcaagatagtgtagcgtcgctaccgtacaagt

SEQ ID NO: 342567 - DNA, 57 bp, Artificial
  Synthetic oligonucleotide
caattgggtgctatgggtgctcttaatacccaccaaggggccatccgcaataattat

SEQ ID NO: 342568 - DNA, 56 bp, Artificial
  Synthetic oligonucleotide
caattgggtgctttgggtgctcttaaataccaccaaggggccatccgcattaatat

SEQ ID NO: 342569 - DNA, 56 bp, Artificial
  Synthetic oligonucleotide
caattgggttgtactctagtgttcccaattagttcaattgaaactgtcccagtcaa

SEQ ID NO: 342570 - DNA, 57 bp, Artificial
  Synthetic oligonucleotide
caattggtggggaaatatcctctagtattcttgcaaattccaatttagtaaatcgca

SEQ ID NO: 342571 - DNA, 55 bp, Artificial
  Synthetic oligonucleotide
caattggttaacgcgctatctccgaggaccgagtcagccgagagactacaaaggg

SEQ ID NO: 342572 - DNA, 55 bp, Artificial
  Synthetic oligonucleotide
caattgtaccagaccctccaacaaaacaagaacaagagtaactatgggaccagga

SEQ ID NO: 342573 - DNA, 59 bp, Artificial
  Synthetic oligonucleotide
caattgtaccagaccctccaacaatacaagaagacgtatgactatgggaccaggacatg

SEQ ID NO: 342574 - DNA, 51 bp, Artificial
  Synthetic oligonucleotide
caattgtactagttaccctgatgcattcattaagaagaagtttggttataa

SEQ ID NO: 342575 - DNA, 50 bp, Artificial
  Synthetic oligonucleotide
caattgtactgttagtaaagggtgtaaccgaaaacggtccgaccgaaagc

SEQ ID NO: 342576 - DNA, 55 bp, Artificial
  Synthetic oligonucleotide
caattgtagaatgggttgccttgtataaagggaataagccacaggattggacgcc

SEQ ID NO: 342577 - DNA, 60 bp, Artificial
  Synthetic oligonucleotide
caattgtatcgtggttctctcgacattaccatgacattcgcaggaaagactaatgtagac

SEQ ID NO: 342578 - DNA, 60 bp, Artificial
  Synthetic oligonucleotide
caattgtatctaaaggtatagcagtaacagagaaagcgaaattgaactcgtatgcaccag

SEQ ID NO: 342579 - DNA, 58 bp, Artificial
  Synthetic oligonucleotide
caattgtcaatgctcaacccaaatgcaaccctaatttacattactggactactcagga

SEQ ID NO: 342580 - DNA, 56 bp, Artificial
  Synthetic oligonucleotide
caattgtcacgattattaaccgaaaagcattacaaggtgacaaaggtcgatgggag

SEQ ID NO: 342581 - DNA, 55 bp, Artificial
  Synthetic oligonucleotide
caattgtcagaagttcggttgctgcatctaggcaagaaaaggagactttgcagcg

SEQ ID NO: 342582 - DNA, 56 bp, Artificial
  Synthetic oligonucleotide
caattgtccaatttggtaattgtaagttatacaattgcgtatcgaccgttcagcgg

SEQ ID NO: 342583 - DNA, 55 bp, Artificial
  Synthetic oligonucleotide
caattgtccttcaagtactacagatgttactcactacggtggttacgaccgattt

SEQ ID NO: 342584 - DNA, 50 bp, Artificial
  Synthetic oligonucleotide
caattgtcgccatccgtaaaatatgactctagatcatcaaccaccctcca

SEQ ID NO: 342585 - DNA, 55 bp, Artificial
  Synthetic oligonucleotide
caattgtctgatcatcaacctcagttatcctcaacatttgcctaaggcaatcatc

SEQ ID NO: 342586 - DNA, 58 bp, Artificial
  Synthetic oligonucleotide
caattgttaaagaagctcagctagcacgatttaggcgtcgagagataactcgcgggga

SEQ ID NO: 342587 - DNA, 55 bp, Artificial
  Synthetic oligonucleotide
caattgttccatgtgttgctgtgcagagtggtgatattggtcatgtggtcatgca

SEQ ID NO: 342588 - DNA, 56 bp, Artificial
  Synthetic oligonucleotide
caattgttcccggttctatgaatctatttacatgatttccgctagcatactttctc

SEQ ID NO: 342589 - DNA, 57 bp, Artificial
  Synthetic oligonucleotide
caattgttccgaagattccccaagatcacaccgatctcgtacaagtcgtttgacgaa

SEQ ID NO: 342590 - DNA, 55 bp, Artificial
  Synthetic oligonucleotide
caattgttctttgcgtacctacggttactcatgtggcaattcccatagctatgtc

SEQ ID NO: 342591 - DNA, 55 bp, Artificial
  Synthetic oligonucleotide
caattgttggacctgccaatgcaaaagttccacatagtgctagctctgacacgtt

SEQ ID NO: 342592 - DNA, 59 bp, Artificial
  Synthetic oligonucleotide
caattgtttaacagtacttggatgtctaatagtacttggaatgctactacagagacaaa

SEQ ID NO: 342593 - DNA, 59 bp, Artificial
  Synthetic oligonucleotide
caattgtttaatagtacttggaatactgggaatgatactagagagtcaaatgacacaaa

SEQ ID NO: 342594 - DNA, 59 bp, Artificial
  Synthetic oligonucleotide
caattgtttacttggaatagtacttggaataatactagagagtcagataacaatacaga

SEQ ID NO: 342595 - DNA, 56 bp, Artificial
  Synthetic oligonucleotide
caattgtttagtagtagttggcttgccaatggtacctgtagtagtacttggaacac

SEQ ID NO: 342596 - DNA, 55 bp, Artificial
  Synthetic oligonucleotide
caatttaaaaaacgttacaacacaaatgacaattcaagaggtatgaattacgaga

SEQ ID NO: 342597 - DNA, 55 bp, Artificial
  Synthetic oligonucleotide
caatttaaacaatacagttaatcctttcccttcctgcactgcttttgcctatact

SEQ ID NO: 342598 - DNA, 55 bp, Artificial
  Synthetic oligonucleotide
caatttaaagcttcctaagcatccaccgtgacattattgtacaaccacagcaagg

SEQ ID NO: 342599 - DNA, 55 bp, Artificial
  Synthetic oligonucleotide
caatttaaatttacgtacgtgtgagcgatgtttcctcgaaaacgatacaacattc

SEQ ID NO: 342600 - DNA, 60 bp, Artificial
  Synthetic oligonucleotide
caatttaaggaatctgcaggaggggacccagaaattgcaatgcacagtttcaattgtgga

SEQ ID NO: 342601 - DNA, 54 bp, Artificial
  Synthetic oligonucleotide
caatttacctattagaaattggacatttgactttggtctactaggtactacgct

SEQ ID NO: 342602 - DNA, 55 bp, Artificial
  Synthetic oligonucleotide
caatttactatggctgccaatatttcagatgaaaacttcggaaactctagcggtg

SEQ ID NO: 342603 - DNA, 58 bp, Artificial
  Synthetic oligonucleotide
caatttactgatgagatacatgtttaaatttcagtggggcggacacgggacagaacaa

SEQ ID NO: 342604 - DNA, 53 bp, Artificial
  Synthetic oligonucleotide
caatttagatatcgcatacaaatacttatccacaggaaaggctaaagtgtgtt

SEQ ID NO: 342605 - DNA, 60 bp, Artificial
  Synthetic oligonucleotide
caatttatagagtatagattgtcatcatgggtgcacaggtatctagacagaatgttggga

SEQ ID NO: 342606 - DNA, 59 bp, Artificial
  Synthetic oligonucleotide
caatttatctagctttgcaggattcgggattggaagtaaacatagtaacagactcacaa

SEQ ID NO: 342607 - DNA, 57 bp, Artificial
  Synthetic oligonucleotide
caatttatgttaattgggctgaagtataaattctgaagaagcccatgaaattggccc

SEQ ID NO: 342608 - DNA, 55 bp, Artificial
  Synthetic oligonucleotide
caatttattgacatgtaatacgagcacccgcacggtagatcaattcgtcttcgcc

SEQ ID NO: 342609 - DNA, 55 bp, Artificial
  Synthetic oligonucleotide
caatttcaaatgccacccgcaattgttcgatgctcaacgtttcctgatcgttgct

SEQ ID NO: 342610 - DNA, 55 bp, Artificial
  Synthetic oligonucleotide
caatttcaaattcagggcgccaatcggtacgtatagtttggttcgcaggcgtagc

SEQ ID NO: 342611 - DNA, 57 bp, Artificial
  Synthetic oligonucleotide
caatttccctatgctatccgttaaacaggttggtttgatcaatgtgcaaattactaa

SEQ ID NO: 342612 - DNA, 56 bp, Artificial
  Synthetic oligonucleotide
caatttccctcctcctcgcgttgaaggttttgtgtctgatttttcaccgagattca

SEQ ID NO: 342613 - DNA, 58 bp, Artificial
  Synthetic oligonucleotide
caatttccgatctactagcccacgattcgtttggaccaatcgcaagatgtgggacgcg

SEQ ID NO: 342614 - DNA, 52 bp, Artificial
  Synthetic oligonucleotide
caatttcctgttgtctttgggcatacatttgaaccctaacaaaaccaaacgt

SEQ ID NO: 342615 - DNA, 58 bp, Artificial
  Synthetic oligonucleotide
caatttcgaattggacgagcgtgtcaaatgatgtatcaaatgtaactaattcgttaaa

SEQ ID NO: 342616 - DNA, 58 bp, Artificial
  Synthetic oligonucleotide
caatttcgaattggactaacgtttcaaatgatgtatcgaatgtgactaattcgttgaa

SEQ ID NO: 342617 - DNA, 60 bp, Artificial
  Synthetic oligonucleotide
caatttcgacatccaacttgcactagcagttatagtagtcgttgtgatgttatcggcaaa

SEQ ID NO: 342618 - DNA, 52 bp, Artificial
  Synthetic oligonucleotide
caatttcgccaaattaaagaaagccgttagggagaaattttctgagaacaag

SEQ ID NO: 342619 - DNA, 57 bp, Artificial
  Synthetic oligonucleotide
caatttctcccggatgggccacctccgaggtgtagaagaccttgctggcttcactcg

SEQ ID NO: 342620 - DNA, 60 bp, Artificial
  Synthetic oligonucleotide
caatttgaagagtgatgtatcgtcgaacggtttagctattacagatctgcaggatcgtgt

SEQ ID NO: 342621 - DNA, 60 bp, Artificial
  Synthetic oligonucleotide
caatttgacacacgcttcattatgaactacatcctgtaccatgctactaaccgcgccccc

SEQ ID NO: 342622 - DNA, 56 bp, Artificial
  Synthetic oligonucleotide
caatttgacgtaacgcccccacttaacatcccgggagaggtgcgcaacctcatgga

SEQ ID NO: 342623 - DNA, 53 bp, Artificial
  Synthetic oligonucleotide
caatttgagcagctccaggcagccatacatacagaccttggggccttagaaaa

SEQ ID NO: 342624 - DNA, 55 bp, Artificial
  Synthetic oligonucleotide
caatttgatgatgggcttgtacgcacgtgcagaacgcgattcatggcaaatagcg

SEQ ID NO: 342625 - DNA, 60 bp, Artificial
  Synthetic oligonucleotide
caatttgcaaatcacactggcatttcgagaagatcgcatcaaattagattctcagaatcc

SEQ ID NO: 342626 - DNA, 55 bp, Artificial
  Synthetic oligonucleotide
caatttgcaactgattggttgggcgatttcgatcggccagtggaagcattatcct

SEQ ID NO: 342627 - DNA, 55 bp, Artificial
  Synthetic oligonucleotide
caatttgccgtaaggcatcctaatgccagcggattcacacctggtaacaggtgcc

SEQ ID NO: 342628 - DNA, 59 bp, Artificial
  Synthetic oligonucleotide
caatttggaccggagttcgttatggggcataataatgccatttcgagcttcatcacgta

SEQ ID NO: 342629 - DNA, 60 bp, Artificial
  Synthetic oligonucleotide
caatttggccatgattcgcccccatgtgatgaggtggcgcttcaagaatatcgtacagta

SEQ ID NO: 342630 - DNA, 59 bp, Artificial
  Synthetic oligonucleotide
caatttggggcttgcgcttattggctaccggcctagctatggtctccttagtgttctgc

SEQ ID NO: 342631 - DNA, 55 bp, Artificial
  Synthetic oligonucleotide
caatttggtgatcccggagatataatgagtacacccacagggatgaagtgtccag

SEQ ID NO: 342632 - DNA, 57 bp, Artificial
  Synthetic oligonucleotide
caatttggttcgcgtttaagttacgtttcttaccaacagatcggcctgctctgatga

SEQ ID NO: 342633 - DNA, 59 bp, Artificial
  Synthetic oligonucleotide
caatttgtatagagccatgtgaagttcgtactagggacgatcgctatgttgaaattttc

SEQ ID NO: 342634 - DNA, 58 bp, Artificial
  Synthetic oligonucleotide
caatttgtatcagaggaaacctattatatatatggttggttcagctccttcatattgg

SEQ ID NO: 342635 - DNA, 55 bp, Artificial
  Synthetic oligonucleotide
caatttgttgatgctaaagcgggtcaaactcttgcctgttttcagcacctgattt

SEQ ID NO: 342636 - DNA, 54 bp, Artificial
  Synthetic oligonucleotide
caattttaccctaatggtgatccctttcgccaaattggaacactcccctcaggc

SEQ ID NO: 342637 - DNA, 55 bp, Artificial
  Synthetic oligonucleotide
caattttagaaggtctataacaactatttcgacatttacaagttcgaagtcttgc

SEQ ID NO: 342638 - DNA, 53 bp, Artificial
  Synthetic oligonucleotide
caattttatggttctgaggaaactgttcggttgacggggggacccattgtata

SEQ ID NO: 342639 - DNA, 58 bp, Artificial
  Synthetic oligonucleotide
caattttctacgagctttagtcaaatcaaattctaacattggacattgttcgtcgcag

SEQ ID NO: 342640 - DNA, 52 bp, Artificial
  Synthetic oligonucleotide
caattttcttctgtctttgggtatacatttgaaccctcataaaaccaaacgt

SEQ ID NO: 342641 - DNA, 53 bp, Artificial
  Synthetic oligonucleotide
caattttgataaggttgtttatccgtacaagacattggccaactttactgggt

SEQ ID NO: 342642 - DNA, 55 bp, Artificial
  Synthetic oligonucleotide
caattttgctcataaccctgttgttccgagctgtattatatctaaggttgggaaa

SEQ ID NO: 342643 - DNA, 57 bp, Artificial
  Synthetic oligonucleotide
caattttggatttaaatcaagaccatttcgatcttacccagcaggataagattccca

SEQ ID NO: 342644 - DNA, 53 bp, Artificial
  Synthetic oligonucleotide
caattttggttacaacctcttggtgactgtaaaatagcactgttagatgatgt

SEQ ID NO: 342645 - DNA, 57 bp, Artificial
  Synthetic oligonucleotide
cacaaaaaatagcagtcaggtcagccaaaattaccctatagtacagaacatccaggg

SEQ ID NO: 342646 - DNA, 52 bp, Artificial
  Synthetic oligonucleotide
cacaaaaacctatcagtactgacaacaacccggacctaaaagttgacggagt

SEQ ID NO: 342647 - DNA, 55 bp, Artificial
  Synthetic oligonucleotide
cacaaaacaaaaagatggggctactcccttaacttcatgggatatgtaattggaa

SEQ ID NO: 342648 - DNA, 60 bp, Artificial
  Synthetic oligonucleotide
cacaaaaccacaagccctgggtgctgtagaaataggagcaaccgctgatgtgggcccaga

SEQ ID NO: 342649 - DNA, 60 bp, Artificial
  Synthetic oligonucleotide
cacaaaaccttgccctctttgattcacagagccttcgctagcattactggccgctacatc

SEQ ID NO: 342650 - DNA, 60 bp, Artificial
  Synthetic oligonucleotide
cacaaaaggattccatctacgcatcagctctagtggaagcaaccaaattttgtgcaccca

SEQ ID NO: 342651 - DNA, 54 bp, Artificial
  Synthetic oligonucleotide
cacaaaaggccttgaccaacttaaacagaatcaaaataaactctggggcaaata

SEQ ID NO: 342652 - DNA, 60 bp, Artificial
  Synthetic oligonucleotide
cacaaaagggtgatctggaatagccagattaatgaaattttcaaggctgtctgcaactcc

SEQ ID NO: 342653 - DNA, 60 bp, Artificial
  Synthetic oligonucleotide
cacaaaatcctgtagagaaatatgtggacaccattctgaatgaggtgctagttgtcccaa

SEQ ID NO: 342654 - DNA, 55 bp, Artificial
  Synthetic oligonucleotide
cacaaaattatggtattaatcttccaatcacaggctccatggacattgcatacgc

SEQ ID NO: 342655 - DNA, 57 bp, Artificial
  Synthetic oligonucleotide
cacaaacaacaaacacgtacagaaatacagactcagcagaacatcttatagtctggg

SEQ ID NO: 342656 - DNA, 55 bp, Artificial
  Synthetic oligonucleotide
cacaaacacatggcccgcgagatacatccggatattatccagggactgctgacac

SEQ ID NO: 342657 - DNA, 55 bp, Artificial
  Synthetic oligonucleotide
cacaaacagactgtgtcctggaagcgatggctttccttgaaaagtcccacccggg

SEQ ID NO: 342658 - DNA, 52 bp, Artificial
  Synthetic oligonucleotide
cacaaacagtggatcctcttcgcttcttcaaaaactaccttttacctaaaaa

SEQ ID NO: 342659 - DNA, 55 bp, Artificial
  Synthetic oligonucleotide
cacaaacagtgtgctattctggttgactcgtgacaggcgaccttatggtacgcca

SEQ ID NO: 342660 - DNA, 56 bp, Artificial
  Synthetic oligonucleotide
cacaaacatctacgataagtagacggttaagattgaaagaaatcacaactcagacg

SEQ ID NO: 342661 - DNA, 55 bp, Artificial
  Synthetic oligonucleotide
cacaaaccaacaggtggatcagccatagagatggcaatagatgaagagccagaac

SEQ ID NO: 342662 - DNA, 60 bp, Artificial
  Synthetic oligonucleotide
cacaaaccacaattatcattcccgctctgtgctaatggtaatgtgtttggtctgtacaag

SEQ ID NO: 342663 - DNA, 55 bp, Artificial
  Synthetic oligonucleotide
cacaaaccagttcctgaccacagacgacggagttgcagcacccatactaccaggg

SEQ ID NO: 342664 - DNA, 52 bp, Artificial
  Synthetic oligonucleotide
cacaaaccccgagtgccgtcagccatagtgacgtgaaacaaatcatcgtggt

SEQ ID NO: 342665 - DNA, 56 bp, Artificial
  Synthetic oligonucleotide
cacaaaccctcccggaactatgtccgagccctctgagactagttgacggccagact

SEQ ID NO: 342666 - DNA, 55 bp, Artificial
  Synthetic oligonucleotide
cacaaacctggacatcggagctagtccagaaggaccttaggttggcagattccac

SEQ ID NO: 342667 - DNA, 55 bp, Artificial
  Synthetic oligonucleotide
cacaaacctttcccagtcgacggtctctagggctgcatccaggactagtgagtgg

SEQ ID NO: 342668 - DNA, 60 bp, Artificial
  Synthetic oligonucleotide
cacaaacgcgcaatggggacgaggtaatactggagcgacgagtgccgcgattgcagccct

SEQ ID NO: 342669 - DNA, 56 bp, Artificial
  Synthetic oligonucleotide
cacaaacgtagaatcacaatataattcactactttcagctatagagacgaacaccc

SEQ ID NO: 342670 - DNA, 53 bp, Artificial
  Synthetic oligonucleotide
cacaaactaaacgctaaaaactacatgacccaaaggaacatcactacatagct

SEQ ID NO: 342671 - DNA, 60 bp, Artificial
  Synthetic oligonucleotide
cacaaacttcaatagtatcatcataagttgggagtttggctgattcacaagaagggatag

SEQ ID NO: 342672 - DNA, 55 bp, Artificial
  Synthetic oligonucleotide
cacaaagaagggtttgggaatctcctatggcaggaagaagcgacgaagacctgca

SEQ ID NO: 342673 - DNA, 55 bp, Artificial
  Synthetic oligonucleotide
cacaaagacatgcaattggtgcacaattcacaacacaccgataaacaggtggaga

SEQ ID NO: 342674 - DNA, 55 bp, Artificial
  Synthetic oligonucleotide
cacaaagagcaagtgcatactaagagacttcccactgtgggccatggcctatggc

SEQ ID NO: 342675 - DNA, 55 bp, Artificial
  Synthetic oligonucleotide
cacaaagagcagttataccaacagctgatggcttgaatacatggctgtttaaccc

SEQ ID NO: 342676 - DNA, 51 bp, Artificial
  Synthetic oligonucleotide
cacaaagaggcgttcccgtacaggggggtacgtcacgcgtacaggggggta

SEQ ID NO: 342677 - DNA, 52 bp, Artificial
  Synthetic oligonucleotide
cacaaagagttcaggaagccctgaatttgggtgctcgtcagtttgatactgg

SEQ ID NO: 342678 - DNA, 55 bp, Artificial
  Synthetic oligonucleotide
cacaaagatgatgacaagattagttgaagactttactgaggcagtggctaactca

SEQ ID NO: 342679 - DNA, 58 bp, Artificial
  Synthetic oligonucleotide
cacaaagcaatcgtatcgccagatacacataagtctttgaccttggttcgttatgtct

SEQ ID NO: 342680 - DNA, 60 bp, Artificial
  Synthetic oligonucleotide
cacaaagccagtgcctctcacatacctcatggtgatgcacatagtcatatccttggccaa

SEQ ID NO: 342681 - DNA, 60 bp, Artificial
  Synthetic oligonucleotide
cacaaagcctgttgagctcatcctcgacgggaagacagtagccatctgttgcgctactgg

SEQ ID NO: 342682 - DNA, 55 bp, Artificial
  Synthetic oligonucleotide
cacaaagcgttgcttctgaagtgtcagacaggaggtcctatagctcaagcaggag

SEQ ID NO: 342683 - DNA, 60 bp, Artificial
  Synthetic oligonucleotide
cacaaagctaaccatcaaagccggcacgcaggagactagcagcactgcgatattcagcgg

SEQ ID NO: 342684 - DNA, 60 bp, Artificial
  Synthetic oligonucleotide
cacaaagctctacaatgcttcccactctgatgttcgcgactctctcgcccgttttatccc

SEQ ID NO: 342685 - DNA, 59 bp, Artificial
  Synthetic oligonucleotide
cacaaaggatagtgatggaatatgcaatctgcagtcagataggaaagcagattgttata

SEQ ID NO: 342686 - DNA, 53 bp, Artificial
  Synthetic oligonucleotide
cacaaaggatattgacttcgaaaaccttggggagaacccgtgcaaggtaggac

SEQ ID NO: 342687 - DNA, 54 bp, Artificial
  Synthetic oligonucleotide
cacaaaggggatgttacggggaggtactggggaggagctggctggaacgcccac

SEQ ID NO: 342688 - DNA, 60 bp, Artificial
  Synthetic oligonucleotide
cacaaagtagtggtggggatagtagtgacaatgcagaaaatgtagatccgcattgcagta

SEQ ID NO: 342689 - DNA, 57 bp, Artificial
  Synthetic oligonucleotide
cacaaagtatacgaagacactatagacaatgcagagtgtttttcggatttagatcta

SEQ ID NO: 342690 - DNA, 60 bp, Artificial
  Synthetic oligonucleotide
cacaaagtgctcaagcactggtctggttgcagctgcgccacatttagatcgtgtgacagg

SEQ ID NO: 342691 - DNA, 60 bp, Artificial
  Synthetic oligonucleotide
cacaaagtgggtgcgcgatgtggtcactgaacaattaaaggagtggccaacaatgattca

SEQ ID NO: 342692 - DNA, 60 bp, Artificial
  Synthetic oligonucleotide
cacaaagtgtgacaagactgccatcccactcacttggacagggatgattgacttgcctgg

SEQ ID NO: 342693 - DNA, 55 bp, Artificial
  Synthetic oligonucleotide
cacaaagttcgatgaggataaatacgttggacgactcccgatattttcgtcttta

SEQ ID NO: 342694 - DNA, 60 bp, Artificial
  Synthetic oligonucleotide
cacaaataattatgtgggcctagagacctggcccacattgttttgccggtcctgctatca

SEQ ID NO: 342695 - DNA, 55 bp, Artificial
  Synthetic oligonucleotide
cacaaataattgtgagggcccaaagatctggcccatactgttttgcctattctgc

SEQ ID NO: 342696 - DNA, 59 bp, Artificial
  Synthetic oligonucleotide
cacaaataccggcagaaatgcttgcgaacattgacttgaaatacttcaacgaatcaacg

SEQ ID NO: 342697 - DNA, 55 bp, Artificial
  Synthetic oligonucleotide
cacaaatagttgtgtggacctagtgacctggcccacattgtcttgcctgttctac

SEQ ID NO: 342698 - DNA, 53 bp, Artificial
  Synthetic oligonucleotide
cacaaatatttttcaaaacccatactgggaattagatgataaccaaccttact

SEQ ID NO: 342699 - DNA, 60 bp, Artificial
  Synthetic oligonucleotide
cacaaatccccgctgtttctggaggaaggtgcaccaaatgtgcatgttgaaaagagactg

SEQ ID NO: 342700 - DNA, 56 bp, Artificial
  Synthetic oligonucleotide
cacaaatcgtgtctacctgcttgtgtgtatggccttgcagtggccagtgggtatga

SEQ ID NO: 342701 - DNA, 57 bp, Artificial
  Synthetic oligonucleotide
cacaaatctgactgcgaagaaagaatgtccgcgtatcacaaacgcgttgtagataca

SEQ ID NO: 342702 - DNA, 60 bp, Artificial
  Synthetic oligonucleotide
cacaaatgaggctcaatcgtcaacaacattcgacgttcattttgaggattggtggaatcg

SEQ ID NO: 342703 - DNA, 59 bp, Artificial
  Synthetic oligonucleotide
cacaaatgcagccgagactacatttgaaagcaagtccacggaagtgcacttaaaaggag

SEQ ID NO: 342704 - DNA, 52 bp, Artificial
  Synthetic oligonucleotide
cacaaatgcaggaagacatcattagcttatgggatcagagccttaaaccttg

SEQ ID NO: 342705 - DNA, 55 bp, Artificial
  Synthetic oligonucleotide
cacaaatgcatgatttaaattcacacatacactgattgggtcgggcgggtaatca

SEQ ID NO: 342706 - DNA, 60 bp, Artificial
  Synthetic oligonucleotide
cacaaatgcgacaacaactgcattgaaagtatccggaatggaacctatgatcatgatatt

SEQ ID NO: 342707 - DNA, 52 bp, Artificial
  Synthetic oligonucleotide
cacaaatgcgtggtaatgctcgtaaggttacgaactatatttcgttgttgag

SEQ ID NO: 342708 - DNA, 52 bp, Artificial
  Synthetic oligonucleotide
cacaaatggtcagacattatcgaagaggggaaatgagagatatgagtatctc

SEQ ID NO: 342709 - DNA, 55 bp, Artificial
  Synthetic oligonucleotide
cacaaatgtaatgactcatgcatggaaaccatcagaaatgggacctacaaccatg

SEQ ID NO: 342710 - DNA, 52 bp, Artificial
  Synthetic oligonucleotide
cacaaatgtcccgcatggaaaatcatcccgaaacggaaacccagtcgaaaag

SEQ ID NO: 342711 - DNA, 55 bp, Artificial
  Synthetic oligonucleotide
cacaaatgtgacaatgcttgcatagagtcaattagaaacgggacttatgatcatg

SEQ ID NO: 342712 - DNA, 60 bp, Artificial
  Synthetic oligonucleotide
cacaaatgtgctatgcgggtgttactctggacgttatgcgcataaacaagacgcattata

SEQ ID NO: 342713 - DNA, 60 bp, Artificial
  Synthetic oligonucleotide
cacaaatgttcatgtggtcaagagggctctatcactcaaagagtccatcaactggtttgt

SEQ ID NO: 342714 - DNA, 58 bp, Artificial
  Synthetic oligonucleotide
cacaaattagacagtggtactggactcaactaacatcctggacacaaacagtacccca

SEQ ID NO: 342715 - DNA, 60 bp, Artificial
  Synthetic oligonucleotide
cacaaattgatttctcgagcggatcgggagtttcacattggaaacagcacaactgatgat

SEQ ID NO: 342716 - DNA, 55 bp, Artificial
  Synthetic oligonucleotide
cacaaattggcagcaaatagggaggttatcgagtcaagtatgtcgtactacagat

SEQ ID NO: 342717 - DNA, 60 bp, Artificial
  Synthetic oligonucleotide
cacaaattgtcactactactacgcaactcacattgcgtgctcactacctacaacatcaag

SEQ ID NO: 342718 - DNA, 54 bp, Artificial
  Synthetic oligonucleotide
cacaaatttctgtaaagctgttggcttttgtcccccccaggtcaatcctcttcc

SEQ ID NO: 342719 - DNA, 55 bp, Artificial
  Synthetic oligonucleotide
cacaacaaatactgtgagcacacggtgtctgtccataactgcatggagatacctg

SEQ ID NO: 342720 - DNA, 55 bp, Artificial
  Synthetic oligonucleotide
cacaacaaatcagaagactgaattacaagccattaagttagctttgcaggattcg

SEQ ID NO: 342721 - DNA, 55 bp, Artificial
  Synthetic oligonucleotide
cacaacaacgccacagggagttccggtgacagtaactatacgcctatagtgcacc

SEQ ID NO: 342722 - DNA, 60 bp, Artificial
  Synthetic oligonucleotide
cacaacaactgggggattgcaatcattcctctgtccaagttagactttgcaccagatgcc

SEQ ID NO: 342723 - DNA, 55 bp, Artificial
  Synthetic oligonucleotide
cacaacaaggtcgcgtgtggaggacgaatccttatccgtgtctacgcggtgcgct

SEQ ID NO: 342724 - DNA, 55 bp, Artificial
  Synthetic oligonucleotide
cacaacaagtactgtgaacaccctgtatcagtacataactgcatggagattcctg

SEQ ID NO: 342725 - DNA, 55 bp, Artificial
  Synthetic oligonucleotide
cacaacacaagactccctacatacagtacttgcatatggtgaatggcccacatac

SEQ ID NO: 342726 - DNA, 59 bp, Artificial
  Synthetic oligonucleotide
cacaacacgagtccagtcctgttccacagcgtggtcgcaacagttaacaccaccggatg

SEQ ID NO: 342727 - DNA, 58 bp, Artificial
  Synthetic oligonucleotide
cacaacacggagcactaacgtcactctttgtgccactaaaacatctgaggacacctac

SEQ ID NO: 342728 - DNA, 60 bp, Artificial
  Synthetic oligonucleotide
cacaacactcaggggccgacatgcaaatgggactatacatgacagaagccctttcagagc

SEQ ID NO: 342729 - DNA, 59 bp, Artificial
  Synthetic oligonucleotide
cacaacactgtttaaggctgcaatcttacattgtggacgatactgattaaagctgcaaa

SEQ ID NO: 342730 - DNA, 58 bp, Artificial
  Synthetic oligonucleotide
cacaacagaaacttaccgtgaagatattgaaatgacaaaatccatgttgaagcttaaa

SEQ ID NO: 342731 - DNA, 53 bp, Artificial
  Synthetic oligonucleotide
cacaacagcaagctattaaggaaggcttgtgtcactagtgctgagtttattga

SEQ ID NO: 342732 - DNA, 60 bp, Artificial
  Synthetic oligonucleotide
cacaacagccctagtggtgtcgcagttactccggatcccacaagctgccgtggatatggt

SEQ ID NO: 342733 - DNA, 60 bp, Artificial
  Synthetic oligonucleotide
cacaacaggagatgtagaagacgtgctgataccaaagcgcttcaggccagccaaggatcc

SEQ ID NO: 342734 - DNA, 60 bp, Artificial
  Synthetic oligonucleotide
cacaacaggaggtcagggaagaatattaagcgcaactagtgtaggagatgtatttcctgc

SEQ ID NO: 342735 - DNA, 51 bp, Artificial
  Synthetic oligonucleotide
cacaacagggaacagtagtaaggggcaactacccaatcctcagacaagggg

SEQ ID NO: 342736 - DNA, 51 bp, Artificial
  Synthetic oligonucleotide
cacaacagggacacgaggccctttattattgtcctaggctcaaagagttcc

SEQ ID NO: 342737 - DNA, 52 bp, Artificial
  Synthetic oligonucleotide
cacaacatacacctagcaggcgtgaccggtggatcaggggacaaatactaca

SEQ ID NO: 342738 - DNA, 60 bp, Artificial
  Synthetic oligonucleotide
cacaacatatgggcaacacataactgtgtgcctttagatcccaatccttatgaagtaacc

SEQ ID NO: 342739 - DNA, 55 bp, Artificial
  Synthetic oligonucleotide
cacaacatcaaggagtttgctaagaagaatgactcggcctagtgggaaagccatc

SEQ ID NO: 342740 - DNA, 60 bp, Artificial
  Synthetic oligonucleotide
cacaacatcacatgcctcaagggcacatccgtcgggggttgctgcccaaccacatatggc

SEQ ID NO: 342741 - DNA, 50 bp, Artificial
  Synthetic oligonucleotide
cacaacatctggccgtttcaccccaaaactaggctcattagagatttcca

SEQ ID NO: 342742 - DNA, 60 bp, Artificial
  Synthetic oligonucleotide
cacaacattcacccattgacaataggtgagtgccccaaatatgtaaagtcagatagattg

SEQ ID NO: 342743 - DNA, 58 bp, Artificial
  Synthetic oligonucleotide
cacaaccaacgaaacagagatatttagacctgcaggaggaaatatgaaggacaattgg

SEQ ID NO: 342744 - DNA, 55 bp, Artificial
  Synthetic oligonucleotide
cacaaccaattgcaccctatccaaagcaattattatatgactctactatagcagc

SEQ ID NO: 342745 - DNA, 53 bp, Artificial
  Synthetic oligonucleotide
cacaaccaccgaccagtcgcaaggaggcaatgctcggcacgcatgtcatttgg

SEQ ID NO: 342746 - DNA, 55 bp, Artificial
  Synthetic oligonucleotide
cacaaccagactattttcctaggataatatttgagaggttaaaaagttatgatac

SEQ ID NO: 342747 - DNA, 55 bp, Artificial
  Synthetic oligonucleotide
cacaaccagagaatacttatggcatatctcctactaatgacatgggcacactgtg

SEQ ID NO: 342748 - DNA, 60 bp, Artificial
  Synthetic oligonucleotide
cacaaccaggcgactgcggaggcattctacgctgtaatcatggtgtgatggggataatca

SEQ ID NO: 342749 - DNA, 60 bp, Artificial
  Synthetic oligonucleotide
cacaaccattcactccatctgtggacatgtctcaatcacgcgagttcctaacgaaggcaa

SEQ ID NO: 342750 - DNA, 51 bp, Artificial
  Synthetic oligonucleotide
cacaaccattcagaacatacatcccagcccaacaaacaggtccaagaggaa

SEQ ID NO: 342751 - DNA, 56 bp, Artificial
  Synthetic oligonucleotide
cacaacccccccagaacccaagcccaatcctattgcgatacgtagtgaccacacga

SEQ ID NO: 342752 - DNA, 58 bp, Artificial
  Synthetic oligonucleotide
cacaaccccgcgtgagaacatccgcggtgacctcgcaactcttgcggggaggattgca

SEQ ID NO: 342753 - DNA, 55 bp, Artificial
  Synthetic oligonucleotide
cacaacccctaagttttgctgaactcttaagttctacttgattttacaatcgcta

SEQ ID NO: 342754 - DNA, 55 bp, Artificial
  Synthetic oligonucleotide
cacaaccgcagattaaacgtgtcaaaacacatggaagcaattttccagggaccta

SEQ ID NO: 342755 - DNA, 55 bp, Artificial
  Synthetic oligonucleotide
cacaaccgtcaccgagagagacatcaggactgaggagtccatataccgggcctgt

SEQ ID NO: 342756 - DNA, 52 bp, Artificial
  Synthetic oligonucleotide
cacaacctgtaagtttactcgatacaggtcagaccaggttttgacagtataa

SEQ ID NO: 342757 - DNA, 55 bp, Artificial
  Synthetic oligonucleotide
cacaacctgtacctcagtaaggaaagtcttagaatgacctctgaagatgttactc

SEQ ID NO: 342758 - DNA, 60 bp, Artificial
  Synthetic oligonucleotide
cacaaccttcccaacatgcaagagttaatcactctgctcagaggaaaaaccatctttagc

SEQ ID NO: 342759 - DNA, 55 bp, Artificial
  Synthetic oligonucleotide
cacaacgaattaggttcgcatcttgaagtacacacaccaaacggagttaaacgcg

SEQ ID NO: 342760 - DNA, 55 bp, Artificial
  Synthetic oligonucleotide
cacaacgacctatgctttgatgagatatcaaattgatcgtagagtgcgattgatc

SEQ ID NO: 342761 - DNA, 56 bp, Artificial
  Synthetic oligonucleotide
cacaacgacgatcacacacgttacgactactagggccttttcagtacttcaacttc

SEQ ID NO: 342762 - DNA, 54 bp, Artificial
  Synthetic oligonucleotide
cacaacggaatattggggatttaaatggctagaatgtaatcaaacagaaaattt

SEQ ID NO: 342763 - DNA, 53 bp, Artificial
  Synthetic oligonucleotide
cacaacggcttttggacagcaacgagttttcaaggagaaagttgacacaaaag

SEQ ID NO: 342764 - DNA, 60 bp, Artificial
  Synthetic oligonucleotide
cacaacgggaagctctgcagcctaaatggagtgaagcctctcattttgagggattgtagt

SEQ ID NO: 342765 - DNA, 57 bp, Artificial
  Synthetic oligonucleotide
cacaacggggagcgcgaatatgaggagttcatccgtaaaattagaagcgtcccagtc

SEQ ID NO: 342766 - DNA, 59 bp, Artificial
  Synthetic oligonucleotide
cacaacggtttatgatgtactgcgcattagaatttatctacggcaatgggcgggattaa

SEQ ID NO: 342767 - DNA, 58 bp, Artificial
  Synthetic oligonucleotide
cacaacgtatataacattggatcaaacttgtgagcatttaaaagtatcatgtggccct

SEQ ID NO: 342768 - DNA, 53 bp, Artificial
  Synthetic oligonucleotide
cacaacgtgaataggacatcgcctttataatggattgcccaacggctcaattt

SEQ ID NO: 342769 - DNA, 55 bp, Artificial
  Synthetic oligonucleotide
cacaacgtgatcctagtacctctattcctgctccaactagtgtgaagtggagtag

SEQ ID NO: 342770 - DNA, 56 bp, Artificial
  Synthetic oligonucleotide
cacaacgttatcagtttacagaaagtatacccaatcacactttactattagctaat

SEQ ID NO: 342771 - DNA, 57 bp, Artificial
  Synthetic oligonucleotide
cacaacgtttagtatgggcctgtgttggcatggaggtaggtcgtgggcagcctttag

SEQ ID NO: 342772 - DNA, 60 bp, Artificial
  Synthetic oligonucleotide
cacaactaagggacaatgccaatgacctggggaatggatgctttgagttctggcataagt

SEQ ID NO: 342773 - DNA, 56 bp, Artificial
  Synthetic oligonucleotide
cacaactacggcggccacacggtttatgaaagacctccacttcactgggatgaacg

SEQ ID NO: 342774 - DNA, 54 bp, Artificial
  Synthetic oligonucleotide
cacaactacgtgaggtaatcaagtccagttacccacgtttcaaacatgcagtgc

SEQ ID NO: 342775 - DNA, 58 bp, Artificial
  Synthetic oligonucleotide
cacaactagttatgtagtccgtgatccaagttacacctcatcatgcgcttatctctac

SEQ ID NO: 342776 - DNA, 60 bp, Artificial
  Synthetic oligonucleotide
cacaactccagacacatactcacaagctggttatatcacttgttggtatcaaaccaattt

SEQ ID NO: 342777 - DNA, 55 bp, Artificial
  Synthetic oligonucleotide
cacaactcccgttgtcagtgagacccgtatatccccccccataggctggaaagga

SEQ ID NO: 342778 - DNA, 57 bp, Artificial
  Synthetic oligonucleotide
cacaactcgatactgagatacgtagtgttaaacacgtaatcgacagtattgcccttt

SEQ ID NO: 342779 - DNA, 60 bp, Artificial
  Synthetic oligonucleotide
cacaactcgtgttaagtcagggcaagtcccctcaatcaaagatacacctgagtgtaagca

SEQ ID NO: 342780 - DNA, 53 bp, Artificial
  Synthetic oligonucleotide
cacaactgcaagcagaagttatcaggagcgagcacaactacagctgcaatcta

SEQ ID NO: 342781 - DNA, 55 bp, Artificial
  Synthetic oligonucleotide
cacaactgctggtgtagtgacacctcaatatataatcggtaacgattctactggg

SEQ ID NO: 342782 - DNA, 55 bp, Artificial
  Synthetic oligonucleotide
cacaactggacggaaatcttaaagccatcgcatcttgtcccaatcagcttgtaac

SEQ ID NO: 342783 - DNA, 60 bp, Artificial
  Synthetic oligonucleotide
cacaactgtttaatagtacttggaatgatacttggtataataatgtgaatgatactagtg

SEQ ID NO: 342784 - DNA, 55 bp, Artificial
  Synthetic oligonucleotide
cacaactttcccctatactggagaccctccttacagccatgggacagggacaggg

SEQ ID NO: 342785 - DNA, 55 bp, Artificial
  Synthetic oligonucleotide
cacaagaaagacctaaccgatctctacggagagaggtgcggtacactcaacctgg

SEQ ID NO: 342786 - DNA, 55 bp, Artificial
  Synthetic oligonucleotide
cacaagaacaggtagagtctctctgcctaagtgctggatgatcagcaacgggacc

SEQ ID NO: 342787 - DNA, 55 bp, Artificial
  Synthetic oligonucleotide
cacaagaagacgcgttcctcgaattactactactaatgagcagactgtcgtgaga

SEQ ID NO: 342788 - DNA, 53 bp, Artificial
  Synthetic oligonucleotide
cacaagaagagggaaaacgcgacaaggaagtaaacgctggaacctctgggact

SEQ ID NO: 342789 - DNA, 60 bp, Artificial
  Synthetic oligonucleotide
cacaagaaggagcaatgcatactgcgttgactggagctacagaaatccaaacgtctggaa

SEQ ID NO: 342790 - DNA, 55 bp, Artificial
  Synthetic oligonucleotide
cacaagaagtcaccggccgcagtttgaaggaggcatatagcgaatttttccagtt

SEQ ID NO: 342791 - DNA, 58 bp, Artificial
  Synthetic oligonucleotide
cacaagacccagcaataacacaagaagaagtgtaaggctaggaccaggacaagcattt

SEQ ID NO: 342792 - DNA, 55 bp, Artificial
  Synthetic oligonucleotide
cacaagacgatggcaaggcactatattcagatctgaagagtccgacaaaaaggca

SEQ ID NO: 342793 - DNA, 60 bp, Artificial
  Synthetic oligonucleotide
cacaagactacatagaagtctcggatcatctgcgcgaactagcgcgatatcagaagaatc

SEQ ID NO: 342794 - DNA, 60 bp, Artificial
  Synthetic oligonucleotide
cacaagagaaccttcaggaggatggcagaatcgatcgagatgggagaagaacttgtatcc

SEQ ID NO: 342795 - DNA, 56 bp, Artificial
  Synthetic oligonucleotide
cacaagagagtaggtacgacgaaggaggtccttacagcaattaagaaacgtaatgc

SEQ ID NO: 342796 - DNA, 58 bp, Artificial
  Synthetic oligonucleotide
cacaagagcactggaatcaaaacaaaaagggcacattagataattacaatgacccaaa

SEQ ID NO: 342797 - DNA, 60 bp, Artificial
  Synthetic oligonucleotide
cacaagagcaggctatctcaagttaccacgaacacattaggtcgccggaagcgcagagcg

SEQ ID NO: 342798 - DNA, 58 bp, Artificial
  Synthetic oligonucleotide
cacaagagcataactatcaacaacccaaaagaatcaactgttaatgatacaaacgacc

SEQ ID NO: 342799 - DNA, 55 bp, Artificial
  Synthetic oligonucleotide
cacaagaggagtttgctaaaagcgttggtactacacctcaaacggtgagtgcatg

SEQ ID NO: 342800 - DNA, 60 bp, Artificial
  Synthetic oligonucleotide
cacaagaggattgcatgataaaagcagtacgaggtgatttgaattttgtcaacagagcga

SEQ ID NO: 342801 - DNA, 60 bp, Artificial
  Synthetic oligonucleotide
cacaagagtctgaatgtgtctgtgtgaacgggtcatgttttaccataatgaccgatggcc

SEQ ID NO: 342802 - DNA, 60 bp, Artificial
  Synthetic oligonucleotide
cacaagagtctgtctcggagctagtcatggcctacaccattgtcgactacggggagcaga

SEQ ID NO: 342803 - DNA, 59 bp, Artificial
  Synthetic oligonucleotide
cacaagatcagttaactacgttcactggtaggcctggagtagccggtgatctaggagta

SEQ ID NO: 342804 - DNA, 55 bp, Artificial
  Synthetic oligonucleotide
cacaagatggatgatgatttaacttttctggctgctataaagaagagattgcggt

SEQ ID NO: 342805 - DNA, 53 bp, Artificial
  Synthetic oligonucleotide
cacaagatggcgccatgctacaatttgaagttgctaaatgtcggtttttcaac

SEQ ID NO: 342806 - DNA, 50 bp, Artificial
  Synthetic oligonucleotide
cacaagatgtagtaccgcttgtgcgtttgatggctacgaaggctctaccg

SEQ ID NO: 342807 - DNA, 60 bp, Artificial
  Synthetic oligonucleotide
cacaagattccggatcgattcggagcacgaattcggatgagtaccctctggatttctctc

SEQ ID NO: 342808 - DNA, 55 bp, Artificial
  Synthetic oligonucleotide
cacaagcaacctacaactttgtttatgatgcttctacccttccaagggatggctt

SEQ ID NO: 342809 - DNA, 54 bp, Artificial
  Synthetic oligonucleotide
cacaagcaatgtacaacctgaggatatgattgaaacacgctatgtacaaaacac

SEQ ID NO: 342810 - DNA, 55 bp, Artificial
  Synthetic oligonucleotide
cacaagcacagcgtttctggaactacaaaaggtagggaatcagtaacctttagag

SEQ ID NO: 342811 - DNA, 60 bp, Artificial
  Synthetic oligonucleotide
cacaagcagcaaagggagtaggagcagcatctcaagatttagataagcatggagcaatta

SEQ ID NO: 342812 - DNA, 55 bp, Artificial
  Synthetic oligonucleotide
cacaagcagctttgttctggcttccacaaactcccagacattaaaccctccaact

SEQ ID NO: 342813 - DNA, 60 bp, Artificial
  Synthetic oligonucleotide
cacaagcaggcagcaagtcgcaaagggccaagtacgggacagcaggctacggagtggagg

SEQ ID NO: 342814 - DNA, 54 bp, Artificial
  Synthetic oligonucleotide
cacaagcagtgtacaaccagaagacatggttgaaacacgttatgtccaaacttc

SEQ ID NO: 342815 - DNA, 54 bp, Artificial
  Synthetic oligonucleotide
cacaagcataaccgtcatactcagcgtataattcatcaccagctcttacagaac

SEQ ID NO: 342816 - DNA, 60 bp, Artificial
  Synthetic oligonucleotide
cacaagcattcagaaatatggtgtatgttagatcattagcggctgatttaaacgacgtag

SEQ ID NO: 342817 - DNA, 52 bp, Artificial
  Synthetic oligonucleotide
cacaagcatttaatagaccccctagactctttaaagaagacaaaccctttta

SEQ ID NO: 342818 - DNA, 60 bp, Artificial
  Synthetic oligonucleotide
cacaagccagtctcatttaaatccaacaagataaccattaacgatatcttgcgcgatata

SEQ ID NO: 342819 - DNA, 55 bp, Artificial
  Synthetic oligonucleotide
cacaagccctactccctgtatgtattccctcattggataactaaacctaaccgcc

SEQ ID NO: 342820 - DNA, 52 bp, Artificial
  Synthetic oligonucleotide
cacaagccgactggggctagcggtgttaaatccaacgatgcagcagcttctt

SEQ ID NO: 342821 - DNA, 59 bp, Artificial
  Synthetic oligonucleotide
cacaagccgatgttgacgtgtacgttaggatgaagcgggcggaactctactgcccgcga

SEQ ID NO: 342822 - DNA, 53 bp, Artificial
  Synthetic oligonucleotide
cacaagccgtctctgtggagttcttattaagtgcggatgggactgcaggtccg

SEQ ID NO: 342823 - DNA, 55 bp, Artificial
  Synthetic oligonucleotide
cacaagcctgtgtattctatagaaggtggccacgttcgcgtgagcagatatgggg

SEQ ID NO: 342824 - DNA, 60 bp, Artificial
  Synthetic oligonucleotide
cacaagcggagagcagatgctgataatttgggggatacatcatcccaatgacgatgcgga

SEQ ID NO: 342825 - DNA, 55 bp, Artificial
  Synthetic oligonucleotide
cacaagcgtgtagttattatgtgtgctggtaacttatcatcagataaggccatcg

SEQ ID NO: 342826 - DNA, 55 bp, Artificial
  Synthetic oligonucleotide
cacaagctctggccccgattccttcggagcaactacccctagacctaggggacga

SEQ ID NO: 342827 - DNA, 60 bp, Artificial
  Synthetic oligonucleotide
cacaagctgagattccattattgaaaatagggagcgcagcgacaatgtttgaggaaactt

SEQ ID NO: 342828 - DNA, 59 bp, Artificial
  Synthetic oligonucleotide
cacaagctttctccagacagttcggaccaacagattaggaccttcagatgccccaaaga

SEQ ID NO: 342829 - DNA, 60 bp, Artificial
  Synthetic oligonucleotide
cacaaggaaccgctcacgcgactggcactgccctacacggctccacaccgcgtcctagcg

SEQ ID NO: 342830 - DNA, 55 bp, Artificial
  Synthetic oligonucleotide
cacaaggaatgttcgtggtacgtggggctttcaaaggagtgttatacgacgcacg

SEQ ID NO: 342831 - DNA, 57 bp, Artificial
  Synthetic oligonucleotide
cacaaggacaaccaagactggaacagtgtagagaaacttgtggaatttggaccacca

SEQ ID NO: 342832 - DNA, 55 bp, Artificial
  Synthetic oligonucleotide
cacaaggacggctgtccagtcacttgctaacgcaactgcggcgcagcagaatgtg

SEQ ID NO: 342833 - DNA, 55 bp, Artificial
  Synthetic oligonucleotide
cacaaggagcacacgcgcccaaccgactgttccggtttcgactggtcagtcgcgt

SEQ ID NO: 342834 - DNA, 57 bp, Artificial
  Synthetic oligonucleotide
cacaaggatattcccggggctatagcaggctataaattaggtcgttcgttatacaga

SEQ ID NO: 342835 - DNA, 54 bp, Artificial
  Synthetic oligonucleotide
cacaaggattgtttgaatggctagtcatgccatttggtctaaagaatgcaccag

SEQ ID NO: 342836 - DNA, 55 bp, Artificial
  Synthetic oligonucleotide
cacaaggccaccaactaatctacgtcatcccggatataatgatgaccataaggga

SEQ ID NO: 342837 - DNA, 57 bp, Artificial
  Synthetic oligonucleotide
cacaaggcgatggcgagatgataccgcgtggtgtgcaagtgcaaaaagtaccagata

SEQ ID NO: 342838 - DNA, 57 bp, Artificial
  Synthetic oligonucleotide
cacaaggcgcagggtcattgattagctatcttaaacgctattcgttatccgcaatct

SEQ ID NO: 342839 - DNA, 55 bp, Artificial
  Synthetic oligonucleotide
cacaaggcggtagtcggtgacgggcatacgggcccagcctgtagcgaaaccgtct

SEQ ID NO: 342840 - DNA, 60 bp, Artificial
  Synthetic oligonucleotide
cacaaggctgagggattctacgtttcattggcacctcaggtgcaacaagtgtgtaaggcc

SEQ ID NO: 342841 - DNA, 60 bp, Artificial
  Synthetic oligonucleotide
cacaaggctggattttaagtccattgatatatcaaagtacattagataatataatacaac

SEQ ID NO: 342842 - DNA, 55 bp, Artificial
  Synthetic oligonucleotide
cacaaggctggtcaagggctgcctgatatacatggacctgatgtatggaggcgac

SEQ ID NO: 342843 - DNA, 56 bp, Artificial
  Synthetic oligonucleotide
cacaagggaaaacgcgtgataatgttatccttgttagactgagtaggactaccaat

SEQ ID NO: 342844 - DNA, 55 bp, Artificial
  Synthetic oligonucleotide
cacaagggaggttcagcatctgaaaggaattattcatgactttgagcgaaagctc

SEQ ID NO: 342845 - DNA, 55 bp, Artificial
  Synthetic oligonucleotide
cacaagggattagtgattaaagaggaaccgctaaaaggatcagccaaacatattg

SEQ ID NO: 342846 - DNA, 60 bp, Artificial
  Synthetic oligonucleotide
cacaagggccccagtcaatgaacggcgcccggatgaggtgcacagctgcaattgcaccac

SEQ ID NO: 342847 - DNA, 59 bp, Artificial
  Synthetic oligonucleotide
cacaagggcgtctacggacaactggtggactcttttgcttacatgaggaatggctggga

SEQ ID NO: 342848 - DNA, 57 bp, Artificial
  Synthetic oligonucleotide
cacaaggggtaggctacgggtgaaacctcttaagctaatacttctatgaagagatgc

SEQ ID NO: 342849 - DNA, 56 bp, Artificial
  Synthetic oligonucleotide
cacaaggtagtggaagtaactgcgatgtaatttcaaaaggagacaacatccttgtt

SEQ ID NO: 342850 - DNA, 57 bp, Artificial
  Synthetic oligonucleotide
cacaaggtgcggttatatttagggggtgtcgagcacaggttcgatgccgcttgtaat

SEQ ID NO: 342851 - DNA, 55 bp, Artificial
  Synthetic oligonucleotide
cacaaggtgggtttgacaatcaagggaacacaccgtttggcaaaggtaccatgaa

SEQ ID NO: 342852 - DNA, 55 bp, Artificial
  Synthetic oligonucleotide
cacaaggttcaggcttattgatattcggcgagagtgacggtcggtacactgacct

SEQ ID NO: 342853 - DNA, 57 bp, Artificial
  Synthetic oligonucleotide
cacaagtaattgtgtgggcctagagacctggcccaaagtgtcttccctgtacgactc

SEQ ID NO: 342854 - DNA, 55 bp, Artificial
  Synthetic oligonucleotide
cacaagtacacggagttggatcatgctgtcgtttgttggagaggcgaatacagct

SEQ ID NO: 342855 - DNA, 60 bp, Artificial
  Synthetic oligonucleotide
cacaagtactgcagtagtagatgtggctgcttctgattggatgttaagagtatataagga

SEQ ID NO: 342856 - DNA, 60 bp, Artificial
  Synthetic oligonucleotide
cacaagtacttcttacatatgtaagaatgatccaacatacgccatgtcagaggtccttac

SEQ ID NO: 342857 - DNA, 55 bp, Artificial
  Synthetic oligonucleotide
cacaagtaggagatctcactgctcagagcgcgggctacgtggctcgctacgcatt

SEQ ID NO: 342858 - DNA, 60 bp, Artificial
  Synthetic oligonucleotide
cacaagtagttgtgtggccctaatgaccttgcccacattgtcttgcctgtcctgctatca

SEQ ID NO: 342859 - DNA, 59 bp, Artificial
  Synthetic oligonucleotide
cacaagtcagatactcccttgacatgctggtaactgagatgttcagagaatataaccat

SEQ ID NO: 342860 - DNA, 60 bp, Artificial
  Synthetic oligonucleotide
cacaagtcggcgatgagtactgctatggagggcacacaaatgaggacgactctaactttg

SEQ ID NO: 342861 - DNA, 59 bp, Artificial
  Synthetic oligonucleotide
cacaagtctcgacacaaaggacagggtcacacgagactagcaacatcgccacagaaggt

SEQ ID NO: 342862 - DNA, 55 bp, Artificial
  Synthetic oligonucleotide
cacaagtggagacgcacagtctcctgctgctccctcttccccgagggtcaacacg

SEQ ID NO: 342863 - DNA, 57 bp, Artificial
  Synthetic oligonucleotide
cacaagttcacgagtgggttgggagtgagaacgcagtggaagaatgtaacggacgga

SEQ ID NO: 342864 - DNA, 55 bp, Artificial
  Synthetic oligonucleotide
cacaagttctacgctaaggtcactggtggacagtatgccagcaacgaacaggctc

SEQ ID NO: 342865 - DNA, 51 bp, Artificial
  Synthetic oligonucleotide
cacaagttcttgagcaaagcgtttcctaatgtgcctaggatccactgtgcg

SEQ ID NO: 342866 - DNA, 55 bp, Artificial
  Synthetic oligonucleotide
cacaagttgcgtctcggtgagctttactttgaaacccttggttgttccacgcttc

SEQ ID NO: 342867 - DNA, 59 bp, Artificial
  Synthetic oligonucleotide
cacaagttgtactctctagggcagctgagaacaacagcctcaatttagaggtaaaccca

SEQ ID NO: 342868 - DNA, 51 bp, Artificial
  Synthetic oligonucleotide
cacaataaacgaggacggaaacgaaactttaaagggtgttgctggtactaa

SEQ ID NO: 342869 - DNA, 60 bp, Artificial
  Synthetic oligonucleotide
cacaataagcttgggaacagaagctacatttgggcaacatcctggcttaggtgcacattg

SEQ ID NO: 342870 - DNA, 59 bp, Artificial
  Synthetic oligonucleotide
cacaataatatatccagcatttggaatgcaacgaatgcattatagaaatggagatccac

SEQ ID NO: 342871 - DNA, 55 bp, Artificial
  Synthetic oligonucleotide
cacaataattaatcgcgcagaaggtacctgtgcgaccagcaccggcgctaccgtg

SEQ ID NO: 342872 - DNA, 56 bp, Artificial
  Synthetic oligonucleotide
cacaatacatgataggattccccatcgaacccttttaatgaacgaattgggcgttc

SEQ ID NO: 342873 - DNA, 55 bp, Artificial
  Synthetic oligonucleotide
cacaatactagagaagaatgttacagtgacacactcagtggagctcctagagagc

SEQ ID NO: 342874 - DNA, 60 bp, Artificial
  Synthetic oligonucleotide
cacaatagacattcccacagtgttgccattacctccacgatacatttgagttactaagca

SEQ ID NO: 342875 - DNA, 60 bp, Artificial
  Synthetic oligonucleotide
cacaatagatccacacccatttacattggacatgttagagctcattctggactacctgga

SEQ ID NO: 342876 - DNA, 55 bp, Artificial
  Synthetic oligonucleotide
cacaatagatgagagtgactctagacaaaatgtttgcattgatcctaagtccatg

SEQ ID NO: 342877 - DNA, 53 bp, Artificial
  Synthetic oligonucleotide
cacaatagccttacgcaatagtgttatgtaacgatgaagtagctatataccat

SEQ ID NO: 342878 - DNA, 53 bp, Artificial
  Synthetic oligonucleotide
cacaatagttaatgtaacgaccactattgatccaacatcagaggtgattggta

SEQ ID NO: 342879 - DNA, 54 bp, Artificial
  Synthetic oligonucleotide
cacaatatcaagtagtgtcgatgatctcatcaggtcctaatcctaacatggtga

SEQ ID NO: 342880 - DNA, 59 bp, Artificial
  Synthetic oligonucleotide
cacaatatgcattaggaatcattcaagcacaaccagatacaagtgaatcagaattagtc

SEQ ID NO: 342881 - DNA, 50 bp, Artificial
  Synthetic oligonucleotide
cacaatatggagggactaacacttcgtataaccccatcattgcgtatgac

SEQ ID NO: 342882 - DNA, 58 bp, Artificial
  Synthetic oligonucleotide
cacaatatggctattggaaccttgatacaacgggaagttgggagggagcagccaggga

SEQ ID NO: 342883 - DNA, 60 bp, Artificial
  Synthetic oligonucleotide
cacaatattcgtgttacctgttatagatcggatcttggatacaaagtgctactaacatcg

SEQ ID NO: 342884 - DNA, 55 bp, Artificial
  Synthetic oligonucleotide
cacaatatttggtcagtaccggatcgtgccaatattacttagagtgacaagccgg

SEQ ID NO: 342885 - DNA, 55 bp, Artificial
  Synthetic oligonucleotide
cacaatcaaacttaaacaagagagatggcttggtaagagattgtcgcagtttgac

SEQ ID NO: 342886 - DNA, 55 bp, Artificial
  Synthetic oligonucleotide
cacaatcagacattctctggcagtccgtattttcctggttagtgagctcaagagg

SEQ ID NO: 342887 - DNA, 57 bp, Artificial
  Synthetic oligonucleotide
cacaatcagctttaacacgctgtgcatggtcctgagtatcaaggatacgagatttca

SEQ ID NO: 342888 - DNA, 55 bp, Artificial
  Synthetic oligonucleotide
cacaatcaggtgagagtatgaaatacaagttaatggctgcagataatcggcgggt

SEQ ID NO: 342889 - DNA, 58 bp, Artificial
  Synthetic oligonucleotide
cacaatccaatatgctgactacggtcggtgtggaggatccgaaacgtaagcaagtttc

SEQ ID NO: 342890 - DNA, 50 bp, Artificial
  Synthetic oligonucleotide
cacaatccagggtagtggtgtttgaggggaacaggaacttaagaacaccg

SEQ ID NO: 342891 - DNA, 57 bp, Artificial
  Synthetic oligonucleotide
cacaatccagtgtatttctagtcgtaatgagcaattgcgggacgggaccaactactt

SEQ ID NO: 342892 - DNA, 54 bp, Artificial
  Synthetic oligonucleotide
cacaatccgcagttcaaattccaatatactactcttccaacagtgagttagaga

SEQ ID NO: 342893 - DNA, 60 bp, Artificial
  Synthetic oligonucleotide
cacaatcctcgtggtcgtggcgtgcgtattcacagaatgccgcattcactgactgataga

SEQ ID NO: 342894 - DNA, 55 bp, Artificial
  Synthetic oligonucleotide
cacaatcgccgtactctccatcgtaatcaggtttcaatatgttgagaacagccgc

SEQ ID NO: 342895 - DNA, 55 bp, Artificial
  Synthetic oligonucleotide
cacaatcggagagaagggtataagacacaaaaccagggaccctgggacgagaatg

SEQ ID NO: 342896 - DNA, 60 bp, Artificial
  Synthetic oligonucleotide
cacaatctggcgctgctattaaatcacaggcacgttccctctatagcatcctttactatg

SEQ ID NO: 342897 - DNA, 60 bp, Artificial
  Synthetic oligonucleotide
cacaatctgggtccggatggtcataatgactcacttcttctccatactattggcccagga

SEQ ID NO: 342898 - DNA, 60 bp, Artificial
  Synthetic oligonucleotide
cacaatctttcctggcgacctgcgtcaacggcgtgtgttggactgtctaccatggtgccg

SEQ ID NO: 342899 - DNA, 57 bp, Artificial
  Synthetic oligonucleotide
cacaatgaaacaatcattttacgatcctgtacgcatgttaccgaccccttcgtcaac

SEQ ID NO: 342900 - DNA, 60 bp, Artificial
  Synthetic oligonucleotide
cacaatgaatggacactagagcttttagaggagcttaagaatgaagctgttagacatttt

SEQ ID NO: 342901 - DNA, 55 bp, Artificial
  Synthetic oligonucleotide
cacaatgacaagttgcactcaactaacatttaggcacaaattgatggaacagtac

SEQ ID NO: 342902 - DNA, 58 bp, Artificial
  Synthetic oligonucleotide
cacaatgaccaaggatgcagaaagaggtaaattaaagagacgggcaattgcaacaccc

SEQ ID NO: 342903 - DNA, 55 bp, Artificial
  Synthetic oligonucleotide
cacaatgagtatctgatcgacgtcttcgaatccagcctgtcaaagatgttcgaac

SEQ ID NO: 342904 - DNA, 55 bp, Artificial
  Synthetic oligonucleotide
cacaatgatcaatagggtggtggctatccaagtcatctaagatcaagcacttctg

SEQ ID NO: 342905 - DNA, 57 bp, Artificial
  Synthetic oligonucleotide
cacaatgatctccctattgttttatgtagctttctcactagttgggaaactgttgta

SEQ ID NO: 342906 - DNA, 55 bp, Artificial
  Synthetic oligonucleotide
cacaatgatgatcgttcacgaattctccgacctaacgacccgcgactcagtagtc

SEQ ID NO: 342907 - DNA, 50 bp, Artificial
  Synthetic oligonucleotide
cacaatgattctgacattagtgtttctatgagttcgttaatagatcacat

SEQ ID NO: 342908 - DNA, 59 bp, Artificial
  Synthetic oligonucleotide
cacaatgcctgcgcgtactcttatcattgttcttaccacctacgacgaattcggaacca

SEQ ID NO: 342909 - DNA, 55 bp, Artificial
  Synthetic oligonucleotide
cacaatgcgtgcggaggcttgtccttcttgtgctagttatgacacttgtcctaac

SEQ ID NO: 342910 - DNA, 55 bp, Artificial
  Synthetic oligonucleotide
cacaatggagaatgcttgtagatttcagggaactaaacaaagctactcaagactt

SEQ ID NO: 342911 - DNA, 55 bp, Artificial
  Synthetic oligonucleotide
cacaatggcaaacgtacgacgacaagtattgttccgaatctcgattggcaggtgt

SEQ ID NO: 342912 - DNA, 60 bp, Artificial
  Synthetic oligonucleotide
cacaatggcacatgtgcagttgtaatgactgacggatcggctagtagtcaagcccataca

SEQ ID NO: 342913 - DNA, 54 bp, Artificial
  Synthetic oligonucleotide
cacaatggtgcgggcgcaaagaactaagcgagcgtctgttactgatatctacag

SEQ ID NO: 342914 - DNA, 60 bp, Artificial
  Synthetic oligonucleotide
cacaatggttctttcccaacctagccatacttatgatatagtgaccatgatggtacggtg

SEQ ID NO: 342915 - DNA, 55 bp, Artificial
  Synthetic oligonucleotide
cacaatggttgggagaagagcaacagctatcctcagaaaggcaaccaggagattg

SEQ ID NO: 342916 - DNA, 52 bp, Artificial
  Synthetic oligonucleotide
cacaatgtggcatgtcaccaggggagctgtactcatgtatcaagggaagaga

SEQ ID NO: 342917 - DNA, 60 bp, Artificial
  Synthetic oligonucleotide
cacaatgttcaatatgtattacgatgtattggctctagaacgtaccaaattgaagatgat

SEQ ID NO: 342918 - DNA, 58 bp, Artificial
  Synthetic oligonucleotide
cacaatgttcacccattgacaataggtgagtgccccaaatatgtaaaatcggagaaat

SEQ ID NO: 342919 - DNA, 55 bp, Artificial
  Synthetic oligonucleotide
cacaatgttcccggtatgatcaagggaccggaattccaacagggtatcggtcagg

SEQ ID NO: 342920 - DNA, 54 bp, Artificial
  Synthetic oligonucleotide
cacaattaaatcccggaggtactgtcgttagacctgtcactggcaataacgact

SEQ ID NO: 342921 - DNA, 56 bp, Artificial
  Synthetic oligonucleotide
cacaattactctgaagggtggaaacggccctaacaaagccacgaagcctgacatcg

SEQ ID NO: 342922 - DNA, 54 bp, Artificial
  Synthetic oligonucleotide
cacaattaggtccgtcccagtaggaaaagcattggcaattcccaattacgaaaa

SEQ ID NO: 342923 - DNA, 57 bp, Artificial
  Synthetic oligonucleotide
cacaattatgaatagttaaatccgtacacacaagtcatttactgttttactgcacgg

SEQ ID NO: 342924 - DNA, 60 bp, Artificial
  Synthetic oligonucleotide
cacaattatggcttaagcataattcgcaggctaaatatgtacgggacgctgctacaatgt

SEQ ID NO: 342925 - DNA, 56 bp, Artificial
  Synthetic oligonucleotide
cacaattcaaatccactcctgcggtggactgctcgttaggtattcaagagaccctg

SEQ ID NO: 342926 - DNA, 60 bp, Artificial
  Synthetic oligonucleotide
cacaattcctcacaggaacatcgactttctttataaagcttgatttatcaccgcataaga

SEQ ID NO: 342927 - DNA, 58 bp, Artificial
  Synthetic oligonucleotide
cacaattcggtaatcacatccagtggacgcaggactgcccacgcgctagctcattgtt

SEQ ID NO: 342928 - DNA, 60 bp, Artificial
  Synthetic oligonucleotide
cacaattcgtggcaagagcaaagcttgctggaaaaatcctgtgtaaccgtgcgattgaag

SEQ ID NO: 342929 - DNA, 60 bp, Artificial
  Synthetic oligonucleotide
cacaattctaaacacaacatgataaactgttctgttacaagaccataataatctgatgtg

SEQ ID NO: 342930 - DNA, 55 bp, Artificial
  Synthetic oligonucleotide
cacaattctacctacaagcatgctaatcacactgactgaacaaacggcatctagc

SEQ ID NO: 342931 - DNA, 60 bp, Artificial
  Synthetic oligonucleotide
cacaattctgaacactgcagttcctataggatcctgcgttagtaaatgccacaccgacag

SEQ ID NO: 342932 - DNA, 56 bp, Artificial
  Synthetic oligonucleotide
cacaattgccactcattgataataattcggtgcctgcggtatcacgtaacattcat

SEQ ID NO: 342933 - DNA, 59 bp, Artificial
  Synthetic oligonucleotide
cacaattggtaatttgaggtaatgttacaaatcaccattgcaggttgttgcattataac

SEQ ID NO: 342934 - DNA, 55 bp, Artificial
  Synthetic oligonucleotide
cacaattggtggaaggggacacgagactccaaagatggtgacaagcctgggttgg

SEQ ID NO: 342935 - DNA, 55 bp, Artificial
  Synthetic oligonucleotide
cacaattgtgacacaaggtgccaaacccctcatggggctttgaacagcagccttc

SEQ ID NO: 342936 - DNA, 53 bp, Artificial
  Synthetic oligonucleotide
cacaattgttatagagcttgtcgagcatacgtagcgtgataggcgtatcactc

SEQ ID NO: 342937 - DNA, 60 bp, Artificial
  Synthetic oligonucleotide
cacaatttgtaccgaccgctgctggccactgtatcaggcgggattggctgtgctgcctgg

SEQ ID NO: 342938 - DNA, 60 bp, Artificial
  Synthetic oligonucleotide
cacacaaaagtgtgttaacgcaaagcttgagcgaccacagagcattttaattgagcacaa

SEQ ID NO: 342939 - DNA, 55 bp, Artificial
  Synthetic oligonucleotide
cacacaaagcatgttgtaacgttcccacacaacgtcttccatgagacgggcttgg

SEQ ID NO: 342940 - DNA, 58 bp, Artificial
  Synthetic oligonucleotide
cacacaaaggtggaggtggaacttggagcataatggtattttctttaggagcattata

SEQ ID NO: 342941 - DNA, 60 bp, Artificial
  Synthetic oligonucleotide
cacacaaataattatgtggtccgagtgatctggcccacatcgtcttgcctgttctactat

SEQ ID NO: 342942 - DNA, 55 bp, Artificial
  Synthetic oligonucleotide
cacacaaataattgtgtggtcccagtgatctggcccacattgttttacccgtacg

SEQ ID NO: 342943 - DNA, 60 bp, Artificial
  Synthetic oligonucleotide
cacacaaatccagacgaggagatcattcgaactaaagaagctgtgggagcaaacccgctc

SEQ ID NO: 342944 - DNA, 59 bp, Artificial
  Synthetic oligonucleotide
cacacaaatctaacagcccagcagctaaagtggtcttaccactatctataggtccctta

SEQ ID NO: 342945 - DNA, 60 bp, Artificial
  Synthetic oligonucleotide
cacacaacaacccggtgttctctgcgctttataacgccaatctgatatccctgcacagcc

SEQ ID NO: 342946 - DNA, 60 bp, Artificial
  Synthetic oligonucleotide
cacacaacaatttgagcatattgtacagctccgaagagtgttgactacagctacaataac

SEQ ID NO: 342947 - DNA, 55 bp, Artificial
  Synthetic oligonucleotide
cacacaaccgccatcaaagggttctttgcggtgcgaaaatgtgcctggttgtgcc

SEQ ID NO: 342948 - DNA, 55 bp, Artificial
  Synthetic oligonucleotide
cacacaacggtcacagcgggcacgggccgaaagtccaacaaccagaggggcccga

SEQ ID NO: 342949 - DNA, 54 bp, Artificial
  Synthetic oligonucleotide
cacacaacgtctcaacaagtcttttaaatcaatgcacagtcaagcaagcacgcg

SEQ ID NO: 342950 - DNA, 55 bp, Artificial
  Synthetic oligonucleotide
cacacaactcgatctgttcgcggtcccggtactgtaggggtaattccccacctca

SEQ ID NO: 342951 - DNA, 59 bp, Artificial
  Synthetic oligonucleotide
cacacaactctgaattcaagttgccgtgtgaggttcgaggttcaaccttcaatgtggta

SEQ ID NO: 342952 - DNA, 60 bp, Artificial
  Synthetic oligonucleotide
cacacaagaatcacctaaaaatgacagtggcataggaggcccatactgcacatacgcaga

SEQ ID NO: 342953 - DNA, 60 bp, Artificial
  Synthetic oligonucleotide
cacacaagacccaggaacgcagttggcacaagacatgcccgtgctaacccatcagattat

SEQ ID NO: 342954 - DNA, 54 bp, Artificial
  Synthetic oligonucleotide
cacacaagtgcacaatagcgttcctctgtccgaagatggttgtccttatttgta

SEQ ID NO: 342955 - DNA, 55 bp, Artificial
  Synthetic oligonucleotide
cacacaagtgggtgctagaaggattatttggtccttcttacaaggtaactcagac

SEQ ID NO: 342956 - DNA, 55 bp, Artificial
  Synthetic oligonucleotide
cacacaatacgattgctctgtcgtcatggtcgttaacccgatggttgacgctgag

SEQ ID NO: 342957 - DNA, 51 bp, Artificial
  Synthetic oligonucleotide
cacacaatattaactacaagtacgattacaattttggcggtacgctgcctt

SEQ ID NO: 342958 - DNA, 60 bp, Artificial
  Synthetic oligonucleotide
cacacaatgggatcaagctgcagtactgtattcaaattatatcgttaacagattaagagg

SEQ ID NO: 342959 - DNA, 60 bp, Artificial
  Synthetic oligonucleotide
cacacacaaagccaaacacgactgttcctaatcaggtaggctcaagtactgaatacattg

SEQ ID NO: 342960 - DNA, 58 bp, Artificial
  Synthetic oligonucleotide
cacacacaagggttaatggggtgcaactcccccgcctatctcgagcgtcatcgagacc

SEQ ID NO: 342961 - DNA, 55 bp, Artificial
  Synthetic oligonucleotide
cacacacaattgcattgacacaaccaggacatacatacgatacaatgaccttgcc

SEQ ID NO: 342962 - DNA, 60 bp, Artificial
  Synthetic oligonucleotide
cacacacacaaaagaaccctgacaggaaattctatcgctgcaaaagaagtaattgccata

SEQ ID NO: 342963 - DNA, 55 bp, Artificial
  Synthetic oligonucleotide
cacacacacccaaccgatctgatgccacgcgcgcctaaggtctgccgacacgcag

SEQ ID NO: 342964 - DNA, 60 bp, Artificial
  Synthetic oligonucleotide
cacacacatatgacactagtaatgatcgagtcaattttctgtcatcgaacggtgtaataa

SEQ ID NO: 342965 - DNA, 60 bp, Artificial
  Synthetic oligonucleotide
cacacacatgaccaggacagactcggtgtagtgcttgacaacatctaccaagggtcaacc

SEQ ID NO: 342966 - DNA, 55 bp, Artificial
  Synthetic oligonucleotide
cacacaccaccgaagcatgcagctctacccgaccatacatttctaaatccctcgg

SEQ ID NO: 342967 - DNA, 57 bp, Artificial
  Synthetic oligonucleotide
cacacaccctggtgagattggtagggatgttggcaaggaaaatcgggaacaagcaaa

SEQ ID NO: 342968 - DNA, 56 bp, Artificial
  Synthetic oligonucleotide
cacacaccgaaccatgatgtacaacttccctacaaaggcgggacagtgtggagggg

SEQ ID NO: 342969 - DNA, 55 bp, Artificial
  Synthetic oligonucleotide
cacacaccgcaacaccgatctgataggaactaaactctccgttatgtcgcatgtt

SEQ ID NO: 342970 - DNA, 55 bp, Artificial
  Synthetic oligonucleotide
cacacacgacagaacagccttccgagggctcatttctactccattaggtagcccc

SEQ ID NO: 342971 - DNA, 55 bp, Artificial
  Synthetic oligonucleotide
cacacacgctgttacaaaacgatgtctagggtcctctagagcattaataatcgct

SEQ ID NO: 342972 - DNA, 60 bp, Artificial
  Synthetic oligonucleotide
cacacacgctgttatattgtcaaagttatcggcaccattgtgacctctatagtaccaact

SEQ ID NO: 342973 - DNA, 57 bp, Artificial
  Synthetic oligonucleotide
cacacacggttaatccgactccaaggacgattatacccgtgtgggttgcacaactga

SEQ ID NO: 342974 - DNA, 57 bp, Artificial
  Synthetic oligonucleotide
cacacacgtgcgaataagctaattacgtctcctgtgtcttataacgaacttgtcgtt

SEQ ID NO: 342975 - DNA, 60 bp, Artificial
  Synthetic oligonucleotide
cacacacgttagttacgcctgctggcaagaggaagagtctcccacgactcgacgacgcca

SEQ ID NO: 342976 - DNA, 53 bp, Artificial
  Synthetic oligonucleotide
cacacactaaactgctcagatagagtctcttccaccatgtggactagtatgta

SEQ ID NO: 342977 - DNA, 55 bp, Artificial
  Synthetic oligonucleotide
cacacactcactgtagttaccggaaatggactaactgtagataacaatgccctcc

SEQ ID NO: 342978 - DNA, 55 bp, Artificial
  Synthetic oligonucleotide
cacacacttaagtataactcatacccaggtatttggtatatccactcattcgtct

SEQ ID NO: 342979 - DNA, 55 bp, Artificial
  Synthetic oligonucleotide
cacacagaaacttgctgagggcaactacaacttgcctcctgactctctcgctgtc

SEQ ID NO: 342980 - DNA, 55 bp, Artificial
  Synthetic oligonucleotide
cacacagacagctaccacatctgctttgctcgacactgtccgaggtaacaacacc

SEQ ID NO: 342981 - DNA, 55 bp, Artificial
  Synthetic oligonucleotide
cacacagagtgaagaaggatttgcctgatagagtgaatccggttaacactcaggg

SEQ ID NO: 342982 - DNA, 57 bp, Artificial
  Synthetic oligonucleotide
cacacagagtgcttcaatcgatgacttacggaaaatattgcccggggaaccacattt

SEQ ID NO: 342983 - DNA, 60 bp, Artificial
  Synthetic oligonucleotide
cacacagattggaggaataaggatggtggacatccttagacagaatccaacggaggaaca

SEQ ID NO: 342984 - DNA, 51 bp, Artificial
  Synthetic oligonucleotide
cacacagcgcttagtatgggcttgtgttggtattgaaatagggcgaggaca

SEQ ID NO: 342985 - DNA, 55 bp, Artificial
  Synthetic oligonucleotide
cacacaggacatagcaaggtaggatccctacaatatttggcgttgaaagcattag

SEQ ID NO: 342986 - DNA, 59 bp, Artificial
  Synthetic oligonucleotide
cacacaggacttcaagtgctgtgttagtagcctagaggcgtttctgttaaaccagctcc

SEQ ID NO: 342987 - DNA, 60 bp, Artificial
  Synthetic oligonucleotide
cacacaggtgctaatgcaactgccagcagagacacttggtacaagggaaacacatacaat

SEQ ID NO: 342988 - DNA, 60 bp, Artificial
  Synthetic oligonucleotide
cacacaggttttaatgcacactcactcccaaggtgttggcttgtgaaaaatggcagctat

SEQ ID NO: 342989 - DNA, 55 bp, Artificial
  Synthetic oligonucleotide
cacacagtacaatagattggtgcatgcaaaccatcaccacagatacgaaaacgca

SEQ ID NO: 342990 - DNA, 60 bp, Artificial
  Synthetic oligonucleotide
cacacagtcagctttggtgaaaacagcgtgataggttatgtggaattgccccctatgcca

SEQ ID NO: 342991 - DNA, 56 bp, Artificial
  Synthetic oligonucleotide
cacacagtttgaggcaatagagcatgagttctcaaatctcgaaaggagaatagaca

SEQ ID NO: 342992 - DNA, 55 bp, Artificial
  Synthetic oligonucleotide
cacacataacactaagtttcagtaacaagaaaacagtgagaatagatagcacgcg

SEQ ID NO: 342993 - DNA, 60 bp, Artificial
  Synthetic oligonucleotide
cacacataccaataatgggtctagaggctgtgagagctcaatgggtgcaccggctaattt

SEQ ID NO: 342994 - DNA, 60 bp, Artificial
  Synthetic oligonucleotide
cacacatacccccaactatatgtgaaactagtgaggccatactggcagtaaacaccacgc

SEQ ID NO: 342995 - DNA, 60 bp, Artificial
  Synthetic oligonucleotide
cacacatccacattttctcattcactggggaggaaatggccacaaaggccgactacactc

SEQ ID NO: 342996 - DNA, 57 bp, Artificial
  Synthetic oligonucleotide
cacacatccgagatgttgtgaagactgcaggactccgcgtttttggtcggaaaaccg

SEQ ID NO: 342997 - DNA, 60 bp, Artificial
  Synthetic oligonucleotide
cacacatctagacaactatcccttaatcattacctattacctccagactccttcgctgtc

SEQ ID NO: 342998 - DNA, 55 bp, Artificial
  Synthetic oligonucleotide
cacacatctgatcaatcgagtgtagccatcctgttacagcactcacacagattcc

SEQ ID NO: 342999 - DNA, 60 bp, Artificial
  Synthetic oligonucleotide
cacacatgcctggatctcttaggacagcttttgtcactccaccatctagtacagcctcta

SEQ ID NO: 343000 - DNA, 55 bp, Artificial
  Synthetic oligonucleotide
cacacatgctagactactaccttggcttttacagccccatattcctctcagatgg

SEQ ID NO: 343001 - DNA, 60 bp, Artificial
  Synthetic oligonucleotide
cacacatgctgctgtccaatcatatccgctcctcaatgcttaattattaaatggtcccct

SEQ ID NO: 343002 - DNA, 59 bp, Artificial
  Synthetic oligonucleotide
cacacatggcatggactaagaacggcaatactaaatagaacaaccttaccaaatatgct

SEQ ID NO: 343003 - DNA, 60 bp, Artificial
  Synthetic oligonucleotide
cacacatgggactggcgacgggggctttttggtgcagatgctatccagagagtgtcacaa

SEQ ID NO: 343004 - DNA, 60 bp, Artificial
  Synthetic oligonucleotide
cacacatgtcaccactgcgctaatgctcaccagtctgaccgccgggattggaggaccgtt

SEQ ID NO: 343005 - DNA, 58 bp, Artificial
  Synthetic oligonucleotide
cacacattacgtttcacagattggtggcttcccaaatcaaacagaagacggaggacta

SEQ ID NO: 343006 - DNA, 52 bp, Artificial
  Synthetic oligonucleotide
cacacattcacctccgcgcaagcgactgtgcaactcggtggcgtattcgcac

SEQ ID NO: 343007 - DNA, 60 bp, Artificial
  Synthetic oligonucleotide
cacacattcatattttctcattcactggagaagaaatggccacaaaagcggattacaccc

SEQ ID NO: 343008 - DNA, 55 bp, Artificial
  Synthetic oligonucleotide
cacacattcgtccgtgtacagaagccagcacggggtcttccgcgcaatgcgttta

SEQ ID NO: 343009 - DNA, 55 bp, Artificial
  Synthetic oligonucleotide
cacacattgtacttcgtgtgccctagcaagatcacacagattcaattggaacgac

SEQ ID NO: 343010 - DNA, 51 bp, Artificial
  Synthetic oligonucleotide
cacacatttggcattccccgccctctaggataaagtgaacgttttgtaatg

SEQ ID NO: 343011 - DNA, 58 bp, Artificial
  Synthetic oligonucleotide
cacaccaaccgactttcaccaaacaattgcctggttgcattgactcgaagcaaagttg

SEQ ID NO: 343012 - DNA, 54 bp, Artificial
  Synthetic oligonucleotide
cacaccaaccgtggatgacgcctcgactggcctcataccaacctatgcctccgg

SEQ ID NO: 343013 - DNA, 60 bp, Artificial
  Synthetic oligonucleotide
cacaccaacgagactgtcacgtacaaagccgcattcgactaccacttcagtgctaacgct

SEQ ID NO: 343014 - DNA, 58 bp, Artificial
  Synthetic oligonucleotide
cacaccaagaataaaatgatcgatatacaccacaagttgaaggtcaatcccgaagatt

SEQ ID NO: 343015 - DNA, 60 bp, Artificial
  Synthetic oligonucleotide
cacaccaagacatatcgacacaaacatccagcctctccaaatctcaatcgctgatgattg

SEQ ID NO: 343016 - DNA, 60 bp, Artificial
  Synthetic oligonucleotide
cacaccaagaggccagctcaaagcttctttaagatttggctctgaccatttcaattgacg

SEQ ID NO: 343017 - DNA, 58 bp, Artificial
  Synthetic oligonucleotide
cacaccaatactgttatgttctatgtggttagggataggcgcccctatggtactccga

SEQ ID NO: 343018 - DNA, 53 bp, Artificial
  Synthetic oligonucleotide
cacaccaatatcatcacgtattggttgatccgtgacagaaggcccaataagga

SEQ ID NO: 343019 - DNA, 57 bp, Artificial
  Synthetic oligonucleotide
cacaccaatgactacgtttacggttgataaattaaggcgactgtgcgcagagaaaaa

SEQ ID NO: 343020 - DNA, 60 bp, Artificial
  Synthetic oligonucleotide
cacaccaatgcattggtgtatgccgcagcataccttgccatgacaccagaccagaggtct

SEQ ID NO: 343021 - DNA, 55 bp, Artificial
  Synthetic oligonucleotide
cacaccaatgtgcctttagatcaagacggatgtccttatttgtacgctgtcgtac

SEQ ID NO: 343022 - DNA, 52 bp, Artificial
  Synthetic oligonucleotide
cacaccacagtgccttggaatggatcaataggacaaccagattggaataaca

SEQ ID NO: 343023 - DNA, 55 bp, Artificial
  Synthetic oligonucleotide
cacaccacattgattcctcaggggcttacctgacatcttgggccaagacgctgtt

SEQ ID NO: 343024 - DNA, 60 bp, Artificial
  Synthetic oligonucleotide
cacaccacctggtatcgcagaacccaccacaagaaaggatgcaatgctaggcactcatgt

SEQ ID NO: 343025 - DNA, 59 bp, Artificial
  Synthetic oligonucleotide
cacaccacgaattactactcagcctttgatggagagttcgagagcaaataccttcgaac

SEQ ID NO: 343026 - DNA, 55 bp, Artificial
  Synthetic oligonucleotide
cacaccacgcaagtacacaaggccagtagtcaatgttttccaagtcatacagtgc

SEQ ID NO: 343027 - DNA, 54 bp, Artificial
  Synthetic oligonucleotide
cacaccagacttgagtcagaatatagaggactctatcgcttctgtaagggtgga

SEQ ID NO: 343028 - DNA, 60 bp, Artificial
  Synthetic oligonucleotide
cacaccagatgcatctggacatgatcaaattgaaggcaggattaatgacacctctcttat

SEQ ID NO: 343029 - DNA, 60 bp, Artificial
  Synthetic oligonucleotide
cacaccagcatgtgttgatcaccagctattgtgggacaccaatttcgtccacagacatca

SEQ ID NO: 343030 - DNA, 55 bp, Artificial
  Synthetic oligonucleotide
cacaccagccccgcagccgcagtcggtcgtgcactaccacttccacctcagtcaa

SEQ ID NO: 343031 - DNA, 55 bp, Artificial
  Synthetic oligonucleotide
cacaccagtgtaccatggcgctgcagagttgattgttttccaacgaggattgcca

SEQ ID NO: 343032 - DNA, 55 bp, Artificial
  Synthetic oligonucleotide
cacaccagttacactaagcaaagaccaactaagtggaatcaacaatattgcattc

SEQ ID NO: 343033 - DNA, 55 bp, Artificial
  Synthetic oligonucleotide
cacaccataaattacaatctctaacaaataacagtgccacatgtgggcggtggtg

SEQ ID NO: 343034 - DNA, 60 bp, Artificial
  Synthetic oligonucleotide
cacaccatgagcgtgacatgatactagcgagggttgtctaaggtgacgaccctgcatcaa

SEQ ID NO: 343035 - DNA, 55 bp, Artificial
  Synthetic oligonucleotide
cacaccattataagcccacaaagaaccttccacatgttgtaccaaggtatcatag

SEQ ID NO: 343036 - DNA, 54 bp, Artificial
  Synthetic oligonucleotide
cacacccagcttaatcttgcagggcgtacagagacctggaatgatttcgctacg

SEQ ID NO: 343037 - DNA, 57 bp, Artificial
  Synthetic oligonucleotide
cacacccagtgactcaattttaccacggaacggttcaggtgtacgcctcagactcca

SEQ ID NO: 343038 - DNA, 60 bp, Artificial
  Synthetic oligonucleotide
cacaccccaaggaggattgcttgcatggtgcaggtatgttgagttacactgtgaggtatc

SEQ ID NO: 343039 - DNA, 57 bp, Artificial
  Synthetic oligonucleotide
cacaccccatgcgagccgcggctctgtgcggcgagcggtccccggatgttttacccc

SEQ ID NO: 343040 - DNA, 52 bp, Artificial
  Synthetic oligonucleotide
cacaccccccgatgtactccgtgcttacgggttttatgtttgcccaggaccc

SEQ ID NO: 343041 - DNA, 54 bp, Artificial
  Synthetic oligonucleotide
cacaccccgcaaggggtgtgacatcgaggctccaatttggagtttagagctcga

SEQ ID NO: 343042 - DNA, 57 bp, Artificial
  Synthetic oligonucleotide
cacacccctcaggcgtccagtacgagtggataagaccgttcgacttcaaagcaccaa

SEQ ID NO: 343043 - DNA, 56 bp, Artificial
  Synthetic oligonucleotide
cacaccccttcgtcatccttgggtggttgcggctagcgttgcagtaatccggtagg

SEQ ID NO: 343044 - DNA, 55 bp, Artificial
  Synthetic oligonucleotide
cacacccgatccaactgtagtacatcatttgaaaaggctgattcagagacacacc

SEQ ID NO: 343045 - DNA, 60 bp, Artificial
  Synthetic oligonucleotide
cacacccgctccattagcagccccatccgccccccatagtactactggctcagatcatgc

SEQ ID NO: 343046 - DNA, 59 bp, Artificial
  Synthetic oligonucleotide
cacaccctcagtcatgtttgccacttatgacccactcacgtcaggcacgggggttgccc

SEQ ID NO: 343047 - DNA, 54 bp, Artificial
  Synthetic oligonucleotide
cacaccctgcgtagtacccgagcccaattgacccgtgtccaacattcccgcccc

SEQ ID NO: 343048 - DNA, 56 bp, Artificial
  Synthetic oligonucleotide
cacacccttgtcgaagtacgtaacggggcagaatatagtttaccatgataggtgtg

SEQ ID NO: 343049 - DNA, 59 bp, Artificial
  Synthetic oligonucleotide
cacaccctttcaaatccaggtgaccgataacacaggaactaattggcatctcaatttga

SEQ ID NO: 343050 - DNA, 54 bp, Artificial
  Synthetic oligonucleotide
cacaccctttcagcaagggggattaatttgtgccatggttcccggtgaccaaag

SEQ ID NO: 343051 - DNA, 58 bp, Artificial
  Synthetic oligonucleotide
cacaccgattggctaaactgcgtgtgggaagactacaacagggacctactagtcagta

SEQ ID NO: 343052 - DNA, 57 bp, Artificial
  Synthetic oligonucleotide
cacaccgctaacaatggggctatggccgacttcttcctccgtgagtacgtccctcaa

SEQ ID NO: 343053 - DNA, 60 bp, Artificial
  Synthetic oligonucleotide
cacaccggagcgtgtcctgatctaatcataccgatacgagctgcagcttctctagaaagg

SEQ ID NO: 343054 - DNA, 54 bp, Artificial
  Synthetic oligonucleotide
cacaccggaggtgagctccgaggtcgaccaacctctgggatttactacggcccc

SEQ ID NO: 343055 - DNA, 55 bp, Artificial
  Synthetic oligonucleotide
cacaccgggtagcaatcaattcttaacctccgatgattaccaatctcctactgcc

SEQ ID NO: 343056 - DNA, 55 bp, Artificial
  Synthetic oligonucleotide
cacaccgttcgagtttgaagtgccgttgttgcgcaacgaatcgttggtgtgggac

SEQ ID NO: 343057 - DNA, 58 bp, Artificial
  Synthetic oligonucleotide
cacacctatagtcacgccccaggctatatatagggacctaccctggcgcaactgttac

SEQ ID NO: 343058 - DNA, 60 bp, Artificial
  Synthetic oligonucleotide
cacacctcaaccttgtacaactcattaacagatatgtcacgagcgcagaccgactccgct

SEQ ID NO: 343059 - DNA, 52 bp, Artificial
  Synthetic oligonucleotide
cacacctgaaagggctgcccactgcattcacgctgaatgggacactggacta

SEQ ID NO: 343060 - DNA, 60 bp, Artificial
  Synthetic oligonucleotide
cacacctgcatatgagcgtgcgctgaatcaggccgctactgcagtgcgccctcttttagc

SEQ ID NO: 343061 - DNA, 60 bp, Artificial
  Synthetic oligonucleotide
cacaccttgctgagatagatgacttgattgatcttgcagcttcaggagacccaacaccac

SEQ ID NO: 343062 - DNA, 59 bp, Artificial
  Synthetic oligonucleotide
cacacgaaaaggtagttcctacattgatgagttaggtctcatccgtgtgccatgtttct

SEQ ID NO: 343063 - DNA, 56 bp, Artificial
  Synthetic oligonucleotide
cacacgaaccggggggtcttaaaggtatgtcagactctactacacctgataatcga

SEQ ID NO: 343064 - DNA, 60 bp, Artificial
  Synthetic oligonucleotide
cacacgaatactgtgatgttcaagttatgtcgtgacagacgaccatttggtacacccatg

SEQ ID NO: 343065 - DNA, 60 bp, Artificial
  Synthetic oligonucleotide
cacacgaatagtgtgatgtttttcttggtgcgtgatcgtcgacctacgggtgcgcctcta

SEQ ID NO: 343066 - DNA, 53 bp, Artificial
  Synthetic oligonucleotide
cacacgaatagtgttatgttttttattgttagggatagacgtccgtttggtac

SEQ ID NO: 343067 - DNA, 60 bp, Artificial
  Synthetic oligonucleotide
cacacgagcgaactcgctgcttggtgggggttttgacgaggtttgctatcgattgatgat

SEQ ID NO: 343068 - DNA, 55 bp, Artificial
  Synthetic oligonucleotide
cacacgagcgagactcttacgtacaagatatccctcgactaccacttcgtagccg

SEQ ID NO: 343069 - DNA, 53 bp, Artificial
  Synthetic oligonucleotide
cacacgaggaaccttctacacaacctcgaagtagcatagaatcaaaaactgat

SEQ ID NO: 343070 - DNA, 60 bp, Artificial
  Synthetic oligonucleotide
cacacgatcgaaagcatgcgtctgattttcgaaaccatgaaagaactactcccgtcagaa

SEQ ID NO: 343071 - DNA, 55 bp, Artificial
  Synthetic oligonucleotide
cacacgatcgacgtcgactgcaggtgcccatgaaaacgcagcacatcgccgccga

SEQ ID NO: 343072 - DNA, 55 bp, Artificial
  Synthetic oligonucleotide
cacacgcaacaaggcagacagcaatcggacgttgctagagcacggatattccata

SEQ ID NO: 343073 - DNA, 52 bp, Artificial
  Synthetic oligonucleotide
cacacgcaacgatcttgaattatgtcccattaaacgtgaaccatctaccaaa

SEQ ID NO: 343074 - DNA, 53 bp, Artificial
  Synthetic oligonucleotide
cacacgccggtgtcaaatactggccgaacattgcgatgtacccactgcaccga

SEQ ID NO: 343075 - DNA, 57 bp, Artificial
  Synthetic oligonucleotide
cacacgcgtatgccccagtagttgtcctagcagtttacataccaggtttaatattcg

SEQ ID NO: 343076 - DNA, 55 bp, Artificial
  Synthetic oligonucleotide
cacacgctaacacttgctcagcctgctcatacctatgagacagtaactctccctg

SEQ ID NO: 343077 - DNA, 60 bp, Artificial
  Synthetic oligonucleotide
cacacgctgctgctgaaccttcacttcaactaactgagattagttaagttgttatggatc

SEQ ID NO: 343078 - DNA, 55 bp, Artificial
  Synthetic oligonucleotide
cacacggaagcttccccgaaaatcatctgattggctcgctagcaccacggggtgg

SEQ ID NO: 343079 - DNA, 57 bp, Artificial
  Synthetic oligonucleotide
cacacggaaggtatactccgggtgtcattcctccagtgaacgtagatagaccaattc

SEQ ID NO: 343080 - DNA, 60 bp, Artificial
  Synthetic oligonucleotide
cacacggagaatgcgttattattgtacatggcatgtactcatgcctctaatcctgtgtat

SEQ ID NO: 343081 - DNA, 60 bp, Artificial
  Synthetic oligonucleotide
cacacggagaatgctctgttactgtatatggcatgtacccatgcctctaaccctgtgtat

SEQ ID NO: 343082 - DNA, 60 bp, Artificial
  Synthetic oligonucleotide
cacacggcacagaaagcatcttctgatcttatgtccagatgccacttacaccacctccta

SEQ ID NO: 343083 - DNA, 55 bp, Artificial
  Synthetic oligonucleotide
cacacggctggcactaccttacacggcaccacaccgcgtcttagcgaccgtctac

SEQ ID NO: 343084 - DNA, 55 bp, Artificial
  Synthetic oligonucleotide
cacacgggagaaataccagcttacccttttcccacaccagtttatcagtcctaga

SEQ ID NO: 343085 - DNA, 55 bp, Artificial
  Synthetic oligonucleotide
cacacggggcaaccgcgtgaatacatgcgctcaatgtttatggattacgtggcgt

SEQ ID NO: 343086 - DNA, 58 bp, Artificial
  Synthetic oligonucleotide
cacacgggggactatgttgccgcaaacgagacacacagtgggaggaagacggcatcct

SEQ ID NO: 343087 - DNA, 53 bp, Artificial
  Synthetic oligonucleotide
cacacgggttaagttgcactacgggtgggattattaatcagggtttattgtta

SEQ ID NO: 343088 - DNA, 60 bp, Artificial
  Synthetic oligonucleotide
cacacggtatcctctgagcagttgaatgggagaatgattactgtccaatcgcaaggccta

SEQ ID NO: 343089 - DNA, 50 bp, Artificial
  Synthetic oligonucleotide
cacacggtgtcgatagaatttggctgagtgtgcgcgaatacaatagcatg

SEQ ID NO: 343090 - DNA, 60 bp, Artificial
  Synthetic oligonucleotide
cacacgtactgctagctgcaggcttctcggtaccaggtgactgtggaggtatcctgaggt

SEQ ID NO: 343091 - DNA, 55 bp, Artificial
  Synthetic oligonucleotide
cacacgtattgcctcgagcgaggccgcacgaatactaaagccaacacttccgtga

SEQ ID NO: 343092 - DNA, 60 bp, Artificial
  Synthetic oligonucleotide
cacacgtcgttggcaataacacttttgtgaatgtgtgctatgagggcttaatgtacgagg

SEQ ID NO: 343093 - DNA, 60 bp, Artificial
  Synthetic oligonucleotide
cacacgtgaatcacacaacataacagtgtaggaacataatgtgccattcgtagtctgaga

SEQ ID NO: 343094 - DNA, 53 bp, Artificial
  Synthetic oligonucleotide
cacacgtggtacgtacgataacgtacagtgtttttccctccacttaaatcgaa

SEQ ID NO: 343095 - DNA, 55 bp, Artificial
  Synthetic oligonucleotide
cacacgtgtcatctatgtgtgcagggttaccgtccagcggccaggcgaccggttg

SEQ ID NO: 343096 - DNA, 55 bp, Artificial
  Synthetic oligonucleotide
cacacgtgtccctacagaattctactaaggttgttaatacagctgtgccacttgc

SEQ ID NO: 343097 - DNA, 60 bp, Artificial
  Synthetic oligonucleotide
cacacgtgtttgcgatctgtattaccagcgataacaagcctttaatagccgctaggagaa

SEQ ID NO: 343098 - DNA, 60 bp, Artificial
  Synthetic oligonucleotide
cacactaaatgaaacataccaaatgcgaatgtacaaagatgattctacaccagattactg

SEQ ID NO: 343099 - DNA, 56 bp, Artificial
  Synthetic oligonucleotide
cacactaacaccgttttgttctggatagttagagatcgacgtcctactggaacgcc

SEQ ID NO: 343100 - DNA, 51 bp, Artificial
  Synthetic oligonucleotide
cacactaacctgtctctcatcgttcgcggcctctgtcaattgatcgctaat

SEQ ID NO: 343101 - DNA, 52 bp, Artificial
  Synthetic oligonucleotide
cacactaacgaggacctagacctggcccgctacaggggctgcaggtggactt

SEQ ID NO: 343102 - DNA, 57 bp, Artificial
  Synthetic oligonucleotide
cacactaaggaatccgtcaagccgaaccaggttcagtacgaacgccacaatgtggag

SEQ ID NO: 343103 - DNA, 56 bp, Artificial
  Synthetic oligonucleotide
cacactaatacggtcatgttctacctagtccgtgatagaagaccttttggtactcc

SEQ ID NO: 343104 - DNA, 55 bp, Artificial
  Synthetic oligonucleotide
cacactacaaattcttggttattcaaaacaccacttggccaaaccactgttccta

SEQ ID NO: 343105 - DNA, 60 bp, Artificial
  Synthetic oligonucleotide
cacactaccccattggcaagtgtagattagagaatgagactggttacagactagtagacg

SEQ ID NO: 343106 - DNA, 55 bp, Artificial
  Synthetic oligonucleotide
cacactaccggtgcgtggcgtcccacgctatttgttcgcgagaccggactaaggg

SEQ ID NO: 343107 - DNA, 56 bp, Artificial
  Synthetic oligonucleotide
cacactactgaaggaaaacacctacatgcctgggtaaaattcgaacactctattaa

SEQ ID NO: 343108 - DNA, 54 bp, Artificial
  Synthetic oligonucleotide
cacactactgtcaaagagccttccctatttaacccaaacattaggtgcgttaac

SEQ ID NO: 343109 - DNA, 55 bp, Artificial
  Synthetic oligonucleotide
cacactagaatatcatggaggactgtacagctcaatatggctatccgctggtaga

SEQ ID NO: 343110 - DNA, 59 bp, Artificial
  Synthetic oligonucleotide
cacactagacaacagacattcgaacgacacaatacatgatagaaccccttatcgaaccc

SEQ ID NO: 343111 - DNA, 60 bp, Artificial
  Synthetic oligonucleotide
cacactagcaattcctgtaatagatttattattaccatgcaacttttgcaatagattctt

SEQ ID NO: 343112 - DNA, 60 bp, Artificial
  Synthetic oligonucleotide
cacactagtcagtatatatgcagtcctgttctcacagacaatccccgaccgaatgaccca

SEQ ID NO: 343113 - DNA, 60 bp, Artificial
  Synthetic oligonucleotide
cacactatagatgtgactgactcagagatgaacaaactctttgaaagagtaaggcgtcaa

SEQ ID NO: 343114 - DNA, 59 bp, Artificial
  Synthetic oligonucleotide
cacactataggcaatcttagggtttgccctagtgacaaactcagattgtccctgtatag

SEQ ID NO: 343115 - DNA, 57 bp, Artificial
  Synthetic oligonucleotide
cacactatattatgtaaataagctagaggggaaagcactctatataaagggtgaacc

SEQ ID NO: 343116 - DNA, 60 bp, Artificial
  Synthetic oligonucleotide
cacactatcaaggaatggtgatttactctatagtccagttgcgaatgggcaagtcgggat

SEQ ID NO: 343117 - DNA, 51 bp, Artificial
  Synthetic oligonucleotide
cacactatccttgtcctttgctctggtatgcggcgtttttttttagcctct

SEQ ID NO: 343118 - DNA, 58 bp, Artificial
  Synthetic oligonucleotide
cacactatctattctcataaaccatttacatgagaagggtctgcgaattctagtgtac

SEQ ID NO: 343119 - DNA, 60 bp, Artificial
  Synthetic oligonucleotide
cacactcactcagaagcgcgactactaatcgctgactataccgttcgaatcagacatact

SEQ ID NO: 343120 - DNA, 60 bp, Artificial
  Synthetic oligonucleotide
cacactcagaaagtacctgcgctcacagcaaatgagactggagccacactaccaacaaca

SEQ ID NO: 343121 - DNA, 55 bp, Artificial
  Synthetic oligonucleotide
cacactcatgagtattgtggcaagtctgcacctcagcatcagaggaaacacccag

SEQ ID NO: 343122 - DNA, 55 bp, Artificial
  Synthetic oligonucleotide
cacactcatggtagttctcgcaatgtactatgcactgtccaagcttggaatcgat

SEQ ID NO: 343123 - DNA, 55 bp, Artificial
  Synthetic oligonucleotide
cacactccaatcagatcatactgtacaagacattcacagctcacactgctagcac

SEQ ID NO: 343124 - DNA, 55 bp, Artificial
  Synthetic oligonucleotide
cacactccacgatttgtcatgcaaatttctccctctctatgctagtgaagcaaaa

SEQ ID NO: 343125 - DNA, 59 bp, Artificial
  Synthetic oligonucleotide
cacactccagtgagtagcttgtcgtaatgcgaaagtctgtggcggaaccgactactttg

SEQ ID NO: 343126 - DNA, 60 bp, Artificial
  Synthetic oligonucleotide
cacactccctcctactatgtccactgacatagaactgaccgatctctcagctaggcctgg

SEQ ID NO: 343127 - DNA, 55 bp, Artificial
  Synthetic oligonucleotide
cacactcctcatttccactcgcagagcgagtagaaacgtctcatcacttgcgttt

SEQ ID NO: 343128 - DNA, 55 bp, Artificial
  Synthetic oligonucleotide
cacactcctgactcctccggatttaaggccagccacggcatggagcatatatgcc

SEQ ID NO: 343129 - DNA, 59 bp, Artificial
  Synthetic oligonucleotide
cacactcctggatccctaagagaaaccgctccattctcaacacaagccagaggggaatc

SEQ ID NO: 343130 - DNA, 60 bp, Artificial
  Synthetic oligonucleotide
cacactcctggattcccaaaagaaatcgatccatcttgaacacaagccagagaggaatac

SEQ ID NO: 343131 - DNA, 60 bp, Artificial
  Synthetic oligonucleotide
cacactcgaattggtcgttcgtgacgcgtccggaaacattgtcgactcttgctacgctga

SEQ ID NO: 343132 - DNA, 55 bp, Artificial
  Synthetic oligonucleotide
cacactcgaattttctccgaatggaaagttcgcaccaccgatagtggatattgcg

SEQ ID NO: 343133 - DNA, 55 bp, Artificial
  Synthetic oligonucleotide
cacactcgccatattatgcggacttcgcgatatacgattgcgtgatccacttcta

SEQ ID NO: 343134 - DNA, 60 bp, Artificial
  Synthetic oligonucleotide
cacactctagtacgtctaagatagtttatatagccgttgggacaaatcctgtcgcagtca

SEQ ID NO: 343135 - DNA, 59 bp, Artificial
  Synthetic oligonucleotide
cacactctcaggtcagagacctcgacctacaatttgactgtgggggacacagggtcagg

SEQ ID NO: 343136 - DNA, 52 bp, Artificial
  Synthetic oligonucleotide
cacactctgcactctttgctcttccgcgagaatgctaagtatggaatccaca

SEQ ID NO: 343137 - DNA, 55 bp, Artificial
  Synthetic oligonucleotide
cacactcttctgggcatgggtccaccgcagtaaaggctaggtaaactagccacag

SEQ ID NO: 343138 - DNA, 57 bp, Artificial
  Synthetic oligonucleotide
cacactcttggatccccaagagaaaccggtccatactgaacacgagccaaagaggaa

SEQ ID NO: 343139 - DNA, 58 bp, Artificial
  Synthetic oligonucleotide
cacactcttgttaacgggctgccgcttccagaacattacagaaaacactaccacgcaa

SEQ ID NO: 343140 - DNA, 55 bp, Artificial
  Synthetic oligonucleotide
cacactgaacgggagaggaccgtgtgtgccatacttaggatcggccacatctgag

SEQ ID NO: 343141 - DNA, 53 bp, Artificial
  Synthetic oligonucleotide
cacactgaagaagtaccatgcatggtggaggaggaatatgatgttgagacgcc

SEQ ID NO: 343142 - DNA, 55 bp, Artificial
  Synthetic oligonucleotide
cacactgaatagatcacaaccagctcatgataacttgatgggtacaatgtggctg

SEQ ID NO: 343143 - DNA, 55 bp, Artificial
  Synthetic oligonucleotide
cacactgacgactatgaggagtgtacacaccaacccgcgtcactcggcgccggtg

SEQ ID NO: 343144 - DNA, 59 bp, Artificial
  Synthetic oligonucleotide
cacactgactgatgtcagaccaactgacccttctgtgtttgaaccagggggggaagaca

SEQ ID NO: 343145 - DNA, 60 bp, Artificial
  Synthetic oligonucleotide
cacactgagttccagactgtgtccttctcaatggtgggtctcttttccaacaatccacat

SEQ ID NO: 343146 - DNA, 57 bp, Artificial
  Synthetic oligonucleotide
cacactgcaatttttcggacgttacagtgtttgttacacattgttttaatgcaactc

SEQ ID NO: 343147 - DNA, 55 bp, Artificial
  Synthetic oligonucleotide
cacactgcatctaacccgcttcattatatccacaaataagctctgtgatgcccga

SEQ ID NO: 343148 - DNA, 60 bp, Artificial
  Synthetic oligonucleotide
cacactgccctgcgaaggactcctgtgaggttagcagctgcctattctgtgtgcacggac

SEQ ID NO: 343149 - DNA, 55 bp, Artificial
  Synthetic oligonucleotide
cacactgcggcctaaagtcaccggccccatgattgacctgcccatcctccgacca

SEQ ID NO: 343150 - DNA, 60 bp, Artificial
  Synthetic oligonucleotide
cacactgctctcaggcaagctattttgtgctggggtgagttaatgactttggcttcctgg

SEQ ID NO: 343151 - DNA, 60 bp, Artificial
  Synthetic oligonucleotide
cacactgctctcagtgcctttgttgttgtgttcgtatttagctctgtcgcaataatttgt

SEQ ID NO: 343152 - DNA, 55 bp, Artificial
  Synthetic oligonucleotide
cacactggagaatcgagacaacctttccaagtcacgatccacatgatggcactga

SEQ ID NO: 343153 - DNA, 50 bp, Artificial
  Synthetic oligonucleotide
cacactggattgtgaaccaaggagtggactgaacactgaagcgttctatg

SEQ ID NO: 343154 - DNA, 55 bp, Artificial
  Synthetic oligonucleotide
cacactggcaacaaagaacacgccatggttggacaccgtgaaaaccaccaaatac

SEQ ID NO: 343155 - DNA, 60 bp, Artificial
  Synthetic oligonucleotide
cacactggggtgactttactaataaatgtagacagtgcacatgcggtcagtttgaagatg

SEQ ID NO: 343156 - DNA, 55 bp, Artificial
  Synthetic oligonucleotide
cacactggtatcccggtacctttgtgcgcctgttttatataccctcccctcagta

SEQ ID NO: 343157 - DNA, 55 bp, Artificial
  Synthetic oligonucleotide
cacactggttttaacgtccattcattgccaaggtgttggcttacaaagaatggta

SEQ ID NO: 343158 - DNA, 52 bp, Artificial
  Synthetic oligonucleotide
cacactgtcaaccaaaactaccccaccattaacttgaacaggtttaggttta

SEQ ID NO: 343159 - DNA, 55 bp, Artificial
  Synthetic oligonucleotide
cacactgtgaactcacggaatccgcatttcaggcacactatagagtctgccaggc

SEQ ID NO: 343160 - DNA, 59 bp, Artificial
  Synthetic oligonucleotide
cacactgtgaggggacccctgtcagttaattcggccattacaagtgacctgccgcttgc

SEQ ID NO: 343161 - DNA, 55 bp, Artificial
  Synthetic oligonucleotide
cacactgtgctagtttcagggtacgggtgcccctccgctttgcgggggtcctcta

SEQ ID NO: 343162 - DNA, 59 bp, Artificial
  Synthetic oligonucleotide
cacactgttgtgtgacataggggaatcatcaccaaatcccacggtagaagcgggacgaa

SEQ ID NO: 343163 - DNA, 55 bp, Artificial
  Synthetic oligonucleotide
cacactgtttgaagacatgcgtcttctagggagatatgagatccccaacaactgc

SEQ ID NO: 343164 - DNA, 58 bp, Artificial
  Synthetic oligonucleotide
cacacttaaaatcgccccgcagaccttgacacatgcgggtcgtcgtgtaacactacga

SEQ ID NO: 343165 - DNA, 55 bp, Artificial
  Synthetic oligonucleotide
cacacttaagagagagggcaacacgcaagtgcataagcatgaggaggcactgcgt

SEQ ID NO: 343166 - DNA, 60 bp, Artificial
  Synthetic oligonucleotide
cacacttaagttgcatatagcctctttatgtgcgggactagctgattctcttgtgtatac

SEQ ID NO: 343167 - DNA, 60 bp, Artificial
  Synthetic oligonucleotide
cacacttagtattatgcatctcttaattaacacactttaataatatgcatctctgaatca

SEQ ID NO: 343168 - DNA, 57 bp, Artificial
  Synthetic oligonucleotide
cacacttatccctacttttgtatggcccccgaagccgactgatatatctcttcttaa

SEQ ID NO: 343169 - DNA, 55 bp, Artificial
  Synthetic oligonucleotide
cacacttatctcataagcctcggaaagcagtcctcggacttgggacagatgttgc

SEQ ID NO: 343170 - DNA, 60 bp, Artificial
  Synthetic oligonucleotide
cacacttccatctaagtaatctctgaggcaatcaaggttgcttatgccatgccctgaagg

SEQ ID NO: 343171 - DNA, 55 bp, Artificial
  Synthetic oligonucleotide
cacacttcctgattgttatgggcggcactaatctgtattgaattggcaccttgat

SEQ ID NO: 343172 - DNA, 53 bp, Artificial
  Synthetic oligonucleotide
cacacttcgctgtaactcttaaggtagagttcaaaaccggtaaactacttgtg

SEQ ID NO: 343173 - DNA, 55 bp, Artificial
  Synthetic oligonucleotide
cacacttgcaataccaaatgcttgcacttcaaaatggattagctcaggcgagtac

SEQ ID NO: 343174 - DNA, 59 bp, Artificial
  Synthetic oligonucleotide
cacacttgcccccatgggaactgggaatgggcgtagaaggattcaataatggctggagc

SEQ ID NO: 343175 - DNA, 55 bp, Artificial
  Synthetic oligonucleotide
cacacttgttggacatgataaagaacgaacaccctgatgcttcgtttgagggtgc

SEQ ID NO: 343176 - DNA, 55 bp, Artificial
  Synthetic oligonucleotide
cacactttaatttatttgcttgggcgggagctatgggccaaacaggaatcctcca

SEQ ID NO: 343177 - DNA, 55 bp, Artificial
  Synthetic oligonucleotide
cacactttactgcgcccatggctaacattgaagacaaagccatgcaatattcttc

SEQ ID NO: 343178 - DNA, 56 bp, Artificial
  Synthetic oligonucleotide
cacactttggctttaaccgccttgtacagtctgtagcagttgacgaaaagacagcc

SEQ ID NO: 343179 - DNA, 55 bp, Artificial
  Synthetic oligonucleotide
cacacttttcaacgagtttctattcagtgggattctagcgttccatggccaggag

SEQ ID NO: 343180 - DNA, 52 bp, Artificial
  Synthetic oligonucleotide
cacagaaaattaaaccacgtaagggggtaatgacgtggtcaacgcccgagcc

SEQ ID NO: 343181 - DNA, 55 bp, Artificial
  Synthetic oligonucleotide
cacagaaacaagcaccacttacaatacaccaggcagcacattctggaagcattgg

SEQ ID NO: 343182 - DNA, 55 bp, Artificial
  Synthetic oligonucleotide
cacagaaacagatggaccagaagcaaccatgacctagacctcatgagatacgtag

SEQ ID NO: 343183 - DNA, 56 bp, Artificial
  Synthetic oligonucleotide
cacagaaacaggggacaactgtgacagttacagttcacctgtaatacacctaaaag

SEQ ID NO: 343184 - DNA, 55 bp, Artificial
  Synthetic oligonucleotide
cacagaaaccaaagcaccccaactcaacccgatcgatgggccattgcctgataac

SEQ ID NO: 343185 - DNA, 60 bp, Artificial
  Synthetic oligonucleotide
cacagaaaccttgatggaattggattacctcagggttattagcgcattagcggatgttca

SEQ ID NO: 343186 - DNA, 60 bp, Artificial
  Synthetic oligonucleotide
cacagaaactacagctacgtagtgttcatcaccagagggccaaacgacatcctagacgaa

SEQ ID NO: 343187 - DNA, 56 bp, Artificial
  Synthetic oligonucleotide
cacagaaactggagcgccccaactcaacccaattgacggaccactacctaaggaca

SEQ ID NO: 343188 - DNA, 56 bp, Artificial
  Synthetic oligonucleotide
cacagaaactggggcaccccaacttaacccgattgatggacccctgcctgaggaca

SEQ ID NO: 343189 - DNA, 57 bp, Artificial
  Synthetic oligonucleotide
cacagaaagcatagtaatatggggcaagattcctaaatttacattgcccatacagaa

SEQ ID NO: 343190 - DNA, 55 bp, Artificial
  Synthetic oligonucleotide
cacagaaaggactttccgcctgagactttccactggggcgttccaggaggtgtgg

SEQ ID NO: 343191 - DNA, 55 bp, Artificial
  Synthetic oligonucleotide
cacagaactataagctactttgttcaaagccatccgaattgttgacattggtgag

SEQ ID NO: 343192 - DNA, 60 bp, Artificial
  Synthetic oligonucleotide
cacagaacttgtggaaccccgtgataccatgttctatcttagcgggaatcagatatcact

SEQ ID NO: 343193 - DNA, 55 bp, Artificial
  Synthetic oligonucleotide
cacagaactttattctacttcaaaggagggacctcttgacaagtactacttactc

SEQ ID NO: 343194 - DNA, 56 bp, Artificial
  Synthetic oligonucleotide
cacagaagaagtttatctcacctcaagagaccggccaacgcggtctatggaggggt

SEQ ID NO: 343195 - DNA, 55 bp, Artificial
  Synthetic oligonucleotide
cacagaagctccccgcagcagtgatgggatccgcatacggcttccaatattcacc

SEQ ID NO: 343196 - DNA, 60 bp, Artificial
  Synthetic oligonucleotide
cacagaaggactccatctatgcatcggctctggtggaagcaaccaagttctgtgcaccca

SEQ ID NO: 343197 - DNA, 56 bp, Artificial
  Synthetic oligonucleotide
cacagaatcagagggttatgatctttctgcaagaatgatagtagatacaaaccatc

SEQ ID NO: 343198 - DNA, 60 bp, Artificial
  Synthetic oligonucleotide
cacagaatgaatcgtttttaacatcaactttgtgtctgtattatccagtagaggcatcaa

SEQ ID NO: 343199 - DNA, 60 bp, Artificial
  Synthetic oligonucleotide
cacagaatgcaatatagcatatgacgccctcaggtttcaacttgactcgacagtgaacgc

SEQ ID NO: 343200 - DNA, 60 bp, Artificial
  Synthetic oligonucleotide
cacagaatggtcgaagaatcctatcggaataggagatcagtaatctgttatgatctagca

SEQ ID NO: 343201 - DNA, 55 bp, Artificial
  Synthetic oligonucleotide
cacagaattgccatatgcacaacaattgcgacaaattatatcgtcttcaagagtg

SEQ ID NO: 343202 - DNA, 55 bp, Artificial
  Synthetic oligonucleotide
cacagacaaacggtggttagcatagtggatgaaacaggtgacctaattaggagtg

SEQ ID NO: 343203 - DNA, 60 bp, Artificial
  Synthetic oligonucleotide
cacagacaacttgtggaatgcaggacacaatcaaacaatgactggtagcaaatacctaaa

SEQ ID NO: 343204 - DNA, 60 bp, Artificial
  Synthetic oligonucleotide
cacagacaagtcatatctgccacatgtgaccataaagtcctcagccggcctaccatacat

SEQ ID NO: 343205 - DNA, 55 bp, Artificial
  Synthetic oligonucleotide
cacagacaatgccagaagcataatagtacaacttgacgagcctgtagtaattgat

SEQ ID NO: 343206 - DNA, 60 bp, Artificial
  Synthetic oligonucleotide
cacagacaatgctaaaaccataatagtacagctgaaggaacctgtgcaaattaattgcac

SEQ ID NO: 343207 - DNA, 60 bp, Artificial
  Synthetic oligonucleotide
cacagacaatggtcccaatttcaccagtacaacagtgaaggctgcctgttggtgggcagg

SEQ ID NO: 343208 - DNA, 60 bp, Artificial
  Synthetic oligonucleotide
cacagacacaacactatgctccgaccaagtgctctatactgccctatccagagcggtaca

SEQ ID NO: 343209 - DNA, 55 bp, Artificial
  Synthetic oligonucleotide
cacagacacttgacttctgaggagcttgtcaacgtaacaaagaccttgcagcagc

SEQ ID NO: 343210 - DNA, 51 bp, Artificial
  Synthetic oligonucleotide
cacagacagaacgtgccacacgatcaaagtcgaactagttagatccttcat

SEQ ID NO: 343211 - DNA, 51 bp, Artificial
  Synthetic oligonucleotide
cacagacagctctgcagacacgctgatcactcttctggaacctgagggacc

SEQ ID NO: 343212 - DNA, 55 bp, Artificial
  Synthetic oligonucleotide
cacagacagcttgggacactgtgacctttcatgtccctgacgttattagagtcgg

SEQ ID NO: 343213 - DNA, 55 bp, Artificial
  Synthetic oligonucleotide
cacagacagggtatgctccagttgattggggacatggagaattgccggattcaac

SEQ ID NO: 343214 - DNA, 60 bp, Artificial
  Synthetic oligonucleotide
cacagacatattgtaggagaagcatgtccattgccccataagatcaacagacatggagct

SEQ ID NO: 343215 - DNA, 55 bp, Artificial
  Synthetic oligonucleotide
cacagaccagcacagcaagaaccatggggtaaagctaactaatgctgctgagcgg

SEQ ID NO: 343216 - DNA, 57 bp, Artificial
  Synthetic oligonucleotide
cacagacccgcctagatcccgattctctggcacgacccttggctaaccttgctgata

SEQ ID NO: 343217 - DNA, 58 bp, Artificial
  Synthetic oligonucleotide
cacagacccttaccaagcaccaactgacaatctcttcgaaccccactacacactagaa

SEQ ID NO: 343218 - DNA, 60 bp, Artificial
  Synthetic oligonucleotide
cacagacctcatgtcatcgattgaaagacaggctgggtcaaaatcttccactaaatgaaa

SEQ ID NO: 343219 - DNA, 53 bp, Artificial
  Synthetic oligonucleotide
cacagacgccctatggggtgagggcactattggacatcaattccatcattcgg

SEQ ID NO: 343220 - DNA, 59 bp, Artificial
  Synthetic oligonucleotide
cacagacggagctgcatccgtgcttatctaccaacacgttacaaccggtgtccaaccaa

SEQ ID NO: 343221 - DNA, 58 bp, Artificial
  Synthetic oligonucleotide
cacagacggcttttattggtcgttagactacaatcagtcaactatccaactaatggac

SEQ ID NO: 343222 - DNA, 57 bp, Artificial
  Synthetic oligonucleotide
cacagacggtcaaggacacccctatatcaacaacctacacaagtttgcccagtactc

SEQ ID NO: 343223 - DNA, 55 bp, Artificial
  Synthetic oligonucleotide
cacagactacagcttactttaaactaggtggcttagctgcacagattacacccga

SEQ ID NO: 343224 - DNA, 59 bp, Artificial
  Synthetic oligonucleotide
cacagactcaggaagtggatattggaaacattgggtctcaacaaaggaaggtgattgtg

SEQ ID NO: 343225 - DNA, 60 bp, Artificial
  Synthetic oligonucleotide
cacagactcgaagcaatttgtgcagcaatgattgaagcatggggttacccaactctgtta

SEQ ID NO: 343226 - DNA, 55 bp, Artificial
  Synthetic oligonucleotide
cacagactgtaggagaacccacaggggcggaaattaaatttgtggaggagttctc

SEQ ID NO: 343227 - DNA, 55 bp, Artificial
  Synthetic oligonucleotide
cacagacttgaatccttggaatgcagttgtgtcttccaagtcagatagaccattt

SEQ ID NO: 343228 - DNA, 55 bp, Artificial
  Synthetic oligonucleotide
cacagagaacccagaagaattagcttatcttgaggaagatacaatcacgcgagtc

SEQ ID NO: 343229 - DNA, 60 bp, Artificial
  Synthetic oligonucleotide
cacagagaagacgaaagtcagacaagtatggggtagagcttttcattacatcctgttaga

SEQ ID NO: 343230 - DNA, 55 bp, Artificial
  Synthetic oligonucleotide
cacagagaccaccacacaacacatgcggaccaccacaacacagagaccaccacac

SEQ ID NO: 343231 - DNA, 55 bp, Artificial
  Synthetic oligonucleotide
cacagagaccaccacgagtcccaccgaccagctcctagctgaaatccaggctgaa

SEQ ID NO: 343232 - DNA, 60 bp, Artificial
  Synthetic oligonucleotide
cacagagactagcaatcctctgaacattgctgtgctaaagcagatggccccggagaggaa

SEQ ID NO: 343233 - DNA, 59 bp, Artificial
  Synthetic oligonucleotide
cacagagataagagagaaggtgaagaacgaatatgcaattttttataaacttgatgtaa

SEQ ID NO: 343234 - DNA, 60 bp, Artificial
  Synthetic oligonucleotide
cacagagatatgctcccagagcctcggcttgacgacattgaaagatttagacaggaaggt

SEQ ID NO: 343235 - DNA, 60 bp, Artificial
  Synthetic oligonucleotide
cacagagatcacaacggacacagcatacattagtgacactctgcacttcttggatccgag

SEQ ID NO: 343236 - DNA, 55 bp, Artificial
  Synthetic oligonucleotide
cacagagatgttaaggaaagattacataaagaggcaagggagcacccctctggcc

SEQ ID NO: 343237 - DNA, 60 bp, Artificial
  Synthetic oligonucleotide
cacagagattcagatgactgatttttggacatttaatcctgatttagtggaatggaattc

SEQ ID NO: 343238 - DNA, 50 bp, Artificial
  Synthetic oligonucleotide
cacagagatttgagaagaaagacgtttttggtaaccaatttgttaggagc

SEQ ID NO: 343239 - DNA, 60 bp, Artificial
  Synthetic oligonucleotide
cacagagcctgcggcgcctcactacattcctctagtgcagttaacttacgactgcccccc

SEQ ID NO: 343240 - DNA, 55 bp, Artificial
  Synthetic oligonucleotide
cacagagcgactgtcgatttagctcgtatgtcggaagagaacggtcaactacagg

SEQ ID NO: 343241 - DNA, 60 bp, Artificial
  Synthetic oligonucleotide
cacagagctttcgtatcagctaatgttagatagcttgcatgatagatctagatattttag

SEQ ID NO: 343242 - DNA, 55 bp, Artificial
  Synthetic oligonucleotide
cacagaggaatggacactgcaagatacatgcgaggaactgtggaatacagagcct

SEQ ID NO: 343243 - DNA, 55 bp, Artificial
  Synthetic oligonucleotide
cacagaggactgcaacttttgtaggcagatgacaggtgctagcctgaagaagggg

SEQ ID NO: 343244 - DNA, 60 bp, Artificial
  Synthetic oligonucleotide
cacagaggaggactacggaacccaacaggcagctagctactgctcggagggtcacgatcc

SEQ ID NO: 343245 - DNA, 60 bp, Artificial
  Synthetic oligonucleotide
cacagagggaaccatctatcattgtcaagtttgctttctgacgaaaggcttaggcattta

SEQ ID NO: 343246 - DNA, 58 bp, Artificial
  Synthetic oligonucleotide
cacagagggagacggtcatttagtgaaccactaactgttgtgggagtcatgctaacct

SEQ ID NO: 343247 - DNA, 55 bp, Artificial
  Synthetic oligonucleotide
cacagagggtggatgggcagcctatgattggaatgtcctctcaagtagaggaggt

SEQ ID NO: 343248 - DNA, 55 bp, Artificial
  Synthetic oligonucleotide
cacagaggtcggtcgcgcttgtaccggttgtactgttagccctggggttgtgcac

SEQ ID NO: 343249 - DNA, 55 bp, Artificial
  Synthetic oligonucleotide
cacagaggtgctcaaatcttttccacacaagctcctcgaagatccgcgattgttc

SEQ ID NO: 343250 - DNA, 55 bp, Artificial
  Synthetic oligonucleotide
cacagagtgacatttcctcctggggtaacgtggtgttatgggagtttggactgca

SEQ ID NO: 343251 - DNA, 56 bp, Artificial
  Synthetic oligonucleotide
cacagagttggtaaaagattctgtgtgaaatctgtatatattataggcaaagtatg

SEQ ID NO: 343252 - DNA, 55 bp, Artificial
  Synthetic oligonucleotide
cacagagtttgcagaccgcaacgagataggggtgggaaacaacttcgccatggag

SEQ ID NO: 343253 - DNA, 60 bp, Artificial
  Synthetic oligonucleotide
cacagataaatagacaagtcatagttgacagtgataactcgtctggatattctggtattt

SEQ ID NO: 343254 - DNA, 59 bp, Artificial
  Synthetic oligonucleotide
cacagatacaataaaaaactgagctttgagattgaaccctgtcgtgtatctgtgtaatt

SEQ ID NO: 343255 - DNA, 59 bp, Artificial
  Synthetic oligonucleotide
cacagatactcgaggccttttctcttgaacggtgatatccagtctgggagtaatgaacc

SEQ ID NO: 343256 - DNA, 55 bp, Artificial
  Synthetic oligonucleotide
cacagatcatagtttacgactcaggaacagaactattgagaatgggagagttgtg

SEQ ID NO: 343257 - DNA, 60 bp, Artificial
  Synthetic oligonucleotide
cacagatcatcgaagtagaacgcagtctccagaaagagctggggatttcgcgtgagggag

SEQ ID NO: 343258 - DNA, 55 bp, Artificial
  Synthetic oligonucleotide
cacagatcgattacctgcaatattcagcttacacctagagcaaacagcacttggt

SEQ ID NO: 343259 - DNA, 50 bp, Artificial
  Synthetic oligonucleotide
cacagatctgtgtttcccaagcacttatctcttgggggggtatcatgtca

SEQ ID NO: 343260 - DNA, 58 bp, Artificial
  Synthetic oligonucleotide
cacagatgaaccttataactcacatggacgatactccccctatgggatacacctacgg

SEQ ID NO: 343261 - DNA, 59 bp, Artificial
  Synthetic oligonucleotide
cacagatgaacttgcttaaccctacattaaacttgattacctagagatgcacccattaa

SEQ ID NO: 343262 - DNA, 59 bp, Artificial
  Synthetic oligonucleotide
cacagatgctactccaacacatggcgcaatatcccatatcaccggcgggagcgcagtgt

SEQ ID NO: 343263 - DNA, 60 bp, Artificial
  Synthetic oligonucleotide
cacagatgctgagttaaaagatggccccaagagagacagtgtccctaccttgtggaagaa

SEQ ID NO: 343264 - DNA, 55 bp, Artificial
  Synthetic oligonucleotide
cacagatggtacaatgggcctacgataatgacatagtagacgatagtgaaattgc

SEQ ID NO: 343265 - DNA, 58 bp, Artificial
  Synthetic oligonucleotide
cacagattaaaggataccgctacccagatgaaattttctagtacatcacttatcaggg

SEQ ID NO: 343266 - DNA, 55 bp, Artificial
  Synthetic oligonucleotide
cacagattacctatctagtgcggagaaccaggccaaagctggctttaacgcaagc

SEQ ID NO: 343267 - DNA, 50 bp, Artificial
  Synthetic oligonucleotide
cacagattcttaatcgggtgagggtgttatttaatgggaatcccaattca

SEQ ID NO: 343268 - DNA, 60 bp, Artificial
  Synthetic oligonucleotide
cacagattgccgatactaaggaggaggaaactcctctctctcgccttgcagctttaaatc

SEQ ID NO: 343269 - DNA, 60 bp, Artificial
  Synthetic oligonucleotide
cacagatttcgtatcattgaattcattacgatttagattcagtttgacagtggatgaacc

SEQ ID NO: 343270 - DNA, 55 bp, Artificial
  Synthetic oligonucleotide
cacagattttgatgcaagtgaagcgaaagtgataatggatcgatggggtcgatcg

SEQ ID NO: 343271 - DNA, 57 bp, Artificial
  Synthetic oligonucleotide
cacagcaaaggctgtccgggtaattcgctccaaattcataaccttggtatccgcaac

SEQ ID NO: 343272 - DNA, 60 bp, Artificial
  Synthetic oligonucleotide
cacagcaagcagcagctgacacaggaaacagccaagtcagccacaattaccctatagtgc

SEQ ID NO: 343273 - DNA, 51 bp, Artificial
  Synthetic oligonucleotide
cacagcaagcagcagctgatagcagccaggtcagccaaaattaccctatag

SEQ ID NO: 343274 - DNA, 52 bp, Artificial
  Synthetic oligonucleotide
cacagcaagcggcagctaacaaaggggttagtcaaaattaccctatagtaca

SEQ ID NO: 343275 - DNA, 55 bp, Artificial
  Synthetic oligonucleotide
cacagcaaggaaggacccaatgtacagatttgatgtacacgtagaagtagatggg

SEQ ID NO: 343276 - DNA, 55 bp, Artificial
  Synthetic oligonucleotide
cacagcaaggccgtgtttggaggacgaacccttatccatgtttgcgtggtgcgct

SEQ ID NO: 343277 - DNA, 55 bp, Artificial
  Synthetic oligonucleotide
cacagcaataactagtggattgaggaaagtagtaccctctattgaacattggatg

SEQ ID NO: 343278 - DNA, 56 bp, Artificial
  Synthetic oligonucleotide
cacagcaatcctgccccactgcaggataagtccaccggggaaaaacatataaccgt

SEQ ID NO: 343279 - DNA, 59 bp, Artificial
  Synthetic oligonucleotide
cacagcactttagctgtatgaggatatacccgacgtctatagttggactagggaagacc

SEQ ID NO: 343280 - DNA, 60 bp, Artificial
  Synthetic oligonucleotide
cacagcagagtctgggtctatattgtcatcagcccaacactgattacaatccccgtcaca

SEQ ID NO: 343281 - DNA, 60 bp, Artificial
  Synthetic oligonucleotide
cacagcagcacctggagagagtcaaggccccatgtcgcctgcgagcacagcagtgcccct

SEQ ID NO: 343282 - DNA, 60 bp, Artificial
  Synthetic oligonucleotide
cacagcagctgttcaagttgatctagtagaaaaggacctgttacctgcaagcctaacaat

SEQ ID NO: 343283 - DNA, 55 bp, Artificial
  Synthetic oligonucleotide
cacagcaggatgtgttagaagcaacctatgccatggtacagcatgtggccaaggg

SEQ ID NO: 343284 - DNA, 50 bp, Artificial
  Synthetic oligonucleotide
cacagcaggcgaaagaggatgacaggaagatcagtcaaaattatcctata

SEQ ID NO: 343285 - DNA, 59 bp, Artificial
  Synthetic oligonucleotide
cacagcagtgaaaggggaccaaatatgtgtcgggtaccatgccaataattccacagaaa

SEQ ID NO: 343286 - DNA, 55 bp, Artificial
  Synthetic oligonucleotide
cacagcatacaacaactggaggttcacaggcttgcgcagcgtatggtggtccgtc

SEQ ID NO: 343287 - DNA, 60 bp, Artificial
  Synthetic oligonucleotide
cacagcatatggcgacgattggagtgctagcgacgccagaaatccctttcacgacggagg

SEQ ID NO: 343288 - DNA, 55 bp, Artificial
  Synthetic oligonucleotide
cacagcatcggtctcacagacaaatggtgactactaccaacccgctaatcaggca

SEQ ID NO: 343289 - DNA, 55 bp, Artificial
  Synthetic oligonucleotide
cacagcatcggtctcacagacagatggcaactatcaccaacccactaatcaggca

SEQ ID NO: 343290 - DNA, 60 bp, Artificial
  Synthetic oligonucleotide
cacagcatcgttgttccttcatctagtcggaatccccacccatcgacatctcaaaggcga

SEQ ID NO: 343291 - DNA, 55 bp, Artificial
  Synthetic oligonucleotide
cacagcatgatcgtacctcagaggggtgctgctggaaaggtggtggttactccag

SEQ ID NO: 343292 - DNA, 60 bp, Artificial
  Synthetic oligonucleotide
cacagcatggaccattactgtcagatacaaagctctatggagtgatgaagtttagtggta

SEQ ID NO: 343293 - DNA, 55 bp, Artificial
  Synthetic oligonucleotide
cacagccaaggctagaagaaagagtatgtgcctatgcaagtggaaagttcacacc

SEQ ID NO: 343294 - DNA, 55 bp, Artificial
  Synthetic oligonucleotide
cacagccacaaggtccgcgagctacatccggagattacacagactgctgacacag

SEQ ID NO: 343295 - DNA, 59 bp, Artificial
  Synthetic oligonucleotide
cacagccatcctctaataagtttgtaagacgtctgatgacgtgtgggaacttattggaa

SEQ ID NO: 343296 - DNA, 60 bp, Artificial
  Synthetic oligonucleotide
cacagccatgactcaagcttgctcaaaagtctctcttgaaccaattcctatacattattg

SEQ ID NO: 343297 - DNA, 60 bp, Artificial
  Synthetic oligonucleotide
cacagccattgcttgcattccagcaagtctatggtcgtaatgagcaattgtgggatggga

SEQ ID NO: 343298 - DNA, 51 bp, Artificial
  Synthetic oligonucleotide
cacagcccccttaaggggtaagctttcaaagcccaaaatatcccacgaatt

SEQ ID NO: 343299 - DNA, 60 bp, Artificial
  Synthetic oligonucleotide
cacagccctagtggccactaccatcttgccatcaattgctgcctctccacaaagcaatca

SEQ ID NO: 343300 - DNA, 60 bp, Artificial
  Synthetic oligonucleotide
cacagccgcagatgttaatcagaatatgcatactctcttaggcgtgagagggttgcacta

SEQ ID NO: 343301 - DNA, 60 bp, Artificial
  Synthetic oligonucleotide
cacagccggatgggacaccaaggtcactaacgcagacctagaggatgaagagcagctcct

SEQ ID NO: 343302 - DNA, 55 bp, Artificial
  Synthetic oligonucleotide
cacagccggcacatgataatttaatggggactatgtggattaacgctggatcaga

SEQ ID NO: 343303 - DNA, 55 bp, Artificial
  Synthetic oligonucleotide
cacagccgtattgtcaaattaagattggaagagtaatagccttcaaacctgtcaa

SEQ ID NO: 343304 - DNA, 55 bp, Artificial
  Synthetic oligonucleotide
cacagccgtccacagtgggtcaaccactgacgaggtaggggacgtgtacctggat

SEQ ID NO: 343305 - DNA, 55 bp, Artificial
  Synthetic oligonucleotide
cacagccgttagttgaacctggaaacttctcagatacagagattgatattgatct

SEQ ID NO: 343306 - DNA, 58 bp, Artificial
  Synthetic oligonucleotide
cacagcctatcgcagttggtacttgtcctacaactatggcgaccctgaaaaaggagtc

SEQ ID NO: 343307 - DNA, 55 bp, Artificial
  Synthetic oligonucleotide
cacagcctggtgtttcagtaaagttatgagccttgacttgaaccgtctgctggcg

SEQ ID NO: 343308 - DNA, 55 bp, Artificial
  Synthetic oligonucleotide
cacagccttgctcaatgcgtcttgcgcagctatggacgacttccagttgatccca

SEQ ID NO: 343309 - DNA, 55 bp, Artificial
  Synthetic oligonucleotide
cacagcgaccatctactattgggactagtgtgatgcctgcgacagtaaggtcttc

SEQ ID NO: 343310 - DNA, 55 bp, Artificial
  Synthetic oligonucleotide
cacagcgcagataatctatgcagggacaatgcgagactctataaagtcatggcgg

SEQ ID NO: 343311 - DNA, 55 bp, Artificial
  Synthetic oligonucleotide
cacagcgccaaggagccatcaattatgttcataagtttgagacacgcttggacgg

SEQ ID NO: 343312 - DNA, 60 bp, Artificial
  Synthetic oligonucleotide
cacagcgcgcacccggtgcactcccaattgttgtgggcgatctcggaatacgaatgcacc

SEQ ID NO: 343313 - DNA, 60 bp, Artificial
  Synthetic oligonucleotide
cacagcggttcaggctaaggtagtagcagatgtgcgagaattacatgagattgactattc

SEQ ID NO: 343314 - DNA, 55 bp, Artificial
  Synthetic oligonucleotide
cacagctaataagaccatttaaaagtgacaggacaagctgtacagattggtgtgt

SEQ ID NO: 343315 - DNA, 58 bp, Artificial
  Synthetic oligonucleotide
cacagctatctagattgacttagatgctaacttatggacatatcttactacttgactg

SEQ ID NO: 343316 - DNA, 57 bp, Artificial
  Synthetic oligonucleotide
cacagctattcactcagatgtcacagctccagacggaagttcggtctctaaggattg

SEQ ID NO: 343317 - DNA, 58 bp, Artificial
  Synthetic oligonucleotide
cacagctatttaatagtacattggctaatagtacaggagattctaatggcaacatcac

SEQ ID NO: 343318 - DNA, 60 bp, Artificial
  Synthetic oligonucleotide
cacagctcgcaaccagattccaaccagtcttggattgaggacatctcttttgtacactcg

SEQ ID NO: 343319 - DNA, 60 bp, Artificial
  Synthetic oligonucleotide
cacagctctctcccacctcttcaacttccaagccgtcgtccacagtgaacgtggtgacat

SEQ ID NO: 343320 - DNA, 51 bp, Artificial
  Synthetic oligonucleotide
cacagctcttattgctggatcaactcagggtattgacgcattctatacggg

SEQ ID NO: 343321 - DNA, 60 bp, Artificial
  Synthetic oligonucleotide
cacagctgcactttctcatgcgggaaataatcgtaatcaggttattatccctaagcaaaa

SEQ ID NO: 343322 - DNA, 60 bp, Artificial
  Synthetic oligonucleotide
cacagctgctatagatctcgagactaaggaaaaatttggagtctacgacgtgtgccttaa

SEQ ID NO: 343323 - DNA, 55 bp, Artificial
  Synthetic oligonucleotide
cacagctggatacctattgcgaaagctggttctattgaagccaaggaacaaagag

SEQ ID NO: 343324 - DNA, 55 bp, Artificial
  Synthetic oligonucleotide
cacagctgtaagcggttgtacatggggcaaaaaggactttggaatggttccttaa

SEQ ID NO: 343325 - DNA, 55 bp, Artificial
  Synthetic oligonucleotide
cacagctgttaggcaagaatatgccgttccagttggaccagtgtttccaccaggc

SEQ ID NO: 343326 - DNA, 60 bp, Artificial
  Synthetic oligonucleotide
cacagctgtttaatacgtgcgtgcttcttcattattatactggatgcaccaccaacgtac

SEQ ID NO: 343327 - DNA, 55 bp, Artificial
  Synthetic oligonucleotide
cacagctgtttaatagtacatacaatcctgcctataatggaacagatgacaacag

SEQ ID NO: 343328 - DNA, 55 bp, Artificial
  Synthetic oligonucleotide
cacagctgtttaatagtacttgggatgtgaatgctactgggaatggtactacaga

SEQ ID NO: 343329 - DNA, 57 bp, Artificial
  Synthetic oligonucleotide
cacagctgtttaatagtgcttggttcagtaataacactgggttaaattataacaatg

SEQ ID NO: 343330 - DNA, 55 bp, Artificial
  Synthetic oligonucleotide
cacagctgtttgaaagagatattgaagcagtggaggaacctcctgatagacagtt

SEQ ID NO: 343331 - DNA, 60 bp, Artificial
  Synthetic oligonucleotide
cacagcttcaaggtctggatacgagatgctaaaggtgccaaatgcactgacagatgatag

SEQ ID NO: 343332 - DNA, 60 bp, Artificial
  Synthetic oligonucleotide
cacagcttgacaaacaggtaaggttgactggtcttcacaattatgacaacacatgctggc

SEQ ID NO: 343333 - DNA, 55 bp, Artificial
  Synthetic oligonucleotide
cacagctttactcaatgcttcttgtgcagcaatggatgattttcaattgatccca

SEQ ID NO: 343334 - DNA, 57 bp, Artificial
  Synthetic oligonucleotide
cacaggaaaaggcagcccggtcagccaaaattaccctatagtgcagaatctccaggg

SEQ ID NO: 343335 - DNA, 50 bp, Artificial
  Synthetic oligonucleotide
cacaggaaaaggctttagggataagagagtaatgtatgaagctcattgta

SEQ ID NO: 343336 - DNA, 57 bp, Artificial
  Synthetic oligonucleotide
cacaggaaacacagtagagaggtgaaacatcagaccacaaagaaggctaagcgccta

SEQ ID NO: 343337 - DNA, 54 bp, Artificial
  Synthetic oligonucleotide
cacaggaaacagcaaaccggtcagccaaaattaccctatagtacaaaaccttca

SEQ ID NO: 343338 - DNA, 60 bp, Artificial
  Synthetic oligonucleotide
cacaggaaacagcaacacaggaaacaacagccaggtcagccaaaattaccctatagtgca

SEQ ID NO: 343339 - DNA, 57 bp, Artificial
  Synthetic oligonucleotide
cacaggaaaccgccaggacagccaaaattaccctatagtgcagaacctccagggaca

SEQ ID NO: 343340 - DNA, 60 bp, Artificial
  Synthetic oligonucleotide
cacaggaaactgtgggggggcggctatggagggattcgccaatctcatctgagaagattg

SEQ ID NO: 343341 - DNA, 55 bp, Artificial
  Synthetic oligonucleotide
cacaggaaatgggctattgtgaaaatgtgagcaccgtgcattgcacacatggaat

SEQ ID NO: 343342 - DNA, 55 bp, Artificial
  Synthetic oligonucleotide
cacaggaacatactgttctctgaatggagtcagtccagtgcatttgggagattgc

SEQ ID NO: 343343 - DNA, 60 bp, Artificial
  Synthetic oligonucleotide
cacaggaacccaatcagtatacacactctctccagacactgaacacatggatggatacca

SEQ ID NO: 343344 - DNA, 55 bp, Artificial
  Synthetic oligonucleotide
cacaggaagagaagatgcgataattaggaagttatatggttatggggagtatgtc

SEQ ID NO: 343345 - DNA, 57 bp, Artificial
  Synthetic oligonucleotide
cacaggaagcaacagcccggtcagccaaaatttccctatagtgcagaaccttcaggg

SEQ ID NO: 343346 - DNA, 50 bp, Artificial
  Synthetic oligonucleotide
cacaggaataaatgacaccattattttcgacttggtagtacacattgtaa

SEQ ID NO: 343347 - DNA, 55 bp, Artificial
  Synthetic oligonucleotide
cacaggaatttgacctatagtgatcttttggagtatgtggtagccaaatgtcagg

SEQ ID NO: 343348 - DNA, 55 bp, Artificial
  Synthetic oligonucleotide
cacaggacagcggctatggcaatactcaagtggaaactgcaacgcaggtagaggg

SEQ ID NO: 343349 - DNA, 55 bp, Artificial
  Synthetic oligonucleotide
cacaggaccagacataaccttccccacgcgtacgggaccgacatatcgacgtgtc

SEQ ID NO: 343350 - DNA, 52 bp, Artificial
  Synthetic oligonucleotide
cacaggacgcaaaaacccccgtaggggggtcggatttgccccgcgctagata

SEQ ID NO: 343351 - DNA, 60 bp, Artificial
  Synthetic oligonucleotide
cacaggacgctctaatacagacatggtgcgaagagcctattgagctagttagtagtcctc

SEQ ID NO: 343352 - DNA, 55 bp, Artificial
  Synthetic oligonucleotide
cacaggactaatattgacacgtgatggaggagaacctaatataacggaggagaca

SEQ ID NO: 343353 - DNA, 55 bp, Artificial
  Synthetic oligonucleotide
cacaggactactattagtacgggatggaggcgagaatatcacggaggagacattc

SEQ ID NO: 343354 - DNA, 60 bp, Artificial
  Synthetic oligonucleotide
cacaggactactattgacacgtgatggaggacacacaaatgacacagagatattcagacc

SEQ ID NO: 343355 - DNA, 52 bp, Artificial
  Synthetic oligonucleotide
cacaggactactattgacacgtgatggaggatacaatgtaacaggagagaat

SEQ ID NO: 343356 - DNA, 55 bp, Artificial
  Synthetic oligonucleotide
cacaggactactattgacacgtgatggaggtgtgaatactacgaataattcgagt

SEQ ID NO: 343357 - DNA, 60 bp, Artificial
  Synthetic oligonucleotide
cacaggactactattggtacgtgatggaggcggagataataacacagaaacattcagacc

SEQ ID NO: 343358 - DNA, 55 bp, Artificial
  Synthetic oligonucleotide
cacaggactactgttagtacgtgatggaggcataaacagtactggcccagaaaca

SEQ ID NO: 343359 - DNA, 57 bp, Artificial
  Synthetic oligonucleotide
cacaggactttgggcaggtttttaacatgttcgataatgagcccagtactgctaccg

SEQ ID NO: 343360 - DNA, 58 bp, Artificial
  Synthetic oligonucleotide
cacaggagccgagaagcctaaattcctcccggatctgtatgattacaaggagaaccga

SEQ ID NO: 343361 - DNA, 55 bp, Artificial
  Synthetic oligonucleotide
cacaggaggatactggtcctactcttatgggtcagcaggatactctgaccagcag

SEQ ID NO: 343362 - DNA, 60 bp, Artificial
  Synthetic oligonucleotide
cacaggaggtggcatatactcttaaacctacttatgatatcgtggtccacgctgaaagga

SEQ ID NO: 343363 - DNA, 51 bp, Artificial
  Synthetic oligonucleotide
cacaggagtaaaattaatgttaccaaaaggacactggggtatggtagtagg

SEQ ID NO: 343364 - DNA, 54 bp, Artificial
  Synthetic oligonucleotide
cacaggataacatcaagtgcccctgccaggtacccgcacctgagttcttcactg

SEQ ID NO: 343365 - DNA, 55 bp, Artificial
  Synthetic oligonucleotide
cacaggatcatgtacgctctttatgtctattggcctggcataacggcgaagaaga

SEQ ID NO: 343366 - DNA, 56 bp, Artificial
  Synthetic oligonucleotide
cacaggatcccacaatgttatataacaaaatggaattcgaaccgtttcagtccctg

SEQ ID NO: 343367 - DNA, 60 bp, Artificial
  Synthetic oligonucleotide
cacaggatcgatggacactgcatatgcaaattctacacagaacgagccgtttttgacatc

SEQ ID NO: 343368 - DNA, 60 bp, Artificial
  Synthetic oligonucleotide
cacaggatgacagtgatttgtttgatatttatgtagacccagacacgacccctgtagctg

SEQ ID NO: 343369 - DNA, 55 bp, Artificial
  Synthetic oligonucleotide
cacaggatgcagatttatattttggagacatccacacattgactttgtaggagtg

SEQ ID NO: 343370 - DNA, 57 bp, Artificial
  Synthetic oligonucleotide
cacaggatggccgcacgcgtgaaagaaagtggtccccgcgcacttgtattggtcggc

SEQ ID NO: 343371 - DNA, 51 bp, Artificial
  Synthetic oligonucleotide
cacaggattactattagcgcgtgatagaagaacaaatgccacaaatgagac

SEQ ID NO: 343372 - DNA, 55 bp, Artificial
  Synthetic oligonucleotide
cacaggattactattgctacgtgatggagggacagataacgagacagagaacaac

SEQ ID NO: 343373 - DNA, 55 bp, Artificial
  Synthetic oligonucleotide
cacaggattggttaaacccaaagacattcaaagatgcaatgaatgcgctaggtca

SEQ ID NO: 343374 - DNA, 55 bp, Artificial
  Synthetic oligonucleotide
cacaggcaagcaacgataaggtgtcggacggaccaacgtatgtggtcccttcggt

SEQ ID NO: 343375 - DNA, 51 bp, Artificial
  Synthetic oligonucleotide
cacaggcaagggcccagcaacgtggaatcacgatcatactgagttcggtgt

SEQ ID NO: 343376 - DNA, 60 bp, Artificial
  Synthetic oligonucleotide
cacaggcagatggtaactaccaccaacccactaatcaggcatgaaaacaggatggtgctg

SEQ ID NO: 343377 - DNA, 60 bp, Artificial
  Synthetic oligonucleotide
cacaggcattcagaaatatggtttatgtacgttctttagctgcaaatttgaattcagtaa

SEQ ID NO: 343378 - DNA, 55 bp, Artificial
  Synthetic oligonucleotide
cacaggcccttgcatctgatgtagcgagtgtttcactccattcgggttatagttc

SEQ ID NO: 343379 - DNA, 51 bp, Artificial
  Synthetic oligonucleotide
cacaggcctaacggttattataggcggagttacggacagtatataagcagc

SEQ ID NO: 343380 - DNA, 56 bp, Artificial
  Synthetic oligonucleotide
cacaggcgataactcctggagcccggctaagcctgactagggttttcatttgggaa

SEQ ID NO: 343381 - DNA, 58 bp, Artificial
  Synthetic oligonucleotide
cacaggcgggcacaggcttaactcgggtgcagtacccgatcacccgtgtaaattcaca

SEQ ID NO: 343382 - DNA, 56 bp, Artificial
  Synthetic oligonucleotide
cacaggcggtgtttcagtgcctggacgagctactcggaactggagcccttttttca

SEQ ID NO: 343383 - DNA, 57 bp, Artificial
  Synthetic oligonucleotide
cacaggcgtaggaccgtgggcacgacgggggggtttcacagacaggcgcagatcgta

SEQ ID NO: 343384 - DNA, 56 bp, Artificial
  Synthetic oligonucleotide
cacaggctattagttgccaacgtcctcaacctcctaaagaaacagaggacccatat

SEQ ID NO: 343385 - DNA, 56 bp, Artificial
  Synthetic oligonucleotide
cacaggctctatacacccaataaccgttgacgcggctaatgaccaggacatctatc

SEQ ID NO: 343386 - DNA, 55 bp, Artificial
  Synthetic oligonucleotide
cacaggctggaggttgcttgtaactggacgcggggcgagcgttgtaacctggacg

SEQ ID NO: 343387 - DNA, 60 bp, Artificial
  Synthetic oligonucleotide
cacaggcttactggaaagtcactaacatggctaaccagaattcgctcctcgccactcttg

SEQ ID NO: 343388 - DNA, 55 bp, Artificial
  Synthetic oligonucleotide
cacagggaaccagttctcccttggaccaaccctaagcgatgcccgtagtcgtcta

SEQ ID NO: 343389 - DNA, 60 bp, Artificial
  Synthetic oligonucleotide
cacagggaagaaccggatataccatccatgttcagtgtaatgcaactaagtttcacagtg

SEQ ID NO: 343390 - DNA, 55 bp, Artificial
  Synthetic oligonucleotide
cacagggacaactccaacaccagatgcaacagtctctcagcaaaccacagacgag

SEQ ID NO: 343391 - DNA, 57 bp, Artificial
  Synthetic oligonucleotide
cacagggactagcaaaagatgcctgggaaattcctagggagtctttgaggctggaag

SEQ ID NO: 343392 - DNA, 55 bp, Artificial
  Synthetic oligonucleotide
cacagggagttatctctctgctaattgctatcctaatggcttggtctggattcct

SEQ ID NO: 343393 - DNA, 60 bp, Artificial
  Synthetic oligonucleotide
cacagggatgtactatagaggtaagaaatttatgtagtgcgcaagctgtagcacaagttg

SEQ ID NO: 343394 - DNA, 55 bp, Artificial
  Synthetic oligonucleotide
cacagggcaaatttgtggagaccatgatcggcatagtcaacaccgccccttaccc

SEQ ID NO: 343395 - DNA, 55 bp, Artificial
  Synthetic oligonucleotide
cacagggcaacgtgtgcgggctgtgctgaattcgctgggtaatactggcccagcg

SEQ ID NO: 343396 - DNA, 55 bp, Artificial
  Synthetic oligonucleotide
cacagggcatagttgatttcgtggcccaccacatggcagatgtcacattcccaag

SEQ ID NO: 343397 - DNA, 60 bp, Artificial
  Synthetic oligonucleotide
cacagggcccactgacgcgaaggcgcgttacatggttgcttatgccccccctggcatgga

SEQ ID NO: 343398 - DNA, 50 bp, Artificial
  Synthetic oligonucleotide
cacagggcgaaagagttccttgccaagaccacagcacttttcccacttgc

SEQ ID NO: 343399 - DNA, 56 bp, Artificial
  Synthetic oligonucleotide
cacaggggaacatgcaaaggccataggaaattgcccaatatgggtgaaaacaccct

SEQ ID NO: 343400 - DNA, 56 bp, Artificial
  Synthetic oligonucleotide
cacaggggaggtagcacgtcaacgtgttccagtgggggagggtaacagtctgcgta

SEQ ID NO: 343401 - DNA, 50 bp, Artificial
  Synthetic oligonucleotide
cacaggggcaacaagatcttggtctcaggcaggtctgaatcaattatgaa

SEQ ID NO: 343402 - DNA, 59 bp, Artificial
  Synthetic oligonucleotide
cacaggggcctggctccgtgcagaggggccacgttttggggagcagccccagagcagga

SEQ ID NO: 343403 - DNA, 54 bp, Artificial
  Synthetic oligonucleotide
cacaggggtctcctcactagcgagagacgccagaatctgcatcaggtgtcccta

SEQ ID NO: 343404 - DNA, 55 bp, Artificial
  Synthetic oligonucleotide
cacaggggttagcgcggccatggagattatgtcacaaaacccagtatctgtgggc

SEQ ID NO: 343405 - DNA, 51 bp, Artificial
  Synthetic oligonucleotide
cacaggggttgacaagcccaaatttctcccggatctgtatgactacaaaga

SEQ ID NO: 343406 - DNA, 59 bp, Artificial
  Synthetic oligonucleotide
cacagggtagatcaactctccgtcgtctggttgtcttcttggcgattcggtgttgcacc

SEQ ID NO: 343407 - DNA, 54 bp, Artificial
  Synthetic oligonucleotide
cacagggtcagggctaattgtctttttccctggattccccggctcaattgtagg

SEQ ID NO: 343408 - DNA, 60 bp, Artificial
  Synthetic oligonucleotide
cacagggtctaacgctaagagcatggacttgggcacaactcctggcgattgtggttgtcc

SEQ ID NO: 343409 - DNA, 57 bp, Artificial
  Synthetic oligonucleotide
cacagggtctggccttctgcgtaccaaatggagtgaccctaagaatttcagtaccaa

SEQ ID NO: 343410 - DNA, 59 bp, Artificial
  Synthetic oligonucleotide
cacagggtgccaacgataattgtcgtcacaccaacaagaccgtgttatacaaattcatg

SEQ ID NO: 343411 - DNA, 59 bp, Artificial
  Synthetic oligonucleotide
cacagggtgtacagagaggagtgcgtttaactgaccaagtccgtactgttaatcttgca

SEQ ID NO: 343412 - DNA, 60 bp, Artificial
  Synthetic oligonucleotide
cacagggttattcccagtcatgtacgcggagacagcgagtctgcaacacgcggtccgtcg

SEQ ID NO: 343413 - DNA, 55 bp, Artificial
  Synthetic oligonucleotide
cacagggtttattggatacgagagggaagaatagtgaagtatgaaaatgtcccca

SEQ ID NO: 343414 - DNA, 60 bp, Artificial
  Synthetic oligonucleotide
cacaggtaaatggacagtctgggagaatcgatttccattggatgcttcttgatcccaacg

SEQ ID NO: 343415 - DNA, 57 bp, Artificial
  Synthetic oligonucleotide
cacaggtactaattggcatcttaatttgagaggggggactcgtgtagtgaatttgga

SEQ ID NO: 343416 - DNA, 55 bp, Artificial
  Synthetic oligonucleotide
cacaggtactatcggtagggtgcattcctgccacaggtgagtattgggacatagc

SEQ ID NO: 343417 - DNA, 60 bp, Artificial
  Synthetic oligonucleotide
cacaggtagaggggcaggaaaatccacaggcattgttacatgcccaacagctacaggcag

SEQ ID NO: 343418 - DNA, 55 bp, Artificial
  Synthetic oligonucleotide
cacaggtataattaacacagtcgcccatacatggattgtcgtacaacgatcgcga

SEQ ID NO: 343419 - DNA, 55 bp, Artificial
  Synthetic oligonucleotide
cacaggtattttcaatatcagttcacccacatgtctcataaatcgagttcagaga

SEQ ID NO: 343420 - DNA, 60 bp, Artificial
  Synthetic oligonucleotide
cacaggtcaaatcaacgatattggaaacacagcattgcagtgcggctcaatccaagtaat

SEQ ID NO: 343421 - DNA, 60 bp, Artificial
  Synthetic oligonucleotide
cacaggtcccatgtcgacatttatggcatcacccactgttgaggaacttgccggagacac

SEQ ID NO: 343422 - DNA, 50 bp, Artificial
  Synthetic oligonucleotide
cacaggtcgtttggctattgtcacgcaaacggttgggagtggcgccccaa

SEQ ID NO: 343423 - DNA, 54 bp, Artificial
  Synthetic oligonucleotide
cacaggtgagttcaagttacgaaatgaagaacccgccccctggattcaggtggc

SEQ ID NO: 343424 - DNA, 60 bp, Artificial
  Synthetic oligonucleotide
cacaggtgcctcaagatgtattggcgtatacattcttcacttcttcgtacgctatccaat

SEQ ID NO: 343425 - DNA, 55 bp, Artificial
  Synthetic oligonucleotide
cacaggtggaacaaaaggaggaggtaccgacagcatccacaaacttgagggaggg

SEQ ID NO: 343426 - DNA, 59 bp, Artificial
  Synthetic oligonucleotide
cacaggtggtccctagcgacactatgcaaacgaggcacgtgaagaattaccattcacgc

SEQ ID NO: 343427 - DNA, 60 bp, Artificial
  Synthetic oligonucleotide
cacaggtgtgatagatctaaaagtggtgcggtgacccgtctcgcgtggttaggtgactca

SEQ ID NO: 343428 - DNA, 55 bp, Artificial
  Synthetic oligonucleotide
cacaggtgtgtggtccagtgtactgtttcaccccaagccccgtcgtggtggggac

SEQ ID NO: 343429 - DNA, 54 bp, Artificial
  Synthetic oligonucleotide
cacaggttctatctgtgaaaagggtacgtgttgccccttccttcttcggagaat

SEQ ID NO: 343430 - DNA, 55 bp, Artificial
  Synthetic oligonucleotide
cacaggttctcctccggtaatcgggcgtgctgagaaggcgtacacagatctggtc

SEQ ID NO: 343431 - DNA, 55 bp, Artificial
  Synthetic oligonucleotide
cacaggttggagtgggagtcatgcaagagggagtcttccacaccatgtggcacgt

SEQ ID NO: 343432 - DNA, 53 bp, Artificial
  Synthetic oligonucleotide
cacagtaaagtcggtggaacccctaaccccgttagtactcctgatgagactat

SEQ ID NO: 343433 - DNA, 55 bp, Artificial
  Synthetic oligonucleotide
cacagtaacggccactctagccctcattggatgttctgggtcaccatggcaatgg

SEQ ID NO: 343434 - DNA, 60 bp, Artificial
  Synthetic oligonucleotide
cacagtaacttagaagcttatctcatagttcaacagtagggtcactaaccaagtggctca

SEQ ID NO: 343435 - DNA, 60 bp, Artificial
  Synthetic oligonucleotide
cacagtaatagatcatgcagggattggctgattgacgtggggctggtcttttcaaagtct

SEQ ID NO: 343436 - DNA, 59 bp, Artificial
  Synthetic oligonucleotide
cacagtaattgacaaggactctataatacttgatagcgaaacggaagacgactctatag

SEQ ID NO: 343437 - DNA, 59 bp, Artificial
  Synthetic oligonucleotide
cacagtacaatgtacacatgggattaaaccagtggtatcaacccaactgctgttaaatg

SEQ ID NO: 343438 - DNA, 55 bp, Artificial
  Synthetic oligonucleotide
cacagtacacaacacccctccacactgaacaatgtttacattcgcacgtagtgat

SEQ ID NO: 343439 - DNA, 60 bp, Artificial
  Synthetic oligonucleotide
cacagtacagtgtacacatgggattaggccagtagtgtcgactcaattgttgttgaatgg

SEQ ID NO: 343440 - DNA, 59 bp, Artificial
  Synthetic oligonucleotide
cacagtaccaaggaaacacacacatgctagactactaccttggcttttacagccccata

SEQ ID NO: 343441 - DNA, 60 bp, Artificial
  Synthetic oligonucleotide
cacagtaccagaaagcatacaccacaggtcctagcatatccataaatattgaacataacg

SEQ ID NO: 343442 - DNA, 57 bp, Artificial
  Synthetic oligonucleotide
cacagtacttgaggatgatactgaggtgcttacaggtgttcctgagagagacactgg

SEQ ID NO: 343443 - DNA, 58 bp, Artificial
  Synthetic oligonucleotide
cacagtagaagaacagatcgagtggatgtttagagcacaaaatcctgtaccagtggga

SEQ ID NO: 343444 - DNA, 55 bp, Artificial
  Synthetic oligonucleotide
cacagtagaagacacaatcgtactcacgaccaacgaccagaccacacaccacccc

SEQ ID NO: 343445 - DNA, 55 bp, Artificial
  Synthetic oligonucleotide
cacagtagcaactatctattgtgtacatgcaaacataaaggtacaagacaccaag

SEQ ID NO: 343446 - DNA, 59 bp, Artificial
  Synthetic oligonucleotide
cacagtagcagatgctataccaggttggggttggctcttgaaaggtggctggtttgtcc

SEQ ID NO: 343447 - DNA, 55 bp, Artificial
  Synthetic oligonucleotide
cacagtagcagttctctattgtgtacataaagggataaaggtactagacaccaag

SEQ ID NO: 343448 - DNA, 55 bp, Artificial
  Synthetic oligonucleotide
cacagtagccactcggtcaacctaccccactttaaattactttagctctccaagc

SEQ ID NO: 343449 - DNA, 55 bp, Artificial
  Synthetic oligonucleotide
cacagtaggtctgatgttagtcttgacattgtaaatgaaacttgcaagtacccgg

SEQ ID NO: 343450 - DNA, 60 bp, Artificial
  Synthetic oligonucleotide
cacagtagtgaaaggggaccagatatgtatcgggtaccatgccaacaattcaacagagaa

SEQ ID NO: 343451 - DNA, 60 bp, Artificial
  Synthetic oligonucleotide
cacagtatacaacagcagggtagagtgcattggttggtcaagtactagttgccatgatgg

SEQ ID NO: 343452 - DNA, 55 bp, Artificial
  Synthetic oligonucleotide
cacagtatatgtgcctcctcccaaccctgtatccaaggttgttgccacggatgcg

SEQ ID NO: 343453 - DNA, 60 bp, Artificial
  Synthetic oligonucleotide
cacagtatgcattaggaatcattcaggcacaaccagacaggagtgaatcagagctagtca

SEQ ID NO: 343454 - DNA, 60 bp, Artificial
  Synthetic oligonucleotide
cacagtatttttcacagcgtcactcttccttcatttggtgggcatacctacccacagaca

SEQ ID NO: 343455 - DNA, 55 bp, Artificial
  Synthetic oligonucleotide
cacagtcactccaattgaccccgcagcacccagtattgtcacaattacagacagt

SEQ ID NO: 343456 - DNA, 57 bp, Artificial
  Synthetic oligonucleotide
cacagtcacttttagtttcaatggggcctttgtggctccagaccgtgtgagcttctt

SEQ ID NO: 343457 - DNA, 59 bp, Artificial
  Synthetic oligonucleotide
cacagtcatacactgttcatgtatggtttcctggaactaaccagtggtagtgctttaac

SEQ ID NO: 343458 - DNA, 60 bp, Artificial
  Synthetic oligonucleotide
cacagtccactacttgaagcagatattgtctggtggtcacaaagccataatgcagcataa

SEQ ID NO: 343459 - DNA, 52 bp, Artificial
  Synthetic oligonucleotide
cacagtcccagtacttcctcgttgtgaaaaggaccccgatgacgtagactcg

SEQ ID NO: 343460 - DNA, 57 bp, Artificial
  Synthetic oligonucleotide
cacagtcccgttgttcaaaaagttatgcagttggcggtcttaatcaggtatgagatg

SEQ ID NO: 343461 - DNA, 55 bp, Artificial
  Synthetic oligonucleotide
cacagtcctggagctataggcacaggtatagttgtgtggttagaactctcaaggc

SEQ ID NO: 343462 - DNA, 60 bp, Artificial
  Synthetic oligonucleotide
cacagtcgcacacagtgacgcactagctaggcgcttcgcatttgacatggacatacaagt

SEQ ID NO: 343463 - DNA, 55 bp, Artificial
  Synthetic oligonucleotide
cacagtcgcggccataattgatacagggtgcacctgttgctgtataaacggcgcg

SEQ ID NO: 343464 - DNA, 60 bp, Artificial
  Synthetic oligonucleotide
cacagtcggatatttgtgtgctggcattcccactgacactcctaggggagaggatagtca

SEQ ID NO: 343465 - DNA, 59 bp, Artificial
  Synthetic oligonucleotide
cacagtctattccgaagtagtaagaacacccgcacgttagatcaattctacgcctgcga

SEQ ID NO: 343466 - DNA, 60 bp, Artificial
  Synthetic oligonucleotide
cacagtctgaaggcaacaaacaacagcgtgaactacttcactccagtaaatgctgatctt

SEQ ID NO: 343467 - DNA, 55 bp, Artificial
  Synthetic oligonucleotide
cacagtctggaactagttacacacctagtacaggattactagtcatagacattgg

SEQ ID NO: 343468 - DNA, 59 bp, Artificial
  Synthetic oligonucleotide
cacagtctggggcataaaacagctccaggcgagagtcctggctgtggaaaggtacctaa

SEQ ID NO: 343469 - DNA, 59 bp, Artificial
  Synthetic oligonucleotide
cacagtctggggcattaaacagctccaagcaagagtcctggctttagaaagatacctaa

SEQ ID NO: 343470 - DNA, 60 bp, Artificial
  Synthetic oligonucleotide
cacagtctgtaaatacaagtgtgatgcaggattcggtcgtctgacaagtgtgaacgcaac

SEQ ID NO: 343471 - DNA, 59 bp, Artificial
  Synthetic oligonucleotide
cacagtcttagcgacttttaggtagcataccctttattgtgttctgcgtatcagtggag

SEQ ID NO: 343472 - DNA, 55 bp, Artificial
  Synthetic oligonucleotide
cacagtcttcctctgtgaacccattgcaagtgaactagaccatcagctatgggtc

SEQ ID NO: 343473 - DNA, 55 bp, Artificial
  Synthetic oligonucleotide
cacagtgaaatccaactgtgaacccactaattgtttccagttcgggcagaacttg

SEQ ID NO: 343474 - DNA, 60 bp, Artificial
  Synthetic oligonucleotide
cacagtgaaggtatctgggaaaggtggacatagtggatcctccttcaagtgctgtcatgg

SEQ ID NO: 343475 - DNA, 55 bp, Artificial
  Synthetic oligonucleotide
cacagtgacagatgcgagagttagcttggatccaggagtgatggagacgttaggg

SEQ ID NO: 343476 - DNA, 60 bp, Artificial
  Synthetic oligonucleotide
cacagtgacagtacagttgcaggaatcgtttgcggcaaaccacttgtactgcattaggag

SEQ ID NO: 343477 - DNA, 60 bp, Artificial
  Synthetic oligonucleotide
cacagtgagcagatgaatggagtgagtgatttcttatcaacttgtgtaacagtggatagc

SEQ ID NO: 343478 - DNA, 55 bp, Artificial
  Synthetic oligonucleotide
cacagtgatccctctgttgtgcggcattggtggagccatgttgcactggacgctc

SEQ ID NO: 343479 - DNA, 55 bp, Artificial
  Synthetic oligonucleotide
cacagtgatgaagcacagatccatcttagaggaccaccctcagcagcccttaggc

SEQ ID NO: 343480 - DNA, 60 bp, Artificial
  Synthetic oligonucleotide
cacagtgcgactgagagcatacctgtccaccccggggctacctgtctgccaagaccacct

SEQ ID NO: 343481 - DNA, 59 bp, Artificial
  Synthetic oligonucleotide
cacagtgcgagtgtacttcaagccgaaacacgtgcgtgcttgggtcccaagaccgccaa

SEQ ID NO: 343482 - DNA, 60 bp, Artificial
  Synthetic oligonucleotide
cacagtgcgatttggaagccttgacccagtagtcgtcaagggtgtagcagggtcctctgc

SEQ ID NO: 343483 - DNA, 55 bp, Artificial
  Synthetic oligonucleotide
cacagtgctccggtttggggaccccgatgcacgtcgcaggggtttccaattggac

SEQ ID NO: 343484 - DNA, 60 bp, Artificial
  Synthetic oligonucleotide
cacagtggaactattcgaaaacttgctaagaacacatgataactttgaagatgagtatag

SEQ ID NO: 343485 - DNA, 55 bp, Artificial
  Synthetic oligonucleotide
cacagtggaagagaggctacgttactaaaactgtcaaacacttattggtggccca

SEQ ID NO: 343486 - DNA, 53 bp, Artificial
  Synthetic oligonucleotide
cacagtggcaggtacttccgtgttccttcacgaccctgccagccttgtccact

SEQ ID NO: 343487 - DNA, 55 bp, Artificial
  Synthetic oligonucleotide
cacagtggcccaccttgatggaattcgaagatgacctgcggaagaaggtcggtcc

SEQ ID NO: 343488 - DNA, 59 bp, Artificial
  Synthetic oligonucleotide
cacagtgggtatggaagtgctgtagagaggaacctgaggagggcacttggacacctatt

SEQ ID NO: 343489 - DNA, 52 bp, Artificial
  Synthetic oligonucleotide
cacagtgtacggacttaaagttcccccatagggggtacctaaagcccagcca

SEQ ID NO: 343490 - DNA, 54 bp, Artificial
  Synthetic oligonucleotide
cacagtgtagtttatgcacaacactgtttcaaagcccctaaaaatttctgtccg

SEQ ID NO: 343491 - DNA, 55 bp, Artificial
  Synthetic oligonucleotide
cacagtgtgactcaagtatatgcagatacgcaaacgtacttacacgatgacatga

SEQ ID NO: 343492 - DNA, 59 bp, Artificial
  Synthetic oligonucleotide
cacagtgtgcagctgtggtcactgttcaggtcctccttaaactccggtcccttgtgggc

SEQ ID NO: 343493 - DNA, 51 bp, Artificial
  Synthetic oligonucleotide
cacagtgtgtaagagagatcagagtgatcgaggctggggtaatcattgcgg

SEQ ID NO: 343494 - DNA, 60 bp, Artificial
  Synthetic oligonucleotide
cacagtgttaaaacctgtagaggatgctctgtcagtgataaccaagaatgtaagaccaat

SEQ ID NO: 343495 - DNA, 55 bp, Artificial
  Synthetic oligonucleotide
cacagtgttgctggatgaacagggtgtggggcctctgtgtaaagctgatagcctg

SEQ ID NO: 343496 - DNA, 55 bp, Artificial
  Synthetic oligonucleotide
cacagttacaactaagacactttgatacaatgatatctcagtatgaggaagctat

SEQ ID NO: 343497 - DNA, 56 bp, Artificial
  Synthetic oligonucleotide
cacagttaccccgaaaccacctaagctaactagcacactagagtacacagcaaccc

SEQ ID NO: 343498 - DNA, 59 bp, Artificial
  Synthetic oligonucleotide
cacagttagtggttctttagtgacatctgatgctcagctgtttaatagaccgttttggt

SEQ ID NO: 343499 - DNA, 55 bp, Artificial
  Synthetic oligonucleotide
cacagttatctaactctgttgcaatgttcttacaaggttcattgggtagtacaca

SEQ ID NO: 343500 - DNA, 55 bp, Artificial
  Synthetic oligonucleotide
cacagttcctagtggctccctggtaagtagtgagtctcagctctttaatagaccc

SEQ ID NO: 343501 - DNA, 55 bp, Artificial
  Synthetic oligonucleotide
cacagttcgatagctctttgacaccatatctcatcaatgccgtattacacattcg

SEQ ID NO: 343502 - DNA, 60 bp, Artificial
  Synthetic oligonucleotide
cacagttctacgcatgcagctttttgagtcgagccaatatcgtaagctacctcgttcaac

SEQ ID NO: 343503 - DNA, 56 bp, Artificial
  Synthetic oligonucleotide
cacagttgaccttttacctggtgaaatagaatctattgctgagatacacccagtac

SEQ ID NO: 343504 - DNA, 51 bp, Artificial
  Synthetic oligonucleotide
cacagttgcattatataaatgttaccaatttagagcaacatgaggcctata

SEQ ID NO: 343505 - DNA, 60 bp, Artificial
  Synthetic oligonucleotide
cacagttggtgatgttcccgaatgccaaacttctgatcctgctcatattagcataactgt

SEQ ID NO: 343506 - DNA, 55 bp, Artificial
  Synthetic oligonucleotide
cacagtttaatgcacctaatcttggcggaggtactcaggttgtgcaagtcaaagc

SEQ ID NO: 343507 - DNA, 50 bp, Artificial
  Synthetic oligonucleotide
cacagtttgtgccgctgccttcaaacgcgtctcagagtcaatcatggcaa

SEQ ID NO: 343508 - DNA, 59 bp, Artificial
  Synthetic oligonucleotide
cacataaataattatgtggtcccaatgatctggcccacattgtctttccggtacgacta

SEQ ID NO: 343509 - DNA, 60 bp, Artificial
  Synthetic oligonucleotide
cacataacatcaaatgaacggcacatatttctctacgaaaaaggaaatgtgcctgcatat

SEQ ID NO: 343510 - DNA, 55 bp, Artificial
  Synthetic oligonucleotide
cacataacgccccaaacattaaggtgacgggccgtgagtttgatacactagtcgt

SEQ ID NO: 343511 - DNA, 55 bp, Artificial
  Synthetic oligonucleotide
cacataagacctacaattaggtgggttgctgctagctgtagtcttcctgaggtgg

SEQ ID NO: 343512 - DNA, 57 bp, Artificial
  Synthetic oligonucleotide
cacataagaggtcaccccataaccctctacggctgacctaaataggttgtgcattag

SEQ ID NO: 343513 - DNA, 60 bp, Artificial
  Synthetic oligonucleotide
cacataagccaatgtgtggctggtcgtaatgagcaattgtgggatgggaccaactacttt

SEQ ID NO: 343514 - DNA, 56 bp, Artificial
  Synthetic oligonucleotide
cacataagtaattatgtggccctaatgacctagcccaaacagttttgccggtacga

SEQ ID NO: 343515 - DNA, 55 bp, Artificial
  Synthetic oligonucleotide
cacataatctttgaagcaaaggttgacagaggatagcacttctttcgcctttgtg

SEQ ID NO: 343516 - DNA, 55 bp, Artificial
  Synthetic oligonucleotide
cacatacaacaggaattccttataattcccaaggacaggccatagttgaaagaac

SEQ ID NO: 343517 - DNA, 60 bp, Artificial
  Synthetic oligonucleotide
cacatacaacatgctcagtcaacggagtaaacgactttagctacaatggtggtacattac

SEQ ID NO: 343518 - DNA, 56 bp, Artificial
  Synthetic oligonucleotide
cacatacagaagacagttacagaatcctgcaaatgaacatgaaaaaataccatttc

SEQ ID NO: 343519 - DNA, 60 bp, Artificial
  Synthetic oligonucleotide
cacatacatcaacaagcattctaccatcaggctggcttcacctgttgttaaaacaggatt

SEQ ID NO: 343520 - DNA, 55 bp, Artificial
  Synthetic oligonucleotide
cacatacccagagaggctgaactatcgggagctacctaatagcttctctctgctt

SEQ ID NO: 343521 - DNA, 60 bp, Artificial
  Synthetic oligonucleotide
cacataccctccacaatggaattcaagaaactaccttagccatgactatggcatttatag

SEQ ID NO: 343522 - DNA, 60 bp, Artificial
  Synthetic oligonucleotide
cacataccgatgccacagaggggatacgcaaatccaaacgaggagatcattcgagctaaa

SEQ ID NO: 343523 - DNA, 60 bp, Artificial
  Synthetic oligonucleotide
cacataccgtcattcggaagctgatgatcctacgatgcctcaatatcacgataggatcag

SEQ ID NO: 343524 - DNA, 60 bp, Artificial
  Synthetic oligonucleotide
cacatacctcagaaatgcattggatggctaccccgtcagtattgatagaaagcacaaagc

SEQ ID NO: 343525 - DNA, 60 bp, Artificial
  Synthetic oligonucleotide
cacatacgcgaccgtgaacaattatcatagggaatctctacgatactggactgatgatat

SEQ ID NO: 343526 - DNA, 54 bp, Artificial
  Synthetic oligonucleotide
cacatactacgatgccgcaggacagcaattagtggacgacacaaagaccaataa

SEQ ID NO: 343527 - DNA, 55 bp, Artificial
  Synthetic oligonucleotide
cacatactatcttattccgcatctgactctgacttaagcccagccagcttaagaa

SEQ ID NO: 343528 - DNA, 60 bp, Artificial
  Synthetic oligonucleotide
cacatagattgttgctccattgggcacttgcttgcgtattcttgcacacacgtcttccca

SEQ ID NO: 343529 - DNA, 57 bp, Artificial
  Synthetic oligonucleotide
cacatagcagctactactaagggatgtttagagttgaatcaaaaagtaatttggacg

SEQ ID NO: 343530 - DNA, 55 bp, Artificial
  Synthetic oligonucleotide
cacatagctcagttgctcgagttcgctaattggtataagtcgagattggatgggc

SEQ ID NO: 343531 - DNA, 51 bp, Artificial
  Synthetic oligonucleotide
cacatagggggcacgtacacgcaccaagctccggagatcctaaaaggagag

SEQ ID NO: 343532 - DNA, 60 bp, Artificial
  Synthetic oligonucleotide
cacataggtggtcgcaggggaatgtttatgccttaccagtgtaacatgaatcatgtgaag

SEQ ID NO: 343533 - DNA, 60 bp, Artificial
  Synthetic oligonucleotide
cacatagtcggggtaccctcatctctaatcccgtggcactgctcgctacagagatgtgca

SEQ ID NO: 343534 - DNA, 60 bp, Artificial
  Synthetic oligonucleotide
cacatagtgctagctctgacacgttaagtctaattgcctactcaggaataccatcttatt

SEQ ID NO: 343535 - DNA, 55 bp, Artificial
  Synthetic oligonucleotide
cacatagttccacaaatgcgggttgttcgcaatagtgataacccaaacgccagtg

SEQ ID NO: 343536 - DNA, 57 bp, Artificial
  Synthetic oligonucleotide
cacatagttttaattgtggaggagaatttttctattgtaatacatcaggactgttta

SEQ ID NO: 343537 - DNA, 51 bp, Artificial
  Synthetic oligonucleotide
cacatatagcccccgtacaaagctaaccccgcataaattattattcggtgt

SEQ ID NO: 343538 - DNA, 58 bp, Artificial
  Synthetic oligonucleotide
cacatatatatacggctccgtttgatagcgattacattgtaataatcctagttgtatc

SEQ ID NO: 343539 - DNA, 57 bp, Artificial
  Synthetic oligonucleotide
cacatatatcctcaaactacacactatatccaaacatcatgaacatctacactacac

SEQ ID NO: 343540 - DNA, 59 bp, Artificial
  Synthetic oligonucleotide
cacatatcaatggatcattaggaattgggagactgtaaagatccaatggtcccaagaac

SEQ ID NO: 343541 - DNA, 60 bp, Artificial
  Synthetic oligonucleotide
cacatatcagagaacaagagcgcttgttcgcaccggaatggatcccagaatgtgctctct

SEQ ID NO: 343542 - DNA, 56 bp, Artificial
  Synthetic oligonucleotide
cacatatcagatacttctggtgattattatttacatcctagtttacaaaaacgaaa

SEQ ID NO: 343543 - DNA, 60 bp, Artificial
  Synthetic oligonucleotide
cacatatcgatgccacaggggtgacacgcaaatccaaacgaggagatcatttgagctgaa

SEQ ID NO: 343544 - DNA, 55 bp, Artificial
  Synthetic oligonucleotide
cacatatcggtttgtacagtcagaggctattaggtgccaaaagacagccgcccca

SEQ ID NO: 343545 - DNA, 50 bp, Artificial
  Synthetic oligonucleotide
cacatatgatctgtcactaagtaacttgaagagactaattgaactagtcc

SEQ ID NO: 343546 - DNA, 55 bp, Artificial
  Synthetic oligonucleotide
cacatatgcgaagccccaagatcgaacctactattatcgccacaactcttgagca

SEQ ID NO: 343547 - DNA, 55 bp, Artificial
  Synthetic oligonucleotide
cacatatgcgaagccctaagattgagcctaccattatcgccacaactctcgaaca

SEQ ID NO: 343548 - DNA, 60 bp, Artificial
  Synthetic oligonucleotide
cacatatggtctccctgtcatgacaaatggtgtatcgacaagccttctcgcgatgtgcac

SEQ ID NO: 343549 - DNA, 55 bp, Artificial
  Synthetic oligonucleotide
cacatatgtcaacaatactactgtcatcaataaggaaacagggactgcaaagcaa

SEQ ID NO: 343550 - DNA, 55 bp, Artificial
  Synthetic oligonucleotide
cacatatgtcagatttgacatggaagtgaccattgtaacaaacaacacagggttg

SEQ ID NO: 343551 - DNA, 57 bp, Artificial
  Synthetic oligonucleotide
cacatattaagaggaccactacatttccaaaggcgggcgatactaggcgcgataaaa

SEQ ID NO: 343552 - DNA, 60 bp, Artificial
  Synthetic oligonucleotide
cacatattaagaggacctctacatttccagcgacgcgcgatattaggcgcgctcaaattc

SEQ ID NO: 343553 - DNA, 60 bp, Artificial
  Synthetic oligonucleotide
cacatattccatatcgatactagcttatggtatcgttgcatcacctgcttcgttcaaact

SEQ ID NO: 343554 - DNA, 55 bp, Artificial
  Synthetic oligonucleotide
cacatattgatgcccacttcctctcacaaactaaacaagggggggaaaacttcgc

SEQ ID NO: 343555 - DNA, 60 bp, Artificial
  Synthetic oligonucleotide
cacatattggaatgtcgaaaaatggtctgctgtccaatatggcaatatcaattctgcctg

SEQ ID NO: 343556 - DNA, 60 bp, Artificial
  Synthetic oligonucleotide
cacatcaaaccatcaactggtgcttacggaatcaaagcctcaattggatcacgccgagta

SEQ ID NO: 343557 - DNA, 60 bp, Artificial
  Synthetic oligonucleotide
cacatcaaagtgtggaattagacgacccattaacactgaatactgacaagcagctaacga

SEQ ID NO: 343558 - DNA, 55 bp, Artificial
  Synthetic oligonucleotide
cacatcaaatggatggggtgctgtgaattcaggggcaggagtaactgctgcatgc

SEQ ID NO: 343559 - DNA, 55 bp, Artificial
  Synthetic oligonucleotide
cacatcaacctctctgtatgataatacctcaaggacttatgacgtatctgactct

SEQ ID NO: 343560 - DNA, 55 bp, Artificial
  Synthetic oligonucleotide
cacatcaagacaaagtattgcatgtctccttgtattaaggactttcagccccttc

SEQ ID NO: 343561 - DNA, 57 bp, Artificial
  Synthetic oligonucleotide
cacatcaatggtgcacggaaggctagggtttgacggtcaataccatgagaaggactt

SEQ ID NO: 343562 - DNA, 59 bp, Artificial
  Synthetic oligonucleotide
cacatcacagtatacttggaactgttgaagatgtcggtcgctttgaaggctttgcgggg

SEQ ID NO: 343563 - DNA, 55 bp, Artificial
  Synthetic oligonucleotide
cacatcacatgccgcaacgtgctcctaggattgctggtgctgtcgtaccgcccgg

SEQ ID NO: 343564 - DNA, 53 bp, Artificial
  Synthetic oligonucleotide
cacatcaccactagcgggtctgactaggtcgtatgtgagtgagctagagtcaa

SEQ ID NO: 343565 - DNA, 58 bp, Artificial
  Synthetic oligonucleotide
cacatcacccttctatggaaaagccggaccctccggaggacagacgggtcaatgctgc

SEQ ID NO: 343566 - DNA, 53 bp, Artificial
  Synthetic oligonucleotide
cacatcaccttgagggtccgtggacggttgggattacgaaattctatggcggc

SEQ ID NO: 343567 - DNA, 55 bp, Artificial
  Synthetic oligonucleotide
cacatcacgactacagctttcgaattacttaggcatgtcagcaagtgcacttagc

SEQ ID NO: 343568 - DNA, 59 bp, Artificial
  Synthetic oligonucleotide
cacatcacgtttggacaatcacgaatgtttattccacatattacactgagttttagtaa

SEQ ID NO: 343569 - DNA, 55 bp, Artificial
  Synthetic oligonucleotide
cacatcactcctcccttctatgcccacactgtgcagaatcaatgccaccaattcc

SEQ ID NO: 343570 - DNA, 55 bp, Artificial
  Synthetic oligonucleotide
cacatcagaacgagcgaaagccgtgctgttagagccacattaacctggctagttg

SEQ ID NO: 343571 - DNA, 56 bp, Artificial
  Synthetic oligonucleotide
cacatcaggactcctaggacccctgctcgtgttacaggcggggtttttcttgttga

SEQ ID NO: 343572 - DNA, 53 bp, Artificial
  Synthetic oligonucleotide
cacatcaggtcccattcgagagtctttgcgaggtgctttgactcgagacacga

SEQ ID NO: 343573 - DNA, 60 bp, Artificial
  Synthetic oligonucleotide
cacatcaggtgatagtaaataaccaaaactggtcaggatactcaggagcattcatcgatt

SEQ ID NO: 343574 - DNA, 55 bp, Artificial
  Synthetic oligonucleotide
cacatcagtgggccctagaaaacccctttccatttgaattaaaggaatggcagga

SEQ ID NO: 343575 - DNA, 55 bp, Artificial
  Synthetic oligonucleotide
cacatcataacagttaaacgcaatggtaacgaatacgtatttatcccaggttacg

SEQ ID NO: 343576 - DNA, 55 bp, Artificial
  Synthetic oligonucleotide
cacatcatgaggaacgttgagctagatgagtatgtagacacaccaaatacagggg

SEQ ID NO: 343577 - DNA, 56 bp, Artificial
  Synthetic oligonucleotide
cacatccaactacgtgctggcctccactaactccagtaggataacaccccctaccg

SEQ ID NO: 343578 - DNA, 59 bp, Artificial
  Synthetic oligonucleotide
cacatccaatcatggagtgacagctacgataactcccaggtcaccatcggtagaagtta

SEQ ID NO: 343579 - DNA, 60 bp, Artificial
  Synthetic oligonucleotide
cacatccagacactctgagcgccttcccgtatacctggaaggtcggccgagaggtgtgcc

SEQ ID NO: 343580 - DNA, 55 bp, Artificial
  Synthetic oligonucleotide
cacatccagactgttgcagggacacttgatgctacgctcgggacgtatgatgacg

SEQ ID NO: 343581 - DNA, 56 bp, Artificial
  Synthetic oligonucleotide
cacatccagtttacaaattggatcgtaaatttatcgacgaagacgaaagtggagcg

SEQ ID NO: 343582 - DNA, 54 bp, Artificial
  Synthetic oligonucleotide
cacatccattctggctaggatgctaaccactgaatcagacatatactccctccc

SEQ ID NO: 343583 - DNA, 57 bp, Artificial
  Synthetic oligonucleotide
cacatccattgatggatctaagtttctttgggaatcctagcgtactagtaaggaaac

SEQ ID NO: 343584 - DNA, 55 bp, Artificial
  Synthetic oligonucleotide
cacatccatttatagagccgggttttaatgcttcaaaagcggaagctgtacgtgc

SEQ ID NO: 343585 - DNA, 55 bp, Artificial
  Synthetic oligonucleotide
cacatcccaaactctgacaaccccattgtttccctgctggggcctcctcatccca

SEQ ID NO: 343586 - DNA, 58 bp, Artificial
  Synthetic oligonucleotide
cacatcccaatatcgaggaggtggctctgtccaacagtggagagatccccttctatgg

SEQ ID NO: 343587 - DNA, 53 bp, Artificial
  Synthetic oligonucleotide
cacatccccaccaagaagttggggtaacgcaaaaatctaacgatcctacttta

SEQ ID NO: 343588 - DNA, 60 bp, Artificial
  Synthetic oligonucleotide
cacatcccgttcatgtggaacttccgatatgtgggcagagcatgagttgtgacccggtga

SEQ ID NO: 343589 - DNA, 60 bp, Artificial
  Synthetic oligonucleotide
cacatccgcgtctgcgttggttttgatccgctgttttcgcgctggactaaagatggattc

SEQ ID NO: 343590 - DNA, 59 bp, Artificial
  Synthetic oligonucleotide
cacatccgtacataccaggccaaagcacttacttactcaaatgtattatccttcgtcga

SEQ ID NO: 343591 - DNA, 60 bp, Artificial
  Synthetic oligonucleotide
cacatccgtcagcagcctaatcactactaccgctagtgaccgtcacggctacactccact

SEQ ID NO: 343592 - DNA, 60 bp, Artificial
  Synthetic oligonucleotide
cacatcctcaatatcattctccaaagcataatcctggatttgaacccatgaaacagtggg

SEQ ID NO: 343593 - DNA, 55 bp, Artificial
  Synthetic oligonucleotide
cacatcctttaagggttcactctttacatgctctagcatatccactccatccctc

SEQ ID NO: 343594 - DNA, 55 bp, Artificial
  Synthetic oligonucleotide
cacatcctttgaagacataaatggtatcagacgaccgaaacacctatatgtgtca

SEQ ID NO: 343595 - DNA, 54 bp, Artificial
  Synthetic oligonucleotide
cacatcgccaaatccggaggaagactacttagtgcgttacttattcagaggaat

SEQ ID NO: 343596 - DNA, 56 bp, Artificial
  Synthetic oligonucleotide
cacatcgcttctagatcaccgccctccgactccgttggcccgtttggccctgtcga

SEQ ID NO: 343597 - DNA, 57 bp, Artificial
  Synthetic oligonucleotide
cacatcggcccgcccaactttcacgaaaggtccgctatgtcaaacgtattcactctc

SEQ ID NO: 343598 - DNA, 60 bp, Artificial
  Synthetic oligonucleotide
cacatcggcgtgtcgacaatcatcataacttaaccgcagtgctgggttgccatcgacagc

SEQ ID NO: 343599 - DNA, 60 bp, Artificial
  Synthetic oligonucleotide
cacatcggtgcaatttggacgtaaagagtacatctgtgatcgattcttcggcggactctg

SEQ ID NO: 343600 - DNA, 55 bp, Artificial
  Synthetic oligonucleotide
cacatcgttgtgtatgcttattggaaatgcaaccgttataccaagcccgcagaca

SEQ ID NO: 343601 - DNA, 55 bp, Artificial
  Synthetic oligonucleotide
cacatctaagatggttacgaatatgttcatggagcagcaacctaccatccaggct

SEQ ID NO: 343602 - DNA, 59 bp, Artificial
  Synthetic oligonucleotide
cacatctacagcatggactattccacttgactttgctaacgacttcccaaactcggaaa

SEQ ID NO: 343603 - DNA, 60 bp, Artificial
  Synthetic oligonucleotide
cacatctagaaggcaaaatcataatagttgctgtccatgtggcaagtggattcatagaag

SEQ ID NO: 343604 - DNA, 60 bp, Artificial
  Synthetic oligonucleotide
cacatctcaattggccttaggcatgataactgcggtgagaaatcccttacagacgattga

SEQ ID NO: 343605 - DNA, 55 bp, Artificial
  Synthetic oligonucleotide
cacatctcactgggatttcttacgtggtttaagacaccaccttggtttggtgtcc

SEQ ID NO: 343606 - DNA, 60 bp, Artificial
  Synthetic oligonucleotide
cacatctccaaactgcacaattgctcaggataaggactctaaactcactttggtacttac

SEQ ID NO: 343607 - DNA, 60 bp, Artificial
  Synthetic oligonucleotide
cacatctgatgatggtatgggggagactagtgaaatgagatctcgatcacttttaacacc

SEQ ID NO: 343608 - DNA, 55 bp, Artificial
  Synthetic oligonucleotide
cacatctgcctaccccaatcttttcatgccggtaggtgctgttaaagactatggt

SEQ ID NO: 343609 - DNA, 60 bp, Artificial
  Synthetic oligonucleotide
cacatctgctggaagctcttggtcaatcagtccagcaaagctgggatgcatcatcgccct

SEQ ID NO: 343610 - DNA, 53 bp, Artificial
  Synthetic oligonucleotide
cacatctggtgatgatgactcaccgcctccccctggtgactccccgtcgcacc

SEQ ID NO: 343611 - DNA, 55 bp, Artificial
  Synthetic oligonucleotide
cacatcttagaaggtagaccattgatcggagcaacattaccatgtatggtggagc

SEQ ID NO: 343612 - DNA, 55 bp, Artificial
  Synthetic oligonucleotide
cacatcttctcattcactggggaggaaatggcaactaaggcggactacacccttg

SEQ ID NO: 343613 - DNA, 50 bp, Artificial
  Synthetic oligonucleotide
cacatctttctcatgtcacgagcgcacaggcaaggactatgctccagttc

SEQ ID NO: 343614 - DNA, 56 bp, Artificial
  Synthetic oligonucleotide
cacatctttgtgtatgttaattggaaatactacggtaattccaagcccgcaaacac

SEQ ID NO: 343615 - DNA, 55 bp, Artificial
  Synthetic oligonucleotide
cacatgaaataccgaaacatgatgcaataccgacagctcatggagcttttaggaa

SEQ ID NO: 343616 - DNA, 59 bp, Artificial
  Synthetic oligonucleotide
cacatgaagaaacgccacaagacacagcgtggtaactctgagaaacgaaactggaagga

SEQ ID NO: 343617 - DNA, 55 bp, Artificial
  Synthetic oligonucleotide
cacatgacatacgccgatacaattggtagcttccgtaaaagtgctagtggtatgg

SEQ ID NO: 343618 - DNA, 55 bp, Artificial
  Synthetic oligonucleotide
cacatgaccgatacaggactggcttacacctatggacagttacaagtggcacccc

SEQ ID NO: 343619 - DNA, 60 bp, Artificial
  Synthetic oligonucleotide
cacatgagaagggcataaaccccaactacctcctggcttggaaacaggtgctagcagagc

SEQ ID NO: 343620 - DNA, 60 bp, Artificial
  Synthetic oligonucleotide
cacatgataaaatccgatgtgaaacctgtggtgagcgacacactcaatatcgacagaccg

SEQ ID NO: 343621 - DNA, 55 bp, Artificial
  Synthetic oligonucleotide
cacatgataaagaccaccttgaagccagtggaagaggataacctccacattgaac

SEQ ID NO: 343622 - DNA, 55 bp, Artificial
  Synthetic oligonucleotide
cacatgatcaaagcacaacccaagcaaaagttggacacttcaatccaaacggagt

SEQ ID NO: 343623 - DNA, 55 bp, Artificial
  Synthetic oligonucleotide
cacatgatgatgacgtgctacatgaatattgcttcaatagacgagcggaacgtgc

SEQ ID NO: 343624 - DNA, 60 bp, Artificial
  Synthetic oligonucleotide
cacatgattctacccttaaattgatagcaatgctgtacacaccacttagggctaataatg

SEQ ID NO: 343625 - DNA, 60 bp, Artificial
  Synthetic oligonucleotide
cacatgattgagaggtgttatatgaacactgccgaaagtgtaactcgaaggagacaacgc

SEQ ID NO: 343626 - DNA, 51 bp, Artificial
  Synthetic oligonucleotide
cacatgcaatattccagtgacaacatttgaagctgcttataagtcaaggaa

SEQ ID NO: 343627 - DNA, 55 bp, Artificial
  Synthetic oligonucleotide
cacatgcatctctgaatgtattactcctaatggaagcatccccaatgacatgccc

SEQ ID NO: 343628 - DNA, 56 bp, Artificial
  Synthetic oligonucleotide
cacatgcatgtgtgccgtacgttcacttgtggaataacattccgagatatctggat

SEQ ID NO: 343629 - DNA, 55 bp, Artificial
  Synthetic oligonucleotide
cacatgcatttctgagtgcatcactcctaatggaagcatcccaaatgacaagcca

SEQ ID NO: 343630 - DNA, 60 bp, Artificial
  Synthetic oligonucleotide
cacatgccatggacgctcggccatctgctccttccactcaattacttccgccgcagacct

SEQ ID NO: 343631 - DNA, 55 bp, Artificial
  Synthetic oligonucleotide
cacatgccggcaaatgtgtctggcatcgtgtggcggggtgagatggcaacgctgt

SEQ ID NO: 343632 - DNA, 60 bp, Artificial
  Synthetic oligonucleotide
cacatgcgaaggatgcttggggccaaatgacagacgggggtacatcaccgtgtctgtccc

SEQ ID NO: 343633 - DNA, 55 bp, Artificial
  Synthetic oligonucleotide
cacatgcgacatcttgtgcttcgtatcggcatgcaatgatttctctgtgcgtatg

SEQ ID NO: 343634 - DNA, 54 bp, Artificial
  Synthetic oligonucleotide
cacatgcgatgcccattgcatgctgggagaaagagtgcatgttgcacttgtgaa

SEQ ID NO: 343635 - DNA, 60 bp, Artificial
  Synthetic oligonucleotide
cacatgctaatgggtcagggattgtgcagatacaagtatcaggggtctggaagaagcctt

SEQ ID NO: 343636 - DNA, 60 bp, Artificial
  Synthetic oligonucleotide
cacatgctcaggacatactggaaaaagagcacaacgggaaactctgcagtctcaaaggag

SEQ ID NO: 343637 - DNA, 51 bp, Artificial
  Synthetic oligonucleotide
cacatgctggactggagagttagaaaatgttataccacataaacaaagtga

SEQ ID NO: 343638 - DNA, 55 bp, Artificial
  Synthetic oligonucleotide
cacatgctgtgaccattgtaaccgtcgagttagattagtagtatctgcaactagc

SEQ ID NO: 343639 - DNA, 55 bp, Artificial
  Synthetic oligonucleotide
cacatgcttaccttagtaacctaccatcagaagtcctatctaggatacctgctga

SEQ ID NO: 343640 - DNA, 55 bp, Artificial
  Synthetic oligonucleotide
cacatgcttccataacagtgtgtaacacttttgatacgaaatgtctgatggtggc

SEQ ID NO: 343641 - DNA, 60 bp, Artificial
  Synthetic oligonucleotide
cacatggaagacaagacccctgtagcctcatggaatgatgtgccgtacctcggaaagcgt

SEQ ID NO: 343642 - DNA, 60 bp, Artificial
  Synthetic oligonucleotide
cacatggaaggtgagccgggagctgtgtcatcgcttcgtggtgaaacggcgatggttgtt

SEQ ID NO: 343643 - DNA, 57 bp, Artificial
  Synthetic oligonucleotide
cacatggagcgcttcacctgggacgtgggggcgtgggaggagtgtttcttctgaaaa

SEQ ID NO: 343644 - DNA, 60 bp, Artificial
  Synthetic oligonucleotide
cacatggagctttgaggaaaagacaacagaccactgcagagcctgcaaaaatctggccct

SEQ ID NO: 343645 - DNA, 60 bp, Artificial
  Synthetic oligonucleotide
cacatggataggaatgaattcacgtagcacctcactgtctgtgtcactagtattggtggg

SEQ ID NO: 343646 - DNA, 57 bp, Artificial
  Synthetic oligonucleotide
cacatggattgcgacattgaggtcacagactcatacaaaacagacttgggtagacta

SEQ ID NO: 343647 - DNA, 50 bp, Artificial
  Synthetic oligonucleotide
cacatggcacatgtgcgaaacttgtcccccgctaaacacccggtgtggga

SEQ ID NO: 343648 - DNA, 60 bp, Artificial
  Synthetic oligonucleotide
cacatggcatcagggcccggaagcaatgtaaggggcctgtgtggacttgtgcaacatcag

SEQ ID NO: 343649 - DNA, 60 bp, Artificial
  Synthetic oligonucleotide
cacatggcccgcgagctacatccggagttttacaaagactgctgacacagtacaaagcct

SEQ ID NO: 343650 - DNA, 57 bp, Artificial
  Synthetic oligonucleotide
cacatggcctccggtctttcagaccgttccaacgcactgggctccgaaagccagttc

SEQ ID NO: 343651 - DNA, 54 bp, Artificial
  Synthetic oligonucleotide
cacatggctacaggtctgtccttttatactacctttatacaaaggctgaggata

SEQ ID NO: 343652 - DNA, 60 bp, Artificial
  Synthetic oligonucleotide
cacatggctgtgcagagcttacaatgagggaattggctttgtcttggaaccattgtggaa

SEQ ID NO: 343653 - DNA, 60 bp, Artificial
  Synthetic oligonucleotide
cacatgggaccaaaaactctggtgccgtcacttctgtgtgcttgcggactcagaatccag

SEQ ID NO: 343654 - DNA, 58 bp, Artificial
  Synthetic oligonucleotide
cacatgggcaatctatgggatgatggggtcttcaagcattacattgatgccggagaca

SEQ ID NO: 343655 - DNA, 60 bp, Artificial
  Synthetic oligonucleotide
cacatggggctgtgaggaatttggctgtctagctgtaagtgatggttgtgtctttggttc

SEQ ID NO: 343656 - DNA, 57 bp, Artificial
  Synthetic oligonucleotide
cacatgggtgtgtgcaaaccgttttgggttacacatttacaagcaacttatataata

SEQ ID NO: 343657 - DNA, 59 bp, Artificial
  Synthetic oligonucleotide
cacatggtaagattcgctcggattaaccagatcataaatgaggatttacactcggtgtt

SEQ ID NO: 343658 - DNA, 55 bp, Artificial
  Synthetic oligonucleotide
cacatggtctccttttaaaggacttggctgatgctcaaccgggtctgatctcctc

SEQ ID NO: 343659 - DNA, 56 bp, Artificial
  Synthetic oligonucleotide
cacatggtcttgcctgtgcgtgaatcaccttccactatgatactaataggtctttc

SEQ ID NO: 343660 - DNA, 60 bp, Artificial
  Synthetic oligonucleotide
cacatggtttcaatactatacagaggatcaaggccagttccccctacaacatgcaataag

SEQ ID NO: 343661 - DNA, 55 bp, Artificial
  Synthetic oligonucleotide
cacatgtaaagcctaatttcaagtcgataaatgttcaagggacggtttccggcag

SEQ ID NO: 343662 - DNA, 60 bp, Artificial
  Synthetic oligonucleotide
cacatgtagttcaagccgtttgcgataccactctgcccacccatgttaactacgatgatt

SEQ ID NO: 343663 - DNA, 57 bp, Artificial
  Synthetic oligonucleotide
cacatgtcccgatgaacaagattaccaagttcggatggccaagtcttcgtataagcc

SEQ ID NO: 343664 - DNA, 60 bp, Artificial
  Synthetic oligonucleotide
cacatgtgatgggtttaaaatgcatctaacttacatgactgcaatccaattacttcagcg

SEQ ID NO: 343665 - DNA, 55 bp, Artificial
  Synthetic oligonucleotide
cacatgtgcaccttcaactcggaatttgttcagacgatcaagtccgtacataact

SEQ ID NO: 343666 - DNA, 55 bp, Artificial
  Synthetic oligonucleotide
cacatgtgtatgcagggataattggcatggttcgaatcgaccgtgggtgtctttc

SEQ ID NO: 343667 - DNA, 60 bp, Artificial
  Synthetic oligonucleotide
cacatgtgttagtcttttattgtcgaacacaggcccttgtatctgatgtagcgagtgttt

SEQ ID NO: 343668 - DNA, 60 bp, Artificial
  Synthetic oligonucleotide
cacatgttgttggcaataatacttttgtgaatgtgtgctacgagggcttgatgtacgaag

SEQ ID NO: 343669 - DNA, 55 bp, Artificial
  Synthetic oligonucleotide
cacatgttttgaatccgtttggctcgactgcccaactggcttgggcacgtctgct

SEQ ID NO: 343670 - DNA, 60 bp, Artificial
  Synthetic oligonucleotide
cacattaaaatggttgcttaatgagttacacttcaatgtgctccatgtcactcgtcatgt

SEQ ID NO: 343671 - DNA, 60 bp, Artificial
  Synthetic oligonucleotide
cacattaacagatgtgtatctcccagatctcgaagcttacctccacccagagaccctgtc

SEQ ID NO: 343672 - DNA, 55 bp, Artificial
  Synthetic oligonucleotide
cacattaatacccgtaattggaacacggtagcaagttacaccattaaatgtggta

SEQ ID NO: 343673 - DNA, 52 bp, Artificial
  Synthetic oligonucleotide
cacattaatggagcggagtgttaatcccatgctccgtggagtattcagcgaa

SEQ ID NO: 343674 - DNA, 57 bp, Artificial
  Synthetic oligonucleotide
cacattaccaccaaatccctcaatcatttggagtttaccgcggtgtggaatctcaaa

SEQ ID NO: 343675 - DNA, 60 bp, Artificial
  Synthetic oligonucleotide
cacattaccagacattgtcactgaagcttcagagaaatttatccctaatagggcatatag

SEQ ID NO: 343676 - DNA, 60 bp, Artificial
  Synthetic oligonucleotide
cacattacgcattgaatctgctgtctgtgaatcagtgcttgcggatgcgaatgaaactct

SEQ ID NO: 343677 - DNA, 54 bp, Artificial
  Synthetic oligonucleotide
cacattacgcttagttttagcaacaaacagacggttagaatagaaagtacaaaa

SEQ ID NO: 343678 - DNA, 60 bp, Artificial
  Synthetic oligonucleotide
cacattacttagtgcatccagctcagatatcccagtgggatgatccctggggagaggttc

SEQ ID NO: 343679 - DNA, 54 bp, Artificial
  Synthetic oligonucleotide
cacattaggactggttctaacagtttctttaaactgtaatcgtcgttgcgacgt

SEQ ID NO: 343680 - DNA, 55 bp, Artificial
  Synthetic oligonucleotide
cacattaggggcgtctcagagagtccaactcataaacactaacggcagctggcat

SEQ ID NO: 343681 - DNA, 54 bp, Artificial
  Synthetic oligonucleotide
cacattataccgccgttggctcgactcgttttagtaaccctacctcagtcgaat

SEQ ID NO: 343682 - DNA, 59 bp, Artificial
  Synthetic oligonucleotide
cacattatacttaggcgtctcgagggtgagatagagaggactgtggacgaactcgtaaa

SEQ ID NO: 343683 - DNA, 55 bp, Artificial
  Synthetic oligonucleotide
cacattcagtgttcgaatactttctgtggcaattctgagtcaggctcatgcgatt

SEQ ID NO: 343684 - DNA, 59 bp, Artificial
  Synthetic oligonucleotide
cacattccgcgtgacggtaccgaccggcctcgctagtgctggtagcaacgctgaaaatc

SEQ ID NO: 343685 - DNA, 59 bp, Artificial
  Synthetic oligonucleotide
cacattccggaagtctgcttgaaatgggagctaatggatgaagactaccagggaaggct

SEQ ID NO: 343686 - DNA, 60 bp, Artificial
  Synthetic oligonucleotide
cacattccggctgcaatccagggacttgaacggtaagccaattcagtgcggccccattca

SEQ ID NO: 343687 - DNA, 55 bp, Artificial
  Synthetic oligonucleotide
cacattcggacggtcacacatcaattagtaagacgccaaaagtaacaggcaaagg

SEQ ID NO: 343688 - DNA, 55 bp, Artificial
  Synthetic oligonucleotide
cacattcgtacgtaccaggccaaagcgcttacttactccaacgtgttatctttcg

SEQ ID NO: 343689 - DNA, 55 bp, Artificial
  Synthetic oligonucleotide
cacattcgtagacttaaccctatcttccacattgttccaacgactcgttcttgga

SEQ ID NO: 343690 - DNA, 55 bp, Artificial
  Synthetic oligonucleotide
cacattcgtcaatgactcaaataacagcgagcgtctagccgagcttctgccggaa

SEQ ID NO: 343691 - DNA, 59 bp, Artificial
  Synthetic oligonucleotide
cacattctacatgcctatgtcaacggaaaaccctactgaagtcgacacaatcgccaggt

SEQ ID NO: 343692 - DNA, 58 bp, Artificial
  Synthetic oligonucleotide
cacattctcataatttcatcgttgtgcaatgatcttgcatctcttaggattttcatgg

SEQ ID NO: 343693 - DNA, 60 bp, Artificial
  Synthetic oligonucleotide
cacattctgatggagacgtgcaaccaattagcactggtaacgtcacgatacctacaaatt

SEQ ID NO: 343694 - DNA, 60 bp, Artificial
  Synthetic oligonucleotide
cacattgaagaccatagaatgtttatataacaatgtctatctagcaatctatatgatgcc

SEQ ID NO: 343695 - DNA, 50 bp, Artificial
  Synthetic oligonucleotide
cacattgacgttgaaatggcaggtagccgttccgccagtaaatattggta

SEQ ID NO: 343696 - DNA, 58 bp, Artificial
  Synthetic oligonucleotide
cacattgactcttgatttttgtatccaagtatcacacattaaaaggtcagtcaaattc

SEQ ID NO: 343697 - DNA, 57 bp, Artificial
  Synthetic oligonucleotide
cacattgacttgtcaagtttccttaacagagtgtcctacttttctgacatcaattaa

SEQ ID NO: 343698 - DNA, 55 bp, Artificial
  Synthetic oligonucleotide
cacattgagtatccgtgcaagacagcgcagagctccccacaatgggcaactgcaa

SEQ ID NO: 343699 - DNA, 55 bp, Artificial
  Synthetic oligonucleotide
cacattgcaaacctcagccggctgctggacgggtacatagcggtccacgttgacg

SEQ ID NO: 343700 - DNA, 60 bp, Artificial
  Synthetic oligonucleotide
cacattgcaagcatgaggaggaattatttcacggcggaggtgtctcattgcagagccaca

SEQ ID NO: 343701 - DNA, 60 bp, Artificial
  Synthetic oligonucleotide
cacattgcaagtatgagaaggaattattttacagcggaagtatcccattgcagagccacc

SEQ ID NO: 343702 - DNA, 60 bp, Artificial
  Synthetic oligonucleotide
cacattgcagtactcaaagcttgtaattgacgagactgagcatgtgcgactaacgtatag

SEQ ID NO: 343703 - DNA, 55 bp, Artificial
  Synthetic oligonucleotide
cacattggcaggacccggaacagactgtgaggcatactcagatacagggatcttc

SEQ ID NO: 343704 - DNA, 50 bp, Artificial
  Synthetic oligonucleotide
cacattggcgcattgtgtggtgcttcgcccgtagaatcctcccacagcga

SEQ ID NO: 343705 - DNA, 55 bp, Artificial
  Synthetic oligonucleotide
cacattggctgctacacccggtatagaaagactggatctagtgcccatgcgagat

SEQ ID NO: 343706 - DNA, 60 bp, Artificial
  Synthetic oligonucleotide
cacattgtcagagccaagaaacattcagcaaaagctccctccagagatagttacattgca

SEQ ID NO: 343707 - DNA, 55 bp, Artificial
  Synthetic oligonucleotide
cacattgtcttctcacgggatcagttttgatgtcgtgtggcttgtgggattttgc

SEQ ID NO: 343708 - DNA, 60 bp, Artificial
  Synthetic oligonucleotide
cacattgtgagcccacagaagcaacatttaaggcacattacaaagtatgtcaagcaacac

SEQ ID NO: 343709 - DNA, 55 bp, Artificial
  Synthetic oligonucleotide
cacattgtgggcgtcatcacttaatataacttcacagttaattgtactctggagg

SEQ ID NO: 343710 - DNA, 53 bp, Artificial
  Synthetic oligonucleotide
cacattgttaaattgttcaactttaaaaggcgatttgtaaatcgtcgttggag

SEQ ID NO: 343711 - DNA, 55 bp, Artificial
  Synthetic oligonucleotide
cacattgtttgggatgtaggattacagtctacaatctcactagtggtaccatggg

SEQ ID NO: 343712 - DNA, 60 bp, Artificial
  Synthetic oligonucleotide
cacatttaatccaaacccttgtggggattcttggtctgctgagatgataagtcgaagcag

SEQ ID NO: 343713 - DNA, 60 bp, Artificial
  Synthetic oligonucleotide
cacatttacctcggctatcttgacattctctcatacacggatgaggaatcagtggaagag

SEQ ID NO: 343714 - DNA, 60 bp, Artificial
  Synthetic oligonucleotide
cacatttagaagggaaagtcatcctggtagcagtccatgtagccagtagctacatagaag

SEQ ID NO: 343715 - DNA, 57 bp, Artificial
  Synthetic oligonucleotide
cacatttatcgtgggcactcactccgcaggaggcaatggagttgggtattgctcctg

SEQ ID NO: 343716 - DNA, 60 bp, Artificial
  Synthetic oligonucleotide
cacatttctttgagtggatacacctgaggctaatggataccacgatgttcgtaggcgacc

SEQ ID NO: 343717 - DNA, 55 bp, Artificial
  Synthetic oligonucleotide
cacatttgaggacggcctgagagaactatcagtaatacagagtcaccttaaagtc

SEQ ID NO: 343718 - DNA, 55 bp, Artificial
  Synthetic oligonucleotide
cacatttggaacccatacttttacacaaccctatgaacccagagcatatactgct

SEQ ID NO: 343719 - DNA, 56 bp, Artificial
  Synthetic oligonucleotide
cacattttatgatttaacgatttgtactatcttacctacgttagtatactctataa

SEQ ID NO: 343720 - DNA, 60 bp, Artificial
  Synthetic oligonucleotide
cacattttattgtccacagagtcttagatgtagtcagaggcaacttgtatgttgaacatc

SEQ ID NO: 343721 - DNA, 55 bp, Artificial
  Synthetic oligonucleotide
caccaaaacaaaacagcatattgacacctgggagagactaggagaccctctgtcc

SEQ ID NO: 343722 - DNA, 56 bp, Artificial
  Synthetic oligonucleotide
caccaaaacgacatactggtgggacggacttcaatcctccgacgactttgctctaa

SEQ ID NO: 343723 - DNA, 55 bp, Artificial
  Synthetic oligonucleotide
caccaaaagtcaaatatgtaattggagctgaagtgcatcaaggcaagttgctaac

SEQ ID NO: 343724 - DNA, 58 bp, Artificial
  Synthetic oligonucleotide
caccaaaagtcagttaaaatgttgaatgacagaattgctgtaacatgctttcaaacgc

SEQ ID NO: 343725 - DNA, 60 bp, Artificial
  Synthetic oligonucleotide
caccaaaatctgaatttgaatttgctgatatgtacacatccaaattcttggaactatgga

SEQ ID NO: 343726 - DNA, 55 bp, Artificial
  Synthetic oligonucleotide
caccaaactccattttagtgctgtacgccattttatgcatgcaaccgaattcggt

SEQ ID NO: 343727 - DNA, 60 bp, Artificial
  Synthetic oligonucleotide
caccaaactgtgggtcttagtgcacttgggctcacaaggatgaatagcactcaaagcgca

SEQ ID NO: 343728 - DNA, 55 bp, Artificial
  Synthetic oligonucleotide
caccaaagggcaaccgattctgggaggcccgcagtagccatgggcgtaacccgaa

SEQ ID NO: 343729 - DNA, 60 bp, Artificial
  Synthetic oligonucleotide
caccaaatcatcaggagagtgtctactggagctgaagtcaaggcagttctgcctgcgact

SEQ ID NO: 343730 - DNA, 60 bp, Artificial
  Synthetic oligonucleotide
caccaaatcatgagggaatacaagcgggagtggatagattttacaggacttgcaagctag

SEQ ID NO: 343731 - DNA, 56 bp, Artificial
  Synthetic oligonucleotide
caccaaatggggagaaaagaatgaacgctcaggattgggcactagtcactcaggtt

SEQ ID NO: 343732 - DNA, 60 bp, Artificial
  Synthetic oligonucleotide
caccaaatggtctccaggtgacaattcagcaaaattcaggcgattcactgctgcccttca

SEQ ID NO: 343733 - DNA, 55 bp, Artificial
  Synthetic oligonucleotide
caccaaatgtggggccgggccatggttgactcccaaatgcctggttgattacccc

SEQ ID NO: 343734 - DNA, 55 bp, Artificial
  Synthetic oligonucleotide
caccaaatgtgtctacaagccttctcggttcgtgcactgttaggcaagcgcggac

SEQ ID NO: 343735 - DNA, 59 bp, Artificial
  Synthetic oligonucleotide
caccaaattctaggtattgttatcagagaatgtagctaagaacagtttgctgaacatac

SEQ ID NO: 343736 - DNA, 55 bp, Artificial
  Synthetic oligonucleotide
caccaaatttgagaagagatttacggaagcaaaggcaggtcaaaccctggcttgc

SEQ ID NO: 343737 - DNA, 60 bp, Artificial
  Synthetic oligonucleotide
caccaacaaagtaaactctgtgattgagaagatgaacactcaattcgaggctgttgggaa

SEQ ID NO: 343738 - DNA, 58 bp, Artificial
  Synthetic oligonucleotide
caccaacaaggtaaattctgtgatcgaaaagatgaacacccaattcggagctgttgga

SEQ ID NO: 343739 - DNA, 57 bp, Artificial
  Synthetic oligonucleotide
caccaacatccaagtagaggagagggcaaatagagaattcaataacttgaccaaagg

SEQ ID NO: 343740 - DNA, 59 bp, Artificial
  Synthetic oligonucleotide
caccaacatgataccttctaccgcggaagtactgtaaacggatactgccgtggcgcata

SEQ ID NO: 343741 - DNA, 51 bp, Artificial
  Synthetic oligonucleotide
caccaaccatggtcaccaaaaatagtaggaggattaggaggaaacattaca

SEQ ID NO: 343742 - DNA, 57 bp, Artificial
  Synthetic oligonucleotide
caccaacccctctgtctccagttctaagagtttgagcgatctaccaacctctggcgt

SEQ ID NO: 343743 - DNA, 56 bp, Artificial
  Synthetic oligonucleotide
caccaacctcgcacataggcttagggatcggagtacccaggttaagtactcaggga

SEQ ID NO: 343744 - DNA, 55 bp, Artificial
  Synthetic oligonucleotide
caccaacgaagcggacacgcttctgagaacttagaataatgaatcatgcattcca

SEQ ID NO: 343745 - DNA, 55 bp, Artificial
  Synthetic oligonucleotide
caccaacgactgcccgaactccagcatcgtttatgaggcggacaccatgatctta

SEQ ID NO: 343746 - DNA, 60 bp, Artificial
  Synthetic oligonucleotide
caccaacgagactctgacgtacaaggtcgctctggactaccacttcgttgccaccgctgc

SEQ ID NO: 343747 - DNA, 58 bp, Artificial
  Synthetic oligonucleotide
caccaacgagttgcagaaatgttagcgttaagtttcagttgcaagcttacgtcaatcg

SEQ ID NO: 343748 - DNA, 50 bp, Artificial
  Synthetic oligonucleotide
caccaacgccgggtttcgatggggctgccgggatagcgggagggcatatg

SEQ ID NO: 343749 - DNA, 60 bp, Artificial
  Synthetic oligonucleotide
caccaacgtctctgtgcgtcccttcgacatccaggctggtcatccctacctcgctgatcc

SEQ ID NO: 343750 - DNA, 55 bp, Artificial
  Synthetic oligonucleotide
caccaactaaagaggagtccacttacaattggctgcccggtgctcactttggctc

SEQ ID NO: 343751 - DNA, 56 bp, Artificial
  Synthetic oligonucleotide
caccaactccagtcgacattcaaatcgaatcgactaaggatgccaaacatgttggc

SEQ ID NO: 343752 - DNA, 52 bp, Artificial
  Synthetic oligonucleotide
caccaacttgacctttaacctagcctgcttctatgacgaattcatgcaccac

SEQ ID NO: 343753 - DNA, 60 bp, Artificial
  Synthetic oligonucleotide
caccaacttgcagatacggattttatcgaaatgtctgcaaatctgttagtatcttgcact

SEQ ID NO: 343754 - DNA, 55 bp, Artificial
  Synthetic oligonucleotide
caccaactttgacctgcaaggccccgcaaattctgtcaccctcgccgcttctgac

SEQ ID NO: 343755 - DNA, 54 bp, Artificial
  Synthetic oligonucleotide
caccaagaccgattagacttccggatgggcctccttgttttcagcggtccaaat

SEQ ID NO: 343756 - DNA, 60 bp, Artificial
  Synthetic oligonucleotide
caccaagcaagcggaggcagctgctcccgtggtggagtccaagtggcgcgcccttgagtc

SEQ ID NO: 343757 - DNA, 59 bp, Artificial
  Synthetic oligonucleotide
caccaagcctacgttcgttgttttcaaggcgaacaccgcggctggtgagatcctgcaga

SEQ ID NO: 343758 - DNA, 60 bp, Artificial
  Synthetic oligonucleotide
caccaagcgagcttgggcacagggagacatgccaatcagtcatgtaacggcaatgatttt

SEQ ID NO: 343759 - DNA, 60 bp, Artificial
  Synthetic oligonucleotide
caccaagcgcaagaagcggtagctacactgtgactgttatggagcttctactgtgaatat

SEQ ID NO: 343760 - DNA, 55 bp, Artificial
  Synthetic oligonucleotide
caccaaggaaactttctgttcagagtaatgaaagttgctcagatgatgtggcgcg

SEQ ID NO: 343761 - DNA, 55 bp, Artificial
  Synthetic oligonucleotide
caccaaggactccaattcgagagcttctctctctaaaattcgcttgcggaagcgt

SEQ ID NO: 343762 - DNA, 57 bp, Artificial
  Synthetic oligonucleotide
caccaaggcctacgttatctcaggtccggcaaccaatttgctgttctctctagggcc

SEQ ID NO: 343763 - DNA, 55 bp, Artificial
  Synthetic oligonucleotide
caccaaggtcttgctagagcccgaaagcatgtccaaggtgaacctgaacggggtg

SEQ ID NO: 343764 - DNA, 51 bp, Artificial
  Synthetic oligonucleotide
caccaagtagcaatgcgagaggggcgggatttctggcacgcataagcgcta

SEQ ID NO: 343765 - DNA, 60 bp, Artificial
  Synthetic oligonucleotide
caccaagtcattgctatatgacatctatctctcatcagtgtgcggtggtgtgtcggatgg

SEQ ID NO: 343766 - DNA, 60 bp, Artificial
  Synthetic oligonucleotide
caccaagtgtcaacagagaattgaggagctagatggtgaaggtaataagactcataaata

SEQ ID NO: 343767 - DNA, 53 bp, Artificial
  Synthetic oligonucleotide
caccaagttgcgtttgttacgcacgcgcattttgtccttaaattcggtttcta

SEQ ID NO: 343768 - DNA, 60 bp, Artificial
  Synthetic oligonucleotide
caccaagtttacattcacagatcagaggaggcaatcctttgtgttgatggtgatcaagtt

SEQ ID NO: 343769 - DNA, 55 bp, Artificial
  Synthetic oligonucleotide
caccaagttttcgaagggaataaggagccagcagtcctcaggaacggagacccgc

SEQ ID NO: 343770 - DNA, 55 bp, Artificial
  Synthetic oligonucleotide
caccaatacgccctacactggggcgctggggcttcttgactttgcactcgagctt

SEQ ID NO: 343771 - DNA, 58 bp, Artificial
  Synthetic oligonucleotide
caccaatagcacttcaaatgaccccccaaatagcactaacatcctgaaagaagaccca

SEQ ID NO: 343772 - DNA, 51 bp, Artificial
  Synthetic oligonucleotide
caccaatcaccaaatccatgatcatgccaatcactgacatcaagactggaa

SEQ ID NO: 343773 - DNA, 56 bp, Artificial
  Synthetic oligonucleotide
caccaatccagacaacgtgggacgaagggtggacaaggttaccttctggcgcgcac

SEQ ID NO: 343774 - DNA, 52 bp, Artificial
  Synthetic oligonucleotide
caccaatcccatggtcctaaattgtgacttgattgagaataagggaaagaca

SEQ ID NO: 343775 - DNA, 59 bp, Artificial
  Synthetic oligonucleotide
caccaatcccttgtcggcaagcaatctccattccagaatgcttacaacgtcaagggcaa

SEQ ID NO: 343776 - DNA, 60 bp, Artificial
  Synthetic oligonucleotide
caccaatcgaattaatatacgcatgtcgatcagccaaagaaatagctgcgttgcaagatg

SEQ ID NO: 343777 - DNA, 60 bp, Artificial
  Synthetic oligonucleotide
caccaatcgaggtatggctattcctcgcacgcgccttggcttctacggctattatgtggg

SEQ ID NO: 343778 - DNA, 60 bp, Artificial
  Synthetic oligonucleotide
caccaatcggcagtcaggaagacagcctacacctctaagagacagtcatcctcaggccat

SEQ ID NO: 343779 - DNA, 54 bp, Artificial
  Synthetic oligonucleotide
caccaatctgtgcaagtgttttccgttggtcgagagctcagtctgtttttggac

SEQ ID NO: 343780 - DNA, 60 bp, Artificial
  Synthetic oligonucleotide
caccaatgagagacggggcgacaactgcgcatgctcttgacgaatgaccgtgagttaatg

SEQ ID NO: 343781 - DNA, 55 bp, Artificial
  Synthetic oligonucleotide
caccaatgcagttgggaggagtgggacaaacaattatggagtaaagggattcggc

SEQ ID NO: 343782 - DNA, 60 bp, Artificial
  Synthetic oligonucleotide
caccaatggctaacttggataataagggcatgttattcaccagtaattatgtattagcat

SEQ ID NO: 343783 - DNA, 55 bp, Artificial
  Synthetic oligonucleotide
caccaatgtctactatcagaatggcactaaacaaagttgcttacagttctgtttc

SEQ ID NO: 343784 - DNA, 59 bp, Artificial
  Synthetic oligonucleotide
caccaatgttgtgacaggcagtggggggaaaagtcccaaatatgccataggcaatatta

SEQ ID NO: 343785 - DNA, 58 bp, Artificial
  Synthetic oligonucleotide
caccaattacggacgcagaatcacctgggtctaaagtgcctgtacccagtctatgtaa

SEQ ID NO: 343786 - DNA, 60 bp, Artificial
  Synthetic oligonucleotide
caccaattagtcatgctgatctatatcctgcgacctgccctgtcacgccatttttttggc

SEQ ID NO: 343787 - DNA, 55 bp, Artificial
  Synthetic oligonucleotide
caccaattatgatggcagtctacacccagtttggtttgaagcactgggaagggtc

SEQ ID NO: 343788 - DNA, 53 bp, Artificial
  Synthetic oligonucleotide
caccaattcatttatacagtgcaagctacgcgaaaccgatcatcagtgcacat

SEQ ID NO: 343789 - DNA, 60 bp, Artificial
  Synthetic oligonucleotide
caccaattctgatatcctcactcttgtttccgccggcgatgactttacgcttaggatgcc

SEQ ID NO: 343790 - DNA, 60 bp, Artificial
  Synthetic oligonucleotide
caccaattggggtcgattcatttatcgccctagtattagtgtcgcatatatagtagtgac

SEQ ID NO: 343791 - DNA, 50 bp, Artificial
  Synthetic oligonucleotide
caccacaaatcccaacggcgcagtgtatttgttgtatgcgaataaatccc

SEQ ID NO: 343792 - DNA, 60 bp, Artificial
  Synthetic oligonucleotide
caccacaacatcccggagtccattcttgatgcttacatcgccatcaagactcatgcccac

SEQ ID NO: 343793 - DNA, 53 bp, Artificial
  Synthetic oligonucleotide
caccacaaccacccgtgtgagagggtggcgcgtggtcatcaacaatggcacaa

SEQ ID NO: 343794 - DNA, 58 bp, Artificial
  Synthetic oligonucleotide
caccacaactcaacccaattgacggaccattacctgaggacaacgagccaagtggata

SEQ ID NO: 343795 - DNA, 52 bp, Artificial
  Synthetic oligonucleotide
caccacaagagctgaaaaacccaagttcctcccagatttgtacgactataaa

SEQ ID NO: 343796 - DNA, 55 bp, Artificial
  Synthetic oligonucleotide
caccacaaggtagaagaagttcccaaggacaacagcctagacagtctgagtctgg

SEQ ID NO: 343797 - DNA, 55 bp, Artificial
  Synthetic oligonucleotide
caccacaagtttaattcttcaggctgtcccgagaggttggcgagctgccgacccc

SEQ ID NO: 343798 - DNA, 60 bp, Artificial
  Synthetic oligonucleotide
caccacaattcggaaatgttatgggactaagatattatacagccagtaatatatgtcaga

SEQ ID NO: 343799 - DNA, 51 bp, Artificial
  Synthetic oligonucleotide
caccacacaaaccccgatcaactggataattaacggcgaaactctcgatgg

SEQ ID NO: 343800 - DNA, 52 bp, Artificial
  Synthetic oligonucleotide
caccacacatggaaggaagctacatcaagagtggttcatgatgcaagtatat

SEQ ID NO: 343801 - DNA, 55 bp, Artificial
  Synthetic oligonucleotide
caccacacgaggggtgtgcgtgctgaacgaattcttgaaacacggcgtgcaggcg

SEQ ID NO: 343802 - DNA, 60 bp, Artificial
  Synthetic oligonucleotide
caccacacttttattgctggccaaatccagcgcagtggcagatccactgtcttcaagagg

SEQ ID NO: 343803 - DNA, 53 bp, Artificial
  Synthetic oligonucleotide
caccacagcaaatgagactgccaccattactggtaacatctaatattgattta

SEQ ID NO: 343804 - DNA, 55 bp, Artificial
  Synthetic oligonucleotide
caccacagccttagctgacatttggcgctgtaggaaccagacccttaaggtcagc

SEQ ID NO: 343805 - DNA, 60 bp, Artificial
  Synthetic oligonucleotide
caccacagggaacagttacagtgactgtgcgcctgtagtgcacctcaaaggtgatcctaa

SEQ ID NO: 343806 - DNA, 55 bp, Artificial
  Synthetic oligonucleotide
caccacaggtaaatttggacagcaaagtggggcagtctatgtaggcaactacagg

SEQ ID NO: 343807 - DNA, 55 bp, Artificial
  Synthetic oligonucleotide
caccacagtgattgtacgtgacaagagaccctgccagttctctgcggtggatcct

SEQ ID NO: 343808 - DNA, 55 bp, Artificial
  Synthetic oligonucleotide
caccacatacggtcaataggtgactcagtatgccaattgggtcttgaccaagcac

SEQ ID NO: 343809 - DNA, 60 bp, Artificial
  Synthetic oligonucleotide
caccacatccctttctagacttgtcgagctaccagtgatcaccgggggatcagacgcaac

SEQ ID NO: 343810 - DNA, 59 bp, Artificial
  Synthetic oligonucleotide
caccacatcctcctttacaaccgctctgaatagggcgcgtactctgaatgaacagggct

SEQ ID NO: 343811 - DNA, 59 bp, Artificial
  Synthetic oligonucleotide
caccacattccaccaagctctgcctgctggtggctccagttccggaacagtaaaccctg

SEQ ID NO: 343812 - DNA, 60 bp, Artificial
  Synthetic oligonucleotide
caccaccaatgatgactaaactggaaaccgcgctgagacaaccgtccacataatcaggat

SEQ ID NO: 343813 - DNA, 60 bp, Artificial
  Synthetic oligonucleotide
caccaccagactctataaagtcaccacaagcaccatgggtgtttgcttgtgcaccagaca

SEQ ID NO: 343814 - DNA, 55 bp, Artificial
  Synthetic oligonucleotide
caccaccagctcttaacaacatacttacaaactctgaccccattggggacaaaac

SEQ ID NO: 343815 - DNA, 55 bp, Artificial
  Synthetic oligonucleotide
caccaccaggtgcttcacaacctacaactagaacacaagccatgttagggaccca

SEQ ID NO: 343816 - DNA, 53 bp, Artificial
  Synthetic oligonucleotide
caccaccatatagcgtattacaagacccgccgcaacctgtagtatggcggcgt

SEQ ID NO: 343817 - DNA, 60 bp, Artificial
  Synthetic oligonucleotide
caccaccatgcaggaggcaatgcgcggaacatacacagtatgggacgtcaatgccgcctc

SEQ ID NO: 343818 - DNA, 55 bp, Artificial
  Synthetic oligonucleotide
caccaccccaatattctgcggcttttgctaatagaccgacgattgcacaggcttc

SEQ ID NO: 343819 - DNA, 55 bp, Artificial
  Synthetic oligonucleotide
caccacccgagcacggacagtgaccaaaccagcctatatgtccgagcatcaggga

SEQ ID NO: 343820 - DNA, 60 bp, Artificial
  Synthetic oligonucleotide
caccacccgttcgtcaagtcataacacgtgctccggtcagtaacattatatgtgacgtga

SEQ ID NO: 343821 - DNA, 60 bp, Artificial
  Synthetic oligonucleotide
caccaccctaatgatgcagctgagcaaacaaaactctaccagaactcgaacacttatgtg

SEQ ID NO: 343822 - DNA, 55 bp, Artificial
  Synthetic oligonucleotide
caccaccgcatcaggttgtgacaacattgcacgatgtaattgtaactcgggtgtg

SEQ ID NO: 343823 - DNA, 51 bp, Artificial
  Synthetic oligonucleotide
caccaccggaatgaggcagcagacaaaccacaccggcaaaaaccccggggg

SEQ ID NO: 343824 - DNA, 58 bp, Artificial
  Synthetic oligonucleotide
caccaccggcagaaatatgccgtaaactcgcgggaactcgtggttgctatcgactgcc

SEQ ID NO: 343825 - DNA, 52 bp, Artificial
  Synthetic oligonucleotide
caccacctagcgggaaagggggaaacttccccgtgcaacaaataggcggcaa

SEQ ID NO: 343826 - DNA, 55 bp, Artificial
  Synthetic oligonucleotide
caccacctggagatggatgggactctgacctactgcgctgactactcgcggtggg

SEQ ID NO: 343827 - DNA, 53 bp, Artificial
  Synthetic oligonucleotide
caccacctggtggcgaacagcccaagacgcgtgatgtggccatgttaggtact

SEQ ID NO: 343828 - DNA, 55 bp, Artificial
  Synthetic oligonucleotide
caccacctgttgacaagtcaaaattcacctatcgattggaattatcatgacgagg

SEQ ID NO: 343829 - DNA, 55 bp, Artificial
  Synthetic oligonucleotide
caccaccttcaaaaggaagcactttaaacctacagtggctgcttgtcgtgatgcc

SEQ ID NO: 343830 - DNA, 54 bp, Artificial
  Synthetic oligonucleotide
caccaccttctttagaaaactctgtgtatttcccaacacttagtgggtcattgg

SEQ ID NO: 343831 - DNA, 58 bp, Artificial
  Synthetic oligonucleotide
caccacgaaatctgaattaccaagttgccagacctatccttaagttcagatcacgctt

SEQ ID NO: 343832 - DNA, 60 bp, Artificial
  Synthetic oligonucleotide
caccacgaatgctgttatagtgggagataaagcagcttatcgcgttgagcgaaaaagcga

SEQ ID NO: 343833 - DNA, 55 bp, Artificial
  Synthetic oligonucleotide
caccacgagtttggtagagtaaacgaacatgcctgggtctttgatacggatggta

SEQ ID NO: 343834 - DNA, 54 bp, Artificial
  Synthetic oligonucleotide
caccacgccaggacaaatcaccgtgaccgcccaacggctggaaaccaagggggc

SEQ ID NO: 343835 - DNA, 60 bp, Artificial
  Synthetic oligonucleotide
caccacgccctctcagattacctgatgggcccccctgctctcagcggtcgaaattcttgc

SEQ ID NO: 343836 - DNA, 60 bp, Artificial
  Synthetic oligonucleotide
caccacgcctaccatcattaaaacagctctgatgcgccaacctatctccaggagaaagtg

SEQ ID NO: 343837 - DNA, 57 bp, Artificial
  Synthetic oligonucleotide
caccacggacaacagcacagagaccttcagacctggaggaggagatatgagggacaa

SEQ ID NO: 343838 - DNA, 59 bp, Artificial
  Synthetic oligonucleotide
caccacggagcagtacagtactcaggaggccgattcaccatccctacaggtacgggcaa

SEQ ID NO: 343839 - DNA, 58 bp, Artificial
  Synthetic oligonucleotide
caccacggccgggtagctgtcaagcccgaattgcaaattggtgtgtgacgtgcggtta

SEQ ID NO: 343840 - DNA, 60 bp, Artificial
  Synthetic oligonucleotide
caccacggctaaagccatggagcaaatggctggatcaagtgaacaggcatctgaagccat

SEQ ID NO: 343841 - DNA, 53 bp, Artificial
  Synthetic oligonucleotide
caccacggctaagactacaactcagactacaagtagtaccagctccactgcta

SEQ ID NO: 343842 - DNA, 54 bp, Artificial
  Synthetic oligonucleotide
caccacgggggattcccagcctcgcagacccccgacgagacagcagcccccgac

SEQ ID NO: 343843 - DNA, 53 bp, Artificial
  Synthetic oligonucleotide
caccacgtgtttgagggagtgaaagaaccagcggtcctcactaaaaatgaccc

SEQ ID NO: 343844 - DNA, 60 bp, Artificial
  Synthetic oligonucleotide
caccactaatccactaatcaggcatgaaaacaggatggtgctggccagcactacggctaa

SEQ ID NO: 343845 - DNA, 55 bp, Artificial
  Synthetic oligonucleotide
caccactacctcctaccatgtctatgactccctgtggtacaccatgatcggtggc

SEQ ID NO: 343846 - DNA, 55 bp, Artificial
  Synthetic oligonucleotide
caccactagcatggggaacactatcacatgctacgtaaaagccctagcggcacgc

SEQ ID NO: 343847 - DNA, 55 bp, Artificial
  Synthetic oligonucleotide
caccactagcgccatggctgaagctcccgcttcccaccatcgttaccccgcccct

SEQ ID NO: 343848 - DNA, 54 bp, Artificial
  Synthetic oligonucleotide
caccactctgttttgtgcatcagatgctaaagcatacaaagcagaggcacataa

SEQ ID NO: 343849 - DNA, 60 bp, Artificial
  Synthetic oligonucleotide
caccactgaaactcccttagttgtaaattctagcggtgccctatctgttgctactgcaga

SEQ ID NO: 343850 - DNA, 50 bp, Artificial
  Synthetic oligonucleotide
caccactgaagcccccttagttataaactctggcggtgccctaactgttg

SEQ ID NO: 343851 - DNA, 55 bp, Artificial
  Synthetic oligonucleotide
caccactgacgtgacctgcggctcgcagcaagtgtactggtccctgccggatatg

SEQ ID NO: 343852 - DNA, 59 bp, Artificial
  Synthetic oligonucleotide
caccactgataaaatgaactttctacgcaagatagtgaaaaactgtagggatgaggaca

SEQ ID NO: 343853 - DNA, 55 bp, Artificial
  Synthetic oligonucleotide
caccactggctaaactttctccaagccgcgtaccgactgcagccagggccctctg

SEQ ID NO: 343854 - DNA, 56 bp, Artificial
  Synthetic oligonucleotide
caccactggggagatccctttctacggcaaggctatcccccttgaggtgatcaagg

SEQ ID NO: 343855 - DNA, 56 bp, Artificial
  Synthetic oligonucleotide
caccacttctggagggacctacggatcttggaagtgtcattttggactccaacacg

SEQ ID NO: 343856 - DNA, 60 bp, Artificial
  Synthetic oligonucleotide
caccagaaaatcggtcatacgggccttttgaggctgtgcatagtggcgcgctagcatgtg

SEQ ID NO: 343857 - DNA, 52 bp, Artificial
  Synthetic oligonucleotide
caccagaacatcactccctctatccaaaccaatcgttgtgcacaccgtcgca

SEQ ID NO: 343858 - DNA, 55 bp, Artificial
  Synthetic oligonucleotide
caccagaaccacacctggctcaaatagttgcagaagacctactttcccctagtgt

SEQ ID NO: 343859 - DNA, 60 bp, Artificial
  Synthetic oligonucleotide
caccagaaggtatcatccccagcatgtttgagccagaacgtgagaaagttgatgccatag

SEQ ID NO: 343860 - DNA, 60 bp, Artificial
  Synthetic oligonucleotide
caccagaatgagcaaggatcaggatatgcagcggaccaaaggagcacacaaaatgccatt

SEQ ID NO: 343861 - DNA, 55 bp, Artificial
  Synthetic oligonucleotide
caccagagatacaccaatcttgaccctaccaaactgcctgccgacacgttcatga

SEQ ID NO: 343862 - DNA, 55 bp, Artificial
  Synthetic oligonucleotide
caccagagattcggacattgttttcacctgggccattcatcacccaccaacatct

SEQ ID NO: 343863 - DNA, 55 bp, Artificial
  Synthetic oligonucleotide
caccagagccacgagggagcagtttgacaattggtatgaagcagtcatgaaggaa

SEQ ID NO: 343864 - DNA, 55 bp, Artificial
  Synthetic oligonucleotide
caccagaggatggtcggacaacggcgaccccatgttcaaccagacatgggcaacc

SEQ ID NO: 343865 - DNA, 60 bp, Artificial
  Synthetic oligonucleotide
caccagataacatagagtctccaaatgcgccatgggtgtttgcctgtgctccagatcgat

SEQ ID NO: 343866 - DNA, 51 bp, Artificial
  Synthetic oligonucleotide
caccagatacatactcagcagctgggtacataacttgctggtatcagacaa

SEQ ID NO: 343867 - DNA, 60 bp, Artificial
  Synthetic oligonucleotide
caccagattgtgatattgaaggacgaaatgtttaggttgttgctctttaataatctgcat

SEQ ID NO: 343868 - DNA, 55 bp, Artificial
  Synthetic oligonucleotide
caccagcaaacatacagcaatttgaacatattgtccagcttaggcgtgcgctaac

SEQ ID NO: 343869 - DNA, 55 bp, Artificial
  Synthetic oligonucleotide
caccagcacaagtgttatgcgaacttctgagcatagcacgcgacaaaggtatgac

SEQ ID NO: 343870 - DNA, 59 bp, Artificial
  Synthetic oligonucleotide
caccagcattattatcgcaccataacataaatttatattcccatgagctacgatagatg

SEQ ID NO: 343871 - DNA, 55 bp, Artificial
  Synthetic oligonucleotide
caccagccgagcactgctttgactacttcaaattagctgtagcttggtctccaag

SEQ ID NO: 343872 - DNA, 54 bp, Artificial
  Synthetic oligonucleotide
caccagccgtgttcagatcaagcacttctgtaaccccggactgagtatcaatag

SEQ ID NO: 343873 - DNA, 60 bp, Artificial
  Synthetic oligonucleotide
caccagcctatgaccctcacctggcagggggaccccattcctgaggagctctataagatg

SEQ ID NO: 343874 - DNA, 51 bp, Artificial
  Synthetic oligonucleotide
caccagcgaaaggagtcggagaccgggtctggggtgtatacgatccagctg

SEQ ID NO: 343875 - DNA, 55 bp, Artificial
  Synthetic oligonucleotide
caccagcgcccttgcctttcgtgtcccccccgtttccatcgacgtcagcctccgc

SEQ ID NO: 343876 - DNA, 55 bp, Artificial
  Synthetic oligonucleotide
caccagctagagctaaggaagcccacatgcagatgaaggccgcagcagtccgtgg

SEQ ID NO: 343877 - DNA, 53 bp, Artificial
  Synthetic oligonucleotide
caccagctcctggattacgagacaagttttaggtttgttggacttttccccca

SEQ ID NO: 343878 - DNA, 55 bp, Artificial
  Synthetic oligonucleotide
caccagctgaattggagagatacaacatcgcacttgttgattgttttgaagcgga

SEQ ID NO: 343879 - DNA, 55 bp, Artificial
  Synthetic oligonucleotide
caccagctgacgactacgttttgcaacgggaagaaactacgagtagagtacaacc

SEQ ID NO: 343880 - DNA, 59 bp, Artificial
  Synthetic oligonucleotide
caccagctgcgttagttaaatgtttcaccactctaatacgcaatatatgttacgtacca

SEQ ID NO: 343881 - DNA, 59 bp, Artificial
  Synthetic oligonucleotide
caccagctttaaactcccctaatgttgaggcatgtggatacagtgacagggtacaacaa

SEQ ID NO: 343882 - DNA, 55 bp, Artificial
  Synthetic oligonucleotide
caccaggagctaccgtccctttcctgcttagcctaacatgctgcatcagaacagc

SEQ ID NO: 343883 - DNA, 60 bp, Artificial
  Synthetic oligonucleotide
caccaggaggtgccaatcaaagaattgctcctcaatggatgttgcctttgcttctaggcc

SEQ ID NO: 343884 - DNA, 60 bp, Artificial
  Synthetic oligonucleotide
caccaggataggggcgtgcttagaggcacatcagaatgctttgatgaaacaacataccga

SEQ ID NO: 343885 - DNA, 52 bp, Artificial
  Synthetic oligonucleotide
caccaggatggactttcaatgtaggtcaagggtacattcatattatagcccc

SEQ ID NO: 343886 - DNA, 55 bp, Artificial
  Synthetic oligonucleotide
caccaggatttggagccactcagcttacaacaatcccacttgacgtaacatcagc

SEQ ID NO: 343887 - DNA, 60 bp, Artificial
  Synthetic oligonucleotide
caccaggccaacaactgtcgttgatgtaggactggcgccaaggccacctatagtaattga

SEQ ID NO: 343888 - DNA, 60 bp, Artificial
  Synthetic oligonucleotide
caccaggcctgatctcaattgggcctctaagcccaagtctggacatggacgcgcatctaa

SEQ ID NO: 343889 - DNA, 58 bp, Artificial
  Synthetic oligonucleotide
caccaggcgtgttgtggcgtcatcgaatcacgaacacttgtgttggccgtagttaaat

SEQ ID NO: 343890 - DNA, 55 bp, Artificial
  Synthetic oligonucleotide
caccagggaaatctttgtacgacggtgagaaaaccaatctcgcccagacgcaaga

SEQ ID NO: 343891 - DNA, 60 bp, Artificial
  Synthetic oligonucleotide
caccagggaacacgagtttggctccgtattacgagacactcgttgacactcacagattca

SEQ ID NO: 343892 - DNA, 59 bp, Artificial
  Synthetic oligonucleotide
caccagggaggaaagtacatctatgggtcatcctcagggtgtgtccccgtgcagggcac

SEQ ID NO: 343893 - DNA, 55 bp, Artificial
  Synthetic oligonucleotide
caccagggaggttcaggacaattgtctgtgggttattccctgcacagatcatggc

SEQ ID NO: 343894 - DNA, 60 bp, Artificial
  Synthetic oligonucleotide
caccagggcactcatgtctgtcacaccaagcacatggacttctggtgcgtggagcacgac

SEQ ID NO: 343895 - DNA, 56 bp, Artificial
  Synthetic oligonucleotide
caccagggcgtgacgggaggtgtggtctgggcgggactgggagtggtcaaccctca

SEQ ID NO: 343896 - DNA, 52 bp, Artificial
  Synthetic oligonucleotide
caccagggcttaccaaccatgaatactccggggagctgtcaatttctgacat

SEQ ID NO: 343897 - DNA, 50 bp, Artificial
  Synthetic oligonucleotide
caccaggggttcaatctctgccctgacagcgtgtgaggagccagtggcaa

SEQ ID NO: 343898 - DNA, 52 bp, Artificial
  Synthetic oligonucleotide
caccagggtacgagatatgtcctgaagtcaagataaacacagagagtacact

SEQ ID NO: 343899 - DNA, 60 bp, Artificial
  Synthetic oligonucleotide
caccaggtactgcgactattatacacaatacacagataaatctggctatagtcaaacagt

SEQ ID NO: 343900 - DNA, 55 bp, Artificial
  Synthetic oligonucleotide
caccaggtagccatggatccagaaagcatcccatggacggccttttgggccatag

SEQ ID NO: 343901 - DNA, 60 bp, Artificial
  Synthetic oligonucleotide
caccaggtaggtacagaacagcaatttgtgggctttaccctgcgcagatcaaggctaggc

SEQ ID NO: 343902 - DNA, 57 bp, Artificial
  Synthetic oligonucleotide
caccaggtcgattccggacaatagtatgtggcctattccctacccagattcaagtac

SEQ ID NO: 343903 - DNA, 60 bp, Artificial
  Synthetic oligonucleotide
caccagtaccagatatttcactatgtagatttattggattacgtgtcgagtcttctgtgt

SEQ ID NO: 343904 - DNA, 55 bp, Artificial
  Synthetic oligonucleotide
caccagtactacagttaaggctgcctgttggtgggcagggatcaggcaggaattt

SEQ ID NO: 343905 - DNA, 55 bp, Artificial
  Synthetic oligonucleotide
caccagtagacccaaagataaagcaataggggaatgcttcaatcctatcactggg

SEQ ID NO: 343906 - DNA, 56 bp, Artificial
  Synthetic oligonucleotide
caccagtagggtagaccgatttgtgtggcgcggaggtagggtgccagggtgatttg

SEQ ID NO: 343907 - DNA, 55 bp, Artificial
  Synthetic oligonucleotide
caccagtatagaaacggtgtgaaatgctgtacccagacgggtcgacattatcgcc

SEQ ID NO: 343908 - DNA, 55 bp, Artificial
  Synthetic oligonucleotide
caccagtatatcaagaagaacacaccaaattaggttttcggaatctgctacttca

SEQ ID NO: 343909 - DNA, 60 bp, Artificial
  Synthetic oligonucleotide
caccagtctatgaggattctccttatgaacctgctgttctttccatcaatgaccagcgcc

SEQ ID NO: 343910 - DNA, 60 bp, Artificial
  Synthetic oligonucleotide
caccagtgagcaacaaagtctataccagaacactgatgcatacgtctcagttggatcatc

SEQ ID NO: 343911 - DNA, 54 bp, Artificial
  Synthetic oligonucleotide
caccagtgctaacacaccagataatgtatgtaccaccagggggacccatacccg

SEQ ID NO: 343912 - DNA, 55 bp, Artificial
  Synthetic oligonucleotide
caccagtggcatgcttgaaggattagtcatgcagtctccaaagattgttggctac

SEQ ID NO: 343913 - DNA, 55 bp, Artificial
  Synthetic oligonucleotide
caccagtgggcgtcaaaacagacagggctcatattggaagcggccttggtgtacc

SEQ ID NO: 343914 - DNA, 60 bp, Artificial
  Synthetic oligonucleotide
caccagttaataatactgctgtccgcgactggctctatcctccaaatgccaatatcgaac

SEQ ID NO: 343915 - DNA, 57 bp, Artificial
  Synthetic oligonucleotide
caccagttcgctagttcatactcttgttggtttagatggtgttctagcggtggggcc

SEQ ID NO: 343916 - DNA, 57 bp, Artificial
  Synthetic oligonucleotide
caccagttgattggggttcaggtgaagtaaatgactcaacaacagttgaaccgactc

SEQ ID NO: 343917 - DNA, 58 bp, Artificial
  Synthetic oligonucleotide
caccagttgccagggtccaaagtacggacgaatatgtgcaaaggactaacatctatta

SEQ ID NO: 343918 - DNA, 55 bp, Artificial
  Synthetic oligonucleotide
caccagtttatgcaacgaccttagataacaagttgcttggtgtacttagaagtta

SEQ ID NO: 343919 - DNA, 57 bp, Artificial
  Synthetic oligonucleotide
caccataaccacttacaaactttgatcctgtttcaactggttgtgttatgtgtatag

SEQ ID NO: 343920 - DNA, 60 bp, Artificial
  Synthetic oligonucleotide
caccataagacaagagatggctagcagaggcctttgggattcctttcgtcagtccgagag

SEQ ID NO: 343921 - DNA, 57 bp, Artificial
  Synthetic oligonucleotide
caccataagttggtccccatcattacccacgtacattgtgccaccgggtgattatac

SEQ ID NO: 343922 - DNA, 55 bp, Artificial
  Synthetic oligonucleotide
caccataattggccgcggtggcgtgaaacgtgaactcatccgcaagggacccttg

SEQ ID NO: 343923 - DNA, 55 bp, Artificial
  Synthetic oligonucleotide
caccatacacgaagatgccgccgactctgatagaataggtaccatcatctcaaac

SEQ ID NO: 343924 - DNA, 60 bp, Artificial
  Synthetic oligonucleotide
caccatacagcaatcaggcaagttgtcctgtgttggggtgatttgatgaatctagccacc

SEQ ID NO: 343925 - DNA, 60 bp, Artificial
  Synthetic oligonucleotide
caccatacagcactaaggcaagctattctgtgttggggtgagttgatgaatctggccacc

SEQ ID NO: 343926 - DNA, 59 bp, Artificial
  Synthetic oligonucleotide
caccatacagcactcagaccaccaaatgcccctatcttatcaacacttccggaaactac

SEQ ID NO: 343927 - DNA, 57 bp, Artificial
  Synthetic oligonucleotide
caccatacagcactcaggcaagctattctgtgttgggacgacgaggcaggtccccta

SEQ ID NO: 343928 - DNA, 57 bp, Artificial
  Synthetic oligonucleotide
caccatacatgccgaggtatggtttgcttcgaaacctacgggataggagtttagcac

SEQ ID NO: 343929 - DNA, 56 bp, Artificial
  Synthetic oligonucleotide
caccataccgagccgtgctttagtccgataaagatcgagcaggtctgggatgaacc

SEQ ID NO: 343930 - DNA, 60 bp, Artificial
  Synthetic oligonucleotide
caccatactgtaaggtccacaccaacaggagtcagacacttagcaattgggaacctgatc

SEQ ID NO: 343931 - DNA, 56 bp, Artificial
  Synthetic oligonucleotide
caccatagcaaccggttacacattaactgcttagttgcgcttcgcgaataccccta

SEQ ID NO: 343932 - DNA, 55 bp, Artificial
  Synthetic oligonucleotide
caccatagccaggtgccaatgtacaacgggagtgtacttttgtgcatctaagaac

SEQ ID NO: 343933 - DNA, 55 bp, Artificial
  Synthetic oligonucleotide
caccatagctctcattcgacatgtggtatgtgatgccctaaaatcacaggacaat

SEQ ID NO: 343934 - DNA, 60 bp, Artificial
  Synthetic oligonucleotide
caccatagtcaccatggctgaatttgcatggtgttacgacaccgaccaattcgaaaagct

SEQ ID NO: 343935 - DNA, 60 bp, Artificial
  Synthetic oligonucleotide
caccatattaatctgcaatatcatttaggctttatagcatttactgcttcctaatgcttt

SEQ ID NO: 343936 - DNA, 52 bp, Artificial
  Synthetic oligonucleotide
caccatcaacggcggacccgctaagaaatgcatctacagtaaagacttcgct

SEQ ID NO: 343937 - DNA, 58 bp, Artificial
  Synthetic oligonucleotide
caccatcaccccgtgaggttggataccacgggtcacgtcagttctacagtctggcgga

SEQ ID NO: 343938 - DNA, 55 bp, Artificial
  Synthetic oligonucleotide
caccatcagacaggatacgtctgggcgtgatcttgtgtcttccgtgtactccgcg

SEQ ID NO: 343939 - DNA, 50 bp, Artificial
  Synthetic oligonucleotide
caccatcagagcatagttgacgagatcttacagtacctttctggagttgc

SEQ ID NO: 343940 - DNA, 52 bp, Artificial
  Synthetic oligonucleotide
caccatcagttctcatcgcactatacaaaagtggtagtctttacagagcagt

SEQ ID NO: 343941 - DNA, 55 bp, Artificial
  Synthetic oligonucleotide
caccatcatactgaaggcctgtaagttgacacccggggttgaatgctgacagtca

SEQ ID NO: 343942 - DNA, 51 bp, Artificial
  Synthetic oligonucleotide
caccatcatttggtctattgcacagcccagctcaaattgcaatctgtctgg

SEQ ID NO: 343943 - DNA, 55 bp, Artificial
  Synthetic oligonucleotide
caccatccgctgaagagtgtggatacagtgatagggtgcgatcgatcacgcttgg

SEQ ID NO: 343944 - DNA, 56 bp, Artificial
  Synthetic oligonucleotide
caccatcctgcaactctaaaagaacaccaagacttgtacaaaaaggacaactccta

SEQ ID NO: 343945 - DNA, 60 bp, Artificial
  Synthetic oligonucleotide
caccatctagagaggataacttgcaacgcgttttcacggtagcctccattagaagcatgt

SEQ ID NO: 343946 - DNA, 55 bp, Artificial
  Synthetic oligonucleotide
caccatctagagaggataacttgcagcgtgtattcacagtggcttccattagaag

SEQ ID NO: 343947 - DNA, 60 bp, Artificial
  Synthetic oligonucleotide
caccatctgtccggcttaaggcctcaacacgtggagtattgcatgtccgtatggtcgctc

SEQ ID NO: 343948 - DNA, 55 bp, Artificial
  Synthetic oligonucleotide
caccatctgtttaaaacctttaatggagcacttgaagtccatacccatatgggaa

SEQ ID NO: 343949 - DNA, 55 bp, Artificial
  Synthetic oligonucleotide
caccatgaatcctgacatactagacgattggaatgttggtgtagctccaccgccc

SEQ ID NO: 343950 - DNA, 55 bp, Artificial
  Synthetic oligonucleotide
caccatgacccaacttcttttcgatgagcattattcgatagtttgtgattactcg

SEQ ID NO: 343951 - DNA, 60 bp, Artificial
  Synthetic oligonucleotide
caccatgcaacgagagtacgatcagaccacccgagccctgctccaagacaatgaacaact

SEQ ID NO: 343952 - DNA, 60 bp, Artificial
  Synthetic oligonucleotide
caccatgcccatcaacatcatgcatacactattagtgtgcttcattctttacctacagct

SEQ ID NO: 343953 - DNA, 55 bp, Artificial
  Synthetic oligonucleotide
caccatggcaatccacatgtcaacagtctacttcggatcaattgaatgcagatta

SEQ ID NO: 343954 - DNA, 55 bp, Artificial
  Synthetic oligonucleotide
caccatggcttgtgctttccacatatcagcttcaggagattctagatgtcggaca

SEQ ID NO: 343955 - DNA, 59 bp, Artificial
  Synthetic oligonucleotide
caccatgggcgcacaggtatctaggcaaaatgttggaactcattctacacaaaactccg

SEQ ID NO: 343956 - DNA, 60 bp, Artificial
  Synthetic oligonucleotide
caccatgggcgctcaagtatctagacaaaatgttggtacacactccactcaaaacacagt

SEQ ID NO: 343957 - DNA, 60 bp, Artificial
  Synthetic oligonucleotide
caccatggggtcgctggcactgctcatccacgacgtcgaggcccgctttcaagccgtgcc

SEQ ID NO: 343958 - DNA, 60 bp, Artificial
  Synthetic oligonucleotide
caccatgggtctttgcatgtgcaccagttcgatgtccaccaacatgtatctatgttgcag

SEQ ID NO: 343959 - DNA, 55 bp, Artificial
  Synthetic oligonucleotide
caccatgtacgatcaggaggaaggctggaatctccgaataactgtcctgatgaca

SEQ ID NO: 343960 - DNA, 55 bp, Artificial
  Synthetic oligonucleotide
caccatgtagcataaaatggcaagctaggatctatgacattgaatctgatggtac

SEQ ID NO: 343961 - DNA, 55 bp, Artificial
  Synthetic oligonucleotide
caccatgtctctgggtagcacagctctgagcaccagtgtgttcaaccctcctgag

SEQ ID NO: 343962 - DNA, 55 bp, Artificial
  Synthetic oligonucleotide
caccatgtggaaattcgacaacaactagtgactgtcctgtcactgctgagaaggt

SEQ ID NO: 343963 - DNA, 60 bp, Artificial
  Synthetic oligonucleotide
caccattaaacaaaagagaccggatttcatcctagccacagacattgccgagatgggagc

SEQ ID NO: 343964 - DNA, 52 bp, Artificial
  Synthetic oligonucleotide
caccattaccttttatgaaaggtcttattccattcagacttgtgaagaatcc

SEQ ID NO: 343965 - DNA, 51 bp, Artificial
  Synthetic oligonucleotide
caccattactataagggaccagaaaacaccacttggggtgttgagctcaca

SEQ ID NO: 343966 - DNA, 55 bp, Artificial
  Synthetic oligonucleotide
caccattagcgacttgaaataaggctaatcctccaatagattttagaatcgctac

SEQ ID NO: 343967 - DNA, 55 bp, Artificial
  Synthetic oligonucleotide
caccattcaagactttaagatgatgcaaaggagtgacgatgagatttgggtgaat

SEQ ID NO: 343968 - DNA, 60 bp, Artificial
  Synthetic oligonucleotide
caccattccagcaaggtggtttgatatgtgccatggtaccaggagatcagagctatggat

SEQ ID NO: 343969 - DNA, 51 bp, Artificial
  Synthetic oligonucleotide
caccattcgcaacagcttgatcggcgattgtgtctattgtctcgcaaagct

SEQ ID NO: 343970 - DNA, 55 bp, Artificial
  Synthetic oligonucleotide
caccattcggctccagattcaagtcacaccagaatgaatactgctggatggacgc

SEQ ID NO: 343971 - DNA, 60 bp, Artificial
  Synthetic oligonucleotide
caccattcgtcatctcatagacgctgggatattttcacaggcagagttcgacgctgggac

SEQ ID NO: 343972 - DNA, 51 bp, Artificial
  Synthetic oligonucleotide
caccattctacccgcataagagctcgaacatgatattagcatctttcctgt

SEQ ID NO: 343973 - DNA, 55 bp, Artificial
  Synthetic oligonucleotide
caccattctccattgtacgaacaagaatatcaggattatatggattacctgcagc

SEQ ID NO: 343974 - DNA, 57 bp, Artificial
  Synthetic oligonucleotide
caccattgagacgacgaccgtgcctcaggacgcggtgtcacgctcacagcggcgagg

SEQ ID NO: 343975 - DNA, 55 bp, Artificial
  Synthetic oligonucleotide
caccattgagcaggtcaccgctcctgcagtagcctcaggatggcgcaggcgtaca

SEQ ID NO: 343976 - DNA, 60 bp, Artificial
  Synthetic oligonucleotide
caccattgcagagtttcttcagttaggtctaagccaaaccactgtgcgaagcagtcaatg

SEQ ID NO: 343977 - DNA, 54 bp, Artificial
  Synthetic oligonucleotide
caccattggttaaacttcctacaagccgcctatcggttacagccagggccttcg

SEQ ID NO: 343978 - DNA, 60 bp, Artificial
  Synthetic oligonucleotide
caccatttcaaatagcagaacaacagatacagaattttcaagtggcaaattggctgcact

SEQ ID NO: 343979 - DNA, 55 bp, Artificial
  Synthetic oligonucleotide
caccatttctttcagccatacccagtattagaagaatcgaggataagagagttgg

SEQ ID NO: 343980 - DNA, 55 bp, Artificial
  Synthetic oligonucleotide
cacccaaaataccagtggtaaccaatcccgtgaatgcaaccatagcacatcgtcc

SEQ ID NO: 343981 - DNA, 59 bp, Artificial
  Synthetic oligonucleotide
cacccaaacgctgagtggatcctgaagactctcgtgaacacggagcacgcctatgagaa

SEQ ID NO: 343982 - DNA, 50 bp, Artificial
  Synthetic oligonucleotide
cacccaaagcatcgactccaaccccactatcgccgacgcgtggagaggtg

SEQ ID NO: 343983 - DNA, 55 bp, Artificial
  Synthetic oligonucleotide
cacccaaaggtgctataaacaccagccttccatttcagaatatacatccagtcac

SEQ ID NO: 343984 - DNA, 55 bp, Artificial
  Synthetic oligonucleotide
cacccaaagttattgtaaatattgacccattagtagcgtctattatactaagccc

SEQ ID NO: 343985 - DNA, 55 bp, Artificial
  Synthetic oligonucleotide
cacccaacgcgaatgttgtggaccctctcgcatatatggctgacccaagacacgg

SEQ ID NO: 343986 - DNA, 54 bp, Artificial
  Synthetic oligonucleotide
cacccaacgtggctgtgaaacaccgcggtgcgctcactcgtagcctgcgaacac

SEQ ID NO: 343987 - DNA, 58 bp, Artificial
  Synthetic oligonucleotide
cacccaactatgccaatgaaggaaatacatgagtccattcgttggactaaggacccac

SEQ ID NO: 343988 - DNA, 51 bp, Artificial
  Synthetic oligonucleotide
cacccaacttttccagtagaggaaatacaagagtccataagatggactaaa

SEQ ID NO: 343989 - DNA, 58 bp, Artificial
  Synthetic oligonucleotide
cacccaagacactccaatatacccatggttacccattgtacctaaagtatcatttgca

SEQ ID NO: 343990 - DNA, 53 bp, Artificial
  Synthetic oligonucleotide
cacccaagatgtgggaaatgggaacaaccaaagaactggtacaaaacacttac

SEQ ID NO: 343991 - DNA, 55 bp, Artificial
  Synthetic oligonucleotide
cacccaaggaaaacgcactgacttggaaaccttagtaagtgccataaacagcgga

SEQ ID NO: 343992 - DNA, 50 bp, Artificial
  Synthetic oligonucleotide
cacccaaggaaactccggcaagggttctggacgcgcttcgcgccaggggg

SEQ ID NO: 343993 - DNA, 58 bp, Artificial
  Synthetic oligonucleotide
cacccaatagcagacaaggacttatcgactacgcattgcgtcagaacggtgctccagt

SEQ ID NO: 343994 - DNA, 57 bp, Artificial
  Synthetic oligonucleotide
cacccaatctaccatgctatagacaagatttggggtggtccgactattatgaaaggt

SEQ ID NO: 343995 - DNA, 60 bp, Artificial
  Synthetic oligonucleotide
cacccaattgaacaatatgtcttgtcagatccttgataaccagcttgcaacctctctagg

SEQ ID NO: 343996 - DNA, 52 bp, Artificial
  Synthetic oligonucleotide
cacccacaacaaatggaccatcattggaagggacgccctacaacaatgccag

SEQ ID NO: 343997 - DNA, 55 bp, Artificial
  Synthetic oligonucleotide
cacccacaacgcaacccggcaaaccgacagccagcagtccaagagctgctccaca

SEQ ID NO: 343998 - DNA, 54 bp, Artificial
  Synthetic oligonucleotide
cacccacaccaaagccgtttttccgggatgaggtctcgttctgcgttgggctta

SEQ ID NO: 343999 - DNA, 55 bp, Artificial
  Synthetic oligonucleotide
cacccacaccaatccggtggcaatgtttcagtacgactgtgcccttctcaacggc

SEQ ID NO: 344000 - DNA, 50 bp, Artificial
  Synthetic oligonucleotide
cacccacaccttgtgtttgaggtcacgaagtggttattagcaatcctggg

SEQ ID NO: 344001 - DNA, 55 bp, Artificial
  Synthetic oligonucleotide
cacccacactgccactcctctcaacctggcagcaccaaccaacatcactgtctcc

SEQ ID NO: 344002 - DNA, 60 bp, Artificial
  Synthetic oligonucleotide
cacccacaggaccacggtcatggatgcagttcgcacatcaccttcttggctcatcgctag

SEQ ID NO: 344003 - DNA, 56 bp, Artificial
  Synthetic oligonucleotide
cacccacagttgaatcaagaactaaaccattcaccgtcccaatcttaactgttgag

SEQ ID NO: 344004 - DNA, 55 bp, Artificial
  Synthetic oligonucleotide
cacccacatccccagtaacatgcgtagatataaggccaacggcacagcctagtgg

SEQ ID NO: 344005 - DNA, 55 bp, Artificial
  Synthetic oligonucleotide
cacccacccacagggcccactgggcgccagcacactggtatcacggtacctttgt

SEQ ID NO: 344006 - DNA, 55 bp, Artificial
  Synthetic oligonucleotide
cacccaccccgtaacttagaagtactgaacacaaccgaccaatagcggcgtgaca

SEQ ID NO: 344007 - DNA, 56 bp, Artificial
  Synthetic oligonucleotide
cacccaccttcctaaagaaccctccaccttcatattcctcaagcggagcaagcttc

SEQ ID NO: 344008 - DNA, 54 bp, Artificial
  Synthetic oligonucleotide
cacccacgagggcaaggttaattatagggtggaggggtgtcggatgtctgggga

SEQ ID NO: 344009 - DNA, 58 bp, Artificial
  Synthetic oligonucleotide
cacccacgtaataactcaagctcgcggttgtagtcataaacggatcacaggtagctgt

SEQ ID NO: 344010 - DNA, 54 bp, Artificial
  Synthetic oligonucleotide
cacccacgtgacagggggggtgcaagcccacggtgcttacgggcttgcatccct

SEQ ID NO: 344011 - DNA, 53 bp, Artificial
  Synthetic oligonucleotide
cacccactaaccttccactcactcatcgcttctttccgtctcgttctatacct

SEQ ID NO: 344012 - DNA, 58 bp, Artificial
  Synthetic oligonucleotide
cacccactactcagacacccctacctatccctggatgcccactcagttcaaagtgtca

SEQ ID NO: 344013 - DNA, 55 bp, Artificial
  Synthetic oligonucleotide
cacccactgttaatcatgattgtggatctttggtggttgctgagattgagggaac

SEQ ID NO: 344014 - DNA, 55 bp, Artificial
  Synthetic oligonucleotide
cacccacttctcgaggagctcttccctccctccgcgttctttcttcgattcggac

SEQ ID NO: 344015 - DNA, 56 bp, Artificial
  Synthetic oligonucleotide
cacccacttctcgagggtgtcctctcttccccctcgattcttcttctgctcggacc

SEQ ID NO: 344016 - DNA, 55 bp, Artificial
  Synthetic oligonucleotide
cacccagaacaaactaccctgggcggttcacaaacttgttggacgtggcagaggc

SEQ ID NO: 344017 - DNA, 53 bp, Artificial
  Synthetic oligonucleotide
cacccagaggtctttattcaggtcaacgtaggctttaccttgagtttcctcgt

SEQ ID NO: 344018 - DNA, 55 bp, Artificial
  Synthetic oligonucleotide
cacccagatgccatagacaggatcgaacaaataaatgaaggatggccttactggc

SEQ ID NO: 344019 - DNA, 55 bp, Artificial
  Synthetic oligonucleotide
cacccagcaccattgggtccaccatgtagtcccaaaactcatcagatcttagatc

SEQ ID NO: 344020 - DNA, 57 bp, Artificial
  Synthetic oligonucleotide
cacccaggaatctttgaaaactcgtgtcttgagacgatggaagttgttcaacaaaca

SEQ ID NO: 344021 - DNA, 55 bp, Artificial
  Synthetic oligonucleotide
cacccaggttgatatgtccccgcaacaaacggtataatgttgaattgggacgtcg

SEQ ID NO: 344022 - DNA, 52 bp, Artificial
  Synthetic oligonucleotide
cacccagtcataacggcaaagaatgtgaggaccatgcttgaggtggaacccc

SEQ ID NO: 344023 - DNA, 55 bp, Artificial
  Synthetic oligonucleotide
cacccagtccagaatgaccctttccgctgaggcccaggtgaacgcctggtatgag

SEQ ID NO: 344024 - DNA, 60 bp, Artificial
  Synthetic oligonucleotide
cacccagtctctatggtcgctacaactgcaaatgctgttggtttgccgacacaaacttga

SEQ ID NO: 344025 - DNA, 60 bp, Artificial
  Synthetic oligonucleotide
cacccagtgtccaaccatctcccactgatctttgtcttagggctaattgtagctatctat

SEQ ID NO: 344026 - DNA, 56 bp, Artificial
  Synthetic oligonucleotide
cacccatacgcaagttcctggggagtacgccaccttctgcgggtggtgcgttacac

SEQ ID NO: 344027 - DNA, 55 bp, Artificial
  Synthetic oligonucleotide
cacccatagagtaggtaagcgtttctgtgttaagtctgtgtacgtattggggaag

SEQ ID NO: 344028 - DNA, 54 bp, Artificial
  Synthetic oligonucleotide
cacccataggtttgggaagagtacctgttcaattctaaataccttggatttcaa

SEQ ID NO: 344029 - DNA, 60 bp, Artificial
  Synthetic oligonucleotide
cacccatcgatcactcatgagccatatgcaatactaagactcacaagacagaatggctct

SEQ ID NO: 344030 - DNA, 55 bp, Artificial
  Synthetic oligonucleotide
cacccatcgccgcgggctgatcataaacgcgagcctgcgactgtcgttgtacgca

SEQ ID NO: 344031 - DNA, 59 bp, Artificial
  Synthetic oligonucleotide
cacccatctgagacagaacataagatagtagaaaaggtaatacaggccttgcaagggaa

SEQ ID NO: 344032 - DNA, 59 bp, Artificial
  Synthetic oligonucleotide
cacccatgaactccttaaagtgtttcaggtaatgcgggtcaacatcatctatgacgtta

SEQ ID NO: 344033 - DNA, 60 bp, Artificial
  Synthetic oligonucleotide
cacccatggctagcgtccgattctttagagcagagcagtgtccggccgtacaagaaacag

SEQ ID NO: 344034 - DNA, 58 bp, Artificial
  Synthetic oligonucleotide
cacccatgtggtgtacaaacctggcaaggaagatacaagctccgctgctaaccttaca

SEQ ID NO: 344035 - DNA, 58 bp, Artificial
  Synthetic oligonucleotide
cacccatgttgctaagataactcacccagagctcttccccaaggactaaactgctgac

SEQ ID NO: 344036 - DNA, 60 bp, Artificial
  Synthetic oligonucleotide
cacccattcaggatggagatatggtggacactgggtatggtgccatggactttggtacat

SEQ ID NO: 344037 - DNA, 59 bp, Artificial
  Synthetic oligonucleotide
cacccattgacaataggtgagtgccccaaatatgtaaagtcagatagattggttttggc

SEQ ID NO: 344038 - DNA, 59 bp, Artificial
  Synthetic oligonucleotide
cacccattgtactgactccagctgctcttacaatgtttccagatactaccaaatttggg

SEQ ID NO: 344039 - DNA, 53 bp, Artificial
  Synthetic oligonucleotide
cacccattttggcgggaaccaatcacaaaatggggggggccggccaatggtga

SEQ ID NO: 344040 - DNA, 53 bp, Artificial
  Synthetic oligonucleotide
caccccaacaatggcatcgttcactaagcatgtagaatcagtaaggccagatt

SEQ ID NO: 344041 - DNA, 54 bp, Artificial
  Synthetic oligonucleotide
caccccaacgtcggaaacacagcccgagacgatgttgcttcttctttagggccc

SEQ ID NO: 344042 - DNA, 59 bp, Artificial
  Synthetic oligonucleotide
caccccaagctacacttcaggtaggcaaatggcagtccgccctgtggacacatcccctc

SEQ ID NO: 344043 - DNA, 55 bp, Artificial
  Synthetic oligonucleotide
caccccaaggggtggaggaaggctccattgggaaagtgtgcagaaccttactggc

SEQ ID NO: 344044 - DNA, 55 bp, Artificial
  Synthetic oligonucleotide
caccccacctgaaagacttaaccactcttatcacgaaaacaatcagaagacgcaa

SEQ ID NO: 344045 - DNA, 56 bp, Artificial
  Synthetic oligonucleotide
caccccactctgaggaaagggcttgcttagtcggttcacgtttccaacagaagagc

SEQ ID NO: 344046 - DNA, 52 bp, Artificial
  Synthetic oligonucleotide
caccccagaggccgaatttgacatcaaggaccggccaccaactcccaggtca

SEQ ID NO: 344047 - DNA, 55 bp, Artificial
  Synthetic oligonucleotide
caccccaggggagagaccatcaggcatgttcgacacttcagtactctgcgagtgt

SEQ ID NO: 344048 - DNA, 55 bp, Artificial
  Synthetic oligonucleotide
caccccaggggagagaccatcgggcatatttgacacctcagtgatctgcgagtgc

SEQ ID NO: 344049 - DNA, 56 bp, Artificial
  Synthetic oligonucleotide
caccccagtccatcctaactgtagctggagtgtccaactacgagctgatccccaac

SEQ ID NO: 344050 - DNA, 55 bp, Artificial
  Synthetic oligonucleotide
caccccagtgggtagatccaaaactggtgaggtgcaatatgtttcggccaaactg

SEQ ID NO: 344051 - DNA, 56 bp, Artificial
  Synthetic oligonucleotide
caccccatcacacggtgggtcatcatccctcacgtactaacttgtgcgtttagggg

SEQ ID NO: 344052 - DNA, 55 bp, Artificial
  Synthetic oligonucleotide
caccccatgagccagcatggaatagaggacgaagaaagagaagtactgaggtggc

SEQ ID NO: 344053 - DNA, 60 bp, Artificial
  Synthetic oligonucleotide
caccccatgtgtaaaatttggagatctctggtgatcagtgcatctctaggggagattagc

SEQ ID NO: 344054 - DNA, 50 bp, Artificial
  Synthetic oligonucleotide
caccccattactagcattgcggagataacaccctcagtcgacataagatg

SEQ ID NO: 344055 - DNA, 55 bp, Artificial
  Synthetic oligonucleotide
caccccattaggaattatcctactggcgaagggaaccttactgcacaagttcgaa

SEQ ID NO: 344056 - DNA, 52 bp, Artificial
  Synthetic oligonucleotide
caccccccgaataaacacacttgacccagcccgttgtttagcactatttgtt

SEQ ID NO: 344057 - DNA, 57 bp, Artificial
  Synthetic oligonucleotide
cacccccctagatgcgtgtgagtaagggggccctgcgtatgagtcagtggggaccac

SEQ ID NO: 344058 - DNA, 54 bp, Artificial
  Synthetic oligonucleotide
caccccccttacaagcagacccagcccggagctgatgggttcgagctacagcac

SEQ ID NO: 344059 - DNA, 54 bp, Artificial
  Synthetic oligonucleotide
cacccccggaatggctgtcaagacaaactgtaatagaatgtagcttagcagaca

SEQ ID NO: 344060 - DNA, 54 bp, Artificial
  Synthetic oligonucleotide
cacccccgtccatgggttccgcagacatgtggacctcatggtgggggcggctac

SEQ ID NO: 344061 - DNA, 50 bp, Artificial
  Synthetic oligonucleotide
cacccccgtccccattgcgttggccagtgccgcgtgcttgtgggttacca

SEQ ID NO: 344062 - DNA, 53 bp, Artificial
  Synthetic oligonucleotide
cacccccgttcacttggttgatcaaagggggatggtggtttgtcaagaaatta

SEQ ID NO: 344063 - DNA, 58 bp, Artificial
  Synthetic oligonucleotide
caccccctaattcattaataatcagacgctattcctgggaggagacacactactataa

SEQ ID NO: 344064 - DNA, 52 bp, Artificial
  Synthetic oligonucleotide
caccccctagcgagggagggggaaactttcccgtacaacgcataggcggcaa

SEQ ID NO: 344065 - DNA, 54 bp, Artificial
  Synthetic oligonucleotide
caccccctctcaagaagaaaatgtctggtaccttcgggggaatactagctggcc

SEQ ID NO: 344066 - DNA, 52 bp, Artificial
  Synthetic oligonucleotide
caccccctgggggtactttgactacaaccgattccactgccacttctccccc

SEQ ID NO: 344067 - DNA, 58 bp, Artificial
  Synthetic oligonucleotide
caccccctgtcaaggacagtcaaccttgcgaagtcgggagaatgcccgatagactgtg

SEQ ID NO: 344068 - DNA, 58 bp, Artificial
  Synthetic oligonucleotide
cacccccttaccatgctttgggtgcactcattcttggtgttttgtctcccagcagccg

SEQ ID NO: 344069 - DNA, 57 bp, Artificial
  Synthetic oligonucleotide
caccccctttactatgtgacgacttgttcgaatgtatggagcgttcatccacgcctt

SEQ ID NO: 344070 - DNA, 55 bp, Artificial
  Synthetic oligonucleotide
caccccgagaaccatggtgtgccccgatgcgctgaacagaaggtttcactttgac

SEQ ID NO: 344071 - DNA, 51 bp, Artificial
  Synthetic oligonucleotide
caccccgagcccctcaggtcgagcaccgctcccgaggggctttcgcatacc

SEQ ID NO: 344072 - DNA, 56 bp, Artificial
  Synthetic oligonucleotide
caccccgcaatacaaatcgtgggccctaccatcgtcatcaaacttgacgacccaac

SEQ ID NO: 344073 - DNA, 55 bp, Artificial
  Synthetic oligonucleotide
caccccggaaatagcagaaagacccaaagtaagagatcaagctgggaggatgaac

SEQ ID NO: 344074 - DNA, 59 bp, Artificial
  Synthetic oligonucleotide
caccccggcgattcaaagaagagacaggatgcggatgacacccataaagaattcggctc

SEQ ID NO: 344075 - DNA, 55 bp, Artificial
  Synthetic oligonucleotide
caccccggggtgtgtcccttgcgtccgcgagggcaacatctcgaggtgttgggtg

SEQ ID NO: 344076 - DNA, 60 bp, Artificial
  Synthetic oligonucleotide
caccccggtgcatccgctctcgcgtcaaagagagttgggaagacattctggcacggaata

SEQ ID NO: 344077 - DNA, 60 bp, Artificial
  Synthetic oligonucleotide
caccccgtgcatatgacaattgcattgaagtgaggtttctgcacaacaagtgtgcatatg

SEQ ID NO: 344078 - DNA, 53 bp, Artificial
  Synthetic oligonucleotide
cacccctaacatttccaagtacttcaggacttgggttttaaagactctcaaga

SEQ ID NO: 344079 - DNA, 52 bp, Artificial
  Synthetic oligonucleotide
cacccctagtaaacttgctacaaagtttgttttgaagtgttttaatcaacga

SEQ ID NO: 344080 - DNA, 54 bp, Artificial
  Synthetic oligonucleotide
cacccctagtcctgtagtggtcgggaccacggatcgccgcggtatccctactta

SEQ ID NO: 344081 - DNA, 55 bp, Artificial
  Synthetic oligonucleotide
cacccctcaaccttcgggggcattgtcaggaagaatcaatcccaggactcccacc

SEQ ID NO: 344082 - DNA, 59 bp, Artificial
  Synthetic oligonucleotide
cacccctcaagaacaaataggctggatgacaggcaacccacctatcccagtgggagaca

SEQ ID NO: 344083 - DNA, 59 bp, Artificial
  Synthetic oligonucleotide
cacccctcaggtctcgaccgactcgaagcgaccttgaatgtattacttactgacatgcg

SEQ ID NO: 344084 - DNA, 55 bp, Artificial
  Synthetic oligonucleotide
cacccctctctacgaggtctcttccctgcctgacctaatcgagattgatttgcgc

SEQ ID NO: 344085 - DNA, 60 bp, Artificial
  Synthetic oligonucleotide
cacccctgctatacagactgggtgctgttcagaatgaaatcaccctgacgcacccagtca

SEQ ID NO: 344086 - DNA, 55 bp, Artificial
  Synthetic oligonucleotide
cacccctgctgtacaggctaggagccgtccaaaacgaggtcaccctcacacaccc

SEQ ID NO: 344087 - DNA, 53 bp, Artificial
  Synthetic oligonucleotide
cacccctggcgagggcgtgaagtctagagctcaactggaaagagagctggatc

SEQ ID NO: 344088 - DNA, 55 bp, Artificial
  Synthetic oligonucleotide
cacccctgtgtgtgttccctgtgctcctcaggtacaggcgtccgtggatctaccc

SEQ ID NO: 344089 - DNA, 54 bp, Artificial
  Synthetic oligonucleotide
caccccttagaggtggtgttaaacgacgtccatatggtgctacgcgaaaattaa

SEQ ID NO: 344090 - DNA, 55 bp, Artificial
  Synthetic oligonucleotide
caccccttgattccctatataacaacacagacttggcctcctagacatgttgtag

SEQ ID NO: 344091 - DNA, 53 bp, Artificial
  Synthetic oligonucleotide
caccccttgtaaactttcaccttaactacaaattctaggcctacaatgttcac

SEQ ID NO: 344092 - DNA, 55 bp, Artificial
  Synthetic oligonucleotide
cacccctttaagattagctcactttatgtctcagatagaacacgaaagtggaggt

SEQ ID NO: 344093 - DNA, 55 bp, Artificial
  Synthetic oligonucleotide
cacccctttatgctctgacgaggtgctctacacggcattttcccgtgcctccgag

SEQ ID NO: 344094 - DNA, 55 bp, Artificial
  Synthetic oligonucleotide
cacccctttccatgccaacgggaataacaacacaggtggatgtgactgtcctggg

SEQ ID NO: 344095 - DNA, 53 bp, Artificial
  Synthetic oligonucleotide
cacccgaacacccacccaaccaacagcccccaccctacacaccctagacacca

SEQ ID NO: 344096 - DNA, 55 bp, Artificial
  Synthetic oligonucleotide
cacccgaaggatatataagagttagtagattaggtaaacgtgcgactattcgaac

SEQ ID NO: 344097 - DNA, 54 bp, Artificial
  Synthetic oligonucleotide
cacccgaagggctctctttctgtgggctaacaatagtgaagtcaaaaaccggga

SEQ ID NO: 344098 - DNA, 60 bp, Artificial
  Synthetic oligonucleotide
cacccgaagtagccctgaatgaaatatgcacgcgcatgtatggggtggatctagacagtg

SEQ ID NO: 344099 - DNA, 55 bp, Artificial
  Synthetic oligonucleotide
cacccgaatggttacgagtataaagacggttgcaaatgtgaaatctatgaggaat

SEQ ID NO: 344100 - DNA, 56 bp, Artificial
  Synthetic oligonucleotide
cacccgacagcacccaccacgggggattcccagcctcgcagacccccaacaagaca

SEQ ID NO: 344101 - DNA, 57 bp, Artificial
  Synthetic oligonucleotide
cacccgacccagtagtcgcggtgaggcgtcgtcaactctagacgaccagatacgagg

SEQ ID NO: 344102 - DNA, 55 bp, Artificial
  Synthetic oligonucleotide
cacccgaccctggtattcgacatcaccaaactactgctggctgtcctcggacccc

SEQ ID NO: 344103 - DNA, 50 bp, Artificial
  Synthetic oligonucleotide
cacccgacctgcacatgctttactagaccctgctcacattattgccactg

SEQ ID NO: 344104 - DNA, 55 bp, Artificial
  Synthetic oligonucleotide
cacccgactctggtgtttgacatcaccaaactactcctggccatcttcgggcccc

SEQ ID NO: 344105 - DNA, 55 bp, Artificial
  Synthetic oligonucleotide
cacccgactttggtatttgacatcaccaagctgttgctagccgtcttcggacccc

SEQ ID NO: 344106 - DNA, 59 bp, Artificial
  Synthetic oligonucleotide
cacccgagagctatggtcaggagaagaaaagaccaatctgatgcaaactcaggacccgg

SEQ ID NO: 344107 - DNA, 55 bp, Artificial
  Synthetic oligonucleotide
cacccgagcaaccagggccgaattcgataggtggtatgaagcagtgcagaaagag

SEQ ID NO: 344108 - DNA, 55 bp, Artificial
  Synthetic oligonucleotide
cacccgagggtagttacaagcctataatggagagacaaggagagactgttgatgg

SEQ ID NO: 344109 - DNA, 57 bp, Artificial
  Synthetic oligonucleotide
cacccgatatgctgcagtatgctaagcgtgcagtcatgtctcttcaagggctaaggg

SEQ ID NO: 344110 - DNA, 60 bp, Artificial
  Synthetic oligonucleotide
cacccgatctcatatctgtgttcgagaacacgcacgttagttacgcttgctggcaggagg

SEQ ID NO: 344111 - DNA, 55 bp, Artificial
  Synthetic oligonucleotide
cacccgatttcaaggctgggttaggcctgttcgctggaataccgtactaatagta

SEQ ID NO: 344112 - DNA, 55 bp, Artificial
  Synthetic oligonucleotide
cacccgcacatccgagaacatcggtgagagcggatacccgacactggtacgatgg

SEQ ID NO: 344113 - DNA, 56 bp, Artificial
  Synthetic oligonucleotide
cacccgcagcttaggtctattcttttacgtcggggtcttctctttgcaagacgatg

SEQ ID NO: 344114 - DNA, 55 bp, Artificial
  Synthetic oligonucleotide
cacccgcatatccaaagatgcgatggtgggctactgagagtgactatcttgagga

SEQ ID NO: 344115 - DNA, 55 bp, Artificial
  Synthetic oligonucleotide
cacccgctgctttgactctacagtcactgagaatgatatccgtgtcgaggagtca

SEQ ID NO: 344116 - DNA, 58 bp, Artificial
  Synthetic oligonucleotide
cacccgctgttttgactcaacggtcactgaaaatgacatccgtgttgaggagtcaatt

SEQ ID NO: 344117 - DNA, 60 bp, Artificial
  Synthetic oligonucleotide
cacccggaatgcagatcagaggattcgtgtattttgtcgaaacactagcaaggagcattt

SEQ ID NO: 344118 - DNA, 52 bp, Artificial
  Synthetic oligonucleotide
cacccggatctattgcgcttgacccgagcctgtgcagctctctgtatgggtg

SEQ ID NO: 344119 - DNA, 55 bp, Artificial
  Synthetic oligonucleotide
cacccgggtacggacagtgaccaaaccagcctatatgttcgagcatcagggagag

SEQ ID NO: 344120 - DNA, 60 bp, Artificial
  Synthetic oligonucleotide
cacccggtgtgtagaagtgcgatccagcttaccatcagacagtcactagctgtcagaatc

SEQ ID NO: 344121 - DNA, 51 bp, Artificial
  Synthetic oligonucleotide
cacccgtaatgtctcaagaaaacgtaccaatggatacagaaggagcgacag

SEQ ID NO: 344122 - DNA, 55 bp, Artificial
  Synthetic oligonucleotide
cacccgtacgtgcttgatgctggcattccaatatcacaattaacagtgtgcccac

SEQ ID NO: 344123 - DNA, 53 bp, Artificial
  Synthetic oligonucleotide
cacccgtagggcttactgggtaaagtacatagtcatcttcgttaagaggttta

SEQ ID NO: 344124 - DNA, 57 bp, Artificial
  Synthetic oligonucleotide
cacccgtatccaaggtgcggaggaggctgaacttcgacagcccatacacgaaccgtg

SEQ ID NO: 344125 - DNA, 51 bp, Artificial
  Synthetic oligonucleotide
cacccgtatgaaggtacatctactatgtacagataaccgtaacgaccccct

SEQ ID NO: 344126 - DNA, 59 bp, Artificial
  Synthetic oligonucleotide
cacccgtccactggccaatagcatccgagatcgatattccgacaacgtccttcaggaac

SEQ ID NO: 344127 - DNA, 55 bp, Artificial
  Synthetic oligonucleotide
cacccgtcgcccctctccaaggttccgttcggaacatgccagcatttcctcgtgg

SEQ ID NO: 344128 - DNA, 56 bp, Artificial
  Synthetic oligonucleotide
cacccgtgttccttttcacgcccgtgacatcccagataagttgcacaaagaaatct

SEQ ID NO: 344129 - DNA, 50 bp, Artificial
  Synthetic oligonucleotide
cacccgttgagaacgccgttgaaacatccggggaagaaatatgcgcttct

SEQ ID NO: 344130 - DNA, 55 bp, Artificial
  Synthetic oligonucleotide
cacccgttgatatcggtcatatatataccggtggttttaaacgatgctcctgggg

SEQ ID NO: 344131 - DNA, 57 bp, Artificial
  Synthetic oligonucleotide
cacccgtttatggatgggcggatgacggtgatactatcttatccgacgaagaactgg

SEQ ID NO: 344132 - DNA, 60 bp, Artificial
  Synthetic oligonucleotide
caccctaaaaagcactaactattcttgcatggtctgtgttgaccgctccagcctatcctc

SEQ ID NO: 344133 - DNA, 58 bp, Artificial
  Synthetic oligonucleotide
caccctaacgctgagtggatcctgaagactcttgtgaacacggaacacgcgtacgaaa

SEQ ID NO: 344134 - DNA, 54 bp, Artificial
  Synthetic oligonucleotide
caccctaagtccgctctccgatgggccctatgactcttggtcccagtgcgagat

SEQ ID NO: 344135 - DNA, 59 bp, Artificial
  Synthetic oligonucleotide
caccctaatgtatagtctacatgccgtgcatacccgatgagctctggtattctaacggt

SEQ ID NO: 344136 - DNA, 51 bp, Artificial
  Synthetic oligonucleotide
caccctacgtggcaatcgtgcgggaccccatcaacggtgggggctctgtaa

SEQ ID NO: 344137 - DNA, 51 bp, Artificial
  Synthetic oligonucleotide
caccctagaacgagaacgattgaagcgtaagttactcctagtacgagcttt

SEQ ID NO: 344138 - DNA, 55 bp, Artificial
  Synthetic oligonucleotide
caccctagtaagcattcatgatcttacctgcggctgtgaatctccactagaatgc

SEQ ID NO: 344139 - DNA, 59 bp, Artificial
  Synthetic oligonucleotide
caccctagtgatcaacacggaacacatgccctcaatgtttgtcccggtgggtgatgttg

SEQ ID NO: 344140 - DNA, 55 bp, Artificial
  Synthetic oligonucleotide
caccctatctgccaacatggcctggaagatgcggacagagaagtgctggtatgga

SEQ ID NO: 344141 - DNA, 55 bp, Artificial
  Synthetic oligonucleotide
caccctatgagccagcatggaatggaggatgcagatagagaaacattaaggtggc

SEQ ID NO: 344142 - DNA, 57 bp, Artificial
  Synthetic oligonucleotide
caccctatgtgcagagacgatttcaacgacgtaatcaagtgtttaagcgcacagtat

SEQ ID NO: 344143 - DNA, 55 bp, Artificial
  Synthetic oligonucleotide
caccctattctaaacatgattgataccaagaaaagctctctgaatatctcaggtt

SEQ ID NO: 344144 - DNA, 55 bp, Artificial
  Synthetic oligonucleotide
caccctcacaccattggggaatgccctaaatacgtgaaatcagataggttggtcc

SEQ ID NO: 344145 - DNA, 56 bp, Artificial
  Synthetic oligonucleotide
caccctcagaaatggacgttggtgactacgtcattagggtgaaggaaggccttcca

SEQ ID NO: 344146 - DNA, 55 bp, Artificial
  Synthetic oligonucleotide
caccctcagctttaccttactttcaccctacaaaggagatctttataccagggca

SEQ ID NO: 344147 - DNA, 60 bp, Artificial
  Synthetic oligonucleotide
caccctcatacatataatgtatcacagcgttagagtacatgtaatccgactgttcaggag

SEQ ID NO: 344148 - DNA, 52 bp, Artificial
  Synthetic oligonucleotide
caccctcatgggacgtcatgtggaaatgccttattcggctcaaacctatgct

SEQ ID NO: 344149 - DNA, 55 bp, Artificial
  Synthetic oligonucleotide
caccctccccaggaggggacccagaaattgtaatgcatagtgttaattgtggagg

SEQ ID NO: 344150 - DNA, 57 bp, Artificial
  Synthetic oligonucleotide
caccctcccggcgcctctgtgccagacgtctctaaggtggtagctaagcaacaaacg

SEQ ID NO: 344151 - DNA, 57 bp, Artificial
  Synthetic oligonucleotide
caccctccgaacttgacatcaggccgacccagaggtccaccctctaaactcgagtga

SEQ ID NO: 344152 - DNA, 59 bp, Artificial
  Synthetic oligonucleotide
caccctcgcatgttacaagtctctgacccgacaaagctcggaccgaagacagcttttca

SEQ ID NO: 344153 - DNA, 55 bp, Artificial
  Synthetic oligonucleotide
caccctcgctcgaattcaacttcatagtctgaacaaacaggttcaccaagtggtc

SEQ ID NO: 344154 - DNA, 54 bp, Artificial
  Synthetic oligonucleotide
caccctctagtacggatagcaggcatcagacgttgcacatatctgactacatat

SEQ ID NO: 344155 - DNA, 52 bp, Artificial
  Synthetic oligonucleotide
caccctctcccccgtcgtgcttgacacggccccctgccttttttccgacggc

SEQ ID NO: 344156 - DNA, 57 bp, Artificial
  Synthetic oligonucleotide
caccctctctattcttctagggagggatggcacctgggccgattggtttctgaagga

SEQ ID NO: 344157 - DNA, 59 bp, Artificial
  Synthetic oligonucleotide
caccctctcttaccatcagcaatgggtgctagttgtgtgggttatttcaccactacaag

SEQ ID NO: 344158 - DNA, 55 bp, Artificial
  Synthetic oligonucleotide
caccctctgcctcctcttcgatagacccgaagatctcgtagagcagccactcggg

SEQ ID NO: 344159 - DNA, 55 bp, Artificial
  Synthetic oligonucleotide
caccctgaacaacgggagtcaggcagtaggacgctcttcattttactgcctggag

SEQ ID NO: 344160 - DNA, 55 bp, Artificial
  Synthetic oligonucleotide
caccctgacacctcgacccataattcatgctgttgcccctgactatcgcgctgaa

SEQ ID NO: 344161 - DNA, 55 bp, Artificial
  Synthetic oligonucleotide
caccctgaggaaggtctgtaggctgtatgctgccgtggtttggaattacatgcac

SEQ ID NO: 344162 - DNA, 57 bp, Artificial
  Synthetic oligonucleotide
caccctgaggctacttacaccaaatgtggggccgggccatggttgactcccaaatgc

SEQ ID NO: 344163 - DNA, 55 bp, Artificial
  Synthetic oligonucleotide
caccctgatagccatcttaagtcacttcaaaccagaccttaaacatctactgacc

SEQ ID NO: 344164 - DNA, 55 bp, Artificial
  Synthetic oligonucleotide
caccctgatgtacatgatgcagagctacctcgtattctagtggatcacaatacac

SEQ ID NO: 344165 - DNA, 56 bp, Artificial
  Synthetic oligonucleotide
caccctgcagataacgtacgatatttagcgtcgtcttgggacagtgtgttgtcgta

SEQ ID NO: 344166 - DNA, 60 bp, Artificial
  Synthetic oligonucleotide
caccctgcattgtatcagaagcactagagctcgggactttagccttaacaggccctacta

SEQ ID NO: 344167 - DNA, 60 bp, Artificial
  Synthetic oligonucleotide
caccctgctaatcattgaatcaatcatgtgggcagctagcgcatcagaaaatgttttgga

SEQ ID NO: 344168 - DNA, 60 bp, Artificial
  Synthetic oligonucleotide
caccctggagggagctagcgtgaccagcgaagaggcatcagtagagactaactctcactt

SEQ ID NO: 344169 - DNA, 55 bp, Artificial
  Synthetic oligonucleotide
caccctggatgaccaagccttctgctgttcgcggcttatgacctacctccgcggg

SEQ ID NO: 344170 - DNA, 60 bp, Artificial
  Synthetic oligonucleotide
caccctggctgccttcccaccgtcttgccagattagtgccttccatcagttagctgagga

SEQ ID NO: 344171 - DNA, 51 bp, Artificial
  Synthetic oligonucleotide
caccctgggaaaccgatcccctcccggaaagtgctgtcaactctcttaaac

SEQ ID NO: 344172 - DNA, 54 bp, Artificial
  Synthetic oligonucleotide
caccctgggtgattggggagcagggccagaattcaaccttaacttttcttattc

SEQ ID NO: 344173 - DNA, 55 bp, Artificial
  Synthetic oligonucleotide
caccctgtgaggcacatgaagcgatagcggaactgaacactacgcttttgattag

SEQ ID NO: 344174 - DNA, 55 bp, Artificial
  Synthetic oligonucleotide
caccctgtttctacagacgaagcgagaaaactatatgtcaatgacaacccataca

SEQ ID NO: 344175 - DNA, 55 bp, Artificial
  Synthetic oligonucleotide
cacccttacagcaccctggtgcaagactgggtgccctgaattttggaagcatccc

SEQ ID NO: 344176 - DNA, 60 bp, Artificial
  Synthetic oligonucleotide
cacccttaccttgcattccgcataactacattctggctatcgttcattttgtccagataa

SEQ ID NO: 344177 - DNA, 55 bp, Artificial
  Synthetic oligonucleotide
cacccttaggacgcaaccctagtgtttctagttctgggtcagtgataagacccac

SEQ ID NO: 344178 - DNA, 59 bp, Artificial
  Synthetic oligonucleotide
cacccttagtaaagctatggtatagcttagaaacagagcctatacagaacacagaaaca

SEQ ID NO: 344179 - DNA, 55 bp, Artificial
  Synthetic oligonucleotide
cacccttcttctggtgattcggttggttatgatttatttggtgctcaaggacaat

SEQ ID NO: 344180 - DNA, 55 bp, Artificial
  Synthetic oligonucleotide
cacccttctttagaagcggtgtccagaagacacatactggttgacacgaaggtct

SEQ ID NO: 344181 - DNA, 56 bp, Artificial
  Synthetic oligonucleotide
cacccttgatccaaggggcacagaacgtaactttcatcgtttctgagtccgataaa

SEQ ID NO: 344182 - DNA, 60 bp, Artificial
  Synthetic oligonucleotide
cacccttgattcaaggggcacagaacgtgaccttcatcgtctctgagtccgataagatta

SEQ ID NO: 344183 - DNA, 59 bp, Artificial
  Synthetic oligonucleotide
cacccttgttgaggtccgccatgaccccgagaacattgagctcggcacaaagagagtgg

SEQ ID NO: 344184 - DNA, 60 bp, Artificial
  Synthetic oligonucleotide
caccctttcgagcctgtgaattcatgtctaatggccttcgaactagctttgaacgcatta

SEQ ID NO: 344185 - DNA, 55 bp, Artificial
  Synthetic oligonucleotide
caccctttgagccagcatggaatagaggatgcagaccgagaagtgttgaagtggc

SEQ ID NO: 344186 - DNA, 56 bp, Artificial
  Synthetic oligonucleotide
caccctttgcctagacccttctgactacgggaggattcagtttgggataccaagca

SEQ ID NO: 344187 - DNA, 58 bp, Artificial
  Synthetic oligonucleotide
caccctttggagcaaattacagcaaaatatccacaggctaaggagtgaattttcaatc

SEQ ID NO: 344188 - DNA, 54 bp, Artificial
  Synthetic oligonucleotide
caccgaaactgtatggagtaatgaaacatgggggtaaaatttacacttataatg

SEQ ID NO: 344189 - DNA, 54 bp, Artificial
  Synthetic oligonucleotide
caccgaaattccgatggagctgttcggagcctacacgaggcgtgtagccgaagt

SEQ ID NO: 344190 - DNA, 55 bp, Artificial
  Synthetic oligonucleotide
caccgaagcatatgaggagctaaaggcacaagctatggggtataatggttcactg

SEQ ID NO: 344191 - DNA, 55 bp, Artificial
  Synthetic oligonucleotide
caccgaagtttcggtctcttctgcatgctatctggcgggctcttcgtttgagggg

SEQ ID NO: 344192 - DNA, 60 bp, Artificial
  Synthetic oligonucleotide
caccgaatcatgagggaatacaagcaggagtagatagattctacaggacctgcaaactag

SEQ ID NO: 344193 - DNA, 60 bp, Artificial
  Synthetic oligonucleotide
caccgaatcatgagggaatacaagcaggggtggatagattctacagaacctgcaagttag

SEQ ID NO: 344194 - DNA, 57 bp, Artificial
  Synthetic oligonucleotide
caccgaatcgtagatgtagttgaagcgagacagatacgagttcgggtcaccgggaat

SEQ ID NO: 344195 - DNA, 55 bp, Artificial
  Synthetic oligonucleotide
caccgaatggctctcgaagagctgccagatgcactggagaccgttacactcattg

SEQ ID NO: 344196 - DNA, 60 bp, Artificial
  Synthetic oligonucleotide
caccgacaattgcatccgcgttaaacacgcacaagcaggttgtcggggtacacatggctc

SEQ ID NO: 344197 - DNA, 60 bp, Artificial
  Synthetic oligonucleotide
caccgacacaagtccgcttcctatgaagcctctattgatgaggcgtggatgctggactgt

SEQ ID NO: 344198 - DNA, 52 bp, Artificial
  Synthetic oligonucleotide
caccgacaccccgtgtcattgcgttaagtccgtgctcagtgccctgagagcg

SEQ ID NO: 344199 - DNA, 56 bp, Artificial
  Synthetic oligonucleotide
caccgacatcttccaaaggttgtttaacatggaggttaagattatggagcctagcg

SEQ ID NO: 344200 - DNA, 55 bp, Artificial
  Synthetic oligonucleotide
caccgacattgtcaaacgccgagtgcactcttaacgagtgtgtatattcatcaga

SEQ ID NO: 344201 - DNA, 60 bp, Artificial
  Synthetic oligonucleotide
caccgacgaagaactcctcagagcagtaaggaccatcaaaatcctatacctcagcagtaa

SEQ ID NO: 344202 - DNA, 52 bp, Artificial
  Synthetic oligonucleotide
caccgacgcccgacaagttcccgccctcggatcagagccgcaagcggatctt

SEQ ID NO: 344203 - DNA, 55 bp, Artificial
  Synthetic oligonucleotide
caccgacgtgcacacgttgggaagacactctatctcgttgagtggattgacgaac

SEQ ID NO: 344204 - DNA, 58 bp, Artificial
  Synthetic oligonucleotide
caccgacgtgggaggagaggctccaatgcaatttcccagcgaaatcaagttggaagaa

SEQ ID NO: 344205 - DNA, 60 bp, Artificial
  Synthetic oligonucleotide
caccgactataattgaattaacaccagtcatgaagataggagcttatagtgtatatgaac

SEQ ID NO: 344206 - DNA, 57 bp, Artificial
  Synthetic oligonucleotide
caccgactcagggacaagagtactcaagtcaaatactcggggacctctcttattaga

SEQ ID NO: 344207 - DNA, 55 bp, Artificial
  Synthetic oligonucleotide
caccgactcagttctggcggccattagtgttggtactttgcgacaacacgttggc

SEQ ID NO: 344208 - DNA, 55 bp, Artificial
  Synthetic oligonucleotide
caccgactccataagacactctctcacgaactatccttgggccgtccccaaggcg

SEQ ID NO: 344209 - DNA, 54 bp, Artificial
  Synthetic oligonucleotide
caccgactctcccttgacgtattcaacctatgggaggttcttagccaaccctag

SEQ ID NO: 344210 - DNA, 60 bp, Artificial
  Synthetic oligonucleotide
caccgactgaaaggaatgaaattgttgcgtatctattagtagcttctttagctgatgtgt

SEQ ID NO: 344211 - DNA, 55 bp, Artificial
  Synthetic oligonucleotide
caccgactttcactcctagtctgttggtgaatcattctcatccggcgagtcgttg

SEQ ID NO: 344212 - DNA, 55 bp, Artificial
  Synthetic oligonucleotide
caccgactttcactcctagtctgttggtgaatcattctgatccaaatagccgttg

SEQ ID NO: 344213 - DNA, 55 bp, Artificial
  Synthetic oligonucleotide
caccgagaacgccgtattactttacatggcatgtacgcatgcatctaaccccgtg

SEQ ID NO: 344214 - DNA, 58 bp, Artificial
  Synthetic oligonucleotide
caccgagaataaatgaacgtctggacgtttataagactgctgaacgtttatgtcagaa

SEQ ID NO: 344215 - DNA, 60 bp, Artificial
  Synthetic oligonucleotide
caccgagacaatacatcttgcaactgcaataccagaaaggagaaccatcgatcgagaaaa

SEQ ID NO: 344216 - DNA, 54 bp, Artificial
  Synthetic oligonucleotide
caccgagacgaattggtctttaaagccccgtgtctttttatggacttcagcgac

SEQ ID NO: 344217 - DNA, 57 bp, Artificial
  Synthetic oligonucleotide
caccgagatgccttagaatcacccgaacattgctccccccaccacactgctctcagg

SEQ ID NO: 344218 - DNA, 56 bp, Artificial
  Synthetic oligonucleotide
caccgagcatacgccatggacaatgagcaagcggcatcccttggagctgttggtct

SEQ ID NO: 344219 - DNA, 60 bp, Artificial
  Synthetic oligonucleotide
caccgagcctgagacatcgcaagtggactattgtccacccaagaaacgtcgtctaactgc

SEQ ID NO: 344220 - DNA, 55 bp, Artificial
  Synthetic oligonucleotide
caccgagctttccacactgctgacaacgagctctacagggactttccgctgggga

SEQ ID NO: 344221 - DNA, 60 bp, Artificial
  Synthetic oligonucleotide
caccgaggtggatcgcgacatggctaggcgacatctagcagaggggaaggtggacactgg

SEQ ID NO: 344222 - DNA, 59 bp, Artificial
  Synthetic oligonucleotide
caccgagttgcacgctgcagaacctcctcagtggaagatttcaccagaagaccctttac

SEQ ID NO: 344223 - DNA, 55 bp, Artificial
  Synthetic oligonucleotide
caccgataccaaacaccagccagtcaaaggtgacaccgcctgctcgcgccaagtt

SEQ ID NO: 344224 - DNA, 50 bp, Artificial
  Synthetic oligonucleotide
caccgatactggtaaggctgtcttgaatttagacccacctatgcgatttg

SEQ ID NO: 344225 - DNA, 58 bp, Artificial
  Synthetic oligonucleotide
caccgatagataatttgtctccaatatattggagaacaattggggactcataaattac

SEQ ID NO: 344226 - DNA, 55 bp, Artificial
  Synthetic oligonucleotide
caccgataggtaaaagagacaccgatgagtcggtactcaattggtacctcaggag

SEQ ID NO: 344227 - DNA, 55 bp, Artificial
  Synthetic oligonucleotide
caccgatgagggccatgatgtagtgaagataccagaatcagatatgatagacgtc

SEQ ID NO: 344228 - DNA, 55 bp, Artificial
  Synthetic oligonucleotide
caccgattgactctccaaaacaacttagtatatgaatcggtgtctggggtcttat

SEQ ID NO: 344229 - DNA, 60 bp, Artificial
  Synthetic oligonucleotide
caccgcaacggtgaagaacatgcatcgtgaccgttatcaagtgttaaggaaatggcatgc

SEQ ID NO: 344230 - DNA, 55 bp, Artificial
  Synthetic oligonucleotide
caccgcaagaccactttgcctaacaactgacttcatgtctaataatgctctctca

SEQ ID NO: 344231 - DNA, 53 bp, Artificial
  Synthetic oligonucleotide
caccgcaagatcccaacgaggacgcggtaaacagtatgttccctgaatgtctg

SEQ ID NO: 344232 - DNA, 55 bp, Artificial
  Synthetic oligonucleotide
caccgcaagtgtgggaagaaagctaagttcgtcgtgtatcctgtggagcagggag

SEQ ID NO: 344233 - DNA, 54 bp, Artificial
  Synthetic oligonucleotide
caccgcacgcaaacgtgtccacagaacggtttttatttgaggttacagcgcccc

SEQ ID NO: 344234 - DNA, 57 bp, Artificial
  Synthetic oligonucleotide
caccgcacggaaccagtatgtgttttaatacatggtggtccagggtgtggtaaatca

SEQ ID NO: 344235 - DNA, 55 bp, Artificial
  Synthetic oligonucleotide
caccgcactacagaggagaatctatgccaacccttccgagaggtcttcgcttcgg

SEQ ID NO: 344236 - DNA, 55 bp, Artificial
  Synthetic oligonucleotide
caccgcagagaccttagagttatggccaacgcaatcaactcgaccgttcctgtgg

SEQ ID NO: 344237 - DNA, 57 bp, Artificial
  Synthetic oligonucleotide
caccgcagatttgttaggcctgggtaagagtcttcgaaccagaggcgtgtggcttac

SEQ ID NO: 344238 - DNA, 60 bp, Artificial
  Synthetic oligonucleotide
caccgcagcacttaaactgagattgtaaccagaaatattgatgctggactgctgttctgt

SEQ ID NO: 344239 - DNA, 55 bp, Artificial
  Synthetic oligonucleotide
caccgcagcttatgcctacgccttaaattcgtgattagcctttactggctaagtc

SEQ ID NO: 344240 - DNA, 60 bp, Artificial
  Synthetic oligonucleotide
caccgcaggtcttagctcagccagcgttacaggcgcaggcagatcgagtgtatgattgtg

SEQ ID NO: 344241 - DNA, 57 bp, Artificial
  Synthetic oligonucleotide
caccgcagtccacgtctaatctttcaacatgttggacgcgtttttcgactcacttcg

SEQ ID NO: 344242 - DNA, 56 bp, Artificial
  Synthetic oligonucleotide
caccgcatgggactttggttctataggaggagtgttcacgtctgttggaaaattag

SEQ ID NO: 344243 - DNA, 51 bp, Artificial
  Synthetic oligonucleotide
caccgccaaccagccggttacgggcttctcaggtggttttaccccaagtta

SEQ ID NO: 344244 - DNA, 55 bp, Artificial
  Synthetic oligonucleotide
caccgccatgctccagcttgcaaacccctgctgcgagaggaggtgacgttctcag

SEQ ID NO: 344245 - DNA, 51 bp, Artificial
  Synthetic oligonucleotide
caccgcccaactctaacgactccaccgctagttttcagcgtagggccgcac

SEQ ID NO: 344246 - DNA, 53 bp, Artificial
  Synthetic oligonucleotide
caccgcccctagggtgttttacgagtttgaaaatcccgcctttgacacagaga

SEQ ID NO: 344247 - DNA, 55 bp, Artificial
  Synthetic oligonucleotide
caccgcccgctgtcgaatacagaacaagtgaactcttcaccaatcgtcataccca

SEQ ID NO: 344248 - DNA, 54 bp, Artificial
  Synthetic oligonucleotide
caccgccctccgactccgttggcccgtttggccctgtcgatcacactgttttgt

SEQ ID NO: 344249 - DNA, 55 bp, Artificial
  Synthetic oligonucleotide
caccgccctgcgctgacatctcgcagaggtacagtgcggtttagtagattgggtc

SEQ ID NO: 344250 - DNA, 54 bp, Artificial
  Synthetic oligonucleotide
caccgccgcaggggggaaggaggcggaacacgtcactaagaatcggaaagaatg

SEQ ID NO: 344251 - DNA, 54 bp, Artificial
  Synthetic oligonucleotide
caccgcctggtcccaacccgagtttacgaatctatcttcgtttacgtccgagca

SEQ ID NO: 344252 - DNA, 54 bp, Artificial
  Synthetic oligonucleotide
caccgcgaacaggcgagttcaactatcagcaatctgcgtagaacgatggatgcg

SEQ ID NO: 344253 - DNA, 56 bp, Artificial
  Synthetic oligonucleotide
caccgcggggccccccgagacaacctcctagaaacatcagatgccctaactgtgga

SEQ ID NO: 344254 - DNA, 55 bp, Artificial
  Synthetic oligonucleotide
caccgcgtgctgccccgcaaggttcatctcgtcgtactgcttacgatttgatcac

SEQ ID NO: 344255 - DNA, 56 bp, Artificial
  Synthetic oligonucleotide
caccgctccgctgaaactcacgccggggttgtggacttccgcgtacctgcgcaaat

SEQ ID NO: 344256 - DNA, 57 bp, Artificial
  Synthetic oligonucleotide
caccgctcgtcacgtagtccctgcacgaatgctcgttgattcctccgatcatggcga

SEQ ID NO: 344257 - DNA, 58 bp, Artificial
  Synthetic oligonucleotide
caccgctgaacgagcctacgctcaattgggcctcatacaaactcctctgagggagttt

SEQ ID NO: 344258 - DNA, 55 bp, Artificial
  Synthetic oligonucleotide
caccgctgaatcagatagggtaatcggctctctcactgacactctaaaggtgccc

SEQ ID NO: 344259 - DNA, 60 bp, Artificial
  Synthetic oligonucleotide
caccgctgtcagttacgcttgctggcaggaggaggaatctcccacgaccaagcgtcgaca

SEQ ID NO: 344260 - DNA, 55 bp, Artificial
  Synthetic oligonucleotide
caccgctgtgggttggactcggcttcgctaattcgcgagctaggcatagcctttg

SEQ ID NO: 344261 - DNA, 60 bp, Artificial
  Synthetic oligonucleotide
caccgcttatgacggcgcaggcatggaaccatttcagttgggtgtactcatgatgtttgt

SEQ ID NO: 344262 - DNA, 55 bp, Artificial
  Synthetic oligonucleotide
caccggaacgttcgaggaagtagcaacggctgaaaagttagtgatcactgatgtg

SEQ ID NO: 344263 - DNA, 55 bp, Artificial
  Synthetic oligonucleotide
caccggaagaaataacttctggaaccagtgggacaaccagaccaatcattagacc

SEQ ID NO: 344264 - DNA, 55 bp, Artificial
  Synthetic oligonucleotide
caccggaagagcgaacggagactacatgcaacaggaacagggctgggccctcaac

SEQ ID NO: 344265 - DNA, 55 bp, Artificial
  Synthetic oligonucleotide
caccggaagttgagtagacggtgctgcctgcaactcaaccccaggaggactgggt

SEQ ID NO: 344266 - DNA, 50 bp, Artificial
  Synthetic oligonucleotide
caccggacaggtgggcctggttctgtacgtctatcaaaccgccggccact

SEQ ID NO: 344267 - DNA, 56 bp, Artificial
  Synthetic oligonucleotide
caccggagaaaacatttgggcgccggtgccaagagactactcgcaacgaggaactg

SEQ ID NO: 344268 - DNA, 53 bp, Artificial
  Synthetic oligonucleotide
caccggagagggagtgaacaacaaggggcgaggaacctcgaagggaactctcc

SEQ ID NO: 344269 - DNA, 60 bp, Artificial
  Synthetic oligonucleotide
caccggagataaatgatggactcgttcttgctgcaatttactcatcctgcagtgtgtcag

SEQ ID NO: 344270 - DNA, 55 bp, Artificial
  Synthetic oligonucleotide
caccggatactgggtagacggtgctgcctgcgtctcagttccaggaggactgggt

SEQ ID NO: 344271 - DNA, 58 bp, Artificial
  Synthetic oligonucleotide
caccggcaggaatccaaacaagactccaaaaacagtaggctacacaaacgagcagcta

SEQ ID NO: 344272 - DNA, 53 bp, Artificial
  Synthetic oligonucleotide
caccggccagaccaaatggtgaccaacaaggactcccgaggtaaggggaagcg

SEQ ID NO: 344273 - DNA, 52 bp, Artificial
  Synthetic oligonucleotide
caccggcccgttccgggaatcctgtggaaaacactggtttctcggtgtggac

SEQ ID NO: 344274 - DNA, 55 bp, Artificial
  Synthetic oligonucleotide
caccggcctcacacacatagatgcccacttcctttcccagacaaaacaatcgggg

SEQ ID NO: 344275 - DNA, 60 bp, Artificial
  Synthetic oligonucleotide
caccggcggaagactaatcaggcatattgtgagatgatgggtatggcgctactgttaatg

SEQ ID NO: 344276 - DNA, 60 bp, Artificial
  Synthetic oligonucleotide
caccggctgtgcggttggctgtaacccagatgagcattggtcacagttctaccatgagtt

SEQ ID NO: 344277 - DNA, 55 bp, Artificial
  Synthetic oligonucleotide
caccggctttagatctctaatagatgatactcctattgacgtatcaccagaaatc

SEQ ID NO: 344278 - DNA, 60 bp, Artificial
  Synthetic oligonucleotide
caccgggaccagggatcagatatccactgacctttggatggtgctacaagctagtgccag

SEQ ID NO: 344279 - DNA, 60 bp, Artificial
  Synthetic oligonucleotide
caccgggagggggggtgagaaatgatgatgttgatcagagtttaattattgctgctagaa

SEQ ID NO: 344280 - DNA, 53 bp, Artificial
  Synthetic oligonucleotide
caccgggattccgggtaattcccagggtcaagctatggtagagcgggccaacc

SEQ ID NO: 344281 - DNA, 55 bp, Artificial
  Synthetic oligonucleotide
caccgggccattcctaaatttaggtagatgcgacaaatctcagaagaaagcaagc

SEQ ID NO: 344282 - DNA, 55 bp, Artificial
  Synthetic oligonucleotide
caccggggacatctcacaaacagccatcctgcaaggggacccaatagaagacacc

SEQ ID NO: 344283 - DNA, 54 bp, Artificial
  Synthetic oligonucleotide
caccgggggcagtgacttcctgtgggttataaaaagaccgcacaagcgccgtta

SEQ ID NO: 344284 - DNA, 55 bp, Artificial
  Synthetic oligonucleotide
caccgggtagcgcctgagggcaataggcacgaggcgaagattcctcgacacatcc

SEQ ID NO: 344285 - DNA, 59 bp, Artificial
  Synthetic oligonucleotide
caccgggtagctcctgagggcaatcgacacgaagctaaggttagtgacgatgtgttgta

SEQ ID NO: 344286 - DNA, 58 bp, Artificial
  Synthetic oligonucleotide
caccgggtaggagtatatctatggaagactcacatagacccggcaaaggaacttctga

SEQ ID NO: 344287 - DNA, 55 bp, Artificial
  Synthetic oligonucleotide
caccgggtcggttcaggactgcaatttgtggactatacccagcccaggtcaaagc

SEQ ID NO: 344288 - DNA, 55 bp, Artificial
  Synthetic oligonucleotide
caccggtaacggtgctaagggatcaagttacagcatcgctgacgatggcatgaaa

SEQ ID NO: 344289 - DNA, 57 bp, Artificial
  Synthetic oligonucleotide
caccggtactaaggaccaccagtgtttggctcgtaaacacaccagcagcgataagga

SEQ ID NO: 344290 - DNA, 55 bp, Artificial
  Synthetic oligonucleotide
caccggtatttctgatggactcactacaaccgcagagtttatctctcccggcgta

SEQ ID NO: 344291 - DNA, 52 bp, Artificial
  Synthetic oligonucleotide
caccggtcactttaagagagacacgaccgttttcggtaagtttgtatgcctt

SEQ ID NO: 344292 - DNA, 51 bp, Artificial
  Synthetic oligonucleotide
caccggtgaactgcctaaccggggtccctcggcacccttcaagggaggacc

SEQ ID NO: 344293 - DNA, 56 bp, Artificial
  Synthetic oligonucleotide
caccggtggacaatacgcttcaaaggaacaggctttggtcaagaagtttgtcagag

SEQ ID NO: 344294 - DNA, 55 bp, Artificial
  Synthetic oligonucleotide
caccggttcagtcagcgcccattagtcatgggaagacagttgaggcataccgggc

SEQ ID NO: 344295 - DNA, 53 bp, Artificial
  Synthetic oligonucleotide
caccggttctctgggacccggttggagctcgacagagttgaaggtccactcca

SEQ ID NO: 344296 - DNA, 57 bp, Artificial
  Synthetic oligonucleotide
caccggttggtgtgtacgtgtggcagactatcttaggctgctacaatgggttggtcg

SEQ ID NO: 344297 - DNA, 55 bp, Artificial
  Synthetic oligonucleotide
caccgtaacattgtgtcgattgtcccattcgcaacttgccgctcgaacctcctga

SEQ ID NO: 344298 - DNA, 55 bp, Artificial
  Synthetic oligonucleotide
caccgtaatcaactactataaggatgcagcaagctcgtcatctgctggacagtca

SEQ ID NO: 344299 - DNA, 57 bp, Artificial
  Synthetic oligonucleotide
caccgtacaggaattctctcgcactagtcgggtttgaagcgcgggtgtatctaggag

SEQ ID NO: 344300 - DNA, 55 bp, Artificial
  Synthetic oligonucleotide
caccgtacatagcagagacagcattgcgcaagttgtatacagacaaagatgcttc

SEQ ID NO: 344301 - DNA, 58 bp, Artificial
  Synthetic oligonucleotide
caccgtacctatttaggtttacgctccaagatcggtggatagcagccctatcaatatc

SEQ ID NO: 344302 - DNA, 55 bp, Artificial
  Synthetic oligonucleotide
caccgtacggggttctagctcgctattccccttctgcggtagaaatagtcgcgtg

SEQ ID NO: 344303 - DNA, 59 bp, Artificial
  Synthetic oligonucleotide
caccgtagtagattatgttaaccaaataatacaagctatgtctaaaagatcgagatcgc

SEQ ID NO: 344304 - DNA, 50 bp, Artificial
  Synthetic oligonucleotide
caccgtattgactctattgttactgaacagtttgcagaggttcacaaggg

SEQ ID NO: 344305 - DNA, 55 bp, Artificial
  Synthetic oligonucleotide
caccgtattgttctggcttgttagagataggaggcccgttactacgccatatggg

SEQ ID NO: 344306 - DNA, 55 bp, Artificial
  Synthetic oligonucleotide
caccgtcacacactcagttgaattgctggagaatcggaaggaagaaagattctgc

SEQ ID NO: 344307 - DNA, 53 bp, Artificial
  Synthetic oligonucleotide
caccgtcagaccgtcaagaggccactcttgagtgcgagcgagtagagttttct

SEQ ID NO: 344308 - DNA, 55 bp, Artificial
  Synthetic oligonucleotide
caccgtcagagaagctggcgttctttgctcagccgccctcctgacattatgggac

SEQ ID NO: 344309 - DNA, 55 bp, Artificial
  Synthetic oligonucleotide
caccgtcagcaacaagcataaaagggctgtccagatagccaacacagaaagcatg

SEQ ID NO: 344310 - DNA, 53 bp, Artificial
  Synthetic oligonucleotide
caccgtcataactaggcggggactaaaacctatataactaacagtacttccga

SEQ ID NO: 344311 - DNA, 55 bp, Artificial
  Synthetic oligonucleotide
caccgtcatcacctacccagtgctatgtcatatcagcaacaatgtgcaaaccagg

SEQ ID NO: 344312 - DNA, 55 bp, Artificial
  Synthetic oligonucleotide
caccgtcatcggaaacaaaataaggttcactcattgttcacaatcgccgagagag

SEQ ID NO: 344313 - DNA, 50 bp, Artificial
  Synthetic oligonucleotide
caccgtccgcttggcgggctaaaccccctggtctacgcggcctcactgta

SEQ ID NO: 344314 - DNA, 59 bp, Artificial
  Synthetic oligonucleotide
caccgtccgtagtcgatggagccacgcactatggctacgtcaggagaaatcagttgcgg

SEQ ID NO: 344315 - DNA, 57 bp, Artificial
  Synthetic oligonucleotide
caccgtcctccccactaatgttggcctcacaatcgaacgtggccactactcctttga

SEQ ID NO: 344316 - DNA, 55 bp, Artificial
  Synthetic oligonucleotide
caccgtcctcctgcctacggacaaactcccatgggcgaaggtgctgatgcctgct

SEQ ID NO: 344317 - DNA, 55 bp, Artificial
  Synthetic oligonucleotide
caccgtcctcgtgttgaatccatcggtagcggccacactaggcttcggctccttc

SEQ ID NO: 344318 - DNA, 55 bp, Artificial
  Synthetic oligonucleotide
caccgtcgtagtggactcgagccaatgccctcaacccttgcactaggccctccga

SEQ ID NO: 344319 - DNA, 55 bp, Artificial
  Synthetic oligonucleotide
caccgtctttgaaggaccgattctacattcgacacgtgttcaaacgtgtgttgtc

SEQ ID NO: 344320 - DNA, 52 bp, Artificial
  Synthetic oligonucleotide
caccgtcttttacggctaacatgggcgagtatggaacagttaccattgattg

SEQ ID NO: 344321 - DNA, 55 bp, Artificial
  Synthetic oligonucleotide
caccgtgaacgcccatttggccttgcccaaggtcttgcacaacaggactcttgga

SEQ ID NO: 344322 - DNA, 60 bp, Artificial
  Synthetic oligonucleotide
caccgtgagtccgcgcagtgctgacttaacacttaagtaatgtataggccgaggattaca

SEQ ID NO: 344323 - DNA, 60 bp, Artificial
  Synthetic oligonucleotide
caccgtgcagttgtccgcccttcccgctcttatagctctttcgccgagctatgattgccc

SEQ ID NO: 344324 - DNA, 55 bp, Artificial
  Synthetic oligonucleotide
caccgtggacaagtgggcgacggagtctgcagggcagtagcacggaaatggcctc

SEQ ID NO: 344325 - DNA, 55 bp, Artificial
  Synthetic oligonucleotide
caccgtggcgcgcttcgacctccttgatgtgtccgggatcgctcctcaacatcac

SEQ ID NO: 344326 - DNA, 60 bp, Artificial
  Synthetic oligonucleotide
caccgtgggaaccgcgtgagggacatcacgaagcactttcgtgacacagcaagaatgaag

SEQ ID NO: 344327 - DNA, 55 bp, Artificial
  Synthetic oligonucleotide
caccgtgggtatgtgagaaagacattcttggctctaatttgaaaagaaggcgaac

SEQ ID NO: 344328 - DNA, 58 bp, Artificial
  Synthetic oligonucleotide
caccgtggtacacccctccgcctaactgcatatccggttgtcaagtgcaaggcacttc

SEQ ID NO: 344329 - DNA, 54 bp, Artificial
  Synthetic oligonucleotide
caccgtggtcacgtttcgatgtcttaaaccggaagaatccgacataccctccga

SEQ ID NO: 344330 - DNA, 54 bp, Artificial
  Synthetic oligonucleotide
caccgtgtacctttcactactttgtgtttttgattgagtacaagatccgtttta

SEQ ID NO: 344331 - DNA, 60 bp, Artificial
  Synthetic oligonucleotide
caccgtgtaggcaagaggttctgtgtcaagtctgtgtatatcttaggcaaggtatggatg

SEQ ID NO: 344332 - DNA, 55 bp, Artificial
  Synthetic oligonucleotide
caccgtgtatatagaaagggagttacatcaagaacctggtttcttaaacaacaca

SEQ ID NO: 344333 - DNA, 55 bp, Artificial
  Synthetic oligonucleotide
caccgttgcatatttatgcgagtagagcaatggtcgatgttgataaaacatgttg

SEQ ID NO: 344334 - DNA, 55 bp, Artificial
  Synthetic oligonucleotide
caccgttggtgtaatgttgcgtcatctgttttgggtgctagcttattttagtaag

SEQ ID NO: 344335 - DNA, 55 bp, Artificial
  Synthetic oligonucleotide
caccgttgtgtgagcaatcaatcccatatagggcttcaagcgcttggatgtcagc

SEQ ID NO: 344336 - DNA, 55 bp, Artificial
  Synthetic oligonucleotide
cacctaaacagtctcgtagcaagtccagcgtccatgaattggagtgagcacagcg

SEQ ID NO: 344337 - DNA, 55 bp, Artificial
  Synthetic oligonucleotide
cacctaaagcgcaactaggaggagcaagagatttgttagtgcaagagactgggac

SEQ ID NO: 344338 - DNA, 56 bp, Artificial
  Synthetic oligonucleotide
cacctaaatagcaaacgaagatttcataaaatagcaggaagctatacaggacagtg

SEQ ID NO: 344339 - DNA, 58 bp, Artificial
  Synthetic oligonucleotide
cacctaactggcggcaacggtgtgggtgatataggcaagggtattgtgcaggtcctgt

SEQ ID NO: 344340 - DNA, 57 bp, Artificial
  Synthetic oligonucleotide
cacctaagcaggcgacctcacacaacagcccgccagtcacacccaccgaaccgcccc

SEQ ID NO: 344341 - DNA, 55 bp, Artificial
  Synthetic oligonucleotide
cacctaatagagtgagcaaactaaagggaagaggccttggcattcaatcaggagc

SEQ ID NO: 344342 - DNA, 55 bp, Artificial
  Synthetic oligonucleotide
cacctaatccggtcgctgcttgctttctagccataatttatgcagttgctacacg

SEQ ID NO: 344343 - DNA, 53 bp, Artificial
  Synthetic oligonucleotide
cacctaatcgcacgattcgaggctcgtatgttctaactgcagcagtgatactc

SEQ ID NO: 344344 - DNA, 53 bp, Artificial
  Synthetic oligonucleotide
cacctaatctatctaagtacaataaaactaaactcctaaaccgattcaaataa

SEQ ID NO: 344345 - DNA, 60 bp, Artificial
  Synthetic oligonucleotide
cacctaatgttgatatcaatgtttccctggccccctgtaatgttgagtatcatggacttc

SEQ ID NO: 344346 - DNA, 52 bp, Artificial
  Synthetic oligonucleotide
cacctacatggacactctaatgtttatcacgaagatatccgacgtcaaggaa

SEQ ID NO: 344347 - DNA, 55 bp, Artificial
  Synthetic oligonucleotide
cacctaccaagggagctgattttccaggtttggcaaaggtcttgggaatactggc

SEQ ID NO: 344348 - DNA, 60 bp, Artificial
  Synthetic oligonucleotide
cacctaccatcggggacattgtgctgacagagcagccaccagaaacggttgatcttcgtt

SEQ ID NO: 344349 - DNA, 58 bp, Artificial
  Synthetic oligonucleotide
cacctaccattcttgtacacatgtataggatgcgtcattttgagcgaggtattgaaat

SEQ ID NO: 344350 - DNA, 60 bp, Artificial
  Synthetic oligonucleotide
cacctaccgttgagattctcaagctccacggcttcactgccctcactccccaacatgacg

SEQ ID NO: 344351 - DNA, 55 bp, Artificial
  Synthetic oligonucleotide
cacctacgaatgaggagatgatagctaacgccacgcataggcaacttgcgatcga

SEQ ID NO: 344352 - DNA, 60 bp, Artificial
  Synthetic oligonucleotide
cacctacgcctgttcccataaatagcggtgatacctatgtcgtcgcacctagctcgactc

SEQ ID NO: 344353 - DNA, 60 bp, Artificial
  Synthetic oligonucleotide
cacctacgggatattatatcccatagatgcgtctgtgacaaacccaagtgatagcctgga

SEQ ID NO: 344354 - DNA, 55 bp, Artificial
  Synthetic oligonucleotide
cacctacgtaattcaggtacactcacactgtaataaccaattgatagaggtcacc

SEQ ID NO: 344355 - DNA, 57 bp, Artificial
  Synthetic oligonucleotide
cacctacgtataacaactcaggacaagctaatagaggtgaactaagctcatgttatc

SEQ ID NO: 344356 - DNA, 55 bp, Artificial
  Synthetic oligonucleotide
cacctactaagatacaggagggtagcccaaagagtgagagcaccccaaaggacta

SEQ ID NO: 344357 - DNA, 58 bp, Artificial
  Synthetic oligonucleotide
cacctactattagtaccataagtgctgcacctactactagtaccataagtgctggtac

SEQ ID NO: 344358 - DNA, 55 bp, Artificial
  Synthetic oligonucleotide
cacctactgagaatacccacccacagacacataattggtgaaggctgtcccaaac

SEQ ID NO: 344359 - DNA, 55 bp, Artificial
  Synthetic oligonucleotide
cacctactggggcaattaagcattgctctggtgaaggcttttactctaacttaag

SEQ ID NO: 344360 - DNA, 60 bp, Artificial
  Synthetic oligonucleotide
cacctacttacagcgtgatggcaatagaactttgtattgctatgacgccgtagatgtacc

SEQ ID NO: 344361 - DNA, 58 bp, Artificial
  Synthetic oligonucleotide
cacctactttcagttacgccatggcccgaccagtatgatgttacacgacacagacccg

SEQ ID NO: 344362 - DNA, 55 bp, Artificial
  Synthetic oligonucleotide
cacctagaaaattcacaacagtaggtagcttaagaaaattgtattcatttagtaa

SEQ ID NO: 344363 - DNA, 59 bp, Artificial
  Synthetic oligonucleotide
cacctagaaacaagtggtgggatggttaccatggtgaagaagtgggtgctattgatgac

SEQ ID NO: 344364 - DNA, 60 bp, Artificial
  Synthetic oligonucleotide
cacctagaacggccgatgccagcaaccataacataccatgataaagatatcgtgatgtca

SEQ ID NO: 344365 - DNA, 56 bp, Artificial
  Synthetic oligonucleotide
cacctagaggccaacctgggctacccattcttctagtgtgcaaaggtacggccaac

SEQ ID NO: 344366 - DNA, 60 bp, Artificial
  Synthetic oligonucleotide
cacctagcaactcacaatgactggcaacattgcgtgtgggaggattataacagggacttg

SEQ ID NO: 344367 - DNA, 58 bp, Artificial
  Synthetic oligonucleotide
cacctagcagggccagctcgagaattagcctagtttccaacccgccaggagtgaatag

SEQ ID NO: 344368 - DNA, 55 bp, Artificial
  Synthetic oligonucleotide
cacctagccaaggattgtagaaagcccaagagagtgactcaaccaggagcgtgct

SEQ ID NO: 344369 - DNA, 51 bp, Artificial
  Synthetic oligonucleotide
cacctagccactcaggaagacatgcacaacgcagttaatgtaatgtggaat

SEQ ID NO: 344370 - DNA, 55 bp, Artificial
  Synthetic oligonucleotide
cacctagccttctctcttcggagagtgaagatgaagttaactacatgacccctcc

SEQ ID NO: 344371 - DNA, 55 bp, Artificial
  Synthetic oligonucleotide
cacctagcttttgtggtgactacgaattaccctattgaacactattgccggaaca

SEQ ID NO: 344372 - DNA, 57 bp, Artificial
  Synthetic oligonucleotide
cacctaggaactcaagaattagacgatgaactagctatgttaagcctcttcggaccc

SEQ ID NO: 344373 - DNA, 60 bp, Artificial
  Synthetic oligonucleotide
cacctagggctgcagcagggataaggaagaggctcgaagcaaccctgatgagacagacca

SEQ ID NO: 344374 - DNA, 60 bp, Artificial
  Synthetic oligonucleotide
cacctaggtgatgatatggatccagaaattcgaagtctagcacaggcattgatcgatcaa

SEQ ID NO: 344375 - DNA, 59 bp, Artificial
  Synthetic oligonucleotide
cacctaggtgtctggtggattacccttacaggctgtggcactacccctgcactgtcaac

SEQ ID NO: 344376 - DNA, 55 bp, Artificial
  Synthetic oligonucleotide
cacctagtagagtaagcaaattaaaaggacgaggcctaggtatccaatcaggatc

SEQ ID NO: 344377 - DNA, 60 bp, Artificial
  Synthetic oligonucleotide
cacctagtcacatttgcgctctggcaactttataacagactccgatctgttgctgaatgc

SEQ ID NO: 344378 - DNA, 55 bp, Artificial
  Synthetic oligonucleotide
cacctatatatgagtgcgcatgggttagctccactggcattgtaaaaaagggact

SEQ ID NO: 344379 - DNA, 55 bp, Artificial
  Synthetic oligonucleotide
cacctatatgtggcgttaatgtcaggtgcttacgtcacagacttgttctggtggt

SEQ ID NO: 344380 - DNA, 59 bp, Artificial
  Synthetic oligonucleotide
cacctatattcacagatctcctcaacccacgaatccaagaggaaacgacatcggaggac

SEQ ID NO: 344381 - DNA, 55 bp, Artificial
  Synthetic oligonucleotide
cacctatcatcctacctgacggtagaatgtacagacgccacttcgccggaatacc

SEQ ID NO: 344382 - DNA, 57 bp, Artificial
  Synthetic oligonucleotide
cacctatcccagtgggagacatctataaaagatggataatcctgggattaaataaaa

SEQ ID NO: 344383 - DNA, 55 bp, Artificial
  Synthetic oligonucleotide
cacctatgccttccatttagattatgagaagtggaacaaccaccagagactcgag

SEQ ID NO: 344384 - DNA, 60 bp, Artificial
  Synthetic oligonucleotide
cacctatggatgccgaatataatgggctacggctagcaggacatcaaggcttgccaacta

SEQ ID NO: 344385 - DNA, 55 bp, Artificial
  Synthetic oligonucleotide
cacctatgggcttgacctgccatatgtaacctacttaaaggatgaacttcgtgct

SEQ ID NO: 344386 - DNA, 55 bp, Artificial
  Synthetic oligonucleotide
cacctatggtgtggctttatgtagctgcaggacaattattagtatccgctagtct

SEQ ID NO: 344387 - DNA, 58 bp, Artificial
  Synthetic oligonucleotide
cacctatgtcttgcaaaattcaaagaactattgtatagattggatccgttgtgtatcc

SEQ ID NO: 344388 - DNA, 55 bp, Artificial
  Synthetic oligonucleotide
cacctatgttacccgtcctgagcgaggtagactggggtatggctaacgaacgctc

SEQ ID NO: 344389 - DNA, 60 bp, Artificial
  Synthetic oligonucleotide
cacctattcaagacaactgtcaattctctgatttccgatcagctattgatgaggaaccat

SEQ ID NO: 344390 - DNA, 58 bp, Artificial
  Synthetic oligonucleotide
cacctattttcccaccgaatgatcgagatagtatcctaactcttttgctgttgtctac

SEQ ID NO: 344391 - DNA, 50 bp, Artificial
  Synthetic oligonucleotide
cacctattttggtaatactatcgtcactatggccatgatggcatatactt

SEQ ID NO: 344392 - DNA, 60 bp, Artificial
  Synthetic oligonucleotide
cacctcaaacgcatcaatgggtgaatgtgacgctaagtgtcaaacaccccaaggagctat

SEQ ID NO: 344393 - DNA, 60 bp, Artificial
  Synthetic oligonucleotide
cacctcaacgcacccaaaccctttgtttcatgcacctattcagcagagcagcattatagc

SEQ ID NO: 344394 - DNA, 53 bp, Artificial
  Synthetic oligonucleotide
cacctcaagaaggtttagtaaggaagtcgaaagtacgatgagtaaacaatctt

SEQ ID NO: 344395 - DNA, 60 bp, Artificial
  Synthetic oligonucleotide
cacctcaagcagaggtaatgatcagagcatttaatcagattcttgtcagcaaaccagcaa

SEQ ID NO: 344396 - DNA, 58 bp, Artificial
  Synthetic oligonucleotide
cacctcaagctcctacgtcggaaatacaactgaccgactacggagctctaacactgga

SEQ ID NO: 344397 - DNA, 60 bp, Artificial
  Synthetic oligonucleotide
cacctcaaggagagatcaagccttcgatatggaaatgtccttgatgtaaatgctattgac

SEQ ID NO: 344398 - DNA, 55 bp, Artificial
  Synthetic oligonucleotide
cacctcaattcaacaagtaagtgggacacaaaccaacattgctgtgcagatcatg

SEQ ID NO: 344399 - DNA, 60 bp, Artificial
  Synthetic oligonucleotide
cacctcaattctctcttcggagaagaccagtagtcagagcactaatagagggtcagcccc

SEQ ID NO: 344400 - DNA, 57 bp, Artificial
  Synthetic oligonucleotide
cacctcacagaagaggaggccgcctaccaccaacaatccgtgcgggacatgcatctc

SEQ ID NO: 344401 - DNA, 60 bp, Artificial
  Synthetic oligonucleotide
cacctcacagacccacattactgtgcgcacatagcaacaacatagcagggtatcccgaaa

SEQ ID NO: 344402 - DNA, 60 bp, Artificial
  Synthetic oligonucleotide
cacctcagatgaacataattacagattctcagtatgtactgggcattctagcctcctgcc

SEQ ID NO: 344403 - DNA, 60 bp, Artificial
  Synthetic oligonucleotide
cacctcagattcttgcggagatggacaaggtccatcaacccatgcactcaattcatagtg

SEQ ID NO: 344404 - DNA, 58 bp, Artificial
  Synthetic oligonucleotide
cacctcagccgtaacacaagcctgtccaaaggtcacatttgacccaattcctatacat

SEQ ID NO: 344405 - DNA, 60 bp, Artificial
  Synthetic oligonucleotide
cacctcagcgagtttgtgctcgtacgggatcagtttgtgcgacgactcaggcaccagcgg

SEQ ID NO: 344406 - DNA, 60 bp, Artificial
  Synthetic oligonucleotide
cacctcaggatacaatccccagggagcaggactcaatctccagtcagtgcacaaaccaat

SEQ ID NO: 344407 - DNA, 52 bp, Artificial
  Synthetic oligonucleotide
cacctcagtcataacacaggcatgtccgaaggtatcctgggaaccaattcct

SEQ ID NO: 344408 - DNA, 52 bp, Artificial
  Synthetic oligonucleotide
cacctcagtcgttacacaggcctgtccaaaggtatcttttcagccaattcct

SEQ ID NO: 344409 - DNA, 55 bp, Artificial
  Synthetic oligonucleotide
cacctcagtgcttttgggccgcactgcggtccttaaaaagggagttttctgagac

SEQ ID NO: 344410 - DNA, 55 bp, Artificial
  Synthetic oligonucleotide
cacctcatagaatacaaaccagatcagaccaagctattcaacacaagagcaactg

SEQ ID NO: 344411 - DNA, 52 bp, Artificial
  Synthetic oligonucleotide
cacctcatatgggacctaaatattatggacctacagtgtttagtgaactact

SEQ ID NO: 344412 - DNA, 60 bp, Artificial
  Synthetic oligonucleotide
cacctcatggagaggatcatgatattgaaaggaattccatcagcgctcttcgtgtggttg

SEQ ID NO: 344413 - DNA, 55 bp, Artificial
  Synthetic oligonucleotide
cacctcatttcccggttgaaaaccttagtccacagcaaattaccatgttccctca

SEQ ID NO: 344414 - DNA, 55 bp, Artificial
  Synthetic oligonucleotide
cacctccaacaactgctggtcaaatagtacagcaaataggatttgcaacaagtgc

SEQ ID NO: 344415 - DNA, 52 bp, Artificial
  Synthetic oligonucleotide
cacctccaagcgcccgaacggctcttcaccaaggcacgtatgaccggttaca

SEQ ID NO: 344416 - DNA, 60 bp, Artificial
  Synthetic oligonucleotide
cacctccaccagaacattgtagacgttcagtatctctatggagtctcttcggccgtagtg

SEQ ID NO: 344417 - DNA, 55 bp, Artificial
  Synthetic oligonucleotide
cacctccactgatgttcgaattcttgtccaacccggtatcgcctctgaactcgtg

SEQ ID NO: 344418 - DNA, 59 bp, Artificial
  Synthetic oligonucleotide
cacctccacttacctactggggtattacaacttcaggtgggagagcatggcaggacaca

SEQ ID NO: 344419 - DNA, 57 bp, Artificial
  Synthetic oligonucleotide
cacctccagaagaatgtggaatgttggtaattacaaaggctgtaccatagaaaatta

SEQ ID NO: 344420 - DNA, 60 bp, Artificial
  Synthetic oligonucleotide
cacctccagaggaccccttcagcgaacagaagagcactgcacggaataggagtaagagcg

SEQ ID NO: 344421 - DNA, 56 bp, Artificial
  Synthetic oligonucleotide
cacctccagaggaccccttcagcgaacagaagggctcctcctcctcgggagtaggc

SEQ ID NO: 344422 - DNA, 57 bp, Artificial
  Synthetic oligonucleotide
cacctccagaggaccccttcagcgaccagagaagctcctcccccgctggagtagacc

SEQ ID NO: 344423 - DNA, 56 bp, Artificial
  Synthetic oligonucleotide
cacctccagcaccctggttggcacccttaacggtcgtatcaaggtctacgttgatc

SEQ ID NO: 344424 - DNA, 55 bp, Artificial
  Synthetic oligonucleotide
cacctccaggattctatattctaaattcaaactctgtaagactgttaccaggtgc

SEQ ID NO: 344425 - DNA, 57 bp, Artificial
  Synthetic oligonucleotide
cacctccgcaccacttacaattacctcaggcgccctaacagtggcaaccaccgctcc

SEQ ID NO: 344426 - DNA, 60 bp, Artificial
  Synthetic oligonucleotide
cacctccggagattgtttcgtccatggcacaatgggacacttcatactggcaacgtgccc

SEQ ID NO: 344427 - DNA, 57 bp, Artificial
  Synthetic oligonucleotide
cacctccggtaccgtcaccattaagggggcttcagtgtcatcagtgactcccacgga

SEQ ID NO: 344428 - DNA, 50 bp, Artificial
  Synthetic oligonucleotide
cacctcctatttgtggtagaaattgcactcctctagttgatctactaatt

SEQ ID NO: 344429 - DNA, 55 bp, Artificial
  Synthetic oligonucleotide
cacctcgaggtcaacggccctgagcagtatgttctgacattcgatgactcccgcc

SEQ ID NO: 344430 - DNA, 56 bp, Artificial
  Synthetic oligonucleotide
cacctcgagtgaaagtggaggacaacttattttggattgttttgacaatggtagga

SEQ ID NO: 344431 - DNA, 55 bp, Artificial
  Synthetic oligonucleotide
cacctcggacatttggtctgcaacgacaaggcctttcgcgaacgttacttcccta

SEQ ID NO: 344432 - DNA, 55 bp, Artificial
  Synthetic oligonucleotide
cacctcggtggtctcttaagcatcctcccacggactaggctgacaatgagctagc

SEQ ID NO: 344433 - DNA, 55 bp, Artificial
  Synthetic oligonucleotide
cacctcgttccttaaacacggtagagtttggatggaatggtactgatggttatgt

SEQ ID NO: 344434 - DNA, 55 bp, Artificial
  Synthetic oligonucleotide
cacctctaatgaaatcggttttgacgtgaacgagtatcatcacggaggtggcgac

SEQ ID NO: 344435 - DNA, 55 bp, Artificial
  Synthetic oligonucleotide
cacctctagaagcttggctgagcaaacagtcacacctgtaagccctgtagtccct

SEQ ID NO: 344436 - DNA, 57 bp, Artificial
  Synthetic oligonucleotide
cacctctccctgttcttcctcgagtgactttcactccctgccgccttcccctcaaca

SEQ ID NO: 344437 - DNA, 60 bp, Artificial
  Synthetic oligonucleotide
cacctctcgccagcacagggcatgctgacaaaaggtgcataagcgtctccggatgttgtt

SEQ ID NO: 344438 - DNA, 55 bp, Artificial
  Synthetic oligonucleotide
cacctctcgtccgcacgaagtgttagtgtattcggcgctctgtaccgcgtacagc

SEQ ID NO: 344439 - DNA, 55 bp, Artificial
  Synthetic oligonucleotide
cacctctgcggcacaaccatcccgtttggggcctatcggacgttccgtcactcct

SEQ ID NO: 344440 - DNA, 51 bp, Artificial
  Synthetic oligonucleotide
cacctctggcagtgacatggtggaataggaatggaccaacaacgagcacaa

SEQ ID NO: 344441 - DNA, 55 bp, Artificial
  Synthetic oligonucleotide
cacctctggcgcctttggaaacaaaccacggactcaacctgtagtcatttggcta

SEQ ID NO: 344442 - DNA, 55 bp, Artificial
  Synthetic oligonucleotide
cacctctggctgtgacgtggtggaacagaaatggaccaacgacaagtacagtcca

SEQ ID NO: 344443 - DNA, 58 bp, Artificial
  Synthetic oligonucleotide
cacctctgtggtgcgggctactgctacgcctataggtttaatatcccggaaatcgcca

SEQ ID NO: 344444 - DNA, 52 bp, Artificial
  Synthetic oligonucleotide
cacctctgttaagttgtgcgagctaataacaattatcaaggatctaccgttc

SEQ ID NO: 344445 - DNA, 56 bp, Artificial
  Synthetic oligonucleotide
cacctcttcacagtttcagtggcggcacggaggcaccaatccccccggtggtgtcg

SEQ ID NO: 344446 - DNA, 55 bp, Artificial
  Synthetic oligonucleotide
cacctctttcagtacctacaggggcttctaatgaggttgatgtcacagttatggg

SEQ ID NO: 344447 - DNA, 55 bp, Artificial
  Synthetic oligonucleotide
cacctgaaataccttatacaatggaatcagcgaatgagattgcgaggatgagtgg

SEQ ID NO: 344448 - DNA, 56 bp, Artificial
  Synthetic oligonucleotide
cacctgaaatgcacattcctggtgaggtcaccaaccttttagagctttgtcaagtg

SEQ ID NO: 344449 - DNA, 57 bp, Artificial
  Synthetic oligonucleotide
cacctgaaccccacgcaccctcaatggactgtgtgtgaaggtctactttgcaagggt

SEQ ID NO: 344450 - DNA, 56 bp, Artificial
  Synthetic oligonucleotide
cacctgacaacttaattgcgcaagtttcggaaggaacacgcgacaattttatacaa

SEQ ID NO: 344451 - DNA, 55 bp, Artificial
  Synthetic oligonucleotide
cacctgacactgcgacgcaccattggcacgctgtcacgtctggtaccccacctac

SEQ ID NO: 344452 - DNA, 60 bp, Artificial
  Synthetic oligonucleotide
cacctgacaggtgtccaccaacagcattgtatgttgctgggataccagaattgggtgcat

SEQ ID NO: 344453 - DNA, 60 bp, Artificial
  Synthetic oligonucleotide
cacctgagccggcgcattcttgtctgtacatgcggacaaacttgaatcggtatactctgt

SEQ ID NO: 344454 - DNA, 60 bp, Artificial
  Synthetic oligonucleotide
cacctgaggaaccatggcgtcagctagctcgatcctatggattgattttcattagtgaag

SEQ ID NO: 344455 - DNA, 56 bp, Artificial
  Synthetic oligonucleotide
cacctgaggcagaggtgggttactacccctatgttgggttcacaacctacagagtc

SEQ ID NO: 344456 - DNA, 55 bp, Artificial
  Synthetic oligonucleotide
cacctgaggctaatggataccacgatgttcgtaggcgaccctttcaaccctccga

SEQ ID NO: 344457 - DNA, 55 bp, Artificial
  Synthetic oligonucleotide
cacctgaggtgctgttattgccaatcgatcatcaaccagctaatgtaacaacgcc

SEQ ID NO: 344458 - DNA, 58 bp, Artificial
  Synthetic oligonucleotide
cacctgagtggatgtggaggttgtaccacctgctccgttcggggtgggtgttgcaggc

SEQ ID NO: 344459 - DNA, 55 bp, Artificial
  Synthetic oligonucleotide
cacctgatccccgcttaagatataggatgatgtgcttttgcttgcgcctaatagt

SEQ ID NO: 344460 - DNA, 60 bp, Artificial
  Synthetic oligonucleotide
cacctgatcctactcgccccgagccagttgttgtcgtcttgcgcggcgcacctgggcagg

SEQ ID NO: 344461 - DNA, 52 bp, Artificial
  Synthetic oligonucleotide
cacctgatgtcatacagaactttctagcgtacgtgcctccatcacatgctat

SEQ ID NO: 344462 - DNA, 55 bp, Artificial
  Synthetic oligonucleotide
cacctgattcagagcggcgccctaccagtgcagaaagcacagggggcctgcagga

SEQ ID NO: 344463 - DNA, 55 bp, Artificial
  Synthetic oligonucleotide
cacctgattcgttgggttacgatctaattcgtgatttaatctcagttattagggc

SEQ ID NO: 344464 - DNA, 55 bp, Artificial
  Synthetic oligonucleotide
cacctgcaattctgaatgcattactccaaacggaagcatacccaatgacaaaccc

SEQ ID NO: 344465 - DNA, 59 bp, Artificial
  Synthetic oligonucleotide
cacctgccatctccgaagtccctgaataaatcccgagcacttgtagccattactcgggc

SEQ ID NO: 344466 - DNA, 53 bp, Artificial
  Synthetic oligonucleotide
cacctgcccctgggtcaatgggggtagggggcgggctaagactacgtacgcgc

SEQ ID NO: 344467 - DNA, 55 bp, Artificial
  Synthetic oligonucleotide
cacctgccctcatacctgaaatacgacgagccgggttatcccaaatagctccggg

SEQ ID NO: 344468 - DNA, 60 bp, Artificial
  Synthetic oligonucleotide
cacctgccttggagaccgctacgattcacctgatccttcatcgtcaaattatggaggcat

SEQ ID NO: 344469 - DNA, 55 bp, Artificial
  Synthetic oligonucleotide
cacctgcgaaaggctttcgaaactggatcacaccctgcgaacattgactactcca

SEQ ID NO: 344470 - DNA, 59 bp, Artificial
  Synthetic oligonucleotide
cacctgcgctgacagacattgaacagggatcaggaaaaccttttacacgacgaccaagc

SEQ ID NO: 344471 - DNA, 60 bp, Artificial
  Synthetic oligonucleotide
cacctgcgtttcgttcgacgatgttgatgcttgcaagagttatgctgtactggaaacatg

SEQ ID NO: 344472 - DNA, 59 bp, Artificial
  Synthetic oligonucleotide
cacctgctaaaggaacaccaattacttatgatgggctaccaacagatctccaactcttg

SEQ ID NO: 344473 - DNA, 60 bp, Artificial
  Synthetic oligonucleotide
cacctgctctgaactccccaaatgttgaagcgtgcgggtatagtgatagggtgcaacaga

SEQ ID NO: 344474 - DNA, 55 bp, Artificial
  Synthetic oligonucleotide
cacctggaaatgacatggactacgtactgacctgtctgagacaaactaatgcagc

SEQ ID NO: 344475 - DNA, 55 bp, Artificial
  Synthetic oligonucleotide
cacctggaatgctgaaccctggaggtgtaccatggatcgcaattggggatgagac

SEQ ID NO: 344476 - DNA, 59 bp, Artificial
  Synthetic oligonucleotide
cacctggacattgtcagattctgagggcaatgaaacaccaggtggttattgtttaacca

SEQ ID NO: 344477 - DNA, 60 bp, Artificial
  Synthetic oligonucleotide
cacctggatcaatggtgattgggcttgggagcccatacttgactgtggaagcggatcgga

SEQ ID NO: 344478 - DNA, 58 bp, Artificial
  Synthetic oligonucleotide
cacctggattcccctatgaaaatttgtcacctgcacaattgaccatgtgcccgcatgt

SEQ ID NO: 344479 - DNA, 60 bp, Artificial
  Synthetic oligonucleotide
cacctggcaatacgaatacgcgcgtctctcgttattctagtagtgcgcgccacaagttac

SEQ ID NO: 344480 - DNA, 57 bp, Artificial
  Synthetic oligonucleotide
cacctggcagatttcgcacaatagtatgtggtctttttcccactcagatccaggttc

SEQ ID NO: 344481 - DNA, 55 bp, Artificial
  Synthetic oligonucleotide
cacctggccactgcagaggactatagaaattgtgtcagaagtctatgggagagag

SEQ ID NO: 344482 - DNA, 55 bp, Artificial
  Synthetic oligonucleotide
cacctggcggtcctgtgcccaataaagtggatgggtacgagtggcagacatcgac

SEQ ID NO: 344483 - DNA, 60 bp, Artificial
  Synthetic oligonucleotide
cacctggctgagattgatgacttgattgaccttgcagcctcaggagatcctacaccacca

SEQ ID NO: 344484 - DNA, 60 bp, Artificial
  Synthetic oligonucleotide
cacctgggaaaatcaatgctcaaatagccatgtgaatacattgagatttcttgtcaaaaa

SEQ ID NO: 344485 - DNA, 57 bp, Artificial
  Synthetic oligonucleotide
cacctgggcctaagatcactaacttaaagaccatcaactgcataaacttaaaggcat

SEQ ID NO: 344486 - DNA, 60 bp, Artificial
  Synthetic oligonucleotide
cacctgggtaaatcagacatatgtcaacatcaacaatactaattttcttactgagaaagc

SEQ ID NO: 344487 - DNA, 55 bp, Artificial
  Synthetic oligonucleotide
cacctgggtcgagaaatgttgtgcccaatctgtttaggtccctatatggattgag

SEQ ID NO: 344488 - DNA, 60 bp, Artificial
  Synthetic oligonucleotide
cacctgggtctaatacgcttgggcccaattgctgaagctctctatacgggtgcatctccg

SEQ ID NO: 344489 - DNA, 55 bp, Artificial
  Synthetic oligonucleotide
cacctgggtctaatgatgcttccggtagttgatgtaaatgttttagtgggaactc

SEQ ID NO: 344490 - DNA, 55 bp, Artificial
  Synthetic oligonucleotide
cacctgggtgatgatatggatcctgagcttagaggtcttgcccaggcactgattg

SEQ ID NO: 344491 - DNA, 55 bp, Artificial
  Synthetic oligonucleotide
cacctgggtgggaagtaatttggaagatccagcatccagggaagcagtagtcagc

SEQ ID NO: 344492 - DNA, 55 bp, Artificial
  Synthetic oligonucleotide
cacctgggtgggtggtaatttggacgatccagcatcaagagaattagtagtcggc

SEQ ID NO: 344493 - DNA, 60 bp, Artificial
  Synthetic oligonucleotide
cacctggtaacactaacacgcgcgtttctcgctactcgagtagcgcacgtcataaactgc

SEQ ID NO: 344494 - DNA, 54 bp, Artificial
  Synthetic oligonucleotide
cacctggtaatacaaacacgcgcgtttctcgttattcgagcagtgcacgccaca

SEQ ID NO: 344495 - DNA, 52 bp, Artificial
  Synthetic oligonucleotide
cacctggtacgatgccatggctctcacgcatggcagcaagttggggacgctg

SEQ ID NO: 344496 - DNA, 60 bp, Artificial
  Synthetic oligonucleotide
cacctggtactgggaagtctctagcaacagggattatcgctagagctatagcagataagt

SEQ ID NO: 344497 - DNA, 55 bp, Artificial
  Synthetic oligonucleotide
cacctggtattcctcccctagattgatatctagtaccggtgcttcctgcatcatg

SEQ ID NO: 344498 - DNA, 55 bp, Artificial
  Synthetic oligonucleotide
cacctggttgctatcgcacactaaacctatttagatacaaaagcaggtgttacat

SEQ ID NO: 344499 - DNA, 57 bp, Artificial
  Synthetic oligonucleotide
cacctggttgctggacacagttacctggtcacaggagttcacccggggctggaatat

SEQ ID NO: 344500 - DNA, 50 bp, Artificial
  Synthetic oligonucleotide
cacctggtttccagggtggttagggaggttatgaccccctaccccggaga

SEQ ID NO: 344501 - DNA, 59 bp, Artificial
  Synthetic oligonucleotide
cacctggtttgtctagccagtcagttgctacaccttctgcacacttacctataaagcct

SEQ ID NO: 344502 - DNA, 60 bp, Artificial
  Synthetic oligonucleotide
cacctgtaaggcatgcacattccaatcacaagtaccattgtatctgcccaatgattagtg

SEQ ID NO: 344503 - DNA, 57 bp, Artificial
  Synthetic oligonucleotide
cacctgtacaaacccaacagataatgtatgtgcctccaggcgggccggtacctacca

SEQ ID NO: 344504 - DNA, 60 bp, Artificial
  Synthetic oligonucleotide
cacctgtatatctactgtaagctcttcctggtcttcagggatcaatttcaatgatttgtc

SEQ ID NO: 344505 - DNA, 60 bp, Artificial
  Synthetic oligonucleotide
cacctgtctatgaggactcaccctatgagcccgcagttctctccatcaatgaccagcgac

SEQ ID NO: 344506 - DNA, 60 bp, Artificial
  Synthetic oligonucleotide
cacctgtgaccttaattcagttctaaataatttcactcaatacgcagcagttaggctgac

SEQ ID NO: 344507 - DNA, 55 bp, Artificial
  Synthetic oligonucleotide
cacctgtgggtctttagaacatcaggtatgaaccccaggctggagttgtggagca

SEQ ID NO: 344508 - DNA, 58 bp, Artificial
  Synthetic oligonucleotide
cacctgtgtaagaccaggtaataacacaagaggacaagtgcaaataggacccatgacc

SEQ ID NO: 344509 - DNA, 55 bp, Artificial
  Synthetic oligonucleotide
cacctgtgtggaggcctggaccgatgtgaaggtccgtggctgtgccttctacgga

SEQ ID NO: 344510 - DNA, 60 bp, Artificial
  Synthetic oligonucleotide
cacctgtgttagtattggctacggatatgcggacagagctagcgagaacattatcggggc

SEQ ID NO: 344511 - DNA, 60 bp, Artificial
  Synthetic oligonucleotide
cacctgttaatgccccgcctaatcgtggtgggagacgcaagccgacagctcgttctcgca

SEQ ID NO: 344512 - DNA, 55 bp, Artificial
  Synthetic oligonucleotide
cacctgttatattgccgatggcaaatctggctgataagggagtgcagcttacaag

SEQ ID NO: 344513 - DNA, 53 bp, Artificial
  Synthetic oligonucleotide
caccttaaaactctacagacacgccacagtagactacatactttcctacaaca

SEQ ID NO: 344514 - DNA, 58 bp, Artificial
  Synthetic oligonucleotide
caccttaaagcagataaaatagagtcgagacccggcctccattgctgcaccccaatag

SEQ ID NO: 344515 - DNA, 52 bp, Artificial
  Synthetic oligonucleotide
caccttaacaggcttttaatagctgttttacctgccgtaggaaaaggaacac

SEQ ID NO: 344516 - DNA, 58 bp, Artificial
  Synthetic oligonucleotide
caccttaagttttggggcgtatatgtctaaggcacatggtgtcgaccccaacatcaga

SEQ ID NO: 344517 - DNA, 52 bp, Artificial
  Synthetic oligonucleotide
caccttaatgaatctgtagcaattgtgtgtacaagacccggcagtaacaaac

SEQ ID NO: 344518 - DNA, 55 bp, Artificial
  Synthetic oligonucleotide
caccttacaacgtttcaatttgctcgcgaatatggcttaagtactacatacttcg

SEQ ID NO: 344519 - DNA, 60 bp, Artificial
  Synthetic oligonucleotide
caccttacgtttgtaatgcacctaactgtgatgtgagtgatgtcaccaaattatatttgg

SEQ ID NO: 344520 - DNA, 52 bp, Artificial
  Synthetic oligonucleotide
caccttactcactccccttggcgattctatccgtaggatacaagggtctgtg

SEQ ID NO: 344521 - DNA, 57 bp, Artificial
  Synthetic oligonucleotide
caccttactcacttattgactcttaccacctcagtcttgagcgcaacttcgttggtt

SEQ ID NO: 344522 - DNA, 54 bp, Artificial
  Synthetic oligonucleotide
caccttacttagagggaaccaacgatgatgacggggccgttcaaaatccagaaa

SEQ ID NO: 344523 - DNA, 55 bp, Artificial
  Synthetic oligonucleotide
caccttagacactccttcagcactattgcaccgtcagcagaatctgtggagctag

SEQ ID NO: 344524 - DNA, 60 bp, Artificial
  Synthetic oligonucleotide
caccttagatatcgatgtagttgctgactttggaacgaaagtgcttccataccttgacac

SEQ ID NO: 344525 - DNA, 57 bp, Artificial
  Synthetic oligonucleotide
caccttagcccagcttgtggcaaaaaagcttattagcctcaatgtttcaacggaaga

SEQ ID NO: 344526 - DNA, 55 bp, Artificial
  Synthetic oligonucleotide
caccttagcgctagcctcctcggtcggtccgacctatctgagcccctttgcaacc

SEQ ID NO: 344527 - DNA, 50 bp, Artificial
  Synthetic oligonucleotide
caccttagctatatggagcacaatatatagtcgtctgacaaatataaatt

SEQ ID NO: 344528 - DNA, 50 bp, Artificial
  Synthetic oligonucleotide
caccttataaatggatgggatatgaattatatcctcggaaatggactata

SEQ ID NO: 344529 - DNA, 54 bp, Artificial
  Synthetic oligonucleotide
caccttcaaacccgcaacccgcgaagcgtcctacgcccgcatcgccctatccgg

SEQ ID NO: 344530 - DNA, 55 bp, Artificial
  Synthetic oligonucleotide
caccttcaaggcgcccacgtcgacgtacacggactaagccaatcgttgtggtaca

SEQ ID NO: 344531 - DNA, 59 bp, Artificial
  Synthetic oligonucleotide
caccttcaagggaagataatttgcaacgcgttttcacagtagcctccattagaagcatg

SEQ ID NO: 344532 - DNA, 56 bp, Artificial
  Synthetic oligonucleotide
caccttcaatagcgtcattttgattgtgacaagagatttcttctccaatccaattg

SEQ ID NO: 344533 - DNA, 55 bp, Artificial
  Synthetic oligonucleotide
caccttcagccaaccatggtatagatgcaaaaggttatttcaagtggtcatccac

SEQ ID NO: 344534 - DNA, 56 bp, Artificial
  Synthetic oligonucleotide
caccttcagtattactgggtgttccagactagttcctgaggtaccaagttatgagg

SEQ ID NO: 344535 - DNA, 60 bp, Artificial
  Synthetic oligonucleotide
caccttccactatgatactcatcggtctctctggccgcgcagcggaacctctcccaaaat

SEQ ID NO: 344536 - DNA, 51 bp, Artificial
  Synthetic oligonucleotide
caccttccccccagaagtgctgcttcccccgggacttatcataccacctca

SEQ ID NO: 344537 - DNA, 60 bp, Artificial
  Synthetic oligonucleotide
caccttccgtaattcatcagatccagaaatactgactattgctatcgattatagtgatta

SEQ ID NO: 344538 - DNA, 54 bp, Artificial
  Synthetic oligonucleotide
caccttcctcaaggacgaacttagaccaacggctaaggttgaacagggactgac

SEQ ID NO: 344539 - DNA, 51 bp, Artificial
  Synthetic oligonucleotide
caccttcgagggggttcacacccccaacctgcgggccggctactcttcttt

SEQ ID NO: 344540 - DNA, 54 bp, Artificial
  Synthetic oligonucleotide
caccttcgagggggttcacacccccagccgacgggccggctattcttcttgatc

SEQ ID NO: 344541 - DNA, 60 bp, Artificial
  Synthetic oligonucleotide
caccttcgggccgtctctatcagagtatccggcattccagaatggagtactcaaggccta

SEQ ID NO: 344542 - DNA, 59 bp, Artificial
  Synthetic oligonucleotide
caccttcgttacttttaatgaagagtgctcattcgatggtggagaggaatgggacgtga

SEQ ID NO: 344543 - DNA, 60 bp, Artificial
  Synthetic oligonucleotide
caccttctacagaagcatctgacacagtacaaggcatagctttttcaggtagccccctct

SEQ ID NO: 344544 - DNA, 55 bp, Artificial
  Synthetic oligonucleotide
caccttctaggatggcgtactactatccctggagaaggaatcgttggaaccgtag

SEQ ID NO: 344545 - DNA, 55 bp, Artificial
  Synthetic oligonucleotide
caccttcttctcagaggacggagagctatcatccctaggaaaggcgggtacaggt

SEQ ID NO: 344546 - DNA, 55 bp, Artificial
  Synthetic oligonucleotide
caccttcttggcgaggaaaggagacattccgagacacaggcttaccgatgcactg

SEQ ID NO: 344547 - DNA, 55 bp, Artificial
  Synthetic oligonucleotide
caccttgactaacggtatctgatagtcctcaaaagggactttcagcgttggtgcg

SEQ ID NO: 344548 - DNA, 56 bp, Artificial
  Synthetic oligonucleotide
caccttgagaaacgttgtaagcgttttgagacgagaaatcgagaaatctggaaaga

SEQ ID NO: 344549 - DNA, 60 bp, Artificial
  Synthetic oligonucleotide
caccttgagagcttgtaaagatcttggtgcatatgggctagagatcctgaagttggtcat

SEQ ID NO: 344550 - DNA, 53 bp, Artificial
  Synthetic oligonucleotide
caccttgagtcctgctcatctaatgcaacttgaaacagttctgcgccaagaga

SEQ ID NO: 344551 - DNA, 60 bp, Artificial
  Synthetic oligonucleotide
caccttgataagattgccgagtcacgcggcaaataccctgaagagcagattcgcaaggtt

SEQ ID NO: 344552 - DNA, 55 bp, Artificial
  Synthetic oligonucleotide
caccttgccatggctgcatcagagttcaaagagacccctgaactcgagagcgccg

SEQ ID NO: 344553 - DNA, 55 bp, Artificial
  Synthetic oligonucleotide
caccttgcgctaatgctctgttacaggtcactaataccatctaagtagttgattc

SEQ ID NO: 344554 - DNA, 60 bp, Artificial
  Synthetic oligonucleotide
caccttgcgtaaacttgccatacagatttgtaaattgtatagatctgtatgacaaattgt

SEQ ID NO: 344555 - DNA, 54 bp, Artificial
  Synthetic oligonucleotide
caccttgcgtaactgttttatggtcgaaaatacttgggatcaaaagttcgagga

SEQ ID NO: 344556 - DNA, 55 bp, Artificial
  Synthetic oligonucleotide
caccttggaagagacctggaggttctaacttttggtgaatctacaggcctgacct

SEQ ID NO: 344557 - DNA, 60 bp, Artificial
  Synthetic oligonucleotide
caccttggaatcttcgacgcgttgcgctcagcactctaccccgagtgtagcttaggccga

SEQ ID NO: 344558 - DNA, 60 bp, Artificial
  Synthetic oligonucleotide
caccttggaggacaaacactcaaacggcacagcacatgatagaactcctcatagaaccct

SEQ ID NO: 344559 - DNA, 60 bp, Artificial
  Synthetic oligonucleotide
caccttggatatggacaaaaagcagcggaaagaatctacagatgccttatgcgctgtggg

SEQ ID NO: 344560 - DNA, 60 bp, Artificial
  Synthetic oligonucleotide
caccttggcgatgacatggatcctgaactcaggggccttgcacaggcactcattgatcaa

SEQ ID NO: 344561 - DNA, 56 bp, Artificial
  Synthetic oligonucleotide
caccttgggactcaagtccaggtgaccacataaatagttatgtggacccaaagaac

SEQ ID NO: 344562 - DNA, 54 bp, Artificial
  Synthetic oligonucleotide
caccttgggtgatgggggatcttgcaaagaattccactttaacctttcttattc

SEQ ID NO: 344563 - DNA, 55 bp, Artificial
  Synthetic oligonucleotide
caccttggtcaatgatcttgcaaagcgtcgtctatacgactcagcggtggaagag

SEQ ID NO: 344564 - DNA, 54 bp, Artificial
  Synthetic oligonucleotide
cacctttaaagcgtaaagtttatgttagttgtccaggagtgccgtagtcctgtc

SEQ ID NO: 344565 - DNA, 58 bp, Artificial
  Synthetic oligonucleotide
cacctttaatcatgactggctttccgtacttcgtgttgctttgccagtctctttgggc

SEQ ID NO: 344566 - DNA, 55 bp, Artificial
  Synthetic oligonucleotide
cacctttaattcgaactggctttccgtatttacagttggattgccagtccttctg

SEQ ID NO: 344567 - DNA, 51 bp, Artificial
  Synthetic oligonucleotide
cacctttaatttgaacgggtttcccgtattttgtgttggactgccagtccc

SEQ ID NO: 344568 - DNA, 55 bp, Artificial
  Synthetic oligonucleotide
cacctttaatttgaattggctttccgtactttgtgttgctttgccaatccctctg

SEQ ID NO: 344569 - DNA, 60 bp, Artificial
  Synthetic oligonucleotide
cacctttacgtctcaatgccaactgcacagtccactatgaaggctgaagaaatcacgcca

SEQ ID NO: 344570 - DNA, 56 bp, Artificial
  Synthetic oligonucleotide
cacctttcaaaccatagcccagcttaaagaaacaggacaacttacaagcggcacta

SEQ ID NO: 344571 - DNA, 60 bp, Artificial
  Synthetic oligonucleotide
cacctttcacctattacaaggctgatcttgaagtgactctcagtgccacatccaacagta

SEQ ID NO: 344572 - DNA, 55 bp, Artificial
  Synthetic oligonucleotide
cacctttcagagaaggaggagtcataatgtctgagtcggcagcgctaaaactgct

SEQ ID NO: 344573 - DNA, 60 bp, Artificial
  Synthetic oligonucleotide
cacctttcatgaggggggctcacaacatatcgtttgtcaccccaccatctagcagatcct

SEQ ID NO: 344574 - DNA, 60 bp, Artificial
  Synthetic oligonucleotide
cacctttctgaagagctatatgacataagactgcagcacctggaactgtcaaagcttaag

SEQ ID NO: 344575 - DNA, 56 bp, Artificial
  Synthetic oligonucleotide
cacctttgacggggggtaggaagatactaggtgtatctaatcctgataccatagaa

SEQ ID NO: 344576 - DNA, 55 bp, Artificial
  Synthetic oligonucleotide
cacctttggcagtaacatggtggaatagaaatggacccgtgacaagtacggtcca

SEQ ID NO: 344577 - DNA, 52 bp, Artificial
  Synthetic oligonucleotide
cacctttggcttttctttaaaggacattagactaccttgtaccttttgtcgc

SEQ ID NO: 344578 - DNA, 55 bp, Artificial
  Synthetic oligonucleotide
cacctttgggcaaccatactgtacataaatctgagttgagtggtacccttggttg

SEQ ID NO: 344579 - DNA, 58 bp, Artificial
  Synthetic oligonucleotide
caccttttagttgtgactggactccaagtgatgacagaattaggttacccacagacaa

SEQ ID NO: 344580 - DNA, 56 bp, Artificial
  Synthetic oligonucleotide
caccttttcgcgtcgactgtgtcgtcaacaccctttcggcccgccagcctaggaca

SEQ ID NO: 344581 - DNA, 51 bp, Artificial
  Synthetic oligonucleotide
caccttttggcggagaacgctaattccgtcaagatccctgtacctcagaaa

SEQ ID NO: 344582 - DNA, 55 bp, Artificial
  Synthetic oligonucleotide
caccttttgggctgtcaacgcctactcctctggcgggtacgcgcaactggcctct

SEQ ID NO: 344583 - DNA, 55 bp, Artificial
  Synthetic oligonucleotide
cacgaaaagaggccaacgatacgagatattgccaccgaacatcctacgacataca

SEQ ID NO: 344584 - DNA, 53 bp, Artificial
  Synthetic oligonucleotide
cacgaaaagtgactcctgacagggaagaaacgacaggtcggaaacaaacttaa

SEQ ID NO: 344585 - DNA, 53 bp, Artificial
  Synthetic oligonucleotide
cacgaaacagaaagtttcgcggggtaagcttccacttctccagaaccgcgctt

SEQ ID NO: 344586 - DNA, 55 bp, Artificial
  Synthetic oligonucleotide
cacgaaacgagaatttcgaaggctttagtaagatcaacgaaatgattggagctcg

SEQ ID NO: 344587 - DNA, 60 bp, Artificial
  Synthetic oligonucleotide
cacgaaactggatcagtgaggcccaaaattcagatgtggtccgcctattcgaatatgcag

SEQ ID NO: 344588 - DNA, 59 bp, Artificial
  Synthetic oligonucleotide
cacgaaagattcatcgtttatactggcgtacccgagtcccgcattagtgcgcaatcaac

SEQ ID NO: 344589 - DNA, 57 bp, Artificial
  Synthetic oligonucleotide
cacgaaaggcgtttacggatatagcgcctcaccacgcatggattaaaggtgttttgc

SEQ ID NO: 344590 - DNA, 55 bp, Artificial
  Synthetic oligonucleotide
cacgaaaggtggggcgggacatgaagaaccgatgctcatgcagagttacggttgg

SEQ ID NO: 344591 - DNA, 58 bp, Artificial
  Synthetic oligonucleotide
cacgaaagtggaaagcacgtttatgcaggaagacctcatcctagtccagccggatacc

SEQ ID NO: 344592 - DNA, 60 bp, Artificial
  Synthetic oligonucleotide
cacgaaagtggatgggcgcactatgaaattgaacactggtcctataaacatgatcggcca

SEQ ID NO: 344593 - DNA, 60 bp, Artificial
  Synthetic oligonucleotide
cacgaaatcgcgtatttgtatcacaaccaaggcgctccagctgccgaacagtacctgact

SEQ ID NO: 344594 - DNA, 55 bp, Artificial
  Synthetic oligonucleotide
cacgaaatcttcatcgaatcgtacatgtgtttcgagatcggtgcacatatgcacg

SEQ ID NO: 344595 - DNA, 59 bp, Artificial
  Synthetic oligonucleotide
cacgaaatgtgacctgttcaaacagttttcgtactgtcttgttgccttgacaagacata

SEQ ID NO: 344596 - DNA, 56 bp, Artificial
  Synthetic oligonucleotide
cacgaaattatcagcggactgactaagaaagacgtgattcttttccctagttataa

SEQ ID NO: 344597 - DNA, 55 bp, Artificial
  Synthetic oligonucleotide
cacgaaatttataatgccggacctgttgatccgatgcctcagtgttcccgtcgct

SEQ ID NO: 344598 - DNA, 57 bp, Artificial
  Synthetic oligonucleotide
cacgaacaacaaggggaaggaagtgcttgtgctctggggggtgcatcaccctccaac

SEQ ID NO: 344599 - DNA, 59 bp, Artificial
  Synthetic oligonucleotide
cacgaacaataaagggaaagaagtgctcgtgctctggggagtgcatcaccctccaacta

SEQ ID NO: 344600 - DNA, 59 bp, Artificial
  Synthetic oligonucleotide
cacgaacacccgctgagtgtctaaccgcctgggcgggtgccggagctccagagagcgga

SEQ ID NO: 344601 - DNA, 55 bp, Artificial
  Synthetic oligonucleotide
cacgaacactaatcgtcgaaggacactttaatgcgcaagatgctacgattgcacg

SEQ ID NO: 344602 - DNA, 58 bp, Artificial
  Synthetic oligonucleotide
cacgaacagacatatattactatgctagtagtgacaggttattaactgttggtaatcc

SEQ ID NO: 344603 - DNA, 52 bp, Artificial
  Synthetic oligonucleotide
cacgaacagcgtcatcttctggttggtaagggatcggagaccgtatgggaca

SEQ ID NO: 344604 - DNA, 55 bp, Artificial
  Synthetic oligonucleotide
cacgaacggtgtcccatctctcacttcaggtggtggcggaacgaacatacccgcc

SEQ ID NO: 344605 - DNA, 51 bp, Artificial
  Synthetic oligonucleotide
cacgaacgtaaattcgatgatagattcacaggcttgctgttagaacgtaaa

SEQ ID NO: 344606 - DNA, 58 bp, Artificial
  Synthetic oligonucleotide
cacgaacgtgacactgttgtcatgcgttccgttaaccgctcaggagctgaaacggacc

SEQ ID NO: 344607 - DNA, 57 bp, Artificial
  Synthetic oligonucleotide
cacgaacgtgttagagttcattagattcctcccatcgagacgaatccaacggaccca

SEQ ID NO: 344608 - DNA, 55 bp, Artificial
  Synthetic oligonucleotide
cacgaactcgaatcagtaccagtatttcgcagcaatgtgggcagagcccacagcg

SEQ ID NO: 344609 - DNA, 60 bp, Artificial
  Synthetic oligonucleotide
cacgaacttagagcagtccgctgcctcacaagaggaccttgaagctatgtttgggaatgt

SEQ ID NO: 344610 - DNA, 57 bp, Artificial
  Synthetic oligonucleotide
cacgaagacacgtagcccgggaactgcacccagagtactttaaagactgctgacaaa

SEQ ID NO: 344611 - DNA, 55 bp, Artificial
  Synthetic oligonucleotide
cacgaagcaacgcagctactgtggctagtgaaatagctcatagtcctgaacgcga

SEQ ID NO: 344612 - DNA, 55 bp, Artificial
  Synthetic oligonucleotide
cacgaagctatagggagcgaggagaccaagaggattcttcctaaaactgcaatgc

SEQ ID NO: 344613 - DNA, 55 bp, Artificial
  Synthetic oligonucleotide
cacgaaggaatccttgcaaatttgaaattcgaggtcattgcttgaatggtaagag

SEQ ID NO: 344614 - DNA, 55 bp, Artificial
  Synthetic oligonucleotide
cacgaaggagaagacaactgtttgctacaccctatctgccagcatggaatggatt

SEQ ID NO: 344615 - DNA, 57 bp, Artificial
  Synthetic oligonucleotide
cacgaaggcgtctaaccaaagacagtcacaaggtaagctgagttgggtgcttgggtc

SEQ ID NO: 344616 - DNA, 60 bp, Artificial
  Synthetic oligonucleotide
cacgaagggtgatgtgtctatcggcgtgcagtacacggataggccgcgcactaagggccg

SEQ ID NO: 344617 - DNA, 55 bp, Artificial
  Synthetic oligonucleotide
cacgaaggtgcacactctggacctcaacggtcgggagacctacgcgccggaggtg

SEQ ID NO: 344618 - DNA, 60 bp, Artificial
  Synthetic oligonucleotide
cacgaagtcagcacatcaaaaaggtgagtacactgccattgggaagcttattgtgtattg

SEQ ID NO: 344619 - DNA, 50 bp, Artificial
  Synthetic oligonucleotide
cacgaagtccgtaagctggtagagatgtttcatggaaaagatcgcggccg

SEQ ID NO: 344620 - DNA, 55 bp, Artificial
  Synthetic oligonucleotide
cacgaagtctggagaccgttggcggcagcttaccaagagcaactagaccggccgg

SEQ ID NO: 344621 - DNA, 55 bp, Artificial
  Synthetic oligonucleotide
cacgaagtgtcaaacacccaagggtgccttaaacaccagcctcccatttcagaat

SEQ ID NO: 344622 - DNA, 55 bp, Artificial
  Synthetic oligonucleotide
cacgaataacgcattcaggggagcactgactagaatgaacttgaacggtccagga

SEQ ID NO: 344623 - DNA, 52 bp, Artificial
  Synthetic oligonucleotide
cacgaataacggtcgagtgtggtggtccaacccttacccgtgtttacgaggc

SEQ ID NO: 344624 - DNA, 60 bp, Artificial
  Synthetic oligonucleotide
cacgaataatgtgatgttctacctgcttagggatagaaggccgtatggcaatacgcccca

SEQ ID NO: 344625 - DNA, 55 bp, Artificial
  Synthetic oligonucleotide
cacgaataccgccggagggaaactcccgtgacacccgactgggtcaggattggca

SEQ ID NO: 344626 - DNA, 60 bp, Artificial
  Synthetic oligonucleotide
cacgaatactgtgatgttcaagttagtgcgtgacagacgtccatttggcacgccacaaga

SEQ ID NO: 344627 - DNA, 55 bp, Artificial
  Synthetic oligonucleotide
cacgaatagtgtgatgttctggctagttagggataggagaccgtatgggacgcct

SEQ ID NO: 344628 - DNA, 60 bp, Artificial
  Synthetic oligonucleotide
cacgaatagtgttatgttctggttggtcagggatcgtagaccgtatggcactcccatgga

SEQ ID NO: 344629 - DNA, 60 bp, Artificial
  Synthetic oligonucleotide
cacgaatatgctggaggcgcgaccagcaaacggcaatcgagtgatcctggaccgggtaat

SEQ ID NO: 344630 - DNA, 55 bp, Artificial
  Synthetic oligonucleotide
cacgaatattacaagcttcaaggctacacacccaaccgagccggactcagcctag

SEQ ID NO: 344631 - DNA, 60 bp, Artificial
  Synthetic oligonucleotide
cacgaatctatccgatggacaaaagacgcacgcaacactcaagatcacgtgcgctccctg

SEQ ID NO: 344632 - DNA, 56 bp, Artificial
  Synthetic oligonucleotide
cacgaatgaaatttactcgcgtaatggtcaagaccctttttggtcaggctacaaga

SEQ ID NO: 344633 - DNA, 58 bp, Artificial
  Synthetic oligonucleotide
cacgaatgaagcttgcttaatgtaggcagcgcgttagcgctgctttcacgcgaacttt

SEQ ID NO: 344634 - DNA, 55 bp, Artificial
  Synthetic oligonucleotide
cacgaatggacacttgtttaggcgcaataatggaatcttgactgtgcgcacatgg

SEQ ID NO: 344635 - DNA, 54 bp, Artificial
  Synthetic oligonucleotide
cacgaatggggaaggctgttcaaaaaattttacggggagccgctgtggagagat

SEQ ID NO: 344636 - DNA, 55 bp, Artificial
  Synthetic oligonucleotide
cacgaatgggtttagttcacgcttgcgtaggggcaaatgcgcatgatgtgaatga

SEQ ID NO: 344637 - DNA, 55 bp, Artificial
  Synthetic oligonucleotide
cacgaatggtagaagcgatgcaaccaatactcctgctgatgcaaaacacccatca

SEQ ID NO: 344638 - DNA, 55 bp, Artificial
  Synthetic oligonucleotide
cacgaattttgtctatcaacagttcatgctaactgggttggcaatcctagaggac

SEQ ID NO: 344639 - DNA, 60 bp, Artificial
  Synthetic oligonucleotide
cacgacaaacatatggttgaaactgcgtgactcctacactcaagtgtgtgaccaccggct

SEQ ID NO: 344640 - DNA, 55 bp, Artificial
  Synthetic oligonucleotide
cacgacaacaatttccaaccatgccagttgattataaaaggtcaatccaacgcgg

SEQ ID NO: 344641 - DNA, 55 bp, Artificial
  Synthetic oligonucleotide
cacgacaacagttcccaacaatgcctattgattataagaggtcaatccagcgtgg

SEQ ID NO: 344642 - DNA, 56 bp, Artificial
  Synthetic oligonucleotide
cacgacaatctccgaccgctcaattcaaggaacgaagtggtacgaagacgaaatgg

SEQ ID NO: 344643 - DNA, 50 bp, Artificial
  Synthetic oligonucleotide
cacgacacgctctttcgacacacactgaagcggtaccggcccgtcaaggc

SEQ ID NO: 344644 - DNA, 55 bp, Artificial
  Synthetic oligonucleotide
cacgacagctacctataacgaaaatggaggttggacgcagaacgataatacttcg

SEQ ID NO: 344645 - DNA, 55 bp, Artificial
  Synthetic oligonucleotide
cacgacagttcttcgatgatctttcagattatttggctgacgaggttatagacgt

SEQ ID NO: 344646 - DNA, 60 bp, Artificial
  Synthetic oligonucleotide
cacgacatcagtcacgttggtaaggtgatgtgcatatctgacgtgactcgtggcaacggt

SEQ ID NO: 344647 - DNA, 55 bp, Artificial
  Synthetic oligonucleotide
cacgacatccgatcgtgtaccgccttgaatgacctgtatcgtgccttcgctcgac

SEQ ID NO: 344648 - DNA, 57 bp, Artificial
  Synthetic oligonucleotide
cacgacatgttacatgagacattgtaacacatcagtcatcaaggaatcatgtgataa

SEQ ID NO: 344649 - DNA, 55 bp, Artificial
  Synthetic oligonucleotide
cacgacattcgaatagcggttcttacgtccatatcgggagtttctgtcggagaga

SEQ ID NO: 344650 - DNA, 58 bp, Artificial
  Synthetic oligonucleotide
cacgacattgttctgtcggttgttggcaacagcgtgcctagtgcacagcgaggtggca

SEQ ID NO: 344651 - DNA, 58 bp, Artificial
  Synthetic oligonucleotide
cacgacatttctcacgttggtaaggtgatttgcatatctgacgtgacccgtggtaacg

SEQ ID NO: 344652 - DNA, 55 bp, Artificial
  Synthetic oligonucleotide
cacgaccaaaggttgtaatggccgttgcattgcgcagatcatacatacggaagtg

SEQ ID NO: 344653 - DNA, 57 bp, Artificial
  Synthetic oligonucleotide
cacgaccaatgctaatttaggcttcgccgagcctaggtctgtactgacggggtacgc

SEQ ID NO: 344654 - DNA, 50 bp, Artificial
  Synthetic oligonucleotide
cacgacccacgcaggtctcccaactgacacaaaccgtgcagtttgaaact

SEQ ID NO: 344655 - DNA, 53 bp, Artificial
  Synthetic oligonucleotide
cacgacccacttgcagttcgcgcctaacgcgattaggacagatggtaaggaga

SEQ ID NO: 344656 - DNA, 57 bp, Artificial
  Synthetic oligonucleotide
cacgacccagtagcaatacacgtcacgtcgcttatttgcatgtatgctagttggcat

SEQ ID NO: 344657 - DNA, 60 bp, Artificial
  Synthetic oligonucleotide
cacgacccataagaacatctacgtggttcctcgcgagtggcagacgcataatttcttgga

SEQ ID NO: 344658 - DNA, 55 bp, Artificial
  Synthetic oligonucleotide
cacgaccgtatcacagtcaccggagctaagctcttcttgcagacactcggcacag

SEQ ID NO: 344659 - DNA, 55 bp, Artificial
  Synthetic oligonucleotide
cacgacctcaattgcctgaacagtccagcctgctagagcagcagccacacgggtg

SEQ ID NO: 344660 - DNA, 55 bp, Artificial
  Synthetic oligonucleotide
cacgacgaacacgaatgcattctaggaaactacacttggcacattaacgaaccgc

SEQ ID NO: 344661 - DNA, 60 bp, Artificial
  Synthetic oligonucleotide
cacgacgagctagtaagcacacaactgactgccaagtacacctttgactttatgtggggc

SEQ ID NO: 344662 - DNA, 60 bp, Artificial
  Synthetic oligonucleotide
cacgacgattttattcacgtaatcaggtgttcaagcgttcaaccatctccagacgagatg

SEQ ID NO: 344663 - DNA, 56 bp, Artificial
  Synthetic oligonucleotide
cacgacgcccacaggcgcgcgttgctttccacgtaggccgggccgacctcgcagca

SEQ ID NO: 344664 - DNA, 59 bp, Artificial
  Synthetic oligonucleotide
cacgacgcctatttaacgcttgccaagggtgcgccaacaattgcgcaacgcgtaaagca

SEQ ID NO: 344665 - DNA, 50 bp, Artificial
  Synthetic oligonucleotide
cacgacgcgatgacgtatgcgcccatacgaccctctggttccggggcagc

SEQ ID NO: 344666 - DNA, 55 bp, Artificial
  Synthetic oligonucleotide
cacgacgctgactaacgcccctgcacgtagggcctttaatcttacctactctaac

SEQ ID NO: 344667 - DNA, 56 bp, Artificial
  Synthetic oligonucleotide
cacgacgtgtacaccgtggtcggtggaaacaccactactatggttcacgctaagcc

SEQ ID NO: 344668 - DNA, 60 bp, Artificial
  Synthetic oligonucleotide
cacgactacactcttcctccatctagtgggtttcccaacccacagacacatctcaggtga

SEQ ID NO: 344669 - DNA, 55 bp, Artificial
  Synthetic oligonucleotide
cacgactataggctgaattggcttttcctaactcaccactgtcaacagagaaacc

SEQ ID NO: 344670 - DNA, 58 bp, Artificial
  Synthetic oligonucleotide
cacgactatgatagacgttgagggttccactttgttgtctaataagcgttgtaatatg

SEQ ID NO: 344671 - DNA, 55 bp, Artificial
  Synthetic oligonucleotide
cacgactcaaggagcgctatgccaaccaagaaccttactgatgaagtgaatcgtg

SEQ ID NO: 344672 - DNA, 57 bp, Artificial
  Synthetic oligonucleotide
cacgactccagaggctacctcttcttgttggctttgcttagcttcgggcccacctta

SEQ ID NO: 344673 - DNA, 60 bp, Artificial
  Synthetic oligonucleotide
cacgactcccttcccacaagcgactgtcgtgcggattgtcttgcgtactaactgggctgc

SEQ ID NO: 344674 - DNA, 55 bp, Artificial
  Synthetic oligonucleotide
cacgactccggagcgggactaaccacctcatctgagacttccagaccggacccca

SEQ ID NO: 344675 - DNA, 59 bp, Artificial
  Synthetic oligonucleotide
cacgactgatttattagtgcatattgatgaccgaaattacggttatatcataacacctg

SEQ ID NO: 344676 - DNA, 58 bp, Artificial
  Synthetic oligonucleotide
cacgacttctaattatagtacagttaaggttaatgtactctgtgatttttacatcata

SEQ ID NO: 344677 - DNA, 54 bp, Artificial
  Synthetic oligonucleotide
cacgagaagagcttctatctttggacgactcccaagggatctgaaacgaccttc

SEQ ID NO: 344678 - DNA, 55 bp, Artificial
  Synthetic oligonucleotide
cacgagaagctttcgttaacgctccaacaactgagtggctacccattcccgaaga

SEQ ID NO: 344679 - DNA, 52 bp, Artificial
  Synthetic oligonucleotide
cacgagaagtatctcaaagttaaagactcgaagtggtattgtacaattgaca

SEQ ID NO: 344680 - DNA, 56 bp, Artificial
  Synthetic oligonucleotide
cacgagaatgaaatacaactttatttaatctcactaggtataccgaaaatagacgc

SEQ ID NO: 344681 - DNA, 55 bp, Artificial
  Synthetic oligonucleotide
cacgagaatgctttctatactatggactcggatccacgtgtttatcaccctacac

SEQ ID NO: 344682 - DNA, 60 bp, Artificial
  Synthetic oligonucleotide
cacgagacgtcgacgtattcataggcgcttgttcagaaccgatctatcgcatatataata

SEQ ID NO: 344683 - DNA, 54 bp, Artificial
  Synthetic oligonucleotide
cacgagactgttagagttcaaaaatggattaaatttaccgcctagatccccaat

SEQ ID NO: 344684 - DNA, 55 bp, Artificial
  Synthetic oligonucleotide
cacgagacttgtcaaagctcaaggagtgtatggacaaatatggtctcaacttacc

SEQ ID NO: 344685 - DNA, 60 bp, Artificial
  Synthetic oligonucleotide
cacgagagatactgcatcaagcgtcgttgcaactcttacgagtagtgttaagcgtgagtt

SEQ ID NO: 344686 - DNA, 54 bp, Artificial
  Synthetic oligonucleotide
cacgagatatgcacagaagtgtatcacaagagtatttctcggcgatgcactaag

SEQ ID NO: 344687 - DNA, 60 bp, Artificial
  Synthetic oligonucleotide
cacgagatgcgaactcagtggacgctccaaccaaaccagatgtatcgactaaccgcttct

SEQ ID NO: 344688 - DNA, 60 bp, Artificial
  Synthetic oligonucleotide
cacgagattccattatgaaagccatcaattacgtaggtacaagcgtactaataaacatga

SEQ ID NO: 344689 - DNA, 55 bp, Artificial
  Synthetic oligonucleotide
cacgagcaatgcagatactattccaacgtttaggagaccgcgttggttacccagc

SEQ ID NO: 344690 - DNA, 58 bp, Artificial
  Synthetic oligonucleotide
cacgagcacctcttatctcgcctacttccgaactcagtatgagggtattaccttctac

SEQ ID NO: 344691 - DNA, 60 bp, Artificial
  Synthetic oligonucleotide
cacgagcagataacgccatacgcaatcatgttgatagtgaagataggctgatgcaccaaa

SEQ ID NO: 344692 - DNA, 60 bp, Artificial
  Synthetic oligonucleotide
cacgagcagatctgttttatttaaccaatcggtgcaacatgggattggagcctagcattt

SEQ ID NO: 344693 - DNA, 60 bp, Artificial
  Synthetic oligonucleotide
cacgagcatacgccatggaccgggaggtggctgcatcgtgcggaggcgcggtgttcatag

SEQ ID NO: 344694 - DNA, 60 bp, Artificial
  Synthetic oligonucleotide
cacgagcgatctccaccttggacacgagaggatcgccgaacatcgcggttacccgagctc

SEQ ID NO: 344695 - DNA, 59 bp, Artificial
  Synthetic oligonucleotide
cacgagcgcgaaagactatacggctacgagtaataaggtagttgttgcagaagtcaaga

SEQ ID NO: 344696 - DNA, 57 bp, Artificial
  Synthetic oligonucleotide
cacgagcggagagctcttatggaggagctctccatcgatggcgaaagccctttctaa

SEQ ID NO: 344697 - DNA, 60 bp, Artificial
  Synthetic oligonucleotide
cacgagctagacttaagcgctccagcacgatacgatgcatacacgttagagcaaacccgt

SEQ ID NO: 344698 - DNA, 55 bp, Artificial
  Synthetic oligonucleotide
cacgagctcgaatcagtaccagtacttcgcagcggtgtgggcagaacccacacca

SEQ ID NO: 344699 - DNA, 53 bp, Artificial
  Synthetic oligonucleotide
cacgagctctgcgctaaacaggcttagcgcggaccgcgagcattgccggttcc

SEQ ID NO: 344700 - DNA, 60 bp, Artificial
  Synthetic oligonucleotide
cacgaggaaccggactcacacatcgcgttggcaagcgattttgtgtgaaatctgtttatg

SEQ ID NO: 344701 - DNA, 55 bp, Artificial
  Synthetic oligonucleotide
cacgaggactgaacccaataggtccaggtcgtacatcaagttacgacgactacgt

SEQ ID NO: 344702 - DNA, 55 bp, Artificial
  Synthetic oligonucleotide
cacgaggaggcaaccgctgtttgcacacctacgcagacggggagagtcacaagct

SEQ ID NO: 344703 - DNA, 58 bp, Artificial
  Synthetic oligonucleotide
cacgaggaggttctggaataggatgatcaattggtaaacctcgacgtactcgagctaa

SEQ ID NO: 344704 - DNA, 55 bp, Artificial
  Synthetic oligonucleotide
cacgaggattacggattcgcctctaacgtactcgacctatgggaggtttctagcc

SEQ ID NO: 344705 - DNA, 56 bp, Artificial
  Synthetic oligonucleotide
cacgaggatttacccgagtgttggtaatgttaggtatagtgatattaagtcaccga

SEQ ID NO: 344706 - DNA, 54 bp, Artificial
  Synthetic oligonucleotide
cacgaggccgacgggcagaaaaaaccgtacctgcttaaacagattccgagatta

SEQ ID NO: 344707 - DNA, 58 bp, Artificial
  Synthetic oligonucleotide
cacgaggctcaagttgttatggaccttcgataacaggctagaagcgtcggaaaatgga

SEQ ID NO: 344708 - DNA, 54 bp, Artificial
  Synthetic oligonucleotide
cacgaggctcctttcaccccaagacgggcccccgcgtcgatgctcagtaccccg

SEQ ID NO: 344709 - DNA, 60 bp, Artificial
  Synthetic oligonucleotide
cacgaggctctgacgagtgcaatcgccacaccaacgagactgtcacctacaaggtagctc

SEQ ID NO: 344710 - DNA, 56 bp, Artificial
  Synthetic oligonucleotide
cacgagggaccattatactctggtcccaagagtttgtaaactagcttacacgaaca

SEQ ID NO: 344711 - DNA, 60 bp, Artificial
  Synthetic oligonucleotide
cacgagggacccgctaagctacatgctgaaaggacctacaggccaaattctgacgctgcg

SEQ ID NO: 344712 - DNA, 60 bp, Artificial
  Synthetic oligonucleotide
cacgagggagaggggataccactatacgatgcaatcaaatgcatgaagacattcttcggt

SEQ ID NO: 344713 - DNA, 55 bp, Artificial
  Synthetic oligonucleotide
cacgaggggagtcagagtctgttaggcaacatggcatctctccttctgacgtggg

SEQ ID NO: 344714 - DNA, 60 bp, Artificial
  Synthetic oligonucleotide
cacgaggggtcaattatgtaatcatctggcgaggatggatctgttacacgcggcacaaga

SEQ ID NO: 344715 - DNA, 60 bp, Artificial
  Synthetic oligonucleotide
cacgaggtaactggttcggctgtacatggatgaatggcactgggttcaccaagacgtgtg

SEQ ID NO: 344716 - DNA, 55 bp, Artificial
  Synthetic oligonucleotide
cacgaggtaggcagacttcaaaggacaacaaggggatgaggatcagattcaagga

SEQ ID NO: 344717 - DNA, 59 bp, Artificial
  Synthetic oligonucleotide
cacgaggtgatggtaggccaaatcaatgatctaggggtttattcaaaaggctgtggcaa

SEQ ID NO: 344718 - DNA, 55 bp, Artificial
  Synthetic oligonucleotide
cacgaggtgcacaacgttcaagccatgttatctcttcctgcttacgttgcccagc

SEQ ID NO: 344719 - DNA, 57 bp, Artificial
  Synthetic oligonucleotide
cacgagtaatgctggggtttatcgaagagactaatggaggctacggaacggctcgtg

SEQ ID NO: 344720 - DNA, 57 bp, Artificial
  Synthetic oligonucleotide
cacgagtaccaaaacttggccactctaactacaccgccgttagcatgttcttgagcc

SEQ ID NO: 344721 - DNA, 56 bp, Artificial
  Synthetic oligonucleotide
cacgagtaccactgaaggacgaaacagcggactcaggtgatactttttacgggcta

SEQ ID NO: 344722 - DNA, 55 bp, Artificial
  Synthetic oligonucleotide
cacgagttactctctgaggaggagctgcgtcttcactacgacacggttcgcacac

SEQ ID NO: 344723 - DNA, 55 bp, Artificial
  Synthetic oligonucleotide
cacgagttattaacgaaatacgacgtgttagccacccaacttttcatggatctaa

SEQ ID NO: 344724 - DNA, 58 bp, Artificial
  Synthetic oligonucleotide
cacgagttttactcctggcggagggggttgatggatacatcaacacttgaagctagga

SEQ ID NO: 344725 - DNA, 56 bp, Artificial
  Synthetic oligonucleotide
cacgataacggctaatgtgaccgacgaatcatacttgtataacgcggatttgctga

SEQ ID NO: 344726 - DNA, 58 bp, Artificial
  Synthetic oligonucleotide
cacgataagtggggactctactggaaactggaatatcacagtttatcctagtcctata

SEQ ID NO: 344727 - DNA, 55 bp, Artificial
  Synthetic oligonucleotide
cacgatacactatgcagtctctgtgtctgtcctttctgtgagaaacaggctcttg

SEQ ID NO: 344728 - DNA, 56 bp, Artificial
  Synthetic oligonucleotide
cacgatacatgtctaagcactttgactttaataagatcccattagcgctccttaac

SEQ ID NO: 344729 - DNA, 55 bp, Artificial
  Synthetic oligonucleotide
cacgatacgccacaacaagcacgagctcttctagcgaaaccactacaacaagcgc

SEQ ID NO: 344730 - DNA, 60 bp, Artificial
  Synthetic oligonucleotide
cacgatagccatcattaatgctttaatcactgaggagtacgctaagagggatcactaccg

SEQ ID NO: 344731 - DNA, 55 bp, Artificial
  Synthetic oligonucleotide
cacgataggagggaaaggccatgaggtcccaagactgatcacaagcctcggatgg

SEQ ID NO: 344732 - DNA, 60 bp, Artificial
  Synthetic oligonucleotide
cacgatatatctcatactggaaaggtgatgtgtatctccgatgttactcgcggtaatggc

SEQ ID NO: 344733 - DNA, 51 bp, Artificial
  Synthetic oligonucleotide
cacgatatgtgacagatagaggaagagacaaggtaagagtactagaacgaa

SEQ ID NO: 344734 - DNA, 60 bp, Artificial
  Synthetic oligonucleotide
cacgatcactagattcagcagccgtttactacagaatctaaatatatcttaagttagaac

SEQ ID NO: 344735 - DNA, 60 bp, Artificial
  Synthetic oligonucleotide
cacgatcagcatttccttcttcgctcgaattgccatttttttcatcgactcttctggctg

SEQ ID NO: 344736 - DNA, 57 bp, Artificial
  Synthetic oligonucleotide
cacgatccacgcaggtttccgcaactgacaagaaccgtgcaacttgaagctccgcct

SEQ ID NO: 344737 - DNA, 57 bp, Artificial
  Synthetic oligonucleotide
cacgatcggtcaacagtccacaacattaaattgtatggattgccctttaagccccac

SEQ ID NO: 344738 - DNA, 60 bp, Artificial
  Synthetic oligonucleotide
cacgatcgtggtgcaatcgtatactatgatccgcttaaactgatctctaaactgggggct

SEQ ID NO: 344739 - DNA, 60 bp, Artificial
  Synthetic oligonucleotide
cacgatctttgtggaccttaaggtgatcaagtcactggtgaattgagcgaaggttgagga

SEQ ID NO: 344740 - DNA, 55 bp, Artificial
  Synthetic oligonucleotide
cacgatgaaagttgctcctataacatctgcccttattgtggtaacaggcttccag

SEQ ID NO: 344741 - DNA, 55 bp, Artificial
  Synthetic oligonucleotide
cacgatgaactacagatcgctgcacgtaacccggagatcgctgaagttgtccacg

SEQ ID NO: 344742 - DNA, 60 bp, Artificial
  Synthetic oligonucleotide
cacgatgaagcacgagagtatttccaaccgatgctgggccagtaccaaaagagcaaactc

SEQ ID NO: 344743 - DNA, 60 bp, Artificial
  Synthetic oligonucleotide
cacgatgacttatcgcacggaacagccagcaagatgttcgatgtccagctcggcgttggt

SEQ ID NO: 344744 - DNA, 60 bp, Artificial
  Synthetic oligonucleotide
cacgatgagattcattattggaataaaggtcagcttgagtcttttctgtcagtaacaaaa

SEQ ID NO: 344745 - DNA, 55 bp, Artificial
  Synthetic oligonucleotide
cacgatgagatttggaataacatgacttggatggagtgggaaagacaaattgaca

SEQ ID NO: 344746 - DNA, 55 bp, Artificial
  Synthetic oligonucleotide
cacgatgcatccggcaaaagggtgtactatctcacccgtgaccctaccacccccc

SEQ ID NO: 344747 - DNA, 60 bp, Artificial
  Synthetic oligonucleotide
cacgatgctaattagggatgagattgtcaagatgcttgaagtgccagtcaagcatgatga

SEQ ID NO: 344748 - DNA, 55 bp, Artificial
  Synthetic oligonucleotide
cacgatgctcaaggactcacgtaaatactccgataagtacggtgtcagtcagatt

SEQ ID NO: 344749 - DNA, 60 bp, Artificial
  Synthetic oligonucleotide
cacgatgctttcttcagctactaaccattgtataatcaatggtgttaccatgatcgcagg

SEQ ID NO: 344750 - DNA, 54 bp, Artificial
  Synthetic oligonucleotide
cacgattacccggtggggtcgcaattaccttgcgagcctgaaccggacgtggcc

SEQ ID NO: 344751 - DNA, 60 bp, Artificial
  Synthetic oligonucleotide
cacgattcgtttggaccaatcgcaagatgtgggacgcgtaatgatctagaactgtgaccc

SEQ ID NO: 344752 - DNA, 51 bp, Artificial
  Synthetic oligonucleotide
cacgatttaagcaggtttccacaactgataaaactcgtgcattttgaaacc

SEQ ID NO: 344753 - DNA, 57 bp, Artificial
  Synthetic oligonucleotide
cacgatttacttcgaaggactagacgatatgcgaggttaggtatgacgacagttaac

SEQ ID NO: 344754 - DNA, 57 bp, Artificial
  Synthetic oligonucleotide
cacgatttattccttacaagattgtagttccgtgttgcttttgtgattccaagcttc

SEQ ID NO: 344755 - DNA, 55 bp, Artificial
  Synthetic oligonucleotide
cacgatttgatgctatcgtttgatcctgaggtacgaaaacgagtcagggtcgtgc

SEQ ID NO: 344756 - DNA, 55 bp, Artificial
  Synthetic oligonucleotide
cacgatttgcaatcaaacccatggaagattaacccctttcttccacatcagtgag

SEQ ID NO: 344757 - DNA, 60 bp, Artificial
  Synthetic oligonucleotide
cacgattttcaagtaaatatcgcggagctgcgtgtactttagtctttcaactgccatgag

SEQ ID NO: 344758 - DNA, 58 bp, Artificial
  Synthetic oligonucleotide
cacgcaaacgcatccgcgtcaaggacaaccgcttcaaaagcgccctgtacctcgttga

SEQ ID NO: 344759 - DNA, 55 bp, Artificial
  Synthetic oligonucleotide
cacgcaaagtcggtatgtaaaccttcgtctcgtgatatcaactcattgctgaatg

SEQ ID NO: 344760 - DNA, 55 bp, Artificial
  Synthetic oligonucleotide
cacgcaacagttggacttacattacgtattgaatctgcagtttgtgagtcagtgc

SEQ ID NO: 344761 - DNA, 55 bp, Artificial
  Synthetic oligonucleotide
cacgcaagaacaactgctgaggactttgctgcgcatagctcaacaactcggtaag

SEQ ID NO: 344762 - DNA, 60 bp, Artificial
  Synthetic oligonucleotide
cacgcaagacgtccaaacattgatcacggagctgaatatctcgtaagataatgacatcgc

SEQ ID NO: 344763 - DNA, 58 bp, Artificial
  Synthetic oligonucleotide
cacgcaagattgggcgcaataccgttttggtgtgcccaattacaggtactgaatccca

SEQ ID NO: 344764 - DNA, 60 bp, Artificial
  Synthetic oligonucleotide
cacgcaagcttggtggtcatgggacacatatatgagctttgccacactcacagcactcgg

SEQ ID NO: 344765 - DNA, 55 bp, Artificial
  Synthetic oligonucleotide
cacgcaaggcctcttccctgattggcagtgttacacaccagggccaggggtcaga

SEQ ID NO: 344766 - DNA, 58 bp, Artificial
  Synthetic oligonucleotide
cacgcaagggaacgtgtctgttaagtacaagtacactcatccaggtgaacaaggtata

SEQ ID NO: 344767 - DNA, 55 bp, Artificial
  Synthetic oligonucleotide
cacgcaagtctgtcacgcgtactactaaaccatctttctcgagcctttcatcgcc

SEQ ID NO: 344768 - DNA, 55 bp, Artificial
  Synthetic oligonucleotide
cacgcaagtggcggtaggtgtggctgggcttcttagaggaaactacttggctctc

SEQ ID NO: 344769 - DNA, 59 bp, Artificial
  Synthetic oligonucleotide
cacgcaagttatgacaggctcgaccgcccacaaaattctaggtcaagctctagttaatg

SEQ ID NO: 344770 - DNA, 51 bp, Artificial
  Synthetic oligonucleotide
cacgcaataacgcacctgaccctattcataattgccaatggacgccaattg

SEQ ID NO: 344771 - DNA, 58 bp, Artificial
  Synthetic oligonucleotide
cacgcaatcagtagataaaaagctaaaatacgggcggatgactattagcaaccaccag

SEQ ID NO: 344772 - DNA, 58 bp, Artificial
  Synthetic oligonucleotide
cacgcaatccaacctatctgactactcgccaactagatggcgagccaaattataccca

SEQ ID NO: 344773 - DNA, 60 bp, Artificial
  Synthetic oligonucleotide
cacgcaatggccgaacaagattcaccaccagtgcgcacgctcattggctcgcacacgcac

SEQ ID NO: 344774 - DNA, 55 bp, Artificial
  Synthetic oligonucleotide
cacgcacaccgaaaacggccctttgatgtttgataaggtctattcacgataccaa

SEQ ID NO: 344775 - DNA, 55 bp, Artificial
  Synthetic oligonucleotide
cacgcacacgtggagacacatttgcttttacagatgggtcctcatcccttccaac

SEQ ID NO: 344776 - DNA, 55 bp, Artificial
  Synthetic oligonucleotide
cacgcacgacatgagggcctggatcgagattttacttagcgtcgtcaccatagcc

SEQ ID NO: 344777 - DNA, 56 bp, Artificial
  Synthetic oligonucleotide
cacgcacgcgtccggtgaaatacacgaaactttttgaggcacgctgtacaccaccg

SEQ ID NO: 344778 - DNA, 55 bp, Artificial
  Synthetic oligonucleotide
cacgcactcggggctgctcaggaggcgaagggacgtactctaaacgaggcgtaca

SEQ ID NO: 344779 - DNA, 59 bp, Artificial
  Synthetic oligonucleotide
cacgcacttggaacatgtttatggttgtatgaacacagtccttagggtctagaccttca

SEQ ID NO: 344780 - DNA, 55 bp, Artificial
  Synthetic oligonucleotide
cacgcacttggggtatatttagggtgttgtagatacctatcccttagggccacac

SEQ ID NO: 344781 - DNA, 60 bp, Artificial
  Synthetic oligonucleotide
cacgcagaactactctccgttgtccagccgatgtcacacattatctgaacaggagatatg

SEQ ID NO: 344782 - DNA, 55 bp, Artificial
  Synthetic oligonucleotide
cacgcagagaagatagtgggtaattataccggtcaacagtggaatgtgcagtcaa

SEQ ID NO: 344783 - DNA, 60 bp, Artificial
  Synthetic oligonucleotide
cacgcagatctaatttagctcgtgagtgggaaacttatcgtagcaattctgcgcgcgaaa

SEQ ID NO: 344784 - DNA, 50 bp, Artificial
  Synthetic oligonucleotide
cacgcagccaagtatggaaagcggatgggaccgaagaccagattttgtac

SEQ ID NO: 344785 - DNA, 60 bp, Artificial
  Synthetic oligonucleotide
cacgcagcgcatcattttgtgggtcaccatattcgtgggaacacgagctacagcatggga

SEQ ID NO: 344786 - DNA, 59 bp, Artificial
  Synthetic oligonucleotide
cacgcagcgcgtgtctagcctatatattaacgacttacccgctaagttgtgtgactact

SEQ ID NO: 344787 - DNA, 55 bp, Artificial
  Synthetic oligonucleotide
cacgcagctcaagggaggaaatggagcaacccactgggcccaatggacccaccac

SEQ ID NO: 344788 - DNA, 53 bp, Artificial
  Synthetic oligonucleotide
cacgcagcttcacgtgaggatcggacatcctctcggcacaggggtcattcatc

SEQ ID NO: 344789 - DNA, 59 bp, Artificial
  Synthetic oligonucleotide
cacgcaggttctctcttagtttttatggctcccgaatttgacacatcaaatcattcaac

SEQ ID NO: 344790 - DNA, 59 bp, Artificial
  Synthetic oligonucleotide
cacgcagtacttcgttagctgtacggtctaacatatctactaagccaagacccatacga

SEQ ID NO: 344791 - DNA, 54 bp, Artificial
  Synthetic oligonucleotide
cacgcagtaggaatgctcgtgtccgtgcttcattcgggtggtagagtcaccgct

SEQ ID NO: 344792 - DNA, 51 bp, Artificial
  Synthetic oligonucleotide
cacgcagtgcgtaaccgtggactcccctcgaagcctgtacctagcatcgga

SEQ ID NO: 344793 - DNA, 55 bp, Artificial
  Synthetic oligonucleotide
cacgcagttgcactgccagtttcccctgattacccacccctctaattacccaccc

SEQ ID NO: 344794 - DNA, 55 bp, Artificial
  Synthetic oligonucleotide
cacgcatacacaaacgagtagcgcggccgttagttcacaatgtctatcgctcgca

SEQ ID NO: 344795 - DNA, 52 bp, Artificial
  Synthetic oligonucleotide
cacgcatacgtgtgggttttcgactcgccaaacagaggaaattgcataaggg

SEQ ID NO: 344796 - DNA, 55 bp, Artificial
  Synthetic oligonucleotide
cacgcatagatgtggacagtgtgagcgattgctcccgtagtttatgaatgtctgt

SEQ ID NO: 344797 - DNA, 60 bp, Artificial
  Synthetic oligonucleotide
cacgcatatacctcacacctgcactcagaaatctcgagtccctgattctacaaagctgtg

SEQ ID NO: 344798 - DNA, 55 bp, Artificial
  Synthetic oligonucleotide
cacgcatcatcaagcgtgtgaacattcaagacttgtggtccaagccacaagtgga

SEQ ID NO: 344799 - DNA, 60 bp, Artificial
  Synthetic oligonucleotide
cacgcatcattactgtaaactttggggcttagatctaaatgaccgcataggtaattatga

SEQ ID NO: 344800 - DNA, 60 bp, Artificial
  Synthetic oligonucleotide
cacgcatcattgctgtacactttagggcttagatctagatgaccacataaatagttatgt

SEQ ID NO: 344801 - DNA, 60 bp, Artificial
  Synthetic oligonucleotide
cacgcatcctctctactctaagttgccgactctgttatcgcagccctgccgagtccacgt

SEQ ID NO: 344802 - DNA, 55 bp, Artificial
  Synthetic oligonucleotide
cacgcatcggcccaacaacgaacagggccacggaatgggttaacaggcccatgta

SEQ ID NO: 344803 - DNA, 60 bp, Artificial
  Synthetic oligonucleotide
cacgcatgtttgtcggccaataatattggcgccttgaatgctagatattgattgttgact

SEQ ID NO: 344804 - DNA, 55 bp, Artificial
  Synthetic oligonucleotide
cacgcattccatactgaagcttacgatcggagggcttttgctaagttgaaaccac

SEQ ID NO: 344805 - DNA, 55 bp, Artificial
  Synthetic oligonucleotide
cacgcattggcatgtacggctcccagccttctatggtgtagaagtccggctctgc

SEQ ID NO: 344806 - DNA, 55 bp, Artificial
  Synthetic oligonucleotide
cacgccaaaagattctttgccaactattttgagaagatcgatcatagcaagggtt

SEQ ID NO: 344807 - DNA, 55 bp, Artificial
  Synthetic oligonucleotide
cacgccaagcaaggagtgtatattggtcaagatcgtatgatgttcatctcgtcgg

SEQ ID NO: 344808 - DNA, 55 bp, Artificial
  Synthetic oligonucleotide
cacgccaagttgatacgcgttgtgtttaagttctgctacatgaacatggtcgcgc

SEQ ID NO: 344809 - DNA, 59 bp, Artificial
  Synthetic oligonucleotide
cacgccaagttgtcggacactaaggttgcagccagatgcccaacgatgggaccggccac

SEQ ID NO: 344810 - DNA, 60 bp, Artificial
  Synthetic oligonucleotide
cacgccaataacaggagaggcatctcttgctgaccatgttttagtgtttgaaggatccgg

SEQ ID NO: 344811 - DNA, 54 bp, Artificial
  Synthetic oligonucleotide
cacgccaccaaggtatgatgcttccgggcggtgttacaattgatgggcagcgct

SEQ ID NO: 344812 - DNA, 60 bp, Artificial
  Synthetic oligonucleotide
cacgccaccacctatttatcatgcatgctctgttactacctacttataaactgcgcagat

SEQ ID NO: 344813 - DNA, 60 bp, Artificial
  Synthetic oligonucleotide
cacgccactctcgcattgagttgcagtgagtaattcccctgtgcgcaaatccatgatttg

SEQ ID NO: 344814 - DNA, 55 bp, Artificial
  Synthetic oligonucleotide
cacgccactctgtagttgagttgcagtgatggattcccctgtgcgtgaatccgtc

SEQ ID NO: 344815 - DNA, 60 bp, Artificial
  Synthetic oligonucleotide
cacgccagaggccagctccagcaatcaagcttggtccagcggccctaagactctcaagac

SEQ ID NO: 344816 - DNA, 55 bp, Artificial
  Synthetic oligonucleotide
cacgccagcaccgttccctccccgaagacccagccgtttcttcgcttcagggtga

SEQ ID NO: 344817 - DNA, 60 bp, Artificial
  Synthetic oligonucleotide
cacgccagcgcagcacgttttgagattgcaaatcggtgtttcaaatcaaactttgctgcc

SEQ ID NO: 344818 - DNA, 55 bp, Artificial
  Synthetic oligonucleotide
cacgccagcttcactgttctaggccgtgggagtttcactggtcggtgtctacctc

SEQ ID NO: 344819 - DNA, 60 bp, Artificial
  Synthetic oligonucleotide
cacgccagcttgctggttcgggtgaacgcagaattaatggctatctggaacaacccatcc

SEQ ID NO: 344820 - DNA, 58 bp, Artificial
  Synthetic oligonucleotide
cacgccatcactcaaggtgtcccgacataccttttgccaggctcgggacaatttctaa

SEQ ID NO: 344821 - DNA, 56 bp, Artificial
  Synthetic oligonucleotide
cacgccattccctactaatgtggctgtcgaattatttgctaagcgcagtattcggc

SEQ ID NO: 344822 - DNA, 60 bp, Artificial
  Synthetic oligonucleotide
cacgccattctctgtttgagctgcagtgatgggttcccctgtgcgtgaatccatgcacgt

SEQ ID NO: 344823 - DNA, 58 bp, Artificial
  Synthetic oligonucleotide
cacgcccaagatatacttgaaaggacacacaacgggaagctctgcagtctaaatgggg

SEQ ID NO: 344824 - DNA, 60 bp, Artificial
  Synthetic oligonucleotide
cacgcccagaaatttatcacaagactctacagctggctatttgagaagtctggccgtgat

SEQ ID NO: 344825 - DNA, 60 bp, Artificial
  Synthetic oligonucleotide
cacgcccaggaacgcccctgggcggggagatgctatcaatttagggatataagcagagca

SEQ ID NO: 344826 - DNA, 56 bp, Artificial
  Synthetic oligonucleotide
cacgccccgtgcatatgataattgcatcgaagtgaggtttttgcacaacaagtgtg

SEQ ID NO: 344827 - DNA, 60 bp, Artificial
  Synthetic oligonucleotide
cacgcccctttgcacaggcatgttgcacaaaggttggcaaaggttagcatatctctgcag

SEQ ID NO: 344828 - DNA, 55 bp, Artificial
  Synthetic oligonucleotide
cacgcccgtcaccgttgttcccacttgttgggtgacatgtcggcttcaagtggtt

SEQ ID NO: 344829 - DNA, 57 bp, Artificial
  Synthetic oligonucleotide
cacgccctctcaaattgcctgatgggcccccttgctcccagcggtcaaaattcttac

SEQ ID NO: 344830 - DNA, 60 bp, Artificial
  Synthetic oligonucleotide
cacgccctctcagattacctgacgggcctccttgctctcagcggtcaaaattcttgctga

SEQ ID NO: 344831 - DNA, 53 bp, Artificial
  Synthetic oligonucleotide
cacgcccttggttatacaacgaacttcggtcggtttgtcgtcgctatggaccc

SEQ ID NO: 344832 - DNA, 54 bp, Artificial
  Synthetic oligonucleotide
cacgccgcagacccaaggcacctacacgaacgggcggtttgtgtccttcccaaa

SEQ ID NO: 344833 - DNA, 55 bp, Artificial
  Synthetic oligonucleotide
cacgccgcctttattagaccatccgatgcgccatttatctccgaagtgaagtgcg

SEQ ID NO: 344834 - DNA, 52 bp, Artificial
  Synthetic oligonucleotide
cacgccggctcgcccccgtcatagggcaacccccgagtaccggtggtctcgg

SEQ ID NO: 344835 - DNA, 56 bp, Artificial
  Synthetic oligonucleotide
cacgccggtttatgcgtcgacgtaagtagtggtatgtcttgaatctgatgacccgg

SEQ ID NO: 344836 - DNA, 55 bp, Artificial
  Synthetic oligonucleotide
cacgccgttatccgcccgatttgcaacacgtgtctcccattaacagactttatgc

SEQ ID NO: 344837 - DNA, 59 bp, Artificial
  Synthetic oligonucleotide
cacgcctaaagcgcaaatagatacgttaaagatgaatggcttaacagtcgtatccaaga

SEQ ID NO: 344838 - DNA, 57 bp, Artificial
  Synthetic oligonucleotide
cacgcctaactgatctaagtacatgttgactaaacgcctaaatctagctaaataatt

SEQ ID NO: 344839 - DNA, 56 bp, Artificial
  Synthetic oligonucleotide
cacgcctacagtaaatctagaaatgtgtggaaagcgtatggccttgctagaagttc

SEQ ID NO: 344840 - DNA, 54 bp, Artificial
  Synthetic oligonucleotide
cacgcctcggttgtttcccgaagtgaatttggataattacaatttgcctggacc

SEQ ID NO: 344841 - DNA, 54 bp, Artificial
  Synthetic oligonucleotide
cacgcctgacagcacttgaggagtatgtgaaagaccaaagcatcttagcttcct

SEQ ID NO: 344842 - DNA, 60 bp, Artificial
  Synthetic oligonucleotide
cacgcctgatagaggctagtagcttgaatgactctgtctacctcagaatgacctttgggc

SEQ ID NO: 344843 - DNA, 54 bp, Artificial
  Synthetic oligonucleotide
cacgcctgatgagtttgaagaagggattgacgcccggttagcaggaaggacaat

SEQ ID NO: 344844 - DNA, 55 bp, Artificial
  Synthetic oligonucleotide
cacgcctgggacttcggttctgctggaggctttctgagttcaattgggaaggcgg

SEQ ID NO: 344845 - DNA, 55 bp, Artificial
  Synthetic oligonucleotide
cacgcctgttggtagactggtcactgttaaccccttcgtgtcggtagcgacagcc

SEQ ID NO: 344846 - DNA, 55 bp, Artificial
  Synthetic oligonucleotide
cacgcctgttgtcgtcactatggcttcctcactcagagctgcgatctcaaagatc

SEQ ID NO: 344847 - DNA, 51 bp, Artificial
  Synthetic oligonucleotide
cacgcctgttttcccattgtacccttccttaaattcctccccatgtaacgt

SEQ ID NO: 344848 - DNA, 58 bp, Artificial
  Synthetic oligonucleotide
cacgccttacatgtggagttatcaaccccaaatgggactggcagcaggcgcctcccag

SEQ ID NO: 344849 - DNA, 55 bp, Artificial
  Synthetic oligonucleotide
cacgcgaaacccacgtttcgccagataatggcccattttagtgacgcagccgagg

SEQ ID NO: 344850 - DNA, 53 bp, Artificial
  Synthetic oligonucleotide
cacgcgactggtgtcaatgactggatgcccacagatcaaggttcgtggattac

SEQ ID NO: 344851 - DNA, 60 bp, Artificial
  Synthetic oligonucleotide
cacgcgagatagcagtgaaacagctcggggagtggccctcaatgatggatgtagcaacgg

SEQ ID NO: 344852 - DNA, 60 bp, Artificial
  Synthetic oligonucleotide
cacgcgatgatgaatgacgtatcaccagaggatctagaccgtgtgcgtactgagggaggt

SEQ ID NO: 344853 - DNA, 60 bp, Artificial
  Synthetic oligonucleotide
cacgcgcaatagggtataccacatccagtggtatgaagcacaagcaattcttgttccccg

SEQ ID NO: 344854 - DNA, 55 bp, Artificial
  Synthetic oligonucleotide
cacgcgcacaaggaatagacaccattgcgcggtgctgttgtaggactggagtcta

SEQ ID NO: 344855 - DNA, 59 bp, Artificial
  Synthetic oligonucleotide
cacgcgcattcttgctatcgtgcgtactccagaccttttatacggttatgacttaacat

SEQ ID NO: 344856 - DNA, 55 bp, Artificial
  Synthetic oligonucleotide
cacgcgcattgcaacgggctgtcattgacacaacgaagaccccgatggaaacacg

SEQ ID NO: 344857 - DNA, 59 bp, Artificial
  Synthetic oligonucleotide
cacgcgcggaaagcggataatgggcatccgatctccgggggaacgcgtgatgtcgcgag

SEQ ID NO: 344858 - DNA, 53 bp, Artificial
  Synthetic oligonucleotide
cacgcgcggtgctatagtattagatcctgtgaatggtgtatttagatacacat

SEQ ID NO: 344859 - DNA, 53 bp, Artificial
  Synthetic oligonucleotide
cacgcgcgtaacgtgacagggattaagggtaaactaactgattttgcaagttt

SEQ ID NO: 344860 - DNA, 59 bp, Artificial
  Synthetic oligonucleotide
cacgcgctacccttcaacctcacgtcctcctgttctctccgtgccattgggtgactctc

SEQ ID NO: 344861 - DNA, 60 bp, Artificial
  Synthetic oligonucleotide
cacgcgctcactagggataaccgcaaaagtggctcgtactatgaagacagtaaatgtgtc

SEQ ID NO: 344862 - DNA, 55 bp, Artificial
  Synthetic oligonucleotide
cacgcgcttagagcccgatataacaccaatcatgcagttgaaaatctcagcattc

SEQ ID NO: 344863 - DNA, 55 bp, Artificial
  Synthetic oligonucleotide
cacgcgcttcttttccttgggattgaccgtggccgacgtggcaagcctgtgtgag

SEQ ID NO: 344864 - DNA, 60 bp, Artificial
  Synthetic oligonucleotide
cacgcggaccggtgggaatggcttattgattacatggataggaagcatacgtgtcagctg

SEQ ID NO: 344865 - DNA, 55 bp, Artificial
  Synthetic oligonucleotide
cacgcggacgtctccgttgtccgtgtgccacggcagacacgcacctggcttttat

SEQ ID NO: 344866 - DNA, 59 bp, Artificial
  Synthetic oligonucleotide
cacgcggatcaccgatatgtcttgcaccttaagtcggtaccttaggacaggccagtaga

SEQ ID NO: 344867 - DNA, 59 bp, Artificial
  Synthetic oligonucleotide
cacgcggcgggaccgggtctcatcacacgcgattacagttcattcacagttacaccaaa

SEQ ID NO: 344868 - DNA, 53 bp, Artificial
  Synthetic oligonucleotide
cacgcggctcctttcaccctaagacaggtccccgcgttgacgcccagtacccc

SEQ ID NO: 344869 - DNA, 51 bp, Artificial
  Synthetic oligonucleotide
cacgcgggttgctaggtacaatagtcaccagccttaccggccgtgacaaga

SEQ ID NO: 344870 - DNA, 53 bp, Artificial
  Synthetic oligonucleotide
cacgcggtgattatcggacttctattgaatacagctacggaaatcgtgggtac

SEQ ID NO: 344871 - DNA, 59 bp, Artificial
  Synthetic oligonucleotide
cacgcgtattggggatttgacgtaggtactcgtcatcgctattacaagtcagaacctgc

SEQ ID NO: 344872 - DNA, 55 bp, Artificial
  Synthetic oligonucleotide
cacgcgtatttcgtttgagggatataatttgataattaacgtgtcaactcccaag

SEQ ID NO: 344873 - DNA, 57 bp, Artificial
  Synthetic oligonucleotide
cacgcgtgaacgctggtttagtgctaccgtgacgcgccgacaacccgtatcgacgcc

SEQ ID NO: 344874 - DNA, 57 bp, Artificial
  Synthetic oligonucleotide
cacgcgtgacgccggttctccggatgttgcgtaaggttgatcccacttttgtggaca

SEQ ID NO: 344875 - DNA, 55 bp, Artificial
  Synthetic oligonucleotide
cacgcgtgacgtcacagatcagtcatctcattggtcgttgtcacacaacgtgttc

SEQ ID NO: 344876 - DNA, 53 bp, Artificial
  Synthetic oligonucleotide
cacgcgtgcgtggtttacccttcaaaaggagcgactctcagggggtaggtagg

SEQ ID NO: 344877 - DNA, 56 bp, Artificial
  Synthetic oligonucleotide
cacgcgtggcccgttctggagcaactcaactttacggatcacatgagaccggaccc

SEQ ID NO: 344878 - DNA, 55 bp, Artificial
  Synthetic oligonucleotide
cacgcgttcgggagtataatgccaattaagcgattggctccagtttcctctaggg

SEQ ID NO: 344879 - DNA, 58 bp, Artificial
  Synthetic oligonucleotide
cacgcgttttcaataagttacagaattaactatgctttgagtaattctcaccatagcg

SEQ ID NO: 344880 - DNA, 55 bp, Artificial
  Synthetic oligonucleotide
cacgctagctacagtaacgccattttgcaaggcatggaaaagtaccagagctgag

SEQ ID NO: 344881 - DNA, 55 bp, Artificial
  Synthetic oligonucleotide
cacgctagcttggaatcagttagcaagaaggcaattcgtgcgttctcttgtgtag

SEQ ID NO: 344882 - DNA, 55 bp, Artificial
  Synthetic oligonucleotide
cacgctatcgctcccatgtcccaggtgtccatatctgtcccggtgtgtctagggc

SEQ ID NO: 344883 - DNA, 59 bp, Artificial
  Synthetic oligonucleotide
cacgctatgagaagtgataagcgtttcgtacattgctgttgtccgattttagacttccg

SEQ ID NO: 344884 - DNA, 55 bp, Artificial
  Synthetic oligonucleotide
cacgctcactggtgtatgccgctctgagctcaaagttggacgataaggtaggcac

SEQ ID NO: 344885 - DNA, 60 bp, Artificial
  Synthetic oligonucleotide
cacgctccaaaatggaaatgcatcgccaatccgtgcccgctcacgagtattccgacctac

SEQ ID NO: 344886 - DNA, 58 bp, Artificial
  Synthetic oligonucleotide
cacgctccatcgtttagtagtggcttacgattctatctcgaatgaaacgtattcccga

SEQ ID NO: 344887 - DNA, 55 bp, Artificial
  Synthetic oligonucleotide
cacgctccattttatgtctcactcggagcttatccatatcttcgccgattccccg

SEQ ID NO: 344888 - DNA, 60 bp, Artificial
  Synthetic oligonucleotide
cacgctccgatagagttgatctacgcatgtagatcagcaagggagttcgcaagattgcaa

SEQ ID NO: 344889 - DNA, 57 bp, Artificial
  Synthetic oligonucleotide
cacgctccgatagagttgatttacgcatgcagatcggcaagggaattcgcaaagttg

SEQ ID NO: 344890 - DNA, 53 bp, Artificial
  Synthetic oligonucleotide
cacgctgaaacctatcccaaaaagccgattcggaaaataatgccggtagaact

SEQ ID NO: 344891 - DNA, 58 bp, Artificial
  Synthetic oligonucleotide
cacgctgaactcgacattgagttcatttgttccctaggtggtactgtaactcttacgc

SEQ ID NO: 344892 - DNA, 53 bp, Artificial
  Synthetic oligonucleotide
cacgctgacgggaaccaccgcgtcgatttgctccaacactttacggacgttat

SEQ ID NO: 344893 - DNA, 55 bp, Artificial
  Synthetic oligonucleotide
cacgctgagtggtttgatgccggtggcttaggtccaagtacactacccactagtc

SEQ ID NO: 344894 - DNA, 55 bp, Artificial
  Synthetic oligonucleotide
cacgctgatgacacagcaagcgggaaacgttaagatcacagttgacggccagacg

SEQ ID NO: 344895 - DNA, 55 bp, Artificial
  Synthetic oligonucleotide
cacgctgcatcaacgagttgtattgcgaggagacagcagaagccatctgtgtgct

SEQ ID NO: 344896 - DNA, 60 bp, Artificial
  Synthetic oligonucleotide
cacgctgctttagatagattgatgcatgtcaaacagcgtaaatcacgttttgcagatttg

SEQ ID NO: 344897 - DNA, 55 bp, Artificial
  Synthetic oligonucleotide
cacgctgggagcgagcggcttttgaccgtgggtcacccactttatgatatatatg

SEQ ID NO: 344898 - DNA, 58 bp, Artificial
  Synthetic oligonucleotide
cacgctggtattatgacgtacaagattatcggcgtacctgggatgtgtccacccgaac

SEQ ID NO: 344899 - DNA, 55 bp, Artificial
  Synthetic oligonucleotide
cacgctgtgaaatacaagacgctgtgacaaatgtacgggtatctgattgtgtatc

SEQ ID NO: 344900 - DNA, 57 bp, Artificial
  Synthetic oligonucleotide
cacgctgtttatataatcttacctaccgcctgccaaaattatccaccgcttgccaaa

SEQ ID NO: 344901 - DNA, 59 bp, Artificial
  Synthetic oligonucleotide
cacgcttaacagtgtgccgtctccctacaggtgagacgaggtgcctttgaagtcctctc

SEQ ID NO: 344902 - DNA, 55 bp, Artificial
  Synthetic oligonucleotide
cacgcttagaatcgagaccacgctcttgtatgaagtaggacaatttgtatcaatt

SEQ ID NO: 344903 - DNA, 60 bp, Artificial
  Synthetic oligonucleotide
cacgcttcaagcacacgttgattcgctcatgcaatatgatcgaccaaagttgcaaccacc

SEQ ID NO: 344904 - DNA, 55 bp, Artificial
  Synthetic oligonucleotide
cacgcttcataaaactaaataaccagtggaagggtcgttgcttacactgctggac

SEQ ID NO: 344905 - DNA, 56 bp, Artificial
  Synthetic oligonucleotide
cacgcttcggcgtgtgcgttatcaggacacgtcccggcccggttggaattccatcg

SEQ ID NO: 344906 - DNA, 55 bp, Artificial
  Synthetic oligonucleotide
cacgcttgttacttgttaaggcatactcgaaagtcacagccagaattgcacccac

SEQ ID NO: 344907 - DNA, 58 bp, Artificial
  Synthetic oligonucleotide
cacgctttacgttgcgaccccgattatgttcctcacgaggtgattagaatcgtagagc

SEQ ID NO: 344908 - DNA, 56 bp, Artificial
  Synthetic oligonucleotide
cacgctttcaaagcggagttcttttcttggtccaagaattctttatagcttgcgtg

SEQ ID NO: 344909 - DNA, 58 bp, Artificial
  Synthetic oligonucleotide
cacgcttttgatgatttagaatcagtaatacgtaatttaatatccgattatgacaaat

SEQ ID NO: 344910 - DNA, 53 bp, Artificial
  Synthetic oligonucleotide
cacgcttttgttccgacacccaagacggggacggtttacgatttgcaagagtg

SEQ ID NO: 344911 - DNA, 59 bp, Artificial
  Synthetic oligonucleotide
cacggaaactgttgatacgctaatagaaaccaatgttcctgtgacacatgccaaagagt

SEQ ID NO: 344912 - DNA, 60 bp, Artificial
  Synthetic oligonucleotide
cacggaaaggcatacatcgaccgatgtgcgtcggaatatgcactcaatgcagggtgcgcg

SEQ ID NO: 344913 - DNA, 56 bp, Artificial
  Synthetic oligonucleotide
cacggaacaacgcgcgggtgtttatcaggtcgacattaactacgcatcggtgaaag

SEQ ID NO: 344914 - DNA, 55 bp, Artificial
  Synthetic oligonucleotide
cacggaaccagacgtgagcagtaacaggttttacacattagaatcagtacagtgg

SEQ ID NO: 344915 - DNA, 55 bp, Artificial
  Synthetic oligonucleotide
cacggaacctctctgtgatgtatcgggatttgccattgtttccaaggataatggg

SEQ ID NO: 344916 - DNA, 52 bp, Artificial
  Synthetic oligonucleotide
cacggaacctttggtcctgttcacttccgaaatcaagttaaaatacgccgcc

SEQ ID NO: 344917 - DNA, 55 bp, Artificial
  Synthetic oligonucleotide
cacggaagtgaggcggagacgttaagttatgcggatccgaagagacacgtcgtga

SEQ ID NO: 344918 - DNA, 57 bp, Artificial
  Synthetic oligonucleotide
cacggaataacggcaattgtctacatgtgggaagtgcaacctccctagccgataacc

SEQ ID NO: 344919 - DNA, 60 bp, Artificial
  Synthetic oligonucleotide
cacggaatactcaggtatctcgctactcgtcgaagaagcgttgactgaggccctcctgga

SEQ ID NO: 344920 - DNA, 55 bp, Artificial
  Synthetic oligonucleotide
cacggaatgcccgtatacggttctatacaagacgagatcttagctgcttacaatc

SEQ ID NO: 344921 - DNA, 58 bp, Artificial
  Synthetic oligonucleotide
cacggaattccactcagtgaaaccgtctgttggcgattcggctcaggggtctgtacac

SEQ ID NO: 344922 - DNA, 55 bp, Artificial
  Synthetic oligonucleotide
cacggacaaggaaagtaggcaagcagttgataattacttaagtagacttgcagct

SEQ ID NO: 344923 - DNA, 55 bp, Artificial
  Synthetic oligonucleotide
cacggacacattatacagtcaagccgctactcacacagccgtataacgcattatg

SEQ ID NO: 344924 - DNA, 58 bp, Artificial
  Synthetic oligonucleotide
cacggacacccctagagtgtacaacgatagagatcttctagactaggtacaagaggcc

SEQ ID NO: 344925 - DNA, 53 bp, Artificial
  Synthetic oligonucleotide
cacggaccacggttatgagtccaagaacctccgtatggagacggttcgtaacc

SEQ ID NO: 344926 - DNA, 55 bp, Artificial
  Synthetic oligonucleotide
cacggaccagcccatcccagacgccgatcacacctggtacacagatggaagcagc

SEQ ID NO: 344927 - DNA, 55 bp, Artificial
  Synthetic oligonucleotide
cacggacccacccccctcctatatcggttaggggcagtgcagaacgaggtcacac

SEQ ID NO: 344928 - DNA, 55 bp, Artificial
  Synthetic oligonucleotide
cacggacccgacgagctttacaattttgtgccgcaaatgggacgattgaaccagg

SEQ ID NO: 344929 - DNA, 60 bp, Artificial
  Synthetic oligonucleotide
cacggacctcaggacaataatcttgtggagctaccacctcttgagcaacttagcatcagg

SEQ ID NO: 344930 - DNA, 55 bp, Artificial
  Synthetic oligonucleotide
cacggacgtacagcaacgcctaacaacgagaattttcgacggtcgatcaatcctt

SEQ ID NO: 344931 - DNA, 60 bp, Artificial
  Synthetic oligonucleotide
cacggacgtatggagcgtatgctacagacgttcatgtcaggggacctcggtgcgttacac

SEQ ID NO: 344932 - DNA, 60 bp, Artificial
  Synthetic oligonucleotide
cacggagaccacaattatagctacggctgacgccaggggccttatccagtcatccagggc

SEQ ID NO: 344933 - DNA, 56 bp, Artificial
  Synthetic oligonucleotide
cacggagatttcctaataacgaatatgacaaaactccagttatatccagttccaaa

SEQ ID NO: 344934 - DNA, 60 bp, Artificial
  Synthetic oligonucleotide
cacggagctgatgtcaacgctacatgctcggaagggaacacgcctttacatgatgcggct

SEQ ID NO: 344935 - DNA, 52 bp, Artificial
  Synthetic oligonucleotide
cacggagctgggataaggacactttgcctccctcttcgtgcgaagtcctatc

SEQ ID NO: 344936 - DNA, 54 bp, Artificial
  Synthetic oligonucleotide
cacggagctgttgacccgcatgaagcgagcggacacatactgccccaggccttt

SEQ ID NO: 344937 - DNA, 59 bp, Artificial
  Synthetic oligonucleotide
cacggaggagaggatctggcggggatccgatcgcgagatctgaacgatggcgaagtcct

SEQ ID NO: 344938 - DNA, 60 bp, Artificial
  Synthetic oligonucleotide
cacggaggagaggcacgttcagtgactcgacgacacaggagcaataaacgtctctccttc

SEQ ID NO: 344939 - DNA, 60 bp, Artificial
  Synthetic oligonucleotide
cacggaggagattgaacttcgataccccgctcatgctgcctgcctctgcgggaggtgtcc

SEQ ID NO: 344940 - DNA, 57 bp, Artificial
  Synthetic oligonucleotide
cacggaggccccatgaatatggcaccgattataagtgcggacagttatgccctgccg

SEQ ID NO: 344941 - DNA, 55 bp, Artificial
  Synthetic oligonucleotide
cacggaggcgaagagtgtggtggcgatgatgagctcgcggatatatcgccaggcg

SEQ ID NO: 344942 - DNA, 60 bp, Artificial
  Synthetic oligonucleotide
cacggagtagaacagagaaatcacctccagaggaccccttcagcgaacagaagagcgcat

SEQ ID NO: 344943 - DNA, 60 bp, Artificial
  Synthetic oligonucleotide
cacggagtaggatctatcccgatgcacacagaccttgaattagatttttccctgacatct

SEQ ID NO: 344944 - DNA, 60 bp, Artificial
  Synthetic oligonucleotide
cacggagtcaaccgaatgactcaagttccacaaaggatagggcgagtatgggcatgctct

SEQ ID NO: 344945 - DNA, 55 bp, Artificial
  Synthetic oligonucleotide
cacggagtcgataccgacaagacggaacgaactaagcaagcattgagcaacttac

SEQ ID NO: 344946 - DNA, 60 bp, Artificial
  Synthetic oligonucleotide
cacggagtgaaaggctgggcctttgacaatggagatgacgtgtggatgggaagaacgatc

SEQ ID NO: 344947 - DNA, 55 bp, Artificial
  Synthetic oligonucleotide
cacggagtttatgtaagagtcaaaggaacaactgtgcgttgtgccgacgccgtag

SEQ ID NO: 344948 - DNA, 60 bp, Artificial
  Synthetic oligonucleotide
cacggatatgcacatacaaaatgatgccattgaacaaaacccagttgaaaattatgtgga

SEQ ID NO: 344949 - DNA, 58 bp, Artificial
  Synthetic oligonucleotide
cacggatcaagaatcaagtgccccactaccacaattatatactaggttgaggaaattc

SEQ ID NO: 344950 - DNA, 55 bp, Artificial
  Synthetic oligonucleotide
cacggatcacctgtgaactcctataccaatacgccttacactggtgcacttggct

SEQ ID NO: 344951 - DNA, 60 bp, Artificial
  Synthetic oligonucleotide
cacggatcctgttgcgtttatcggaacctgttgcctgaactcaatcacacagtggtctat

SEQ ID NO: 344952 - DNA, 55 bp, Artificial
  Synthetic oligonucleotide
cacggatgaatatgtaactcgcaccagcatttactatcacgccgccagctcccgc

SEQ ID NO: 344953 - DNA, 55 bp, Artificial
  Synthetic oligonucleotide
cacggatgactttgttaaacggacggacatctactatcacactagtactgaacga

SEQ ID NO: 344954 - DNA, 60 bp, Artificial
  Synthetic oligonucleotide
cacggatgaggcggctaggcagctaagcattagcatcgccaagatttctgaggcctcggg

SEQ ID NO: 344955 - DNA, 55 bp, Artificial
  Synthetic oligonucleotide
cacggatgatcactcgtcagctcccgcattcccagacttctcaccaactcctgag

SEQ ID NO: 344956 - DNA, 60 bp, Artificial
  Synthetic oligonucleotide
cacggatgccctcatgacggggtttaccggcgactttgactcagtgatagactgcaacac

SEQ ID NO: 344957 - DNA, 53 bp, Artificial
  Synthetic oligonucleotide
cacggatgctatgaccaggtactcagctccccctggagacgtcccgcagccca

SEQ ID NO: 344958 - DNA, 55 bp, Artificial
  Synthetic oligonucleotide
cacggatgggagcagtttcctgcaaaaagggcagcgtaaggccggagcagcggta

SEQ ID NO: 344959 - DNA, 55 bp, Artificial
  Synthetic oligonucleotide
cacggatgttcttaaagttaagatggaagctgacgctttacctgccttagctcaa

SEQ ID NO: 344960 - DNA, 55 bp, Artificial
  Synthetic oligonucleotide
cacggattaggtccgaagtctgatggagagctttacattgtcaacagcgagtgtg

SEQ ID NO: 344961 - DNA, 55 bp, Artificial
  Synthetic oligonucleotide
cacggattcacatgccctcgctgcacctcagacgaattcacctactctccttccg

SEQ ID NO: 344962 - DNA, 55 bp, Artificial
  Synthetic oligonucleotide
cacggcaaacagtttacctgctcacaccttgttgttaatggacacctcgccgaac

SEQ ID NO: 344963 - DNA, 58 bp, Artificial
  Synthetic oligonucleotide
cacggcaacagggcctatctcatatagggcttcagacagttcctgcactacaaatatc

SEQ ID NO: 344964 - DNA, 55 bp, Artificial
  Synthetic oligonucleotide
cacggcaactgtacaggggccgagcttggacttcgccctatctctacttaggagg

SEQ ID NO: 344965 - DNA, 59 bp, Artificial
  Synthetic oligonucleotide
cacggcaagaacactacgggggaacaggtttggcagacccatcacagctgtggtcatag

SEQ ID NO: 344966 - DNA, 60 bp, Artificial
  Synthetic oligonucleotide
cacggcaatgacgatgtgacctgtgcatccgctttgcctataaataagttttagtttgta

SEQ ID NO: 344967 - DNA, 58 bp, Artificial
  Synthetic oligonucleotide
cacggcacatcaacacagtataataatttaggttcaacagttaataatggtgtttcgc

SEQ ID NO: 344968 - DNA, 55 bp, Artificial
  Synthetic oligonucleotide
cacggcagaggaacgcacctacggggttaggtgtgcgcaaccgttgggaacatcg

SEQ ID NO: 344969 - DNA, 60 bp, Artificial
  Synthetic oligonucleotide
cacggcagaggtttatgcatttcagtataagagtttatatatagtgtggcgaggacagtt

SEQ ID NO: 344970 - DNA, 55 bp, Artificial
  Synthetic oligonucleotide
cacggcagcagccctgctattctgtcactatgcttacatggttccaggctggcag

SEQ ID NO: 344971 - DNA, 54 bp, Artificial
  Synthetic oligonucleotide
cacggccagtgttctcctatggtatgcacaaatacagccacactggatagcagc

SEQ ID NO: 344972 - DNA, 55 bp, Artificial
  Synthetic oligonucleotide
cacggccctgaactgtaatgcaagcctcgacaccggctggttagcggggctcttc

SEQ ID NO: 344973 - DNA, 55 bp, Artificial
  Synthetic oligonucleotide
cacggccgggttcgtgtacattaatattttggcgttagaatcgtgtcatttgaag

SEQ ID NO: 344974 - DNA, 51 bp, Artificial
  Synthetic oligonucleotide
cacggccgtcactagactacaacaggctcgtgctaggtattacatcagctg

SEQ ID NO: 344975 - DNA, 52 bp, Artificial
  Synthetic oligonucleotide
cacggcctaaggtgaacgggcaaggaggtagaatggagttttcttggaccct

SEQ ID NO: 344976 - DNA, 60 bp, Artificial
  Synthetic oligonucleotide
cacggcctactcccaacagacgcggggcctacttggctgcatcatcactagcctcacagg

SEQ ID NO: 344977 - DNA, 55 bp, Artificial
  Synthetic oligonucleotide
cacggcctatccgtttgcagtttctggcggaaaagtcgtgattactaaagcgatg

SEQ ID NO: 344978 - DNA, 55 bp, Artificial
  Synthetic oligonucleotide
cacggcctcagtcctgtcgagttaattaatcaaggttgctgtgaccccgtgagac

SEQ ID NO: 344979 - DNA, 57 bp, Artificial
  Synthetic oligonucleotide
cacggcctcccctcggggtggaagtggaccgctctgctaggggctctcatcaatgtg

SEQ ID NO: 344980 - DNA, 55 bp, Artificial
  Synthetic oligonucleotide
cacggccttagtcgattcgatgcaacctggcgagccgcccgaaacagacgtcgaa

SEQ ID NO: 344981 - DNA, 55 bp, Artificial
  Synthetic oligonucleotide
cacggcgacttgtcagacctttcttggtcgaacggttcgcacgatacgaaaccca

SEQ ID NO: 344982 - DNA, 55 bp, Artificial
  Synthetic oligonucleotide
cacggcgcctctgaaacccagctgtacggcgcacattataacgttggaccagtct

SEQ ID NO: 344983 - DNA, 55 bp, Artificial
  Synthetic oligonucleotide
cacggcgcctggccactatcctgtcctaattggcaaaggaaggccaaactgtctg

SEQ ID NO: 344984 - DNA, 57 bp, Artificial
  Synthetic oligonucleotide
cacggcgctgccctagctggctattcccaaggcgcggtagtggtttccgaactgtgg

SEQ ID NO: 344985 - DNA, 55 bp, Artificial
  Synthetic oligonucleotide
cacggcggcgttggcagtagctcagttgctccggatcccacaagccatcttggac

SEQ ID NO: 344986 - DNA, 60 bp, Artificial
  Synthetic oligonucleotide
cacggcgtgattagagctctagattatcgtccttcgaggaatgatgggatagtaatacca

SEQ ID NO: 344987 - DNA, 60 bp, Artificial
  Synthetic oligonucleotide
cacggcgtgggtagggcggacgccattatatgattatgatgatttctcattgtcgcgtgc

SEQ ID NO: 344988 - DNA, 51 bp, Artificial
  Synthetic oligonucleotide
cacggctaaatgagttagctcgtttctatcagttagacccatcgactatcc

SEQ ID NO: 344989 - DNA, 55 bp, Artificial
  Synthetic oligonucleotide
cacggctaaattcatggggatgtgcgtggaaacaagtatgtcacaccacagtgcc

SEQ ID NO: 344990 - DNA, 60 bp, Artificial
  Synthetic oligonucleotide
cacggctacgacgtgttatatgagagggttgtctgaacacattcgaattcagactagttc

SEQ ID NO: 344991 - DNA, 55 bp, Artificial
  Synthetic oligonucleotide
cacggctcaagtgggccccgtagattacactaaatcttcaatcaccaacccatgg

SEQ ID NO: 344992 - DNA, 55 bp, Artificial
  Synthetic oligonucleotide
cacggctccaaacagaacaggtcgtgtggctccagtcaggcgagaacgctgcgac

SEQ ID NO: 344993 - DNA, 60 bp, Artificial
  Synthetic oligonucleotide
cacggctccctctcagagagactgtttcatggaagatgagagactcgaaactgacacact

SEQ ID NO: 344994 - DNA, 58 bp, Artificial
  Synthetic oligonucleotide
cacggctcgtagtgttttacaaacatcgcgagctggggtcacaggctatccgggagtc

SEQ ID NO: 344995 - DNA, 55 bp, Artificial
  Synthetic oligonucleotide
cacggctctttgcgacttttcgcatctttctcgggtgactcgagcacggttttcg

SEQ ID NO: 344996 - DNA, 60 bp, Artificial
  Synthetic oligonucleotide
cacggctgatgctaggggccttatccaatcctcccgtgcacatgccatcgttgcacttac

SEQ ID NO: 344997 - DNA, 59 bp, Artificial
  Synthetic oligonucleotide
cacggctgatggagaggtgtatatcaggaggggccaaagaggtagcgggcaacccgaca

SEQ ID NO: 344998 - DNA, 60 bp, Artificial
  Synthetic oligonucleotide
cacggctgctgcgaggggcggtaacacagtcgtctgcgccactcagggtcctgatggtga

SEQ ID NO: 344999 - DNA, 58 bp, Artificial
  Synthetic oligonucleotide
cacggctggatacaagatctgtaactaccacttggctactcaagaggaccttcagaat

SEQ ID NO: 345000 - DNA, 52 bp, Artificial
  Synthetic oligonucleotide
cacggcttctgacgttaacgctcgtatgcatcatcttatgggtgtgacgcag

SEQ ID NO: 345001 - DNA, 60 bp, Artificial
  Synthetic oligonucleotide
cacggctttgttgaagatcctaccagactcgacagctctgataatgagttgttggtttct

SEQ ID NO: 345002 - DNA, 60 bp, Artificial
  Synthetic oligonucleotide
cacgggaccaggacaagtgctctatgcaacaggggcagtagtaggagatataagacaagc

SEQ ID NO: 345003 - DNA, 55 bp, Artificial
  Synthetic oligonucleotide
cacgggacctttggccctgtacacttcagaaatcaagtcaagataagacgaaggg

SEQ ID NO: 345004 - DNA, 53 bp, Artificial
  Synthetic oligonucleotide
cacgggactattattggaacgtgatggaggaaaggtaaataataaaaccgaga

SEQ ID NO: 345005 - DNA, 55 bp, Artificial
  Synthetic oligonucleotide
cacgggagcgaagctgaaacggttatgatggcagatccacgaagacatactgtat

SEQ ID NO: 345006 - DNA, 54 bp, Artificial
  Synthetic oligonucleotide
cacgggagtcgagaaacccaaatttcttccggatctgtatgactacaaggaaaa

SEQ ID NO: 345007 - DNA, 59 bp, Artificial
  Synthetic oligonucleotide
cacgggcaacctaacatgggtacccaatggagcacccgaggcagcactgaacaacacga

SEQ ID NO: 345008 - DNA, 58 bp, Artificial
  Synthetic oligonucleotide
cacgggcaagacactaaatgcagaccccccgctctcgccgacaagcaacaactactcg

SEQ ID NO: 345009 - DNA, 55 bp, Artificial
  Synthetic oligonucleotide
cacgggcaagagccttcaatcgacacggcttcctacgaaccatgacgtgctgctc

SEQ ID NO: 345010 - DNA, 58 bp, Artificial
  Synthetic oligonucleotide
cacgggccggtggatgcatccagtgccagagggaattacctactcagtcggttacaac

SEQ ID NO: 345011 - DNA, 59 bp, Artificial
  Synthetic oligonucleotide
cacgggcgaccgtgtcctagcctgcgtggcggccaacccagcatatgctgggacgccct

SEQ ID NO: 345012 - DNA, 57 bp, Artificial
  Synthetic oligonucleotide
cacgggcgtataccctttcatgtggggtggagcctactgcttctgcgactccgagaa

SEQ ID NO: 345013 - DNA, 56 bp, Artificial
  Synthetic oligonucleotide
cacgggctacgacgcgagcctaagcccagtttggtttgcgtgtctaagccgtgtgt

SEQ ID NO: 345014 - DNA, 60 bp, Artificial
  Synthetic oligonucleotide
cacggggaagaaggacgacgacagcaaggatagtgctacggatagcggcaattgcgatgc

SEQ ID NO: 345015 - DNA, 58 bp, Artificial
  Synthetic oligonucleotide
cacggggaggagctgcctccccgtggaatgtagccagacatgacctcagttagggaag

SEQ ID NO: 345016 - DNA, 56 bp, Artificial
  Synthetic oligonucleotide
cacggggcaagcgtgagggccttacaagcgacaaaactaacatggggaagcgtgaa

SEQ ID NO: 345017 - DNA, 55 bp, Artificial
  Synthetic oligonucleotide
cacggggcccgttgttaaaggtcccgtcagacaccgtggcaggcacacactagct

SEQ ID NO: 345018 - DNA, 55 bp, Artificial
  Synthetic oligonucleotide
cacggggccggaacaaggaccattgcgtcatctaagggtcctgttatccagatgt

SEQ ID NO: 345019 - DNA, 56 bp, Artificial
  Synthetic oligonucleotide
cacggggccggcagtaaaaccatctgcggtccgaaaggacctgtgaaccagatgta

SEQ ID NO: 345020 - DNA, 53 bp, Artificial
  Synthetic oligonucleotide
cacggggccggcgattcagagggggaaacagcgctggacttggaagaagggca

SEQ ID NO: 345021 - DNA, 54 bp, Artificial
  Synthetic oligonucleotide
cacggggcgatctaagctttgggttcaattcccttacgcagtgacccctaggtg

SEQ ID NO: 345022 - DNA, 50 bp, Artificial
  Synthetic oligonucleotide
cacgggggcgtaaaaaaactaaacagcctcgaagggtgaaactcgaccac

SEQ ID NO: 345023 - DNA, 52 bp, Artificial
  Synthetic oligonucleotide
cacggggtaatgggattacccaccgtgtaggtaagcggttctgtgttaagtc

SEQ ID NO: 345024 - DNA, 56 bp, Artificial
  Synthetic oligonucleotide
cacggggtcatgcactagccccatgggaaatcaggggtatggtgttaagggatttg

SEQ ID NO: 345025 - DNA, 57 bp, Artificial
  Synthetic oligonucleotide
cacgggtaatgcaactggtttcctccctacgtctggcatgtatgttgtcccttctaa

SEQ ID NO: 345026 - DNA, 55 bp, Artificial
  Synthetic oligonucleotide
cacgggtagaacggtcagaggagccacccttcaatcgaaaattaggcttcacagc

SEQ ID NO: 345027 - DNA, 57 bp, Artificial
  Synthetic oligonucleotide
cacgggtatcgttactcaaaaggagaatctgctttaatgttccgacataacagaaga

SEQ ID NO: 345028 - DNA, 55 bp, Artificial
  Synthetic oligonucleotide
cacgggtatgggccctaaatttgataaggccgctgcttgggttaacaggcccatg

SEQ ID NO: 345029 - DNA, 57 bp, Artificial
  Synthetic oligonucleotide
cacgggtattcacggattctatttggtacaaggatgatttcacacggccacctggtg

SEQ ID NO: 345030 - DNA, 50 bp, Artificial
  Synthetic oligonucleotide
cacgggtccgatatatcaaagggtcgcaatcccaaagcagaggaggtaga

SEQ ID NO: 345031 - DNA, 53 bp, Artificial
  Synthetic oligonucleotide
cacgggtccgcgaaagcggtggctccaccgaaaggtgggcgggcttcggccca

SEQ ID NO: 345032 - DNA, 55 bp, Artificial
  Synthetic oligonucleotide
cacgggtcgtgtgaacggcactccattgactatgaacctccttgtaagaggaggc

SEQ ID NO: 345033 - DNA, 54 bp, Artificial
  Synthetic oligonucleotide
cacgggtgaggtaattggctttaggagatgtaataggtgatactgcggatgcac

SEQ ID NO: 345034 - DNA, 55 bp, Artificial
  Synthetic oligonucleotide
cacgggttgtcattgtccaggggaatgtggaaggaactgcagaggcaatctgtgc

SEQ ID NO: 345035 - DNA, 55 bp, Artificial
  Synthetic oligonucleotide
cacgggtttcgttatatgctatctggtaaaatatctgcaacttttgtcgctggag

SEQ ID NO: 345036 - DNA, 51 bp, Artificial
  Synthetic oligonucleotide
cacggtaaatcagtaatttttaattaccgaggtgaatgggtaaaaaaatga

SEQ ID NO: 345037 - DNA, 55 bp, Artificial
  Synthetic oligonucleotide
cacggtaaccttcactttcaatggggcattcatagctcctgacagggcaagtttc

SEQ ID NO: 345038 - DNA, 51 bp, Artificial
  Synthetic oligonucleotide
cacggtaacgtgctgttagtcgtagtagtggtatcagtagcaaagatgtag

SEQ ID NO: 345039 - DNA, 54 bp, Artificial
  Synthetic oligonucleotide
cacggtaaggtatatcgacggagtgcttggccgtcgacaatttcagtttccctt

SEQ ID NO: 345040 - DNA, 56 bp, Artificial
  Synthetic oligonucleotide
cacggtacaaaacagaataggtcacttttccccatgtgtaattcgcagaattagaa

SEQ ID NO: 345041 - DNA, 59 bp, Artificial
  Synthetic oligonucleotide
cacggtagaacaggtgggagagcatatagcctctgcgtggggagaattccagattcccg

SEQ ID NO: 345042 - DNA, 60 bp, Artificial
  Synthetic oligonucleotide
cacggtatagattggccagagcgttgtgggctgtaagactgtggttactgcgtcacgcta

SEQ ID NO: 345043 - DNA, 55 bp, Artificial
  Synthetic oligonucleotide
cacggtatccctggtggtataggatacccgcacacagcgaatctgagcggcgcgg

SEQ ID NO: 345044 - DNA, 52 bp, Artificial
  Synthetic oligonucleotide
cacggtatttcaaagtttcggtcaacggaactaagatctatgaaggcagcga

SEQ ID NO: 345045 - DNA, 55 bp, Artificial
  Synthetic oligonucleotide
cacggtcagcacttatcttaagaggatcagttgcacacaaatcctgcctgcctgc

SEQ ID NO: 345046 - DNA, 56 bp, Artificial
  Synthetic oligonucleotide
cacggtcatgttctggttagttagggataggcgtcctgtcactacgccctatgggt

SEQ ID NO: 345047 - DNA, 55 bp, Artificial
  Synthetic oligonucleotide
cacggtcatgttttggttagttcgtgatcgtcgaccttttggaacgcctatggac

SEQ ID NO: 345048 - DNA, 54 bp, Artificial
  Synthetic oligonucleotide
cacggtccacaggtgttggtcctaccggtgtaataaggacccggcgctaggcac

SEQ ID NO: 345049 - DNA, 55 bp, Artificial
  Synthetic oligonucleotide
cacggtcctattttgtatgttgagacatggccgcgaatgtgcactggtgttgagt

SEQ ID NO: 345050 - DNA, 58 bp, Artificial
  Synthetic oligonucleotide
cacggtcctggggaacctatgtgcttgtggtgtcacttttttcgccgtacatgatcca

SEQ ID NO: 345051 - DNA, 53 bp, Artificial
  Synthetic oligonucleotide
cacggtctgaaattaaacaaacgaacgatcgcatttccttagaagtgacacaa

SEQ ID NO: 345052 - DNA, 60 bp, Artificial
  Synthetic oligonucleotide
cacggtctgctctcatcctgaggggatcagtggctcacaaatcttgcctgcctgcttgtg

SEQ ID NO: 345053 - DNA, 60 bp, Artificial
  Synthetic oligonucleotide
cacggtgaatacagcggataaatgcattataacgtacgccgatgactcttgtgcggggta

SEQ ID NO: 345054 - DNA, 55 bp, Artificial
  Synthetic oligonucleotide
cacggtgcacacatctggaaaacagggatttcgtcactggcactcagggaaccac

SEQ ID NO: 345055 - DNA, 55 bp, Artificial
  Synthetic oligonucleotide
cacggtgggacacgtctgcataaaggtcccaaaactagtggacagcctaactttc

SEQ ID NO: 345056 - DNA, 51 bp, Artificial
  Synthetic oligonucleotide
cacggtggtgctgtcacagagaagaaacgtgtgcacacagacgtggcattc

SEQ ID NO: 345057 - DNA, 55 bp, Artificial
  Synthetic oligonucleotide
cacggtgtaaatccaatgcctggtccgcttacacgtgcgattgctcgcgccgctt

SEQ ID NO: 345058 - DNA, 55 bp, Artificial
  Synthetic oligonucleotide
cacggtgtactagacatgggtctagtcgaaacaggagttaatgcagtaagagact

SEQ ID NO: 345059 - DNA, 57 bp, Artificial
  Synthetic oligonucleotide
cacggtgtatgttctggcatcttctgaagtctcctagatggtaatagcccacaagat

SEQ ID NO: 345060 - DNA, 55 bp, Artificial
  Synthetic oligonucleotide
cacggtgtcatcggaatcataacagctggtggggagggtttagtcgcattctctg

SEQ ID NO: 345061 - DNA, 58 bp, Artificial
  Synthetic oligonucleotide
cacggtgttgactgacttcaagacctggctcaagtccaaactcgtgccgcagttaccg

SEQ ID NO: 345062 - DNA, 55 bp, Artificial
  Synthetic oligonucleotide
cacggttacaggcttcggtatagcaattatttcgcaaaacacaaatgcgagtgct

SEQ ID NO: 345063 - DNA, 60 bp, Artificial
  Synthetic oligonucleotide
cacggttactagctcagttgaactggttgaaaataagcacactggatctttctgctcaat

SEQ ID NO: 345064 - DNA, 60 bp, Artificial
  Synthetic oligonucleotide
cacggttacttctgttatgacagcctcttggtgctgggcgatccattacaatgtgagtac

SEQ ID NO: 345065 - DNA, 57 bp, Artificial
  Synthetic oligonucleotide
cacggttagagtcgaatggtgtagtggtacctgaatacacccttacacagacagaat

SEQ ID NO: 345066 - DNA, 57 bp, Artificial
  Synthetic oligonucleotide
cacggttatgagtttacgattgactccagtacgaagatacaaagtgttggtgggcgc

SEQ ID NO: 345067 - DNA, 54 bp, Artificial
  Synthetic oligonucleotide
cacggttcacaggctcacctgtctaccagttgttccccacgaaccctgccccgg

SEQ ID NO: 345068 - DNA, 59 bp, Artificial
  Synthetic oligonucleotide
cacggttctaaaattggtcagacgtgctgttgtcgagaatattaacctcaccacatcaa

SEQ ID NO: 345069 - DNA, 58 bp, Artificial
  Synthetic oligonucleotide
cacggttgcaggtatctagaccgggacagctccctggtatccgcctccgcagtggtag

SEQ ID NO: 345070 - DNA, 57 bp, Artificial
  Synthetic oligonucleotide
cacggttgggggcttgaaaggaatatccaccgaatgtttcgcagtggatatcttcag

SEQ ID NO: 345071 - DNA, 57 bp, Artificial
  Synthetic oligonucleotide
cacggtttccgagctttacccacacaattcgcttcttgcacgacttgttcactcaac

SEQ ID NO: 345072 - DNA, 58 bp, Artificial
  Synthetic oligonucleotide
cacggtttgaggctggaatccgtcgcatcattggtgggggtgagatgcggagctggta

SEQ ID NO: 345073 - DNA, 54 bp, Artificial
  Synthetic oligonucleotide
cacgtaaactttattgagagtgtgtggttacattttgttaaggtgagagcccgg

SEQ ID NO: 345074 - DNA, 60 bp, Artificial
  Synthetic oligonucleotide
cacgtaaatcgtttgagtgctggccttgtctatgcgtatgcagcgacgaggtgtacagca

SEQ ID NO: 345075 - DNA, 58 bp, Artificial
  Synthetic oligonucleotide
cacgtaacatgcggggacatcggaacacactacgcaatatgggtggaatacatggggg

SEQ ID NO: 345076 - DNA, 55 bp, Artificial
  Synthetic oligonucleotide
cacgtaacgatctcgaactatgtccccttaatcgtgaaccatcgacaagacgcct

SEQ ID NO: 345077 - DNA, 60 bp, Artificial
  Synthetic oligonucleotide
cacgtaagaccaagctcactacatacaagtgagttcgtcgcaacgtgaatctgttcgtcc

SEQ ID NO: 345078 - DNA, 51 bp, Artificial
  Synthetic oligonucleotide
cacgtaagatcaatcgttaatgaatacggtcgtgggtaggagaacaatcaa

SEQ ID NO: 345079 - DNA, 55 bp, Artificial
  Synthetic oligonucleotide
cacgtaataatttgtttaagcgatcaaccatctccaaacgagatgatgggagacg

SEQ ID NO: 345080 - DNA, 55 bp, Artificial
  Synthetic oligonucleotide
cacgtacaagcatacctgcccggcattctcagaactgatgaatccctctccacgc

SEQ ID NO: 345081 - DNA, 52 bp, Artificial
  Synthetic oligonucleotide
cacgtacaggggggtacgtcatccgtacaggggggtacgtcatccgtacagg

SEQ ID NO: 345082 - DNA, 60 bp, Artificial
  Synthetic oligonucleotide
cacgtaccactgtggccaggcggtagctgggacgtgcagccgaccaccatggggagtagc

SEQ ID NO: 345083 - DNA, 53 bp, Artificial
  Synthetic oligonucleotide
cacgtaccgctgccacaggggtgatactcaaatacaaactcgaagatcatttg

SEQ ID NO: 345084 - DNA, 56 bp, Artificial
  Synthetic oligonucleotide
cacgtacctaccaggacccatgtgatcctggttggtatgtggtaaactctcgtagg

SEQ ID NO: 345085 - DNA, 56 bp, Artificial
  Synthetic oligonucleotide
cacgtacgagagtgctttaaccagtgataggaggtggtggactgcactttcccggt

SEQ ID NO: 345086 - DNA, 55 bp, Artificial
  Synthetic oligonucleotide
cacgtacgcaagtgtctaaacgggtagccccgtttaaacgagctgatgtgaaatg

SEQ ID NO: 345087 - DNA, 57 bp, Artificial
  Synthetic oligonucleotide
cacgtacggcactctcagcggagtcgttgagggttacgaggggcaggcggactcttg

SEQ ID NO: 345088 - DNA, 51 bp, Artificial
  Synthetic oligonucleotide
cacgtacggggctgggtgccgcgtccacctaggttgtgtccatatatcagg

SEQ ID NO: 345089 - DNA, 55 bp, Artificial
  Synthetic oligonucleotide
cacgtacgtggaccgggttatgtctgcaatgctggagacacacaacgtccactga

SEQ ID NO: 345090 - DNA, 53 bp, Artificial
  Synthetic oligonucleotide
cacgtactacatgtcgttaaatgaaccagatatcattcaacgagtttcgtttc

SEQ ID NO: 345091 - DNA, 55 bp, Artificial
  Synthetic oligonucleotide
cacgtacttctctaaaagatttgtttcgtattggtatcgtgttgagaaaataaca

SEQ ID NO: 345092 - DNA, 51 bp, Artificial
  Synthetic oligonucleotide
cacgtagccagcgcgttaggagattcagattattcggattatccatcctcc

SEQ ID NO: 345093 - DNA, 55 bp, Artificial
  Synthetic oligonucleotide
cacgtagcccgtgaacaacatccggaatattacaaagactgctgacacaggggac

SEQ ID NO: 345094 - DNA, 60 bp, Artificial
  Synthetic oligonucleotide
cacgtagcttccttatgcgcggggctagctgactctctggtgtatacattgcctgtagcg

SEQ ID NO: 345095 - DNA, 60 bp, Artificial
  Synthetic oligonucleotide
cacgtagggcagcaatgccctacaatgatgatcttttggtgggctctgagctcacctact

SEQ ID NO: 345096 - DNA, 57 bp, Artificial
  Synthetic oligonucleotide
cacgtagtctcactcttccaaattgtcttgtgtccccgtctttgcattctcgttccg

SEQ ID NO: 345097 - DNA, 60 bp, Artificial
  Synthetic oligonucleotide
cacgtagtgatgggagaatactggccataccattggacatgagcaatacattgttctcca

SEQ ID NO: 345098 - DNA, 55 bp, Artificial
  Synthetic oligonucleotide
cacgtataaacgttcgcacgcgtatgtacgtaggaacaaatatacgatcaactta

SEQ ID NO: 345099 - DNA, 59 bp, Artificial
  Synthetic oligonucleotide
cacgtataaggtttaaggatgatacatcatttgaagacatcaatggcataaggagacca

SEQ ID NO: 345100 - DNA, 55 bp, Artificial
  Synthetic oligonucleotide
cacgtataatgcacagttcatcacgcctaccaactcggcgtcaggctttgtcagg

SEQ ID NO: 345101 - DNA, 55 bp, Artificial
  Synthetic oligonucleotide
cacgtatcgttatgcaagctttcatgttgactactgcagtgtttcttgctctgac

SEQ ID NO: 345102 - DNA, 55 bp, Artificial
  Synthetic oligonucleotide
cacgtatgaaaagcatgttactcggttcaatccaaatggtcaacgcaaactttcg

SEQ ID NO: 345103 - DNA, 54 bp, Artificial
  Synthetic oligonucleotide
cacgtattgcaaggcccgaatgccggaaagattcgaggtctactttgcagtaga

SEQ ID NO: 345104 - DNA, 55 bp, Artificial
  Synthetic oligonucleotide
cacgtattgttctgctcccttcacagctaggtggtcttaattacctcgcatgtag

SEQ ID NO: 345105 - DNA, 55 bp, Artificial
  Synthetic oligonucleotide
cacgtcacaccaaagatgaaggaggttatggcaagacatgtgaccgccctactac

SEQ ID NO: 345106 - DNA, 59 bp, Artificial
  Synthetic oligonucleotide
cacgtcaccgggggaagtgtcgccagcggcgcgtctagtcttgttaatctcttcacaca

SEQ ID NO: 345107 - DNA, 60 bp, Artificial
  Synthetic oligonucleotide
cacgtcactgccgtagagtttgcgagctcatgttagttccacagcgatccccctggacat

SEQ ID NO: 345108 - DNA, 56 bp, Artificial
  Synthetic oligonucleotide
cacgtcacttacgtttcacatggttggtcagttctaaaaatgataagcggttcagg

SEQ ID NO: 345109 - DNA, 60 bp, Artificial
  Synthetic oligonucleotide
cacgtcagattacatcaacacctcattgacctcaattaatgttcaggcaagtgcgctatt

SEQ ID NO: 345110 - DNA, 58 bp, Artificial
  Synthetic oligonucleotide
cacgtcagtttaccatgcgtatacccggacaagcatccactccgttggccgagaattc

SEQ ID NO: 345111 - DNA, 60 bp, Artificial
  Synthetic oligonucleotide
cacgtcatcacaaggcccgagagctgcatccggagtactacaaggtctgctgacactgag

SEQ ID NO: 345112 - DNA, 55 bp, Artificial
  Synthetic oligonucleotide
cacgtcatcggggacactgccggccaagccgcgcatcgactcaccaacatcttct

SEQ ID NO: 345113 - DNA, 52 bp, Artificial
  Synthetic oligonucleotide
cacgtcatcgggggaactgtcgcctaccacacgtccgtgctcgccggaatct

SEQ ID NO: 345114 - DNA, 52 bp, Artificial
  Synthetic oligonucleotide
cacgtcatctttaagtatttccctggaccggggtcgatgggtggcggctgac

SEQ ID NO: 345115 - DNA, 59 bp, Artificial
  Synthetic oligonucleotide
cacgtcatgtccaagaatccaacgttagtgcgccaatttgtgcgggccggccttgatgt

SEQ ID NO: 345116 - DNA, 55 bp, Artificial
  Synthetic oligonucleotide
cacgtcatgtgcaagaagtccaaattccatggtattgttcagatatgagtgacga

SEQ ID NO: 345117 - DNA, 55 bp, Artificial
  Synthetic oligonucleotide
cacgtcattgcgggggactttggaaatttcgatggatctttagtagcacaaattt

SEQ ID NO: 345118 - DNA, 60 bp, Artificial
  Synthetic oligonucleotide
cacgtcatttccctgaccacagtctacgttattgagcagcgtctattaatatctcgtcat

SEQ ID NO: 345119 - DNA, 56 bp, Artificial
  Synthetic oligonucleotide
cacgtccacttgaacgagtgttcgtacggcgtgtacgcctcctgttcctgtggaaa

SEQ ID NO: 345120 - DNA, 55 bp, Artificial
  Synthetic oligonucleotide
cacgtccataccagaccaatccgaacagaaagaactactcatatattgactgcca

SEQ ID NO: 345121 - DNA, 55 bp, Artificial
  Synthetic oligonucleotide
cacgtccatgaccagcgaatatcccgtgctaaccgaagtgctcagttatgccgcc

SEQ ID NO: 345122 - DNA, 60 bp, Artificial
  Synthetic oligonucleotide
cacgtcccctcagattgcccgacgggcctccctgctatcagcgatcgaaattcttgctga

SEQ ID NO: 345123 - DNA, 60 bp, Artificial
  Synthetic oligonucleotide
cacgtccgctcgtggttatggctctatctgcatccgaagattttatcccaagaatcggga

SEQ ID NO: 345124 - DNA, 55 bp, Artificial
  Synthetic oligonucleotide
cacgtccgtccgacagttagatggatagctgcatgctgtaaccttccagaagtgg

SEQ ID NO: 345125 - DNA, 60 bp, Artificial
  Synthetic oligonucleotide
cacgtcctctcagactgcctgatgggcctccttgttcccagcggtcgaaattcttgctga

SEQ ID NO: 345126 - DNA, 50 bp, Artificial
  Synthetic oligonucleotide
cacgtcctgttccaaaagtactgccaactgacgagtttgtcatcaatacg

SEQ ID NO: 345127 - DNA, 55 bp, Artificial
  Synthetic oligonucleotide
cacgtcgacaagcttctggaattgaaggtgatccggccttcaacgagtagacacc

SEQ ID NO: 345128 - DNA, 55 bp, Artificial
  Synthetic oligonucleotide
cacgtcgcatggagaccaccgtgaacgcccactggaccctgcccaaggtcttaca

SEQ ID NO: 345129 - DNA, 60 bp, Artificial
  Synthetic oligonucleotide
cacgtcgtatgctcggtttgcaaacacagactgttgactcctcacagggttcagagttcg

SEQ ID NO: 345130 - DNA, 60 bp, Artificial
  Synthetic oligonucleotide
cacgtcgtattctaccgacgaggaacgtgcgctgattcgcactgaattggcagctctact

SEQ ID NO: 345131 - DNA, 53 bp, Artificial
  Synthetic oligonucleotide
cacgtcgtggcttacagacgcgacagagaagtggtgtcaagaccgtgcaatct

SEQ ID NO: 345132 - DNA, 58 bp, Artificial
  Synthetic oligonucleotide
cacgtcgttgcctagaacaatcatgggtaatgacgttaggcgaatatcctataatgta

SEQ ID NO: 345133 - DNA, 51 bp, Artificial
  Synthetic oligonucleotide
cacgtctagggaaaaggtcaactctattgaaaaccctaagactgtagcaga

SEQ ID NO: 345134 - DNA, 55 bp, Artificial
  Synthetic oligonucleotide
cacgtctcgggagatccatggtagtcgacagtcatatccagccgaagcaatgcgt

SEQ ID NO: 345135 - DNA, 60 bp, Artificial
  Synthetic oligonucleotide
cacgtctgaagtggctcggcaatgcgaggattggtacaccctagctgtgccaaccaccta

SEQ ID NO: 345136 - DNA, 55 bp, Artificial
  Synthetic oligonucleotide
cacgtctgcacactccactttgcataaagcgtacccaaatttaacacttctgttt

SEQ ID NO: 345137 - DNA, 57 bp, Artificial
  Synthetic oligonucleotide
cacgtctgcccaccgctagtactaatcccttcgtctaacatgaacgccgaccgcacc

SEQ ID NO: 345138 - DNA, 60 bp, Artificial
  Synthetic oligonucleotide
cacgtctgtcaatatgggtgcaaacaatagcaaggagtctgtgtcaagcaatggcaatca

SEQ ID NO: 345139 - DNA, 55 bp, Artificial
  Synthetic oligonucleotide
cacgtctgtcagaacacagtatcgttggttgtgcattccacccacgacgacttgc

SEQ ID NO: 345140 - DNA, 55 bp, Artificial
  Synthetic oligonucleotide
cacgtcttacggcgtcacgcgagttacagcttgtagctggagatgttgtcgtggc

SEQ ID NO: 345141 - DNA, 60 bp, Artificial
  Synthetic oligonucleotide
cacgtcttcaaagcaagtggattgatgtgacatctccactgacgtaagggatgacgcaca

SEQ ID NO: 345142 - DNA, 53 bp, Artificial
  Synthetic oligonucleotide
cacgtcttttgactattacttacatcccagtttaagaaccaaaaggcgcaaac

SEQ ID NO: 345143 - DNA, 59 bp, Artificial
  Synthetic oligonucleotide
cacgtgaagggattccacactctttttcacctgatcttcgatctcaggtcttaatgtgg

SEQ ID NO: 345144 - DNA, 60 bp, Artificial
  Synthetic oligonucleotide
cacgtgacagccttgagtcccaagctatagacacatccattaatacactgcgagggcagt

SEQ ID NO: 345145 - DNA, 58 bp, Artificial
  Synthetic oligonucleotide
cacgtgaccatatctactttccaagaggtcgttgctgactttagtggcagtaggtacc

SEQ ID NO: 345146 - DNA, 55 bp, Artificial
  Synthetic oligonucleotide
cacgtgacccctgacaagcctacgtcacactcgtcgtaaccacacccattccgga

SEQ ID NO: 345147 - DNA, 55 bp, Artificial
  Synthetic oligonucleotide
cacgtgaccgttctacacggaagtgaggcggaaacgttgagttatgcggatccga

SEQ ID NO: 345148 - DNA, 55 bp, Artificial
  Synthetic oligonucleotide
cacgtgatctcgaatagagatataacccgcatgtgcgatccgccacaataagagc

SEQ ID NO: 345149 - DNA, 55 bp, Artificial
  Synthetic oligonucleotide
cacgtgatggaggaagtgacaatgggacagagacattcagacctggaggaggaga

SEQ ID NO: 345150 - DNA, 60 bp, Artificial
  Synthetic oligonucleotide
cacgtgatgtgcttgagcaacagtgtggcgagtgtggcgggacaaatctatcccgctctt

SEQ ID NO: 345151 - DNA, 50 bp, Artificial
  Synthetic oligonucleotide
cacgtgccaaagctctagacccgctgacgtgttatgaaattcacgtgcca

SEQ ID NO: 345152 - DNA, 58 bp, Artificial
  Synthetic oligonucleotide
cacgtgcccatcatcggtcgcgggttgtagtctgacgaacaacaacttttgtacacag

SEQ ID NO: 345153 - DNA, 55 bp, Artificial
  Synthetic oligonucleotide
cacgtgccgcttacgcccacagtgttatcttgagtgctgacaaaatggagaacaa

SEQ ID NO: 345154 - DNA, 55 bp, Artificial
  Synthetic oligonucleotide
cacgtgccgggaatgatgacttcacctttggttggatgataggcactccgcaact

SEQ ID NO: 345155 - DNA, 60 bp, Artificial
  Synthetic oligonucleotide
cacgtgcctgccgacttcttctgacggaagtacgacgagtaacgctcgatggagtgcgca

SEQ ID NO: 345156 - DNA, 55 bp, Artificial
  Synthetic oligonucleotide
cacgtgcgccgcacgccactttagtggtgggccatatgtcccgagttagtgcgct

SEQ ID NO: 345157 - DNA, 55 bp, Artificial
  Synthetic oligonucleotide
cacgtgcggtcactgtgcctcctagcatggcataatggtagggaaacctatgagg

SEQ ID NO: 345158 - DNA, 57 bp, Artificial
  Synthetic oligonucleotide
cacgtgcggtctaacgatccggtggggacgctgcgtaagaacagcaagggtgtgtac

SEQ ID NO: 345159 - DNA, 55 bp, Artificial
  Synthetic oligonucleotide
cacgtgctcaaggccggaactgtcaatcatttaattcaattcgcctcaaatgatc

SEQ ID NO: 345160 - DNA, 60 bp, Artificial
  Synthetic oligonucleotide
cacgtgctcctatatattcaattacaatgtgacctggggtcactcgttatcaaacaatgg

SEQ ID NO: 345161 - DNA, 57 bp, Artificial
  Synthetic oligonucleotide
cacgtgctgaggtatataattttgcatgcactgaattaaacttagtgtatagggatg

SEQ ID NO: 345162 - DNA, 58 bp, Artificial
  Synthetic oligonucleotide
cacgtgcttaaactaactatgcgtcacaacggcggtagcttcacgctaaccaaccaga

SEQ ID NO: 345163 - DNA, 53 bp, Artificial
  Synthetic oligonucleotide
cacgtggaagaacggacccggcgggtgggccgacgtgaccacggtcaaacaga

SEQ ID NO: 345164 - DNA, 55 bp, Artificial
  Synthetic oligonucleotide
cacgtggaagtgtctttccaaatacgcagttgttttgctcgactcttcttgcgtg

SEQ ID NO: 345165 - DNA, 55 bp, Artificial
  Synthetic oligonucleotide
cacgtggacctcacgtggtcgggtcacttggtgcgaggaaataattattccggtc

SEQ ID NO: 345166 - DNA, 59 bp, Artificial
  Synthetic oligonucleotide
cacgtggagatgtccccctctcataaggcgcccttggtgcgtcaataaatcagtggtcc

SEQ ID NO: 345167 - DNA, 55 bp, Artificial
  Synthetic oligonucleotide
cacgtggaggtggtggcccaaaacagacacgggcctcagaatgggttaacaggcc

SEQ ID NO: 345168 - DNA, 53 bp, Artificial
  Synthetic oligonucleotide
cacgtggatatttatgattggtgggtatagagtcggtgttaaaactcgaagtt

SEQ ID NO: 345169 - DNA, 60 bp, Artificial
  Synthetic oligonucleotide
cacgtggatcaaggaggcctcggatggtttggatgtcacagaggatgtgtttgttaacac

SEQ ID NO: 345170 - DNA, 59 bp, Artificial
  Synthetic oligonucleotide
cacgtggattggctcaaattgtggaggggtgcgggattacgttgtgcaattgcttccta

SEQ ID NO: 345171 - DNA, 55 bp, Artificial
  Synthetic oligonucleotide
cacgtggcaattgtgggtccccccttcatcaagacaccaggtctttcctccttaa

SEQ ID NO: 345172 - DNA, 54 bp, Artificial
  Synthetic oligonucleotide
cacgtggcaattgtgggtcccccctttgtcaagacaccgagtctttctccctta

SEQ ID NO: 345173 - DNA, 55 bp, Artificial
  Synthetic oligonucleotide
cacgtggcacgggtatgggccctaaattcgataaggccgctgcgtgggttaacag

SEQ ID NO: 345174 - DNA, 55 bp, Artificial
  Synthetic oligonucleotide
cacgtggcatgtggacaaagaacacccatatcggacatggcagtattgggggagt

SEQ ID NO: 345175 - DNA, 60 bp, Artificial
  Synthetic oligonucleotide
cacgtggctttcaatggaagagaaggaagtgcaagtttcataccctatcatgctagtttg

SEQ ID NO: 345176 - DNA, 59 bp, Artificial
  Synthetic oligonucleotide
cacgtgggacaagcagatttatgagacccttaaagaactacttgtagctcaagctacaa

SEQ ID NO: 345177 - DNA, 59 bp, Artificial
  Synthetic oligonucleotide
cacgtgggagataacattcattcccttccccacggaggcaattatgcagacggcaccaa

SEQ ID NO: 345178 - DNA, 55 bp, Artificial
  Synthetic oligonucleotide
cacgtgggcccgagggccggatttgattgggccacgtcacgttcgcaccaattgc

SEQ ID NO: 345179 - DNA, 55 bp, Artificial
  Synthetic oligonucleotide
cacgtgggcgaatgaaatgagcccctcatagcttaattgttttgtggtcccctat

SEQ ID NO: 345180 - DNA, 55 bp, Artificial
  Synthetic oligonucleotide
cacgtgggtgaaggacatacacttgtcacgaacttgctggctaactggaagggga

SEQ ID NO: 345181 - DNA, 50 bp, Artificial
  Synthetic oligonucleotide
cacgtgggtgacaatctacatcatttaccttacggtggttcatactgtga

SEQ ID NO: 345182 - DNA, 57 bp, Artificial
  Synthetic oligonucleotide
cacgtgggtgctgcgtcacagccgccattttagttaacaaaatggccgacttccttc

SEQ ID NO: 345183 - DNA, 51 bp, Artificial
  Synthetic oligonucleotide
cacgtgggttattgacttccataagatatgtggacagacactcaatttttc

SEQ ID NO: 345184 - DNA, 58 bp, Artificial
  Synthetic oligonucleotide
cacgtggtaatggtatcactcaccgtgtgggtaagcgtttctgtgttaagtctgtgta

SEQ ID NO: 345185 - DNA, 55 bp, Artificial
  Synthetic oligonucleotide
cacgtggtactcaattgacctagagaagggtgaggcaaactgcacgcgtcaacac

SEQ ID NO: 345186 - DNA, 55 bp, Artificial
  Synthetic oligonucleotide
cacgtggtatgactggaaggttatccaacacacccaacgtagccttcgcctatca

SEQ ID NO: 345187 - DNA, 54 bp, Artificial
  Synthetic oligonucleotide
cacgtggtccaaagatctcggacactttttcaaccgtagttactgtaggacgaa

SEQ ID NO: 345188 - DNA, 52 bp, Artificial
  Synthetic oligonucleotide
cacgtggtgagccacccgcgccgctcctggccgctgtttgagagcaacatgt

SEQ ID NO: 345189 - DNA, 55 bp, Artificial
  Synthetic oligonucleotide
cacgtggttcgggatgttgattatactggttttatatgttatcctttgcaggtcg

SEQ ID NO: 345190 - DNA, 54 bp, Artificial
  Synthetic oligonucleotide
cacgtgtaagctaccccagcttacggtgtcaagaaattcgaggccctaaggggc

SEQ ID NO: 345191 - DNA, 59 bp, Artificial
  Synthetic oligonucleotide
cacgtgtacacgtccaccagcgatggccagcccgtgtacggctggcccgtggtggccca

SEQ ID NO: 345192 - DNA, 55 bp, Artificial
  Synthetic oligonucleotide
cacgtgtcaaatagtgaccgccccactgttgatacagtctactactactccacct

SEQ ID NO: 345193 - DNA, 59 bp, Artificial
  Synthetic oligonucleotide
cacgtgtcacccttcagatgctccggcccgtttccgccttcttcatgctgtacaacgcg

SEQ ID NO: 345194 - DNA, 59 bp, Artificial
  Synthetic oligonucleotide
cacgtgtcatttcaccacctcaatccttcagaccgtgtcagtcgcccttaccatcctag

SEQ ID NO: 345195 - DNA, 55 bp, Artificial
  Synthetic oligonucleotide
cacgtgtcgagcaaaaacagggtagttgcgtagtcgctggtaaagatagttaagg

SEQ ID NO: 345196 - DNA, 55 bp, Artificial
  Synthetic oligonucleotide
cacgtgtctcctacgcattatgtccctgagtccgacgcggcagctcgtgtgaccc

SEQ ID NO: 345197 - DNA, 59 bp, Artificial
  Synthetic oligonucleotide
cacgtgtgatacaaccacgcgatccaaggttcaacgctgtatttgcgaaatacataaaa

SEQ ID NO: 345198 - DNA, 55 bp, Artificial
  Synthetic oligonucleotide
cacgtgttgagaacgcttttgcgtggaaaggtctggcggtcatacgtggtcctga

SEQ ID NO: 345199 - DNA, 58 bp, Artificial
  Synthetic oligonucleotide
cacgtgttgtcatgttggattgaaatctttatacatgggtttgtaccgtatatacctg

SEQ ID NO: 345200 - DNA, 55 bp, Artificial
  Synthetic oligonucleotide
cacgtgtttacccctttgctcggtactgatgcttgactaaacattgaggctgagg

SEQ ID NO: 345201 - DNA, 55 bp, Artificial
  Synthetic oligonucleotide
cacgtgtttatgaacccgtcattcaagatttttggtgtgcggttgcaacggttgt

SEQ ID NO: 345202 - DNA, 55 bp, Artificial
  Synthetic oligonucleotide
cacgttaaggtttgtattctggtatgtatgtactggggactgggagtgggcttcg

SEQ ID NO: 345203 - DNA, 50 bp, Artificial
  Synthetic oligonucleotide
cacgttaatatgcaactcatgtgtgacaatcaacttgacaccaatggtaa

SEQ ID NO: 345204 - DNA, 59 bp, Artificial
  Synthetic oligonucleotide
cacgttaattaattatcttgttcgtaaattacaagtatccagattggagacacacatga

SEQ ID NO: 345205 - DNA, 60 bp, Artificial
  Synthetic oligonucleotide
cacgttacacaccgctgccctgccgatgtgtgtgagctcatacgtggggcttatcctaag

SEQ ID NO: 345206 - DNA, 56 bp, Artificial
  Synthetic oligonucleotide
cacgttagtgtctcgcgccaagtacacgtccaacatatggcgtgagacaacgtgtc

SEQ ID NO: 345207 - DNA, 60 bp, Artificial
  Synthetic oligonucleotide
cacgttatagcacatacctgatgctactattgattgtctcatatgcatcagcatgttcag

SEQ ID NO: 345208 - DNA, 60 bp, Artificial
  Synthetic oligonucleotide
cacgttcaggaactcgagtagggtccagccatcatttcttttatgatattagtgacatta

SEQ ID NO: 345209 - DNA, 60 bp, Artificial
  Synthetic oligonucleotide
cacgttccatcttatgaggctcgactcatcctgcctgcggttatattgtcgactgtctgg

SEQ ID NO: 345210 - DNA, 55 bp, Artificial
  Synthetic oligonucleotide
cacgttccctgactcatccttccttgacaatgggaatatagagccattaccactc

SEQ ID NO: 345211 - DNA, 60 bp, Artificial
  Synthetic oligonucleotide
cacgttcctgtttaacacaatggccaacatgctattcaccttcttgcgctacaacattag

SEQ ID NO: 345212 - DNA, 55 bp, Artificial
  Synthetic oligonucleotide
cacgttccttaaacggggatttgtattggatggtagtcttgtgcgtccagttatg

SEQ ID NO: 345213 - DNA, 55 bp, Artificial
  Synthetic oligonucleotide
cacgttcgaatccacccagatcgtgtacgaagagtgccccaagtgtgggtgcgag

SEQ ID NO: 345214 - DNA, 55 bp, Artificial
  Synthetic oligonucleotide
cacgttcgacgactgagcaaccgccggcaaaacgtcggattcataccctgacctg

SEQ ID NO: 345215 - DNA, 57 bp, Artificial
  Synthetic oligonucleotide
cacgttcgccgtgtctgtccactcattgtacgatataccggttaatgaactcggtcc

SEQ ID NO: 345216 - DNA, 55 bp, Artificial
  Synthetic oligonucleotide
cacgttctatttcgagttcgagggatcccctaatgtggattttcctcgcgattcc

SEQ ID NO: 345217 - DNA, 55 bp, Artificial
  Synthetic oligonucleotide
cacgttgaatttctccccacgtggaggtggtggcccaaaacagacacgggcctca

SEQ ID NO: 345218 - DNA, 54 bp, Artificial
  Synthetic oligonucleotide
cacgttgacatacgtttagcagcggacaaccccgatctacgcgttggtctgcgt

SEQ ID NO: 345219 - DNA, 56 bp, Artificial
  Synthetic oligonucleotide
cacgttgactttgggagattacggagaagtcacctttgattgtgaacccaggtcag

SEQ ID NO: 345220 - DNA, 60 bp, Artificial
  Synthetic oligonucleotide
cacgttgagtgctgaattgcccagaattttagttgatcacaagctcggaatcatgcatgt

SEQ ID NO: 345221 - DNA, 60 bp, Artificial
  Synthetic oligonucleotide
cacgttgcgaaagtgacgtttcgaaaatgggcggcgcaagcctctctatatattgagcgc

SEQ ID NO: 345222 - DNA, 55 bp, Artificial
  Synthetic oligonucleotide
cacgttgcgatttaagcatgaggtggtggtcaaccttccgggtgttgacaagcct

SEQ ID NO: 345223 - DNA, 55 bp, Artificial
  Synthetic oligonucleotide
cacgttgcgctgacccatacgttcctaggtgttatcgtagcactaatttgggcga

SEQ ID NO: 345224 - DNA, 60 bp, Artificial
  Synthetic oligonucleotide
cacgttgctatcaagtcacatgtctgtgactattctttagacgttgatgggacagtgagg

SEQ ID NO: 345225 - DNA, 50 bp, Artificial
  Synthetic oligonucleotide
cacgttggatgaccactattctgtgaatcaccagctattcaattgtgtag

SEQ ID NO: 345226 - DNA, 60 bp, Artificial
  Synthetic oligonucleotide
cacgttgtcagccaagctttggcagactgactccaagggatggtactggaaattccctga

SEQ ID NO: 345227 - DNA, 56 bp, Artificial
  Synthetic oligonucleotide
cacgtttatagtatacgtgcagttagccataactgaccagttaacggtttgcgttc

SEQ ID NO: 345228 - DNA, 55 bp, Artificial
  Synthetic oligonucleotide
cacgtttcagcctctgacgaagaaggcatatacacgctcgcagtacgcacacggc

SEQ ID NO: 345229 - DNA, 55 bp, Artificial
  Synthetic oligonucleotide
cacgtttcagctcgtggtgaaattacacgtactaaagaccgcaaaacacgtgaac

SEQ ID NO: 345230 - DNA, 54 bp, Artificial
  Synthetic oligonucleotide
cacgtttcccccaatgtttgacaaatccaaaccagataaaggctacgtgttcta

SEQ ID NO: 345231 - DNA, 55 bp, Artificial
  Synthetic oligonucleotide
cacgtttcctcacgcacgaggtctttgacttaacatctgatctgcctggggtgca

SEQ ID NO: 345232 - DNA, 55 bp, Artificial
  Synthetic oligonucleotide
cacgtttcgatgtcttaaaccggaagaatccgacataccctccgagaccgcagcc

SEQ ID NO: 345233 - DNA, 55 bp, Artificial
  Synthetic oligonucleotide
cacgtttgacaaacgctttccgggttttatggcaccgcataagctggcgtgtgcc

SEQ ID NO: 345234 - DNA, 55 bp, Artificial
  Synthetic oligonucleotide
cacgtttgcaacactcgtcgcacagtatacgtatgccgataagatgaccgtccga

SEQ ID NO: 345235 - DNA, 55 bp, Artificial
  Synthetic oligonucleotide
cacgtttgtcatgctcaataaatgtgctcatttccgtctgcacccatctacgccc

SEQ ID NO: 345236 - DNA, 56 bp, Artificial
  Synthetic oligonucleotide
cacgttttacatcgctttatttatctacaagctcataaaagcgtttgttgtttcaa

SEQ ID NO: 345237 - DNA, 55 bp, Artificial
  Synthetic oligonucleotide
cacgttttatgaaggacttgcacttcaccgggacaaatggtgttggcgaggtggg

SEQ ID NO: 345238 - DNA, 55 bp, Artificial
  Synthetic oligonucleotide
cacgttttcaatcccgtacctttcggcggccgactacgcatacaccgcgtctgac

SEQ ID NO: 345239 - DNA, 58 bp, Artificial
  Synthetic oligonucleotide
cacgttttgatgtgtattcgctgtttgagctgatatgtaggcctgtcgagtctgagta

SEQ ID NO: 345240 - DNA, 60 bp, Artificial
  Synthetic oligonucleotide
cactaaaacgaaagctattaggcagtccatatgaaagccctgtcagtgattcacagcaca

SEQ ID NO: 345241 - DNA, 59 bp, Artificial
  Synthetic oligonucleotide
cactaaacctgtggcctcagattattgggatggttacagtggacaattagtttgtatca

SEQ ID NO: 345242 - DNA, 55 bp, Artificial
  Synthetic oligonucleotide
cactaaactacacgaagatcgtcacctaatccgtgatcgtctcacacacatggac

SEQ ID NO: 345243 - DNA, 55 bp, Artificial
  Synthetic oligonucleotide
cactaaacttaagggtctcagaggccgcgcagcggccgccactacattctcgcac

SEQ ID NO: 345244 - DNA, 55 bp, Artificial
  Synthetic oligonucleotide
cactaaagattgtagtaattatgggagagtgttcttttatcgtaatgataatgac

SEQ ID NO: 345245 - DNA, 59 bp, Artificial
  Synthetic oligonucleotide
cactaaagctagtggaccaagcaactccgaacaggtacctgccgtgactgccgctgaaa

SEQ ID NO: 345246 - DNA, 58 bp, Artificial
  Synthetic oligonucleotide
cactaaatattcacttgaatacatccgtttccatcaagaaacatcgaccgtatgtaac

SEQ ID NO: 345247 - DNA, 52 bp, Artificial
  Synthetic oligonucleotide
cactaaatggcgtgactgggattctcggcttaggtataccacgttccgcggt

SEQ ID NO: 345248 - DNA, 55 bp, Artificial
  Synthetic oligonucleotide
cactaaattcctcaggtagtaatgcaactgacggcagagacacttggtacaaggg

SEQ ID NO: 345249 - DNA, 54 bp, Artificial
  Synthetic oligonucleotide
cactaacaatcactagtatttatgcaaacgcagtgttaatggaggaaggctcct

SEQ ID NO: 345250 - DNA, 60 bp, Artificial
  Synthetic oligonucleotide
cactaacacccatattatggctactgaggcatctaattatgctcagtatcgtgttgtccg

SEQ ID NO: 345251 - DNA, 54 bp, Artificial
  Synthetic oligonucleotide
cactaacactgtcatgttctggttagttagggatagacgtccccttacaacccc

SEQ ID NO: 345252 - DNA, 55 bp, Artificial
  Synthetic oligonucleotide
cactaacagactacgtcagccacattaattgcatagaacgtgaaaagaacgacgt

SEQ ID NO: 345253 - DNA, 60 bp, Artificial
  Synthetic oligonucleotide
cactaacagactcaggtccaaaagtcaatattatagtagactcacagtatgtaatgggaa

SEQ ID NO: 345254 - DNA, 60 bp, Artificial
  Synthetic oligonucleotide
cactaacaggtatccaagcagacgtaagtatggtggtgggcatactagaccatctgttag

SEQ ID NO: 345255 - DNA, 54 bp, Artificial
  Synthetic oligonucleotide
cactaacagtgttatgttctggttagttagggatagaaggccgtttggttcacc

SEQ ID NO: 345256 - DNA, 60 bp, Artificial
  Synthetic oligonucleotide
cactaaccagcagagagcatccgcggggcaaatcagcgtacagcccacattctctgtaca

SEQ ID NO: 345257 - DNA, 54 bp, Artificial
  Synthetic oligonucleotide
cactaacgagggctttagctgctgagtcccatatggacgctgatctcacaaaac

SEQ ID NO: 345258 - DNA, 54 bp, Artificial
  Synthetic oligonucleotide
cactaacgcgatgaactttctccgcaagatagtgagaggttgcagggatgagga

SEQ ID NO: 345259 - DNA, 55 bp, Artificial
  Synthetic oligonucleotide
cactaacgtatggttatccgactgagaaattagtacagctgtccctcatcccggc

SEQ ID NO: 345260 - DNA, 58 bp, Artificial
  Synthetic oligonucleotide
cactaactaagctaactggtggagacaacggtacaattcctgagtcttgggctgataa

SEQ ID NO: 345261 - DNA, 60 bp, Artificial
  Synthetic oligonucleotide
cactaactatgatggtagcatacaccctatgtggtttcaagctctaaaagaagttctatc

SEQ ID NO: 345262 - DNA, 60 bp, Artificial
  Synthetic oligonucleotide
cactaactccacttgcatcggatctcgaggacctggctttagagccttggagcacaccaa

SEQ ID NO: 345263 - DNA, 60 bp, Artificial
  Synthetic oligonucleotide
cactaactcttgtcggccaatcatatgacgcgctcaaagcttaaataaatttcctgccta

SEQ ID NO: 345264 - DNA, 55 bp, Artificial
  Synthetic oligonucleotide
cactaactgccccgatcctgcatctatattaaataaagtagccataggcccctgg

SEQ ID NO: 345265 - DNA, 60 bp, Artificial
  Synthetic oligonucleotide
cactaactggacagtttcaagcgatcagagccgcatatgatgtgctgactgtccccgaca

SEQ ID NO: 345266 - DNA, 55 bp, Artificial
  Synthetic oligonucleotide
cactaactggatgggctatacttggattgtttcaactcgtttggacaagttcgac

SEQ ID NO: 345267 - DNA, 55 bp, Artificial
  Synthetic oligonucleotide
cactaagactgacggaatatctcggagctttatgagagattacggagcactcgag

SEQ ID NO: 345268 - DNA, 55 bp, Artificial
  Synthetic oligonucleotide
cactaagatgcgagccgagaagcgattcatctacgcgataatagatcatggagca

SEQ ID NO: 345269 - DNA, 55 bp, Artificial
  Synthetic oligonucleotide
cactaagcactccgagcgaagcgaggagtgcgacccttactgtggggcccacttc

SEQ ID NO: 345270 - DNA, 56 bp, Artificial
  Synthetic oligonucleotide
cactaagcggtttgttgcaaaccagtctataagcttagttaagatgtgcttaccaa

SEQ ID NO: 345271 - DNA, 55 bp, Artificial
  Synthetic oligonucleotide
cactaagctgcgatttacatatattccgactaccaacacgactgcgacaggccgc

SEQ ID NO: 345272 - DNA, 60 bp, Artificial
  Synthetic oligonucleotide
cactaagctggctgcgccgactgtgtagagatgcgacctatctatgcactcggtagcggc

SEQ ID NO: 345273 - DNA, 60 bp, Artificial
  Synthetic oligonucleotide
cactaaggatgccctgtggagtgtctggtattacgtgttggagtgtcgtagccgtcttga

SEQ ID NO: 345274 - DNA, 55 bp, Artificial
  Synthetic oligonucleotide
cactaaggccaatccagcacaagccattgaaatacttgataatccaagtccgtta

SEQ ID NO: 345275 - DNA, 53 bp, Artificial
  Synthetic oligonucleotide
cactaagggagccgctctcatgagtggtgaaggacgtctggatccctactggg

SEQ ID NO: 345276 - DNA, 56 bp, Artificial
  Synthetic oligonucleotide
cactaagggagtataagcgtagaatggggacgagagagggggcctcgattgattcg

SEQ ID NO: 345277 - DNA, 60 bp, Artificial
  Synthetic oligonucleotide
cactaagtacttagtttgttggatcattgagccagtgtaatcaagatggatagcgaaggt

SEQ ID NO: 345278 - DNA, 57 bp, Artificial
  Synthetic oligonucleotide
cactaagtatgacagtttcttatcacgtggataaaccgctggtgtctttaaatttca

SEQ ID NO: 345279 - DNA, 58 bp, Artificial
  Synthetic oligonucleotide
cactaagtctattctcaacctccgtaccaacactgagaccaataatccgtgtgccaaa

SEQ ID NO: 345280 - DNA, 55 bp, Artificial
  Synthetic oligonucleotide
cactaagttcgactgggaaaatgatagacctcctatacaggtagactcacgaagc

SEQ ID NO: 345281 - DNA, 55 bp, Artificial
  Synthetic oligonucleotide
cactaagtttgaataaaccctagaattgaaatctaggtgcccgctaagataatta

SEQ ID NO: 345282 - DNA, 51 bp, Artificial
  Synthetic oligonucleotide
cactaataaagatcgattggatttaattcccatgcgtgatgtttcatgcgc

SEQ ID NO: 345283 - DNA, 51 bp, Artificial
  Synthetic oligonucleotide
cactaataaggccaagaccgagaccaaactcgttaaaaagggtgggtctag

SEQ ID NO: 345284 - DNA, 55 bp, Artificial
  Synthetic oligonucleotide
cactaatactacatctacacacctattgtgtgaggaacaagacagcggatatggc

SEQ ID NO: 345285 - DNA, 55 bp, Artificial
  Synthetic oligonucleotide
cactaatacttcggtttcgtctgttgcgatgttcaatgggtcgtatagacctgaa

SEQ ID NO: 345286 - DNA, 56 bp, Artificial
  Synthetic oligonucleotide
cactaatagcaaaattggatgctacagttttcgctcaaatagttaaacttaggaaa

SEQ ID NO: 345287 - DNA, 60 bp, Artificial
  Synthetic oligonucleotide
cactaatagctggaggcatgctaatagcgtgttatgtcatatccggaagctcagccgatt

SEQ ID NO: 345288 - DNA, 56 bp, Artificial
  Synthetic oligonucleotide
cactaatatcgaacactaattgcaatacagtcgaaagaacaaagaccacttgaagc

SEQ ID NO: 345289 - DNA, 60 bp, Artificial
  Synthetic oligonucleotide
cactaatcagcacttttgcagggagcacactccccagaagatcaggtacaactggtgttg

SEQ ID NO: 345290 - DNA, 60 bp, Artificial
  Synthetic oligonucleotide
cactaatcaggacgttcattgttgttgtcctctgttggattatagagatgctatgcgtaa

SEQ ID NO: 345291 - DNA, 60 bp, Artificial
  Synthetic oligonucleotide
cactaatgaggaagcactgagacaaataatcagagaatctggaggaattgacaaagagtc

SEQ ID NO: 345292 - DNA, 55 bp, Artificial
  Synthetic oligonucleotide
cactaatgatgtaaggcaattaacagaagcagtgcaaaagatagccctagaaagc

SEQ ID NO: 345293 - DNA, 60 bp, Artificial
  Synthetic oligonucleotide
cactaatgcttgctttgctactaattgatttcttcattacaacaatctacctcattgtcc

SEQ ID NO: 345294 - DNA, 60 bp, Artificial
  Synthetic oligonucleotide
cactaatgggacagagacattcagacctggaggaggaaatatgagggacaattggagaag

SEQ ID NO: 345295 - DNA, 60 bp, Artificial
  Synthetic oligonucleotide
cactaatgtacaagggcttgccctggaatgttgtgcgtattaagatcgtacaaatgctca

SEQ ID NO: 345296 - DNA, 50 bp, Artificial
  Synthetic oligonucleotide
cactaatgtcaagggttgtctataaacattatcgcagtctaatctcagaa

SEQ ID NO: 345297 - DNA, 55 bp, Artificial
  Synthetic oligonucleotide
cactaatgtcactgcttgcaacatcaccgatttagccaaccaaacagcatgcttg

SEQ ID NO: 345298 - DNA, 54 bp, Artificial
  Synthetic oligonucleotide
cactaatgttggatggcagcgctttaatttgaatgggtttccctctatgcgctg

SEQ ID NO: 345299 - DNA, 56 bp, Artificial
  Synthetic oligonucleotide
cactaattaaatcagggagaggcactgtctcacttccccgtctcagaaactttctt

SEQ ID NO: 345300 - DNA, 59 bp, Artificial
  Synthetic oligonucleotide
cactaattccaaattcttataatactcatacatatacttaacaccaccattaacatcta

SEQ ID NO: 345301 - DNA, 50 bp, Artificial
  Synthetic oligonucleotide
cactaattctcggtatggttgggctagctgttgcaacaggaacgtttgct

SEQ ID NO: 345302 - DNA, 55 bp, Artificial
  Synthetic oligonucleotide
cactaattggaatagtactactaatgccactgacataactactaatgccactgac

SEQ ID NO: 345303 - DNA, 57 bp, Artificial
  Synthetic oligonucleotide
cactaattgtgtagtggcccgatgtgggcctaagttccattttggctaacttaatgc

SEQ ID NO: 345304 - DNA, 56 bp, Artificial
  Synthetic oligonucleotide
cactacaacaactacggtcccgcaaacggtgctaattcaccccgtgtgaacgcaca

SEQ ID NO: 345305 - DNA, 51 bp, Artificial
  Synthetic oligonucleotide
cactacaacgtatgaatcttgatcgtcaggcgttgaataaccaagtggagc

SEQ ID NO: 345306 - DNA, 55 bp, Artificial
  Synthetic oligonucleotide
cactacaagccaaactattgtccattgcccagctggcctttcaccttccacgcca

SEQ ID NO: 345307 - DNA, 55 bp, Artificial
  Synthetic oligonucleotide
cactacaatcaatatggccgacttaacctcgcttggtcgacacgaatctttagga

SEQ ID NO: 345308 - DNA, 55 bp, Artificial
  Synthetic oligonucleotide
cactacaatcaggattagcagctaaagagcgtaaagatgccttagcagtaagtcc

SEQ ID NO: 345309 - DNA, 56 bp, Artificial
  Synthetic oligonucleotide
cactacaattggggaactgtaacattgccggatgggtcttaggaaacccagaatgc

SEQ ID NO: 345310 - DNA, 55 bp, Artificial
  Synthetic oligonucleotide
cactacacaaaagagcttcggtatggcattctggaaaatatgagagtgtaccccg

SEQ ID NO: 345311 - DNA, 55 bp, Artificial
  Synthetic oligonucleotide
cactacaccagtcggacagttggtagttaatgcgccagcgattctcaactattct

SEQ ID NO: 345312 - DNA, 54 bp, Artificial
  Synthetic oligonucleotide
cactacagcaaaatcgctctgatgttagtttggatatagtagatgaaatctgca

SEQ ID NO: 345313 - DNA, 60 bp, Artificial
  Synthetic oligonucleotide
cactacagctaaggctatggaacagatggctggatcgagtgaacaggcagcggaggccat

SEQ ID NO: 345314 - DNA, 57 bp, Artificial
  Synthetic oligonucleotide
cactacaggcggagacgtcggtgacattaagaagggtgccctgtatattgtaattgc

SEQ ID NO: 345315 - DNA, 55 bp, Artificial
  Synthetic oligonucleotide
cactacatacgaaaatcaagcaataaacgccgtgtacaacaagcgaatcgtcagc

SEQ ID NO: 345316 - DNA, 55 bp, Artificial
  Synthetic oligonucleotide
cactacatcatacacaaagcctaacaccacacagataaaataacttatagaatat

SEQ ID NO: 345317 - DNA, 55 bp, Artificial
  Synthetic oligonucleotide
cactacatgcaatgtcccatgtctaccaaatcgggccctcgtcccagctagccgt

SEQ ID NO: 345318 - DNA, 60 bp, Artificial
  Synthetic oligonucleotide
cactacatgcctgtctgcttgagctcaaggagatgccacctggttggtgagtgtcacaag

SEQ ID NO: 345319 - DNA, 55 bp, Artificial
  Synthetic oligonucleotide
cactacatggttcagcttccgttagaacgttcctcactgatgcattgacatgccc

SEQ ID NO: 345320 - DNA, 60 bp, Artificial
  Synthetic oligonucleotide
cactacattatgaacaggaccaggtcttgcatgcaaactagccacagatcggataacatc

SEQ ID NO: 345321 - DNA, 60 bp, Artificial
  Synthetic oligonucleotide
cactacattgtcggtggggagttcgatccaactactagctgcttgcatcagttaatccgc

SEQ ID NO: 345322 - DNA, 60 bp, Artificial
  Synthetic oligonucleotide
cactacatttaatgaaacacagtgcaaatgtgtactatcagacttgccactgtggagcat

SEQ ID NO: 345323 - DNA, 59 bp, Artificial
  Synthetic oligonucleotide
cactacatttggatggcagcgctttaatttgaatatgttttcccctacgcgctgcggac

SEQ ID NO: 345324 - DNA, 59 bp, Artificial
  Synthetic oligonucleotide
cactaccaagccgttggtagcctctacgacgtcgatcccgctgagcagggcaagtgtta

SEQ ID NO: 345325 - DNA, 57 bp, Artificial
  Synthetic oligonucleotide
cactaccacaaacggcacagagatcttcagacctggaggaggagatatgagggacaa

SEQ ID NO: 345326 - DNA, 55 bp, Artificial
  Synthetic oligonucleotide
cactaccacatgtcagcttggggaccctggtgatattatgagtaccccacaaggg

SEQ ID NO: 345327 - DNA, 57 bp, Artificial
  Synthetic oligonucleotide
cactaccagccctcggagatcaccctcctggtcaactactttgagttcgccgcctcc

SEQ ID NO: 345328 - DNA, 58 bp, Artificial
  Synthetic oligonucleotide
cactaccccgagcaggtctataacatggtcgaggcgtggtttttcagcggcccgcgca

SEQ ID NO: 345329 - DNA, 57 bp, Artificial
  Synthetic oligonucleotide
cactacccgcaacgggcacaccacttcgaccacccagtcgagtgtgggagtcacgta

SEQ ID NO: 345330 - DNA, 54 bp, Artificial
  Synthetic oligonucleotide
cactacccgccaagaccatgtggggtagtgccggcctcacaagtgtgcggtcct

SEQ ID NO: 345331 - DNA, 49 bp, Artificial
  Synthetic oligonucleotide
cactaccctaaggtatataaaacttatttcgaaaaagtcgaaaggttaa

SEQ ID NO: 345332 - DNA, 55 bp, Artificial
  Synthetic oligonucleotide
cactacccttaggcacgtctgctgatattcatacggcagcggcagccggtacgga

SEQ ID NO: 345333 - DNA, 60 bp, Artificial
  Synthetic oligonucleotide
cactaccgagagacgcttgtgacgatctacagtaccggtgcgtttcgtcgtcagtcataa

SEQ ID NO: 345334 - DNA, 51 bp, Artificial
  Synthetic oligonucleotide
cactaccgatgacataaacacggaaacattatcaagtcccacgattcaaag

SEQ ID NO: 345335 - DNA, 56 bp, Artificial
  Synthetic oligonucleotide
cactaccgcctcacgtgctttgaaagctgccttccacgacctcgttgggaaagccc

SEQ ID NO: 345336 - DNA, 60 bp, Artificial
  Synthetic oligonucleotide
cactaccgcgttggaggcactaaatgggaggatgagcacggactcaacaatatagacgac

SEQ ID NO: 345337 - DNA, 55 bp, Artificial
  Synthetic oligonucleotide
cactaccgcttatgcgttcttctgctgagagattaattcaagaagacggactaag

SEQ ID NO: 345338 - DNA, 55 bp, Artificial
  Synthetic oligonucleotide
cactaccgtgttggaggcaccaaatgggaggacgagcatggatttgacaatatag

SEQ ID NO: 345339 - DNA, 56 bp, Artificial
  Synthetic oligonucleotide
cactacctagcagattttacatacactcgggaaagggtctggacgaacttaatgaa

SEQ ID NO: 345340 - DNA, 54 bp, Artificial
  Synthetic oligonucleotide
cactacctcatcccaaaaccctcccctttatctacctcacataaaactacctca

SEQ ID NO: 345341 - DNA, 56 bp, Artificial
  Synthetic oligonucleotide
cactacctgaccaactacgagggtcaggagggacacaagtctccgacgaagaactg

SEQ ID NO: 345342 - DNA, 57 bp, Artificial
  Synthetic oligonucleotide
cactacctgcatattctagtcttagacgaaaatggttagattcgttctagataactc

SEQ ID NO: 345343 - DNA, 60 bp, Artificial
  Synthetic oligonucleotide
cactacctgtgcaaatgtggctggagaatccaagttcagtgcaacgcgtcccagtttcat

SEQ ID NO: 345344 - DNA, 50 bp, Artificial
  Synthetic oligonucleotide
cactacgatgctgatatctgactctctgcgtaaaggagagtcctgtctgt

SEQ ID NO: 345345 - DNA, 60 bp, Artificial
  Synthetic oligonucleotide
cactacgcacctcggccgtgtggtattgtgcccgcgtcgcaagtgtgcggtccagtgtat

SEQ ID NO: 345346 - DNA, 54 bp, Artificial
  Synthetic oligonucleotide
cactacgcgcagacggttactcgcttccctggttcgcactctgatcgctgaccc

SEQ ID NO: 345347 - DNA, 59 bp, Artificial
  Synthetic oligonucleotide
cactacgcgcctcgaccgtgtggtatcgtacccgcgtcgcaggtgtgtggtccagtgta

SEQ ID NO: 345348 - DNA, 55 bp, Artificial
  Synthetic oligonucleotide
cactacgtgccagagagcgatgcagctgctcgcgtcaccaccatactcagcagcc

SEQ ID NO: 345349 - DNA, 56 bp, Artificial
  Synthetic oligonucleotide
cactactacgacatgtatcataagaagccaataatatacatgataggatcagcacc

SEQ ID NO: 345350 - DNA, 55 bp, Artificial
  Synthetic oligonucleotide
cactactactaaggtgtctggggtggctcggtgatttcgtcattgaggtgaactc

SEQ ID NO: 345351 - DNA, 55 bp, Artificial
  Synthetic oligonucleotide
cactactacttcaaaactcttggagtcaaagccgagctctgcaataacggcgatg

SEQ ID NO: 345352 - DNA, 56 bp, Artificial
  Synthetic oligonucleotide
cactactagaaagtatcagtggagacgtcctctcacgaggggtaggactttgaagt

SEQ ID NO: 345353 - DNA, 55 bp, Artificial
  Synthetic oligonucleotide
cactactatagaagcaataccaagtgaatatatggggagcgagatatacaacact

SEQ ID NO: 345354 - DNA, 55 bp, Artificial
  Synthetic oligonucleotide
cactactatcctttgcactagggttaagggccactattatatatttgcactactg

SEQ ID NO: 345355 - DNA, 56 bp, Artificial
  Synthetic oligonucleotide
cactactatggttcacgctaagccgcttcgggaaaggatcgttcagtttaatttca

SEQ ID NO: 345356 - DNA, 60 bp, Artificial
  Synthetic oligonucleotide
cactactcaatattagtggtgaagccattacaaatgatttgatttcaggttcactatatt

SEQ ID NO: 345357 - DNA, 50 bp, Artificial
  Synthetic oligonucleotide
cactactcagctcagctagcaacactagatatagatccacaaccaattgc

SEQ ID NO: 345358 - DNA, 60 bp, Artificial
  Synthetic oligonucleotide
cactactcctgtagtgattcgctttgggagttttgactcccctgctgcggcacagattgc

SEQ ID NO: 345359 - DNA, 53 bp, Artificial
  Synthetic oligonucleotide
cactactctctcatctgtgaggggcaaatgcgttctatcatgagccacagcca

SEQ ID NO: 345360 - DNA, 57 bp, Artificial
  Synthetic oligonucleotide
cactactgacctcttgaacaaagagtatggagaaacgaaactggtggacattgatac

SEQ ID NO: 345361 - DNA, 55 bp, Artificial
  Synthetic oligonucleotide
cactactggtgtttcatcagagtggagtcacaccatagttatgactgatgctaga

SEQ ID NO: 345362 - DNA, 55 bp, Artificial
  Synthetic oligonucleotide
cactactggttcagaatgctaacccagattgcaagttagtacttaagggcttggg

SEQ ID NO: 345363 - DNA, 60 bp, Artificial
  Synthetic oligonucleotide
cactactgtatatcgtcatatgcctaccactcgtgatggcatcatgacgtcataaaacaa

SEQ ID NO: 345364 - DNA, 59 bp, Artificial
  Synthetic oligonucleotide
cactactgttgtagcggggcgtttggctacgatggttactgatccaatgacgactaaga

SEQ ID NO: 345365 - DNA, 55 bp, Artificial
  Synthetic oligonucleotide
cactacttagggttgggataatgggtaggatcatagttcataagttagcattgtg

SEQ ID NO: 345366 - DNA, 60 bp, Artificial
  Synthetic oligonucleotide
cactacttatatcaagatagaagtagagggacctattgtcgactcgttgaatggaacaga

SEQ ID NO: 345367 - DNA, 54 bp, Artificial
  Synthetic oligonucleotide
cactacttcactataagtagagaacaataaaggccttgagtttacggaatgttt

SEQ ID NO: 345368 - DNA, 51 bp, Artificial
  Synthetic oligonucleotide
cactagaaatagtcctgcgggaaattggttattcagaagatgcagtttctc

SEQ ID NO: 345369 - DNA, 59 bp, Artificial
  Synthetic oligonucleotide
cactagaaatgattggtacgaagccacgtgcagttctgttctaaacgacaccacaagag

SEQ ID NO: 345370 - DNA, 55 bp, Artificial
  Synthetic oligonucleotide
cactagaagtggtagaacctccttacctaaatgttggatggtgtcaaatgggtcc

SEQ ID NO: 345371 - DNA, 60 bp, Artificial
  Synthetic oligonucleotide
cactagagcacttaatgaaccattatattagagcagatagtaatgtagccgtgctactag

SEQ ID NO: 345372 - DNA, 55 bp, Artificial
  Synthetic oligonucleotide
cactagagccaacagccccaccggcagacagcttcaagttcgaggagacaacccc

SEQ ID NO: 345373 - DNA, 60 bp, Artificial
  Synthetic oligonucleotide
cactagattctgcagcattttactatagagtgtagatattatgtagattagagttgtatg

SEQ ID NO: 345374 - DNA, 55 bp, Artificial
  Synthetic oligonucleotide
cactagcaagtaccccaatatgtatgttcctgtcggtgctgtgactgaacaggga

SEQ ID NO: 345375 - DNA, 60 bp, Artificial
  Synthetic oligonucleotide
cactagcacagtgtttctgcagctcattggaatcccaacccatcgacacctaattggcga

SEQ ID NO: 345376 - DNA, 60 bp, Artificial
  Synthetic oligonucleotide
cactagcacctgggtgctagtaggcggagtccttgcagctctggccgcgtactgcttgac

SEQ ID NO: 345377 - DNA, 60 bp, Artificial
  Synthetic oligonucleotide
cactagcactcgcaacaatagctcctcaggccagcacatgcgcacgtggtacatgagaga

SEQ ID NO: 345378 - DNA, 55 bp, Artificial
  Synthetic oligonucleotide
cactagcatcagaccatagcgaacattgatcagcatttccaagatattgtttgaa

SEQ ID NO: 345379 - DNA, 56 bp, Artificial
  Synthetic oligonucleotide
cactagcatcttctattcgaccaggttcaagagtcactcatgggtcactcaattct

SEQ ID NO: 345380 - DNA, 55 bp, Artificial
  Synthetic oligonucleotide
cactagcctaccaacagccttaccccacctgcagaccatagaccttactgacgcc

SEQ ID NO: 345381 - DNA, 55 bp, Artificial
  Synthetic oligonucleotide
cactagcgagaagtatttgtgagaagcttgaacagtctgggcttccggttggagg

SEQ ID NO: 345382 - DNA, 59 bp, Artificial
  Synthetic oligonucleotide
cactagcgaggagtatttgtgaaaaacttgaacaatcaggactgccagttggaggcaat

SEQ ID NO: 345383 - DNA, 58 bp, Artificial
  Synthetic oligonucleotide
cactagcgcccatcacgagtaccaacgttgtgtgccaaacgggcttggtttcaagata

SEQ ID NO: 345384 - DNA, 60 bp, Artificial
  Synthetic oligonucleotide
cactagcgcgagctccatactcaacgcctagccagcgggagtaagttctagtttgttcac

SEQ ID NO: 345385 - DNA, 51 bp, Artificial
  Synthetic oligonucleotide
cactagcggtcatccagagtgtatcactcatagcagcagtggccgggacca

SEQ ID NO: 345386 - DNA, 51 bp, Artificial
  Synthetic oligonucleotide
cactagcggtcttggcgggaagcctctacttgggcctcgggcgggtgaaaa

SEQ ID NO: 345387 - DNA, 53 bp, Artificial
  Synthetic oligonucleotide
cactagctgtcagaatcttcctagtgagtgagctcaagagaggtcgtaatact

SEQ ID NO: 345388 - DNA, 55 bp, Artificial
  Synthetic oligonucleotide
cactagctttcgcattggttggttaccattcaccattaaaacttaggtagtcgcc

SEQ ID NO: 345389 - DNA, 55 bp, Artificial
  Synthetic oligonucleotide
cactagctttgtgagccatttgaaaccgttgagctttaacgtgaagtgcgaaacg

SEQ ID NO: 345390 - DNA, 55 bp, Artificial
  Synthetic oligonucleotide
cactagctttgtgtttgaggatgacttggagcccttcaatttagtcaggacctca

SEQ ID NO: 345391 - DNA, 55 bp, Artificial
  Synthetic oligonucleotide
cactaggaaaattcgcagtgaagagttgtctttcacagttgtatcaaacggagcc

SEQ ID NO: 345392 - DNA, 55 bp, Artificial
  Synthetic oligonucleotide
cactaggacaaaattaacaccagactgggtcattgaggaggaatgtgaactggat

SEQ ID NO: 345393 - DNA, 59 bp, Artificial
  Synthetic oligonucleotide
cactaggccttgcaaatctaatggttctcctcccactgcaaacatgtggtaagttgtac

SEQ ID NO: 345394 - DNA, 55 bp, Artificial
  Synthetic oligonucleotide
cactagggactttctttgcgatgtagccatcaacacggcgtatgccccatagttc

SEQ ID NO: 345395 - DNA, 56 bp, Artificial
  Synthetic oligonucleotide
cactagggaggtccagggggagtggcctgggcgggactgggagtggccagccctca

SEQ ID NO: 345396 - DNA, 60 bp, Artificial
  Synthetic oligonucleotide
cactaggggaggttttgatgacccctctgacagtgcacccgtgcatgaattttccattca

SEQ ID NO: 345397 - DNA, 55 bp, Artificial
  Synthetic oligonucleotide
cactaggtgaatcaaactttaaagcgtacccctcaacaatgttgtctgttactgt

SEQ ID NO: 345398 - DNA, 60 bp, Artificial
  Synthetic oligonucleotide
cactaggttcagcacgctcaccattcacgacaccgaaaagtacgcctctcagccagaact

SEQ ID NO: 345399 - DNA, 54 bp, Artificial
  Synthetic oligonucleotide
cactaggttcaggaagttactacaagatcccgagacctattcagaacttgacaa

SEQ ID NO: 345400 - DNA, 55 bp, Artificial
  Synthetic oligonucleotide
cactagtagcggacaggttgcctggttcggtaagttccagtccctgacgctcagt

SEQ ID NO: 345401 - DNA, 55 bp, Artificial
  Synthetic oligonucleotide
cactagtgcagggtatccatatgttagtctggggatcaagaaaagagcaatacta

SEQ ID NO: 345402 - DNA, 55 bp, Artificial
  Synthetic oligonucleotide
cactagtgctacgaaattcggttcgcaattgcatggtacagtgtgtgatcatgtg

SEQ ID NO: 345403 - DNA, 55 bp, Artificial
  Synthetic oligonucleotide
cactagttccgtcatgtcctcatgcttgaactcatcgaacgtggtgttcctgtac

SEQ ID NO: 345404 - DNA, 55 bp, Artificial
  Synthetic oligonucleotide
cactagttgccaatcaacaggaacccaccatattagaagttggtgactgctgttc

SEQ ID NO: 345405 - DNA, 60 bp, Artificial
  Synthetic oligonucleotide
cactataagcacacagactgtccctcaagacgctgtctcacgtagtcagcgccgggggcg

SEQ ID NO: 345406 - DNA, 55 bp, Artificial
  Synthetic oligonucleotide
cactataataatggagtcccgataggaaaacaactgaaccttggcggatcagtac

SEQ ID NO: 345407 - DNA, 50 bp, Artificial
  Synthetic oligonucleotide
cactatacaacaattttgaacgtttacgagggatcagatcccttcgtttt

SEQ ID NO: 345408 - DNA, 60 bp, Artificial
  Synthetic oligonucleotide
cactatacatgattgtaccaattcatgcatgcaatatgatgaaaagctgtttgattgcat

SEQ ID NO: 345409 - DNA, 59 bp, Artificial
  Synthetic oligonucleotide
cactatagatgtgacagactccgaaatgaacaaactctttgaacgagttaggcgacagt

SEQ ID NO: 345410 - DNA, 60 bp, Artificial
  Synthetic oligonucleotide
cactatagatgtgacagactccgagatgaataaactctttgaaagagtcagacgccaact

SEQ ID NO: 345411 - DNA, 55 bp, Artificial
  Synthetic oligonucleotide
cactatagtagcctcaaccgtaaacaaatatggtgtaccaaggcataatgcaaaa

SEQ ID NO: 345412 - DNA, 55 bp, Artificial
  Synthetic oligonucleotide
cactatagttgtgccttacatcaactgcacacccatggacagcatgttgcgacac

SEQ ID NO: 345413 - DNA, 60 bp, Artificial
  Synthetic oligonucleotide
cactatatcagaatgtcgggacttatgtttcagtaggaacatcgacactgaacaaaagat

SEQ ID NO: 345414 - DNA, 50 bp, Artificial
  Synthetic oligonucleotide
cactatatccacgagcactaaaaccaagtttcgcgataaaggttgtatta

SEQ ID NO: 345415 - DNA, 58 bp, Artificial
  Synthetic oligonucleotide
cactatattgggaaatgccccaaatacataccatcagggagtctaaaactggcaatag

SEQ ID NO: 345416 - DNA, 60 bp, Artificial
  Synthetic oligonucleotide
cactatattgtgatccaactcgaaagccgcatcaacagaacacacctcgtaccatttcct

SEQ ID NO: 345417 - DNA, 60 bp, Artificial
  Synthetic oligonucleotide
cactatcaatttacagctgcattgcaagcagtgttgtattagtaggactcatacttgcat

SEQ ID NO: 345418 - DNA, 60 bp, Artificial
  Synthetic oligonucleotide
cactatcacatgcaaaagaagacgactgaagtgtatgatccttcaagtgtaagaattttc

SEQ ID NO: 345419 - DNA, 54 bp, Artificial
  Synthetic oligonucleotide
cactatcacttatgaatgtccagtcctagctgccggaaatgaccctgaagacat

SEQ ID NO: 345420 - DNA, 55 bp, Artificial
  Synthetic oligonucleotide
cactatcagcgcgcaattttgatactattagactctcatttcagctcgttagacc

SEQ ID NO: 345421 - DNA, 60 bp, Artificial
  Synthetic oligonucleotide
cactatcatatgggtatatggacctactggcggagaaggaaaatccacgtttgctcgtga

SEQ ID NO: 345422 - DNA, 60 bp, Artificial
  Synthetic oligonucleotide
cactatcatcgctacgacattggagcatcgatttaaagagataccagatgagcaactagc

SEQ ID NO: 345423 - DNA, 58 bp, Artificial
  Synthetic oligonucleotide
cactatcgaactaagcgaaatcagaacgtaagttgccggaatagtgtttagcaccgca

SEQ ID NO: 345424 - DNA, 55 bp, Artificial
  Synthetic oligonucleotide
cactatcgaagggctgatatacggtaatccctcttgtgatttgctactgggaggg

SEQ ID NO: 345425 - DNA, 60 bp, Artificial
  Synthetic oligonucleotide
cactatcgataaagtatcggcagaggctgtctcgctttgagatttctggttcagtagtaa

SEQ ID NO: 345426 - DNA, 60 bp, Artificial
  Synthetic oligonucleotide
cactatcgcaaccagggctggcgctcagttgagacctctggtgtcgctgaggaggaggct

SEQ ID NO: 345427 - DNA, 60 bp, Artificial
  Synthetic oligonucleotide
cactatcgcgactagtcatctcatcttgagctatcttgaactgtatatctatcgataatc

SEQ ID NO: 345428 - DNA, 60 bp, Artificial
  Synthetic oligonucleotide
cactatcggcatcaggatattaaaaccgcgctaactgcgagttctcatgggaagtgtgcg

SEQ ID NO: 345429 - DNA, 60 bp, Artificial
  Synthetic oligonucleotide
cactatcggtacgtggcatctgatgaatatacagctggcggttttattacttgctggtat

SEQ ID NO: 345430 - DNA, 55 bp, Artificial
  Synthetic oligonucleotide
cactatctcggaccccggcagtcatgtgtatacctccactcctagtggctctatg

SEQ ID NO: 345431 - DNA, 56 bp, Artificial
  Synthetic oligonucleotide
cactatctgttccgagaccttcccaggggtacacttctgtcccgagggataagcca

SEQ ID NO: 345432 - DNA, 60 bp, Artificial
  Synthetic oligonucleotide
cactatcttggaattaacctctgacaagggaatgtctgggcgcacaccttcaacacacag

SEQ ID NO: 345433 - DNA, 59 bp, Artificial
  Synthetic oligonucleotide
cactatctttgggactccatgcacatttgtcaaggtaatggcccaccacttaccattac

SEQ ID NO: 345434 - DNA, 60 bp, Artificial
  Synthetic oligonucleotide
cactatgaaagcagtaatccaagagtgagttcagaggtacacatcccagtagggcaagct

SEQ ID NO: 345435 - DNA, 60 bp, Artificial
  Synthetic oligonucleotide
cactatgaagagcggagtggacgtgtattataaaccatctgagccgtgcgacacgctttt

SEQ ID NO: 345436 - DNA, 60 bp, Artificial
  Synthetic oligonucleotide
cactatgaatacaagacgctatgacaaatgtacgggtatctgattaggtatcctaacgat

SEQ ID NO: 345437 - DNA, 55 bp, Artificial
  Synthetic oligonucleotide
cactatgatagcattcatccaaaagtaagttcggaagtacacatcccgctgggag

SEQ ID NO: 345438 - DNA, 60 bp, Artificial
  Synthetic oligonucleotide
cactatgcttgagatggtgcggtgcatcattactctgtgctatgccgagaaggttcactt

SEQ ID NO: 345439 - DNA, 60 bp, Artificial
  Synthetic oligonucleotide
cactatggagcaagacaaatgacgctggatcagacagagtgatggtgtcttctctagctg

SEQ ID NO: 345440 - DNA, 60 bp, Artificial
  Synthetic oligonucleotide
cactatggccaactatgcaaatcattccatcataacatgtccacccaggccctacacgat

SEQ ID NO: 345441 - DNA, 60 bp, Artificial
  Synthetic oligonucleotide
cactatgggcgcagcgtcagtaacgctgacggtacaggccagacaattgttgtctggtat

SEQ ID NO: 345442 - DNA, 58 bp, Artificial
  Synthetic oligonucleotide
cactatggggccgcggaatcagactcagcttacttgggagaggttttagttgactaca

SEQ ID NO: 345443 - DNA, 59 bp, Artificial
  Synthetic oligonucleotide
cactatgtcctcaaccacaccttctggtagtgttgggtcaacaagaccagcaaagctgg

SEQ ID NO: 345444 - DNA, 60 bp, Artificial
  Synthetic oligonucleotide
cactatgtggggagcggtgacggacgtaccgtgatgtgttttgcaaagcgatcacctgaa

SEQ ID NO: 345445 - DNA, 51 bp, Artificial
  Synthetic oligonucleotide
cactatgttgagatgcatcaaccagggctagttgccgaccactctctcctt

SEQ ID NO: 345446 - DNA, 55 bp, Artificial
  Synthetic oligonucleotide
cactattagaagcacactatgataacattgtgaaggtgagttctactacctcctg

SEQ ID NO: 345447 - DNA, 57 bp, Artificial
  Synthetic oligonucleotide
cactattagttggtctccttcgctcccaacttatgtggtacctccaggtgattatac

SEQ ID NO: 345448 - DNA, 56 bp, Artificial
  Synthetic oligonucleotide
cactattatactaatgattgttgtggaatattgcaaggctgtcatggagagtgaag

SEQ ID NO: 345449 - DNA, 55 bp, Artificial
  Synthetic oligonucleotide
cactattcaacacagtagcaactctctattgtgtacatgcaaggatagatgtacg

SEQ ID NO: 345450 - DNA, 60 bp, Artificial
  Synthetic oligonucleotide
cactattcacactcgcgcgaggcttccccttcgtcgatgttggagtgtcggctctcctgc

SEQ ID NO: 345451 - DNA, 60 bp, Artificial
  Synthetic oligonucleotide
cactattcacagcaagctcatggtcctacatagtggaaacgcctaattcagacaatggga

SEQ ID NO: 345452 - DNA, 50 bp, Artificial
  Synthetic oligonucleotide
cactattcagaatcacgcaggtcgaagttgcaaagattggctaatcgatc

SEQ ID NO: 345453 - DNA, 60 bp, Artificial
  Synthetic oligonucleotide
cactattcagcagtattctaagacattctatgtgctcccactccgtgggaagctatcctt

SEQ ID NO: 345454 - DNA, 51 bp, Artificial
  Synthetic oligonucleotide
cactattcatgtgcaatgtaactctagtaagttccaccaaggcttattgat

SEQ ID NO: 345455 - DNA, 55 bp, Artificial
  Synthetic oligonucleotide
cactattcctaaaacaaatgcgattccgctcaaagctcgccatacagttattccg

SEQ ID NO: 345456 - DNA, 60 bp, Artificial
  Synthetic oligonucleotide
cactattcctgatagggatggataattgtctttcgatgatgcggttgtcattatgttaat

SEQ ID NO: 345457 - DNA, 55 bp, Artificial
  Synthetic oligonucleotide
cactattctagctactgcttcacaaccagaccaggcccaatatgccagtaatctg

SEQ ID NO: 345458 - DNA, 60 bp, Artificial
  Synthetic oligonucleotide
cactattctgacgagaccggtgagcatatgatgcctgactatgttaggggtatttctaag

SEQ ID NO: 345459 - DNA, 60 bp, Artificial
  Synthetic oligonucleotide
cactattgacatgaccgtcaatgctcactgtcatgggagacgcactgattacataatgtc

SEQ ID NO: 345460 - DNA, 55 bp, Artificial
  Synthetic oligonucleotide
cactattgagaatcactctggtcgctcgaacttggattggaagatagacacaggc

SEQ ID NO: 345461 - DNA, 52 bp, Artificial
  Synthetic oligonucleotide
cactattgattggaaagctcgttatgatcaattggaaaaaagatttgagtca

SEQ ID NO: 345462 - DNA, 55 bp, Artificial
  Synthetic oligonucleotide
cactattgcgtatgcttttgatcaagattgatagtatcacttcactttgcgatgc

SEQ ID NO: 345463 - DNA, 54 bp, Artificial
  Synthetic oligonucleotide
cactattgctggtactgtataattcccagaaatattaaacgtcttttgattaac

SEQ ID NO: 345464 - DNA, 59 bp, Artificial
  Synthetic oligonucleotide
cactattgctttgggaacttagattgcttgtaatatggaaactaaatctagacgcaagc

SEQ ID NO: 345465 - DNA, 52 bp, Artificial
  Synthetic oligonucleotide
cactattggagaatgccccaaatacataaagagcaccaagctaagaatggca

SEQ ID NO: 345466 - DNA, 58 bp, Artificial
  Synthetic oligonucleotide
cactattggagaatgtcccaaatacgtcaagaccacaaaactaagaatggcaacagga

SEQ ID NO: 345467 - DNA, 55 bp, Artificial
  Synthetic oligonucleotide
cactattgggatgatataaggtttagatattgtgcaccaccgggttatgccttgc

SEQ ID NO: 345468 - DNA, 59 bp, Artificial
  Synthetic oligonucleotide
cactatttgggtcttatgacaatcggctggagtttgttgagaatgtagacttagacagg

SEQ ID NO: 345469 - DNA, 55 bp, Artificial
  Synthetic oligonucleotide
cactattttagctgatgttggctctgacggagtactagtaaatgactggggtctt

SEQ ID NO: 345470 - DNA, 56 bp, Artificial
  Synthetic oligonucleotide
cactcaaaaagcgaaacgcggacgttccagaaatgggagacgcgattaacatgaag

SEQ ID NO: 345471 - DNA, 55 bp, Artificial
  Synthetic oligonucleotide
cactcaaaacaactagtggacttgttcaccaagtcatggagaaaactagggaggc

SEQ ID NO: 345472 - DNA, 55 bp, Artificial
  Synthetic oligonucleotide
cactcaaaacagcgagagagctgcactccacgcttcatataggggctcgagcact

SEQ ID NO: 345473 - DNA, 55 bp, Artificial
  Synthetic oligonucleotide
cactcaaaactggagaccgtacgatgggacttataccagtcccttggatgacgac

SEQ ID NO: 345474 - DNA, 60 bp, Artificial
  Synthetic oligonucleotide
cactcaaacgaaagatcgtagctgggagtcagagcgcgttcacgacagtatgtgcaggtg

SEQ ID NO: 345475 - DNA, 54 bp, Artificial
  Synthetic oligonucleotide
cactcaaagagaaactaatgtccattgctcttctggccgttcactctgggccag

SEQ ID NO: 345476 - DNA, 55 bp, Artificial
  Synthetic oligonucleotide
cactcaacaggtaaggctagcattgaaggcggtagatattatgaacacgccccga

SEQ ID NO: 345477 - DNA, 53 bp, Artificial
  Synthetic oligonucleotide
cactcaacgaaaccatatttggttgacttagtgaatgcagagaccggagaaaa

SEQ ID NO: 345478 - DNA, 60 bp, Artificial
  Synthetic oligonucleotide
cactcaagaccaaactgcacaatataccaacgatctgacagcgggtcttcacgtcctctg

SEQ ID NO: 345479 - DNA, 55 bp, Artificial
  Synthetic oligonucleotide
cactcaagactgacgtgatgtcaattcaacgaacaatacacataattgatgcgct

SEQ ID NO: 345480 - DNA, 59 bp, Artificial
  Synthetic oligonucleotide
cactcaagcagccatcgaccaaatcaatgggaaactgaatagggtaatcgagaaaacga

SEQ ID NO: 345481 - DNA, 60 bp, Artificial
  Synthetic oligonucleotide
cactcaagcagccatcgaccaaatcaatgggaaattgaacagggtcattgagaagacaaa

SEQ ID NO: 345482 - DNA, 51 bp, Artificial
  Synthetic oligonucleotide
cactcaaggggaggctcccttggggacctggtggcctgaattatatgtctg

SEQ ID NO: 345483 - DNA, 59 bp, Artificial
  Synthetic oligonucleotide
cactcaaggtaggaatttatcagactttacaccaagaagtgatatggagtatgattttc

SEQ ID NO: 345484 - DNA, 60 bp, Artificial
  Synthetic oligonucleotide
cactcaaggtccactcgtctcctcctgagcgctctcttcgcttccctgtgttgaactttg

SEQ ID NO: 345485 - DNA, 60 bp, Artificial
  Synthetic oligonucleotide
cactcaagtgttctggaccatatgccatattcgaacgattaccatgtgagaaggattatc

SEQ ID NO: 345486 - DNA, 60 bp, Artificial
  Synthetic oligonucleotide
cactcaagtttacactcatgatgatacaaaagatagttatgagaacgcgtttcttatctc

SEQ ID NO: 345487 - DNA, 60 bp, Artificial
  Synthetic oligonucleotide
cactcaatccgtgaacagttctggcattcttcgggatgtcagttttgctagtggatttcg

SEQ ID NO: 345488 - DNA, 55 bp, Artificial
  Synthetic oligonucleotide
cactcaatggcacaggttgattcaggtttgactgttcatttagcccctcttagag

SEQ ID NO: 345489 - DNA, 55 bp, Artificial
  Synthetic oligonucleotide
cactcaattggaaaagttgctgtagaaggtggaagatattacgaacatgcaccaa

SEQ ID NO: 345490 - DNA, 52 bp, Artificial
  Synthetic oligonucleotide
cactcacaactgacggtaacagcattgctaacgcattcgtctcctacttggc

SEQ ID NO: 345491 - DNA, 55 bp, Artificial
  Synthetic oligonucleotide
cactcacaagccttctcgtatacgttggatcaccttttccgactatataacgggg

SEQ ID NO: 345492 - DNA, 54 bp, Artificial
  Synthetic oligonucleotide
cactcacaccccacgggttgaggtgcgcatttgtcgcgtcacgcgtatgtgggg

SEQ ID NO: 345493 - DNA, 55 bp, Artificial
  Synthetic oligonucleotide
cactcacagacagccgctcttcgctcatctccgtcggagaggggagtcacaagtt

SEQ ID NO: 345494 - DNA, 55 bp, Artificial
  Synthetic oligonucleotide
cactcacagctttaagggattccttacaatatattccactagacactttgcaaac

SEQ ID NO: 345495 - DNA, 56 bp, Artificial
  Synthetic oligonucleotide
cactcacatggattgggacaattgtgtgtgggaagactacaacagggatctattgg

SEQ ID NO: 345496 - DNA, 55 bp, Artificial
  Synthetic oligonucleotide
cactcacattgactatggtacaatcaaggttcaattacgtgattatcagcgagat

SEQ ID NO: 345497 - DNA, 60 bp, Artificial
  Synthetic oligonucleotide
cactcaccaatccccgggtccgagcccaacttgagctccacattgcctaccagcgcatag

SEQ ID NO: 345498 - DNA, 58 bp, Artificial
  Synthetic oligonucleotide
cactcacgtcaagttctaaatatacatacaggcggaaactcacaaaccctgtggatac

SEQ ID NO: 345499 - DNA, 55 bp, Artificial
  Synthetic oligonucleotide
cactcacgtccgtgcacacgcgggacccgatggactttcgttcacccacctacag

SEQ ID NO: 345500 - DNA, 55 bp, Artificial
  Synthetic oligonucleotide
cactcacgtcgtctacaatcatcaggaagcagcgaaatatgagaatcatactgag

SEQ ID NO: 345501 - DNA, 60 bp, Artificial
  Synthetic oligonucleotide
cactcacgtgagttatgcctgctggcaagaagaggagtctccgacgacgaaacgtcgcca

SEQ ID NO: 345502 - DNA, 55 bp, Artificial
  Synthetic oligonucleotide
cactcactaccggcgtaatttgtggttatgctattgcgttgagagtgttgtgggc

SEQ ID NO: 345503 - DNA, 52 bp, Artificial
  Synthetic oligonucleotide
cactcactcaagaggaatacacacgcaaggcaacctactattctgacgcctt

SEQ ID NO: 345504 - DNA, 55 bp, Artificial
  Synthetic oligonucleotide
cactcactctgctggaggcaacggagttgggtactgctcatgtgtatccaggtcc

SEQ ID NO: 345505 - DNA, 60 bp, Artificial
  Synthetic oligonucleotide
cactcacttcaggggcactagcaccaatggtgtgtacaactactactcaagtggcatagt

SEQ ID NO: 345506 - DNA, 60 bp, Artificial
  Synthetic oligonucleotide
cactcactttagctacttcagtaacacacccagaagaagagtgaccataacacattatcc

SEQ ID NO: 345507 - DNA, 55 bp, Artificial
  Synthetic oligonucleotide
cactcagaaggatcgtgatgattgggttcagagatgctccaggttagaacaggag

SEQ ID NO: 345508 - DNA, 55 bp, Artificial
  Synthetic oligonucleotide
cactcagaatagagacaaacttgattctcatgtgatgtcagtaagtaatgccaag

SEQ ID NO: 345509 - DNA, 59 bp, Artificial
  Synthetic oligonucleotide
cactcagatccgcaatacttaaggactgaatttaatttacccaagatggtggcagaaga

SEQ ID NO: 345510 - DNA, 54 bp, Artificial
  Synthetic oligonucleotide
cactcagatcctctctagccttaccatcactcaactgctgaagcggcttcacca

SEQ ID NO: 345511 - DNA, 57 bp, Artificial
  Synthetic oligonucleotide
cactcagatgttgggctctctcaccataaccagtctgcttaggaggctacatcagtg

SEQ ID NO: 345512 - DNA, 60 bp, Artificial
  Synthetic oligonucleotide
cactcagcactgggttgtagctgtgtttggaccgaacagtgacattttagatggcactgg

SEQ ID NO: 345513 - DNA, 50 bp, Artificial
  Synthetic oligonucleotide
cactcagcccttgctgttcttgaagatactgttgactaccccgctcgtgc

SEQ ID NO: 345514 - DNA, 60 bp, Artificial
  Synthetic oligonucleotide
cactcagcgcatgttgctctcagcatcaacaaatcccctcctacagggtacaagggtcga

SEQ ID NO: 345515 - DNA, 60 bp, Artificial
  Synthetic oligonucleotide
cactcagctactcaaccggtgcacttgccagttgcatgggtctcatatacaacaggatgg

SEQ ID NO: 345516 - DNA, 55 bp, Artificial
  Synthetic oligonucleotide
cactcagctcttacagcaggcacccagtgcgatctcggggcgcccgctatcctta

SEQ ID NO: 345517 - DNA, 55 bp, Artificial
  Synthetic oligonucleotide
cactcaggaggatcataaacgaaccgtccgcagctgcgatatactttgtttcaaa

SEQ ID NO: 345518 - DNA, 60 bp, Artificial
  Synthetic oligonucleotide
cactcaggcatacactccagcatatatctatcagctggcaggagctactttgaaaccacc

SEQ ID NO: 345519 - DNA, 55 bp, Artificial
  Synthetic oligonucleotide
cactcaggccgctcttgcagggactggttgattgacattggactgatcttctcaa

SEQ ID NO: 345520 - DNA, 60 bp, Artificial
  Synthetic oligonucleotide
cactcaggctgataaatttgagttagaggagaagggctataagaatgtgaacaccgttca

SEQ ID NO: 345521 - DNA, 55 bp, Artificial
  Synthetic oligonucleotide
cactcagtggcagatttacgacaaggcatcacgcctacgcgaatcacttcgcgga

SEQ ID NO: 345522 - DNA, 56 bp, Artificial
  Synthetic oligonucleotide
cactcagttcattgctcccggaggcaccatcatccttgaatcctgccatggcgcac

SEQ ID NO: 345523 - DNA, 59 bp, Artificial
  Synthetic oligonucleotide
cactcagttggtgctgtctaatggagcagcgcctgtagttctaagccttgtgtcgaagg

SEQ ID NO: 345524 - DNA, 60 bp, Artificial
  Synthetic oligonucleotide
cactcatacaaggtatccagtccatatctggattagtaatagcaatacaaggtcttccgc

SEQ ID NO: 345525 - DNA, 60 bp, Artificial
  Synthetic oligonucleotide
cactcatagactggttcttcctgcctatgacgcattggttgaatcgctacgtaacagaac

SEQ ID NO: 345526 - DNA, 59 bp, Artificial
  Synthetic oligonucleotide
cactcatatctggtatgtggttattaacagttataccaaacgacatgtttcttcgtgaa

SEQ ID NO: 345527 - DNA, 58 bp, Artificial
  Synthetic oligonucleotide
cactcatcctgaggggatcagtggcccacaagtcctacatgcctgctggtgtgtacgg

SEQ ID NO: 345528 - DNA, 59 bp, Artificial
  Synthetic oligonucleotide
cactcatcgatatttctcacttcgaacgctggttaccgggcgccccattcgcgtcagta

SEQ ID NO: 345529 - DNA, 59 bp, Artificial
  Synthetic oligonucleotide
cactcatcgtatattttgacgtatgcagttacatcgtttacgcaatagtcagactgtag

SEQ ID NO: 345530 - DNA, 60 bp, Artificial
  Synthetic oligonucleotide
cactcatgaggcgaggtcaatcctggcacattgttagacgtcgtatagtgcagatggttt

SEQ ID NO: 345531 - DNA, 60 bp, Artificial
  Synthetic oligonucleotide
cactcatgatgaagagccaggaaaatgggcaggtggcaacgccactgacaataagagcat

SEQ ID NO: 345532 - DNA, 52 bp, Artificial
  Synthetic oligonucleotide
cactcatggaatgggacatcaggcctttgaccatctgggccacatatgtggt

SEQ ID NO: 345533 - DNA, 60 bp, Artificial
  Synthetic oligonucleotide
cactcatggagatgatagtctagctgccgtcagtaccgctcaatacataccgctcgagaa

SEQ ID NO: 345534 - DNA, 55 bp, Artificial
  Synthetic oligonucleotide
cactcatggcggccatattgggcttttcaaatgtggcagccacttcattagcctg

SEQ ID NO: 345535 - DNA, 51 bp, Artificial
  Synthetic oligonucleotide
cactcatgttgctacacatagtatccactagttttgttgtcagttgcatag

SEQ ID NO: 345536 - DNA, 55 bp, Artificial
  Synthetic oligonucleotide
cactcattataggacagagggaacttttattgaatttacgcgatcgaatgcagtt

SEQ ID NO: 345537 - DNA, 60 bp, Artificial
  Synthetic oligonucleotide
cactcattctgagagggtcagtggctcacaagtcctgtctgcctgcttgtgtgtatggac

SEQ ID NO: 345538 - DNA, 55 bp, Artificial
  Synthetic oligonucleotide
cactcattgcaaacgttatagcatatgattgtattgacccagtctggaaccttgc

SEQ ID NO: 345539 - DNA, 50 bp, Artificial
  Synthetic oligonucleotide
cactcatttcttattacgcgtcactcgaaatgaggctacaaaagctctta

SEQ ID NO: 345540 - DNA, 55 bp, Artificial
  Synthetic oligonucleotide
cactccaactcgtgtggcactcgtgggacttcagaagaggcctctttggccaggc

SEQ ID NO: 345541 - DNA, 58 bp, Artificial
  Synthetic oligonucleotide
cactccaatcacctttaaaacacttcagttgatacgtgtagtattactaatcaggcaa

SEQ ID NO: 345542 - DNA, 60 bp, Artificial
  Synthetic oligonucleotide
cactccaatctgaatgatgccacctatcagagaacaagagcccttgttcgcactgggatg

SEQ ID NO: 345543 - DNA, 54 bp, Artificial
  Synthetic oligonucleotide
cactccaatctttccaccgttgagagacactcatcctcaggccatgcagtggaa

SEQ ID NO: 345544 - DNA, 60 bp, Artificial
  Synthetic oligonucleotide
cactccacagtatgaaattaacctggctgagataaggaaagcggtggagcgatcatctaa

SEQ ID NO: 345545 - DNA, 55 bp, Artificial
  Synthetic oligonucleotide
cactccaccatcaaggcagatactgtaatactgatttccaatgcccagcaacgct

SEQ ID NO: 345546 - DNA, 59 bp, Artificial
  Synthetic oligonucleotide
cactccagagggatcgttggtggtttatgacgaggcccagcaagcgcacttgtacccta

SEQ ID NO: 345547 - DNA, 60 bp, Artificial
  Synthetic oligonucleotide
cactccagagttacataagaggagattgcaacgtagcttaggatctcatccaatctacat

SEQ ID NO: 345548 - DNA, 55 bp, Artificial
  Synthetic oligonucleotide
cactccagatacaaataccactatgatgctgattactcccggtgggactcaacac

SEQ ID NO: 345549 - DNA, 60 bp, Artificial
  Synthetic oligonucleotide
cactccagatatacagggtgcagacccaacggaaatgtcaagagatttggttcacttgag

SEQ ID NO: 345550 - DNA, 55 bp, Artificial
  Synthetic oligonucleotide
cactccagctgacaaatcaagtgaattcaagaaattggactatagtagtgtgacc

SEQ ID NO: 345551 - DNA, 59 bp, Artificial
  Synthetic oligonucleotide
cactccagtaaattcctggttggggaacataatcatgtacgctcctgcaatctgggtac

SEQ ID NO: 345552 - DNA, 55 bp, Artificial
  Synthetic oligonucleotide
cactccagtacgtggagcattcgcgagctgactgtatcgttcgatgggcaccgag

SEQ ID NO: 345553 - DNA, 56 bp, Artificial
  Synthetic oligonucleotide
cactccatatagaagtccagaggcgccacggctccagcattgagctgcgcatcact

SEQ ID NO: 345554 - DNA, 55 bp, Artificial
  Synthetic oligonucleotide
cactccattcatactctccaagtgagatcaatagggtgagtagttgcctcaggaa

SEQ ID NO: 345555 - DNA, 54 bp, Artificial
  Synthetic oligonucleotide
cactcccaagctagacaagatatccttgatttgtgggtttaccacacacaaggg

SEQ ID NO: 345556 - DNA, 52 bp, Artificial
  Synthetic oligonucleotide
cactcccagaagagacaggagatccttgatctgtgggtttaccacacacaag

SEQ ID NO: 345557 - DNA, 60 bp, Artificial
  Synthetic oligonucleotide
cactcccatcagacatgggagtgtgacttactatggcccgttcgtgtttgcggatgacca

SEQ ID NO: 345558 - DNA, 60 bp, Artificial
  Synthetic oligonucleotide
cactcccatctcgacttcgactaatttagcgcataggttgagggatcgtagcactcaagt

SEQ ID NO: 345559 - DNA, 60 bp, Artificial
  Synthetic oligonucleotide
cactccccaataggggagtgacgtcgaggcctctgaggacttgagctcagaggttgatca

SEQ ID NO: 345560 - DNA, 52 bp, Artificial
  Synthetic oligonucleotide
cactccccgtccctgagtttcttacgcctttcctttctcaattccaacactt

SEQ ID NO: 345561 - DNA, 60 bp, Artificial
  Synthetic oligonucleotide
cactcccctcgcacgagctgcgtgggagacagctagacacactccagtcaactcctggct

SEQ ID NO: 345562 - DNA, 56 bp, Artificial
  Synthetic oligonucleotide
cactcccgcctcgaaggtacgtcgccgtctgaacttcgacacccccgtgatgagcc

SEQ ID NO: 345563 - DNA, 56 bp, Artificial
  Synthetic oligonucleotide
cactcccgccttcagggcacgtcggcgtctgaacttcgacggcccgtatgtcaacc

SEQ ID NO: 345564 - DNA, 55 bp, Artificial
  Synthetic oligonucleotide
cactcccgtaggagctcgtttctggggctatgaaggcgtacccgaatctcgtatg

SEQ ID NO: 345565 - DNA, 56 bp, Artificial
  Synthetic oligonucleotide
cactcccgttacccccgtaagttgaagagttatcctgatctagttgcatccattta

SEQ ID NO: 345566 - DNA, 54 bp, Artificial
  Synthetic oligonucleotide
cactcccgttgggggccgttcgacgctccacggtgacccctgtgttgcgaacta

SEQ ID NO: 345567 - DNA, 55 bp, Artificial
  Synthetic oligonucleotide
cactccctattatcttaaaggcactttacatgttgtcaacacgtgggagacagac

SEQ ID NO: 345568 - DNA, 55 bp, Artificial
  Synthetic oligonucleotide
cactcccttaagtttgaccttaggtcactggaaagatgtcgagcggatcgctcac

SEQ ID NO: 345569 - DNA, 54 bp, Artificial
  Synthetic oligonucleotide
cactccgagcgggtctcgaacgctcgaagaggtgctcgagatgcatcgggtgag

SEQ ID NO: 345570 - DNA, 58 bp, Artificial
  Synthetic oligonucleotide
cactccgagctgagaagaaatacatccttgcgactaatattctgcagaacggtgtgaa

SEQ ID NO: 345571 - DNA, 54 bp, Artificial
  Synthetic oligonucleotide
cactccgagttattaaaactaactatctggggtgtaaagaatcttcaggcccgc

SEQ ID NO: 345572 - DNA, 57 bp, Artificial
  Synthetic oligonucleotide
cactccgcgcagaatcggctagcttaaattaagtcgttccatgagtcatccgttctt

SEQ ID NO: 345573 - DNA, 59 bp, Artificial
  Synthetic oligonucleotide
cactccgctatacactcatccctctaactgcagggaagattcctttgtcccgattcgac

SEQ ID NO: 345574 - DNA, 55 bp, Artificial
  Synthetic oligonucleotide
cactccgggcgatacacgaagtgaaccatgcttcgaacgtttcaggctgttgcag

SEQ ID NO: 345575 - DNA, 51 bp, Artificial
  Synthetic oligonucleotide
cactccgggggagaggccgtctggcatgtttgacacctcggtactctgtga

SEQ ID NO: 345576 - DNA, 59 bp, Artificial
  Synthetic oligonucleotide
cactccggtcttattggcttattcttagttccagagtgttgtatacctgctagcttgaa

SEQ ID NO: 345577 - DNA, 55 bp, Artificial
  Synthetic oligonucleotide
cactccggtgagcccggcactcttctatggaacactgtctggaatatggccgtca

SEQ ID NO: 345578 - DNA, 55 bp, Artificial
  Synthetic oligonucleotide
cactccggtgctggctacttctatggcaagactctcgttggccttcacaaaggcc

SEQ ID NO: 345579 - DNA, 55 bp, Artificial
  Synthetic oligonucleotide
cactccgtctgatgactgagcataagtcgaataacacagaaagagacgagtgtgc

SEQ ID NO: 345580 - DNA, 53 bp, Artificial
  Synthetic oligonucleotide
cactccgttaaccttcttgaagacagacataacgggaaactatgtaaactagg

SEQ ID NO: 345581 - DNA, 59 bp, Artificial
  Synthetic oligonucleotide
cactccgttagttagaaaatctgaaaatatcacgaaggatattgaacaccattatgctg

SEQ ID NO: 345582 - DNA, 54 bp, Artificial
  Synthetic oligonucleotide
cactcctacatggaggggtgaacctgcgggtcttagtgtggttaaaggacctcc

SEQ ID NO: 345583 - DNA, 52 bp, Artificial
  Synthetic oligonucleotide
cactcctaggaacggggttgagagaacggcgcaccagggttccgtccctgtt

SEQ ID NO: 345584 - DNA, 55 bp, Artificial
  Synthetic oligonucleotide
cactcctcagccaggaaataacctttataaagcacagagtaactggcctctttac

SEQ ID NO: 345585 - DNA, 55 bp, Artificial
  Synthetic oligonucleotide
cactcctgtcctacatcacaacccagaaaccccgccaaacgcaacatcacgacca

SEQ ID NO: 345586 - DNA, 55 bp, Artificial
  Synthetic oligonucleotide
cactcctgtctacccagtacccaagccaaatggccgctggagaatggtactggac

SEQ ID NO: 345587 - DNA, 55 bp, Artificial
  Synthetic oligonucleotide
cactcctgttgtccacttttgaaccctagggatggagcccaccaaacacgtcgcg

SEQ ID NO: 345588 - DNA, 56 bp, Artificial
  Synthetic oligonucleotide
cactcctgttttgctatgggagggctcagctaacggtgcagggacaaaaacctacc

SEQ ID NO: 345589 - DNA, 60 bp, Artificial
  Synthetic oligonucleotide
cactccttattctgctgactgtttcaatgtcaccagttcagtccgcaccggtaggccaca

SEQ ID NO: 345590 - DNA, 60 bp, Artificial
  Synthetic oligonucleotide
cactccttcaaggtgaagcagcggctcacgattaacgaaaaattgcagaggatgatgctg

SEQ ID NO: 345591 - DNA, 55 bp, Artificial
  Synthetic oligonucleotide
cactccttcccccctgcggggcttccccataagatggcaggaacccactcattgg

SEQ ID NO: 345592 - DNA, 54 bp, Artificial
  Synthetic oligonucleotide
cactcgaaaaggtatttgccgtctgagtctttattaagtggtgggattattggg

SEQ ID NO: 345593 - DNA, 60 bp, Artificial
  Synthetic oligonucleotide
cactcgaagacgggagtgcactcggcaatgcgctagtatacccacatcagtggatcaacc

SEQ ID NO: 345594 - DNA, 59 bp, Artificial
  Synthetic oligonucleotide
cactcgaataggcttaatgacctcacaacagagttcctctagtcgatgtcacctttaac

SEQ ID NO: 345595 - DNA, 58 bp, Artificial
  Synthetic oligonucleotide
cactcgacccctcaaggaagtcagtagcaccgccagagtgtcaacacgaagagtcccc

SEQ ID NO: 345596 - DNA, 57 bp, Artificial
  Synthetic oligonucleotide
cactcgacgactacagtcggccgacgtttataagccaacaattggcctaggcttggc

SEQ ID NO: 345597 - DNA, 55 bp, Artificial
  Synthetic oligonucleotide
cactcgacgctgctaaccatacaaaaccttttgctattgaaggaggaagactcgt

SEQ ID NO: 345598 - DNA, 55 bp, Artificial
  Synthetic oligonucleotide
cactcgaggtagagatctgttcggcaatagtgaagtgcgccagtgagtgcactcc

SEQ ID NO: 345599 - DNA, 55 bp, Artificial
  Synthetic oligonucleotide
cactcgaggttgaatacaataggcctagtcaatcacgacgggtcacaccaacttg

SEQ ID NO: 345600 - DNA, 55 bp, Artificial
  Synthetic oligonucleotide
cactcgatattgacaggtgagtcttacggtgaatcagtcaaacaggcggtcctac

SEQ ID NO: 345601 - DNA, 55 bp, Artificial
  Synthetic oligonucleotide
cactcgatcttggacggttacctggcactcaagatttacaaagagtgcgagccga

SEQ ID NO: 345602 - DNA, 53 bp, Artificial
  Synthetic oligonucleotide
cactcgattatacgcttgggaagtactacgacatacggttacaactctttggt

SEQ ID NO: 345603 - DNA, 56 bp, Artificial
  Synthetic oligonucleotide
cactcgcattggagatattttcccgtcacccgaacggtatactcggtacactatta

SEQ ID NO: 345604 - DNA, 50 bp, Artificial
  Synthetic oligonucleotide
cactcgccacgatagcggtgaggggtgtggttccacgtgtgtgggtcttc

SEQ ID NO: 345605 - DNA, 60 bp, Artificial
  Synthetic oligonucleotide
cactcgccagttgcatgggtctcatttataaccggatgggaacagtgaccacagaggtgg

SEQ ID NO: 345606 - DNA, 55 bp, Artificial
  Synthetic oligonucleotide
cactcgccttgactctcgtgtttgtcccaacagaggatgatttgctggcgcgagc

SEQ ID NO: 345607 - DNA, 60 bp, Artificial
  Synthetic oligonucleotide
cactcgcgagatactgacaaaaaccactgtggaccatatggcaataatcagaaagtacac

SEQ ID NO: 345608 - DNA, 55 bp, Artificial
  Synthetic oligonucleotide
cactcgctgctttgactcaacggtcacagagagagacattagaacagaggaatcc

SEQ ID NO: 345609 - DNA, 55 bp, Artificial
  Synthetic oligonucleotide
cactcgctgtagtcgggtcgtatcgcggggacgtcgctgtgcgctggtccgatgt

SEQ ID NO: 345610 - DNA, 53 bp, Artificial
  Synthetic oligonucleotide
cactcggaactacagttctttcacagttaccccgaaaccacctaagctaacta

SEQ ID NO: 345611 - DNA, 52 bp, Artificial
  Synthetic oligonucleotide
cactcggccttatatctgccttctcctttacgtgccagcgatcctgaaatct

SEQ ID NO: 345612 - DNA, 56 bp, Artificial
  Synthetic oligonucleotide
cactcgggtgcctggacggcgccccgcactccgaaggaggctcctatgcccccgac

SEQ ID NO: 345613 - DNA, 57 bp, Artificial
  Synthetic oligonucleotide
cactcggtgaaaacatggcaccggaaaaagtagactttgaggattgcaaggatgtta

SEQ ID NO: 345614 - DNA, 60 bp, Artificial
  Synthetic oligonucleotide
cactcggtgtacctctgacagagtgtacctctagtaggtttaagcgtaaatgcatgcaca

SEQ ID NO: 345615 - DNA, 55 bp, Artificial
  Synthetic oligonucleotide
cactcgtaacgcaattcggggagattggacgcgccgagtaccttatcgaaaggcg

SEQ ID NO: 345616 - DNA, 55 bp, Artificial
  Synthetic oligonucleotide
cactcgtaagactgggaatcagtctcatagacctgtcagaaccatggttagaagg

SEQ ID NO: 345617 - DNA, 55 bp, Artificial
  Synthetic oligonucleotide
cactcgtaatgatggaggtaatactgcagatgttaacgcaggtacagaaacgttg

SEQ ID NO: 345618 - DNA, 56 bp, Artificial
  Synthetic oligonucleotide
cactcgtaccattatttctgagactaaaccaaccaacgctagacgtttagcttaca

SEQ ID NO: 345619 - DNA, 55 bp, Artificial
  Synthetic oligonucleotide
cactcgtcaaaatgattgagatggggagggaaagtcagggttattccgttgtccc

SEQ ID NO: 345620 - DNA, 52 bp, Artificial
  Synthetic oligonucleotide
cactcgtcatgttggcgagtttgtgatcagtgagggagcaaaaattttgcaa

SEQ ID NO: 345621 - DNA, 60 bp, Artificial
  Synthetic oligonucleotide
cactcgtccagacaaaactgaaggccccctgatcattagtgaggatctgaatggcctgac

SEQ ID NO: 345622 - DNA, 58 bp, Artificial
  Synthetic oligonucleotide
cactcgtgccatagtcccgtagcgctagaacgcatcagaaacgaagcgacagacggga

SEQ ID NO: 345623 - DNA, 57 bp, Artificial
  Synthetic oligonucleotide
cactcgtggaaatgggcttacccatcgtgtgggtaagagattctgtgtgaagtccgt

SEQ ID NO: 345624 - DNA, 55 bp, Artificial
  Synthetic oligonucleotide
cactcgtgtggtccaacctgttattgtaaaacccatcgcttcaggccaaggcaag

SEQ ID NO: 345625 - DNA, 55 bp, Artificial
  Synthetic oligonucleotide
cactcgttggttatgaacgctgagcagccgcaacctttccacactatcctggtcc

SEQ ID NO: 345626 - DNA, 56 bp, Artificial
  Synthetic oligonucleotide
cactcgttttgtattcgagaagtagttgcaacaacggtccccttattgcctgacaa

SEQ ID NO: 345627 - DNA, 55 bp, Artificial
  Synthetic oligonucleotide
cactctacgactgggaggtaccaacctccccatgtgaggtccccggcttccgtca

SEQ ID NO: 345628 - DNA, 55 bp, Artificial
  Synthetic oligonucleotide
cactctacttaagggtgcgcgtgctatcccgtcggctcttggtgctatcctcttg

SEQ ID NO: 345629 - DNA, 52 bp, Artificial
  Synthetic oligonucleotide
cactctagagtgtgagaatacacgtgcacagataccttgttccgtggtagcg

SEQ ID NO: 345630 - DNA, 52 bp, Artificial
  Synthetic oligonucleotide
cactctagtaggtatttccagaacgtaaccaaacaagtcgttcggtttctac

SEQ ID NO: 345631 - DNA, 60 bp, Artificial
  Synthetic oligonucleotide
cactctagtgaacccctgaatggcgatcttaagcgcctctgtagggaagccaggaatgtc

SEQ ID NO: 345632 - DNA, 55 bp, Artificial
  Synthetic oligonucleotide
cactctcaacccctttatttataggcagttacgcagctttgagtattaaccggaa

SEQ ID NO: 345633 - DNA, 55 bp, Artificial
  Synthetic oligonucleotide
cactctcaatcccttgtgaagcccatgcgagatttccttttaatgtcagttcaag

SEQ ID NO: 345634 - DNA, 57 bp, Artificial
  Synthetic oligonucleotide
cactctcacgtcacactaaactacccccccccacttcacactataatgactctacga

SEQ ID NO: 345635 - DNA, 53 bp, Artificial
  Synthetic oligonucleotide
cactctcagctgctaacttgcgcagatggaaactgtcagactctaaaagtgat

SEQ ID NO: 345636 - DNA, 55 bp, Artificial
  Synthetic oligonucleotide
cactctcagtcatctctaagatggcgtacattgtatccggctcagccaggtaacg

SEQ ID NO: 345637 - DNA, 58 bp, Artificial
  Synthetic oligonucleotide
cactctcatacaggttgctggggcatccttcgttgttaacagaatctccaaaaggttc

SEQ ID NO: 345638 - DNA, 60 bp, Artificial
  Synthetic oligonucleotide
cactctcatagaacaaaatgtgccagtcacccaaacaatggagctcgtagaaacaaagaa

SEQ ID NO: 345639 - DNA, 55 bp, Artificial
  Synthetic oligonucleotide
cactctcctttgagcgcgctgtcgcacagaacgctcctctttcggtggttaacca

SEQ ID NO: 345640 - DNA, 60 bp, Artificial
  Synthetic oligonucleotide
cactctcgcttgttaccggtatctgataccaagtacgagatatatcgtaaggatcaaaca

SEQ ID NO: 345641 - DNA, 51 bp, Artificial
  Synthetic oligonucleotide
cactctcgggaaatttggacaacaatccggggccatttacgtgggtaactt

SEQ ID NO: 345642 - DNA, 60 bp, Artificial
  Synthetic oligonucleotide
cactctcgggctcagatccagatgaccgcatagataattgtgtgggcctaaagacctggc

SEQ ID NO: 345643 - DNA, 60 bp, Artificial
  Synthetic oligonucleotide
cactctcttgtgagggacaaaaatacaatcagggacagtatatgaatactccatggagaa

SEQ ID NO: 345644 - DNA, 60 bp, Artificial
  Synthetic oligonucleotide
cactctctttcctttgggacagctggcgcgcactatgagttatgtgtacgtggcatcatg

SEQ ID NO: 345645 - DNA, 60 bp, Artificial
  Synthetic oligonucleotide
cactctctttccttttggacagctggcgcgcactattaactatgttgacgtggcgttatg

SEQ ID NO: 345646 - DNA, 60 bp, Artificial
  Synthetic oligonucleotide
cactctgaaactccaattccactgggaggaagtggtgcaatgtcaataatggaactttca

SEQ ID NO: 345647 - DNA, 55 bp, Artificial
  Synthetic oligonucleotide
cactctgaaactttagaagcaatctttacgacacacgtatccaataccgcttagt

SEQ ID NO: 345648 - DNA, 55 bp, Artificial
  Synthetic oligonucleotide
cactctgagagagcctcgactgacgtaccgtttcagctggttggacagaattacg

SEQ ID NO: 345649 - DNA, 60 bp, Artificial
  Synthetic oligonucleotide
cactctgagtataagcttgtcaaagccacaacacctgtgtcatgataaacatgaataatc

SEQ ID NO: 345650 - DNA, 55 bp, Artificial
  Synthetic oligonucleotide
cactctgatgagaaggatgggcctagataagcagttcccggtgcgttccacatcc

SEQ ID NO: 345651 - DNA, 52 bp, Artificial
  Synthetic oligonucleotide
cactctgctggaggcaatggagttggttactgctcatgcgtttccagatcca

SEQ ID NO: 345652 - DNA, 58 bp, Artificial
  Synthetic oligonucleotide
cactctggacctgacgagtaccggcgtctcttcgagcctttccagggtctcttcgaga

SEQ ID NO: 345653 - DNA, 55 bp, Artificial
  Synthetic oligonucleotide
cactctgggacagacagcgactacgaagcctttgatagatcgcaggatggtgcta

SEQ ID NO: 345654 - DNA, 55 bp, Artificial
  Synthetic oligonucleotide
cactctggggtcagacactttatacaacaatgacctgacggccggcgttcacatc

SEQ ID NO: 345655 - DNA, 55 bp, Artificial
  Synthetic oligonucleotide
cactctgggtcaccatccatcctaccttgcaagccccggctttcccaaccacggt

SEQ ID NO: 345656 - DNA, 58 bp, Artificial
  Synthetic oligonucleotide
cactctgtattcaaccctccaaggattaacatccttgagcgagaagtaagacgaagag

SEQ ID NO: 345657 - DNA, 60 bp, Artificial
  Synthetic oligonucleotide
cactctgtcaccgtattacaagcgctatatcagctggtgcttatggtggcttcagtattt

SEQ ID NO: 345658 - DNA, 59 bp, Artificial
  Synthetic oligonucleotide
cactctgtcccctcggcccattatccacgctgtcgcccctgactatcgggttgaacata

SEQ ID NO: 345659 - DNA, 54 bp, Artificial
  Synthetic oligonucleotide
cactctgtgcgagaccgacttcagcgtggccaccccgatctggaccaaggagca

SEQ ID NO: 345660 - DNA, 50 bp, Artificial
  Synthetic oligonucleotide
cactctgttggtaggttgtacgtactcattcttaatgaattacgtgccac

SEQ ID NO: 345661 - DNA, 60 bp, Artificial
  Synthetic oligonucleotide
cactctgttgttagcccaaactggactaatctatagacttggcacaacaactagagtgca

SEQ ID NO: 345662 - DNA, 53 bp, Artificial
  Synthetic oligonucleotide
cactcttaataacctccaatgtgggcatatccacagaggaccggtggaagtat

SEQ ID NO: 345663 - DNA, 60 bp, Artificial
  Synthetic oligonucleotide
cactcttacagaacacctacgctctattacatcatttcctggcattgagatgaacttgca

SEQ ID NO: 345664 - DNA, 56 bp, Artificial
  Synthetic oligonucleotide
cactcttacatggtttctaaatggcttagggtacaatcaccagtttaacccacaga

SEQ ID NO: 345665 - DNA, 55 bp, Artificial
  Synthetic oligonucleotide
cactcttagatgacgtcactgatccgtgttggatttacatggatacatatttgcg

SEQ ID NO: 345666 - DNA, 56 bp, Artificial
  Synthetic oligonucleotide
cactcttccaagatgttggttgataagaaatggaagttatcttaatacttctgaat

SEQ ID NO: 345667 - DNA, 55 bp, Artificial
  Synthetic oligonucleotide
cactcttcccaagtggtggcctataataattagagggtgctccatgttcacgaac

SEQ ID NO: 345668 - DNA, 53 bp, Artificial
  Synthetic oligonucleotide
cactcttccgctcgtaaccgttaagttcagataatgagtcttccgcactccca

SEQ ID NO: 345669 - DNA, 57 bp, Artificial
  Synthetic oligonucleotide
cactcttcgcgtacgtgaaaatcatagggataggttccgggtgattcaacagaggaa

SEQ ID NO: 345670 - DNA, 57 bp, Artificial
  Synthetic oligonucleotide
cactcttcggccggcaggacgtagaacttctgtccttcgtacatgtaatgtacgtgg

SEQ ID NO: 345671 - DNA, 50 bp, Artificial
  Synthetic oligonucleotide
cactcttgaacccggttccagatgtttcgtaccggcctgaagagctctat

SEQ ID NO: 345672 - DNA, 55 bp, Artificial
  Synthetic oligonucleotide
cactcttgacagatgtgtgatgaataagggatgtgatctcactgacctgaggtcc

SEQ ID NO: 345673 - DNA, 55 bp, Artificial
  Synthetic oligonucleotide
cactcttgagacgagcgactcactcttgagcccgagcggttgtaatggaccgccc

SEQ ID NO: 345674 - DNA, 60 bp, Artificial
  Synthetic oligonucleotide
cactcttgctgacatccagcattttttgcaggatgaatcagcatacactgcggaccttgt

SEQ ID NO: 345675 - DNA, 60 bp, Artificial
  Synthetic oligonucleotide
cactcttggatcaccagatccgagattacagaagagcccagcatgcaaaacatgaggctc

SEQ ID NO: 345676 - DNA, 56 bp, Artificial
  Synthetic oligonucleotide
cactctttcgagcgacgtgatccgcaggattccgtggggatgtggcatctatgtgg

SEQ ID NO: 345677 - DNA, 55 bp, Artificial
  Synthetic oligonucleotide
cactctttggaaggcggggatcttatataaaagagagtccacacgtaccgcctca

SEQ ID NO: 345678 - DNA, 56 bp, Artificial
  Synthetic oligonucleotide
cactcttttaccgcctggtgtgaggcaccccggttcaataaacgtggcgcacgctc

SEQ ID NO: 345679 - DNA, 60 bp, Artificial
  Synthetic oligonucleotide
cactgaaaaaacctgatcatcactctgcaatcgccaagatcaggcaaagctcagatgact

SEQ ID NO: 345680 - DNA, 56 bp, Artificial
  Synthetic oligonucleotide
cactgaaactggtacccaaccactggtgacaggctaaggatgccctccaggtaccc

SEQ ID NO: 345681 - DNA, 60 bp, Artificial
  Synthetic oligonucleotide
cactgaaagctcttgacttccttggacagagacatcttgttgctcaatgaatttccaaga

SEQ ID NO: 345682 - DNA, 60 bp, Artificial
  Synthetic oligonucleotide
cactgaaatcacggctgagcacactacgatggatgtacaatttgagaagtggtgggacaa

SEQ ID NO: 345683 - DNA, 54 bp, Artificial
  Synthetic oligonucleotide
cactgaaattactgctggcatacacgccccctggcgtaggaaaaccaacatcta

SEQ ID NO: 345684 - DNA, 50 bp, Artificial
  Synthetic oligonucleotide
cactgaacaaaacccagggcctgacgccatcaaggtatacaacaatgacc

SEQ ID NO: 345685 - DNA, 57 bp, Artificial
  Synthetic oligonucleotide
cactgaaccagagatcggtcccagaaatagctaccaggcccaaagtgaacgggcaaa

SEQ ID NO: 345686 - DNA, 55 bp, Artificial
  Synthetic oligonucleotide
cactgaaccctacagatctgcgtggattaacgctatacgcgaggcgagggctgaa

SEQ ID NO: 345687 - DNA, 55 bp, Artificial
  Synthetic oligonucleotide
cactgaaccgggcctcgttgagccggagcactctcctctcgccgcagattcttca

SEQ ID NO: 345688 - DNA, 55 bp, Artificial
  Synthetic oligonucleotide
cactgaaccgtacatgttcaagacctatgaaaaggcgttaatttcgggaacaggc

SEQ ID NO: 345689 - DNA, 55 bp, Artificial
  Synthetic oligonucleotide
cactgaacggctgtactgcggtggccctatgtacaactctcgaggccaagcatgc

SEQ ID NO: 345690 - DNA, 55 bp, Artificial
  Synthetic oligonucleotide
cactgaactcaagctcagtgacaatgagggacgattgatccaaaacagcatcacc

SEQ ID NO: 345691 - DNA, 60 bp, Artificial
  Synthetic oligonucleotide
cactgaagataagagtacatgaagggtatgaagaattcacaatggttggccgaagggcaa

SEQ ID NO: 345692 - DNA, 60 bp, Artificial
  Synthetic oligonucleotide
cactgaagcatgtaacaccccagatggaagaaagctttcgcaggcatgtggaagcactgt

SEQ ID NO: 345693 - DNA, 55 bp, Artificial
  Synthetic oligonucleotide
cactgaagcgaaacattggcttgacttagggacaggacctgaagctaggccttta

SEQ ID NO: 345694 - DNA, 60 bp, Artificial
  Synthetic oligonucleotide
cactgaaggcaggacgtctgacatgaggaccgagatcataagaatgatggaaagtgccag

SEQ ID NO: 345695 - DNA, 60 bp, Artificial
  Synthetic oligonucleotide
cactgaagtggtcttaggcctggtatgtgcaacctgtgaacagattgctgactcccagca

SEQ ID NO: 345696 - DNA, 55 bp, Artificial
  Synthetic oligonucleotide
cactgaagttacagacatagttgtcggagctataagcacccagaaggttaggagc

SEQ ID NO: 345697 - DNA, 58 bp, Artificial
  Synthetic oligonucleotide
cactgaatacaataaactcacacaaatttcgtttattacaatcaccagatccaggaac

SEQ ID NO: 345698 - DNA, 59 bp, Artificial
  Synthetic oligonucleotide
cactgaatatcgagacaaggacgaaaactgatggttgttgatacacgggtgattaccgc

SEQ ID NO: 345699 - DNA, 60 bp, Artificial
  Synthetic oligonucleotide
cactgaatcagagatcagtcccagaaatagccactaggcccaaagtaaatgggcaaagtg

SEQ ID NO: 345700 - DNA, 52 bp, Artificial
  Synthetic oligonucleotide
cactgaatcctaacttaccggttattttacctggttcggctagttatctcgg

SEQ ID NO: 345701 - DNA, 60 bp, Artificial
  Synthetic oligonucleotide
cactgaatgaagtaggccatggccccaatcatgtactacatttagagcatgagcaaactg

SEQ ID NO: 345702 - DNA, 55 bp, Artificial
  Synthetic oligonucleotide
cactgaatgcagcagtgttgatccaagattcaaccgcttgcacgttatatgcgcg

SEQ ID NO: 345703 - DNA, 58 bp, Artificial
  Synthetic oligonucleotide
cactgaattcaattaaagttactcaatctgatgttgcgagcgtactttcaaaagtagt

SEQ ID NO: 345704 - DNA, 55 bp, Artificial
  Synthetic oligonucleotide
cactgaattgttaccatatagctattggattggccatccggtgtgcaatagagct

SEQ ID NO: 345705 - DNA, 60 bp, Artificial
  Synthetic oligonucleotide
cactgacaaactaaactctttgtccaatctctctttccactccacaattctgctctgaat

SEQ ID NO: 345706 - DNA, 60 bp, Artificial
  Synthetic oligonucleotide
cactgacaataagagcatcacaatacaacctttggaggttagtgagactgcatgtgaggc

SEQ ID NO: 345707 - DNA, 60 bp, Artificial
  Synthetic oligonucleotide
cactgacattcgccagccaattatggatgtttctcgcaatagtgtaccttgagaacacat

SEQ ID NO: 345708 - DNA, 60 bp, Artificial
  Synthetic oligonucleotide
cactgaccatcatcaaacctaaatccggctatctcatgcggcgcatagcggataaccatt

SEQ ID NO: 345709 - DNA, 55 bp, Artificial
  Synthetic oligonucleotide
cactgacccggtagggaacaaggtagattgttattttgtattacatgagggccaa

SEQ ID NO: 345710 - DNA, 53 bp, Artificial
  Synthetic oligonucleotide
cactgaccgatcgaaggatcttccgattaaacgttttcccaaacgtcggttgc

SEQ ID NO: 345711 - DNA, 60 bp, Artificial
  Synthetic oligonucleotide
cactgacgaaacatccagatatagtagggagactggaagtcaagcagtcggtaatccgtg

SEQ ID NO: 345712 - DNA, 51 bp, Artificial
  Synthetic oligonucleotide
cactgacgaggtgatcccgtccggtacgtcgctcaatccgcacttccatct

SEQ ID NO: 345713 - DNA, 55 bp, Artificial
  Synthetic oligonucleotide
cactgacgcgtgcgcacaactacgatacgatgccggcgtgaaaatgctaactcgg

SEQ ID NO: 345714 - DNA, 58 bp, Artificial
  Synthetic oligonucleotide
cactgacggtcgctgcagcatcacccttcggaacaagaccgtcgattatgagaccaga

SEQ ID NO: 345715 - DNA, 59 bp, Artificial
  Synthetic oligonucleotide
cactgacggtttagctaccgttagtgccgtcctcaatggccgtaagcgcaagattgcca

SEQ ID NO: 345716 - DNA, 55 bp, Artificial
  Synthetic oligonucleotide
cactgacgtaatgccgattggtctagctggaggactccctactataataccggga

SEQ ID NO: 345717 - DNA, 58 bp, Artificial
  Synthetic oligonucleotide
cactgactcaaaggcccgctacatggtggcgtacgtcccccctggtgtcgagacacca

SEQ ID NO: 345718 - DNA, 55 bp, Artificial
  Synthetic oligonucleotide
cactgactcgacatcaccgcagggtaacctagcagctttaggtaccgcaacctcg

SEQ ID NO: 345719 - DNA, 60 bp, Artificial
  Synthetic oligonucleotide
cactgactgcggcggctatattcctcatagtgctgacgactctgtgtacactgacgtggc

SEQ ID NO: 345720 - DNA, 55 bp, Artificial
  Synthetic oligonucleotide
cactgactgtaggcttctccacaagagaggtgtgcggttcgtctgtaaccgtaca

SEQ ID NO: 345721 - DNA, 55 bp, Artificial
  Synthetic oligonucleotide
cactgagaaactagctttctgggtttatgaaagaataggtttggatactacctgg

SEQ ID NO: 345722 - DNA, 55 bp, Artificial
  Synthetic oligonucleotide
cactgagaaagggctaatagaaatacctcaaatgatatcaactgaagctgctctg

SEQ ID NO: 345723 - DNA, 55 bp, Artificial
  Synthetic oligonucleotide
cactgagaaaggggagtttaatttactaggtatacatgataactgtgctgtggtc

SEQ ID NO: 345724 - DNA, 60 bp, Artificial
  Synthetic oligonucleotide
cactgagaaggacagtttgatgactgatattgagggaagcgcattattgtctaataggcg

SEQ ID NO: 345725 - DNA, 55 bp, Artificial
  Synthetic oligonucleotide
cactgagaagggctacagtggcgccccctactggaacgggaaatctatagtaggg

SEQ ID NO: 345726 - DNA, 52 bp, Artificial
  Synthetic oligonucleotide
cactgagaagtctgcgagactttcacatgtgtccagaggtttgctggatcat

SEQ ID NO: 345727 - DNA, 57 bp, Artificial
  Synthetic oligonucleotide
cactgagaatgagaggactcaatagattcggctctagcaatataacagtgatgacta

SEQ ID NO: 345728 - DNA, 50 bp, Artificial
  Synthetic oligonucleotide
cactgagacatggcacagaacttcgtatccgatggggacgtgatcccttg

SEQ ID NO: 345729 - DNA, 58 bp, Artificial
  Synthetic oligonucleotide
cactgagagactctatgttgggggccctcttaccaattcaagaggggagaactgcggc

SEQ ID NO: 345730 - DNA, 58 bp, Artificial
  Synthetic oligonucleotide
cactgagagtagagacacttggtataaaggaaatacatacaacgacaagatacaccag

SEQ ID NO: 345731 - DNA, 55 bp, Artificial
  Synthetic oligonucleotide
cactgagatgctctagaatctgcatcctatgcatagatgaccgtggtcaccacac

SEQ ID NO: 345732 - DNA, 59 bp, Artificial
  Synthetic oligonucleotide
cactgagatgtactcttcatgacctgtgatttttatacaaacacctttactcggtctct

SEQ ID NO: 345733 - DNA, 55 bp, Artificial
  Synthetic oligonucleotide
cactgagcagtccataagctttaaacagttggttgacaattttggtactggtgcg

SEQ ID NO: 345734 - DNA, 59 bp, Artificial
  Synthetic oligonucleotide
cactgagccagttaaagatctcatgctaaaaggagccccagcactaaactcccctaata

SEQ ID NO: 345735 - DNA, 55 bp, Artificial
  Synthetic oligonucleotide
cactgagcgctgtggcgctccgagaactcaaaataagtggtaggtatgttacacg

SEQ ID NO: 345736 - DNA, 55 bp, Artificial
  Synthetic oligonucleotide
cactgagctatctacaagggactttccaccggggactttccaggggaggtgtggc

SEQ ID NO: 345737 - DNA, 55 bp, Artificial
  Synthetic oligonucleotide
cactgagctcgctgtcactgacacgatagttgttacgtccgagctagtcatgccg

SEQ ID NO: 345738 - DNA, 58 bp, Artificial
  Synthetic oligonucleotide
cactgagcttcttgtggcccaagattcaccgggccttagttcaattgccgaatggagg

SEQ ID NO: 345739 - DNA, 55 bp, Artificial
  Synthetic oligonucleotide
cactgaggagttatgaaagcggaacagccgcactgcttccacactatccttgtcc

SEQ ID NO: 345740 - DNA, 55 bp, Artificial
  Synthetic oligonucleotide
cactgagggtttgcggaaaaatcacctccagaggaccccttcagcgaacggaaga

SEQ ID NO: 345741 - DNA, 55 bp, Artificial
  Synthetic oligonucleotide
cactgagtacctcttttacgactccgcccttaaagctcgggtcatgaagggcaga

SEQ ID NO: 345742 - DNA, 54 bp, Artificial
  Synthetic oligonucleotide
cactgagtactcacttaaggcactttaccctggtataggtagtggggtattatt

SEQ ID NO: 345743 - DNA, 59 bp, Artificial
  Synthetic oligonucleotide
cactgagtcacaagagtggaaggctccgcggttttccagcctccaccttgcagactgtt

SEQ ID NO: 345744 - DNA, 60 bp, Artificial
  Synthetic oligonucleotide
cactgagtccatgatgagtagaattgcagctggagacttggagtcatcggtggatgatcc

SEQ ID NO: 345745 - DNA, 51 bp, Artificial
  Synthetic oligonucleotide
cactgagtcgtccgttagttcgctcgactgcagtagacatgacaccgagtg

SEQ ID NO: 345746 - DNA, 60 bp, Artificial
  Synthetic oligonucleotide
cactgagtcttgttgatctctgcttctggagtaccctattctatacagcatcaatcttcc

SEQ ID NO: 345747 - DNA, 57 bp, Artificial
  Synthetic oligonucleotide
cactgagtgactattgtataggtaaaaatgttgactcaataatgttaccatcgttat

SEQ ID NO: 345748 - DNA, 52 bp, Artificial
  Synthetic oligonucleotide
cactgagttttctgcaaagggactttccgctggggactttccgggggaggcg

SEQ ID NO: 345749 - DNA, 55 bp, Artificial
  Synthetic oligonucleotide
cactgagttttgatgggctgtggcaaaatactaatcgcccagtggctgaaggtac

SEQ ID NO: 345750 - DNA, 60 bp, Artificial
  Synthetic oligonucleotide
cactgatacatattataggctaataaattgcaatgtgtcaaccataacgcaggcttgtcc

SEQ ID NO: 345751 - DNA, 60 bp, Artificial
  Synthetic oligonucleotide
cactgataccgatggtacgaacggccgctgaaatgccgcgccagactggactattggaaa

SEQ ID NO: 345752 - DNA, 55 bp, Artificial
  Synthetic oligonucleotide
cactgatagaaccccagttccctgaggagatagtacgaattgctcttgagcctac

SEQ ID NO: 345753 - DNA, 60 bp, Artificial
  Synthetic oligonucleotide
cactgatagaatagcgatctatacagagtccacgttagcggacattaaacgtctgtacaa

SEQ ID NO: 345754 - DNA, 60 bp, Artificial
  Synthetic oligonucleotide
cactgatagacatggtgtgaagacccaattgtgcttggttgtgactcctccggcccctga

SEQ ID NO: 345755 - DNA, 60 bp, Artificial
  Synthetic oligonucleotide
cactgatagcaagacaccttttattggtcattggtgccgggcttatcagagaaattgcac

SEQ ID NO: 345756 - DNA, 60 bp, Artificial
  Synthetic oligonucleotide
cactgatatcgcttcattctcaattaatccacaactttattgtgattataatggtggact

SEQ ID NO: 345757 - DNA, 55 bp, Artificial
  Synthetic oligonucleotide
cactgatatgatcgcatggggcgatttgagattgagagaatcgaaacctgaaggc

SEQ ID NO: 345758 - DNA, 55 bp, Artificial
  Synthetic oligonucleotide
cactgatcggactctctcatctgagggaggacactctaaccagttgggtgtgggc

SEQ ID NO: 345759 - DNA, 55 bp, Artificial
  Synthetic oligonucleotide
cactgatctacggccctatgcttgtctcacaatacaccaggggatagtaactgat

SEQ ID NO: 345760 - DNA, 55 bp, Artificial
  Synthetic oligonucleotide
cactgatcttccggccaattagtatacactatgatcgatagcatagccgctctcc

SEQ ID NO: 345761 - DNA, 55 bp, Artificial
  Synthetic oligonucleotide
cactgatgaccgcgcttaactgtcaattattagcaattttcataatgagcaatcc

SEQ ID NO: 345762 - DNA, 60 bp, Artificial
  Synthetic oligonucleotide
cactgatgagggctgaaaatgattgcgttatcactgcatgtgcacaagctttagctaggg

SEQ ID NO: 345763 - DNA, 55 bp, Artificial
  Synthetic oligonucleotide
cactgatgagtttaattctacctcttacgtggttatttatgccaaggggagggga

SEQ ID NO: 345764 - DNA, 55 bp, Artificial
  Synthetic oligonucleotide
cactgatgcagacaggatgtacatagctaaagaaggatattgttacctaaatatc

SEQ ID NO: 345765 - DNA, 60 bp, Artificial
  Synthetic oligonucleotide
cactgatgcgctcgaccttgtaaagtgaaaggagcgcgcctgctacaaggtgcgctacga

SEQ ID NO: 345766 - DNA, 55 bp, Artificial
  Synthetic oligonucleotide
cactgatgctgaagggtccttgagaatttacttagctgatctaggtgacaaggag

SEQ ID NO: 345767 - DNA, 55 bp, Artificial
  Synthetic oligonucleotide
cactgatggcatgcattactatgaacatgcaacgcgttcaaaccttgacaacaga

SEQ ID NO: 345768 - DNA, 60 bp, Artificial
  Synthetic oligonucleotide
cactgatggtgtctcatctattggcagtggttctctaacaggtggcacgcttaagaggaa

SEQ ID NO: 345769 - DNA, 55 bp, Artificial
  Synthetic oligonucleotide
cactgatgtatactgcatatgtagggacaattggaaaggttccaacaggccttgg

SEQ ID NO: 345770 - DNA, 55 bp, Artificial
  Synthetic oligonucleotide
cactgattaaaacaatcagagtaagacctaagaaggaggtactgaaagctatgtc

SEQ ID NO: 345771 - DNA, 55 bp, Artificial
  Synthetic oligonucleotide
cactgattaaatagacagattgctattgagttagagcgggtaaaactgagccaag

SEQ ID NO: 345772 - DNA, 51 bp, Artificial
  Synthetic oligonucleotide
cactgattatgacacgcatactcggagctatgctaaccagcgtagccccta

SEQ ID NO: 345773 - DNA, 59 bp, Artificial
  Synthetic oligonucleotide
cactgattctcctagaattttcgacagccttctttcttctccgatcccttcacatagat

SEQ ID NO: 345774 - DNA, 55 bp, Artificial
  Synthetic oligonucleotide
cactgattgacacatccagtaccattactatcccagctaacattgggctgttagg

SEQ ID NO: 345775 - DNA, 53 bp, Artificial
  Synthetic oligonucleotide
cactgatttgttacgttctgtcagaaccccagaggttattaaatactgtgagg

SEQ ID NO: 345776 - DNA, 55 bp, Artificial
  Synthetic oligonucleotide
cactgcaaccatatcatagttgttgacgtacacccagactagcacgtagttttcg

SEQ ID NO: 345777 - DNA, 58 bp, Artificial
  Synthetic oligonucleotide
cactgcaagatgccttttgtcaaaaaaatcctagctcttatagtggccctcgggtgcc

SEQ ID NO: 345778 - DNA, 55 bp, Artificial
  Synthetic oligonucleotide
cactgcaagcaaggcaacagacagtgtcagcactggaggacaaactcgcagattt

SEQ ID NO: 345779 - DNA, 57 bp, Artificial
  Synthetic oligonucleotide
cactgcaatgaacttcaccaaaacacgtgcgaacactacaaacggtgtccaaacggc

SEQ ID NO: 345780 - DNA, 60 bp, Artificial
  Synthetic oligonucleotide
cactgcacataggctcattggtgcggaacccaggcctcccgttagtggaaccaggtatgc

SEQ ID NO: 345781 - DNA, 55 bp, Artificial
  Synthetic oligonucleotide
cactgcacccacgatttatggtgttcctgtgaccacgtactcaaacatctcctac

SEQ ID NO: 345782 - DNA, 55 bp, Artificial
  Synthetic oligonucleotide
cactgcacctgcacgcactttcaagcaagccactcatagactggttcttcctgcc

SEQ ID NO: 345783 - DNA, 60 bp, Artificial
  Synthetic oligonucleotide
cactgcagggcaacagaatacataatgaaaggagtatacataaacacagctttactcaac

SEQ ID NO: 345784 - DNA, 53 bp, Artificial
  Synthetic oligonucleotide
cactgcagtggaaactggggccacaaatccactagtcccttctgatacagtgc

SEQ ID NO: 345785 - DNA, 52 bp, Artificial
  Synthetic oligonucleotide
cactgcagtggccggcgttagagccctgcccacggcaagtgcacgattcgta

SEQ ID NO: 345786 - DNA, 60 bp, Artificial
  Synthetic oligonucleotide
cactgcagttcccatagggtcatgtgtcagcaggtgtcacacagacaaaggctctctctc

SEQ ID NO: 345787 - DNA, 55 bp, Artificial
  Synthetic oligonucleotide
cactgcataagaaaggaaactggctgacactgcagggactttccagaaggggctg

SEQ ID NO: 345788 - DNA, 60 bp, Artificial
  Synthetic oligonucleotide
cactgcatacgaagatcgctgagcttgaatcgaaattggcgtctgctgccgctatgtcaa

SEQ ID NO: 345789 - DNA, 60 bp, Artificial
  Synthetic oligonucleotide
cactgcatataggtatgttgccacggttgctatagctcactatggtaagaacagactcgc

SEQ ID NO: 345790 - DNA, 60 bp, Artificial
  Synthetic oligonucleotide
cactgcatcgaagcgtgctgtgtcataatcaagtagaactttttacatagtgcattgatg

SEQ ID NO: 345791 - DNA, 60 bp, Artificial
  Synthetic oligonucleotide
cactgcatgcttggctaaggcctacgcccagatgtggctcttgctgtacttccacagaag

SEQ ID NO: 345792 - DNA, 57 bp, Artificial
  Synthetic oligonucleotide
cactgccagcaagcagtaacaccgttctagttctctctgcacatgctaatgcggcca

SEQ ID NO: 345793 - DNA, 55 bp, Artificial
  Synthetic oligonucleotide
cactgccatcaggacatagagcaactacatttataaactctgtcttgaacagggc

SEQ ID NO: 345794 - DNA, 55 bp, Artificial
  Synthetic oligonucleotide
cactgccatgcacttcattacttgtcttgtaatagtcagtgtccttactatgctc

SEQ ID NO: 345795 - DNA, 56 bp, Artificial
  Synthetic oligonucleotide
cactgccatgtataatcacgggtatacgggtggttttcatatggggaacagggtgg

SEQ ID NO: 345796 - DNA, 58 bp, Artificial
  Synthetic oligonucleotide
cactgccattaatggtttggagaatgtggaattctttgatgccttggtacttgggact

SEQ ID NO: 345797 - DNA, 52 bp, Artificial
  Synthetic oligonucleotide
cactgccattgaagaacgaattggtcgaacgtagagtgatatcaatgactct

SEQ ID NO: 345798 - DNA, 58 bp, Artificial
  Synthetic oligonucleotide
cactgcccaggaattagtggaatcgcaacatctaccggaattgtgtcccagcccttta

SEQ ID NO: 345799 - DNA, 55 bp, Artificial
  Synthetic oligonucleotide
cactgcccctttcccgataaagtcccggatggctgtgtgcttgcgctcaaatcta

SEQ ID NO: 345800 - DNA, 54 bp, Artificial
  Synthetic oligonucleotide
cactgcccgacaacccggggatgaatattcccggttctatgagatggaagtcta

SEQ ID NO: 345801 - DNA, 58 bp, Artificial
  Synthetic oligonucleotide
cactgccctagctaagcacggcgtcccgaagaggttcactccgtactgcttcgacttc

SEQ ID NO: 345802 - DNA, 55 bp, Artificial
  Synthetic oligonucleotide
cactgccgccgattgaagtttcacaccgaatcctcttggcgcacagtcggttgcg

SEQ ID NO: 345803 - DNA, 55 bp, Artificial
  Synthetic oligonucleotide
cactgccgttaacatggacagggttcatcccattacctggggagattgaaaagac

SEQ ID NO: 345804 - DNA, 51 bp, Artificial
  Synthetic oligonucleotide
cactgcctagagatcgacctatcgaagtttgacaagtcccaaggtgaactg

SEQ ID NO: 345805 - DNA, 55 bp, Artificial
  Synthetic oligonucleotide
cactgcctgatcccaacaggtttgctttacaggaccctggcatatatgaccccga

SEQ ID NO: 345806 - DNA, 60 bp, Artificial
  Synthetic oligonucleotide
cactgcctgtaaatactggggtaggccacctcgcaaattcctcacagacacgccattcta

SEQ ID NO: 345807 - DNA, 60 bp, Artificial
  Synthetic oligonucleotide
cactgcgaaacattaaaagagcagtgtatgccattcctattagccatcgaagggcaagtg

SEQ ID NO: 345808 - DNA, 60 bp, Artificial
  Synthetic oligonucleotide
cactgcgagcattcacggatgctatgaccaggtactcagctccccctggagacgtcccgc

SEQ ID NO: 345809 - DNA, 60 bp, Artificial
  Synthetic oligonucleotide
cactgcgagtaacagggcacacacaggaacggagctacctgtatgccatgtcacagcatc

SEQ ID NO: 345810 - DNA, 55 bp, Artificial
  Synthetic oligonucleotide
cactgcgctactccggaacagttggccataatagggaagatccacaggttctcgg

SEQ ID NO: 345811 - DNA, 60 bp, Artificial
  Synthetic oligonucleotide
cactgcggaaggagtgcttgcatctagtgtataaagttgtagccaatacaacaccataca

SEQ ID NO: 345812 - DNA, 53 bp, Artificial
  Synthetic oligonucleotide
cactgcggattggaagtactgagaaaggtataccagatataccagcgtgtata

SEQ ID NO: 345813 - DNA, 60 bp, Artificial
  Synthetic oligonucleotide
cactgcgttacaggtcagctagttgagggacaatgtttcaatccatcccactcacttact

SEQ ID NO: 345814 - DNA, 55 bp, Artificial
  Synthetic oligonucleotide
cactgcgttgtctgctgctgagttctcgaaagaacttgcggatttacgtaccaag

SEQ ID NO: 345815 - DNA, 60 bp, Artificial
  Synthetic oligonucleotide
cactgctagcatttcagttgaagaggtcagatatcttggtgttgctcgcaggataaaaga

SEQ ID NO: 345816 - DNA, 55 bp, Artificial
  Synthetic oligonucleotide
cactgctataccaggaggttgtgtcttgtattgctatgtagctacaagatctgag

SEQ ID NO: 345817 - DNA, 55 bp, Artificial
  Synthetic oligonucleotide
cactgctatgctggggctcactgctatgctggggctcactgctatgctggggctc

SEQ ID NO: 345818 - DNA, 59 bp, Artificial
  Synthetic oligonucleotide
cactgctatggaacttttaatagctaggattgttatgtaccatcctaatgttggcttac

SEQ ID NO: 345819 - DNA, 60 bp, Artificial
  Synthetic oligonucleotide
cactgctcctccagttgacattgatccaggtctttgtatgcccacaagctgtaaaatctc

SEQ ID NO: 345820 - DNA, 60 bp, Artificial
  Synthetic oligonucleotide
cactgctcgagttaccctcggtgcaagatattggtgctcgagtgaaggatccatttaccc

SEQ ID NO: 345821 - DNA, 55 bp, Artificial
  Synthetic oligonucleotide
cactgctcgccagcttgacttctccttatatgtcaccgacaatcttgacgaaccc

SEQ ID NO: 345822 - DNA, 59 bp, Artificial
  Synthetic oligonucleotide
cactgctgcgccaaaaacgcgcgacgaagctatggcatgcattcatgctgtgtgggatg

SEQ ID NO: 345823 - DNA, 54 bp, Artificial
  Synthetic oligonucleotide
cactgctgcgtttggcccagcagcttgtgcattcacatgttaacatgggcctcc

SEQ ID NO: 345824 - DNA, 55 bp, Artificial
  Synthetic oligonucleotide
cactgctgtaaccaatgatatcctctcggccaacgatgttaaatggcgggagtcg

SEQ ID NO: 345825 - DNA, 60 bp, Artificial
  Synthetic oligonucleotide
cactgctgtggtcactgatggctaccttaagatggcaggcatgcatttcggtgcttgcga

SEQ ID NO: 345826 - DNA, 60 bp, Artificial
  Synthetic oligonucleotide
cactgctgttgtccgatattagacttccgcgatgctcagaggaagaccactagatggtta

SEQ ID NO: 345827 - DNA, 55 bp, Artificial
  Synthetic oligonucleotide
cactgcttggtgagcattcaggtgatgcctctatagtccaaggccctgtagaaag

SEQ ID NO: 345828 - DNA, 56 bp, Artificial
  Synthetic oligonucleotide
cactgctttcacgaggatcactgactcccccctaacgtattctacctatgggaggt

SEQ ID NO: 345829 - DNA, 60 bp, Artificial
  Synthetic oligonucleotide
cactggaaacaagccaatcctctatttctggggtgtacaccatcctcctgacaccaatga

SEQ ID NO: 345830 - DNA, 60 bp, Artificial
  Synthetic oligonucleotide
cactggaaatagtgtgtcccacctgtgcttcaagaccataacggcatggcggataaccaa

SEQ ID NO: 345831 - DNA, 55 bp, Artificial
  Synthetic oligonucleotide
cactggaagaggagtgtaactacaacgttatgtctgttataccctcgatcccagg

SEQ ID NO: 345832 - DNA, 55 bp, Artificial
  Synthetic oligonucleotide
cactggaagagggatgtaactacaatgttatgtctgttataccctcagtcccagg

SEQ ID NO: 345833 - DNA, 56 bp, Artificial
  Synthetic oligonucleotide
cactggaaggatcttctaaagaaagaattaagtgaggttttactaactgatgatgg

SEQ ID NO: 345834 - DNA, 55 bp, Artificial
  Synthetic oligonucleotide
cactggaagggaagattagcttgcattatgagatatggttaggccagggaaccat

SEQ ID NO: 345835 - DNA, 60 bp, Artificial
  Synthetic oligonucleotide
cactggaagttactgttatgcttaataaacgcctgccagatagtaggacatcctatgtta

SEQ ID NO: 345836 - DNA, 60 bp, Artificial
  Synthetic oligonucleotide
cactggaagtttaaaggcccttcacttgccaatgacttcacagcatttgaccagtcacaa

SEQ ID NO: 345837 - DNA, 60 bp, Artificial
  Synthetic oligonucleotide
cactggaatggatcccagaatgtgctccctaatgcaaggttcaacacttcccagaaggtc

SEQ ID NO: 345838 - DNA, 60 bp, Artificial
  Synthetic oligonucleotide
cactggaatggggagtccttcactggtccccttgcagatcaggcatccaaagccaacctc

SEQ ID NO: 345839 - DNA, 60 bp, Artificial
  Synthetic oligonucleotide
cactggacaacgcaagactgcaactgctccatgtacctcggccatatatcgggtcaccgc

SEQ ID NO: 345840 - DNA, 55 bp, Artificial
  Synthetic oligonucleotide
cactggacactagtacggccgggtgacaacataaccttttcacacaatggaggcc

SEQ ID NO: 345841 - DNA, 57 bp, Artificial
  Synthetic oligonucleotide
cactggacagactctgcatgaaaggtcggaattacaaagacttgggtaactgccatc

SEQ ID NO: 345842 - DNA, 53 bp, Artificial
  Synthetic oligonucleotide
cactggacagcttgagtctgtgacacaatcggcaaccctaggcccaatggcct

SEQ ID NO: 345843 - DNA, 60 bp, Artificial
  Synthetic oligonucleotide
cactggacatcttcacagggaacttcatcttgtcgagacaaatccaacgaacccacacac

SEQ ID NO: 345844 - DNA, 53 bp, Artificial
  Synthetic oligonucleotide
cactggaccacctacctggacactttctttacggaatttccgccgtccgtcta

SEQ ID NO: 345845 - DNA, 57 bp, Artificial
  Synthetic oligonucleotide
cactggacccaactcaacagacttctgggagaaacttgattccacaccttacctcaa

SEQ ID NO: 345846 - DNA, 54 bp, Artificial
  Synthetic oligonucleotide
cactggagcgcactggggcgtgatgttcggcctagcctacttctccatgcaagg

SEQ ID NO: 345847 - DNA, 55 bp, Artificial
  Synthetic oligonucleotide
cactggaggataaacttgcggacttcaagagaagaatggcagatgctgtgtcccg

SEQ ID NO: 345848 - DNA, 55 bp, Artificial
  Synthetic oligonucleotide
cactggaggccaagaagttagagacctactttgtgtgcaatcttttaatggcatc

SEQ ID NO: 345849 - DNA, 54 bp, Artificial
  Synthetic oligonucleotide
cactggatcggccctattaccaactggagaactggttagataccgtaccaaagg

SEQ ID NO: 345850 - DNA, 60 bp, Artificial
  Synthetic oligonucleotide
cactggatttgacccgtcactaggtttcaccgctacatgcaatatatcgccgaccataac

SEQ ID NO: 345851 - DNA, 60 bp, Artificial
  Synthetic oligonucleotide
cactggcaggccacttggatccctgactgggaggcggtgcataccccacaactagtcagg

SEQ ID NO: 345852 - DNA, 55 bp, Artificial
  Synthetic oligonucleotide
cactggcatttcgagaagatcgcatcaaattagattctcagaatccgcgacatca

SEQ ID NO: 345853 - DNA, 55 bp, Artificial
  Synthetic oligonucleotide
cactggcatttgcacagaatcagactacgaagcctttgatgcctcccaggaccac

SEQ ID NO: 345854 - DNA, 55 bp, Artificial
  Synthetic oligonucleotide
cactggccaatatggcattcactatgtgtagatacgaatggaggagaggacaacc

SEQ ID NO: 345855 - DNA, 55 bp, Artificial
  Synthetic oligonucleotide
cactggccgaaggcaactagcaataaggtaggtgggttcagacgcttaaagtgtg

SEQ ID NO: 345856 - DNA, 55 bp, Artificial
  Synthetic oligonucleotide
cactggcctatgagtgtgtgaccatagatcaaggagaagagcctgttgacgtgga

SEQ ID NO: 345857 - DNA, 51 bp, Artificial
  Synthetic oligonucleotide
cactggcctgggcgggactgagagtggccaaccctcagatgctgcatataa

SEQ ID NO: 345858 - DNA, 54 bp, Artificial
  Synthetic oligonucleotide
cactggcgaggtgattacaaaccttcgacagttaacaaaacgtatggccccgtc

SEQ ID NO: 345859 - DNA, 50 bp, Artificial
  Synthetic oligonucleotide
cactggctatgctaccaatgtatttgctccgacatcaggtggttacatac

SEQ ID NO: 345860 - DNA, 55 bp, Artificial
  Synthetic oligonucleotide
cactggctgcactgaagaatgagtgggattcagtttacccgaaagaatacctccg

SEQ ID NO: 345861 - DNA, 55 bp, Artificial
  Synthetic oligonucleotide
cactggctggatgattgagagatcgatctgatttctaggaaactaggagggcctc

SEQ ID NO: 345862 - DNA, 60 bp, Artificial
  Synthetic oligonucleotide
cactggctgtctagtggactctagttggtagagaaagctatgcttttgcccaaagccatg

SEQ ID NO: 345863 - DNA, 60 bp, Artificial
  Synthetic oligonucleotide
cactgggaagagctcaataatgaggtcagatgcacctattgatacctgtgtttctgaatg

SEQ ID NO: 345864 - DNA, 53 bp, Artificial
  Synthetic oligonucleotide
cactgggacaattgacaaaacaccggaagaaataacttctggaaccggtggga

SEQ ID NO: 345865 - DNA, 50 bp, Artificial
  Synthetic oligonucleotide
cactgggacgcctacaagggtgccagggtggtcctctgggatgacttcgg

SEQ ID NO: 345866 - DNA, 55 bp, Artificial
  Synthetic oligonucleotide
cactgggactcccttggtgactccctcccttccgacggaatgcctttcagctacg

SEQ ID NO: 345867 - DNA, 58 bp, Artificial
  Synthetic oligonucleotide
cactgggagcattcataaccgacaggataatatgtacggcccgaaccataatcaccgg

SEQ ID NO: 345868 - DNA, 60 bp, Artificial
  Synthetic oligonucleotide
cactgggatcggcactgcctcacgacctagtgaagtgtgcatggttgacggaacggacat

SEQ ID NO: 345869 - DNA, 60 bp, Artificial
  Synthetic oligonucleotide
cactgggatgcctacaagggcgccagagttgtcctctgggacgacttcggcatggataac

SEQ ID NO: 345870 - DNA, 57 bp, Artificial
  Synthetic oligonucleotide
cactgggctaagcttgtttgagttcaatatgaggtataagaaaggttccttagagaa

SEQ ID NO: 345871 - DNA, 58 bp, Artificial
  Synthetic oligonucleotide
cactgggctttggtgtttacatgtctaaggcccatgggattgaacctaacatcaggac

SEQ ID NO: 345872 - DNA, 55 bp, Artificial
  Synthetic oligonucleotide
cactggggagtcctggcgggcatagcgtacttctccatggtagggaactgggcga

SEQ ID NO: 345873 - DNA, 58 bp, Artificial
  Synthetic oligonucleotide
cactggggcgtgccaggaggagtggtctgagcgggacggggagtggtcaaccctcaga

SEQ ID NO: 345874 - DNA, 51 bp, Artificial
  Synthetic oligonucleotide
cactggggcgttccaagaagaatggtctgggggggactgggagtggccacc

SEQ ID NO: 345875 - DNA, 55 bp, Artificial
  Synthetic oligonucleotide
cactgggggcgtgctccctcaccccgccgctggggagtcccttgctgaccccgga

SEQ ID NO: 345876 - DNA, 52 bp, Artificial
  Synthetic oligonucleotide
cactgggtgggatgctgttatagtagcgtgaatgataggttggtgagctttc

SEQ ID NO: 345877 - DNA, 55 bp, Artificial
  Synthetic oligonucleotide
cactggtaaggttatatgcatatctgacgttactcgcggtaacggtattacccac

SEQ ID NO: 345878 - DNA, 57 bp, Artificial
  Synthetic oligonucleotide
cactggtacctccaaatcctacgtacggtctttgtagtaggtgagtcctcagcgtga

SEQ ID NO: 345879 - DNA, 60 bp, Artificial
  Synthetic oligonucleotide
cactggtagtatgggtgagtctgattatcgtttggcatgctatgctcatttagcccgtgc

SEQ ID NO: 345880 - DNA, 60 bp, Artificial
  Synthetic oligonucleotide
cactggtatccccacgccacactccacaaggcaggagcactacgtgtcactcatgtatga

SEQ ID NO: 345881 - DNA, 55 bp, Artificial
  Synthetic oligonucleotide
cactggtattagtgggaatcgtgacactgtacttgggagttatggtgcaggccga

SEQ ID NO: 345882 - DNA, 57 bp, Artificial
  Synthetic oligonucleotide
cactggtcggtaaattgaattccacagcattcacccaagtgcgtaaattcaagactt

SEQ ID NO: 345883 - DNA, 55 bp, Artificial
  Synthetic oligonucleotide
cactggtgattgggaatcccctggaattgtgatatctggtaaaggaagtgtgagc

SEQ ID NO: 345884 - DNA, 59 bp, Artificial
  Synthetic oligonucleotide
cactggtggagagggggtatcttgctccttggaatgttgatgatctgtagcactactaa

SEQ ID NO: 345885 - DNA, 58 bp, Artificial
  Synthetic oligonucleotide
cactggtggtatgagttgtataggattggattcttaaataagttatatcgatgtggtg

SEQ ID NO: 345886 - DNA, 59 bp, Artificial
  Synthetic oligonucleotide
cactggtggtgaaggcaaatcaacgtttgccagagatctgtatagaactgggtcttggt

SEQ ID NO: 345887 - DNA, 60 bp, Artificial
  Synthetic oligonucleotide
cactggttacaacaaagagcttaacgcgatggctgcgactcacgcttacataagactcag

SEQ ID NO: 345888 - DNA, 55 bp, Artificial
  Synthetic oligonucleotide
cactggttcctgcactaatgctgttggagggagtgggacgaataactatggggtg

SEQ ID NO: 345889 - DNA, 54 bp, Artificial
  Synthetic oligonucleotide
cactggttcgagctgccctcagattccagctgaatggggatttcctgcctttcc

SEQ ID NO: 345890 - DNA, 58 bp, Artificial
  Synthetic oligonucleotide
cactggtttcagtgtggtctgtaacttgacacatgcgtgttatttcaagtccattgga

SEQ ID NO: 345891 - DNA, 55 bp, Artificial
  Synthetic oligonucleotide
cactggttttggcaaccagacaagatagcatggggatctttaaatcttgtgagcg

SEQ ID NO: 345892 - DNA, 60 bp, Artificial
  Synthetic oligonucleotide
cactgtaaagctgcctagcagcgtcaagcgtgaatctggtacgtttaccgctaacacgaa

SEQ ID NO: 345893 - DNA, 57 bp, Artificial
  Synthetic oligonucleotide
cactgtaacattagtagaaaaggatggaatgacactttaagagaggtagctagaaaa

SEQ ID NO: 345894 - DNA, 60 bp, Artificial
  Synthetic oligonucleotide
cactgtactctaatgttagtgacctcattcagcaatttaaccaaatgatagttactatga

SEQ ID NO: 345895 - DNA, 60 bp, Artificial
  Synthetic oligonucleotide
cactgtactgaaagctgacactatctgtgtgggctaccatgcaaacaactctacagacac

SEQ ID NO: 345896 - DNA, 50 bp, Artificial
  Synthetic oligonucleotide
cactgtacttgggagtcatggtgcaggccgatagtggttgcgttgtgagt

SEQ ID NO: 345897 - DNA, 60 bp, Artificial
  Synthetic oligonucleotide
cactgtagaggagttacagtgatcaaagtggtagattctgtgataattagtataagatct

SEQ ID NO: 345898 - DNA, 54 bp, Artificial
  Synthetic oligonucleotide
cactgtagctgacaatacacgtggcacacctttgaccattaatattggtccgaa

SEQ ID NO: 345899 - DNA, 57 bp, Artificial
  Synthetic oligonucleotide
cactgtaggttataaaggtccgaacgaaatggatgctggtatttactacgctccata

SEQ ID NO: 345900 - DNA, 60 bp, Artificial
  Synthetic oligonucleotide
cactgtaggttatggagaatggccagagtattgccctgatactgatgctactgcagtgga

SEQ ID NO: 345901 - DNA, 58 bp, Artificial
  Synthetic oligonucleotide
cactgtatacatagaaagagagtcagatcaaaaacctgagtttttaaacaatacagaa

SEQ ID NO: 345902 - DNA, 60 bp, Artificial
  Synthetic oligonucleotide
cactgtatgtattatcatatgcaatgtttaacatgtacatggggggttatagtaatgatg

SEQ ID NO: 345903 - DNA, 55 bp, Artificial
  Synthetic oligonucleotide
cactgtcacctgctaccttaacccatggtaccacaccggaatggatacagcaggc

SEQ ID NO: 345904 - DNA, 60 bp, Artificial
  Synthetic oligonucleotide
cactgtcagaaccaagaaacatccaacagaagctccctcctgaaataatcacactgcatc

SEQ ID NO: 345905 - DNA, 57 bp, Artificial
  Synthetic oligonucleotide
cactgtcaggcagccgggtgaaaccaacacggcgttcagtgttcccccactcaacca

SEQ ID NO: 345906 - DNA, 59 bp, Artificial
  Synthetic oligonucleotide
cactgtcagtaagggagtctagttgaaatgcaaccgctatcatcgaaatgtaccgacgg

SEQ ID NO: 345907 - DNA, 60 bp, Artificial
  Synthetic oligonucleotide
cactgtcatacatgagaaaataggggaccaccagactgtagtgtacccaacgataactga

SEQ ID NO: 345908 - DNA, 59 bp, Artificial
  Synthetic oligonucleotide
cactgtcatccacctggttcaaaaggtagacatcagggacgaacaaaagcgaagccaga

SEQ ID NO: 345909 - DNA, 52 bp, Artificial
  Synthetic oligonucleotide
cactgtcccagcgtctgctgaacactaccggaatgcttcgggcatctatcag

SEQ ID NO: 345910 - DNA, 55 bp, Artificial
  Synthetic oligonucleotide
cactgtccgtggctacattcgtgaggatcttaagagtgtggccgacttagatttg

SEQ ID NO: 345911 - DNA, 55 bp, Artificial
  Synthetic oligonucleotide
cactgtcctcgtcaccaacaaaagaaggacatggaccaacaggcccatgtatcgc

SEQ ID NO: 345912 - DNA, 60 bp, Artificial
  Synthetic oligonucleotide
cactgtcctgatttctcttatcttcctattcaaaagaggtgactcctgcacgcttccgcc

SEQ ID NO: 345913 - DNA, 53 bp, Artificial
  Synthetic oligonucleotide
cactgtccttgatctgcaccccggagcaggaaagacacgcaagatacttcccc

SEQ ID NO: 345914 - DNA, 51 bp, Artificial
  Synthetic oligonucleotide
cactgtctcccggcccttcggacgacccccaatgggctggtttaaaaggac

SEQ ID NO: 345915 - DNA, 55 bp, Artificial
  Synthetic oligonucleotide
cactgtctgtgacatgatatacggatcatacgtcacctatctggatcttttgctg

SEQ ID NO: 345916 - DNA, 58 bp, Artificial
  Synthetic oligonucleotide
cactgtctttaagtatagtgtgattgtatcaccaaataatgcttttgtttagtgtggt

SEQ ID NO: 345917 - DNA, 54 bp, Artificial
  Synthetic oligonucleotide
cactgtgacaaatctactaaggggatcgaacacagttaaagtcgtagggaaagg

SEQ ID NO: 345918 - DNA, 58 bp, Artificial
  Synthetic oligonucleotide
cactgtgagattggtggacccgataactggcaaaacttgcgataaagcggttcgagac

SEQ ID NO: 345919 - DNA, 60 bp, Artificial
  Synthetic oligonucleotide
cactgtgatcgaccatttcagcagtgtgagctaagtaccgttaacggtgcggacacttac

SEQ ID NO: 345920 - DNA, 53 bp, Artificial
  Synthetic oligonucleotide
cactgtgatctaaaggggtgcaccccggtaagagctcggcccaaaggccgggt

SEQ ID NO: 345921 - DNA, 60 bp, Artificial
  Synthetic oligonucleotide
cactgtgatgctgtatgggcaatttggcccgaatgtggagtttgctggccaacagaaagg

SEQ ID NO: 345922 - DNA, 55 bp, Artificial
  Synthetic oligonucleotide
cactgtgatgttgtggaggcaggcagtcaatttgtcattgggcctgtgagggtgg

SEQ ID NO: 345923 - DNA, 60 bp, Artificial
  Synthetic oligonucleotide
cactgtgattaactacggtatatatcaaagcaatgaccagcaagtgtccatcgactgtcc

SEQ ID NO: 345924 - DNA, 55 bp, Artificial
  Synthetic oligonucleotide
cactgtgcaagtagtcagagtggtcaatttagctgtgccggacacttggatgtcg

SEQ ID NO: 345925 - DNA, 58 bp, Artificial
  Synthetic oligonucleotide
cactgtgctcatgtggatattacaagattccaaaaaagccttataggtgggttaggaa

SEQ ID NO: 345926 - DNA, 60 bp, Artificial
  Synthetic oligonucleotide
cactgtggcccaagtacagtccgtattggagtttgtaatgccagagtcaagcctcaagat

SEQ ID NO: 345927 - DNA, 58 bp, Artificial
  Synthetic oligonucleotide
cactgtggttacctccatccggtaaattatatttgccaccctctcagcctgtggctaa

SEQ ID NO: 345928 - DNA, 55 bp, Artificial
  Synthetic oligonucleotide
cactgtggttttgagtgattcacagagtctgaaatactcggactcttcgaagacc

SEQ ID NO: 345929 - DNA, 52 bp, Artificial
  Synthetic oligonucleotide
cactgtgtacgttgcttcacaacaaaaggcttaggaatctcctatggcagga

SEQ ID NO: 345930 - DNA, 57 bp, Artificial
  Synthetic oligonucleotide
cactgtgtgggaaaccacattacgttccatcaatgacctagggttcttcgctaagaa

SEQ ID NO: 345931 - DNA, 54 bp, Artificial
  Synthetic oligonucleotide
cactgtgtggggtgtggatgggaaagcgagttccgcacgtcgaacgcggagtgg

SEQ ID NO: 345932 - DNA, 60 bp, Artificial
  Synthetic oligonucleotide
cactgtgtgtgttggacccgagacctcgcactcgattggttgcactgcgcacgtgttaac

SEQ ID NO: 345933 - DNA, 51 bp, Artificial
  Synthetic oligonucleotide
cactgttaagcaaatttaaagactcgtttggggtcagctttacagaactta

SEQ ID NO: 345934 - DNA, 60 bp, Artificial
  Synthetic oligonucleotide
cactgttaatgtggtgcgtagtacacgagctaatgttgttaacttactatgatctcttgt

SEQ ID NO: 345935 - DNA, 55 bp, Artificial
  Synthetic oligonucleotide
cactgttacaacgattaagatctccaccagaacatatttgtaatggtgcttgtgg

SEQ ID NO: 345936 - DNA, 56 bp, Artificial
  Synthetic oligonucleotide
cactgttacgagtttcgtgaccttacggttgccgcattcaagggggatgattctgt

SEQ ID NO: 345937 - DNA, 55 bp, Artificial
  Synthetic oligonucleotide
cactgttacggatcatgtgagaaatatgcatatccatggcaaactgctggttgct

SEQ ID NO: 345938 - DNA, 55 bp, Artificial
  Synthetic oligonucleotide
cactgttcacaacacattttgtcaagtatgatggaactatgcaccctgaagtcca

SEQ ID NO: 345939 - DNA, 55 bp, Artificial
  Synthetic oligonucleotide
cactgttcatcctcgctcctacagtgaggaggtgttgggtactgatgaggaggtg

SEQ ID NO: 345940 - DNA, 58 bp, Artificial
  Synthetic oligonucleotide
cactgttcccacgagaccgaataagtattggcctggtgttgtagctataggacttgtg

SEQ ID NO: 345941 - DNA, 56 bp, Artificial
  Synthetic oligonucleotide
cactgttccggagattcacgcgtgtttggtggtacacggacaagttggaacaagtc

SEQ ID NO: 345942 - DNA, 57 bp, Artificial
  Synthetic oligonucleotide
cactgttccggagattcactcgtgtttggtggtacaacattgacaagttggaacaag

SEQ ID NO: 345943 - DNA, 57 bp, Artificial
  Synthetic oligonucleotide
cactgttccgtagattcactcgcgtctggtggtatagtaacaaccagttggaacaag

SEQ ID NO: 345944 - DNA, 55 bp, Artificial
  Synthetic oligonucleotide
cactgttcgcttgtagtctagttaacgattccaccattttgcaccagcgagaagc

SEQ ID NO: 345945 - DNA, 59 bp, Artificial
  Synthetic oligonucleotide
cactgttgaccataagctgcgtaacaaacgtaccaccatcgccttactcagtcgagaag

SEQ ID NO: 345946 - DNA, 60 bp, Artificial
  Synthetic oligonucleotide
cactgttgtctcaatccgctgctgtacgtcttcgtgggcaccaagtttcggcaagaactg

SEQ ID NO: 345947 - DNA, 55 bp, Artificial
  Synthetic oligonucleotide
cactgttgttaaattggacagaaacgaaaaatttagagatattaggaaatacata

SEQ ID NO: 345948 - DNA, 60 bp, Artificial
  Synthetic oligonucleotide
cactgtttactgacattgcaacaccacattctgtatgggtatttgcatgtgcacctgata

SEQ ID NO: 345949 - DNA, 55 bp, Artificial
  Synthetic oligonucleotide
cactgtttatacgaaacagcaagccgatggaacatttgctaaagaagcgcacgta

SEQ ID NO: 345950 - DNA, 50 bp, Artificial
  Synthetic oligonucleotide
cactgtttattgggcccccggcgtgcgtgaggagtaccggtctagcgact

SEQ ID NO: 345951 - DNA, 52 bp, Artificial
  Synthetic oligonucleotide
cactgtttccaatcaaagacatagtccaagctaaccgtcgcgtgaatgctta

SEQ ID NO: 345952 - DNA, 58 bp, Artificial
  Synthetic oligonucleotide
cactgtttctgttatggatctgtctcaaatgtattctcctgttttcgagtacctgtca

SEQ ID NO: 345953 - DNA, 60 bp, Artificial
  Synthetic oligonucleotide
cactgtttggcttagaaaattgatttccttctttgattcatcattgagagtctttatcgc

SEQ ID NO: 345954 - DNA, 53 bp, Artificial
  Synthetic oligonucleotide
cactgttttatatcacgtgttgagtggatgagatccagatgttcactcgcaaa

SEQ ID NO: 345955 - DNA, 55 bp, Artificial
  Synthetic oligonucleotide
cacttaaaagttgctctgttacgtatgtcaatgacccttcatctaagatggtttg

SEQ ID NO: 345956 - DNA, 55 bp, Artificial
  Synthetic oligonucleotide
cacttaaagttaggaaacatttgttagatgccgtggaaaaggacgcattcgtgaa

SEQ ID NO: 345957 - DNA, 55 bp, Artificial
  Synthetic oligonucleotide
cacttaaatcgaagggtagtgtcttggaacgcgcgggtcaaatataagtggttca

SEQ ID NO: 345958 - DNA, 56 bp, Artificial
  Synthetic oligonucleotide
cacttaacacgtgatcttagaatcggtgggagagtttgcgattaactttaggtcta

SEQ ID NO: 345959 - DNA, 55 bp, Artificial
  Synthetic oligonucleotide
cacttaacggacaggctacaaattccaccgttcaatacatgtatgtaccacctgg

SEQ ID NO: 345960 - DNA, 50 bp, Artificial
  Synthetic oligonucleotide
cacttaactattggagaataactaatcaagatgaatataatgtgggtctc

SEQ ID NO: 345961 - DNA, 55 bp, Artificial
  Synthetic oligonucleotide
cacttaactgcttgacaaccgcgctagacagaactgacgcggacgtaaccatcta

SEQ ID NO: 345962 - DNA, 59 bp, Artificial
  Synthetic oligonucleotide
cacttaaggaatgacaccgacgtggtaaactttgtgagcatggaattttctctcactga

SEQ ID NO: 345963 - DNA, 52 bp, Artificial
  Synthetic oligonucleotide
cacttaaggcactttaccctggtataggtagtggggtattatttcaagggaa

SEQ ID NO: 345964 - DNA, 56 bp, Artificial
  Synthetic oligonucleotide
cacttaataaaggagtttcttcaccaatagtacctaattctatatcttcggtagca

SEQ ID NO: 345965 - DNA, 54 bp, Artificial
  Synthetic oligonucleotide
cacttaattcgggtaaaagtgatgcaggacctccgatttaccaggtttagtgta

SEQ ID NO: 345966 - DNA, 58 bp, Artificial
  Synthetic oligonucleotide
cacttacaagggtggacctgtattagaaccatcaccaggcgcgtggaaaagtctcaga

SEQ ID NO: 345967 - DNA, 51 bp, Artificial
  Synthetic oligonucleotide
cacttacaaggtgatcctaattgcctaaagtgtttaaggtggaggttaaag

SEQ ID NO: 345968 - DNA, 57 bp, Artificial
  Synthetic oligonucleotide
cacttacaatgtcagctgtattaagggggcccccatggttgagaaagtcaaggagcc

SEQ ID NO: 345969 - DNA, 60 bp, Artificial
  Synthetic oligonucleotide
cacttacaggtacgtttccactggagagcgagcctcaggaatgtttgacagtgtagtgct

SEQ ID NO: 345970 - DNA, 53 bp, Artificial
  Synthetic oligonucleotide
cacttacagtcaacaattcaagccatactaatgctacttgtgcctggctggaa

SEQ ID NO: 345971 - DNA, 55 bp, Artificial
  Synthetic oligonucleotide
cacttacattacgtgtgacctccatacaatcggatttcgaatctcgaatagccac

SEQ ID NO: 345972 - DNA, 58 bp, Artificial
  Synthetic oligonucleotide
cacttaccacggtgttcctgtggccatcaagcaagtaaacaagtgcaccgaggaccta

SEQ ID NO: 345973 - DNA, 58 bp, Artificial
  Synthetic oligonucleotide
cacttaccatatttgcacggctatgtaatatgccaccgtgttgggcgttttgatgggg

SEQ ID NO: 345974 - DNA, 58 bp, Artificial
  Synthetic oligonucleotide
cacttacccgccacacagagaagtgcgttatccttgacgcacccggcctgttacgtga

SEQ ID NO: 345975 - DNA, 55 bp, Artificial
  Synthetic oligonucleotide
cacttacctgcaaacttatcaactgaggaggaaactcgaactcttcacgtattct

SEQ ID NO: 345976 - DNA, 55 bp, Artificial
  Synthetic oligonucleotide
cacttacggtgagcgcattcaaagacttggtcgggttggtaggtgcaagccgggg

SEQ ID NO: 345977 - DNA, 60 bp, Artificial
  Synthetic oligonucleotide
cacttacgttgcatacctctgttgagtggtattgaaagcgtagcagagagtcctaagttg

SEQ ID NO: 345978 - DNA, 60 bp, Artificial
  Synthetic oligonucleotide
cacttactaattcacaatgacaagttgcactcaactaacatttaggcacaaattgatgga

SEQ ID NO: 345979 - DNA, 60 bp, Artificial
  Synthetic oligonucleotide
cacttactatggagcttacttgctcctgggactgaacgtctcatgatccaactaagaaac

SEQ ID NO: 345980 - DNA, 60 bp, Artificial
  Synthetic oligonucleotide
cacttaggaaatagtgaaattctagaatggcttggaattcctcaggctcatttgagagta

SEQ ID NO: 345981 - DNA, 55 bp, Artificial
  Synthetic oligonucleotide
cacttaggaagccaagaattagatgatgaatgcacaatgctaacattgttcggac

SEQ ID NO: 345982 - DNA, 59 bp, Artificial
  Synthetic oligonucleotide
cacttaggatagggcacacagagaaagggattgaagagatccctgaattcatagcaact

SEQ ID NO: 345983 - DNA, 55 bp, Artificial
  Synthetic oligonucleotide
cacttaggtcaacgacatccgattttacaatcactcgggttcgtttaatcgctga

SEQ ID NO: 345984 - DNA, 57 bp, Artificial
  Synthetic oligonucleotide
cacttataatggagagacaccgaacgcaactactgattactactctacaactaactt

SEQ ID NO: 345985 - DNA, 55 bp, Artificial
  Synthetic oligonucleotide
cacttatatcacatttcctccccttgggaaaaccgagcccagtcgatgtcggtcc

SEQ ID NO: 345986 - DNA, 53 bp, Artificial
  Synthetic oligonucleotide
cacttatctaagatttgacatggaaatcacaatcgtgattactagttcacagg

SEQ ID NO: 345987 - DNA, 60 bp, Artificial
  Synthetic oligonucleotide
cacttatctgggaggcggtggacggaaactgcagtacgatctcagttaggtcatgagaca

SEQ ID NO: 345988 - DNA, 60 bp, Artificial
  Synthetic oligonucleotide
cacttatgaacatggctgagcttaagccacgatcggtccgctaggctgcatgcgcattga

SEQ ID NO: 345989 - DNA, 55 bp, Artificial
  Synthetic oligonucleotide
cacttatgacaataaggcgctgacgtggcggaatgtccagtctttcgtcgaatcg

SEQ ID NO: 345990 - DNA, 60 bp, Artificial
  Synthetic oligonucleotide
cacttatgagcatagtgtcaagcctgcacctgagcattagaggaaataccatctacaaag

SEQ ID NO: 345991 - DNA, 60 bp, Artificial
  Synthetic oligonucleotide
cacttatgagtacgttgtgcacaattcctcactcgttaatgtttgtagaggtctggttga

SEQ ID NO: 345992 - DNA, 56 bp, Artificial
  Synthetic oligonucleotide
cacttatgcaggcaagttctttggtaaccgcaaccgctaacctatggaaagattta

SEQ ID NO: 345993 - DNA, 57 bp, Artificial
  Synthetic oligonucleotide
cacttatgctagaatgactcaaattatattgtcgttattttggttatcttacgttgg

SEQ ID NO: 345994 - DNA, 55 bp, Artificial
  Synthetic oligonucleotide
cacttatggacccgacattctaagcgctctcaatatgaaggcagcaatgggtgca

SEQ ID NO: 345995 - DNA, 58 bp, Artificial
  Synthetic oligonucleotide
cacttattctaatctggtggagttacaaaactatgactgtcccttctcgccacagcag

SEQ ID NO: 345996 - DNA, 53 bp, Artificial
  Synthetic oligonucleotide
cacttattttgggtatatcgaggcttggagaaaccttaaggttagattaacac

SEQ ID NO: 345997 - DNA, 60 bp, Artificial
  Synthetic oligonucleotide
cacttcaaaagctacaaagataatcttatacaccgatgtatcgcagtgggacgcgagcca

SEQ ID NO: 345998 - DNA, 55 bp, Artificial
  Synthetic oligonucleotide
cacttcaaacggcactgttgacgaaccttcagtcgacgaatgtggcgccaggcct

SEQ ID NO: 345999 - DNA, 59 bp, Artificial
  Synthetic oligonucleotide
cacttcaaagtgggcattcacagggttatacactggctgacactaatggggcaaaaata

SEQ ID NO: 346000 - DNA, 59 bp, Artificial
  Synthetic oligonucleotide
cacttcaacagggaaaatatgcaacaacccatatagggtcctagatggaagaaactgca

SEQ ID NO: 346001 - DNA, 60 bp, Artificial
  Synthetic oligonucleotide
cacttcaagaagagtgatcatgctcctattcgtttcggaacaattgtgtctagattcaaa

SEQ ID NO: 346002 - DNA, 56 bp, Artificial
  Synthetic oligonucleotide
cacttcaagatctgggtccagatcggactcggtatctgggtccgggggggccaagc

SEQ ID NO: 346003 - DNA, 52 bp, Artificial
  Synthetic oligonucleotide
cacttcaagctccagatatggtacatcagttacaaaccacatggggacactc

SEQ ID NO: 346004 - DNA, 57 bp, Artificial
  Synthetic oligonucleotide
cacttcaagggatcaggagctcagattgtgggaccgatgggacagcccctacaagta

SEQ ID NO: 346005 - DNA, 55 bp, Artificial
  Synthetic oligonucleotide
cacttcaatcaaggcatgtgatatggcaatgtgttatggggcaactgtgacaaac

SEQ ID NO: 346006 - DNA, 58 bp, Artificial
  Synthetic oligonucleotide
cacttcaatcaatccgactgataacatccgtgtgaccacgaccctttcgggccgcacc

SEQ ID NO: 346007 - DNA, 60 bp, Artificial
  Synthetic oligonucleotide
cacttcaatgttctacagcgcacctgatgttgagaagcgatatagtaaagtttctggtga

SEQ ID NO: 346008 - DNA, 60 bp, Artificial
  Synthetic oligonucleotide
cacttcaattaccatgctagccgtacattctggcaagcaagagtacgatcgactcttcgc

SEQ ID NO: 346009 - DNA, 55 bp, Artificial
  Synthetic oligonucleotide
cacttcactggctcagaaactacattggagaattttctaggaaggtccgcctgtg

SEQ ID NO: 346010 - DNA, 53 bp, Artificial
  Synthetic oligonucleotide
cacttcagaaaccaagttaaaatacgccgccgagttgatataaacccgggtca

SEQ ID NO: 346011 - DNA, 60 bp, Artificial
  Synthetic oligonucleotide
cacttcagagacgctacggaggtggtctcgtgagaaatcccctctcacgcaattccactc

SEQ ID NO: 346012 - DNA, 55 bp, Artificial
  Synthetic oligonucleotide
cacttcagatcgagcatggcattaagactgagatggcagagtcgttcttcaacgg

SEQ ID NO: 346013 - DNA, 55 bp, Artificial
  Synthetic oligonucleotide
cacttcagttgatacgtgtggtgctactaatcaggcagctgtatcacaatgggag

SEQ ID NO: 346014 - DNA, 60 bp, Artificial
  Synthetic oligonucleotide
cacttcatactggcttgaaatgccggccaaggggtctgctattggtgattatatagtggt

SEQ ID NO: 346015 - DNA, 55 bp, Artificial
  Synthetic oligonucleotide
cacttcataggactattcaacggtttaaccatggctgatgacttacaaggattaa

SEQ ID NO: 346016 - DNA, 54 bp, Artificial
  Synthetic oligonucleotide
cacttcatcccctttaaggataatgtaaccactgaaggttctagttactagcct

SEQ ID NO: 346017 - DNA, 55 bp, Artificial
  Synthetic oligonucleotide
cacttcatggaaagaggtttcactaagtatgagagacatatattccctggaccat

SEQ ID NO: 346018 - DNA, 57 bp, Artificial
  Synthetic oligonucleotide
cacttcattcgagtaaaccctaggattgaaatctaggtgtccactcaaatagttatg

SEQ ID NO: 346019 - DNA, 55 bp, Artificial
  Synthetic oligonucleotide
cacttcattggccccgatgctcctcaagcgctcaacgaccactacgtgcgcttct

SEQ ID NO: 346020 - DNA, 55 bp, Artificial
  Synthetic oligonucleotide
cacttccaaacatcccactagtgacatcttcaactatgtcgtcggacatgtctca

SEQ ID NO: 346021 - DNA, 60 bp, Artificial
  Synthetic oligonucleotide
cacttccacatcagtggcctgcatcacttgtcatagcgacccctgcaacgtttttgtaat

SEQ ID NO: 346022 - DNA, 55 bp, Artificial
  Synthetic oligonucleotide
cacttcccattacttatgttggaaaattagatcttggcgaaaggactcaaatggt

SEQ ID NO: 346023 - DNA, 60 bp, Artificial
  Synthetic oligonucleotide
cacttcccctagcagcgccccatcttctgtctatctcgaactgtccgtcaaaagacaatg

SEQ ID NO: 346024 - DNA, 60 bp, Artificial
  Synthetic oligonucleotide
cacttccgctcgcgcaattggcatggcttacgccgcctgtgcaatggatcgtacctttca

SEQ ID NO: 346025 - DNA, 53 bp, Artificial
  Synthetic oligonucleotide
cacttccggaaactactgttgttagacgaaggagaccctctggaagacgcact

SEQ ID NO: 346026 - DNA, 54 bp, Artificial
  Synthetic oligonucleotide
cacttccgggtcaaaggttgtttttccggtgacgtcacgggatgtgacgcagta

SEQ ID NO: 346027 - DNA, 57 bp, Artificial
  Synthetic oligonucleotide
cacttccgtgcttgcacaaaatggccgccaattacttccggggtcaaaggttgctgc

SEQ ID NO: 346028 - DNA, 60 bp, Artificial
  Synthetic oligonucleotide
cacttcctgggccgagtctacgtcctcatataaatgactgcacttccgaatggctgagtt

SEQ ID NO: 346029 - DNA, 53 bp, Artificial
  Synthetic oligonucleotide
cacttcgaaaagaggagaggtactcaaggtgaagctagagcttacgccatgaa

SEQ ID NO: 346030 - DNA, 57 bp, Artificial
  Synthetic oligonucleotide
cacttcgaatgtgaattacttccaaaacacacatttacacaatcgaggaactagatt

SEQ ID NO: 346031 - DNA, 56 bp, Artificial
  Synthetic oligonucleotide
cacttcgccaggtattacgtacaaaagacttggtttcataaagaaagctgatgctt

SEQ ID NO: 346032 - DNA, 54 bp, Artificial
  Synthetic oligonucleotide
cacttcgcccgaggttacggcgagacgatacgggttgatcgtaaatccgtgttc

SEQ ID NO: 346033 - DNA, 55 bp, Artificial
  Synthetic oligonucleotide
cacttcgcgcccgtttatgttgatgcggaacaagctagaatcagactgaacgcag

SEQ ID NO: 346034 - DNA, 60 bp, Artificial
  Synthetic oligonucleotide
cacttcgctagtcggatctattgttaatagactcaggattgagtatctatacagactaat

SEQ ID NO: 346035 - DNA, 60 bp, Artificial
  Synthetic oligonucleotide
cacttcgcttcacctctgcacgtcgcatggaaaccaccgtgaacgcccacgctcatcaaa

SEQ ID NO: 346036 - DNA, 55 bp, Artificial
  Synthetic oligonucleotide
cacttcggcggtgatatcagccctagcaaggccaactacctttccgtttccaagt

SEQ ID NO: 346037 - DNA, 55 bp, Artificial
  Synthetic oligonucleotide
cacttcggcgttcgtaacgtcagcgatcttatccacgtccggaatagttgcgctc

SEQ ID NO: 346038 - DNA, 60 bp, Artificial
  Synthetic oligonucleotide
cacttcgggtcatcgctgtgctaagcacaatgccaatgtaggtggcgctaagaactccat

SEQ ID NO: 346039 - DNA, 55 bp, Artificial
  Synthetic oligonucleotide
cacttcggtcgggtcagtcatgtcagtatcggacaacttgaaaggattgcgcact

SEQ ID NO: 346040 - DNA, 55 bp, Artificial
  Synthetic oligonucleotide
cacttctagaggttgcttccagtcgataggacgtttgattaacagttctaagtac

SEQ ID NO: 346041 - DNA, 55 bp, Artificial
  Synthetic oligonucleotide
cacttctcagtgcacgttatgttaagtacgtggattccagtgcactaggaccatc

SEQ ID NO: 346042 - DNA, 51 bp, Artificial
  Synthetic oligonucleotide
cacttctcgaggatctcctcccttcctcctctccgagctttcttcgattcg

SEQ ID NO: 346043 - DNA, 55 bp, Artificial
  Synthetic oligonucleotide
cacttctcgcatgcggctgttcgctcgcttctgctatcatcgcctgcagtccgag

SEQ ID NO: 346044 - DNA, 60 bp, Artificial
  Synthetic oligonucleotide
cacttctctaatagaacaatacaatttgcaccacactcaggaggagacctagaagttaca

SEQ ID NO: 346045 - DNA, 52 bp, Artificial
  Synthetic oligonucleotide
cacttctgatgaccttggctttgagtctgtccaagtcggctgcaagaacaag

SEQ ID NO: 346046 - DNA, 55 bp, Artificial
  Synthetic oligonucleotide
cacttctgatgattctttcgaatcgacagagaactatctccttcaaaatcgttcg

SEQ ID NO: 346047 - DNA, 56 bp, Artificial
  Synthetic oligonucleotide
cacttctgctgacgttcgaattcttgttcaacccggtttggcgtctgaacttgtta

SEQ ID NO: 346048 - DNA, 57 bp, Artificial
  Synthetic oligonucleotide
cacttctgtttccccggtcaaagttgatatgctccaccagggcaaaaacaactgcga

SEQ ID NO: 346049 - DNA, 57 bp, Artificial
  Synthetic oligonucleotide
cacttctgtttccccggttgatgttgatatgctccaacagggcaaaaacaacagaaa

SEQ ID NO: 346050 - DNA, 57 bp, Artificial
  Synthetic oligonucleotide
cacttcttaatgaatttcctgaatccgttcacggatttcgttgtatgttagctatta

SEQ ID NO: 346051 - DNA, 55 bp, Artificial
  Synthetic oligonucleotide
cacttcttccaagtatggtagcgtagttactaatgatatgggtactatatgctca

SEQ ID NO: 346052 - DNA, 55 bp, Artificial
  Synthetic oligonucleotide
cacttcttcttatactgttccacgttttgaaactactagatctggttcttattac

SEQ ID NO: 346053 - DNA, 60 bp, Artificial
  Synthetic oligonucleotide
cacttgaacctaacaatgcccaatgcatgttcagttaacaactcccaccattacatcagt

SEQ ID NO: 346054 - DNA, 60 bp, Artificial
  Synthetic oligonucleotide
cacttgaagaggcacaagcattcaacactgagtcaatatactataaaccacgcggattgt

SEQ ID NO: 346055 - DNA, 60 bp, Artificial
  Synthetic oligonucleotide
cacttgaagatgtgtactatgctgaatggcatcaaggaaatgccattgatgcgtcaaatt

SEQ ID NO: 346056 - DNA, 55 bp, Artificial
  Synthetic oligonucleotide
cacttgaagattctggaccacggagtcaggtgagtcgcagttctacagctacttt

SEQ ID NO: 346057 - DNA, 60 bp, Artificial
  Synthetic oligonucleotide
cacttgacaccatgtacgttgtggccactgcagagaaaggaggaagagctcacagaatgg

SEQ ID NO: 346058 - DNA, 51 bp, Artificial
  Synthetic oligonucleotide
cacttgacaggatcggagacgctctgaatgcaaatgtcgcatttcatatac

SEQ ID NO: 346059 - DNA, 56 bp, Artificial
  Synthetic oligonucleotide
cacttgaccaaaagcttgatcgggtagagaccttgatatctaaggtagaacgttgg

SEQ ID NO: 346060 - DNA, 60 bp, Artificial
  Synthetic oligonucleotide
cacttgacgcccgcaatggagaagcagttcaaaagacatgtccaagccctcttggatata

SEQ ID NO: 346061 - DNA, 60 bp, Artificial
  Synthetic oligonucleotide
cacttgacttgagggagaatggcgtaacgctttatgctgctctggtctgtgccacctcta

SEQ ID NO: 346062 - DNA, 57 bp, Artificial
  Synthetic oligonucleotide
cacttgagaaaagacgtgcgcaactatcatcactgttgactatgctacagaaaccag

SEQ ID NO: 346063 - DNA, 60 bp, Artificial
  Synthetic oligonucleotide
cacttgagaactgtgagaccaaatgccaaactccgttgggagcaataaacacaacattgc

SEQ ID NO: 346064 - DNA, 55 bp, Artificial
  Synthetic oligonucleotide
cacttgagaggttacagatacatccttcgcttttgtcgaacagacttagttctgt

SEQ ID NO: 346065 - DNA, 54 bp, Artificial
  Synthetic oligonucleotide
cacttgagtaaatagtgatgacgtcacccccacctagtcgcctactggatactt

SEQ ID NO: 346066 - DNA, 58 bp, Artificial
  Synthetic oligonucleotide
cacttgataccttacagaccctaattgattttgccttaacctggcaactgagctagtc

SEQ ID NO: 346067 - DNA, 55 bp, Artificial
  Synthetic oligonucleotide
cacttgatgtgatcagatctccgagtgcagccgagtcaatgaaagttggagctgc

SEQ ID NO: 346068 - DNA, 59 bp, Artificial
  Synthetic oligonucleotide
cacttgcaaaggtttagattatgggctgtcatgcttgggttttgaccatatgttgaaac

SEQ ID NO: 346069 - DNA, 60 bp, Artificial
  Synthetic oligonucleotide
cacttgcaagctggattcaaagtgagttcaataaggcgtgcgaactgactgattcgagct

SEQ ID NO: 346070 - DNA, 55 bp, Artificial
  Synthetic oligonucleotide
cacttgcacggaggcgcgatcttcagtatatttataacaagctctcacgcactat

SEQ ID NO: 346071 - DNA, 59 bp, Artificial
  Synthetic oligonucleotide
cacttgcagctctgcatgtgtgcgcgttaccacaaatcccaacggcgcagtgtacttgt

SEQ ID NO: 346072 - DNA, 53 bp, Artificial
  Synthetic oligonucleotide
cacttgcatcatcaataagttcaggccgcagagacgataatttgagtgatgca

SEQ ID NO: 346073 - DNA, 60 bp, Artificial
  Synthetic oligonucleotide
cacttgccagctgtatgggcctcatatacaacagaatgggaacagtaaccacagaagggg

SEQ ID NO: 346074 - DNA, 55 bp, Artificial
  Synthetic oligonucleotide
cacttgccatgaaattggcggagaaatggacagaactaactacagcatttgaggg

SEQ ID NO: 346075 - DNA, 54 bp, Artificial
  Synthetic oligonucleotide
cacttgcctgtccgtgtcgtggcgctcgggactctcgactcccctcaaacggcg

SEQ ID NO: 346076 - DNA, 55 bp, Artificial
  Synthetic oligonucleotide
cacttgcctttccgactgacggcttctttgaagtcgtcagctgggttccccgtct

SEQ ID NO: 346077 - DNA, 55 bp, Artificial
  Synthetic oligonucleotide
cacttgcgggcagactacgtccccgctccctcgcgatccaacaagcggaaaagag

SEQ ID NO: 346078 - DNA, 60 bp, Artificial
  Synthetic oligonucleotide
cacttgcgtacaaaatgggtggtctatcgcttttatgactcatagacttactggaactga

SEQ ID NO: 346079 - DNA, 60 bp, Artificial
  Synthetic oligonucleotide
cacttgctaatcaatctggtggtgctaataacatcaccgaagctttcttcgataagcttc

SEQ ID NO: 346080 - DNA, 56 bp, Artificial
  Synthetic oligonucleotide
cacttgctccagagggcgcatacctctggttaaacaaaattgtcccctgagagtag

SEQ ID NO: 346081 - DNA, 50 bp, Artificial
  Synthetic oligonucleotide
cacttgctcgctaaacgctcagcttagtccgtagtgttagttgccgtcga

SEQ ID NO: 346082 - DNA, 55 bp, Artificial
  Synthetic oligonucleotide
cacttgctgaaaacgtatgtagacaactacaaggaccaccattcaacgtgagccc

SEQ ID NO: 346083 - DNA, 55 bp, Artificial
  Synthetic oligonucleotide
cacttggaaatagaggactaagaatccctcctgaaggggtgttaagttgtcttga

SEQ ID NO: 346084 - DNA, 55 bp, Artificial
  Synthetic oligonucleotide
cacttggaataacgattcggatacgagagtccatgtgaatcagagcctcctaggg

SEQ ID NO: 346085 - DNA, 57 bp, Artificial
  Synthetic oligonucleotide
cacttggaatgcaggaccttttttctgacccaaggcgccttactgaatgacaagcat

SEQ ID NO: 346086 - DNA, 57 bp, Artificial
  Synthetic oligonucleotide
cacttggatgaacgggactgggtacacaaaaacgtgcggagcaccaccttgccgcat

SEQ ID NO: 346087 - DNA, 56 bp, Artificial
  Synthetic oligonucleotide
cacttggcaaattgattgctcaactctgttacccggaacacggtcccaaggacaaa

SEQ ID NO: 346088 - DNA, 55 bp, Artificial
  Synthetic oligonucleotide
cacttggcagggattaaacacttggcagctcggttaaggttagaacaagatctcg

SEQ ID NO: 346089 - DNA, 55 bp, Artificial
  Synthetic oligonucleotide
cacttggccaccgaatgagactacaggggctgatgacaccatcacactcccatgc

SEQ ID NO: 346090 - DNA, 60 bp, Artificial
  Synthetic oligonucleotide
cacttggctagacacacaggcgcctggcgccctcatcgaattggcgcaccgctggcgttc

SEQ ID NO: 346091 - DNA, 60 bp, Artificial
  Synthetic oligonucleotide
cacttggctgaattgctgaaatgggctagacctggaacactacaagccaaattactatct

SEQ ID NO: 346092 - DNA, 60 bp, Artificial
  Synthetic oligonucleotide
cacttgggaaaaccattgtgagtataaccatctgaacaccatccaccttctcatgagccc

SEQ ID NO: 346093 - DNA, 57 bp, Artificial
  Synthetic oligonucleotide
cacttgggaacgggctcgtaacgaagcggagtatcaccttgaggctactcaagctag

SEQ ID NO: 346094 - DNA, 59 bp, Artificial
  Synthetic oligonucleotide
cacttgggaccagggcaaacgttctatgcaacaggtgctataataggaaatataagaca

SEQ ID NO: 346095 - DNA, 55 bp, Artificial
  Synthetic oligonucleotide
cacttgggataacactaacatcacgcagccaaatagcacagggtcaaatgacacc

SEQ ID NO: 346096 - DNA, 55 bp, Artificial
  Synthetic oligonucleotide
cacttgggataagtgaggaaataattttcctcacgctccaaaaagcggccatccg

SEQ ID NO: 346097 - DNA, 60 bp, Artificial
  Synthetic oligonucleotide
cacttgggcaggggaccacgctggaaaacaaacactcaaatggcacaatacatgatagga

SEQ ID NO: 346098 - DNA, 55 bp, Artificial
  Synthetic oligonucleotide
cacttggggagccactgacagcatgcatggggcaaatgacacggagtcaaatgac

SEQ ID NO: 346099 - DNA, 55 bp, Artificial
  Synthetic oligonucleotide
cacttggggatctgggagttttgaatacagtgaggctacagagcaaggaggcaat

SEQ ID NO: 346100 - DNA, 55 bp, Artificial
  Synthetic oligonucleotide
cacttgggtcctaaatacccttaagaaatgaccagtctgaggctgtaaggtcgtc

SEQ ID NO: 346101 - DNA, 56 bp, Artificial
  Synthetic oligonucleotide
cacttgggttgaaacacagcttcccaactacccccatttgcaaattggctcaggaa

SEQ ID NO: 346102 - DNA, 59 bp, Artificial
  Synthetic oligonucleotide
cacttggtacatctgtgtaaatagtttaggtttcatgccgctgaattcttttgttcatc

SEQ ID NO: 346103 - DNA, 55 bp, Artificial
  Synthetic oligonucleotide
cacttggtagatctggctacaccatacatgtgcaatgtaacgcaaccaagtttca

SEQ ID NO: 346104 - DNA, 54 bp, Artificial
  Synthetic oligonucleotide
cacttggtataaaggaaatacatacaacgagaagatatgcgagttagcacaaat

SEQ ID NO: 346105 - DNA, 53 bp, Artificial
  Synthetic oligonucleotide
cacttggtggactcatacgcctacatgagaaacggatgggacattgaggtgtc

SEQ ID NO: 346106 - DNA, 55 bp, Artificial
  Synthetic oligonucleotide
cacttggtgttttccgttataagagtcgttgctatgtgggcttagtatggatgtg

SEQ ID NO: 346107 - DNA, 60 bp, Artificial
  Synthetic oligonucleotide
cacttgtacgctttttgctagtgcaaatggtgaacccatgccttattgtgcagactcggc

SEQ ID NO: 346108 - DNA, 53 bp, Artificial
  Synthetic oligonucleotide
cacttgtagtcttattaaaacctattgggttcctttcctcatttacgagaaca

SEQ ID NO: 346109 - DNA, 50 bp, Artificial
  Synthetic oligonucleotide
cacttgtatcgtcgattgaatggtacatgaaatcaatggaattgcctgac

SEQ ID NO: 346110 - DNA, 51 bp, Artificial
  Synthetic oligonucleotide
cacttgtcacggttcttctgaactcggtctctagtatgacagcctaaggat

SEQ ID NO: 346111 - DNA, 60 bp, Artificial
  Synthetic oligonucleotide
cacttgtgaactcaacctggatgtcctgggaaggatgtgatctagattactactgcacta

SEQ ID NO: 346112 - DNA, 55 bp, Artificial
  Synthetic oligonucleotide
cacttgtgaatccccaatgccttccgcaggttgtggttgaacctgatttgtactg

SEQ ID NO: 346113 - DNA, 60 bp, Artificial
  Synthetic oligonucleotide
cacttgtgattggacacgggagtgctctgtcgtatgttagaggactgacccctgatgtca

SEQ ID NO: 346114 - DNA, 60 bp, Artificial
  Synthetic oligonucleotide
cacttgtgcgactagcacagagtgctctttttgccactggtgagaactttcggacacgca

SEQ ID NO: 346115 - DNA, 55 bp, Artificial
  Synthetic oligonucleotide
cacttgtggaatatccaagtctccaacttgaatggcactccgtttgacccaacgg

SEQ ID NO: 346116 - DNA, 51 bp, Artificial
  Synthetic oligonucleotide
cacttgtgggtcacagtatattatggggtgcctgtgtggaaagatgcagta

SEQ ID NO: 346117 - DNA, 60 bp, Artificial
  Synthetic oligonucleotide
cacttgtggtaatgtcggactttgcacccgaatcagctagtgtcctttacttgatcctgc

SEQ ID NO: 346118 - DNA, 60 bp, Artificial
  Synthetic oligonucleotide
cacttgtggtggaaatagggcacgatgctccttagaatgttaatgaactgtaatgctaaa

SEQ ID NO: 346119 - DNA, 57 bp, Artificial
  Synthetic oligonucleotide
cactttaaattgtactgatgtggagaagaataatactactaataccacaactactag

SEQ ID NO: 346120 - DNA, 54 bp, Artificial
  Synthetic oligonucleotide
cactttaacctcctcgccctatataagaggaggtggcctagtattacccacctc

SEQ ID NO: 346121 - DNA, 60 bp, Artificial
  Synthetic oligonucleotide
cactttaaggcagcagtgtggtggctaggaatagcacacaccacaggacacccctataat

SEQ ID NO: 346122 - DNA, 55 bp, Artificial
  Synthetic oligonucleotide
cactttaagtctcttattaacgatcttgctcttaagcggtctattagacccgata

SEQ ID NO: 346123 - DNA, 59 bp, Artificial
  Synthetic oligonucleotide
cactttaccatttagatcctatgagaggtactagttatggtaagccagctgtggtacag

SEQ ID NO: 346124 - DNA, 50 bp, Artificial
  Synthetic oligonucleotide
cactttactaagagcgcgaatgaggatctattcacgacatacggtagtac

SEQ ID NO: 346125 - DNA, 55 bp, Artificial
  Synthetic oligonucleotide
cactttagaaccaacgcagtaaccgcaaggctttgcgggcgatgtaccaacactg

SEQ ID NO: 346126 - DNA, 56 bp, Artificial
  Synthetic oligonucleotide
cactttagcaaaatggtctcatttgaaggacccccaattaagacagggctcctcga

SEQ ID NO: 346127 - DNA, 58 bp, Artificial
  Synthetic oligonucleotide
cactttagcaacgtccggtaaggcacgcgtcgtgttatttggccatgtctcacagccc

SEQ ID NO: 346128 - DNA, 55 bp, Artificial
  Synthetic oligonucleotide
cactttaggtgagcttattaggatgatcaatgatcaaggcttgagcaatcagttg

SEQ ID NO: 346129 - DNA, 56 bp, Artificial
  Synthetic oligonucleotide
cactttatcacgactaacatttgttctcctacaggttccggatcccttctcgccac

SEQ ID NO: 346130 - DNA, 57 bp, Artificial
  Synthetic oligonucleotide
cactttatgaagaaagtgcgattcggggtaagattgaatctagagagagacctaccc

SEQ ID NO: 346131 - DNA, 60 bp, Artificial
  Synthetic oligonucleotide
cactttattaaacagactccgagttgccattggactcaggagctatgattcagtatcgga

SEQ ID NO: 346132 - DNA, 54 bp, Artificial
  Synthetic oligonucleotide
cactttattcaggattccggccattgatttctaagttttttgaacggccattta

SEQ ID NO: 346133 - DNA, 56 bp, Artificial
  Synthetic oligonucleotide
cactttcaaaagaacgagtgggtcatctgtcaaaagagaggaagaagtgcttacgg

SEQ ID NO: 346134 - DNA, 53 bp, Artificial
  Synthetic oligonucleotide
cactttcaagacattgtccttttgagtcgttctcatgttcatcaaagcgtcta

SEQ ID NO: 346135 - DNA, 60 bp, Artificial
  Synthetic oligonucleotide
cactttcaagtttgctgcatgttctgtgatgagtatttgagtacaaatgggagtgataga

SEQ ID NO: 346136 - DNA, 55 bp, Artificial
  Synthetic oligonucleotide
cactttcacgaggacaaaatactgtcaggattactggaaaaggtggccatagtgg

SEQ ID NO: 346137 - DNA, 55 bp, Artificial
  Synthetic oligonucleotide
cactttcagatagacttgttctagttccacttgctgaagagctagagaagagtag

SEQ ID NO: 346138 - DNA, 55 bp, Artificial
  Synthetic oligonucleotide
cactttccactttaaggcttgacttgcctacatggtactatgttacctggcccac

SEQ ID NO: 346139 - DNA, 54 bp, Artificial
  Synthetic oligonucleotide
cactttcccaagtgtcggttgccgttgggatcgattggttaggaccgtcatctt

SEQ ID NO: 346140 - DNA, 55 bp, Artificial
  Synthetic oligonucleotide
cactttccgcaaggtagcgttgattattttatcgaattacgaacgattggaccca

SEQ ID NO: 346141 - DNA, 60 bp, Artificial
  Synthetic oligonucleotide
cactttcctaggatgtggctccatggcttagggcaacatatctatgaaacttatggggat

SEQ ID NO: 346142 - DNA, 58 bp, Artificial
  Synthetic oligonucleotide
cactttcgacgaaggatacgtccctacacattcagcacctacccatcctcaatgggac

SEQ ID NO: 346143 - DNA, 55 bp, Artificial
  Synthetic oligonucleotide
cactttcgggagtgtctggctcgtcattctcacatctatgctgatggaacacgtt

SEQ ID NO: 346144 - DNA, 56 bp, Artificial
  Synthetic oligonucleotide
cactttctaaaggcaaagtacctatactggtaccctctagaatgaagcaagaggct

SEQ ID NO: 346145 - DNA, 56 bp, Artificial
  Synthetic oligonucleotide
cactttgaaagcaggaatccaagagtaagctcagaagtacacatcccactagagga

SEQ ID NO: 346146 - DNA, 59 bp, Artificial
  Synthetic oligonucleotide
cactttgaacaacaaacactcaaatggcacaatacatgataggagtccccatagaaccc

SEQ ID NO: 346147 - DNA, 50 bp, Artificial
  Synthetic oligonucleotide
cactttgacaaggaggcccaatctctgaaattcatgagaaaagttcaggg

SEQ ID NO: 346148 - DNA, 60 bp, Artificial
  Synthetic oligonucleotide
cactttgactggccaatcacatttgagcttcaaagcttagttagtgcggaccgcactata

SEQ ID NO: 346149 - DNA, 56 bp, Artificial
  Synthetic oligonucleotide
cactttgatcgcccggcttccccggtcactactgtatggactgtttcgcagttctt

SEQ ID NO: 346150 - DNA, 53 bp, Artificial
  Synthetic oligonucleotide
cactttgattggtgagatagctagctattatacccactggacaggcagtattc

SEQ ID NO: 346151 - DNA, 60 bp, Artificial
  Synthetic oligonucleotide
cactttgcatcagagtgtccgaatcccaagaaattgatgcacagagttcagatcctacaa

SEQ ID NO: 346152 - DNA, 55 bp, Artificial
  Synthetic oligonucleotide
cactttgcctctgttaaggcgtgcggaaccaaggatgagctttaagtatgaggga

SEQ ID NO: 346153 - DNA, 60 bp, Artificial
  Synthetic oligonucleotide
cactttgctaagaatcaatcaactacattacacaagctcctctaccttgggctgttgaac

SEQ ID NO: 346154 - DNA, 55 bp, Artificial
  Synthetic oligonucleotide
cactttggatacactactcttgaaaaggggtggatatctatgatgcgccatgcgg

SEQ ID NO: 346155 - DNA, 57 bp, Artificial
  Synthetic oligonucleotide
cactttgggcaactctatttatgttcccacggtcagtggttctttggtgtccacaga

SEQ ID NO: 346156 - DNA, 59 bp, Artificial
  Synthetic oligonucleotide
cactttggtgcaatcaaaattctcataactgctcaattcagtcatggaattaattcacc

SEQ ID NO: 346157 - DNA, 56 bp, Artificial
  Synthetic oligonucleotide
cactttgtcacaaaatttgctttgatgttatgtgaattcacccttcccaaatggtg

SEQ ID NO: 346158 - DNA, 55 bp, Artificial
  Synthetic oligonucleotide
cactttgtcataacgctggatacttacagggtcgccaaagaatggcagtcctgta

SEQ ID NO: 346159 - DNA, 55 bp, Artificial
  Synthetic oligonucleotide
cactttgtgatttaatgatcgctttccaaacctcggatgcgggtacaactttagt

SEQ ID NO: 346160 - DNA, 55 bp, Artificial
  Synthetic oligonucleotide
cactttgtggaaggcaggcatcttatataagagagaaacaacacgtagtgcttca

SEQ ID NO: 346161 - DNA, 60 bp, Artificial
  Synthetic oligonucleotide
cactttgtggatcttattgaggacttttggcagactactcagggtatgcatgaaattgct

SEQ ID NO: 346162 - DNA, 60 bp, Artificial
  Synthetic oligonucleotide
cactttgttcacattagaacgttgacttatgagacatttgctaatagtcgtctctataat

SEQ ID NO: 346163 - DNA, 54 bp, Artificial
  Synthetic oligonucleotide
cactttgttgttgctacaaatatcatcgagaatggagtcacgctggatgttgat

SEQ ID NO: 346164 - DNA, 54 bp, Artificial
  Synthetic oligonucleotide
cacttttaaagcgaacaacagagatcatttggaatggttgtctaaaggtttcgt

SEQ ID NO: 346165 - DNA, 55 bp, Artificial
  Synthetic oligonucleotide
cacttttaccttcaatggtgcattcatagccccagatagagccacctttctccgc

SEQ ID NO: 346166 - DNA, 52 bp, Artificial
  Synthetic oligonucleotide
cacttttagccagcccccaggtaggtttaccttagttggggaggatcgtctc

SEQ ID NO: 346167 - DNA, 51 bp, Artificial
  Synthetic oligonucleotide
cacttttagtgcgccaccaggttatcaaattgaaattgttagaaatcctcg

SEQ ID NO: 346168 - DNA, 55 bp, Artificial
  Synthetic oligonucleotide
cacttttcaacggcgctgtatcttgtggcatgctctatgtatcaatttgcgccgg

SEQ ID NO: 346169 - DNA, 51 bp, Artificial
  Synthetic oligonucleotide
cacttttcactaggtgtcaccggggctacttgcaccgcggcccctccgtct

SEQ ID NO: 346170 - DNA, 55 bp, Artificial
  Synthetic oligonucleotide
cacttttccagacttggtatatccaggttcagtaaaatgttgagcaatgactcca

SEQ ID NO: 346171 - DNA, 53 bp, Artificial
  Synthetic oligonucleotide
cacttttcgagccatgctcagtcacctcagcccaaacatcatcctttatccac

SEQ ID NO: 346172 - DNA, 54 bp, Artificial
  Synthetic oligonucleotide
cacttttcgttgtttacatcacaacaaaaccggtccgtgctcctttggtagcgc

SEQ ID NO: 346173 - DNA, 60 bp, Artificial
  Synthetic oligonucleotide
cacttttctggcacggtctgcactcatattgagaggatcagttgctcacaagtcttgcct

SEQ ID NO: 346174 - DNA, 60 bp, Artificial
  Synthetic oligonucleotide
cacttttcttatctttggacattatgaaccagcacttaatcgagaaaacatgttgtcata

SEQ ID NO: 346175 - DNA, 54 bp, Artificial
  Synthetic oligonucleotide
cacttttgacggggaaatctgtgccatgccttagcttataaggaagtgcgtggt

SEQ ID NO: 346176 - DNA, 60 bp, Artificial
  Synthetic oligonucleotide
cacttttgctatagagtcagccacggagaccatgcgtttactgtttagcggatatgcaag

SEQ ID NO: 346177 - DNA, 60 bp, Artificial
  Synthetic oligonucleotide
cactttttaataccactatgttatatgcatgtcagtgatttttatagcccaccacattgt

SEQ ID NO: 346178 - DNA, 56 bp, Artificial
  Synthetic oligonucleotide
cactttttgtggttatgctttatctaatggtcatttattcccaagtgtttcgcgta

SEQ ID NO: 346179 - DNA, 52 bp, Artificial
  Synthetic oligonucleotide
cagaaaaaactgagtattcattagcctatgatggatctcacgaacaacgaat

SEQ ID NO: 346180 - DNA, 60 bp, Artificial
  Synthetic oligonucleotide
cagaaaaacctgatttcatactcaccactgacatttcggagatgggtgccaatttagatg

SEQ ID NO: 346181 - DNA, 57 bp, Artificial
  Synthetic oligonucleotide
cagaaaaacttcctcttttagagtatataagtaagtgcgcagacgaatggctgagtt

SEQ ID NO: 346182 - DNA, 57 bp, Artificial
  Synthetic oligonucleotide
cagaaaaatcattcgcgttaaggaaaattctgaatcagcccgaggtgaaatttcatc

SEQ ID NO: 346183 - DNA, 54 bp, Artificial
  Synthetic oligonucleotide
cagaaaacacgggcggagagctaatagaaatggtccccctcagacacccccctc

SEQ ID NO: 346184 - DNA, 58 bp, Artificial
  Synthetic oligonucleotide
cagaaaacagggaaattctaaaagagccagtacatggagtgtactatgacccatcaaa

SEQ ID NO: 346185 - DNA, 58 bp, Artificial
  Synthetic oligonucleotide
cagaaaacgtccacggttttcgttgtatgctagccgtgaagtatctgcaagcggtcga

SEQ ID NO: 346186 - DNA, 55 bp, Artificial
  Synthetic oligonucleotide
cagaaaactgggcggagccaaaggtgccgactcctataaattcactaggttcggc

SEQ ID NO: 346187 - DNA, 58 bp, Artificial
  Synthetic oligonucleotide
cagaaaagaattaagtgtttcaactgtggcaaagaaggacacctagccagaaattgca

SEQ ID NO: 346188 - DNA, 55 bp, Artificial
  Synthetic oligonucleotide
cagaaaagtgaagaacctactctatcgaaagagttaaaaggcatttccaacgcta

SEQ ID NO: 346189 - DNA, 55 bp, Artificial
  Synthetic oligonucleotide
cagaaaatataatcatcgcttgacaatggctggaaacgttcgctaagtcgtacta

SEQ ID NO: 346190 - DNA, 60 bp, Artificial
  Synthetic oligonucleotide
cagaaaatccagaggggtcaggtgtagggcaggttccctcactgaatccagaatcactgc

SEQ ID NO: 346191 - DNA, 60 bp, Artificial
  Synthetic oligonucleotide
cagaaaattttaacatgtggaacaacaatatggtagagcagatgcatgaagatataatta

SEQ ID NO: 346192 - DNA, 60 bp, Artificial
  Synthetic oligonucleotide
cagaaacaacacaagctgacttgtgtattccctatgtatctgacacaaactatgttatga

SEQ ID NO: 346193 - DNA, 57 bp, Artificial
  Synthetic oligonucleotide
cagaaacaagcctctgcgcgccaaaaacgctgacggtgcccattgttaaagggtgga

SEQ ID NO: 346194 - DNA, 56 bp, Artificial
  Synthetic oligonucleotide
cagaaacacggtgaaaagtgaactcttatggaaatttacattagacaccaatgtaa

SEQ ID NO: 346195 - DNA, 54 bp, Artificial
  Synthetic oligonucleotide
cagaaacactacccaagataagttggaagcactgttccaggggccaccccagtt

SEQ ID NO: 346196 - DNA, 55 bp, Artificial
  Synthetic oligonucleotide
cagaaacaggacaagaaactgcatacttcatattaaaattagcaagcagatggcc

SEQ ID NO: 346197 - DNA, 55 bp, Artificial
  Synthetic oligonucleotide
cagaaacattgatctgagactgctcttgtgttatatagctcaagcatgggtgctg

SEQ ID NO: 346198 - DNA, 56 bp, Artificial
  Synthetic oligonucleotide
cagaaaccaggaagattcctgtagaatgtaaaattgagctacctaaaggaacagta

SEQ ID NO: 346199 - DNA, 53 bp, Artificial
  Synthetic oligonucleotide
cagaaaccgagacaaaaagtaacgcaagtatgcggtctgtgtgacggtacggg

SEQ ID NO: 346200 - DNA, 55 bp, Artificial
  Synthetic oligonucleotide
cagaaacctactttggttagaggatgatgcaatggaacagggcataacagactac

SEQ ID NO: 346201 - DNA, 51 bp, Artificial
  Synthetic oligonucleotide
cagaaacctagacatagacatgacacggtggtatcgtgtacacgaaccggt

SEQ ID NO: 346202 - DNA, 54 bp, Artificial
  Synthetic oligonucleotide
cagaaaccttacgaagaatcgcggttttaggtgtccttcctaacctataatgca

SEQ ID NO: 346203 - DNA, 55 bp, Artificial
  Synthetic oligonucleotide
cagaaaccttactggtccaaaatgcaaatccagattgcaagtccattttgagagc

SEQ ID NO: 346204 - DNA, 55 bp, Artificial
  Synthetic oligonucleotide
cagaaaccttgtttcactcttgggactacagacgaggacttattactcaaacagc

SEQ ID NO: 346205 - DNA, 55 bp, Artificial
  Synthetic oligonucleotide
cagaaacgacagctcgtgctttgtcgagtacacgttgcgcgagcagaagtcgcac

SEQ ID NO: 346206 - DNA, 59 bp, Artificial
  Synthetic oligonucleotide
cagaaacgctgttaagcggactaagattaattgcagcttgccatctaataccaaaccat

SEQ ID NO: 346207 - DNA, 55 bp, Artificial
  Synthetic oligonucleotide
cagaaacggaaccaagcggcacctgatctacaagaaaatgtgcacgcaacagttc

SEQ ID NO: 346208 - DNA, 60 bp, Artificial
  Synthetic oligonucleotide
cagaaactctctggtgatcccaacgatgtgtactcccccacatcggcttcctgtgaatac

SEQ ID NO: 346209 - DNA, 54 bp, Artificial
  Synthetic oligonucleotide
cagaaactttggtgacggaaagtggactgacggacacggtaaaatagagcccta

SEQ ID NO: 346210 - DNA, 60 bp, Artificial
  Synthetic oligonucleotide
cagaaacttttatttactacgatgcaatatctcagctgatggtcgcaatgcaacaaaagc

SEQ ID NO: 346211 - DNA, 53 bp, Artificial
  Synthetic oligonucleotide
cagaaagaaccattttcaaggataacgcagcgttgaacttttggttcccgaaa

SEQ ID NO: 346212 - DNA, 55 bp, Artificial
  Synthetic oligonucleotide
cagaaagaattattaatggtgctgtgatacctctgtactgtaggcatttggccaa

SEQ ID NO: 346213 - DNA, 55 bp, Artificial
  Synthetic oligonucleotide
cagaaagacggaccacggatttcatgtctaggagtgctctctcaaactctgagtc

SEQ ID NO: 346214 - DNA, 55 bp, Artificial
  Synthetic oligonucleotide
cagaaagagaggatgattacccagattgtaatttagccttatcagccaatcaacc

SEQ ID NO: 346215 - DNA, 60 bp, Artificial
  Synthetic oligonucleotide
cagaaagagcagaagatagtggaaatgaaagtgatggggaagacaaggagacgctggcaa

SEQ ID NO: 346216 - DNA, 58 bp, Artificial
  Synthetic oligonucleotide
cagaaagagttatctaatcagaacattaaccctaaacacaatgaccaaggacgctgag

SEQ ID NO: 346217 - DNA, 60 bp, Artificial
  Synthetic oligonucleotide
cagaaagatgcccatattggtatgtggtatcgtgctttaaccagtgttggaccaagatca

SEQ ID NO: 346218 - DNA, 55 bp, Artificial
  Synthetic oligonucleotide
cagaaagcaccggacactccaactgcatccaaaccgaaaacgagttcattcaggc

SEQ ID NO: 346219 - DNA, 55 bp, Artificial
  Synthetic oligonucleotide
cagaaagcatatcacgccaaagtggtgagggtcgcaagaccatcctccgatgggg

SEQ ID NO: 346220 - DNA, 59 bp, Artificial
  Synthetic oligonucleotide
cagaaagccagatgttaattgaaccaccaaaattaagaagtggtccagctgcgctgtac

SEQ ID NO: 346221 - DNA, 60 bp, Artificial
  Synthetic oligonucleotide
cagaaagcccccgtcttaaacactgagtccagcgaaaggatggaacagcttgatcactca

SEQ ID NO: 346222 - DNA, 57 bp, Artificial
  Synthetic oligonucleotide
cagaaagcgctcatgcatttcattagcagaagaaccaatgtacatgccgctacgctt

SEQ ID NO: 346223 - DNA, 60 bp, Artificial
  Synthetic oligonucleotide
cagaaagcgtatgcactgttttatagacctgatgtagtaccacttcatgagaactcgaac

SEQ ID NO: 346224 - DNA, 57 bp, Artificial
  Synthetic oligonucleotide
cagaaagctaggggatgggtttataaacatcactatgaaagtaggaatccaagaatg

SEQ ID NO: 346225 - DNA, 55 bp, Artificial
  Synthetic oligonucleotide
cagaaaggcacactgcaaatgatgtgaaccgaaacatgcatagtctgttaggtat

SEQ ID NO: 346226 - DNA, 59 bp, Artificial
  Synthetic oligonucleotide
cagaaagggttgacacactgttagagaacaatgttccggttacaagctctgttgatctg

SEQ ID NO: 346227 - DNA, 51 bp, Artificial
  Synthetic oligonucleotide
cagaaaggtgaggtatgatggatgctcgtttgctctcgtccctgcggctcg

SEQ ID NO: 346228 - DNA, 58 bp, Artificial
  Synthetic oligonucleotide
cagaaaggttagaattgcggtatattcaataccatacttcattttgagctaaccgcta

SEQ ID NO: 346229 - DNA, 56 bp, Artificial
  Synthetic oligonucleotide
cagaaaggttatataccaaaagatccaacacgcacgtccctgggtggattgtccga

SEQ ID NO: 346230 - DNA, 58 bp, Artificial
  Synthetic oligonucleotide
cagaaaggttgtccgcgagattggttcagaaccagtttgtctgattagaactagcacc

SEQ ID NO: 346231 - DNA, 54 bp, Artificial
  Synthetic oligonucleotide
cagaaagtaggagcacatgagaacaccaatgtggcgactggtggttccacagtc

SEQ ID NO: 346232 - DNA, 50 bp, Artificial
  Synthetic oligonucleotide
cagaaagtatacataatcttattgtaaggtgccagttttgtctgaaacgt

SEQ ID NO: 346233 - DNA, 55 bp, Artificial
  Synthetic oligonucleotide
cagaaagttgaacgctacgagaccacgccatatactacctatagttgtgtccggc

SEQ ID NO: 346234 - DNA, 60 bp, Artificial
  Synthetic oligonucleotide
cagaaagtttgattcgaatgatgaggatgggttcacgctgatacagattcgaaatccctt

SEQ ID NO: 346235 - DNA, 53 bp, Artificial
  Synthetic oligonucleotide
cagaaataaaatctcatcgaaggcccatgtgaataacgcactcatgtgtgata

SEQ ID NO: 346236 - DNA, 60 bp, Artificial
  Synthetic oligonucleotide
cagaaataccctctgacgctgagagggagcgtgtgatacaaaagaccgcagatgtttacc

SEQ ID NO: 346237 - DNA, 59 bp, Artificial
  Synthetic oligonucleotide
cagaaatacgagaggcttagagactatcacgatgagttggaatggaagggttggttcaa

SEQ ID NO: 346238 - DNA, 60 bp, Artificial
  Synthetic oligonucleotide
cagaaatagcagcaagaccagctgtgaatggacaaagagggagaattgactattattggt

SEQ ID NO: 346239 - DNA, 55 bp, Artificial
  Synthetic oligonucleotide
cagaaatcccgaacgatcatcacctgatgtacaccatcgactgactcagcgatca

SEQ ID NO: 346240 - DNA, 59 bp, Artificial
  Synthetic oligonucleotide
cagaaatcccggaaatgctgagattgaagatctcatctttctggcacgatctgcactca

SEQ ID NO: 346241 - DNA, 56 bp, Artificial
  Synthetic oligonucleotide
cagaaatgaataaattattcgagaagactaggcgccagttaagagaaaacgcggaa

SEQ ID NO: 346242 - DNA, 60 bp, Artificial
  Synthetic oligonucleotide
cagaaatgaatggacacagcatacaacaactggaggttcacaggcttgcgcagcgtatgg

SEQ ID NO: 346243 - DNA, 55 bp, Artificial
  Synthetic oligonucleotide
cagaaatgtcccacaagctcaagatcggggactctttggagcaattgcaggcttc

SEQ ID NO: 346244 - DNA, 60 bp, Artificial
  Synthetic oligonucleotide
cagaaatgtccctgcgattgccgcaagaggcctgtttggtgcaatagcggggttcataga

SEQ ID NO: 346245 - DNA, 55 bp, Artificial
  Synthetic oligonucleotide
cagaaatgttatgtaagaaatttaagaaacttttagagaggctgaaagatttaga

SEQ ID NO: 346246 - DNA, 56 bp, Artificial
  Synthetic oligonucleotide
cagaaattcagctaggaattccacacccggcaggactagccaaaaagaaaaggatc

SEQ ID NO: 346247 - DNA, 55 bp, Artificial
  Synthetic oligonucleotide
cagaaattcctaccagagactacttctctggataatgctttggccctagccctgc

SEQ ID NO: 346248 - DNA, 58 bp, Artificial
  Synthetic oligonucleotide
cagaaatttcagatatcatcggagaacaataaaatgttcggcggacaaggtattatac

SEQ ID NO: 346249 - DNA, 55 bp, Artificial
  Synthetic oligonucleotide
cagaacaaactaccctggacggttcacaaacctgttggacgtggcagaggcctgc

SEQ ID NO: 346250 - DNA, 56 bp, Artificial
  Synthetic oligonucleotide
cagaacaacttcgttccagttattggggcaagacctcaggtcaatggacaaagtgg

SEQ ID NO: 346251 - DNA, 55 bp, Artificial
  Synthetic oligonucleotide
cagaacaatgtgcctaattatcagcacattggaatcaagcgctattgcactgtac

SEQ ID NO: 346252 - DNA, 54 bp, Artificial
  Synthetic oligonucleotide
cagaacaattcaaaaccagcgtcggagaccctagcaccattccctgcccctacg

SEQ ID NO: 346253 - DNA, 50 bp, Artificial
  Synthetic oligonucleotide
cagaacacaagtagaccccgacctggcagaccaactaattcatatatatt

SEQ ID NO: 346254 - DNA, 60 bp, Artificial
  Synthetic oligonucleotide
cagaacacaatggaatgctgtgtgcaacaaatctgggacatcccctcattctagacacat

SEQ ID NO: 346255 - DNA, 55 bp, Artificial
  Synthetic oligonucleotide
cagaacacatcatgggaggatcattgcatgttctcaagaccctcacccatgggat

SEQ ID NO: 346256 - DNA, 55 bp, Artificial
  Synthetic oligonucleotide
cagaacacatttacgatagtgttgctggaagcacgctgctaataaataatgatcg

SEQ ID NO: 346257 - DNA, 59 bp, Artificial
  Synthetic oligonucleotide
cagaacaccaactgacctgtttggtgatcctatatccagacaatacacacgtaaggaaa

SEQ ID NO: 346258 - DNA, 59 bp, Artificial
  Synthetic oligonucleotide
cagaacaccatgtgatctagaggtcgtccagaacaagcctaaaaggaatttattgtgga

SEQ ID NO: 346259 - DNA, 60 bp, Artificial
  Synthetic oligonucleotide
cagaacacccaatagtggagcagataatacaagaggccataaaaaaggaagccatatatg

SEQ ID NO: 346260 - DNA, 54 bp, Artificial
  Synthetic oligonucleotide
cagaacactagaaacatcgtaccagtgtccattaaagcaaggtcaataacatat

SEQ ID NO: 346261 - DNA, 56 bp, Artificial
  Synthetic oligonucleotide
cagaacactgtctctaccatatcgtcaatcttatcgacgactggggaccctgtgcc

SEQ ID NO: 346262 - DNA, 55 bp, Artificial
  Synthetic oligonucleotide
cagaacaggacaaatgtaacattgagtccccagatagaaaccatctgggcggcag

SEQ ID NO: 346263 - DNA, 55 bp, Artificial
  Synthetic oligonucleotide
cagaacaggtagcagtcacggatcctttattcttgagtagaccctcacaattagt

SEQ ID NO: 346264 - DNA, 60 bp, Artificial
  Synthetic oligonucleotide
cagaacataacgtgtctcgttgttatcaatgtcattcgggcgaattgtatcgcgtgactt

SEQ ID NO: 346265 - DNA, 60 bp, Artificial
  Synthetic oligonucleotide
cagaacatagagagaaatgcacttggaaattgccccaagtacataaaatcagggcagctt

SEQ ID NO: 346266 - DNA, 56 bp, Artificial
  Synthetic oligonucleotide
cagaacatcatccatcctttagtcaatgcgagaaacagatgcgtgctggactatac

SEQ ID NO: 346267 - DNA, 60 bp, Artificial
  Synthetic oligonucleotide
cagaacatgatccagcatctttcgaagctatataaacgtggattttcatatagagtgaac

SEQ ID NO: 346268 - DNA, 51 bp, Artificial
  Synthetic oligonucleotide
cagaacatgcctgataaacaagccagggtgctttatccctaaacatccttg

SEQ ID NO: 346269 - DNA, 60 bp, Artificial
  Synthetic oligonucleotide
cagaacatgtactaccattatctaggacgagccggttacaccatacacgtgcagtgcaac

SEQ ID NO: 346270 - DNA, 60 bp, Artificial
  Synthetic oligonucleotide
cagaacattcttgatgttgaaaggacttgttaaacaatgcaactacgaatgtacatatga

SEQ ID NO: 346271 - DNA, 56 bp, Artificial
  Synthetic oligonucleotide
cagaacattgtacgcgatccgccaaataatccgggtaggttttaacatggaagcag

SEQ ID NO: 346272 - DNA, 50 bp, Artificial
  Synthetic oligonucleotide
cagaaccagcgcgtctgattgagttggaagtaggttatcagcggacgtta

SEQ ID NO: 346273 - DNA, 60 bp, Artificial
  Synthetic oligonucleotide
cagaaccattattgggaagagataatatgactagatttggagcaaaattagtaatggcac

SEQ ID NO: 346274 - DNA, 60 bp, Artificial
  Synthetic oligonucleotide
cagaacccacgtggccatcataccacaagcgcaggtagattaagtggcgacccctcataa

SEQ ID NO: 346275 - DNA, 55 bp, Artificial
  Synthetic oligonucleotide
cagaaccccaatggtgaagatataagtactttctgtcaaatggtgtcgtcggttg

SEQ ID NO: 346276 - DNA, 55 bp, Artificial
  Synthetic oligonucleotide
cagaaccccagcatcgattagaagcaatttgcgccgcaatggtggaagcatgggg

SEQ ID NO: 346277 - DNA, 58 bp, Artificial
  Synthetic oligonucleotide
cagaaccccttcagcgaacagaggagcctcccacgcgataggagtaagcccataacga

SEQ ID NO: 346278 - DNA, 55 bp, Artificial
  Synthetic oligonucleotide
cagaacccgccgaaaggacaggctgagggcgtacgattcatgcgtagttggctgg

SEQ ID NO: 346279 - DNA, 60 bp, Artificial
  Synthetic oligonucleotide
cagaacccgtaatcttcacgattcctgatatcagaacacagctttggcacgatatgcacg

SEQ ID NO: 346280 - DNA, 55 bp, Artificial
  Synthetic oligonucleotide
cagaaccggatggctgatgcaggtccgcgccccgaaccggtcgtgatttacctgt

SEQ ID NO: 346281 - DNA, 55 bp, Artificial
  Synthetic oligonucleotide
cagaaccggtggcgaaaaggcgaacaaccgatgacggggggtattgcttatgcga

SEQ ID NO: 346282 - DNA, 57 bp, Artificial
  Synthetic oligonucleotide
cagaacctactggtcggacgtaatagaggtgaggaaatacttgattcgaaagagctc

SEQ ID NO: 346283 - DNA, 55 bp, Artificial
  Synthetic oligonucleotide
cagaacctattagtagtacacctatacctggggttagtcgtgtggcagggccacg

SEQ ID NO: 346284 - DNA, 55 bp, Artificial
  Synthetic oligonucleotide
cagaacctcctcgttggacgtaataggggcgaggagatacttgattcgaaggagc

SEQ ID NO: 346285 - DNA, 55 bp, Artificial
  Synthetic oligonucleotide
cagaacctctttacacaacataccctgacaagcaccacgacatcatccaagcgca

SEQ ID NO: 346286 - DNA, 56 bp, Artificial
  Synthetic oligonucleotide
cagaaccttcggttaattacgatttatttggtgctcaaggacagaattcaaataca

SEQ ID NO: 346287 - DNA, 55 bp, Artificial
  Synthetic oligonucleotide
cagaacgaagtgcatatatgaatgtgtttattcaaaagttaccatacccattatc

SEQ ID NO: 346288 - DNA, 59 bp, Artificial
  Synthetic oligonucleotide
cagaacgactatagcgagatgattgctacatatagtgattagaacgagctgactgcaaa

SEQ ID NO: 346289 - DNA, 55 bp, Artificial
  Synthetic oligonucleotide
cagaacgactctgatggaataaagagaaacgtgttttcgattggttatggatcat

SEQ ID NO: 346290 - DNA, 60 bp, Artificial
  Synthetic oligonucleotide
cagaacgcacgccctcgctacgatgaccacatacatgctaaggcatgtacaggacctatc

SEQ ID NO: 346291 - DNA, 59 bp, Artificial
  Synthetic oligonucleotide
cagaacgcattagatggatcgataatcgaaaacggaaacgtagccacacgagacgtcga

SEQ ID NO: 346292 - DNA, 60 bp, Artificial
  Synthetic oligonucleotide
cagaacgccgacccagttgtgctagatgtgagttggatatcgctgtggttcgctttcaac

SEQ ID NO: 346293 - DNA, 60 bp, Artificial
  Synthetic oligonucleotide
cagaacgctggttccaagcctgctcagatgtctgtatgggtggagtccgttttctatttc

SEQ ID NO: 346294 - DNA, 53 bp, Artificial
  Synthetic oligonucleotide
cagaacgcttcagagtattacgcgtctgctgccgcaatcctaatggattcgtg

SEQ ID NO: 346295 - DNA, 55 bp, Artificial
  Synthetic oligonucleotide
cagaacggtagaggacataaaccgagaggcagtaaaccatctaccgagggaactg

SEQ ID NO: 346296 - DNA, 58 bp, Artificial
  Synthetic oligonucleotide
cagaacggtcctctaatctatgtggagacgtggcctaatatgttgtccggcgccttgg

SEQ ID NO: 346297 - DNA, 54 bp, Artificial
  Synthetic oligonucleotide
cagaacgtaacgatagcaatttcgtacaccggccgcaaacttgtgaggttttaa

SEQ ID NO: 346298 - DNA, 54 bp, Artificial
  Synthetic oligonucleotide
cagaacgtagaaactacacaggtagagaaccaaggtggccctaagattccgggc

SEQ ID NO: 346299 - DNA, 55 bp, Artificial
  Synthetic oligonucleotide
cagaacgtgcagtaaatgcagcgaaaagtgcgttaggcattgcatcaccttctaa

SEQ ID NO: 346300 - DNA, 56 bp, Artificial
  Synthetic oligonucleotide
cagaacgtgttacaagtgctcggaccttgggaacgtgacgttcgtgaactactcac

SEQ ID NO: 346301 - DNA, 52 bp, Artificial
  Synthetic oligonucleotide
cagaacgtttggtttggaaactagtaggtatagaagtcgggagaggtgggcc

SEQ ID NO: 346302 - DNA, 53 bp, Artificial
  Synthetic oligonucleotide
cagaactaaacgatatgggtagtggtcttaggaaagccaacgtagccttaggg

SEQ ID NO: 346303 - DNA, 55 bp, Artificial
  Synthetic oligonucleotide
cagaactacactgccaaacatgttgccaccgattttcccaccgaatgatcgggat

SEQ ID NO: 346304 - DNA, 50 bp, Artificial
  Synthetic oligonucleotide
cagaactactagaagctcacattgctaatctagtaacggtcggaggccta

SEQ ID NO: 346305 - DNA, 55 bp, Artificial
  Synthetic oligonucleotide
cagaactcagtgaattaagaacgacatagtgatcacagcacgaagtaatcttcgg

SEQ ID NO: 346306 - DNA, 55 bp, Artificial
  Synthetic oligonucleotide
cagaactcgctctcctgtgagggacagcgatatcagcagggggactttatgaata

SEQ ID NO: 346307 - DNA, 55 bp, Artificial
  Synthetic oligonucleotide
cagaactgagatacgtgcattggagctctgcaagatactttcggcgatcggacgt

SEQ ID NO: 346308 - DNA, 55 bp, Artificial
  Synthetic oligonucleotide
cagaactgattccatccaaaggaatgacctaagtaagttcagaaacaagatttcc

SEQ ID NO: 346309 - DNA, 55 bp, Artificial
  Synthetic oligonucleotide
cagaactgcactaaacacttgttatcaggggactgttgaggagtctccccgcccg

SEQ ID NO: 346310 - DNA, 54 bp, Artificial
  Synthetic oligonucleotide
cagaactgcctattaccgtgacggttgggagcgggtccttaaggatttcaaagc

SEQ ID NO: 346311 - DNA, 57 bp, Artificial
  Synthetic oligonucleotide
cagaactgctccctcgttataccgggctttaacgcacaggatgtatttaactgctac

SEQ ID NO: 346312 - DNA, 60 bp, Artificial
  Synthetic oligonucleotide
cagaactgcttaatgcaggagaggtgctgagctgatttcttccctttgaggaagatatgt

SEQ ID NO: 346313 - DNA, 59 bp, Artificial
  Synthetic oligonucleotide
cagaactggtatgattctcgaaggtcacacctcgagtaccttgatttagagtctgttag

SEQ ID NO: 346314 - DNA, 60 bp, Artificial
  Synthetic oligonucleotide
cagaactgtgcgggttgctagaccatcctgaggcggcatgtgttaggtgtggcttttgca

SEQ ID NO: 346315 - DNA, 59 bp, Artificial
  Synthetic oligonucleotide
cagaactgtttaatacatcaggatctaatgatactatcacactcccatgtaagataaaa

SEQ ID NO: 346316 - DNA, 60 bp, Artificial
  Synthetic oligonucleotide
cagaacttcacacagctcaaatgggcaaaaacagcaagcacaactgacaccacaaatgca

SEQ ID NO: 346317 - DNA, 50 bp, Artificial
  Synthetic oligonucleotide
cagaacttgatttggaagtactacgagtctcaatctgttcacgcagtaag

SEQ ID NO: 346318 - DNA, 51 bp, Artificial
  Synthetic oligonucleotide
cagaacttgcacaggcggaggtatcacgtattgataaacactatgatagtg

SEQ ID NO: 346319 - DNA, 56 bp, Artificial
  Synthetic oligonucleotide
cagaagaaaaggcgggaacttcaagagacacctccaaccactcccagtgaagtcat

SEQ ID NO: 346320 - DNA, 60 bp, Artificial
  Synthetic oligonucleotide
cagaagaactcaatggggcgaaagatagccaatgatgctatctctgaatcgaagcaagga

SEQ ID NO: 346321 - DNA, 55 bp, Artificial
  Synthetic oligonucleotide
cagaagaagatagtgtttcagtttctgatgcccctggaagctgtataatagattg

SEQ ID NO: 346322 - DNA, 55 bp, Artificial
  Synthetic oligonucleotide
cagaagaagttctgttatggttcacagcattttcagcagacttaacacctacaga

SEQ ID NO: 346323 - DNA, 55 bp, Artificial
  Synthetic oligonucleotide
cagaagacaacatcaacaatcttaaagcccaggctgatatcctatactctaccaa

SEQ ID NO: 346324 - DNA, 59 bp, Artificial
  Synthetic oligonucleotide
cagaagacaaccttagggatcttaatgaccacaagtcaactatacagctgcctccctgg

SEQ ID NO: 346325 - DNA, 55 bp, Artificial
  Synthetic oligonucleotide
cagaagacatccggtatcacacctatcttgaagccatacattcggacaaacacat

SEQ ID NO: 346326 - DNA, 55 bp, Artificial
  Synthetic oligonucleotide
cagaagacattgaggttaaaaagatacgtggggtgacaagagtattagagccagt

SEQ ID NO: 346327 - DNA, 55 bp, Artificial
  Synthetic oligonucleotide
cagaagaccagttggaatatccagtatggtagaggccatggtttccagagcccga

SEQ ID NO: 346328 - DNA, 54 bp, Artificial
  Synthetic oligonucleotide
cagaagacgctgagactgtaggcggtgttttaggggaagttaacacaaggttag

SEQ ID NO: 346329 - DNA, 55 bp, Artificial
  Synthetic oligonucleotide
cagaagactgaattacaagcaatccagctagccttgcaagactcaggaccagaag

SEQ ID NO: 346330 - DNA, 60 bp, Artificial
  Synthetic oligonucleotide
cagaagactgagttacaggcaatttatctagctttgcaggattcagaattagaagtaaac

SEQ ID NO: 346331 - DNA, 55 bp, Artificial
  Synthetic oligonucleotide
cagaagactgagttggaagccattcatctagctttgcaagattcaggattagaag

SEQ ID NO: 346332 - DNA, 60 bp, Artificial
  Synthetic oligonucleotide
cagaagagagcagcctttggcctgggagcactgttccttgggtttctgggtgcagcagga

SEQ ID NO: 346333 - DNA, 60 bp, Artificial
  Synthetic oligonucleotide
cagaagagcaagtactcctgactgggcaatgggactgcattgcatatccctaggcaccta

SEQ ID NO: 346334 - DNA, 58 bp, Artificial
  Synthetic oligonucleotide
cagaagaggaaacgcctagagtcgcgtgtacccccatgtccactgaagatgggcaagg

SEQ ID NO: 346335 - DNA, 60 bp, Artificial
  Synthetic oligonucleotide
cagaagagtctactcggatcaggagtaagaccatagcgataggaagagatgctaggagtt

SEQ ID NO: 346336 - DNA, 58 bp, Artificial
  Synthetic oligonucleotide
cagaagagtggattaggagggtttaagatggtattagcattcgataaagatgtatttg

SEQ ID NO: 346337 - DNA, 60 bp, Artificial
  Synthetic oligonucleotide
cagaagataataacaatcggctcagtctctctaaccattgcaacagtatgtttcctcatg

SEQ ID NO: 346338 - DNA, 59 bp, Artificial
  Synthetic oligonucleotide
cagaagatatgagcattcagggtggaaatacgctcaacactactttttcctccatgcta

SEQ ID NO: 346339 - DNA, 60 bp, Artificial
  Synthetic oligonucleotide
cagaagatcacccttttaaggtgtatatagaacactgcctatcacggactgcaaagcagc

SEQ ID NO: 346340 - DNA, 55 bp, Artificial
  Synthetic oligonucleotide
cagaagattatgacaaaaggcagggtagcacaccactctccttggttgatctatg

SEQ ID NO: 346341 - DNA, 57 bp, Artificial
  Synthetic oligonucleotide
cagaagattcgcagcgttaatggtgctattgtcgtatctcagtcaaacggtaaattg

SEQ ID NO: 346342 - DNA, 60 bp, Artificial
  Synthetic oligonucleotide
cagaagatttcattatagaatatggaacaactgacgatgaagtatatatacaaagagcat

SEQ ID NO: 346343 - DNA, 55 bp, Artificial
  Synthetic oligonucleotide
cagaagattttgctggggttgataaagtagatccaaccacaacaggaggtcaggg

SEQ ID NO: 346344 - DNA, 60 bp, Artificial
  Synthetic oligonucleotide
cagaagcaatgagccaagtaacaacttcaaatgttataatgatgcagaaaggcaattata

SEQ ID NO: 346345 - DNA, 56 bp, Artificial
  Synthetic oligonucleotide
cagaagcacataatatctgggctacacatgcctgtgtaccaacagaccccaaccca

SEQ ID NO: 346346 - DNA, 60 bp, Artificial
  Synthetic oligonucleotide
cagaagcagcattccaagcccattacaaagtatgccaagttactcacaggttcagggatg

SEQ ID NO: 346347 - DNA, 58 bp, Artificial
  Synthetic oligonucleotide
cagaagcatatgataattctaaaggttttgtacctcaacctgggacatcaaaatctat

SEQ ID NO: 346348 - DNA, 58 bp, Artificial
  Synthetic oligonucleotide
cagaagccaacgtaggggtcgcacgggaagaggtaggcacggcatatatcggtatgtc

SEQ ID NO: 346349 - DNA, 55 bp, Artificial
  Synthetic oligonucleotide
cagaagccacgtactctcggtgtggttccggcccctggcttacacccaggtgcat

SEQ ID NO: 346350 - DNA, 55 bp, Artificial
  Synthetic oligonucleotide
cagaagccatacactcgatctcaggtgataaagggccttcagatctcatggaggc

SEQ ID NO: 346351 - DNA, 60 bp, Artificial
  Synthetic oligonucleotide
cagaagccccgaagctgtttatgctcgaatcatgatgaacggaggccgactaaagagatc

SEQ ID NO: 346352 - DNA, 60 bp, Artificial
  Synthetic oligonucleotide
cagaagcccctataggaccttgatgagttgtcctgttggtgaggctccctctccatacaa

SEQ ID NO: 346353 - DNA, 59 bp, Artificial
  Synthetic oligonucleotide
cagaagccctactgctggcactacgcgcctcaaccgtgtggtcttgtgcccgcagcgga

SEQ ID NO: 346354 - DNA, 60 bp, Artificial
  Synthetic oligonucleotide
cagaagccctcacagaacattaatgagttgtcctgtgggtgaggctccttccccatataa

SEQ ID NO: 346355 - DNA, 60 bp, Artificial
  Synthetic oligonucleotide
cagaagcccttagcgatatgggactgtttgggcagaacatgcaataccactacctgggaa

SEQ ID NO: 346356 - DNA, 57 bp, Artificial
  Synthetic oligonucleotide
cagaagcccttatagggccttaatgagctgccctgtcggtgaagctccgtccccgta

SEQ ID NO: 346357 - DNA, 60 bp, Artificial
  Synthetic oligonucleotide
cagaagcccttatagggccttaatgagctgtcctctaggtgaagctccgtctccatacaa

SEQ ID NO: 346358 - DNA, 55 bp, Artificial
  Synthetic oligonucleotide
cagaagcctggagcaatgctgtggagctatggaacaactcaccatggagaaacac

SEQ ID NO: 346359 - DNA, 55 bp, Artificial
  Synthetic oligonucleotide
cagaagcgcactttccagggatctcgattagcgggcaaattggctctgctggatg

SEQ ID NO: 346360 - DNA, 60 bp, Artificial
  Synthetic oligonucleotide
cagaagcggctgacaaaaaggtcagtcaaaattatcctatagtgcagaatcttcaagggc

SEQ ID NO: 346361 - DNA, 55 bp, Artificial
  Synthetic oligonucleotide
cagaagcgtatcggtcaggcagctgagggagacaaggcgtggcttcgttacgttc

SEQ ID NO: 346362 - DNA, 59 bp, Artificial
  Synthetic oligonucleotide
cagaagcgtgattggaagactaatgtacacgtcattgtggggccacctgggtgtggtaa

SEQ ID NO: 346363 - DNA, 57 bp, Artificial
  Synthetic oligonucleotide
cagaagcgttaattggcacctgttgtctgtactcgatgacacaatgatctatcttca

SEQ ID NO: 346364 - DNA, 55 bp, Artificial
  Synthetic oligonucleotide
cagaagctagtaggaaagttaaattgggcaagtcagatttatccaggaataaggg

SEQ ID NO: 346365 - DNA, 58 bp, Artificial
  Synthetic oligonucleotide
cagaagctcgaatcgattccgtccagacttggaagttcaggaacgctttgtgaagatt

SEQ ID NO: 346366 - DNA, 55 bp, Artificial
  Synthetic oligonucleotide
cagaagctgccttgaaatgcttcacttacggacttccagtaattaccaataacgt

SEQ ID NO: 346367 - DNA, 60 bp, Artificial
  Synthetic oligonucleotide
cagaagcttgttcattgagtatggcaaagcattaggctcatcctctacaggcagcaaagc

SEQ ID NO: 346368 - DNA, 60 bp, Artificial
  Synthetic oligonucleotide
cagaaggaccaagatatgatcctatggaagatccagctgtaaaggacttactcaattctt

SEQ ID NO: 346369 - DNA, 60 bp, Artificial
  Synthetic oligonucleotide
cagaaggactaaatgacttcagcgtgtcacatggtgtgcttgacatgggtctagtcgaaa

SEQ ID NO: 346370 - DNA, 55 bp, Artificial
  Synthetic oligonucleotide
cagaaggactcgtaatcgcaacagccaatgcaacagtggtactgacgtcactacg

SEQ ID NO: 346371 - DNA, 55 bp, Artificial
  Synthetic oligonucleotide
cagaaggagaggatgattatccggaatgtaatttagctttagtggcaaaccaacc

SEQ ID NO: 346372 - DNA, 51 bp, Artificial
  Synthetic oligonucleotide
cagaaggagccactccacaagatttaaacaccatgttaaatacaatagggg

SEQ ID NO: 346373 - DNA, 55 bp, Artificial
  Synthetic oligonucleotide
cagaaggagtggtacttgttaaccacacaacacagcctgttattgcacacagcga

SEQ ID NO: 346374 - DNA, 60 bp, Artificial
  Synthetic oligonucleotide
cagaaggctcgcaaactactaatagtgatgtggaccccacctcgcaatgaccaacagtac

SEQ ID NO: 346375 - DNA, 55 bp, Artificial
  Synthetic oligonucleotide
cagaaggctgagttagcagcagttcagttagctttacaggattcaggaccagaag

SEQ ID NO: 346376 - DNA, 56 bp, Artificial
  Synthetic oligonucleotide
cagaagggtgcagcaaccgatttcggtcccaaacatacaaaggcctagcccgcagg

SEQ ID NO: 346377 - DNA, 55 bp, Artificial
  Synthetic oligonucleotide
cagaagggtgtgtggactattggggtatatattatatgaacgagcacctaaaagt

SEQ ID NO: 346378 - DNA, 55 bp, Artificial
  Synthetic oligonucleotide
cagaaggtcccatacgaaagcgggaagtacttaacatccatgacattgggcccgc

SEQ ID NO: 346379 - DNA, 55 bp, Artificial
  Synthetic oligonucleotide
cagaaggtgtgtatacccttgtcctcgggaccccggctggtcgctttctatccga

SEQ ID NO: 346380 - DNA, 55 bp, Artificial
  Synthetic oligonucleotide
cagaagtaaagattagagtttatcatagagcaaaacatgttgaagcctggatccc

SEQ ID NO: 346381 - DNA, 55 bp, Artificial
  Synthetic oligonucleotide
cagaagtaaggatacattatacagagtgcaagcagagttgaataaaacgaaggcg

SEQ ID NO: 346382 - DNA, 55 bp, Artificial
  Synthetic oligonucleotide
cagaagtaatccagaaggcgtctcaagaagctatagttatctggggaaaattgcc

SEQ ID NO: 346383 - DNA, 55 bp, Artificial
  Synthetic oligonucleotide
cagaagtacacataccattaggggatgctagattagtaatcacaacatattgggg

SEQ ID NO: 346384 - DNA, 55 bp, Artificial
  Synthetic oligonucleotide
cagaagtacacatcccactaggagatgcaaaattagtagtgacaacatattgggg

SEQ ID NO: 346385 - DNA, 55 bp, Artificial
  Synthetic oligonucleotide
cagaagtacctaaatatactgtaaactttgacttaaacgcgccgcaataaactca

SEQ ID NO: 346386 - DNA, 60 bp, Artificial
  Synthetic oligonucleotide
cagaagtactactacgagcttgcagagctattcttaacgtacccagaagaatcagacagg

SEQ ID NO: 346387 - DNA, 51 bp, Artificial
  Synthetic oligonucleotide
cagaagtatacaacggtgcaattccatatgggagaaatgaagctttatggc

SEQ ID NO: 346388 - DNA, 50 bp, Artificial
  Synthetic oligonucleotide
cagaagtatcttaatgctactcgttccttgtcttctgtcttggccactcg

SEQ ID NO: 346389 - DNA, 55 bp, Artificial
  Synthetic oligonucleotide
cagaagtcaaagatgaagtagtctgccacgatactttccaaacgtgtaagcatcg

SEQ ID NO: 346390 - DNA, 55 bp, Artificial
  Synthetic oligonucleotide
cagaagtcacagcccctagcatacacccaggcatgctagccctagacaaaagagc

SEQ ID NO: 346391 - DNA, 55 bp, Artificial
  Synthetic oligonucleotide
cagaagtctacgtaaggcatgggcggggcctacataacctttcgctattggttgg

SEQ ID NO: 346392 - DNA, 60 bp, Artificial
  Synthetic oligonucleotide
cagaagtctacgtcaggcatgggcggggcttgcacaatctctcgctattggttggttccc

SEQ ID NO: 346393 - DNA, 57 bp, Artificial
  Synthetic oligonucleotide
cagaagtgaacatagtaacagactcacagtatgtattaggaatcatccaagcactac

SEQ ID NO: 346394 - DNA, 60 bp, Artificial
  Synthetic oligonucleotide
cagaagtgaccaaacaaatggttcaagatgtatcaaatgacgtgagagaaacttacgcac

SEQ ID NO: 346395 - DNA, 50 bp, Artificial
  Synthetic oligonucleotide
cagaagtgcataatatctgggccacacatgcttgtgtacctacagacccc

SEQ ID NO: 346396 - DNA, 60 bp, Artificial
  Synthetic oligonucleotide
cagaagtggaggaaacactagccagcagagagcatctgcagggcaaatcagcgtacagcc

SEQ ID NO: 346397 - DNA, 58 bp, Artificial
  Synthetic oligonucleotide
cagaagtggggagtggggacgatgggtcctgcctatggattccaatactcgcctcaac

SEQ ID NO: 346398 - DNA, 58 bp, Artificial
  Synthetic oligonucleotide
cagaagtggtcctatgtgtctaaagcacgcgtgaagaagataagagggaatccacttt

SEQ ID NO: 346399 - DNA, 50 bp, Artificial
  Synthetic oligonucleotide
cagaagtgtactccattcacgacgtttgtgttctccactcggtattcaac

SEQ ID NO: 346400 - DNA, 55 bp, Artificial
  Synthetic oligonucleotide
cagaagttctctaccgagaacgtgcagtggctgtcatagacagccttcagactgc

SEQ ID NO: 346401 - DNA, 60 bp, Artificial
  Synthetic oligonucleotide
cagaagttgttgagtcaagacgacggtgaatcatgcttgttgcgtatgagttccgttgaa

SEQ ID NO: 346402 - DNA, 60 bp, Artificial
  Synthetic oligonucleotide
cagaataatgtagggtctcagcggttgggagtattgagtagtgcattcccaaatctcgct

SEQ ID NO: 346403 - DNA, 55 bp, Artificial
  Synthetic oligonucleotide
cagaatacacaatccttgctacagcttcgcaaccaactcaatctagttattctag

SEQ ID NO: 346404 - DNA, 55 bp, Artificial
  Synthetic oligonucleotide
cagaatacattaacaatggtctacctccaatccagaacacgcggaatgtggttcc

SEQ ID NO: 346405 - DNA, 57 bp, Artificial
  Synthetic oligonucleotide
cagaataccccgactccgtgatgtatatgcgttgtgggatggatacccttatttggg

SEQ ID NO: 346406 - DNA, 59 bp, Artificial
  Synthetic oligonucleotide
cagaatacggggagttcaccatgttgggcatttatgacagatgggccgttctcccacgc

SEQ ID NO: 346407 - DNA, 55 bp, Artificial
  Synthetic oligonucleotide
cagaatacgtagcacaacgtaaaaagatattagacgacttcagaaagaagttaag

SEQ ID NO: 346408 - DNA, 60 bp, Artificial
  Synthetic oligonucleotide
cagaatagctgcccgcttgtctggagatatcaacttcacaggtgtgagtgcaggttaccc

SEQ ID NO: 346409 - DNA, 55 bp, Artificial
  Synthetic oligonucleotide
cagaatagtcctgtttggctatgaacatatcatacttgttcaccttgacatctga

SEQ ID NO: 346410 - DNA, 59 bp, Artificial
  Synthetic oligonucleotide
cagaatatagaaacgctttaagagggatcaatcagtcgttgcgagaagtaaattccgca

SEQ ID NO: 346411 - DNA, 52 bp, Artificial
  Synthetic oligonucleotide
cagaatatataacggaaacaggagtttccgtttgtggaagtcccggaagtcc

SEQ ID NO: 346412 - DNA, 51 bp, Artificial
  Synthetic oligonucleotide
cagaatatccagatgtcaaactatcaaagttgacagatggggttaaaagct

SEQ ID NO: 346413 - DNA, 57 bp, Artificial
  Synthetic oligonucleotide
cagaatatgcgggcaaaaccgtgtggtttgtggcgagcgtaaaaatggggaatgaga

SEQ ID NO: 346414 - DNA, 56 bp, Artificial
  Synthetic oligonucleotide
cagaatattggcgggaaagagattcgcaaatctaaacgaatgtaaacagtcaaaag

SEQ ID NO: 346415 - DNA, 56 bp, Artificial
  Synthetic oligonucleotide
cagaatattgtcaaacactcgatacgtttggacaaaagcgacagggaaaccataag

SEQ ID NO: 346416 - DNA, 54 bp, Artificial
  Synthetic oligonucleotide
cagaatatttttaatgttcaaaggattaatgaggcaatgcaactatgaatatac

SEQ ID NO: 346417 - DNA, 60 bp, Artificial
  Synthetic oligonucleotide
cagaatcaaaactagactgttcaccataaggcaggaaatggccagtagaggtctctggga

SEQ ID NO: 346418 - DNA, 60 bp, Artificial
  Synthetic oligonucleotide
cagaatcagcctgaaatatgcaatcaaagcgtcattacttacgaaaacaacacttgggta

SEQ ID NO: 346419 - DNA, 55 bp, Artificial
  Synthetic oligonucleotide
cagaatcatggatactgagaaacccgggctacgccctcgttgcagctgtcattgg

SEQ ID NO: 346420 - DNA, 57 bp, Artificial
  Synthetic oligonucleotide
cagaatccagtggacatatcactcactctgggatggtgggcatgggagtccgctgca

SEQ ID NO: 346421 - DNA, 55 bp, Artificial
  Synthetic oligonucleotide
cagaatcctcaggacaatcaggcgtaggatttcaacctccagttaacgctcaacc

SEQ ID NO: 346422 - DNA, 53 bp, Artificial
  Synthetic oligonucleotide
cagaatcctcattctacgcagagatgaaatggcttctgtcaaatacggataac

SEQ ID NO: 346423 - DNA, 56 bp, Artificial
  Synthetic oligonucleotide
cagaatccttgtacatgatttgcaacagattttgtatatcttcctctagagcgttg

SEQ ID NO: 346424 - DNA, 60 bp, Artificial
  Synthetic oligonucleotide
cagaatctaaccatcgagtcctcaggagccatgcatgcctcttgttgggatcagctctct

SEQ ID NO: 346425 - DNA, 60 bp, Artificial
  Synthetic oligonucleotide
cagaatctaatgtcgcagtcccgcactcgcgagatactaacaaaaaccactgtggaccat

SEQ ID NO: 346426 - DNA, 55 bp, Artificial
  Synthetic oligonucleotide
cagaatctacagaaagtgcacttcaagcacattttgcaatctgcaaactaacttc

SEQ ID NO: 346427 - DNA, 53 bp, Artificial
  Synthetic oligonucleotide
cagaatctataaatagttctgcttacattctggtgattcagagtgccctagcg

SEQ ID NO: 346428 - DNA, 60 bp, Artificial
  Synthetic oligonucleotide
cagaatctatcggactcttaggacaactgacgtgcccaggggctgtgaaggcccatgtaa

SEQ ID NO: 346429 - DNA, 60 bp, Artificial
  Synthetic oligonucleotide
cagaatcttataccaaagcagtaagtatatatgtaatgctagatttattagcaagagtag

SEQ ID NO: 346430 - DNA, 59 bp, Artificial
  Synthetic oligonucleotide
cagaatcttatttcatagatgagctttatcaaaagaatccggcggaagtgttttatagc

SEQ ID NO: 346431 - DNA, 60 bp, Artificial
  Synthetic oligonucleotide
cagaatgagtggtatgagagaacgcacccacgctatacggaccaaagaagatagggataa

SEQ ID NO: 346432 - DNA, 55 bp, Artificial
  Synthetic oligonucleotide
cagaatgcagaagtcactgtggacatcccactatagttgccgcggatgttgggga

SEQ ID NO: 346433 - DNA, 55 bp, Artificial
  Synthetic oligonucleotide
cagaatgccctaaatgggaatggagacccaaacaacatggacagggcagtcaaac

SEQ ID NO: 346434 - DNA, 54 bp, Artificial
  Synthetic oligonucleotide
cagaatgccggcttaagttgtctgcatgtgaaagcaatttgttaacagtccaag

SEQ ID NO: 346435 - DNA, 51 bp, Artificial
  Synthetic oligonucleotide
cagaatgcgagctgtgccctcttccgtgtgcttgaccaagctgcgacccac

SEQ ID NO: 346436 - DNA, 60 bp, Artificial
  Synthetic oligonucleotide
cagaatgcgtatgcattaatggaacttgtacagtagtaatgactgatggaagtgcatcag

SEQ ID NO: 346437 - DNA, 55 bp, Artificial
  Synthetic oligonucleotide
cagaatgctggcaatgagtatcgtaaagagatggatgtcattgaagcatttatcg

SEQ ID NO: 346438 - DNA, 58 bp, Artificial
  Synthetic oligonucleotide
cagaatggaggaagcaatgcttgcaaaaggggacctaatagcggtttcttcagtagac

SEQ ID NO: 346439 - DNA, 60 bp, Artificial
  Synthetic oligonucleotide
cagaatggatacatcataagataagtaatgtagaaggaactggacattggtcatcaattg

SEQ ID NO: 346440 - DNA, 52 bp, Artificial
  Synthetic oligonucleotide
cagaatggcgcgcattcagggcaagcggccgcagtcactttcgagcgtggtg

SEQ ID NO: 346441 - DNA, 55 bp, Artificial
  Synthetic oligonucleotide
cagaatggctgttgtttaggttgtcagaggcagcacgtactcgacagttcagacg

SEQ ID NO: 346442 - DNA, 55 bp, Artificial
  Synthetic oligonucleotide
cagaatgggcttatttgcgggctacgtcagctagccaatgaaactacccaggctc

SEQ ID NO: 346443 - DNA, 60 bp, Artificial
  Synthetic oligonucleotide
cagaatgtcatttagcattagttgctaatcagcaggaacctaccatattggaagttggtg

SEQ ID NO: 346444 - DNA, 56 bp, Artificial
  Synthetic oligonucleotide
cagaatgtgaattactgctcacagcaagatcatggtcttacattgtggagacatcc

SEQ ID NO: 346445 - DNA, 53 bp, Artificial
  Synthetic oligonucleotide
cagaatgtgcctttgctttctagacctgttgcaagaaatacttactaaccaac

SEQ ID NO: 346446 - DNA, 55 bp, Artificial
  Synthetic oligonucleotide
cagaatgtggaactcgagcacggcttgttccctagcaaacgtgtttcgagggagc

SEQ ID NO: 346447 - DNA, 60 bp, Artificial
  Synthetic oligonucleotide
cagaatgttaaacattcatctgacacatacattgcctggtgactttggtttggttgataa

SEQ ID NO: 346448 - DNA, 58 bp, Artificial
  Synthetic oligonucleotide
cagaattaaaatcagctaaacctcgacttttcgggttggatggtggcatcagtacaca

SEQ ID NO: 346449 - DNA, 58 bp, Artificial
  Synthetic oligonucleotide
cagaattaaggccttcccaataaactgtatataagtaagtgcagttccgaatggctga

SEQ ID NO: 346450 - DNA, 59 bp, Artificial
  Synthetic oligonucleotide
cagaattaaggcgttcccactaaagtgaatataagtaagtgcagtggcgaatggctgag

SEQ ID NO: 346451 - DNA, 58 bp, Artificial
  Synthetic oligonucleotide
cagaattaaggcgttcccagtaaagtgaatataagtagacgcagtttcgaatggctga

SEQ ID NO: 346452 - DNA, 59 bp, Artificial
  Synthetic oligonucleotide
cagaattactttacatggctaaggatggatattgctatctgaatatatatctcgccatg

SEQ ID NO: 346453 - DNA, 58 bp, Artificial
  Synthetic oligonucleotide
cagaattagatatgtcagagttagctgacttgatacttaatgagtggctttgtaatcc

SEQ ID NO: 346454 - DNA, 55 bp, Artificial
  Synthetic oligonucleotide
cagaattagcgaacctaatattaaatgaatggctgtgtaacccgatggacatcac

SEQ ID NO: 346455 - DNA, 55 bp, Artificial
  Synthetic oligonucleotide
cagaattatgggcctatgctacaacgtgactgcgaaggaatgccaatagaggaac

SEQ ID NO: 346456 - DNA, 56 bp, Artificial
  Synthetic oligonucleotide
cagaattcaaccttcaccttccttattctgtagtattcaaagggcacagtgagggg

SEQ ID NO: 346457 - DNA, 60 bp, Artificial
  Synthetic oligonucleotide
cagaattcagatgtggtccgcctattcgagtatgcagcacttgaagtgcttctcgactgt

SEQ ID NO: 346458 - DNA, 55 bp, Artificial
  Synthetic oligonucleotide
cagaattccagatgtatggacggcattacaggaagcatttgattgggcaggatgg

SEQ ID NO: 346459 - DNA, 60 bp, Artificial
  Synthetic oligonucleotide
cagaattgatttcgtcggctggtggacaattgttctattctcgccccgtcgtctcagcca

SEQ ID NO: 346460 - DNA, 55 bp, Artificial
  Synthetic oligonucleotide
cagaattgctctctcttgagcttatacgtgatgtctctctaatttgtagtgctgc

SEQ ID NO: 346461 - DNA, 59 bp, Artificial
  Synthetic oligonucleotide
cagaattggcttgagactgaacatgcatttgcttttaaagaggttacagggcaacgtgt

SEQ ID NO: 346462 - DNA, 55 bp, Artificial
  Synthetic oligonucleotide
cagaattgggccgttgctgccgattcaattggtgacgctgcaacagagtgggccg

SEQ ID NO: 346463 - DNA, 60 bp, Artificial
  Synthetic oligonucleotide
cagaattgggtcaaggggacatgtgtttgtcataagagaaccattcgtggcatgtggtcc

SEQ ID NO: 346464 - DNA, 53 bp, Artificial
  Synthetic oligonucleotide
cagaattgggtgtcgccatagcagaataggcattacgcaacagaggagagtaa

SEQ ID NO: 346465 - DNA, 50 bp, Artificial
  Synthetic oligonucleotide
cagaattgttagagtggcaattagtcaataagggtgtcgggtatgctagt

SEQ ID NO: 346466 - DNA, 55 bp, Artificial
  Synthetic oligonucleotide
cagaatttatgccgactttaccagcaaacgtgcaatatgtcttacgatgtatagg

SEQ ID NO: 346467 - DNA, 54 bp, Artificial
  Synthetic oligonucleotide
cagaatttcacaaccctgtgtattatgaaggacaaggcgaaaatgtgggtgaag

SEQ ID NO: 346468 - DNA, 55 bp, Artificial
  Synthetic oligonucleotide
cagaattttacaccggacacactcctgcgaccggtgtcactgaacctgccacccc

SEQ ID NO: 346469 - DNA, 60 bp, Artificial
  Synthetic oligonucleotide
cagaattttatatgccatgtaagaatgataactattcagtaccagttatgatacaatgta

SEQ ID NO: 346470 - DNA, 55 bp, Artificial
  Synthetic oligonucleotide
cagaattttcagttagatgctggagtgtggttgactggtgttgagtggagtgggg

SEQ ID NO: 346471 - DNA, 60 bp, Artificial
  Synthetic oligonucleotide
cagaattttgtccttgtctacagtgcgagccattcagatagcttctgaactagcttctga

SEQ ID NO: 346472 - DNA, 58 bp, Artificial
  Synthetic oligonucleotide
cagacaaaacacgcgtcttcgggcaagcagactggcacatttttggatttgttgaaac

SEQ ID NO: 346473 - DNA, 60 bp, Artificial
  Synthetic oligonucleotide
cagacaaaatctgccttggacatcatgccgtatcaaatggtaccaaagtgaacacactca

SEQ ID NO: 346474 - DNA, 57 bp, Artificial
  Synthetic oligonucleotide
cagacaaaatttgccccgggaaattatcccatactatggagctatgcaatgggggtc

SEQ ID NO: 346475 - DNA, 57 bp, Artificial
  Synthetic oligonucleotide
cagacaaaccaacagctactttaatgtggtatgcatttcgggttggacaacaacgcc

SEQ ID NO: 346476 - DNA, 54 bp, Artificial
  Synthetic oligonucleotide
cagacaaatcatttggacgctcatttcaatgcctgatggttcggttgtacggaa

SEQ ID NO: 346477 - DNA, 60 bp, Artificial
  Synthetic oligonucleotide
cagacaacataagtcatgtattcgttacttcaaggggtcaatcctacctgaagtcatgat

SEQ ID NO: 346478 - DNA, 60 bp, Artificial
  Synthetic oligonucleotide
cagacaacctactgcatcgatggtgcagacagcatactgggatgtatcaggggtcctcgc

SEQ ID NO: 346479 - DNA, 60 bp, Artificial
  Synthetic oligonucleotide
cagacaactatgcaaactggaacatctggagtaatgggaacaaggtgaatttgaaagaca

SEQ ID NO: 346480 - DNA, 60 bp, Artificial
  Synthetic oligonucleotide
cagacaactctgttgtcctctctaggaagtacacctccttcccatggctgctcggttgtg

SEQ ID NO: 346481 - DNA, 60 bp, Artificial
  Synthetic oligonucleotide
cagacaagacactatttgcatactctctggaaggcgggcattctatataggagggagaca

SEQ ID NO: 346482 - DNA, 55 bp, Artificial
  Synthetic oligonucleotide
cagacaagaggctccttgtcaatattgagccactctccctccagagtatatgggg

SEQ ID NO: 346483 - DNA, 55 bp, Artificial
  Synthetic oligonucleotide
cagacaagatgagtgaacctttcgatgtcagctccaactactacgtcatgccagg

SEQ ID NO: 346484 - DNA, 55 bp, Artificial
  Synthetic oligonucleotide
cagacaagcaatactgtgctggggtgagttaatgactctggcatcctgggtgggc

SEQ ID NO: 346485 - DNA, 59 bp, Artificial
  Synthetic oligonucleotide
cagacaagcacaatacagagcattcaaggccaagcagggaaaaatagttgggcaaactg

SEQ ID NO: 346486 - DNA, 60 bp, Artificial
  Synthetic oligonucleotide
cagacaagctaccaatacttaatcatacagaatagaacttggcaaaaccactgcacgtac

SEQ ID NO: 346487 - DNA, 55 bp, Artificial
  Synthetic oligonucleotide
cagacaagctgagtagagtgggcaaacccgttaccgagacatcgagttttccgta

SEQ ID NO: 346488 - DNA, 59 bp, Artificial
  Synthetic oligonucleotide
cagacaagctttacccactggcttccagtattcttcggattagctggacagctttacaa

SEQ ID NO: 346489 - DNA, 55 bp, Artificial
  Synthetic oligonucleotide
cagacaaggtgtgataaaactgccataccattaacctggacaggaatgattgacc

SEQ ID NO: 346490 - DNA, 56 bp, Artificial
  Synthetic oligonucleotide
cagacaagtgggcaagactaatgaagaggcaaagatgattagccaatcattgcatg

SEQ ID NO: 346491 - DNA, 55 bp, Artificial
  Synthetic oligonucleotide
cagacaagtgtattatgggtccggcctttaacattacgggtacattccacttgca

SEQ ID NO: 346492 - DNA, 60 bp, Artificial
  Synthetic oligonucleotide
cagacaataccaatccatactgatcacacagtacgtataccaagatgggacgagaaaatc

SEQ ID NO: 346493 - DNA, 53 bp, Artificial
  Synthetic oligonucleotide
cagacaatccaagaggagggcatagacgggaatggagccttagctgggtccaa

SEQ ID NO: 346494 - DNA, 60 bp, Artificial
  Synthetic oligonucleotide
cagacaatgagatagagcaacatacagcaaagcaaccaaagttacgtacaccacccattc

SEQ ID NO: 346495 - DNA, 60 bp, Artificial
  Synthetic oligonucleotide
cagacaatgatgaattcctgtttgctcacttcatgagctttgttgatcgattgaagtttt

SEQ ID NO: 346496 - DNA, 60 bp, Artificial
  Synthetic oligonucleotide
cagacaatgcacaatctctgtacaagacatgtatactcctccttactgttgttgtttaaa

SEQ ID NO: 346497 - DNA, 60 bp, Artificial
  Synthetic oligonucleotide
cagacaatgcatcaggcggtgatattttgactagggttgcggatgatgcatccaacgtat

SEQ ID NO: 346498 - DNA, 60 bp, Artificial
  Synthetic oligonucleotide
cagacaatgccaaaacaataatagtacaccttaatagatctgtagagattaattgtacaa

SEQ ID NO: 346499 - DNA, 59 bp, Artificial
  Synthetic oligonucleotide
cagacaatgcctcggtacagcaaacctatcccaatgagtattaaccggcgacgcgcctg

SEQ ID NO: 346500 - DNA, 60 bp, Artificial
  Synthetic oligonucleotide
cagacaatgcgacttgactccagcgaagcccctcaacgtttcatttcagttgtcacccga

SEQ ID NO: 346501 - DNA, 60 bp, Artificial
  Synthetic oligonucleotide
cagacaatggggcggtggctgtattgaaatacaatggcataataacagatactattaaga

SEQ ID NO: 346502 - DNA, 53 bp, Artificial
  Synthetic oligonucleotide
cagacaattgttgtctggtatagtgcaacagcagaataacctgctgatggcta

SEQ ID NO: 346503 - DNA, 50 bp, Artificial
  Synthetic oligonucleotide
cagacacaacagtccccatctatggcaaaaccatagctactcctagtgac

SEQ ID NO: 346504 - DNA, 60 bp, Artificial
  Synthetic oligonucleotide
cagacacaatctggaatgtgacttacagtgggacaagcaaagcatgttcgaattcattct

SEQ ID NO: 346505 - DNA, 55 bp, Artificial
  Synthetic oligonucleotide
cagacacatcctccaatcgcttctacactttagagagcaaagtgtggactcgaac

SEQ ID NO: 346506 - DNA, 55 bp, Artificial
  Synthetic oligonucleotide
cagacaccaacggtagtcccaaatgcagtaattgagttcgaaggcctggtcatgg

SEQ ID NO: 346507 - DNA, 55 bp, Artificial
  Synthetic oligonucleotide
cagacaccaatagctaattccgtgacagtgagacaggatttagaaaggcaacttg

SEQ ID NO: 346508 - DNA, 56 bp, Artificial
  Synthetic oligonucleotide
cagacaccaatggaccgaccacgaactccacttccggttcagttggacctccacac

SEQ ID NO: 346509 - DNA, 60 bp, Artificial
  Synthetic oligonucleotide
cagacaccatgctattactcaggtcttgctgttgggatcaacccatacaaagattggcac

SEQ ID NO: 346510 - DNA, 53 bp, Artificial
  Synthetic oligonucleotide
cagacaccggagcaggtagaaaccgcgagcggcagtccggaaagaaattgggg

SEQ ID NO: 346511 - DNA, 60 bp, Artificial
  Synthetic oligonucleotide
cagacaccttccttcaagtactctgcagaaggtcataagactagctggtgcgcgtgttga

SEQ ID NO: 346512 - DNA, 55 bp, Artificial
  Synthetic oligonucleotide
cagacacctttagtattactgggtgttccagactagttcctgaggtaccaagttg

SEQ ID NO: 346513 - DNA, 60 bp, Artificial
  Synthetic oligonucleotide
cagacacgagtcagtagactatatagtgtgctacaccaccacaggccccttcgagacaaa

SEQ ID NO: 346514 - DNA, 53 bp, Artificial
  Synthetic oligonucleotide
cagacacggggcaatccatctggacagttctcaacaactatggacaataacat

SEQ ID NO: 346515 - DNA, 54 bp, Artificial
  Synthetic oligonucleotide
cagacactagcttcagtatcatcaggaccaaaacacacccagagtgtccccata

SEQ ID NO: 346516 - DNA, 55 bp, Artificial
  Synthetic oligonucleotide
cagacactgccaagattaggaaaatgctgatagttaatcacagaaacacggattc

SEQ ID NO: 346517 - DNA, 55 bp, Artificial
  Synthetic oligonucleotide
cagacactggataatatgaaagtcattggcaaatggcaagatgaccctgaccagt

SEQ ID NO: 346518 - DNA, 55 bp, Artificial
  Synthetic oligonucleotide
cagacactttcctagacagtggctccatggactagggcaatatatctatgcaacc

SEQ ID NO: 346519 - DNA, 55 bp, Artificial
  Synthetic oligonucleotide
cagacactttcctcgatcgtggcttcatggcttaggacaatatgtctataacacc

SEQ ID NO: 346520 - DNA, 58 bp, Artificial
  Synthetic oligonucleotide
cagacagaaaggatgatgagatatagtaggaaaaaatggtggctagtcttttacaccg

SEQ ID NO: 346521 - DNA, 60 bp, Artificial
  Synthetic oligonucleotide
cagacagaatctgtgtaggatacttaagcaccaactcaacagaaaaagttgacacactgt

SEQ ID NO: 346522 - DNA, 60 bp, Artificial
  Synthetic oligonucleotide
cagacagacaaacttaatcattttgaagtgacaggaactactatcagcactggctggttt

SEQ ID NO: 346523 - DNA, 60 bp, Artificial
  Synthetic oligonucleotide
cagacagagaagtgctgcggtggcagtttgacagtagcctagcacgcagacacatggccc

SEQ ID NO: 346524 - DNA, 60 bp, Artificial
  Synthetic oligonucleotide
cagacagagacaggtccgagctcagcccgctactgctgtccaccacacaatggcaggttc

SEQ ID NO: 346525 - DNA, 55 bp, Artificial
  Synthetic oligonucleotide
cagacagagcgcattgtttcaggtagcacgctaataccgacatctctgacgccac

SEQ ID NO: 346526 - DNA, 55 bp, Artificial
  Synthetic oligonucleotide
cagacagaggaaggcagaaaattgtctctctaactgagacaacaaatcagaggac

SEQ ID NO: 346527 - DNA, 60 bp, Artificial
  Synthetic oligonucleotide
cagacagatcagacctcatcgggttatgggaggaccaaatatactgcttggatatttcca

SEQ ID NO: 346528 - DNA, 55 bp, Artificial
  Synthetic oligonucleotide
cagacagatcccatatgaggtgctcactggttacaacatatctaaggagatagct

SEQ ID NO: 346529 - DNA, 55 bp, Artificial
  Synthetic oligonucleotide
cagacagcacgtcgagtgagatcgaggtccccgcgaaggaagcgaatacccaggg

SEQ ID NO: 346530 - DNA, 60 bp, Artificial
  Synthetic oligonucleotide
cagacagcaggacgctttctgcccgcccttgcttcccggctgggtgtctccgccaagatg

SEQ ID NO: 346531 - DNA, 57 bp, Artificial
  Synthetic oligonucleotide
cagacagcagggttaacatgggtttagaccctaaacaaactcagatgtttatgatag

SEQ ID NO: 346532 - DNA, 55 bp, Artificial
  Synthetic oligonucleotide
cagacagccacttttgaggaagtgttgcgttgtaacgttgagtcgcagagagaga

SEQ ID NO: 346533 - DNA, 52 bp, Artificial
  Synthetic oligonucleotide
cagacagcctctttaacgccgttcgcgcccttacacatcgccgacggaatga

SEQ ID NO: 346534 - DNA, 55 bp, Artificial
  Synthetic oligonucleotide
cagacagcgccgggtacctttaagacttctgaaggcgaagttggagctatagctc

SEQ ID NO: 346535 - DNA, 54 bp, Artificial
  Synthetic oligonucleotide
cagacagctgactggtttgcaattggtcagtatatcatagggtttgcacttgca

SEQ ID NO: 346536 - DNA, 60 bp, Artificial
  Synthetic oligonucleotide
cagacaggacttgacgtccgaacttgatttagctccctgaatgttcggatggaaatgtgc

SEQ ID NO: 346537 - DNA, 55 bp, Artificial
  Synthetic oligonucleotide
cagacaggagcgatgccgtgttttcgacgttgtcaaaggtaagaacgatcttcac

SEQ ID NO: 346538 - DNA, 55 bp, Artificial
  Synthetic oligonucleotide
cagacaggatctgcatcggttaccatgcaaacaactcgacaacacaagtggacac

SEQ ID NO: 346539 - DNA, 60 bp, Artificial
  Synthetic oligonucleotide
cagacaggatttgcggacgaatatccactcgcgccaagtgatttggggtgatagtggtca

SEQ ID NO: 346540 - DNA, 56 bp, Artificial
  Synthetic oligonucleotide
cagacaggcgcgtgggagtgcgctgttaaagtagggtttctctctcctcaaacccc

SEQ ID NO: 346541 - DNA, 59 bp, Artificial
  Synthetic oligonucleotide
cagacagggagtcaactcaaaaggcagtagaccagataacatccaaagtaaacaacatc

SEQ ID NO: 346542 - DNA, 55 bp, Artificial
  Synthetic oligonucleotide
cagacagggcttagaaaggcttttgctataagatgggtggcaagtggtcaaaatg

SEQ ID NO: 346543 - DNA, 60 bp, Artificial
  Synthetic oligonucleotide
cagacaggtctcccagtgcatatcaagagaagtgaagtgcctgaaccgaatgaagaggtg

SEQ ID NO: 346544 - DNA, 50 bp, Artificial
  Synthetic oligonucleotide
cagacagtatcgtgtaccgctccatcgtgtgggcccaacccttcggggcc

SEQ ID NO: 346545 - DNA, 55 bp, Artificial
  Synthetic oligonucleotide
cagacagtttcggagggctagcggttttcaaccaaggcgctatcagggagatgct

SEQ ID NO: 346546 - DNA, 59 bp, Artificial
  Synthetic oligonucleotide
cagacataaatggaagcaattgatcctcaaagattttagggtacaaccgcctcacagac

SEQ ID NO: 346547 - DNA, 60 bp, Artificial
  Synthetic oligonucleotide
cagacatactatgacattaaatgtttgctacatcgctggcggggactcatgggtaccttg

SEQ ID NO: 346548 - DNA, 60 bp, Artificial
  Synthetic oligonucleotide
cagacatactctcctgatacgattggtcacgatcttatacgcgatttaatttcagtaatt

SEQ ID NO: 346549 - DNA, 55 bp, Artificial
  Synthetic oligonucleotide
cagacatactttacttggtcactacgccttttggaaaagggtaatacatcagaag

SEQ ID NO: 346550 - DNA, 58 bp, Artificial
  Synthetic oligonucleotide
cagacatatgtcaacatcaacaatactaattttcttactgagaaagctgtggcttcag

SEQ ID NO: 346551 - DNA, 55 bp, Artificial
  Synthetic oligonucleotide
cagacatcaacgataagcagaaggttaaggctaaaagagatggcgactcaaacgg

SEQ ID NO: 346552 - DNA, 60 bp, Artificial
  Synthetic oligonucleotide
cagacatcagcattgaaaatgcgtacattacattacatagtcggcagttttgccgacgaa

SEQ ID NO: 346553 - DNA, 60 bp, Artificial
  Synthetic oligonucleotide
cagacatctatgctttttgcaaagacttaattcacgcatactctacaacaacagttcgtg

SEQ ID NO: 346554 - DNA, 57 bp, Artificial
  Synthetic oligonucleotide
cagacatctcttggaaggagatttatttatcaggtaggattgttaaacaaaggaata

SEQ ID NO: 346555 - DNA, 60 bp, Artificial
  Synthetic oligonucleotide
cagacatgacctgtgacacattaatgatgtgggaagctgtgtcatgtaaaactgagatag

SEQ ID NO: 346556 - DNA, 60 bp, Artificial
  Synthetic oligonucleotide
cagacatgatcatatctagtcatatctgatcagatctaaacagatataactatatctgag

SEQ ID NO: 346557 - DNA, 55 bp, Artificial
  Synthetic oligonucleotide
cagacatgcctattgatgtccagtggggctttgtatactccactcgatgttatgc

SEQ ID NO: 346558 - DNA, 58 bp, Artificial
  Synthetic oligonucleotide
cagacatggagactacacaacaaaagctcttgcaagaattacaaaggactggccaatt

SEQ ID NO: 346559 - DNA, 50 bp, Artificial
  Synthetic oligonucleotide
cagacatggggagttggtgtgatgattcaatcatgtacgagtgtgtcacc

SEQ ID NO: 346560 - DNA, 55 bp, Artificial
  Synthetic oligonucleotide
cagacatggtcaacgcaattgaatacttttcacggttgcttcctaatccagacga

SEQ ID NO: 346561 - DNA, 54 bp, Artificial
  Synthetic oligonucleotide
cagacatgtttggatactttgcagtgtacacaagccccaagtctgacaacgatt

SEQ ID NO: 346562 - DNA, 60 bp, Artificial
  Synthetic oligonucleotide
cagacattacaatcagcccaggtgaaccttctatgacactggggactttctctgttataa

SEQ ID NO: 346563 - DNA, 55 bp, Artificial
  Synthetic oligonucleotide
cagacattctctggcagtccgtatcttcctagttagtgagctcaagaggggccgc

SEQ ID NO: 346564 - DNA, 60 bp, Artificial
  Synthetic oligonucleotide
cagacattgacctgaaatacttcaatgaatcaacgagagagaaaatcgagaaaataagac

SEQ ID NO: 346565 - DNA, 52 bp, Artificial
  Synthetic oligonucleotide
cagacattgtgttgttgactgtcgattcaatgtatgattacgttacgaaagt

SEQ ID NO: 346566 - DNA, 55 bp, Artificial
  Synthetic oligonucleotide
cagacatttcggctacaaacttctctcaggagataattaacgagtgcccttcccg

SEQ ID NO: 346567 - DNA, 60 bp, Artificial
  Synthetic oligonucleotide
cagaccaaaagtccacacagtctgcactgtagtctttagacaatatgtttattgtcggag

SEQ ID NO: 346568 - DNA, 58 bp, Artificial
  Synthetic oligonucleotide
cagaccaaaagtccacacattcttctgtgtagtccttagacaatatgtttattgtcgg

SEQ ID NO: 346569 - DNA, 55 bp, Artificial
  Synthetic oligonucleotide
cagaccaaatatagggccacgacccctagttagggaacagcaggggagaatggat

SEQ ID NO: 346570 - DNA, 55 bp, Artificial
  Synthetic oligonucleotide
cagaccaacaggattgacactgcccaccggtttagaacaggcaatgcgcaaagga

SEQ ID NO: 346571 - DNA, 60 bp, Artificial
  Synthetic oligonucleotide
cagaccaagcccaagccaggagacatcgtgttaacatgcttccgaggctgggtaaagcag

SEQ ID NO: 346572 - DNA, 55 bp, Artificial
  Synthetic oligonucleotide
cagaccaagggttcaagagacgttccaattaaagcaacacgaacgatctactcaa

SEQ ID NO: 346573 - DNA, 55 bp, Artificial
  Synthetic oligonucleotide
cagaccaataggtgatggctatccaagtcattaacggtcaagcacttctgtttcc

SEQ ID NO: 346574 - DNA, 55 bp, Artificial
  Synthetic oligonucleotide
cagaccacaatgacacccagtttggaggcaatccatataacactaaccagtttac

SEQ ID NO: 346575 - DNA, 60 bp, Artificial
  Synthetic oligonucleotide
cagaccacagatcatagcaggcggttattactgactgataagaggggcccagtaggttaa

SEQ ID NO: 346576 - DNA, 55 bp, Artificial
  Synthetic oligonucleotide
cagaccacctatggttcatcgaccaaccccatgtatgtttcagataccgttacat

SEQ ID NO: 346577 - DNA, 54 bp, Artificial
  Synthetic oligonucleotide
cagaccacctgaagacgtgtcgcaagaaaaccctgtgcatcggtcattcggacg

SEQ ID NO: 346578 - DNA, 55 bp, Artificial
  Synthetic oligonucleotide
cagaccacgaagacgcttacgccaatattgttagggaaagttggatttcaagact

SEQ ID NO: 346579 - DNA, 55 bp, Artificial
  Synthetic oligonucleotide
cagaccactcataccataacatcaaacacctaactgaggtggcagcacggaagta

SEQ ID NO: 346580 - DNA, 52 bp, Artificial
  Synthetic oligonucleotide
cagaccagaacacatacctaaaatcatcgaagatccggcgaccttgaatatt

SEQ ID NO: 346581 - DNA, 55 bp, Artificial
  Synthetic oligonucleotide
cagaccagacattatttacataccctttggaaggcgggtattctatataagagag

SEQ ID NO: 346582 - DNA, 60 bp, Artificial
  Synthetic oligonucleotide
cagaccagaggccttattgctggcactacgcgcctcagccgtgcggtaccatacccgcgg

SEQ ID NO: 346583 - DNA, 55 bp, Artificial
  Synthetic oligonucleotide
cagaccagccttaacctctcgtaggggtactgtccgcttcagcagagtaggtcag

SEQ ID NO: 346584 - DNA, 55 bp, Artificial
  Synthetic oligonucleotide
cagaccaggcatgaatcccgcaacaatacggatgctggcactgatcctcgtggtc

SEQ ID NO: 346585 - DNA, 60 bp, Artificial
  Synthetic oligonucleotide
cagaccagtatggatttgacaacaatggagtcctagtgaagcctgttcgggatttgcttg

SEQ ID NO: 346586 - DNA, 54 bp, Artificial
  Synthetic oligonucleotide
cagaccatatctaaaactcactactggagacttaaaacccttattcgacaccct

SEQ ID NO: 346587 - DNA, 60 bp, Artificial
  Synthetic oligonucleotide
cagaccatgacaaagcacctggctcaagcagtggaactgtccaagaagtccaatgccctt

SEQ ID NO: 346588 - DNA, 58 bp, Artificial
  Synthetic oligonucleotide
cagaccatgtgacgtggataacaagattggcaacgctaagtgttgtccatttatatgc

SEQ ID NO: 346589 - DNA, 55 bp, Artificial
  Synthetic oligonucleotide
cagaccatgtggaccttgagaacccgattcctccaccgcgcccgaagagagctgc

SEQ ID NO: 346590 - DNA, 52 bp, Artificial
  Synthetic oligonucleotide
cagaccattggattacgacataaactgtcctagttttaactacatgctgaga

SEQ ID NO: 346591 - DNA, 59 bp, Artificial
  Synthetic oligonucleotide
cagacccaactactgcaccacaaacggaaagaatgatgcgcataaattggaaaagatgg

SEQ ID NO: 346592 - DNA, 57 bp, Artificial
  Synthetic oligonucleotide
cagacccaccagtgtaccctaaccagggaggatgctcccaaaacgtggctccaggca

SEQ ID NO: 346593 - DNA, 55 bp, Artificial
  Synthetic oligonucleotide
cagacccagatacatataccagcgcaggatttgtttcatgctggtatcaaacttc

SEQ ID NO: 346594 - DNA, 58 bp, Artificial
  Synthetic oligonucleotide
cagaccccagcgggtgctataaattccaggatgccttttcacaatgtccatcctttta

SEQ ID NO: 346595 - DNA, 55 bp, Artificial
  Synthetic oligonucleotide
cagacccccctgggggcaataaatacaacactgcctttccacaacattcacccat

SEQ ID NO: 346596 - DNA, 52 bp, Artificial
  Synthetic oligonucleotide
cagacccctcactcaatgtcactggacacatggaaaaattcatgcagctaca

SEQ ID NO: 346597 - DNA, 60 bp, Artificial
  Synthetic oligonucleotide
cagacccctctattgtgtacatcaaaggatagagataagagataccaaggaagctttaga

SEQ ID NO: 346598 - DNA, 55 bp, Artificial
  Synthetic oligonucleotide
cagaccccttccaatcccggatcctccgactacgcctggcgaacatttgtgttcg

SEQ ID NO: 346599 - DNA, 55 bp, Artificial
  Synthetic oligonucleotide
cagacccgacattatttacatactctctggaaggctgggattctatataagaggg

SEQ ID NO: 346600 - DNA, 58 bp, Artificial
  Synthetic oligonucleotide
cagacccgagactggagccacacaaatgggaaaagtactgtgttctcgaaataggaga

SEQ ID NO: 346601 - DNA, 50 bp, Artificial
  Synthetic oligonucleotide
cagacccgtccacgggagagatgatcatgccaatcactgacacaagagag

SEQ ID NO: 346602 - DNA, 55 bp, Artificial
  Synthetic oligonucleotide
cagacccgtctaagctggcttatttaagctcggcttgggctgaccccaattcact

SEQ ID NO: 346603 - DNA, 55 bp, Artificial
  Synthetic oligonucleotide
cagaccctgatgtgttgccagaatccgacgatacgcttggttcggtcgttgtgaa

SEQ ID NO: 346604 - DNA, 55 bp, Artificial
  Synthetic oligonucleotide
cagacccttgttgggtatacatggatacatatttaagaaatggcttggatggaca

SEQ ID NO: 346605 - DNA, 57 bp, Artificial
  Synthetic oligonucleotide
cagaccgagggttcatattgtgcaggacaactagcacagtgtaacccgtgcaggctg

SEQ ID NO: 346606 - DNA, 56 bp, Artificial
  Synthetic oligonucleotide
cagaccgcatattgaaatgggtagctgggttcttatacttaggcacattagggatt

SEQ ID NO: 346607 - DNA, 60 bp, Artificial
  Synthetic oligonucleotide
cagaccgcccgcgcagcgatggggatcaagctctcccctgtggcgcaacctgtgcagaaa

SEQ ID NO: 346608 - DNA, 55 bp, Artificial
  Synthetic oligonucleotide
cagaccgcgaactcacctccattgtaggcggcatggctgtttcagcaggccaaaa

SEQ ID NO: 346609 - DNA, 55 bp, Artificial
  Synthetic oligonucleotide
cagaccgctgtggatacatgcttaggaagacttggttcaatagcgataccaagcc

SEQ ID NO: 346610 - DNA, 55 bp, Artificial
  Synthetic oligonucleotide
cagaccggataatgaggcggaattcgctctcaagaaagacatcggggacctgctc

SEQ ID NO: 346611 - DNA, 55 bp, Artificial
  Synthetic oligonucleotide
cagaccgggagtggaatgccctgttgtgcatggactcgcagaagttgttgcacgc

SEQ ID NO: 346612 - DNA, 60 bp, Artificial
  Synthetic oligonucleotide
cagaccgggctctggtttacaccatcccacagcacactgtctggagattcacgtggattg

SEQ ID NO: 346613 - DNA, 55 bp, Artificial
  Synthetic oligonucleotide
cagaccgtttcaccagtcctattaccgtcaatctaatatctctacgaacattcga

SEQ ID NO: 346614 - DNA, 55 bp, Artificial
  Synthetic oligonucleotide
cagacctaagccccaggcttagagctataacaatatcaccacctaaacaaacagc

SEQ ID NO: 346615 - DNA, 59 bp, Artificial
  Synthetic oligonucleotide
cagacctacctagagctgttatttgggaggtacatactcattctgaaataggcctctta

SEQ ID NO: 346616 - DNA, 56 bp, Artificial
  Synthetic oligonucleotide
cagacctcgaccagaaccacacgtttggggtgtcccggcacatctcagcgatgtct

SEQ ID NO: 346617 - DNA, 53 bp, Artificial
  Synthetic oligonucleotide
cagacctgaaggttgcgttgtaactgagtctggtgactacattaaacccgtca

SEQ ID NO: 346618 - DNA, 53 bp, Artificial
  Synthetic oligonucleotide
cagacctgaccccgtatcgtgtggtgttaaccacttcgttaaatacgggtcaa

SEQ ID NO: 346619 - DNA, 55 bp, Artificial
  Synthetic oligonucleotide
cagacctgcagagtcgtgttaaatccttggaatctgtttcgagtcacgggctatc

SEQ ID NO: 346620 - DNA, 55 bp, Artificial
  Synthetic oligonucleotide
cagacctgcccagactttgacacaatgctcaaagacatgatgcttttcccgaggg

SEQ ID NO: 346621 - DNA, 55 bp, Artificial
  Synthetic oligonucleotide
cagacctgcctttacaacacgtagaggtggtgtgcgttttagtaggcttggcaca

SEQ ID NO: 346622 - DNA, 60 bp, Artificial
  Synthetic oligonucleotide
cagacctgggtatgcagtccaggctagagagttaacatctctccagtctatactgcagac

SEQ ID NO: 346623 - DNA, 55 bp, Artificial
  Synthetic oligonucleotide
cagacctgttaggcatgatgaaacaacactcgtcagatcacaggttgatgctttc

SEQ ID NO: 346624 - DNA, 54 bp, Artificial
  Synthetic oligonucleotide
cagaccttcgcacttctgaacgtaccccttcgaccaaacgtcgtctaccacgtc

SEQ ID NO: 346625 - DNA, 57 bp, Artificial
  Synthetic oligonucleotide
cagaccttgaagttgagaaaacacttgtgaatccccaatgccttcctcaggttgtgg

SEQ ID NO: 346626 - DNA, 54 bp, Artificial
  Synthetic oligonucleotide
cagacgaaagctgtagaaatgggtggaaaaccacccattggaaatataagcgga

SEQ ID NO: 346627 - DNA, 52 bp, Artificial
  Synthetic oligonucleotide
cagacgaagtgcaccgataacggtaagacttttctcttttaaccgtaggcgt

SEQ ID NO: 346628 - DNA, 60 bp, Artificial
  Synthetic oligonucleotide
cagacgaatggctgagtttatgccgctggtggtagacacgaacagagctgagtgtctaac

SEQ ID NO: 346629 - DNA, 54 bp, Artificial
  Synthetic oligonucleotide
cagacgaatgtgttctgtctggccgctacccggtacgtaaggtcaagtttcccg

SEQ ID NO: 346630 - DNA, 53 bp, Artificial
  Synthetic oligonucleotide
cagacgaatttgctaaggctcgaaaaccaattttagtcccgactcaaatattt

SEQ ID NO: 346631 - DNA, 53 bp, Artificial
  Synthetic oligonucleotide
cagacgacaggtgtcagaccaaagaccgatgtagtaatccgacatgttgttgg

SEQ ID NO: 346632 - DNA, 56 bp, Artificial
  Synthetic oligonucleotide
cagacgaccaccttaaggaaagatctagcctcagatatggaaatgtccttgatgtg

SEQ ID NO: 346633 - DNA, 55 bp, Artificial
  Synthetic oligonucleotide
cagacgacggggtggagagggcgccatacctctttcccgcccttcgcttctatgg

SEQ ID NO: 346634 - DNA, 55 bp, Artificial
  Synthetic oligonucleotide
cagacgacttctaccaggcagtcgtcgaggtgtttgcagaaaacgggggaagagg

SEQ ID NO: 346635 - DNA, 57 bp, Artificial
  Synthetic oligonucleotide
cagacgagaattcgaagtattgccacgtcgtcgagttctgcggatcggaaacgttgt

SEQ ID NO: 346636 - DNA, 60 bp, Artificial
  Synthetic oligonucleotide
cagacgagactcatggctcaggggacaagtccaacatgcggaagctctccaggaacaact

SEQ ID NO: 346637 - DNA, 58 bp, Artificial
  Synthetic oligonucleotide
cagacgaggctgctaaaaagcacgatcaagaatacgatcaacagcttaaagcgggaga

SEQ ID NO: 346638 - DNA, 56 bp, Artificial
  Synthetic oligonucleotide
cagacgataagtattttgtcccagcgtataccgacgaggcgtatagtttcctggtg

SEQ ID NO: 346639 - DNA, 60 bp, Artificial
  Synthetic oligonucleotide
cagacgatatgttcaacgcattattacccgacctaatcgccggagcgcatcagaacgccg

SEQ ID NO: 346640 - DNA, 58 bp, Artificial
  Synthetic oligonucleotide
cagacgatcagcgtcaaagatggcagtaatgttcttagggtgcaggttggccgattaa

SEQ ID NO: 346641 - DNA, 60 bp, Artificial
  Synthetic oligonucleotide
cagacgatggctggctatggacgggcgtgggtggtcaatgcgagcgatgatcccgagagg

SEQ ID NO: 346642 - DNA, 55 bp, Artificial
  Synthetic oligonucleotide
cagacgattaacgatgtgttcttctttcgtaaccgcttagggttcctcgctggtg

SEQ ID NO: 346643 - DNA, 58 bp, Artificial
  Synthetic oligonucleotide
cagacgattatccggtagtgtgtaacctgcccattaatagacccatttatgaagacaa

SEQ ID NO: 346644 - DNA, 56 bp, Artificial
  Synthetic oligonucleotide
cagacgcaaataggaacatgtagagtagattttcatcaagtagtactttctgtcat

SEQ ID NO: 346645 - DNA, 60 bp, Artificial
  Synthetic oligonucleotide
cagacgcagagcgcgcggcaggtgtaatgctggtgaaacgtgcaaagtttgactcatggg

SEQ ID NO: 346646 - DNA, 60 bp, Artificial
  Synthetic oligonucleotide
cagacgcattgccgagtaccttagatctctggctgtgtcgcgacatgcttatgaggaccg

SEQ ID NO: 346647 - DNA, 55 bp, Artificial
  Synthetic oligonucleotide
cagacgccaatgaaacgatgcttgctaatgttacatcagtgagacaagagtatgc

SEQ ID NO: 346648 - DNA, 51 bp, Artificial
  Synthetic oligonucleotide
cagacgccagttttatcctccccttaccccgtgtaacttagaagtttttca

SEQ ID NO: 346649 - DNA, 55 bp, Artificial
  Synthetic oligonucleotide
cagacgccgagagattcagtttcccgagagtcattaattcagctgatggtactac

SEQ ID NO: 346650 - DNA, 52 bp, Artificial
  Synthetic oligonucleotide
cagacgcctgctgttgagtgtgacgatacacatagagacaacacttctgcgt

SEQ ID NO: 346651 - DNA, 55 bp, Artificial
  Synthetic oligonucleotide
cagacgccttcattaacaaccccgcgaacctgcagggctggacgcggctctactc

SEQ ID NO: 346652 - DNA, 60 bp, Artificial
  Synthetic oligonucleotide
cagacgcgctgacactatttggataatatcacaaaggttaccgattaatgctaatgtaat

SEQ ID NO: 346653 - DNA, 57 bp, Artificial
  Synthetic oligonucleotide
cagacgcggaaaggtttagttttccaagagtgatcaattcagctgacggggcaacta

SEQ ID NO: 346654 - DNA, 55 bp, Artificial
  Synthetic oligonucleotide
cagacgctattaatgcaatccccacaaaagaagagttaaaaggggtaggaataga

SEQ ID NO: 346655 - DNA, 57 bp, Artificial
  Synthetic oligonucleotide
cagacgcttggaaccaattccagaaaccgtgtgctataggctttgatatgaagagat

SEQ ID NO: 346656 - DNA, 58 bp, Artificial
  Synthetic oligonucleotide
cagacggaaggcacaccagacgcattagacctgctgcaggttagtaacctaagggtaa

SEQ ID NO: 346657 - DNA, 55 bp, Artificial
  Synthetic oligonucleotide
cagacggaatgataaggctaccacaagtcacccatgaaggcacctttataccggg

SEQ ID NO: 346658 - DNA, 56 bp, Artificial
  Synthetic oligonucleotide
cagacggaggtaacaatcccagtaccagtggagggagtggagtatcggtggggcaa

SEQ ID NO: 346659 - DNA, 55 bp, Artificial
  Synthetic oligonucleotide
cagacggcgaaatcgcgtgtatctcgaaagttggtgtatgaatcgcccaaaggtc

SEQ ID NO: 346660 - DNA, 60 bp, Artificial
  Synthetic oligonucleotide
cagacgggaccttatgcaggagcagttgaggtgcaacaatctggcagatattacgtaccg

SEQ ID NO: 346661 - DNA, 60 bp, Artificial
  Synthetic oligonucleotide
cagacgggacgaacaacagcgtcacagaattcagtgtctgtgttgtaagtgtaacaaggc

SEQ ID NO: 346662 - DNA, 60 bp, Artificial
  Synthetic oligonucleotide
cagacgggatagttactggtcatcaaattcgctctagaatgctggactctgttcaaaaag

SEQ ID NO: 346663 - DNA, 54 bp, Artificial
  Synthetic oligonucleotide
cagacgggcagctgtgtctgcattggagactaaactcggagagctcaagagaca

SEQ ID NO: 346664 - DNA, 58 bp, Artificial
  Synthetic oligonucleotide
cagacgggcatgtaactctgtgttgaacttgatccctgaaacaccaacctccttctta

SEQ ID NO: 346665 - DNA, 58 bp, Artificial
  Synthetic oligonucleotide
cagacggtgacgagattttctgcgatctaggaggagaagcggttacgcaaatcctttc

SEQ ID NO: 346666 - DNA, 55 bp, Artificial
  Synthetic oligonucleotide
cagacgtacattagaaccacaggctccagtggcctgggtgaatagtgctgcgcgg

SEQ ID NO: 346667 - DNA, 60 bp, Artificial
  Synthetic oligonucleotide
cagacgtccatttggcacgccacaagactttggtcaagtgtttaacatgtatgacaatga

SEQ ID NO: 346668 - DNA, 60 bp, Artificial
  Synthetic oligonucleotide
cagacgtcgcgaacgctgagctaccacgcatgctagtggaccacaagacaaagataatcc

SEQ ID NO: 346669 - DNA, 55 bp, Artificial
  Synthetic oligonucleotide
cagacgtctaaagctcgtgtaccgcgaaagttggcgtatgaatcgcctaaagggc

SEQ ID NO: 346670 - DNA, 55 bp, Artificial
  Synthetic oligonucleotide
cagacgtgccatcatgataccggttggtgaatcgtaccatatctgtgtcaccgcc

SEQ ID NO: 346671 - DNA, 55 bp, Artificial
  Synthetic oligonucleotide
cagacgtggaacagacccgccgcaccaatccaggtgacactggtgccctcaagga

SEQ ID NO: 346672 - DNA, 55 bp, Artificial
  Synthetic oligonucleotide
cagacgtggtgatctagaaacccttggatattgtatgattagatggttgggaggc

SEQ ID NO: 346673 - DNA, 60 bp, Artificial
  Synthetic oligonucleotide
cagacgtgtagagttgctattcctagcatctctatatgctgtgcctcttctaggggcacg

SEQ ID NO: 346674 - DNA, 55 bp, Artificial
  Synthetic oligonucleotide
cagacgtgtagcgtaatagatgttcgcgcttcagagttgatcggttgctcaccct

SEQ ID NO: 346675 - DNA, 55 bp, Artificial
  Synthetic oligonucleotide
cagacgtgtgcgtgacgacagacgaattcaggggtatgtactccaacgccaggtg

SEQ ID NO: 346676 - DNA, 60 bp, Artificial
  Synthetic oligonucleotide
cagacgttaatagtccaatatttggtacataggtctgactcattacatgcgtttgacgag

SEQ ID NO: 346677 - DNA, 55 bp, Artificial
  Synthetic oligonucleotide
cagacgttcattccgagtgatgcttttcttaaggataactttaagacggaagcac

SEQ ID NO: 346678 - DNA, 60 bp, Artificial
  Synthetic oligonucleotide
cagacgttctttctgcggaatgagcaggcacgacgaaacctgatagctgaaattaacaaa

SEQ ID NO: 346679 - DNA, 51 bp, Artificial
  Synthetic oligonucleotide
cagacgttgagcaatctttacactgagattgtgaacacgccaatactcacc

SEQ ID NO: 346680 - DNA, 60 bp, Artificial
  Synthetic oligonucleotide
cagactaaatgagatctcgtgttgtactggattatcaggtatcaagtcggtcagtcagtt

SEQ ID NO: 346681 - DNA, 55 bp, Artificial
  Synthetic oligonucleotide
cagactaactgtgcatgttaatgtaaaaccaacacctgaaccccacgcaccctca

SEQ ID NO: 346682 - DNA, 55 bp, Artificial
  Synthetic oligonucleotide
cagactaatgacagcgttagagcatgataaaagagatgattgctgccagtcagaa

SEQ ID NO: 346683 - DNA, 55 bp, Artificial
  Synthetic oligonucleotide
cagactaatgtggccaataattgtggggaggcagcaaagtttgatttcggaacaa

SEQ ID NO: 346684 - DNA, 60 bp, Artificial
  Synthetic oligonucleotide
cagactacccaggggaacatctagcaatcccgagaccagtgatagagaatcaggaagctc

SEQ ID NO: 346685 - DNA, 55 bp, Artificial
  Synthetic oligonucleotide
cagactacccccaccccgacgtccgttgatatgaattcaataacctcgacggatg

SEQ ID NO: 346686 - DNA, 51 bp, Artificial
  Synthetic oligonucleotide
cagactagtaattaatctctgatactcaagctcctcaatctcttcaccaga

SEQ ID NO: 346687 - DNA, 52 bp, Artificial
  Synthetic oligonucleotide
cagactagtggttagaggagaccctcccaagacacaacgcagcagcggggcc

SEQ ID NO: 346688 - DNA, 60 bp, Artificial
  Synthetic oligonucleotide
cagactcacagtatgtattaggaatcatccaagcacaaccagataaaagtgaatcagagt

SEQ ID NO: 346689 - DNA, 60 bp, Artificial
  Synthetic oligonucleotide
cagactcacccaatctccagcattgatggttgtcactccatgtggaaccgcgcggtagat

SEQ ID NO: 346690 - DNA, 55 bp, Artificial
  Synthetic oligonucleotide
cagactcagaaaagaatggtcttagtccagatttgcaacaagttgcgagatactc

SEQ ID NO: 346691 - DNA, 60 bp, Artificial
  Synthetic oligonucleotide
cagactcagcagaacatcttatagtctggggaattcaccatccctctagcacacaagaaa

SEQ ID NO: 346692 - DNA, 56 bp, Artificial
  Synthetic oligonucleotide
cagactcaggcctttaaagaagtgttttctagcgtcactagaagttaaaggtgata

SEQ ID NO: 346693 - DNA, 60 bp, Artificial
  Synthetic oligonucleotide
cagactcagggcatatgataccggttctgaacaccgggagcggtcacaagagagtaggta

SEQ ID NO: 346694 - DNA, 55 bp, Artificial
  Synthetic oligonucleotide
cagactcagttgctggctcggttcaggtctaaaaatactccggttagaggttttc

SEQ ID NO: 346695 - DNA, 60 bp, Artificial
  Synthetic oligonucleotide
cagactcatatactatcaagagaggaagtgacactctatcaagtgtctaatgccacttga

SEQ ID NO: 346696 - DNA, 60 bp, Artificial
  Synthetic oligonucleotide
cagactcattaattgtgagatcatctacactcccaggtgtgcgactaccactacgggatc

SEQ ID NO: 346697 - DNA, 60 bp, Artificial
  Synthetic oligonucleotide
cagactcattagaacatgctgtacacctaccacactctggctttatgctaagaaggcgag

SEQ ID NO: 346698 - DNA, 57 bp, Artificial
  Synthetic oligonucleotide
cagactccaattatgaattcagtaacagtaagacaagatttagaacgtcaacttacc

SEQ ID NO: 346699 - DNA, 60 bp, Artificial
  Synthetic oligonucleotide
cagactccacattaatctaggttgcagggaaataatacccgacatgcacaatactatcac

SEQ ID NO: 346700 - DNA, 60 bp, Artificial
  Synthetic oligonucleotide
cagactcccaatatgttataggaattctacaaggactgcctgatcaaagtgactccccca

SEQ ID NO: 346701 - DNA, 60 bp, Artificial
  Synthetic oligonucleotide
cagactccgacgaagagagcgttatctcaagcacgagcagtggatcatctcaagaagaag

SEQ ID NO: 346702 - DNA, 50 bp, Artificial
  Synthetic oligonucleotide
cagactctatccggacacgcgtggcgctgccctaacgagcaccgagtcat

SEQ ID NO: 346703 - DNA, 59 bp, Artificial
  Synthetic oligonucleotide
cagactctcaaccataattccaggataaccggagtactacatcccaggtgcttagagga

SEQ ID NO: 346704 - DNA, 55 bp, Artificial
  Synthetic oligonucleotide
cagactctcagtcccaaccaatgagctcagatctgagtggaagcgcgacttggat

SEQ ID NO: 346705 - DNA, 60 bp, Artificial
  Synthetic oligonucleotide
cagactctcccggatctaggacgcttgctcccagcctttgcagatctcgatacggatgta

SEQ ID NO: 346706 - DNA, 60 bp, Artificial
  Synthetic oligonucleotide
cagactctctgcaggtacagacgttcctgtgggctgaggatcagtccttcaatactggtg

SEQ ID NO: 346707 - DNA, 60 bp, Artificial
  Synthetic oligonucleotide
cagactctgagggtaatgctacaccaggaggttattgtctgaccaggtggatgttaattg

SEQ ID NO: 346708 - DNA, 56 bp, Artificial
  Synthetic oligonucleotide
cagactctgccataagaaaagccttattaggacagataattattcataggtgtgac

SEQ ID NO: 346709 - DNA, 55 bp, Artificial
  Synthetic oligonucleotide
cagactctgttatctcaactacagggctacatgccaaagacctggaacccctcca

SEQ ID NO: 346710 - DNA, 53 bp, Artificial
  Synthetic oligonucleotide
cagactctttcaacggacaagtcttttacatccccaacgagggctacctgtgc

SEQ ID NO: 346711 - DNA, 55 bp, Artificial
  Synthetic oligonucleotide
cagactgaaaactccaaattcggtaacaaacacatgattgcgaagcttatgaacg

SEQ ID NO: 346712 - DNA, 55 bp, Artificial
  Synthetic oligonucleotide
cagactgaaggattggtttgtggatactttactagtagttcgaattcccctgatg

SEQ ID NO: 346713 - DNA, 60 bp, Artificial
  Synthetic oligonucleotide
cagactgactggataggccagtatgacatatcagaaccctacaaactagacaagtacagc

SEQ ID NO: 346714 - DNA, 55 bp, Artificial
  Synthetic oligonucleotide
cagactgcacttcgctccagagacacagctacaaactactctcagctactgcagc

SEQ ID NO: 346715 - DNA, 55 bp, Artificial
  Synthetic oligonucleotide
cagactgcatcacggtgtcaaggaagccctgtaacgtagggcagtcaaacacggg

SEQ ID NO: 346716 - DNA, 55 bp, Artificial
  Synthetic oligonucleotide
cagactgctctaacactcatgtgtgtctaccactactagacatgaaggatgctgc

SEQ ID NO: 346717 - DNA, 55 bp, Artificial
  Synthetic oligonucleotide
cagactggaagagatatctactaattggatctttggccgtaggaggagtggtagc

SEQ ID NO: 346718 - DNA, 55 bp, Artificial
  Synthetic oligonucleotide
cagactggagtcagatcgctgatgagaattggcaaggtcagaaaacagaacagtg

SEQ ID NO: 346719 - DNA, 55 bp, Artificial
  Synthetic oligonucleotide
cagactggtacaataacgactggaactgcaccaaacatcgacatcgtgttttcgg

SEQ ID NO: 346720 - DNA, 55 bp, Artificial
  Synthetic oligonucleotide
cagactgtaatgacttgttggaccccccatttccaattttctggggcttgttgtc

SEQ ID NO: 346721 - DNA, 58 bp, Artificial
  Synthetic oligonucleotide
cagactgtgaattccgctttggcagttttgaacgactcgactgttcctgagaacgtgg

SEQ ID NO: 346722 - DNA, 55 bp, Artificial
  Synthetic oligonucleotide
cagactgtgcagctactcagaaacttggggtataacattgccagcagcaagactg

SEQ ID NO: 346723 - DNA, 57 bp, Artificial
  Synthetic oligonucleotide
cagactgtgtaaatcaaaacatatctttagagactcatactatgaagtagagggtgg

SEQ ID NO: 346724 - DNA, 60 bp, Artificial
  Synthetic oligonucleotide
cagactgttcactataagacgagaaatggccagcaggggcctatgggattcctttcgtca

SEQ ID NO: 346725 - DNA, 59 bp, Artificial
  Synthetic oligonucleotide
cagacttaacacctaccgatatggctcaattactgatgtcagctccaggatgtgctgca

SEQ ID NO: 346726 - DNA, 59 bp, Artificial
  Synthetic oligonucleotide
cagacttacggtatctctgcaatccgcaaagggtgaaggttcgcagacccggaatgcga

SEQ ID NO: 346727 - DNA, 51 bp, Artificial
  Synthetic oligonucleotide
cagacttagaatatcgaaacatatcccaagatattctagagcaagtatata

SEQ ID NO: 346728 - DNA, 57 bp, Artificial
  Synthetic oligonucleotide
cagacttataccccttgcaggaaaagcgaatattctggggtcagtggtgtttctaga

SEQ ID NO: 346729 - DNA, 54 bp, Artificial
  Synthetic oligonucleotide
cagacttatgccatcgctatgactgaaggctggtggggagatcatcctaggtat

SEQ ID NO: 346730 - DNA, 60 bp, Artificial
  Synthetic oligonucleotide
cagacttcgtgaaacaacgtaaatgcagaaatgagtatttgctagaatggtacaatcatt

SEQ ID NO: 346731 - DNA, 60 bp, Artificial
  Synthetic oligonucleotide
cagacttgcctccttgtgagaggccgcaccctggcagtaaatagacacatggccgagtct

SEQ ID NO: 346732 - DNA, 55 bp, Artificial
  Synthetic oligonucleotide
cagacttggaggttttgctataatgaggttcactggggaattttcaacctttctg

SEQ ID NO: 346733 - DNA, 58 bp, Artificial
  Synthetic oligonucleotide
cagacttggtagatggatttacttcaattgaacgaaattttggctcaacatggacaaa

SEQ ID NO: 346734 - DNA, 56 bp, Artificial
  Synthetic oligonucleotide
cagacttggtcaactagttgacttaactaggttattagcttacaattatgaaacgc

SEQ ID NO: 346735 - DNA, 59 bp, Artificial
  Synthetic oligonucleotide
cagacttggtgagagtgcacccggatagcagcctggtgggacgtaagggctacagtacc

SEQ ID NO: 346736 - DNA, 55 bp, Artificial
  Synthetic oligonucleotide
cagacttggtttgatcctagtgcagattatgatcggtcaagagtagctatccatc

SEQ ID NO: 346737 - DNA, 53 bp, Artificial
  Synthetic oligonucleotide
cagactttacttgaatctgaagggtatggaagtttagggacgcaggaaaccgg

SEQ ID NO: 346738 - DNA, 58 bp, Artificial
  Synthetic oligonucleotide
cagactttaggaataggttgtactactacaaatgcggcgacatttgaggaagtagcta

SEQ ID NO: 346739 - DNA, 59 bp, Artificial
  Synthetic oligonucleotide
cagactttatgcaaataaacgtctgataatgtgttcacaatgctaaagtggtccccata

SEQ ID NO: 346740 - DNA, 60 bp, Artificial
  Synthetic oligonucleotide
cagactttatgcaaataaatgtctgtaaagcatgtatacaatacatatgtggttcccatt

SEQ ID NO: 346741 - DNA, 58 bp, Artificial
  Synthetic oligonucleotide
cagactttcgagggtcgccagccaaacttttgcacaaatccggctgagaaatgtgacg

SEQ ID NO: 346742 - DNA, 59 bp, Artificial
  Synthetic oligonucleotide
cagactttgatggacttgcctaccttcgtgatgagtgtttaactaaacatccttcacta

SEQ ID NO: 346743 - DNA, 58 bp, Artificial
  Synthetic oligonucleotide
cagactttgggaataggttgtactactacaaatacagcaacatttgaagaagtggcta

SEQ ID NO: 346744 - DNA, 60 bp, Artificial
  Synthetic oligonucleotide
cagactttggtcactacagagcttccaactaaacctgactataatgacctgcttctcaaa

SEQ ID NO: 346745 - DNA, 55 bp, Artificial
  Synthetic oligonucleotide
cagactttgtgtataacccatttttggtggatgtacaacaatggggttatgtagg

SEQ ID NO: 346746 - DNA, 58 bp, Artificial
  Synthetic oligonucleotide
cagacttttaacaaggtgaagtggtattttggtgcccgctgccacatcgagaaagcga

SEQ ID NO: 346747 - DNA, 60 bp, Artificial
  Synthetic oligonucleotide
cagacttttccgaagagcacgttgtcacacagttcattgcccctggtggaaccatcatcc

SEQ ID NO: 346748 - DNA, 60 bp, Artificial
  Synthetic oligonucleotide
cagagaaacactgcagtggaggtttgacagccgcttagcacttcgtcacctggcccgaga

SEQ ID NO: 346749 - DNA, 51 bp, Artificial
  Synthetic oligonucleotide
cagagaaacataaggtggcgctacaaaggcacataatccttatgtgtataa

SEQ ID NO: 346750 - DNA, 54 bp, Artificial
  Synthetic oligonucleotide
cagagaaaccgctcgaaaattcaaacgatgggtaacttcagacgtcctacccgc

SEQ ID NO: 346751 - DNA, 55 bp, Artificial
  Synthetic oligonucleotide
cagagaaagaggtctactcgaaaatagtagactacaggagctggtcaaagccgca

SEQ ID NO: 346752 - DNA, 55 bp, Artificial
  Synthetic oligonucleotide
cagagaaaggtgaattcacaatgctaggtgtatatgacagagttgcggtgctccc

SEQ ID NO: 346753 - DNA, 60 bp, Artificial
  Synthetic oligonucleotide
cagagaaatctccctttcgagagagcgaccatcatggcagcatttacagggaacactgaa

SEQ ID NO: 346754 - DNA, 57 bp, Artificial
  Synthetic oligonucleotide
cagagaaatgaaaagtttagagacatcagaccacatatacctactcaaatcactgag

SEQ ID NO: 346755 - DNA, 60 bp, Artificial
  Synthetic oligonucleotide
cagagaacaagagcgcttgttcgcaccggaatggatcccagaatgtgctctctaatgcaa

SEQ ID NO: 346756 - DNA, 60 bp, Artificial
  Synthetic oligonucleotide
cagagaacagttggacaaggctcttggcagtagcaggcacggtagacccgtgaaagcatg

SEQ ID NO: 346757 - DNA, 60 bp, Artificial
  Synthetic oligonucleotide
cagagaacattcttgagtcagcattaaatggtgaagtcacaattaagcaggagaagtgga

SEQ ID NO: 346758 - DNA, 60 bp, Artificial
  Synthetic oligonucleotide
cagagaacgctttactgttgtatatggcttgtactcatgctagtaatccagtgtatgcta

SEQ ID NO: 346759 - DNA, 60 bp, Artificial
  Synthetic oligonucleotide
cagagaactagcaaaaatgccactcgtaagactgggaatcagtctcatagacctgtcaga

SEQ ID NO: 346760 - DNA, 60 bp, Artificial
  Synthetic oligonucleotide
cagagaactagccaaaataccactggttagactaggaatcagtctcacagacctgtcaga

SEQ ID NO: 346761 - DNA, 60 bp, Artificial
  Synthetic oligonucleotide
cagagaactcctcatggaatttgaagaggcgcacgccacaaaacagtccgttgttgctct

SEQ ID NO: 346762 - DNA, 56 bp, Artificial
  Synthetic oligonucleotide
cagagaagcagcgatgacaacaagttggcctactttctgttgacgctctgcagtct

SEQ ID NO: 346763 - DNA, 60 bp, Artificial
  Synthetic oligonucleotide
cagagaaggacaagggacattcttcagtgggagaggcaactggtctgggctcatggagag

SEQ ID NO: 346764 - DNA, 52 bp, Artificial
  Synthetic oligonucleotide
cagagaaggctaaagcacaggttacctattcagatactgggattaacaatgc

SEQ ID NO: 346765 - DNA, 55 bp, Artificial
  Synthetic oligonucleotide
cagagaaggttcatttcgctgggttcgcggcgcctgcgtgtgagagcggggaagt

SEQ ID NO: 346766 - DNA, 60 bp, Artificial
  Synthetic oligonucleotide
cagagaagttccacgtaatacagatccaattctgggaagcatcgcaacgtcgagtataca

SEQ ID NO: 346767 - DNA, 55 bp, Artificial
  Synthetic oligonucleotide
cagagaagttggctccagacgcaacaaggaatactaacgccagcggtggcgcctc

SEQ ID NO: 346768 - DNA, 60 bp, Artificial
  Synthetic oligonucleotide
cagagaataaacgagatgttagacgagatatgggatagattagaatacatagagtcatta

SEQ ID NO: 346769 - DNA, 60 bp, Artificial
  Synthetic oligonucleotide
cagagaatgccatcagatcagtatacatagtgccaattcgagggggtatgtttatgcgag

SEQ ID NO: 346770 - DNA, 60 bp, Artificial
  Synthetic oligonucleotide
cagagaatgctctgttattgtatatggcatgtactcatgccagtaatccagtgtatgcta

SEQ ID NO: 346771 - DNA, 58 bp, Artificial
  Synthetic oligonucleotide
cagagaatttaaatgattcaacactgatacgctattccagtgatcttgtcatttaccg

SEQ ID NO: 346772 - DNA, 60 bp, Artificial
  Synthetic oligonucleotide
cagagacaagctcgatgtccccattgaatggtcacgtacgtagcaacggtgcgactacaa

SEQ ID NO: 346773 - DNA, 50 bp, Artificial
  Synthetic oligonucleotide
cagagacacgtttcaaatagagccagtttgattggacagagcagacagat

SEQ ID NO: 346774 - DNA, 59 bp, Artificial
  Synthetic oligonucleotide
cagagacacttggtacaagggaaacacatgcaatacgaacatacaaaacttagcagaga

SEQ ID NO: 346775 - DNA, 55 bp, Artificial
  Synthetic oligonucleotide
cagagacagacgaacaattcaaaattatctctcaattggggggtatacctgttaa

SEQ ID NO: 346776 - DNA, 53 bp, Artificial
  Synthetic oligonucleotide
cagagacagatccactccattagtgagcggattcttcatacttgtctggcagg

SEQ ID NO: 346777 - DNA, 55 bp, Artificial
  Synthetic oligonucleotide
cagagacatataattctatcacggatgctaaattaaggatggccaaagccctgga

SEQ ID NO: 346778 - DNA, 55 bp, Artificial
  Synthetic oligonucleotide
cagagacatctttccacaaaccaacaggtggatcagccatagagatggcaataga

SEQ ID NO: 346779 - DNA, 55 bp, Artificial
  Synthetic oligonucleotide
cagagacatgaagtcctatgcagcatgtacacattgtttagaaaatgctttgtac

SEQ ID NO: 346780 - DNA, 55 bp, Artificial
  Synthetic oligonucleotide
cagagaccaagccaatcatattggaagagttggctagtgtcttacagcagatcgg

SEQ ID NO: 346781 - DNA, 60 bp, Artificial
  Synthetic oligonucleotide
cagagaccatggaaactggattccaatactacatacacatccatggtatcaatgccaaag

SEQ ID NO: 346782 - DNA, 55 bp, Artificial
  Synthetic oligonucleotide
cagagaccgcagccagacagggagactcctctgcgagagtgtgcggggataatca

SEQ ID NO: 346783 - DNA, 55 bp, Artificial
  Synthetic oligonucleotide
cagagacctgaagttcacttgagagaggttagagttaggagagccttgcctaggt

SEQ ID NO: 346784 - DNA, 60 bp, Artificial
  Synthetic oligonucleotide
cagagacgaggcattaaacaatcggttccagatcaaaggtgttcagctgaagtcaggata

SEQ ID NO: 346785 - DNA, 60 bp, Artificial
  Synthetic oligonucleotide
cagagacgatataacacacaaatagatccagacctagcagaccaactgattcatctacac

SEQ ID NO: 346786 - DNA, 52 bp, Artificial
  Synthetic oligonucleotide
cagagacgcaaggttttaagtacgttcttacggagcggatcttatgtacccc

SEQ ID NO: 346787 - DNA, 55 bp, Artificial
  Synthetic oligonucleotide
cagagacggcgtatcattcatctacgagaagcctagcatctaccatagtgatggg

SEQ ID NO: 346788 - DNA, 55 bp, Artificial
  Synthetic oligonucleotide
cagagactattaaacctgttcttgatcttacaaattccatcatacagcgggtaga

SEQ ID NO: 346789 - DNA, 55 bp, Artificial
  Synthetic oligonucleotide
cagagacttggacgtgttggcagaattcaacccggtacagcacttcgcattggac

SEQ ID NO: 346790 - DNA, 60 bp, Artificial
  Synthetic oligonucleotide
cagagactttggtgcaatacatcgcaacaatgctttcctcgtcatctaaccatgttatca

SEQ ID NO: 346791 - DNA, 54 bp, Artificial
  Synthetic oligonucleotide
cagagagaaacgtcgcctcaaacggaatgagtcgaattctgttccaagtcgcct

SEQ ID NO: 346792 - DNA, 58 bp, Artificial
  Synthetic oligonucleotide
cagagagacccacattaaatgaattacagaagttagcaggtaagattaactgggctag

SEQ ID NO: 346793 - DNA, 60 bp, Artificial
  Synthetic oligonucleotide
cagagagattcactctgaatcccacggtcattcaaactgtgtccaaaccgaagatacaac

SEQ ID NO: 346794 - DNA, 57 bp, Artificial
  Synthetic oligonucleotide
cagagagcactggggatatgtgaggaaatagtttttggactgaactcgaaatttctt

SEQ ID NO: 346795 - DNA, 51 bp, Artificial
  Synthetic oligonucleotide
cagagagccattgcaagtcagcaattgcctgttctcggcttaagcagctag

SEQ ID NO: 346796 - DNA, 55 bp, Artificial
  Synthetic oligonucleotide
cagagagcgaggtgggcgatgcatcagatgccctcctagaattgacgaggtggtt

SEQ ID NO: 346797 - DNA, 55 bp, Artificial
  Synthetic oligonucleotide
cagagagctctagacatcaagacaggatgcaaggagccagaagatataaatgtgg

SEQ ID NO: 346798 - DNA, 59 bp, Artificial
  Synthetic oligonucleotide
cagagaggactacaactatgcaaaggctaagggtactaaagatgagtgctcgaaaatcc

SEQ ID NO: 346799 - DNA, 54 bp, Artificial
  Synthetic oligonucleotide
cagagaggattcgcgccatgttgccaccagactttttagaacctctttctgtta

SEQ ID NO: 346800 - DNA, 56 bp, Artificial
  Synthetic oligonucleotide
cagagaggcaattttaggaaccaaagaaagcctgttaagtgtttcaattgtggcaa

SEQ ID NO: 346801 - DNA, 60 bp, Artificial
  Synthetic oligonucleotide
cagagaggcgttagagaagtatcttagcaactggtgatttatatgttcaagtgccctata

SEQ ID NO: 346802 - DNA, 60 bp, Artificial
  Synthetic oligonucleotide
cagagagggagtggccaactccatcactaggggtagcgcgaagcgcctcccacgctgccg

SEQ ID NO: 346803 - DNA, 55 bp, Artificial
  Synthetic oligonucleotide
cagagagggatgttccacatgatgtgatggaattggttaggtgcacaaaatcccc

SEQ ID NO: 346804 - DNA, 55 bp, Artificial
  Synthetic oligonucleotide
cagagagggtggtggtgagcattgaccgtttcttaagggttcgagatcaacgggg

SEQ ID NO: 346805 - DNA, 60 bp, Artificial
  Synthetic oligonucleotide
cagagagggttttcaatgcagtcaatgtcccattgcgcaattatgtgtaccaaataatgt

SEQ ID NO: 346806 - DNA, 55 bp, Artificial
  Synthetic oligonucleotide
cagagaggtagacgattgatttatgacgtacttaaagtaaatgacgttctaccac

SEQ ID NO: 346807 - DNA, 55 bp, Artificial
  Synthetic oligonucleotide
cagagaggtgccttactccggcgaacctcagtacgtgcagtatgcagtggtagcc

SEQ ID NO: 346808 - DNA, 60 bp, Artificial
  Synthetic oligonucleotide
cagagagtcaatcaacacatcccggtgatcctctgagagctctcctatgaaaactctcaa

SEQ ID NO: 346809 - DNA, 60 bp, Artificial
  Synthetic oligonucleotide
cagagagtgagttgggtagtgcagcgatagatggaataatacagggagcagcaaggtctg

SEQ ID NO: 346810 - DNA, 51 bp, Artificial
  Synthetic oligonucleotide
cagagagtggcgcctcaccctgcccaggggccccatctcctgcggccgctc

SEQ ID NO: 346811 - DNA, 55 bp, Artificial
  Synthetic oligonucleotide
cagagagtgggttcgtcacattgtggcaccagacagcattcgtgtccaatggaac

SEQ ID NO: 346812 - DNA, 54 bp, Artificial
  Synthetic oligonucleotide
cagagataatagatgtgatgtgtcacgcgactttgacagcgcggctgctcacac

SEQ ID NO: 346813 - DNA, 55 bp, Artificial
  Synthetic oligonucleotide
cagagatactaattaatctgatgcagccccggcagcttgttttccggcctgaggt

SEQ ID NO: 346814 - DNA, 60 bp, Artificial
  Synthetic oligonucleotide
cagagatacttggatgtaatggactttgtgcaaatggaggaatgttgtgaatcagtttct

SEQ ID NO: 346815 - DNA, 60 bp, Artificial
  Synthetic oligonucleotide
cagagataggctgatagagagcaacttccaccgggtcctctggcctcccttctatgtcca

SEQ ID NO: 346816 - DNA, 59 bp, Artificial
  Synthetic oligonucleotide
cagagatagtgtatttgaacagcaccactatagagagagagatttgccccgaagcagtg

SEQ ID NO: 346817 - DNA, 60 bp, Artificial
  Synthetic oligonucleotide
cagagatattaaggaatgcctttttggtgggccagacgcaagagatggtggagaggccgc

SEQ ID NO: 346818 - DNA, 59 bp, Artificial
  Synthetic oligonucleotide
cagagatcatcgcgggatggaggttgcggaacctgaagtgttaggtgtggaattcaaaa

SEQ ID NO: 346819 - DNA, 59 bp, Artificial
  Synthetic oligonucleotide
cagagatcgaaatagacatctaaacaacaaagatagtgaaccgtatgtattaaccaaca

SEQ ID NO: 346820 - DNA, 55 bp, Artificial
  Synthetic oligonucleotide
cagagatcgcagaggagaccttcacgcacaacaagtggatgctcttcgcttcttc

SEQ ID NO: 346821 - DNA, 58 bp, Artificial
  Synthetic oligonucleotide
cagagatctacgtcagacatgggcggggtttgcataacctttcgctattggttggttc

SEQ ID NO: 346822 - DNA, 55 bp, Artificial
  Synthetic oligonucleotide
cagagatctgtgggagaaggattgcgacgtcaggaatcacacaacgtgctgcggc

SEQ ID NO: 346823 - DNA, 55 bp, Artificial
  Synthetic oligonucleotide
cagagatggaccacctcagatgaacataattacagattctcagtatgtactgggc

SEQ ID NO: 346824 - DNA, 55 bp, Artificial
  Synthetic oligonucleotide
cagagatgggtacaattgtagtaggaaatgagaccaaaattaggactcagacaat

SEQ ID NO: 346825 - DNA, 60 bp, Artificial
  Synthetic oligonucleotide
cagagatgtataatctgaaaaagcgtatagttgatcgtcacgtgaaagagttacgagaga

SEQ ID NO: 346826 - DNA, 55 bp, Artificial
  Synthetic oligonucleotide
cagagatgtggaaaagtatgtttaacctgcatgaacacattcttctgctagggtc

SEQ ID NO: 346827 - DNA, 55 bp, Artificial
  Synthetic oligonucleotide
cagagatgtttagggaatacaatcacaggcatagtgttggaacaaccttagaagc

SEQ ID NO: 346828 - DNA, 55 bp, Artificial
  Synthetic oligonucleotide
cagagattgaactggccgctattccgtacaacatcctcagtgagcactacgggga

SEQ ID NO: 346829 - DNA, 60 bp, Artificial
  Synthetic oligonucleotide
cagagattgtgaattccataataccatcagtgtagttgagagtgtagtcccacaaatcct

SEQ ID NO: 346830 - DNA, 52 bp, Artificial
  Synthetic oligonucleotide
cagagcaaccgcccgaccccgttaaaccaccacaaccagtacaagcgcagct

SEQ ID NO: 346831 - DNA, 54 bp, Artificial
  Synthetic oligonucleotide
cagagcaataatgtataaacgtgttagcatatcctatggcgaacgtattcagag

SEQ ID NO: 346832 - DNA, 55 bp, Artificial
  Synthetic oligonucleotide
cagagcaatttagtgaacagtctacttacggtattgttggtcctattcctaacga

SEQ ID NO: 346833 - DNA, 55 bp, Artificial
  Synthetic oligonucleotide
cagagcacaaggtattgatcgattggtcctcacaaccatccacatcggccgaaca

SEQ ID NO: 346834 - DNA, 59 bp, Artificial
  Synthetic oligonucleotide
cagagcacagtgaggctcactggaggctaacttgaagggagtgtccttatccctctttt

SEQ ID NO: 346835 - DNA, 55 bp, Artificial
  Synthetic oligonucleotide
cagagcacatcatgtggaagtccatcgagaatgagctcaatgctatcctggagga

SEQ ID NO: 346836 - DNA, 55 bp, Artificial
  Synthetic oligonucleotide
cagagcacgcctacgagaacaaacgcatcattgttgagggcggtatgccgtctgg

SEQ ID NO: 346837 - DNA, 56 bp, Artificial
  Synthetic oligonucleotide
cagagcagaagcgcaactgcacgagtgggttccccccctcaacgtccgaggggggc

SEQ ID NO: 346838 - DNA, 55 bp, Artificial
  Synthetic oligonucleotide
cagagcagacgaacaatatccattcctcgtccatcctgtaatgccaatgaaggac

SEQ ID NO: 346839 - DNA, 55 bp, Artificial
  Synthetic oligonucleotide
cagagcagttggaactgagcttgaaggagataacgaactgggaatactctgggga

SEQ ID NO: 346840 - DNA, 56 bp, Artificial
  Synthetic oligonucleotide
cagagcatatcagacgcataagggaaaaacacggagtgacatatgaaagaaaagca

SEQ ID NO: 346841 - DNA, 60 bp, Artificial
  Synthetic oligonucleotide
cagagcatatggtagcaacccagctactagtatgtcataatgcgtaagtctgggatggga

SEQ ID NO: 346842 - DNA, 55 bp, Artificial
  Synthetic oligonucleotide
cagagcatcattcgcaagcgttactttgataaatgcagctgtctccgggtccaac

SEQ ID NO: 346843 - DNA, 60 bp, Artificial
  Synthetic oligonucleotide
cagagcatcgatggaacaagccccagagaaccaagggccacagagggagccatacaatga

SEQ ID NO: 346844 - DNA, 55 bp, Artificial
  Synthetic oligonucleotide
cagagcattcaaagctaaacaggggaagataattgggcaagttgagatcagtttc

SEQ ID NO: 346845 - DNA, 55 bp, Artificial
  Synthetic oligonucleotide
cagagcattgttcacctaaccatacagcactaaggcaagctgttctgtgctgggg

SEQ ID NO: 346846 - DNA, 55 bp, Artificial
  Synthetic oligonucleotide
cagagcatttactgctttgttgatcagctgtatactcatctgagcctcggctttc

SEQ ID NO: 346847 - DNA, 60 bp, Artificial
  Synthetic oligonucleotide
cagagcatttgggtcgagcaagtgatcattacttcaagtataatgctacaacagggatgg

SEQ ID NO: 346848 - DNA, 55 bp, Artificial
  Synthetic oligonucleotide
cagagccaacagccccgccggcagagactttcgggtttggagaggagataacccc

SEQ ID NO: 346849 - DNA, 60 bp, Artificial
  Synthetic oligonucleotide
cagagccacagagtacataatgaaaggggtatacatcaatactgcattgctcaatgcatc

SEQ ID NO: 346850 - DNA, 53 bp, Artificial
  Synthetic oligonucleotide
cagagccccgccgcatttccgttccgtcgactggagtccggtaggactaacgg

SEQ ID NO: 346851 - DNA, 60 bp, Artificial
  Synthetic oligonucleotide
cagagcccttatttgtaccaacaatggaagattatagatcagctgagttatttactcgta

SEQ ID NO: 346852 - DNA, 59 bp, Artificial
  Synthetic oligonucleotide
cagagccgcttaaacggcgatagactgctttcgccgtggatattggaccctgcgatggc

SEQ ID NO: 346853 - DNA, 55 bp, Artificial
  Synthetic oligonucleotide
cagagccgttgcagcctctcagcaggcacttaactctgcaacatcagtgctgggg

SEQ ID NO: 346854 - DNA, 55 bp, Artificial
  Synthetic oligonucleotide
cagagcctcctatatggataccccgtctacgtgtttggcgattgtgtacaggccg

SEQ ID NO: 346855 - DNA, 60 bp, Artificial
  Synthetic oligonucleotide
cagagcctgactctgttgatcctacggttgtcatggctgggcgagaggtctgattctgag

SEQ ID NO: 346856 - DNA, 60 bp, Artificial
  Synthetic oligonucleotide
cagagccttatacaacatcttctcttatctacacatcctacggagtatcacaagtcatga

SEQ ID NO: 346857 - DNA, 58 bp, Artificial
  Synthetic oligonucleotide
cagagcctttaaacgcgatgcccacgccattggctaccgccacggacatattttccca

SEQ ID NO: 346858 - DNA, 60 bp, Artificial
  Synthetic oligonucleotide
cagagcgaagcgtcttggcacgtagtatgcaccgcggcataagatcaactccgtctggtg

SEQ ID NO: 346859 - DNA, 54 bp, Artificial
  Synthetic oligonucleotide
cagagcgagtaaccgtcactcgttatcgttctcccgttaactcgttccctgttc

SEQ ID NO: 346860 - DNA, 60 bp, Artificial
  Synthetic oligonucleotide
cagagcgcaatgccgctaccgtaatccgcaccgcactttcacacgtatctaacgaagccc

SEQ ID NO: 346861 - DNA, 58 bp, Artificial
  Synthetic oligonucleotide
cagagcgcgaattctaattcacccttaaagatccaggttgatggggtcagtttatcaa

SEQ ID NO: 346862 - DNA, 55 bp, Artificial
  Synthetic oligonucleotide
cagagcgctctggggtacccgcatcatgatttactcaaggactcgactccgttcc

SEQ ID NO: 346863 - DNA, 59 bp, Artificial
  Synthetic oligonucleotide
cagagcggagggtagttgctcagggtccagaagaagaatttggaagatctttgatcaaa

SEQ ID NO: 346864 - DNA, 56 bp, Artificial
  Synthetic oligonucleotide
cagagcggagtcttacggttccggatgctcttctcgagtcgcctaacttgagatta

SEQ ID NO: 346865 - DNA, 55 bp, Artificial
  Synthetic oligonucleotide
cagagcggcagcaagtggggaacagcagaagacctgaccgccgcagagtggatgt

SEQ ID NO: 346866 - DNA, 56 bp, Artificial
  Synthetic oligonucleotide
cagagcggtatgccttctattctgaatagccttggtaaaaacgcttacttccgccg

SEQ ID NO: 346867 - DNA, 55 bp, Artificial
  Synthetic oligonucleotide
cagagcgtgagtatctacctggcgttaagtggatcaacgttgctcctagacctgg

SEQ ID NO: 346868 - DNA, 60 bp, Artificial
  Synthetic oligonucleotide
cagagctagacccagtgacagcagaccagatgatccactataagtattttgactgctgga

SEQ ID NO: 346869 - DNA, 60 bp, Artificial
  Synthetic oligonucleotide
cagagctagagggttcactggcatttgcacagaatcagactacgaagcctttgatgcctc

SEQ ID NO: 346870 - DNA, 60 bp, Artificial
  Synthetic oligonucleotide
cagagctaggtttgacgtacgagtttgacgacataacagatgacatctgtgcaaacccct

SEQ ID NO: 346871 - DNA, 60 bp, Artificial
  Synthetic oligonucleotide
cagagctatgtctaactaggaaaactcctgagaatataactataagcggcagaaagttgc

SEQ ID NO: 346872 - DNA, 55 bp, Artificial
  Synthetic oligonucleotide
cagagctattagagctagatctcaagcattcattgaggcttgcaagctgataatc

SEQ ID NO: 346873 - DNA, 55 bp, Artificial
  Synthetic oligonucleotide
cagagctcatgttggggctgacaccatcatgacacatcttcatgatttcatcgtt

SEQ ID NO: 346874 - DNA, 60 bp, Artificial
  Synthetic oligonucleotide
cagagctcgagactatgtcgaagcgtcccgccgatatagtcatttccactcccgcatcca

SEQ ID NO: 346875 - DNA, 52 bp, Artificial
  Synthetic oligonucleotide
cagagctcgtagtgggaccttgagggccatgtgtagctgcataaatagtttg

SEQ ID NO: 346876 - DNA, 60 bp, Artificial
  Synthetic oligonucleotide
cagagctctctttcacaatcactggggataacaccaagtggaatgagaatcagagtcctc

SEQ ID NO: 346877 - DNA, 55 bp, Artificial
  Synthetic oligonucleotide
cagagctgccaccactacccttacaagaggctgaacagttagtccctgagagttc

SEQ ID NO: 346878 - DNA, 60 bp, Artificial
  Synthetic oligonucleotide
cagagctgtttactggtatttggaatggtacttgggataagaattgcactagcactgaga

SEQ ID NO: 346879 - DNA, 60 bp, Artificial
  Synthetic oligonucleotide
cagagcttaggccaccacgccctcaccatttccagctctcaaggcatgacctactctgac

SEQ ID NO: 346880 - DNA, 51 bp, Artificial
  Synthetic oligonucleotide
cagagcttgaaactagccctcacacagccaccggctttggccctgccctcc

SEQ ID NO: 346881 - DNA, 55 bp, Artificial
  Synthetic oligonucleotide
cagagcttgacaagcttagcctgcaatgtgtggagacaactcaagacgttgggac

SEQ ID NO: 346882 - DNA, 55 bp, Artificial
  Synthetic oligonucleotide
cagagctttgctccctacagaatacaggctcattgcgggcactgcgaacgaccta

SEQ ID NO: 346883 - DNA, 55 bp, Artificial
  Synthetic oligonucleotide
cagaggaacaaaagtggtcccaagagggaaactgtccaccagaggagtccaaatc

SEQ ID NO: 346884 - DNA, 54 bp, Artificial
  Synthetic oligonucleotide
cagaggaagacaaaaggtagtttccctaactgaaacaacaaatcaaaagactga

SEQ ID NO: 346885 - DNA, 55 bp, Artificial
  Synthetic oligonucleotide
cagaggaagacagaaagccgtcttcctaacagagaccacaaatcagaaggctgag

SEQ ID NO: 346886 - DNA, 55 bp, Artificial
  Synthetic oligonucleotide
cagaggaatctttggagcaatagcgggattcatagaaaacggctgggaaggaatg

SEQ ID NO: 346887 - DNA, 55 bp, Artificial
  Synthetic oligonucleotide
cagaggaatggggaaaatggtcaacatcctttaattggagcttcacaactccact

SEQ ID NO: 346888 - DNA, 58 bp, Artificial
  Synthetic oligonucleotide
cagaggaattgaaataggtagagggcaaccactaggtgtaggtagtgtaggacatcca

SEQ ID NO: 346889 - DNA, 59 bp, Artificial
  Synthetic oligonucleotide
cagaggacagaagctgatcggggtttctttatcacgacactaccaacaagatgtcgtct

SEQ ID NO: 346890 - DNA, 55 bp, Artificial
  Synthetic oligonucleotide
cagaggaccccttcagcgaacagaagggcgctagatgcgataggagtaagaccat

SEQ ID NO: 346891 - DNA, 60 bp, Artificial
  Synthetic oligonucleotide
cagaggaccccttcagcgaacagagaactctgacgcgcgaggacgaagcccatagcgatg

SEQ ID NO: 346892 - DNA, 55 bp, Artificial
  Synthetic oligonucleotide
cagaggaccctcaccctggttggtgactcggcgactatcgccgggatgggtatgt

SEQ ID NO: 346893 - DNA, 55 bp, Artificial
  Synthetic oligonucleotide
cagaggactactggttacagcgtcgagatggtaaagcaatcaccgacgttactac

SEQ ID NO: 346894 - DNA, 55 bp, Artificial
  Synthetic oligonucleotide
cagaggactatttggagcgattgccggattcattgaaggaggatggacaggcatg

SEQ ID NO: 346895 - DNA, 54 bp, Artificial
  Synthetic oligonucleotide
cagaggactcgaacggacggacaccggtgaacttaggttctgaacggtacacag

SEQ ID NO: 346896 - DNA, 58 bp, Artificial
  Synthetic oligonucleotide
cagaggagaacaagtaggaggacaattgaaaatagggcctggtatctggcaaatggat

SEQ ID NO: 346897 - DNA, 60 bp, Artificial
  Synthetic oligonucleotide
cagaggagagtggaacagtcagaaaggatgatcctgatgctccaccaacgagtgtccaag

SEQ ID NO: 346898 - DNA, 60 bp, Artificial
  Synthetic oligonucleotide
cagaggagcgtacttcgcaaatttgcgtgttggctcccatgctttctatattgaacagtg

SEQ ID NO: 346899 - DNA, 60 bp, Artificial
  Synthetic oligonucleotide
cagaggagttgtatgagaacatcaagatgaccgagtacttctgtcgcgctaaaagtaggt

SEQ ID NO: 346900 - DNA, 55 bp, Artificial
  Synthetic oligonucleotide
cagaggatagaggtaagagacaccaaggaagccttagataaggtagaggaggagc

SEQ ID NO: 346901 - DNA, 55 bp, Artificial
  Synthetic oligonucleotide
cagaggatagcttgtctaatggtcgtccgctcatcatttggacaaatttaacaca

SEQ ID NO: 346902 - DNA, 60 bp, Artificial
  Synthetic oligonucleotide
cagaggatctgctcacgagcacaagtgctacgggtgcggagaggctgcccgcgactgggc

SEQ ID NO: 346903 - DNA, 51 bp, Artificial
  Synthetic oligonucleotide
cagaggattactcgtacgtacgttatctggatcccctaacaggcgagacgt

SEQ ID NO: 346904 - DNA, 56 bp, Artificial
  Synthetic oligonucleotide
cagaggcaacaactttccgaagcttgggaaaactctcaatgttcctctgcccccga

SEQ ID NO: 346905 - DNA, 55 bp, Artificial
  Synthetic oligonucleotide
cagaggcagcgctagcgccgaatttcaacataagcgcactttaacatcagatact

SEQ ID NO: 346906 - DNA, 55 bp, Artificial
  Synthetic oligonucleotide
cagaggcagggcggaccgaacagatagacgagaatgggtaccagggagaagtggg

SEQ ID NO: 346907 - DNA, 60 bp, Artificial
  Synthetic oligonucleotide
cagaggcatctgattgtagcagcaagaacaaggtccgcagtcaacaagttagtgacgcta

SEQ ID NO: 346908 - DNA, 55 bp, Artificial
  Synthetic oligonucleotide
cagaggccaacctgagacccagacagtacaatgcagatggcagttctaacagcca

SEQ ID NO: 346909 - DNA, 60 bp, Artificial
  Synthetic oligonucleotide
cagaggccaccccaatcaccacatcagcagttgagttgttatcctcgcctgcgaggggac

SEQ ID NO: 346910 - DNA, 59 bp, Artificial
  Synthetic oligonucleotide
cagaggcgaacacacacacagaacctccctgcttacaaaccatgtattgtagctaaacc

SEQ ID NO: 346911 - DNA, 59 bp, Artificial
  Synthetic oligonucleotide
cagaggcgctctatctcccgcctgaacctgacacaccaccacagcaacctcaggcacat

SEQ ID NO: 346912 - DNA, 55 bp, Artificial
  Synthetic oligonucleotide
cagaggctataaattacgagctagcgcgagcctcaactagcaatcaaccccgtct

SEQ ID NO: 346913 - DNA, 60 bp, Artificial
  Synthetic oligonucleotide
cagaggctcggaaggcaatcagcgctctcacagagcgactgtacatcgggggtcccatgt

SEQ ID NO: 346914 - DNA, 56 bp, Artificial
  Synthetic oligonucleotide
cagaggctcggtttagtttctacaaggcattcggaatgccccctgattaccaggaa

SEQ ID NO: 346915 - DNA, 55 bp, Artificial
  Synthetic oligonucleotide
cagaggcttgtggttatagtgacagggtcttacagctcaaattaggaaattccag

SEQ ID NO: 346916 - DNA, 56 bp, Artificial
  Synthetic oligonucleotide
cagaggcttttaaaagatccacatcctaaccaagtatcccagctgctaaagaaccc

SEQ ID NO: 346917 - DNA, 60 bp, Artificial
  Synthetic oligonucleotide
cagagggagccatacaatgaatggacactagagcttttagaggagcttaagaatgaagct

SEQ ID NO: 346918 - DNA, 54 bp, Artificial
  Synthetic oligonucleotide
cagagggaggaatcctcacggagaaaagcggaaaaatcacctccagaggacccc

SEQ ID NO: 346919 - DNA, 50 bp, Artificial
  Synthetic oligonucleotide
cagagggatgcaccccgcaagatttaaatatgatgctaaacatagtgggg

SEQ ID NO: 346920 - DNA, 55 bp, Artificial
  Synthetic oligonucleotide
cagagggcaatgatgcgcaacatgactatgtcagcatacattcataaaatgtgcc

SEQ ID NO: 346921 - DNA, 55 bp, Artificial
  Synthetic oligonucleotide
cagagggccctacgattgattcacctgttgtgacaacaagcagaggctccagtgc

SEQ ID NO: 346922 - DNA, 60 bp, Artificial
  Synthetic oligonucleotide
cagagggcttgaattctctgaagggtatcttgatagtatctagacaaattactcgcagca

SEQ ID NO: 346923 - DNA, 57 bp, Artificial
  Synthetic oligonucleotide
cagaggggaaacgtgctcctatctcctgaagaggttagtgaaacacagggaatagaa

SEQ ID NO: 346924 - DNA, 54 bp, Artificial
  Synthetic oligonucleotide
cagaggggaaataaagcatctctacggtggtcctaaatagtcagcatagtacat

SEQ ID NO: 346925 - DNA, 60 bp, Artificial
  Synthetic oligonucleotide
cagaggggaatccttgaagacgaacagatgtaccagaagtgctgcagtctattcgagaaa

SEQ ID NO: 346926 - DNA, 55 bp, Artificial
  Synthetic oligonucleotide
cagaggggaggtttatggagttcacaagagcaacagcagctaaagtcgctagtga

SEQ ID NO: 346927 - DNA, 55 bp, Artificial
  Synthetic oligonucleotide
cagaggggatgattaccgaacgtgattcattaaactctcaagggcgcatacgtga

SEQ ID NO: 346928 - DNA, 55 bp, Artificial
  Synthetic oligonucleotide
cagaggggccacgttttggggagcagccccagagcaggatgtggcatggtgaggt

SEQ ID NO: 346929 - DNA, 53 bp, Artificial
  Synthetic oligonucleotide
cagagggggaaacagcgctggacttggaagaagggcagggcttagcgcgactc

SEQ ID NO: 346930 - DNA, 59 bp, Artificial
  Synthetic oligonucleotide
cagagggggtgggaagccctcaagcatctggggaatatagtgctgtattggggtcagga

SEQ ID NO: 346931 - DNA, 55 bp, Artificial
  Synthetic oligonucleotide
cagaggggtggatcaactccccaaaacatgccaagtcagttacacaaacattggt

SEQ ID NO: 346932 - DNA, 58 bp, Artificial
  Synthetic oligonucleotide
cagagggtggacatggctgatgtaaccaagctgaacgtagtcacggctaacggaaaag

SEQ ID NO: 346933 - DNA, 55 bp, Artificial
  Synthetic oligonucleotide
cagagggtgtatgtcatggtgaaactatttcatatgcctgtgctaccagagatgg

SEQ ID NO: 346934 - DNA, 56 bp, Artificial
  Synthetic oligonucleotide
cagaggtaatagagacctatcccgcccctggaggggcccaccaaagagtctgccca

SEQ ID NO: 346935 - DNA, 55 bp, Artificial
  Synthetic oligonucleotide
cagaggtaatgaaaatggcgtattataggcgctcgtatagaaggtcctacaaccg

SEQ ID NO: 346936 - DNA, 55 bp, Artificial
  Synthetic oligonucleotide
cagaggtaccgacagctacgattaggcgttcaagttttgatcggtctcacggtta

SEQ ID NO: 346937 - DNA, 60 bp, Artificial
  Synthetic oligonucleotide
cagaggtcaaggaatttaattctgggactccacctcatgttttttgagctcatgtcagac

SEQ ID NO: 346938 - DNA, 60 bp, Artificial
  Synthetic oligonucleotide
cagaggtcctagcttcaagccatactctggcacagcttacaactccctagcacctaaggg

SEQ ID NO: 346939 - DNA, 55 bp, Artificial
  Synthetic oligonucleotide
cagaggtggccttacccactactggggagatccccttctatgggagggcgatccc

SEQ ID NO: 346940 - DNA, 60 bp, Artificial
  Synthetic oligonucleotide
cagaggttcatggccaaagcctgtgataacacttctttgattcagtataagttcgattac

SEQ ID NO: 346941 - DNA, 59 bp, Artificial
  Synthetic oligonucleotide
cagaggttggaatgaataacatgttgtgtgcatcgcccatgggatcgccatgcgccctc

SEQ ID NO: 346942 - DNA, 55 bp, Artificial
  Synthetic oligonucleotide
cagaggttgggcctcccgtcgagggatagtcggacatttcactagcgcgagctcc

SEQ ID NO: 346943 - DNA, 56 bp, Artificial
  Synthetic oligonucleotide
cagaggttgttgttcaatgtttctcaaggcaacgccttattattaccccctatctc

SEQ ID NO: 346944 - DNA, 60 bp, Artificial
  Synthetic oligonucleotide
cagaggtttaagtcgaagacatatatgcctattgccccctgtaggagtgcactagatgtt

SEQ ID NO: 346945 - DNA, 55 bp, Artificial
  Synthetic oligonucleotide
cagagtaacgtatttgactcgatcatactttggtggcaattcggtgatggtaagc

SEQ ID NO: 346946 - DNA, 55 bp, Artificial
  Synthetic oligonucleotide
cagagtaatacgccgatagatagagcgttagcagttcctgatcagcctgatttta

SEQ ID NO: 346947 - DNA, 55 bp, Artificial
  Synthetic oligonucleotide
cagagtaatcaggaggtattacaggagtcagtatcaggcagttactatgaaccag

SEQ ID NO: 346948 - DNA, 55 bp, Artificial
  Synthetic oligonucleotide
cagagtaatggctgaatacgctatatttccgactttgccacatgagtacaaaggt

SEQ ID NO: 346949 - DNA, 55 bp, Artificial
  Synthetic oligonucleotide
cagagtacgacttctctggtgataccatccgggcgtcttcaaacacctgggtgcg

SEQ ID NO: 346950 - DNA, 60 bp, Artificial
  Synthetic oligonucleotide
cagagtacgatgcctatttggacatggttgacggagcttcatgctgcttagacactgcca

SEQ ID NO: 346951 - DNA, 55 bp, Artificial
  Synthetic oligonucleotide
cagagtacggcttgacagatgttgcagccgttaagataagcaatggcccggagtg

SEQ ID NO: 346952 - DNA, 55 bp, Artificial
  Synthetic oligonucleotide
cagagtactcccagatgtattcaggggtgggaccgcttagtgggttacgcgaacg

SEQ ID NO: 346953 - DNA, 55 bp, Artificial
  Synthetic oligonucleotide
cagagtagaatgtataggatggtccagcacttcatgccatgacggcatctcaaga

SEQ ID NO: 346954 - DNA, 55 bp, Artificial
  Synthetic oligonucleotide
cagagtagagaactcagagtttcgagaggccatattattatccaagactcaccga

SEQ ID NO: 346955 - DNA, 53 bp, Artificial
  Synthetic oligonucleotide
cagagtagcaaacaaatcatacctgatcgggacgtgaatgcaggaacaactgg

SEQ ID NO: 346956 - DNA, 57 bp, Artificial
  Synthetic oligonucleotide
cagagtagcacagaggttagttggttgagggtgaccaagaatgggttgttctgttgt

SEQ ID NO: 346957 - DNA, 57 bp, Artificial
  Synthetic oligonucleotide
cagagtagcgaaggggaacttagaagtagttagggagaaaggagatgatactagtca

SEQ ID NO: 346958 - DNA, 55 bp, Artificial
  Synthetic oligonucleotide
cagagtaggtaagcttacgacaaaacaagtacatgagatacgtgaagcagtctac

SEQ ID NO: 346959 - DNA, 56 bp, Artificial
  Synthetic oligonucleotide
cagagtatccgaaacagaaggtgacatcaagctagccgaagcatatgcaagtattg

SEQ ID NO: 346960 - DNA, 57 bp, Artificial
  Synthetic oligonucleotide
cagagtatctgtggacgacgaataaaacaggaatgacgttttctcctggtgggtcta

SEQ ID NO: 346961 - DNA, 55 bp, Artificial
  Synthetic oligonucleotide
cagagtatgttcagaaagtgagacatattacaaatggacagcatcagagttcacg

SEQ ID NO: 346962 - DNA, 56 bp, Artificial
  Synthetic oligonucleotide
cagagtcatctgctaaagctgtagtatcaactgatccagctccgtaatgttctgac

SEQ ID NO: 346963 - DNA, 60 bp, Artificial
  Synthetic oligonucleotide
cagagtccactggtgtggcattgaaacgaagcagctggctgattgtactgcttgtgttac

SEQ ID NO: 346964 - DNA, 55 bp, Artificial
  Synthetic oligonucleotide
cagagtccgcatctgaagtaccggttcctattgtacttcttgttgcccatgtctc

SEQ ID NO: 346965 - DNA, 60 bp, Artificial
  Synthetic oligonucleotide
cagagtcctcggatgtttctggcgatgataacatacattacaaggaaccaacctgaatgg

SEQ ID NO: 346966 - DNA, 53 bp, Artificial
  Synthetic oligonucleotide
cagagtcgcacgtcacacagcgctggtcatacacaggctcgtcgtctgacggc

SEQ ID NO: 346967 - DNA, 60 bp, Artificial
  Synthetic oligonucleotide
cagagtcgcatgttattagcatttgattccacaatacaaagagaacgctttttactgcat

SEQ ID NO: 346968 - DNA, 55 bp, Artificial
  Synthetic oligonucleotide
cagagtcgggacggtggtgacagcatatgaagattgctctggattagtctctttc

SEQ ID NO: 346969 - DNA, 60 bp, Artificial
  Synthetic oligonucleotide
cagagtctacaccataactgcagccaatgattaccaattctcatcacagtaccaagcagg

SEQ ID NO: 346970 - DNA, 58 bp, Artificial
  Synthetic oligonucleotide
cagagtctacagtctttaaaagcgaaccagtctggtacaagtgacaatggtttcaata

SEQ ID NO: 346971 - DNA, 55 bp, Artificial
  Synthetic oligonucleotide
cagagtgaccctttggtggattgggaagagcagtgtaggaaacattttgtttcag

SEQ ID NO: 346972 - DNA, 60 bp, Artificial
  Synthetic oligonucleotide
cagagtgaggggacgggatgcaatcctggaatatatgcactccgtgttgcgacgcatccc

SEQ ID NO: 346973 - DNA, 59 bp, Artificial
  Synthetic oligonucleotide
cagagtgatgctcctttggattctagttgtagaggggattgctttcacagtgggggtac

SEQ ID NO: 346974 - DNA, 54 bp, Artificial
  Synthetic oligonucleotide
cagagtgatttcatcacgcgtcatgaggtagctacggcaatgtttgttgttcca

SEQ ID NO: 346975 - DNA, 55 bp, Artificial
  Synthetic oligonucleotide
cagagtgcatcagccacatcgcggcatcatcgagacagtctacctgcgtacaccg

SEQ ID NO: 346976 - DNA, 55 bp, Artificial
  Synthetic oligonucleotide
cagagtgcttttcgccgactctctgaatccccaaaggctattgttcacgttgcag

SEQ ID NO: 346977 - DNA, 56 bp, Artificial
  Synthetic oligonucleotide
cagagtggaaagataaccctaccgcacaagcattaagccccgcgctagctacgggg

SEQ ID NO: 346978 - DNA, 55 bp, Artificial
  Synthetic oligonucleotide
cagagtggcgcaactcacagttgggaactccactattaccacacaagaggctgcc

SEQ ID NO: 346979 - DNA, 60 bp, Artificial
  Synthetic oligonucleotide
cagagtgggccgatatagatgtgagaacacgctcagaatcacttatggtgcaagaaggag

SEQ ID NO: 346980 - DNA, 60 bp, Artificial
  Synthetic oligonucleotide
cagagtggtactcatctgcccttataccagaccacaactatataacccacagaaaccaga

SEQ ID NO: 346981 - DNA, 54 bp, Artificial
  Synthetic oligonucleotide
cagagtgtaaactcattctgaagagcatgccaggagccactctggaggaaatgt

SEQ ID NO: 346982 - DNA, 56 bp, Artificial
  Synthetic oligonucleotide
cagagtgtacgaatcctcggttaacgtgtgggcaattccgttcattgtgtcgggga

SEQ ID NO: 346983 - DNA, 55 bp, Artificial
  Synthetic oligonucleotide
cagagtgtatctaccaacatactttctcgttgtacagttaagcaagcacgagtcg

SEQ ID NO: 346984 - DNA, 52 bp, Artificial
  Synthetic oligonucleotide
cagagtgtcccgaatacaaaccaaagcacaccagcacattctcaagaggtgc

SEQ ID NO: 346985 - DNA, 55 bp, Artificial
  Synthetic oligonucleotide
cagagtgtctgacgataccagtcagctatacgctggggatgatatggcgcaggat

SEQ ID NO: 346986 - DNA, 55 bp, Artificial
  Synthetic oligonucleotide
cagagtgtctgtggcccggtatattgtttcacccccagtcccgtggtggtgggaa

SEQ ID NO: 346987 - DNA, 60 bp, Artificial
  Synthetic oligonucleotide
cagagtgtgcaaattttatcacttcaatcaaggcatgtgatatggcaatgtgttatgggg

SEQ ID NO: 346988 - DNA, 60 bp, Artificial
  Synthetic oligonucleotide
cagagtgtttgggtacaggagatcactggtctcatcactatgagtttccagatgacctac

SEQ ID NO: 346989 - DNA, 56 bp, Artificial
  Synthetic oligonucleotide
cagagttagctgacttaatacttaatgagtggctttgtaatccaatggacataacg

SEQ ID NO: 346990 - DNA, 59 bp, Artificial
  Synthetic oligonucleotide
cagagttatgcttttgaagtgtacgtgaactcaattttgccatggagtgaacttaatcc

SEQ ID NO: 346991 - DNA, 58 bp, Artificial
  Synthetic oligonucleotide
cagagttcagaagaacagccccacccagtctctacggtcgctataactgtaaatgttg

SEQ ID NO: 346992 - DNA, 57 bp, Artificial
  Synthetic oligonucleotide
cagagttctttctggaacgggaaatcatgtacagcgcgcttcgcttcggggtcgaat

SEQ ID NO: 346993 - DNA, 60 bp, Artificial
  Synthetic oligonucleotide
cagagttgaataaaacgaaggcgatgaatagctggaagacaaacttcagtacatggacat

SEQ ID NO: 346994 - DNA, 55 bp, Artificial
  Synthetic oligonucleotide
cagagttggatgatcttagtactctttacgatagactggacagagccgtggacaa

SEQ ID NO: 346995 - DNA, 60 bp, Artificial
  Synthetic oligonucleotide
cagagttggcatgaatatgaatgaggatggccccatcatcttcgagagacactccagata

SEQ ID NO: 346996 - DNA, 60 bp, Artificial
  Synthetic oligonucleotide
cagagttgtctctgattctgacttattgttgtactgacgatggctcaacctgttgatgtt

SEQ ID NO: 346997 - DNA, 55 bp, Artificial
  Synthetic oligonucleotide
cagagtttagggttgagcgtgtaaattccactaaacagcgaaagaaatatggaat

SEQ ID NO: 346998 - DNA, 55 bp, Artificial
  Synthetic oligonucleotide
cagagtttattaaacaacaagatgatggccattgggttcatgccatgtcagcccc

SEQ ID NO: 346999 - DNA, 55 bp, Artificial
  Synthetic oligonucleotide
cagagtttccgccacagctctcaaagctttagtggacattgaggaaagtcagcac

SEQ ID NO: 347000 - DNA, 58 bp, Artificial
  Synthetic oligonucleotide
cagagtttgaagaaagatcggccgattgtcaaagtgcccttttatatgtcggaagcaa

SEQ ID NO: 347001 - DNA, 55 bp, Artificial
  Synthetic oligonucleotide
cagagtttgatactgtatagccaatcatccttatgtgttcagatcaatcggaatg

SEQ ID NO: 347002 - DNA, 50 bp, Artificial
  Synthetic oligonucleotide
cagagtttgtaaacgctgagagacgcttcttgatgacgggctgaggtgta

SEQ ID NO: 347003 - DNA, 56 bp, Artificial
  Synthetic oligonucleotide
cagagtttttgcaagtacaaaatataggcctgtagatctttgtattaggaagttag

SEQ ID NO: 347004 - DNA, 60 bp, Artificial
  Synthetic oligonucleotide
cagataaagcagtggggtatatcacatctgcagtgccctaccggtctgtatcattgctgc

SEQ ID NO: 347005 - DNA, 56 bp, Artificial
  Synthetic oligonucleotide
cagataaatgcaatgaactcaggtattttagaggattggcaattagggtttgttcc

SEQ ID NO: 347006 - DNA, 55 bp, Artificial
  Synthetic oligonucleotide
cagataacccactactaactagagcggtatataatgctattatgcgtgagtttgc

SEQ ID NO: 347007 - DNA, 55 bp, Artificial
  Synthetic oligonucleotide
cagataacgaggattgtcatagtctggctgtcctgcggttgcaaagtgctggcct

SEQ ID NO: 347008 - DNA, 51 bp, Artificial
  Synthetic oligonucleotide
cagataacgcatctgctaatgtgcgtagagatgtggtgtccggaaataaag

SEQ ID NO: 347009 - DNA, 60 bp, Artificial
  Synthetic oligonucleotide
cagataagaattggtcagatttggctctgatggatctagcggctgacctgggtattaaca

SEQ ID NO: 347010 - DNA, 60 bp, Artificial
  Synthetic oligonucleotide
cagataagataacacttgctgagtttagacaattgtctgcttagctcctagttacattga

SEQ ID NO: 347011 - DNA, 60 bp, Artificial
  Synthetic oligonucleotide
cagataagcgaagaattctcaacccagctgtcatcaaagaggttatgattagtctgcgtc

SEQ ID NO: 347012 - DNA, 56 bp, Artificial
  Synthetic oligonucleotide
cagataaggtagactacgcaaattttgtaattggaatggttaattcggcgccaatg

SEQ ID NO: 347013 - DNA, 55 bp, Artificial
  Synthetic oligonucleotide
cagataaggtccttgaatacgggccaatcatgaaagcacacgcagtcttttgtgg

SEQ ID NO: 347014 - DNA, 60 bp, Artificial
  Synthetic oligonucleotide
cagataatcagtccggtccagttgcacatcaggtgatagtaaacaaccaaaactggtcag

SEQ ID NO: 347015 - DNA, 60 bp, Artificial
  Synthetic oligonucleotide
cagataatccccaggagttcttggtccaatcatgatgcttcatcaggagtgagcgcagca

SEQ ID NO: 347016 - DNA, 55 bp, Artificial
  Synthetic oligonucleotide
cagataatggagcaaatttcacaagtgcagcagtacaggcggtctgctggtgggc

SEQ ID NO: 347017 - DNA, 60 bp, Artificial
  Synthetic oligonucleotide
cagataattcccaggagctcttggtccaatcatgacgccacatcgggagtgagttcagcg

SEQ ID NO: 347018 - DNA, 52 bp, Artificial
  Synthetic oligonucleotide
cagataattgctagtatcaataattgaaactgcatctgggaccgttgttcta

SEQ ID NO: 347019 - DNA, 60 bp, Artificial
  Synthetic oligonucleotide
cagataattgggatgttctctctgtagacgtcggggaaagcgacagcgaaggagtctgct

SEQ ID NO: 347020 - DNA, 55 bp, Artificial
  Synthetic oligonucleotide
cagataattgtgtggtcctaacgacctagcccacattgttttacccgtacgacta

SEQ ID NO: 347021 - DNA, 57 bp, Artificial
  Synthetic oligonucleotide
cagatacaaaactgtatggagtaatgaaatacaacgggaagttgtatacgtataatg

SEQ ID NO: 347022 - DNA, 58 bp, Artificial
  Synthetic oligonucleotide
cagatacaagtcgtgttctacatttctatggataagaccttaaatcaataccctgcct

SEQ ID NO: 347023 - DNA, 55 bp, Artificial
  Synthetic oligonucleotide
cagatacaggggctgtaaactaaggttttacagaagccccgtctgtgactttata

SEQ ID NO: 347024 - DNA, 60 bp, Artificial
  Synthetic oligonucleotide
cagatacatatttacagtgcgccatgggattcggatgacgtgttcttttttcactgcgtg

SEQ ID NO: 347025 - DNA, 57 bp, Artificial
  Synthetic oligonucleotide
cagataccagggtatagaggttattacatttataggggcgctgagggacatgttaaa

SEQ ID NO: 347026 - DNA, 55 bp, Artificial
  Synthetic oligonucleotide
cagataccggcacaaagtgctgccatggcctgataaggcctattgaacatgtgcc

SEQ ID NO: 347027 - DNA, 53 bp, Artificial
  Synthetic oligonucleotide
cagatacctggaagaacatcccagtgcggggaaggacccaaagaaaactgggg

SEQ ID NO: 347028 - DNA, 55 bp, Artificial
  Synthetic oligonucleotide
cagatacgccttgtggagatccaacgctttccgcacgttgtggttgaaccggatc

SEQ ID NO: 347029 - DNA, 60 bp, Artificial
  Synthetic oligonucleotide
cagatacgctcctagagagcaaggacggatgccaacgcatcctagaagtaatctgcccct

SEQ ID NO: 347030 - DNA, 51 bp, Artificial
  Synthetic oligonucleotide
cagatactactcgagcgaagaagaagagacgccgcacgacagctctaccca

SEQ ID NO: 347031 - DNA, 60 bp, Artificial
  Synthetic oligonucleotide
cagatactttccaatagtggtggctgagcacgactggtacgaaatacaagcatcccccta

SEQ ID NO: 347032 - DNA, 55 bp, Artificial
  Synthetic oligonucleotide
cagatagaataatgctatatcaggaattagactgctggcattatcaccagtactg

SEQ ID NO: 347033 - DNA, 60 bp, Artificial
  Synthetic oligonucleotide
cagatagaatctggaatgttacctacagcgggacaagcaaggcatgctcgaactcatttt

SEQ ID NO: 347034 - DNA, 58 bp, Artificial
  Synthetic oligonucleotide
cagatagaattataagagtagtgcaaggaatctgtagagctatcactaacatacctag

SEQ ID NO: 347035 - DNA, 55 bp, Artificial
  Synthetic oligonucleotide
cagatagacagtattttgagaggagatgttattatgaggggtttcataacgtcga

SEQ ID NO: 347036 - DNA, 60 bp, Artificial
  Synthetic oligonucleotide
cagatagagagttactcttgctgattgcacgcaagacatgtggatccacggaacaacaac

SEQ ID NO: 347037 - DNA, 59 bp, Artificial
  Synthetic oligonucleotide
cagatagatggtctaccaagcacagtacaaactatcgtgatagttgtggcaaacaatta

SEQ ID NO: 347038 - DNA, 59 bp, Artificial
  Synthetic oligonucleotide
cagatagattggaacacttggcaaggatttcctgtggatcaaaaactaccattggtcaa

SEQ ID NO: 347039 - DNA, 55 bp, Artificial
  Synthetic oligonucleotide
cagatagcagagcaacaaatacagaactttcaggtagcgaattggctgcatttcg

SEQ ID NO: 347040 - DNA, 50 bp, Artificial
  Synthetic oligonucleotide
cagatagcggtacccagtactctaacgacttgacaggaacaatccaaata

SEQ ID NO: 347041 - DNA, 60 bp, Artificial
  Synthetic oligonucleotide
cagatagcgtatgatggcaatattctgcagacaataggttcagccacactaacagacgtt

SEQ ID NO: 347042 - DNA, 55 bp, Artificial
  Synthetic oligonucleotide
cagatagctaaaagagaaatggttttagctcatcctttgttagggtacctcacaa

SEQ ID NO: 347043 - DNA, 60 bp, Artificial
  Synthetic oligonucleotide
cagataggatggatgacaagcaatccacctatcccagtgggagaaatctataaaagatgg

SEQ ID NO: 347044 - DNA, 55 bp, Artificial
  Synthetic oligonucleotide
cagataggattaagcgtggagtatacatggacctgcttgtttcgggtgcaagccc

SEQ ID NO: 347045 - DNA, 58 bp, Artificial
  Synthetic oligonucleotide
cagataggattatagaagtaatacaaagatttgttagaggaatcctccacatacccag

SEQ ID NO: 347046 - DNA, 54 bp, Artificial
  Synthetic oligonucleotide
cagatagggctgcaaaagtgtgtcaggatgtacaatccgaccaacatcctagac

SEQ ID NO: 347047 - DNA, 58 bp, Artificial
  Synthetic oligonucleotide
cagataggtgaggccttgctggtgttgatcaccctctttacactcaccccggggtata

SEQ ID NO: 347048 - DNA, 54 bp, Artificial
  Synthetic oligonucleotide
cagataggtgtcctccaactgcattatatgttgcaggtgtcccagaactcgggg

SEQ ID NO: 347049 - DNA, 55 bp, Artificial
  Synthetic oligonucleotide
cagatagtacttcgactatagagggagctcaagctgaatccccgttgcaacctta

SEQ ID NO: 347050 - DNA, 60 bp, Artificial
  Synthetic oligonucleotide
cagatagtcaatatgtgtataatatggtaatgtcaagaccagagcctattgatcccttat

SEQ ID NO: 347051 - DNA, 55 bp, Artificial
  Synthetic oligonucleotide
cagatagtcgacagatcacgacgagccaatgaactgactttctctagagttaccg

SEQ ID NO: 347052 - DNA, 55 bp, Artificial
  Synthetic oligonucleotide
cagatagtggtgagggtcgttggactctacacgctgctgtagatcttggtgttcc

SEQ ID NO: 347053 - DNA, 55 bp, Artificial
  Synthetic oligonucleotide
cagatataaaacctgtcgtcactgatacgttgcatttagatagagcgatagccgc

SEQ ID NO: 347054 - DNA, 50 bp, Artificial
  Synthetic oligonucleotide
cagatataaagcgcatatggagctccctggataacaaaggaaaggacgca

SEQ ID NO: 347055 - DNA, 50 bp, Artificial
  Synthetic oligonucleotide
cagatataaattgattaattcctgccttgacgcaagtccatgcttcctga

SEQ ID NO: 347056 - DNA, 57 bp, Artificial
  Synthetic oligonucleotide
cagatataattatacgtttgatcttaaaagatggatttatttacattcaattggaaa

SEQ ID NO: 347057 - DNA, 60 bp, Artificial
  Synthetic oligonucleotide
cagatatacgtatcggtgtcacagaggggacacacaaattcaaacaaggaggtcattcga

SEQ ID NO: 347058 - DNA, 60 bp, Artificial
  Synthetic oligonucleotide
cagatatagtggaactagtatacgctgataacgcatacatatactatccgaacgaagata

SEQ ID NO: 347059 - DNA, 55 bp, Artificial
  Synthetic oligonucleotide
cagatatatgagaaacacgccaatgactacatttacagtcgataaactaagacgg

SEQ ID NO: 347060 - DNA, 58 bp, Artificial
  Synthetic oligonucleotide
cagatatcagtataatgtgctgccacagggatagaaaggatcaccggcaatattccag

SEQ ID NO: 347061 - DNA, 60 bp, Artificial
  Synthetic oligonucleotide
cagatatcatcgagaatgcagttcctggctcggaaaggtacaggtcaaacatcaaggcaa

SEQ ID NO: 347062 - DNA, 55 bp, Artificial
  Synthetic oligonucleotide
cagatatctcgaagagcatcccagtgctggtaaagaccctaagaagactggaggt

SEQ ID NO: 347063 - DNA, 60 bp, Artificial
  Synthetic oligonucleotide
cagatatctcgacgttgggcttccacgactgttttcctatatccatgcgcaaattggcac

SEQ ID NO: 347064 - DNA, 58 bp, Artificial
  Synthetic oligonucleotide
cagatatgaaccgcgacaaccattccaggctgattcctgcctacatcagaatcgacgc

SEQ ID NO: 347065 - DNA, 60 bp, Artificial
  Synthetic oligonucleotide
cagatatgaatatcttagacgctatccaggttgagaacaatcctgacacggatgcaaaat

SEQ ID NO: 347066 - DNA, 60 bp, Artificial
  Synthetic oligonucleotide
cagatatgcagcagatggccctattacagcgccgtttcccagatgttttaattgaagctc

SEQ ID NO: 347067 - DNA, 59 bp, Artificial
  Synthetic oligonucleotide
cagatatggaacaccggctgggattttgcccagcacactggggtcagtgattcaacgtt

SEQ ID NO: 347068 - DNA, 55 bp, Artificial
  Synthetic oligonucleotide
cagatatggcacatgctctcacacgattaatcagaaagaagttgatgtgtgataa

SEQ ID NO: 347069 - DNA, 60 bp, Artificial
  Synthetic oligonucleotide
cagatatggcgaccggtgtaactaaaaccattgatgccacaatcaattctgttaatgaga

SEQ ID NO: 347070 - DNA, 55 bp, Artificial
  Synthetic oligonucleotide
cagatatggtacgcgtaacgatcttgaactatgtcccattaacctagaaccatcg

SEQ ID NO: 347071 - DNA, 60 bp, Artificial
  Synthetic oligonucleotide
cagatatgtgcagcaactattcgggaaggttccaaccggcgagtttccgctgcatcagat

SEQ ID NO: 347072 - DNA, 55 bp, Artificial
  Synthetic oligonucleotide
cagatatgttattagcgctttcctctttggtgatgaactcaagacagggatgatc

SEQ ID NO: 347073 - DNA, 54 bp, Artificial
  Synthetic oligonucleotide
cagatatgttgcagtcaacttccgggggtgggacttccggggtcaaaggtcact

SEQ ID NO: 347074 - DNA, 53 bp, Artificial
  Synthetic oligonucleotide
cagatattaattttgttggaaccggaagggcttggcgaagttgagggcttaac

SEQ ID NO: 347075 - DNA, 60 bp, Artificial
  Synthetic oligonucleotide
cagatattagacaactagacttcatcgcagaaacacagggcattactgattacataacaa

SEQ ID NO: 347076 - DNA, 55 bp, Artificial
  Synthetic oligonucleotide
cagatattgcatatcaatatgctaaattggcgccagacaatagcaatgctgttgc

SEQ ID NO: 347077 - DNA, 57 bp, Artificial
  Synthetic oligonucleotide
cagatcaaaagacaagttgtggtcgataacttaaattggtcaggatacagtggttcc

SEQ ID NO: 347078 - DNA, 60 bp, Artificial
  Synthetic oligonucleotide
cagatcaaaggtgttgagctgaagtcaggatacaaagattggattctatggatttccttt

SEQ ID NO: 347079 - DNA, 52 bp, Artificial
  Synthetic oligonucleotide
cagatcaaatgatctgacctccaatgagtcagggagattaatagacttcctc

SEQ ID NO: 347080 - DNA, 60 bp, Artificial
  Synthetic oligonucleotide
cagatcaacaggaggccctcgagaacgagtggaggaaatgggaaccatcgctgaatagag

SEQ ID NO: 347081 - DNA, 60 bp, Artificial
  Synthetic oligonucleotide
cagatcaacgttagccaaattggtgtcatctccaatgtcgatattagttgcattaataga

SEQ ID NO: 347082 - DNA, 55 bp, Artificial
  Synthetic oligonucleotide
cagatcaagcactaaaatttgactttgggacaatggtgcagtgggcgtatgacaa

SEQ ID NO: 347083 - DNA, 60 bp, Artificial
  Synthetic oligonucleotide
cagatcaatagagaatcacaagggagctattcgaatgctcagacatagtgtgccaattcg

SEQ ID NO: 347084 - DNA, 50 bp, Artificial
  Synthetic oligonucleotide
cagatcacaccaaggggaattcaccgtacagaacacaacgcagcttcaag

SEQ ID NO: 347085 - DNA, 55 bp, Artificial
  Synthetic oligonucleotide
cagatcacctcctatttccttccatacttgccaggacgttggcctatcgccaggc

SEQ ID NO: 347086 - DNA, 60 bp, Artificial
  Synthetic oligonucleotide
cagatcacgaaggcggccgatgagtctccgcgtcgcctgcggtactacatcccgtgcccg

SEQ ID NO: 347087 - DNA, 55 bp, Artificial
  Synthetic oligonucleotide
cagatcacgcagaccatagaaatcgttacgaaacaaacagaggcagtggaacaac

SEQ ID NO: 347088 - DNA, 60 bp, Artificial
  Synthetic oligonucleotide
cagatcagagcttagccccctgctgctgtctacaacggagtggcagatactaccctgttc

SEQ ID NO: 347089 - DNA, 55 bp, Artificial
  Synthetic oligonucleotide
cagatcagagtagaactcatcgcaaggattcctagtctccggtggacccgctctc

SEQ ID NO: 347090 - DNA, 55 bp, Artificial
  Synthetic oligonucleotide
cagatcaggctctaggatggaaagctctaaattttcatagagcccttatgtgtga

SEQ ID NO: 347091 - DNA, 60 bp, Artificial
  Synthetic oligonucleotide
cagatcagtgtgcaacctacattctcagtgcaacggaatctcccttttgaaagagcaacc

SEQ ID NO: 347092 - DNA, 51 bp, Artificial
  Synthetic oligonucleotide
cagatcatcacagattgcaatgatattgacacagagatcacaatagtgtgg

SEQ ID NO: 347093 - DNA, 60 bp, Artificial
  Synthetic oligonucleotide
cagatcattgtcactagagagccatatgtatcatgcgacccatcaggatgtaaaatgtat

SEQ ID NO: 347094 - DNA, 60 bp, Artificial
  Synthetic oligonucleotide
cagatccaaacactcttgcatgcagggacgtcaatgataacagtcccctccggaggaata

SEQ ID NO: 347095 - DNA, 55 bp, Artificial
  Synthetic oligonucleotide
cagatccacgcctttacaaggtgtgggtacgactctcctcccaggtaccttcgat

SEQ ID NO: 347096 - DNA, 56 bp, Artificial
  Synthetic oligonucleotide
cagatccacgccttttcatggtaacaccgtattttatcgactatcaacgtaataag

SEQ ID NO: 347097 - DNA, 60 bp, Artificial
  Synthetic oligonucleotide
cagatccactagcatctttattggagatgtgccacagcacacagattggtggaattagga

SEQ ID NO: 347098 - DNA, 60 bp, Artificial
  Synthetic oligonucleotide
cagatccagctcttagagcacatgctctcgccatagcaactgaatctaacataggtttgg

SEQ ID NO: 347099 - DNA, 55 bp, Artificial
  Synthetic oligonucleotide
cagatccaggcgattagtgagcggattcttagcgattgtctgggaggatctacgg

SEQ ID NO: 347100 - DNA, 55 bp, Artificial
  Synthetic oligonucleotide
cagatccaggtagtgaaatacagatagatggcattacaactaaagtggaagactc

SEQ ID NO: 347101 - DNA, 60 bp, Artificial
  Synthetic oligonucleotide
cagatccatatcttgttcttcgaattggaggtaataggaatttgaaccagtcgcgatgta

SEQ ID NO: 347102 - DNA, 55 bp, Artificial
  Synthetic oligonucleotide
cagatccatggagcaagtagccttgagctatgaggagtctctactccatcagatg

SEQ ID NO: 347103 - DNA, 59 bp, Artificial
  Synthetic oligonucleotide
cagatccccaagggcaattcagattaaaaggggtgacgtgcaggccactgaagcacaaa

SEQ ID NO: 347104 - DNA, 58 bp, Artificial
  Synthetic oligonucleotide
cagatcccgagcatgttgttcaggaacttttcagaagaccgagaactgaggactccct

SEQ ID NO: 347105 - DNA, 55 bp, Artificial
  Synthetic oligonucleotide
cagatcccttttatcaatcgcgttgaacagattaccttaaggtatgcttcgttta

SEQ ID NO: 347106 - DNA, 51 bp, Artificial
  Synthetic oligonucleotide
cagatccgatctacggttttgtgtccaacccgccacgcacagcatttcccg

SEQ ID NO: 347107 - DNA, 52 bp, Artificial
  Synthetic oligonucleotide
cagatcctaattgagaacgcagctggtcaccgtgtctgtatctcgacttata

SEQ ID NO: 347108 - DNA, 55 bp, Artificial
  Synthetic oligonucleotide
cagatcctatgtggaaatacacaagggagtaactgtgatgtcactttgaactcag

SEQ ID NO: 347109 - DNA, 56 bp, Artificial
  Synthetic oligonucleotide
cagatcctccaggtctgaatcttccttaaggtcgcgagcaagctcaccgcaccgga

SEQ ID NO: 347110 - DNA, 59 bp, Artificial
  Synthetic oligonucleotide
cagatcctgatgaaacgtttgtttactggggtattggagtcctatatatatagtgagta

SEQ ID NO: 347111 - DNA, 57 bp, Artificial
  Synthetic oligonucleotide
cagatcgaacggcctaacaactaatgaatcagggagactaatagacttcctaaagga

SEQ ID NO: 347112 - DNA, 60 bp, Artificial
  Synthetic oligonucleotide
cagatcgaagaatctggaatttgtgcagacgaatttgccttcgaactgcaccaacaccat

SEQ ID NO: 347113 - DNA, 60 bp, Artificial
  Synthetic oligonucleotide
cagatcgaatgaacctactaatgccacaaattatccatggtttgatgcttgggacgctaa

SEQ ID NO: 347114 - DNA, 60 bp, Artificial
  Synthetic oligonucleotide
cagatcgaatgcccttgattatttctctgagagtggaagttgttccagccctgacagaaa

SEQ ID NO: 347115 - DNA, 55 bp, Artificial
  Synthetic oligonucleotide
cagatcgatcgaaagtgtccgctgtgctcctctcaatacgtgtcaaagttccggg

SEQ ID NO: 347116 - DNA, 55 bp, Artificial
  Synthetic oligonucleotide
cagatcgctgtgagttgtccgtacctcttcccaaacatcatcttggttacgactg

SEQ ID NO: 347117 - DNA, 55 bp, Artificial
  Synthetic oligonucleotide
cagatcggaatcagcaatggagatatgcctttaatggacactcaccatatgccaa

SEQ ID NO: 347118 - DNA, 55 bp, Artificial
  Synthetic oligonucleotide
cagatcggcgcaattataaaatccttcacccacgggatctatgcgctgccaacgc

SEQ ID NO: 347119 - DNA, 52 bp, Artificial
  Synthetic oligonucleotide
cagatcggggtatacgatccacgtacaatgcaacgcgtctaagttccatcag

SEQ ID NO: 347120 - DNA, 60 bp, Artificial
  Synthetic oligonucleotide
cagatcgggtccgacaatgggccggcctctgtggcaaaagtaacacagcagttgtgtgag

SEQ ID NO: 347121 - DNA, 59 bp, Artificial
  Synthetic oligonucleotide
cagatcgtaagagagtcgtctcggtagtacctgacgacgaatttgtgaatgttatggag

SEQ ID NO: 347122 - DNA, 55 bp, Artificial
  Synthetic oligonucleotide
cagatcgtccgtcgatttgaaaagtaccccagtcgacgtaatcaccgtccttctc

SEQ ID NO: 347123 - DNA, 56 bp, Artificial
  Synthetic oligonucleotide
cagatcgtgtgagtttctttagaggggaatctacagggattcaaagtgaagtaccg

SEQ ID NO: 347124 - DNA, 55 bp, Artificial
  Synthetic oligonucleotide
cagatcgttggctgcatcattagctaaatcgtcatcgaaagacaaaaggtgatag

SEQ ID NO: 347125 - DNA, 55 bp, Artificial
  Synthetic oligonucleotide
cagatctaaacacacctgtgcctatcactatatccataagccctatgtgtgctga

SEQ ID NO: 347126 - DNA, 51 bp, Artificial
  Synthetic oligonucleotide
cagatctacaaagcgtaggagagtaagatagtaaagatgtagaatgtttac

SEQ ID NO: 347127 - DNA, 60 bp, Artificial
  Synthetic oligonucleotide
cagatctaccatgtcggtaacctgctgaggggagacaaggttaatggacactcaattcac

SEQ ID NO: 347128 - DNA, 60 bp, Artificial
  Synthetic oligonucleotide
cagatctatatagcctagagagttgacattctttttaaggctattgaaatctctaatgtt

SEQ ID NO: 347129 - DNA, 60 bp, Artificial
  Synthetic oligonucleotide
cagatctatggagacatcgatcgggacccagcctttggtgaaaacacaatgactgctgag

SEQ ID NO: 347130 - DNA, 60 bp, Artificial
  Synthetic oligonucleotide
cagatctatggggccgtttactccattgaaccacttgacctacctcagatcattcaacga

SEQ ID NO: 347131 - DNA, 60 bp, Artificial
  Synthetic oligonucleotide
cagatctcatggaggcaagtatagtgattccctcttgcatcatatcatctgaagccttgc

SEQ ID NO: 347132 - DNA, 55 bp, Artificial
  Synthetic oligonucleotide
cagatctcgaagttccatacaacggttcgcttaccttctaacgtcacgcctgaac

SEQ ID NO: 347133 - DNA, 51 bp, Artificial
  Synthetic oligonucleotide
cagatctgatggagacagcattgccactgaaattagaggactactgttccc

SEQ ID NO: 347134 - DNA, 55 bp, Artificial
  Synthetic oligonucleotide
cagatctgcttcgcactaactgtctcatctctcaagcttgaataaaacctcacct

SEQ ID NO: 347135 - DNA, 59 bp, Artificial
  Synthetic oligonucleotide
cagatctggacgtggcctttggcagaccaaagtgtatggggaccataccttcagcaaaa

SEQ ID NO: 347136 - DNA, 50 bp, Artificial
  Synthetic oligonucleotide
cagatctgttgggggtccgtcccgtctgtggagcatgacgggtgtcgtct

SEQ ID NO: 347137 - DNA, 60 bp, Artificial
  Synthetic oligonucleotide
cagatcttggggtcagagtcagtaatgggacagacaaaaatgacattctgagagagactc

SEQ ID NO: 347138 - DNA, 60 bp, Artificial
  Synthetic oligonucleotide
cagatctttctgtgctcccagacatggcatactccaattcttgtacaggatcatcattca

SEQ ID NO: 347139 - DNA, 55 bp, Artificial
  Synthetic oligonucleotide
cagatgaaaccaacacccgacaacctaatcgcgcaagtctcagaaggaacacgcg

SEQ ID NO: 347140 - DNA, 59 bp, Artificial
  Synthetic oligonucleotide
cagatgaacaatacccctttttggtgcaccccgttatgcccatgaaagacatccatgaa

SEQ ID NO: 347141 - DNA, 56 bp, Artificial
  Synthetic oligonucleotide
cagatgaacgcgtatacacatcgtattcatccattacattaatgtctattacagga

SEQ ID NO: 347142 - DNA, 60 bp, Artificial
  Synthetic oligonucleotide
cagatgacgtcagttgctattactggatcgctgagactttttccatctgaacgcgtgtta

SEQ ID NO: 347143 - DNA, 55 bp, Artificial
  Synthetic oligonucleotide
cagatgactgatttctggacatttaatcctgatttagtggaatggaattcagtgg

SEQ ID NO: 347144 - DNA, 60 bp, Artificial
  Synthetic oligonucleotide
cagatgacttgatatctcagctgtgtcagctgtacatagcaggagatcaagtgttgtcca

SEQ ID NO: 347145 - DNA, 60 bp, Artificial
  Synthetic oligonucleotide
cagatgagatatggaatcctacggacttgactatgtgatcttgctttcgtaataaaattc

SEQ ID NO: 347146 - DNA, 55 bp, Artificial
  Synthetic oligonucleotide
cagatgagtatataaggagagcagaagagcagatttgcattgctcatgatccagc

SEQ ID NO: 347147 - DNA, 55 bp, Artificial
  Synthetic oligonucleotide
cagatgataaggatgctgatagctatgacatatgacgaagcggacgactgttgtc

SEQ ID NO: 347148 - DNA, 54 bp, Artificial
  Synthetic oligonucleotide
cagatgatgacataataattgaatatatatattccaatgagttagactttcaaa

SEQ ID NO: 347149 - DNA, 51 bp, Artificial
  Synthetic oligonucleotide
cagatgatgataccatttagcgaacgtattttcagaatggcctcgtcattt

SEQ ID NO: 347150 - DNA, 55 bp, Artificial
  Synthetic oligonucleotide
cagatgatgcacttgtattatatactgatgtgtcgcaatgggattcatctcagca

SEQ ID NO: 347151 - DNA, 55 bp, Artificial
  Synthetic oligonucleotide
cagatgatgctgctgcactagaactggttagagacgtggtaaccgaggtagctga

SEQ ID NO: 347152 - DNA, 57 bp, Artificial
  Synthetic oligonucleotide
cagatgcaaacttttatgaccccaacacccaacgtttggtgtgggcctgcataggaa

SEQ ID NO: 347153 - DNA, 60 bp, Artificial
  Synthetic oligonucleotide
cagatgcaagcgcccacggctcagtgctccttaactgtgctgttgatccgaaggtgcggt

SEQ ID NO: 347154 - DNA, 50 bp, Artificial
  Synthetic oligonucleotide
cagatgcacagagtgctttgagtcagtgtaggacttttagaggcagagtg

SEQ ID NO: 347155 - DNA, 57 bp, Artificial
  Synthetic oligonucleotide
cagatgcacccggtgagaacctctagggggtgggtgatggttaggcggcctgacacg

SEQ ID NO: 347156 - DNA, 60 bp, Artificial
  Synthetic oligonucleotide
cagatgcacctattgatacctgtatttctgaatgcatcactccaaatggaagcattccca

SEQ ID NO: 347157 - DNA, 55 bp, Artificial
  Synthetic oligonucleotide
cagatgcactggaaaccattacactcatcgttgccattactgtgatgacaggagg

SEQ ID NO: 347158 - DNA, 60 bp, Artificial
  Synthetic oligonucleotide
cagatgcagaggccttggttccagagagttcttgtaacatggataaccatcagtccatgt

SEQ ID NO: 347159 - DNA, 55 bp, Artificial
  Synthetic oligonucleotide
cagatgcatatacttagagggccgttacattttcagcgtcgagcgatattgggtg

SEQ ID NO: 347160 - DNA, 55 bp, Artificial
  Synthetic oligonucleotide
cagatgccactggccagggaaaacttggtgataccccggtacatgtgtggagaaa

SEQ ID NO: 347161 - DNA, 55 bp, Artificial
  Synthetic oligonucleotide
cagatgcccggggccttattcagtcgtctcgggctcatgccatcgtcgctctgac

SEQ ID NO: 347162 - DNA, 55 bp, Artificial
  Synthetic oligonucleotide
cagatgcctcagatttcgttatgaatcctttaggcttaaatgtaccaggatcaag

SEQ ID NO: 347163 - DNA, 60 bp, Artificial
  Synthetic oligonucleotide
cagatgcgcgtgggtgtacgacacagtccgctctacactcccagcaacatgtgcatgatg

SEQ ID NO: 347164 - DNA, 60 bp, Artificial
  Synthetic oligonucleotide
cagatgcggagatcgacgatatatttgagaccagcggaactgtcattgacagcataatta

SEQ ID NO: 347165 - DNA, 60 bp, Artificial
  Synthetic oligonucleotide
cagatgcgtagagcattacctgtccggcgtgtgtagagcattcgtgtgtggctcgtcacc

SEQ ID NO: 347166 - DNA, 55 bp, Artificial
  Synthetic oligonucleotide
cagatgctatgttacttgaatcatgtctagaacaattctcagctaacgtgcgcgc

SEQ ID NO: 347167 - DNA, 60 bp, Artificial
  Synthetic oligonucleotide
cagatgctgtcggtatatgtagcacatacttagccacgaacatgagtgagtggaggcgtg

SEQ ID NO: 347168 - DNA, 60 bp, Artificial
  Synthetic oligonucleotide
cagatgctgtgtccaggaaaaagatggatactaaacctgctgacccgactgggattgaac

SEQ ID NO: 347169 - DNA, 56 bp, Artificial
  Synthetic oligonucleotide
cagatggaacaacccccagaagaccaagggccacagagggagccatatcatgaatg

SEQ ID NO: 347170 - DNA, 55 bp, Artificial
  Synthetic oligonucleotide
cagatggaaggaagccatgcaggaggtgaagcaaaccattgcagaacaccccagg

SEQ ID NO: 347171 - DNA, 55 bp, Artificial
  Synthetic oligonucleotide
cagatggaccaagggtaaagcaatggccattgtcaaaagaaaagatagaggcatt

SEQ ID NO: 347172 - DNA, 59 bp, Artificial
  Synthetic oligonucleotide
cagatggaggaccaaatctatacaatatccggaatctccacattccggaagtctgttta

SEQ ID NO: 347173 - DNA, 60 bp, Artificial
  Synthetic oligonucleotide
cagatggagggccaaacttatacaatatccggaatcttcacatccctgaagtctgcttga

SEQ ID NO: 347174 - DNA, 60 bp, Artificial
  Synthetic oligonucleotide
cagatggatatagacgaacagcctacaactagtactcctacacaaagattggagaccact

SEQ ID NO: 347175 - DNA, 55 bp, Artificial
  Synthetic oligonucleotide
cagatggcaccataccacggaggttctcggggaactgttcttgagcaaagttcgc

SEQ ID NO: 347176 - DNA, 59 bp, Artificial
  Synthetic oligonucleotide
cagatggctcattggtcttccaacgctggaaaggtgtatctaccacctagtgcccctgt

SEQ ID NO: 347177 - DNA, 55 bp, Artificial
  Synthetic oligonucleotide
cagatggcttggatagtcaaagataagcacacccaacgatagtagtcgacgaacc

SEQ ID NO: 347178 - DNA, 51 bp, Artificial
  Synthetic oligonucleotide
cagatgggacgagaattggagctactaacgccattgcattgcacagcttat

SEQ ID NO: 347179 - DNA, 60 bp, Artificial
  Synthetic oligonucleotide
cagatgggaggttgtgtatgagtttgcttactgacaacgtacaggtgactcgtgaagcgt

SEQ ID NO: 347180 - DNA, 60 bp, Artificial
  Synthetic oligonucleotide
cagatgggcatgttactcacagggtctaacgctaagagcatggacttgggtacaactcct

SEQ ID NO: 347181 - DNA, 60 bp, Artificial
  Synthetic oligonucleotide
cagatgggctgtgttaccgcgccacgccaagcctggaccaaccattctcatgaacgacca

SEQ ID NO: 347182 - DNA, 60 bp, Artificial
  Synthetic oligonucleotide
cagatggggatgcgaagagtttgggtgcttggctgtcaacacaggttgtgtgtttgggtc

SEQ ID NO: 347183 - DNA, 55 bp, Artificial
  Synthetic oligonucleotide
cagatggtcaacaataccaattaacttcatcatagtaagagtatggtggctatgg

SEQ ID NO: 347184 - DNA, 55 bp, Artificial
  Synthetic oligonucleotide
cagatggtccatcgtctcacgcgttgaaccgttggttttctgtagtctcttaaat

SEQ ID NO: 347185 - DNA, 50 bp, Artificial
  Synthetic oligonucleotide
cagatggtgccaaaagtgcctcatccaatcctagaccatctgttgtgcca

SEQ ID NO: 347186 - DNA, 50 bp, Artificial
  Synthetic oligonucleotide
cagatggttctggagaatgtcggatcacatgctggttatctaaaactagt

SEQ ID NO: 347187 - DNA, 57 bp, Artificial
  Synthetic oligonucleotide
cagatggttgaagaccccaaattcctgccgctcctgacgcgattgacctggaaccgt

SEQ ID NO: 347188 - DNA, 56 bp, Artificial
  Synthetic oligonucleotide
cagatgtaaaaatacaggtacctcataaatgttttggatgggtaactggtaagtca

SEQ ID NO: 347189 - DNA, 55 bp, Artificial
  Synthetic oligonucleotide
cagatgtaaatcgaaggcgtcgtgcagtacggtaaactgcacatctatcctctag

SEQ ID NO: 347190 - DNA, 57 bp, Artificial
  Synthetic oligonucleotide
cagatgtatgggtagctatcatatctattgaaccaaatgttaattcagagagcagac

SEQ ID NO: 347191 - DNA, 60 bp, Artificial
  Synthetic oligonucleotide
cagatgtcaaaggaaatctactcaagatgatgaatgactcaatggctaagaaaaccaatg

SEQ ID NO: 347192 - DNA, 55 bp, Artificial
  Synthetic oligonucleotide
cagatgtcaatggagtgtgggtaatgatggatggggaagagcaagttgagtaccc

SEQ ID NO: 347193 - DNA, 51 bp, Artificial
  Synthetic oligonucleotide
cagatgtcacgcaaagggttatacaagggcttgccacgtgtggtggatgtg

SEQ ID NO: 347194 - DNA, 59 bp, Artificial
  Synthetic oligonucleotide
cagatgtcactgacccattgaaaccaaccactagtagttttatccaactagcacctcca

SEQ ID NO: 347195 - DNA, 55 bp, Artificial
  Synthetic oligonucleotide
cagatgtcactgtggacacccaacagtcagaagatatacctgccgcccacccctg

SEQ ID NO: 347196 - DNA, 60 bp, Artificial
  Synthetic oligonucleotide
cagatgtccctgcaattttagatatatcttctactaatacagtacatgttacatctacca

SEQ ID NO: 347197 - DNA, 57 bp, Artificial
  Synthetic oligonucleotide
cagatgtccgtatactcgacccgccctctacaacaaacaatccccggatgaaggcta

SEQ ID NO: 347198 - DNA, 55 bp, Artificial
  Synthetic oligonucleotide
cagatgtcgactatccagctattcaagactatcagatttggttcctttgagcctg

SEQ ID NO: 347199 - DNA, 55 bp, Artificial
  Synthetic oligonucleotide
cagatgtcttgtgccgctggtactacacaaacagcttgtactgatgacaacgcac

SEQ ID NO: 347200 - DNA, 59 bp, Artificial
  Synthetic oligonucleotide
cagatgtgattcaaatattacaggactaatcttaacaagagatggtgggagtccggata

SEQ ID NO: 347201 - DNA, 55 bp, Artificial
  Synthetic oligonucleotide
cagatgtgcaaagtgctgaacttccaagaatactagttgaccacacacatcaggc

SEQ ID NO: 347202 - DNA, 59 bp, Artificial
  Synthetic oligonucleotide
cagatgtgttatgtttatccccaacaggcagttagataacagccttccacccgccaaga

SEQ ID NO: 347203 - DNA, 56 bp, Artificial
  Synthetic oligonucleotide
cagatgttaaagagggtccaaacacatctaaaggggatctatggtaggaataagaa

SEQ ID NO: 347204 - DNA, 53 bp, Artificial
  Synthetic oligonucleotide
cagatgttactcgtggtaatggattaactcatcgtacaggcaaacgtttttgc

SEQ ID NO: 347205 - DNA, 58 bp, Artificial
  Synthetic oligonucleotide
cagatgttagcataccctggagctagttatctcacttacatgatgacagaaacttcag

SEQ ID NO: 347206 - DNA, 60 bp, Artificial
  Synthetic oligonucleotide
cagatgttcattgtctcgccggaacatcactggtttgtgcaagaatgcaattgctccatc

SEQ ID NO: 347207 - DNA, 60 bp, Artificial
  Synthetic oligonucleotide
cagatgttccgtacgtgggaaagcgtgaggacatctggtgtggcagccttatcggaacgc

SEQ ID NO: 347208 - DNA, 60 bp, Artificial
  Synthetic oligonucleotide
cagatgttcgttgtctcgcctgagcaccattggttcgtgcaagaatgcaattgctccatc

SEQ ID NO: 347209 - DNA, 59 bp, Artificial
  Synthetic oligonucleotide
cagatgttgcaacataggatctctaacctcacaggagtagtatacaatttcaataatag

SEQ ID NO: 347210 - DNA, 56 bp, Artificial
  Synthetic oligonucleotide
cagatgttgctgacaaggggactttccgcctgggactttccggggagtgcgcggca

SEQ ID NO: 347211 - DNA, 56 bp, Artificial
  Synthetic oligonucleotide
cagatgttgtagatggtgtcaatcataaattaaacgttacaacagcaacgtgtacc

SEQ ID NO: 347212 - DNA, 55 bp, Artificial
  Synthetic oligonucleotide
cagatgttttctcaccaacaggcaaaagatgacaccctactttgggctaccattg

SEQ ID NO: 347213 - DNA, 55 bp, Artificial
  Synthetic oligonucleotide
cagattaaaaccagatcaaaacggtgtttcattaggcgataaaatatcgccagca

SEQ ID NO: 347214 - DNA, 60 bp, Artificial
  Synthetic oligonucleotide
cagattaaagccagacagatggtaagcccagttatgagtgtaattggatttcttgcgttg

SEQ ID NO: 347215 - DNA, 55 bp, Artificial
  Synthetic oligonucleotide
cagattaaattaaaggatgaacggttcatgagtctatcaagcgctatgcctcagg

SEQ ID NO: 347216 - DNA, 55 bp, Artificial
  Synthetic oligonucleotide
cagattaaatttggttcgctcaaacctccttgaggctatgcgagaatcctcttcc

SEQ ID NO: 347217 - DNA, 55 bp, Artificial
  Synthetic oligonucleotide
cagattaactgtaccagacccggcaacaatacaaggaaaagtatacgtataggac

SEQ ID NO: 347218 - DNA, 56 bp, Artificial
  Synthetic oligonucleotide
cagattaattcgcttattggcaaactttgcgaagtaccgattaatgttcgttcttg

SEQ ID NO: 347219 - DNA, 54 bp, Artificial
  Synthetic oligonucleotide
cagattacatgggagtggtggactcgagcacaatgggaaataccagtaggacaa

SEQ ID NO: 347220 - DNA, 54 bp, Artificial
  Synthetic oligonucleotide
cagattaccggatatggctaaacggcgagcccgtattaccggggcaggtactaa

SEQ ID NO: 347221 - DNA, 60 bp, Artificial
  Synthetic oligonucleotide
cagattacctgacgggcctccctgctctcagcggtcaaaattcttgctgatggatgccct

SEQ ID NO: 347222 - DNA, 60 bp, Artificial
  Synthetic oligonucleotide
cagattactccccaaaatgcttgagctcaagaagatgttattgggttggagaatgtcact

SEQ ID NO: 347223 - DNA, 52 bp, Artificial
  Synthetic oligonucleotide
cagattacttcacacaactaggtggtgcttttggcgagggctttacacacaa

SEQ ID NO: 347224 - DNA, 51 bp, Artificial
  Synthetic oligonucleotide
cagattagcagagagtaatggcaaactagacaaggtcaatgtcggactaat

SEQ ID NO: 347225 - DNA, 60 bp, Artificial
  Synthetic oligonucleotide
cagattagccgacgaaaaaacacacacatagtgcagcctcgggctaaagaccgagtctca

SEQ ID NO: 347226 - DNA, 60 bp, Artificial
  Synthetic oligonucleotide
cagattagctgtacctaaccgaggagttaatgcttggcttacagccagtgagtacgcacg

SEQ ID NO: 347227 - DNA, 55 bp, Artificial
  Synthetic oligonucleotide
cagattagggaacctagggggagtgatatagctggacctactagttcccctcagg

SEQ ID NO: 347228 - DNA, 59 bp, Artificial
  Synthetic oligonucleotide
cagattaggtactccctagacatgctagtgaccgagatgtttagagagtacattcacag

SEQ ID NO: 347229 - DNA, 60 bp, Artificial
  Synthetic oligonucleotide
cagattataaacctcaatcactgtgtcagcctgagattacaaatttgatccagtattgta

SEQ ID NO: 347230 - DNA, 60 bp, Artificial
  Synthetic oligonucleotide
cagattatagcattgattctagttatgtgtgctcggggcttgttggcgacacaccaagaa

SEQ ID NO: 347231 - DNA, 58 bp, Artificial
  Synthetic oligonucleotide
cagattatatgtgccccctccaataccccgtaggcaaccatctataaaagatacagac

SEQ ID NO: 347232 - DNA, 59 bp, Artificial
  Synthetic oligonucleotide
cagattatctgagttttcagagccatcagctgtaaccagtctgttgaaatcgcagctca

SEQ ID NO: 347233 - DNA, 55 bp, Artificial
  Synthetic oligonucleotide
cagattcaaatctgctagatatagcgaaggagggtactcctcagtttgcccaaac

SEQ ID NO: 347234 - DNA, 57 bp, Artificial
  Synthetic oligonucleotide
cagattcaacttttgggcttgtctccattcaaattgcaaactataatcactcagatg

SEQ ID NO: 347235 - DNA, 55 bp, Artificial
  Synthetic oligonucleotide
cagattcacgtggctttgcatacatgagtgctgtttcaagcgaaacattaacact

SEQ ID NO: 347236 - DNA, 55 bp, Artificial
  Synthetic oligonucleotide
cagattcagagctagtaaaggagatcgtagagctcataaggcaaaaggaccaggt

SEQ ID NO: 347237 - DNA, 55 bp, Artificial
  Synthetic oligonucleotide
cagattcagcacaacctggtcatgggtaggatcagagggtaatgcacggttaggg

SEQ ID NO: 347238 - DNA, 55 bp, Artificial
  Synthetic oligonucleotide
cagattcagtagaacatcttataatctggggaattcatcacccttcaagcacaca

SEQ ID NO: 347239 - DNA, 50 bp, Artificial
  Synthetic oligonucleotide
cagattcatgcataatacacatgcgagacaaaagtactgaaataatccta

SEQ ID NO: 347240 - DNA, 60 bp, Artificial
  Synthetic oligonucleotide
cagattcattatccgacgcagcctcttcaatatcaagaggagcatccattcgttcagtgg

SEQ ID NO: 347241 - DNA, 60 bp, Artificial
  Synthetic oligonucleotide
cagattccaccatgggtgatgactgagtatttggatggaaagtcggtgtcttgtctgtca

SEQ ID NO: 347242 - DNA, 55 bp, Artificial
  Synthetic oligonucleotide
cagattccatgtctaacgacatgcactttgatcacgttgctatgcttggccatct

SEQ ID NO: 347243 - DNA, 57 bp, Artificial
  Synthetic oligonucleotide
cagattccccctctgttagtctggtcgatgaggctagaagtaccccacaggtaactg

SEQ ID NO: 347244 - DNA, 55 bp, Artificial
  Synthetic oligonucleotide
cagattccgtgccactgttactggtggacaatatgcgtctaaggaacaagcgatc

SEQ ID NO: 347245 - DNA, 60 bp, Artificial
  Synthetic oligonucleotide
cagattcgacacgctatcgagcggattgcccagattactaatgttgacagcacagattat

SEQ ID NO: 347246 - DNA, 54 bp, Artificial
  Synthetic oligonucleotide
cagattcggggtttgcaaacgtttcgagtgtcggtgatccgttacgagttgcat

SEQ ID NO: 347247 - DNA, 55 bp, Artificial
  Synthetic oligonucleotide
cagattctccattctgctcgaccaatcatgattatacattatggcttcccgaaaa

SEQ ID NO: 347248 - DNA, 58 bp, Artificial
  Synthetic oligonucleotide
cagattctctagccggttgtctgaggggtcaccgttcaggtgtctgacctccatccct

SEQ ID NO: 347249 - DNA, 55 bp, Artificial
  Synthetic oligonucleotide
cagattctgaatcttcaaattcctctaagactctgctagtcgtgaccactatagg

SEQ ID NO: 347250 - DNA, 55 bp, Artificial
  Synthetic oligonucleotide
cagattctttaaagctctaagagctgaacaagctacacaggaagtaaaacattgg

SEQ ID NO: 347251 - DNA, 60 bp, Artificial
  Synthetic oligonucleotide
cagattgaacgtgcatcagataaaattgcacaaggagttataatagcataccgagatatg

SEQ ID NO: 347252 - DNA, 60 bp, Artificial
  Synthetic oligonucleotide
cagattgaagtgactaatgctactgagctggttcagagttcctcaacaggtagaatatgc

SEQ ID NO: 347253 - DNA, 55 bp, Artificial
  Synthetic oligonucleotide
cagattgaccctcgcgatctgctcaatcctattctctttcacggttgccatggca

SEQ ID NO: 347254 - DNA, 55 bp, Artificial
  Synthetic oligonucleotide
cagattgacgcggtaaggccctctgctgattttggagttcacaacaactccttgg

SEQ ID NO: 347255 - DNA, 60 bp, Artificial
  Synthetic oligonucleotide
cagattgactggcgtgacatcacgcagtgcacgttcctcaaacggggatttgtgctggat

SEQ ID NO: 347256 - DNA, 60 bp, Artificial
  Synthetic oligonucleotide
cagattgagactagaggactctttggagctatcgcaggatttattgaaggaggatggact

SEQ ID NO: 347257 - DNA, 57 bp, Artificial
  Synthetic oligonucleotide
cagattgagagcatgattgaggccgagtcttccgtcaaagagaaggacatgaccaag

SEQ ID NO: 347258 - DNA, 55 bp, Artificial
  Synthetic oligonucleotide
cagattgagggttcccagtttaggtcctgcttttgtgactcagggatgggtgtac

SEQ ID NO: 347259 - DNA, 60 bp, Artificial
  Synthetic oligonucleotide
cagattgaggtgactaatgctaccgagctagttcaaagctcttcaaaagggaaaatatgc

SEQ ID NO: 347260 - DNA, 55 bp, Artificial
  Synthetic oligonucleotide
cagattgattgtcaacaaatcctttcctaagcctattagcaatcttcagaacggt

SEQ ID NO: 347261 - DNA, 55 bp, Artificial
  Synthetic oligonucleotide
cagattgcaacttgtggaccgaaatgccaaccatgcgggatgactttgcacgcca

SEQ ID NO: 347262 - DNA, 56 bp, Artificial
  Synthetic oligonucleotide
cagattgcaagtacatggtgaccaagaccgtgaatattagacatgcctgctacatc

SEQ ID NO: 347263 - DNA, 56 bp, Artificial
  Synthetic oligonucleotide
cagattgccttcacgaaaaatacggtggattaaacaaaagcaagccttactacaca

SEQ ID NO: 347264 - DNA, 55 bp, Artificial
  Synthetic oligonucleotide
cagattgcgaactggcacagcgtataacgcgtactcggcagttctggacgagtac

SEQ ID NO: 347265 - DNA, 58 bp, Artificial
  Synthetic oligonucleotide
cagattgcgagtcaagtcatcatgcaggaaaatgagttgggaccggaccaacgacgga

SEQ ID NO: 347266 - DNA, 53 bp, Artificial
  Synthetic oligonucleotide
cagattgctaccatcgaacagagtgcaccgtcacaaagcgaccaagaacaact

SEQ ID NO: 347267 - DNA, 57 bp, Artificial
  Synthetic oligonucleotide
cagattggaaagctctaccggagccctccaaacagttgtcaatggacttaattcgag

SEQ ID NO: 347268 - DNA, 60 bp, Artificial
  Synthetic oligonucleotide
cagattggcaatgtaattaactggaccagagactccatcacagaagtatggtcttacaat

SEQ ID NO: 347269 - DNA, 55 bp, Artificial
  Synthetic oligonucleotide
cagattggcagcttatcagggagattgtgaaaccgtagaagcagcccttagcctc

SEQ ID NO: 347270 - DNA, 55 bp, Artificial
  Synthetic oligonucleotide
cagattggcagtcatacacagaagggccaggaacaaggtacccattatgcttcgg

SEQ ID NO: 347271 - DNA, 51 bp, Artificial
  Synthetic oligonucleotide
cagattgggacaggctgcatcctacccatgctgggccaatagcaccaggac

SEQ ID NO: 347272 - DNA, 57 bp, Artificial
  Synthetic oligonucleotide
cagattgggaccacaatcccaccaaagaccactggacagaagccaacaaggtaggag

SEQ ID NO: 347273 - DNA, 56 bp, Artificial
  Synthetic oligonucleotide
cagattgggacttcaacccacacaaggacagctggcccgatgccacaaaggtagga

SEQ ID NO: 347274 - DNA, 56 bp, Artificial
  Synthetic oligonucleotide
cagattgggggaataaggatggtagacattcttcggcaaaatccaacggaggaaca

SEQ ID NO: 347275 - DNA, 55 bp, Artificial
  Synthetic oligonucleotide
cagattggtaacaacaacgtttgacaacgtcagttataggtgtcctgctgacgta

SEQ ID NO: 347276 - DNA, 58 bp, Artificial
  Synthetic oligonucleotide
cagattggtatactataggagtatatgtgattggttttacacttcccattatattaaa

SEQ ID NO: 347277 - DNA, 60 bp, Artificial
  Synthetic oligonucleotide
cagattggtatagacgtcacaatggtgtgcggatttgctggatcggggaaaagtcgcaaa

SEQ ID NO: 347278 - DNA, 59 bp, Artificial
  Synthetic oligonucleotide
cagattggtggaacatgcattatttgggatcattcaaatatgcacctgtgatggtcatt

SEQ ID NO: 347279 - DNA, 55 bp, Artificial
  Synthetic oligonucleotide
cagattggttcgctggtaacgagtggtgtgagggtagttattcctgatctctgct

SEQ ID NO: 347280 - DNA, 60 bp, Artificial
  Synthetic oligonucleotide
cagattgtgtcaactgctacccagaccttcctggcaacctgtatcaacggggcatgctgg

SEQ ID NO: 347281 - DNA, 58 bp, Artificial
  Synthetic oligonucleotide
cagattgttccgttcatacggagccttctgatgccaaccaccggaccggcgtccattc

SEQ ID NO: 347282 - DNA, 57 bp, Artificial
  Synthetic oligonucleotide
cagattgtttaacttttacacagtattcaaggaatgtctgtttactgtgactaagtg

SEQ ID NO: 347283 - DNA, 57 bp, Artificial
  Synthetic oligonucleotide
cagattgtttggaagagtgggaggatatattgttccctctatccataacaaacaggg

SEQ ID NO: 347284 - DNA, 55 bp, Artificial
  Synthetic oligonucleotide
cagatttaaggcgttcccccaaaagtgaatataagtaagcgcagttccgaatggc

SEQ ID NO: 347285 - DNA, 60 bp, Artificial
  Synthetic oligonucleotide
cagatttagtcatataccgcacaaacactataggtgatgactatataccaacttgtgatt

SEQ ID NO: 347286 - DNA, 51 bp, Artificial
  Synthetic oligonucleotide
cagatttattaggccgtctgaccaatctataggtactcattcacgttcaaa

SEQ ID NO: 347287 - DNA, 60 bp, Artificial
  Synthetic oligonucleotide
cagatttcaatcagtgcagatatcatctagcacctgcagcaaccgccaagactttgccag

SEQ ID NO: 347288 - DNA, 59 bp, Artificial
  Synthetic oligonucleotide
cagatttcacaataccctatagcccaaaaatacacactaggatgaacttgcctgtccta

SEQ ID NO: 347289 - DNA, 55 bp, Artificial
  Synthetic oligonucleotide
cagatttcatattgaagatgacacagcacaagtgtatgcaggagacgatatggcc

SEQ ID NO: 347290 - DNA, 60 bp, Artificial
  Synthetic oligonucleotide
cagatttcgacctcgtcgttgggcaactgccaaaggatatgcaaccattcaagtcaacga

SEQ ID NO: 347291 - DNA, 59 bp, Artificial
  Synthetic oligonucleotide
cagatttctagccattccaccgacagcaggagtcttggctagatggggtacctttaaga

SEQ ID NO: 347292 - DNA, 55 bp, Artificial
  Synthetic oligonucleotide
cagatttctataaagtacaaggaaataatacaaggatgcacgagcggagagccta

SEQ ID NO: 347293 - DNA, 58 bp, Artificial
  Synthetic oligonucleotide
cagatttgaacctatatgtgtcataaccacaggattttatggtgaccgacttcttacc

SEQ ID NO: 347294 - DNA, 56 bp, Artificial
  Synthetic oligonucleotide
cagatttgaatagcgctactgatttaaaatatcattctaactttttaaaacactac

SEQ ID NO: 347295 - DNA, 58 bp, Artificial
  Synthetic oligonucleotide
cagatttgagttattcagcgggtgaccaaaccctgcagcaaaatgcccttaattataa

SEQ ID NO: 347296 - DNA, 59 bp, Artificial
  Synthetic oligonucleotide
cagatttgatgacacaccattataagcccacaaagaaccttccacatgttgtaccaagg

SEQ ID NO: 347297 - DNA, 58 bp, Artificial
  Synthetic oligonucleotide
cagatttgatgttagatcagggcttactcccgaatcaaggtttaggtaaacaacatca

SEQ ID NO: 347298 - DNA, 60 bp, Artificial
  Synthetic oligonucleotide
cagatttgcatcggttaccatgcaaacaactcgacagagcaggttgacacaataatggaa

SEQ ID NO: 347299 - DNA, 60 bp, Artificial
  Synthetic oligonucleotide
cagatttggcatggactcaaatcttttacacagcccccagccgcaatgtgctggctatgg

SEQ ID NO: 347300 - DNA, 59 bp, Artificial
  Synthetic oligonucleotide
cagatttgttcctattcattaacctctttgatctcattgagtgaaacaattcggttgta

SEQ ID NO: 347301 - DNA, 55 bp, Artificial
  Synthetic oligonucleotide
cagatttgttgaaattggtgtgacaaggagagaagttcacatatactacctggag

SEQ ID NO: 347302 - DNA, 60 bp, Artificial
  Synthetic oligonucleotide
cagattttgctttcaaaccaagaccactagcacccctcctgcgtctcgaaccatctgata

SEQ ID NO: 347303 - DNA, 58 bp, Artificial
  Synthetic oligonucleotide
cagattttggcgatctactccacaatcgctagttccctggtcttgttagtctccctgg

SEQ ID NO: 347304 - DNA, 60 bp, Artificial
  Synthetic oligonucleotide
cagatttttaacatgttcgacaacgagccgagtacagctacaatcaagaatgatctcaga

SEQ ID NO: 347305 - DNA, 60 bp, Artificial
  Synthetic oligonucleotide
cagatttttgatgtacctcgagtgccagatgaccaaatgtacagattaagagatagactt

SEQ ID NO: 347306 - DNA, 59 bp, Artificial
  Synthetic oligonucleotide
cagcaaaatgggagctcaagtatcaacgcaaaagactggggcacatgagaccgggctga

SEQ ID NO: 347307 - DNA, 60 bp, Artificial
  Synthetic oligonucleotide
cagcaaacaagagtggacaagctgactcaaggtcgccagacctatgattggacattaaac

SEQ ID NO: 347308 - DNA, 55 bp, Artificial
  Synthetic oligonucleotide
cagcaaaccccagtacccctggactatgttaacttggaggcagtttgccgccgca

SEQ ID NO: 347309 - DNA, 60 bp, Artificial
  Synthetic oligonucleotide
cagcaaacgaaatggcagcagttacattcgcatcagctatcaccaacgccaccaccaata

SEQ ID NO: 347310 - DNA, 60 bp, Artificial
  Synthetic oligonucleotide
cagcaaactctcctcacaattagggagatccaatacaatctggatatcccgcataagttg

SEQ ID NO: 347311 - DNA, 55 bp, Artificial
  Synthetic oligonucleotide
cagcaaagaaacaaaccctatcacaatctgttaacccatttgtgaccatccagtt

SEQ ID NO: 347312 - DNA, 55 bp, Artificial
  Synthetic oligonucleotide
cagcaaagattcacgttcaggttatgagaccttcaaggtcattggtggttggtcc

SEQ ID NO: 347313 - DNA, 55 bp, Artificial
  Synthetic oligonucleotide
cagcaaaggtatagggtttcacttgttgacttcacaatctggagcacatctgatc

SEQ ID NO: 347314 - DNA, 60 bp, Artificial
  Synthetic oligonucleotide
cagcaaagttcacctacttagaggacacatccaatggttatgatcactctaaagccgact

SEQ ID NO: 347315 - DNA, 50 bp, Artificial
  Synthetic oligonucleotide
cagcaaagttcgttccacaagagtgcaaccgtgccgcgtagacggtcggc

SEQ ID NO: 347316 - DNA, 58 bp, Artificial
  Synthetic oligonucleotide
cagcaaataaaacaaatgtggaacaagtcattatgcaataagttcgctgttatgcacg

SEQ ID NO: 347317 - DNA, 52 bp, Artificial
  Synthetic oligonucleotide
cagcaaataactatttgaaaatgcaaatagatgatagaaataccgcaattga

SEQ ID NO: 347318 - DNA, 60 bp, Artificial
  Synthetic oligonucleotide
cagcaaatacaggaatattgagaaattggtataatccagttctagcattaaaaatgacac

SEQ ID NO: 347319 - DNA, 55 bp, Artificial
  Synthetic oligonucleotide
cagcaaatgaaacaggagctagcatgcccgtggagccatcagatagtgttgagac

SEQ ID NO: 347320 - DNA, 60 bp, Artificial
  Synthetic oligonucleotide
cagcaaatgagtacggaatgctggaaaaaaccaaagcagacctcaagagcatgtttggcg

SEQ ID NO: 347321 - DNA, 59 bp, Artificial
  Synthetic oligonucleotide
cagcaaatgtaaccggttaccagaaatcatagtcaggatgacacagcaaatgtaaccgc

SEQ ID NO: 347322 - DNA, 59 bp, Artificial
  Synthetic oligonucleotide
cagcaaattccctaacatgtacattccagtgggacaggtcacagattacggcttcctaa

SEQ ID NO: 347323 - DNA, 56 bp, Artificial
  Synthetic oligonucleotide
cagcaacaaaccgccctattacactttttggactaataaatttgttcaatctgtca

SEQ ID NO: 347324 - DNA, 55 bp, Artificial
  Synthetic oligonucleotide
cagcaacaacacgatgaatcgtgctaagtacaacagacctgtgggtcgacgatct

SEQ ID NO: 347325 - DNA, 60 bp, Artificial
  Synthetic oligonucleotide
cagcaacacacaccatggattacgcaacattccgcaagttcaataagcaaactgaaggtc

SEQ ID NO: 347326 - DNA, 60 bp, Artificial
  Synthetic oligonucleotide
cagcaacacgaccccggaccctgcacgaattgtgtgaggtgctggaagaatcggtgcatg

SEQ ID NO: 347327 - DNA, 55 bp, Artificial
  Synthetic oligonucleotide
cagcaacaggaagttgtgattatggatgatctgaaccaaaatccagatggacagg

SEQ ID NO: 347328 - DNA, 55 bp, Artificial
  Synthetic oligonucleotide
cagcaaccactagtaagggagaattcaccatgcttggagtccatgacaacgtcgc

SEQ ID NO: 347329 - DNA, 60 bp, Artificial
  Synthetic oligonucleotide
cagcaaccagcaagtaattgatgtggcctggcccttggtgtgtgaggctgtggtggaaag

SEQ ID NO: 347330 - DNA, 55 bp, Artificial
  Synthetic oligonucleotide
cagcaaccatacctgatgtgaactcaaactgtagacgcggctgtactgctcgcgt

SEQ ID NO: 347331 - DNA, 60 bp, Artificial
  Synthetic oligonucleotide
cagcaaccatgaagggcgactgatccagaacagcataacaatagagaggatggtgctttc

SEQ ID NO: 347332 - DNA, 55 bp, Artificial
  Synthetic oligonucleotide
cagcaacccttgtgctgccctacgtaaactccctagcaatagactgcatggccaa

SEQ ID NO: 347333 - DNA, 55 bp, Artificial
  Synthetic oligonucleotide
cagcaaccgggccaaccaagaaatcttggttcattaacgcccacctgtttcacga

SEQ ID NO: 347334 - DNA, 51 bp, Artificial
  Synthetic oligonucleotide
cagcaaccggggtctttattggccgagggtgcagtgggtagcccccattgg

SEQ ID NO: 347335 - DNA, 55 bp, Artificial
  Synthetic oligonucleotide
cagcaacggtttattataacggaaggctgaccactaccattaagacctgggccag

SEQ ID NO: 347336 - DNA, 55 bp, Artificial
  Synthetic oligonucleotide
cagcaacgtttcaagtgacgctgaattttatttgataccgcaatcgcagactgct

SEQ ID NO: 347337 - DNA, 55 bp, Artificial
  Synthetic oligonucleotide
cagcaactcagcgtcctaacatcatggcgtatgtgcacgaaggggaaggtgatgg

SEQ ID NO: 347338 - DNA, 55 bp, Artificial
  Synthetic oligonucleotide
cagcaactgaatcaaactcatgcgttagaatattttggtcacgagcaagacgtcg

SEQ ID NO: 347339 - DNA, 60 bp, Artificial
  Synthetic oligonucleotide
cagcaactgctacccatatgatgtaccagactatgactcactcaggtctctagttgcttc

SEQ ID NO: 347340 - DNA, 60 bp, Artificial
  Synthetic oligonucleotide
cagcaactgctatccctatgatgtaccagactatgcatcgctcaggtctctaattgcttc

SEQ ID NO: 347341 - DNA, 59 bp, Artificial
  Synthetic oligonucleotide
cagcaactttgtttgctttgccccacggtgcacctttgctattctacgaatattcatac

SEQ ID NO: 347342 - DNA, 55 bp, Artificial
  Synthetic oligonucleotide
cagcaagaaacgatggagtggtggtaccaaggttactggatattacgttacacgc

SEQ ID NO: 347343 - DNA, 60 bp, Artificial
  Synthetic oligonucleotide
cagcaagaatgcttaaatacaattatccaactaaatcaggctattgtggtggcatcttat

SEQ ID NO: 347344 - DNA, 58 bp, Artificial
  Synthetic oligonucleotide
cagcaagagaggtgagtggctaacgaaaggtagtacagtgtacaacgagatacctaaa

SEQ ID NO: 347345 - DNA, 60 bp, Artificial
  Synthetic oligonucleotide
cagcaagagcaagttcactggattaccaggcccaaccagtctatcccagtaggagacatc

SEQ ID NO: 347346 - DNA, 55 bp, Artificial
  Synthetic oligonucleotide
cagcaagagcacgctcctcacggacttgctggtgccctccgcttgtgtgaaacgc

SEQ ID NO: 347347 - DNA, 55 bp, Artificial
  Synthetic oligonucleotide
cagcaagagctggatcaggcaacaaaacaattgcttgaaatgacccgctggtgga

SEQ ID NO: 347348 - DNA, 58 bp, Artificial
  Synthetic oligonucleotide
cagcaagaggataattatcacgagcaataagtcccccgagacctggtacaaggaggac

SEQ ID NO: 347349 - DNA, 55 bp, Artificial
  Synthetic oligonucleotide
cagcaagagtgccattcctgagcttgtggtgattgagtgcccaaaagatgagttg

SEQ ID NO: 347350 - DNA, 55 bp, Artificial
  Synthetic oligonucleotide
cagcaagatgggagcacaagtgtcaacgcagaaaactggcgcacacgaaactggg

SEQ ID NO: 347351 - DNA, 55 bp, Artificial
  Synthetic oligonucleotide
cagcaagcatgtccggaggattaatcagctaatacgcgagagcaatcctagtgcg

SEQ ID NO: 347352 - DNA, 55 bp, Artificial
  Synthetic oligonucleotide
cagcaagccgtcgatcgccgatgcctatcgcgaatatctcaaggaagccgcggcg

SEQ ID NO: 347353 - DNA, 55 bp, Artificial
  Synthetic oligonucleotide
cagcaagcgaaagaagctgacgggaaggtcagtcaaaattatcctatagtgcaga

SEQ ID NO: 347354 - DNA, 58 bp, Artificial
  Synthetic oligonucleotide
cagcaaggatatgtcgcacctaactttccaggtttacccccacaacatgcctgcccca

SEQ ID NO: 347355 - DNA, 57 bp, Artificial
  Synthetic oligonucleotide
cagcaagggtagtggagattctgggacgcaacagttgggaagcccttaaatatctag

SEQ ID NO: 347356 - DNA, 50 bp, Artificial
  Synthetic oligonucleotide
cagcaaggtggaccaattctttggggaaattaatatctattgtgcactgc

SEQ ID NO: 347357 - DNA, 55 bp, Artificial
  Synthetic oligonucleotide
cagcaagtgaattcccatcgacgatcttgtctgaatcgtagtctatagacgtaca

SEQ ID NO: 347358 - DNA, 60 bp, Artificial
  Synthetic oligonucleotide
cagcaagtgcttgccacgatggcattagttggctgacaattggtatttccggaccagaca

SEQ ID NO: 347359 - DNA, 60 bp, Artificial
  Synthetic oligonucleotide
cagcaagtggttacagttatggatgatctgtgtcagaatcccgacggtaaggacatgtca

SEQ ID NO: 347360 - DNA, 56 bp, Artificial
  Synthetic oligonucleotide
cagcaagtgtggaggatgaactagcctggttggctcaaaatccaccagtagatgta

SEQ ID NO: 347361 - DNA, 53 bp, Artificial
  Synthetic oligonucleotide
cagcaagttataggctagaagaagagggaggttcagttacagtcatagactac

SEQ ID NO: 347362 - DNA, 55 bp, Artificial
  Synthetic oligonucleotide
cagcaagttatcactatcagtcccagaggaaaagaagcattcagttctagctgac

SEQ ID NO: 347363 - DNA, 55 bp, Artificial
  Synthetic oligonucleotide
cagcaataaacaccatctgcaatggatgaccctgaaggtacaaacggggtagggg

SEQ ID NO: 347364 - DNA, 60 bp, Artificial
  Synthetic oligonucleotide
cagcaataccagaattccatggacacacaacttggtgacaacgctattagcggaggctcc

SEQ ID NO: 347365 - DNA, 55 bp, Artificial
  Synthetic oligonucleotide
cagcaatactaaccctcttactgagaaagctgtggcttcagtaacattggcaggc

SEQ ID NO: 347366 - DNA, 58 bp, Artificial
  Synthetic oligonucleotide
cagcaatcacacaagcttgtccaaaaacctcctttgaaccaattccaatacattactg

SEQ ID NO: 347367 - DNA, 60 bp, Artificial
  Synthetic oligonucleotide
cagcaatcatgaaaagtgaactgaattatggtaactgtgataccaaatgtcagaccccag

SEQ ID NO: 347368 - DNA, 60 bp, Artificial
  Synthetic oligonucleotide
cagcaatctacggcgagccctgcaatggctaagagtggcaactactcctacaaaaggtgg

SEQ ID NO: 347369 - DNA, 60 bp, Artificial
  Synthetic oligonucleotide
cagcaatgaactcacatgatgacggaaacaatagtgatccatctccgggaaattacagtc

SEQ ID NO: 347370 - DNA, 60 bp, Artificial
  Synthetic oligonucleotide
cagcaatgagctcacagggtagggatttgcacagccttttcttaagtgtatgctgaaata

SEQ ID NO: 347371 - DNA, 54 bp, Artificial
  Synthetic oligonucleotide
cagcaatgagtaaggttccaggtcgattcaaagacctgatgggattttcctcgg

SEQ ID NO: 347372 - DNA, 55 bp, Artificial
  Synthetic oligonucleotide
cagcaatggaaatctaattgcccctcgaggttatttcaagatacgcactgggaaa

SEQ ID NO: 347373 - DNA, 60 bp, Artificial
  Synthetic oligonucleotide
cagcaatgggagatattgatagagctgatgacgatcctaatgcagaattgcaaaaggctc

SEQ ID NO: 347374 - DNA, 55 bp, Artificial
  Synthetic oligonucleotide
cagcaatgggtaagccagaacggttgtcggttgtcaaatgccgttgcgttggttg

SEQ ID NO: 347375 - DNA, 55 bp, Artificial
  Synthetic oligonucleotide
cagcaatgtcaacgaccgcaaggtcttacataagaggactcttggactctcagca

SEQ ID NO: 347376 - DNA, 60 bp, Artificial
  Synthetic oligonucleotide
cagcaatgtgatttgacacaatgataccaccaacgcatactgataacatcttgaatccgc

SEQ ID NO: 347377 - DNA, 55 bp, Artificial
  Synthetic oligonucleotide
cagcaattccccggacgtacctatgcatgtgattgggacactcctagaggaagga

SEQ ID NO: 347378 - DNA, 55 bp, Artificial
  Synthetic oligonucleotide
cagcaatttaataaattcggtgacgctagtcaagtcgaaaggtcaatcgggaata

SEQ ID NO: 347379 - DNA, 60 bp, Artificial
  Synthetic oligonucleotide
cagcaatttcaccagcactgcagttaaggccgcctgttggtgggcaggcatcaagcagga

SEQ ID NO: 347380 - DNA, 58 bp, Artificial
  Synthetic oligonucleotide
cagcaattttgtgtcaacagaggcctacctcgtttttactggtcttagagcagggaga

SEQ ID NO: 347381 - DNA, 53 bp, Artificial
  Synthetic oligonucleotide
cagcacaaaaccgtcggagtgtaggtataggaattacaaacttggcacacgca

SEQ ID NO: 347382 - DNA, 55 bp, Artificial
  Synthetic oligonucleotide
cagcacaaaaggaatagacagaggctacacggcgtggaacttgtaggaccagagg

SEQ ID NO: 347383 - DNA, 60 bp, Artificial
  Synthetic oligonucleotide
cagcacaaaatgctataagcacaactttcccctatactggagaccctccttacagccatg

SEQ ID NO: 347384 - DNA, 51 bp, Artificial
  Synthetic oligonucleotide
cagcacaaataaatagaatagatcccttagccccactccgacttttgattt

SEQ ID NO: 347385 - DNA, 60 bp, Artificial
  Synthetic oligonucleotide
cagcacaacggctaaggctatggaacaaatggctggatcaagtgaacaagcagcagaggc

SEQ ID NO: 347386 - DNA, 55 bp, Artificial
  Synthetic oligonucleotide
cagcacaaggatgtcaacaactaatggaacaggtagaaccagctctcaaaacagg

SEQ ID NO: 347387 - DNA, 55 bp, Artificial
  Synthetic oligonucleotide
cagcacaaggcctaaagtaaatggtcaggctggaagaatgacattctactggacc

SEQ ID NO: 347388 - DNA, 55 bp, Artificial
  Synthetic oligonucleotide
cagcacacaaggggattggaggaaatgaacaggtagataaattagtcagctccgg

SEQ ID NO: 347389 - DNA, 54 bp, Artificial
  Synthetic oligonucleotide
cagcacacacaggtcgcgtgggttcaactcccccccttttccgagggtatcgga

SEQ ID NO: 347390 - DNA, 60 bp, Artificial
  Synthetic oligonucleotide
cagcacacttcatcaggcgtcgtcgcgggtcctcgtccggctgcaacaggtcctactgct

SEQ ID NO: 347391 - DNA, 56 bp, Artificial
  Synthetic oligonucleotide
cagcacagataagcactggtataagccagaagagcagcaatatggtggcatatcac

SEQ ID NO: 347392 - DNA, 60 bp, Artificial
  Synthetic oligonucleotide
cagcacagcaacactgtgtctgggacatcacgcagtgtcaaatggaacagtagtgaagac

SEQ ID NO: 347393 - DNA, 60 bp, Artificial
  Synthetic oligonucleotide
cagcacagcaagctacgaagaatgtttcgaatgttctacacaagaaatacaaaggcttca

SEQ ID NO: 347394 - DNA, 60 bp, Artificial
  Synthetic oligonucleotide
cagcacagctggcctatagggtggtaacagagtgtgggttgtgtagccgtccagttaggc

SEQ ID NO: 347395 - DNA, 53 bp, Artificial
  Synthetic oligonucleotide
cagcacagggtctcctttattccatattggttgccacacatgactcagggtat

SEQ ID NO: 347396 - DNA, 60 bp, Artificial
  Synthetic oligonucleotide
cagcacaggttctgactttatagtgcgttattagagatcatggattgtaaaatagggtta

SEQ ID NO: 347397 - DNA, 60 bp, Artificial
  Synthetic oligonucleotide
cagcacataaaagtcagctggtatggatggcttgtcactctgcagcatttgaagatctga

SEQ ID NO: 347398 - DNA, 51 bp, Artificial
  Synthetic oligonucleotide
cagcacataaaggaatcggaggaaatgaacaggtagacaaattagtcagtt

SEQ ID NO: 347399 - DNA, 60 bp, Artificial
  Synthetic oligonucleotide
cagcacatacaacatgctcagttaacggagtgaacgactttagttacaatggcggtacat

SEQ ID NO: 347400 - DNA, 60 bp, Artificial
  Synthetic oligonucleotide
cagcacatccaagagttgaatgccttaacaaacgatgctgtttggcgagtgcggaatgta

SEQ ID NO: 347401 - DNA, 60 bp, Artificial
  Synthetic oligonucleotide
cagcacatctagcccgcaggctaactttatagtctcactgtgtggtaagaaaaccacctg

SEQ ID NO: 347402 - DNA, 60 bp, Artificial
  Synthetic oligonucleotide
cagcacatggtccagtaaagaaaatggactatgatgcggtgtctggaactcatagttgga

SEQ ID NO: 347403 - DNA, 55 bp, Artificial
  Synthetic oligonucleotide
cagcacattcaagcagcaactccaatcctacttgctggagttatgcctccatgga

SEQ ID NO: 347404 - DNA, 55 bp, Artificial
  Synthetic oligonucleotide
cagcaccaattgaggttggcgtggttgattgcgatgcatttgaggaagcagtgtg

SEQ ID NO: 347405 - DNA, 60 bp, Artificial
  Synthetic oligonucleotide
cagcaccatcatttggtcaattgcacaaccaagttcaaattgcagcctgtcagggctacc

SEQ ID NO: 347406 - DNA, 60 bp, Artificial
  Synthetic oligonucleotide
cagcaccatgcattctgaggagtaaagtaatatttcgtaggcctaaatgagttcgtcgac

SEQ ID NO: 347407 - DNA, 55 bp, Artificial
  Synthetic oligonucleotide
cagcaccatttatggtacttcttgaggattcaatacagaccaggtttgctccagg

SEQ ID NO: 347408 - DNA, 56 bp, Artificial
  Synthetic oligonucleotide
cagcaccgaattggtggactaacccgaacctaatcttgggtttcatggagatgtac

SEQ ID NO: 347409 - DNA, 55 bp, Artificial
  Synthetic oligonucleotide
cagcaccgatgcccaagaaggcacggtcggtggcaatgaaatcagtacagggagc

SEQ ID NO: 347410 - DNA, 53 bp, Artificial
  Synthetic oligonucleotide
cagcaccgcgaaacatcctggtcagctaccactacttcaagggctacgacctg

SEQ ID NO: 347411 - DNA, 55 bp, Artificial
  Synthetic oligonucleotide
cagcaccgggctcactccctgtctatctactactgtgcttaacttaaccactgat

SEQ ID NO: 347412 - DNA, 60 bp, Artificial
  Synthetic oligonucleotide
cagcacctgtaacggtaacgatctcagtcacaaaagctacatttggagacacatttgtgt

SEQ ID NO: 347413 - DNA, 60 bp, Artificial
  Synthetic oligonucleotide
cagcacgaagtgtcttatcgctgcagctcgtaaggtgccgcggcacgcagcagtggcacg

SEQ ID NO: 347414 - DNA, 56 bp, Artificial
  Synthetic oligonucleotide
cagcacgattgatggtatcccgcctttaatttgaaccggctttccatatttacagt

SEQ ID NO: 347415 - DNA, 55 bp, Artificial
  Synthetic oligonucleotide
cagcacgcacacacagtaccacggggacaggtctgaatcccacccgcagggattc

SEQ ID NO: 347416 - DNA, 55 bp, Artificial
  Synthetic oligonucleotide
cagcacgcctcaccgtgctacctgcatcgcgataaatcgtgttacgtcgcaacac

SEQ ID NO: 347417 - DNA, 55 bp, Artificial
  Synthetic oligonucleotide
cagcacggaactagggtcaccactagtgcttgatgactgctctctggagggtttg

SEQ ID NO: 347418 - DNA, 60 bp, Artificial
  Synthetic oligonucleotide
cagcacggatagtctgatggccaaataaggcaggcaagacagctatttgtaactgcgaaa

SEQ ID NO: 347419 - DNA, 55 bp, Artificial
  Synthetic oligonucleotide
cagcacgtacgtatcgtaaaacctgacggcagacaggtagccgcagttaacgaga

SEQ ID NO: 347420 - DNA, 60 bp, Artificial
  Synthetic oligonucleotide
cagcacgtactgcaactaactgcacaaacaagcagcggactgtgtgtagttctaacgttg

SEQ ID NO: 347421 - DNA, 55 bp, Artificial
  Synthetic oligonucleotide
cagcacgtggacttttcccctaccaaatttcagatcctcgcgtacggtgacgacg

SEQ ID NO: 347422 - DNA, 55 bp, Artificial
  Synthetic oligonucleotide
cagcacgtgggagggcgatcgcaatctggctcccgagaatgtgaatgaagatggc

SEQ ID NO: 347423 - DNA, 60 bp, Artificial
  Synthetic oligonucleotide
cagcacgttcaagtcacctgtttcgagccactgttctagacatatgtcgatcacgcaaaa

SEQ ID NO: 347424 - DNA, 60 bp, Artificial
  Synthetic oligonucleotide
cagcactagcactgtgggtagcactaccagcactagcactgtgggtagcactgccagcac

SEQ ID NO: 347425 - DNA, 60 bp, Artificial
  Synthetic oligonucleotide
cagcactcaacccccgagtgtagcttaggtcgatgagtctggacattcctcaccggtgac

SEQ ID NO: 347426 - DNA, 60 bp, Artificial
  Synthetic oligonucleotide
cagcactcaggcaagctattctatgttggggcgaattgatgaatctggccacctgggtgg

SEQ ID NO: 347427 - DNA, 59 bp, Artificial
  Synthetic oligonucleotide
cagcactccacgcaatctcgcggtatacccgccgtcattggatcgagtggggccctaaa

SEQ ID NO: 347428 - DNA, 60 bp, Artificial
  Synthetic oligonucleotide
cagcactcgcccggcactgtggtcatggacgactacactaaactgcctgccggatacatt

SEQ ID NO: 347429 - DNA, 60 bp, Artificial
  Synthetic oligonucleotide
cagcactcttgaactgagaagcagatattgggctataaggaccaggagtggagggaacac

SEQ ID NO: 347430 - DNA, 55 bp, Artificial
  Synthetic oligonucleotide
cagcactcttgaattgagaagtagatactgggccataagaaccagaagtggaggg

SEQ ID NO: 347431 - DNA, 60 bp, Artificial
  Synthetic oligonucleotide
cagcactgccccaaatgatggcatttgctggcataatcagctgtttgtcacttgtgcaga

SEQ ID NO: 347432 - DNA, 55 bp, Artificial
  Synthetic oligonucleotide
cagcactggccaggtgtcggtgcagattgactgggagatccagaaggagcggtcc

SEQ ID NO: 347433 - DNA, 60 bp, Artificial
  Synthetic oligonucleotide
cagcacttcatgccatgacggcatctcaagaatgtcaatctgcatgtcaggacctaataa

SEQ ID NO: 347434 - DNA, 60 bp, Artificial
  Synthetic oligonucleotide
cagcacttccaatgcagcgccagctttagatgcagctgagaccggacacaccagtaatgt

SEQ ID NO: 347435 - DNA, 55 bp, Artificial
  Synthetic oligonucleotide
cagcacttgcatgccactggtgtggaatattaacagaacagtgtgtagaaaacaa

SEQ ID NO: 347436 - DNA, 55 bp, Artificial
  Synthetic oligonucleotide
cagcagaaaccgtgtgcacaggagacaccgtcgacggacaagcaggacggaccga

SEQ ID NO: 347437 - DNA, 60 bp, Artificial
  Synthetic oligonucleotide
cagcagaacgtttcgtggagagcgatattggatcggcggcaatagatgggttgatacaag

SEQ ID NO: 347438 - DNA, 52 bp, Artificial
  Synthetic oligonucleotide
cagcagaatattctcggaggacatgggttacctaatgcagtacggtggagga

SEQ ID NO: 347439 - DNA, 54 bp, Artificial
  Synthetic oligonucleotide
cagcagacacgaggcctcttgggcgccatagtggtaagcatgacggggcgagac

SEQ ID NO: 347440 - DNA, 60 bp, Artificial
  Synthetic oligonucleotide
cagcagacagccaccttttcttatagataaatggacatacatgcagtatcacccatacat

SEQ ID NO: 347441 - DNA, 55 bp, Artificial
  Synthetic oligonucleotide
cagcagacccactagcatcactattagagatgtgccacagcacccagatcggtgg

SEQ ID NO: 347442 - DNA, 55 bp, Artificial
  Synthetic oligonucleotide
cagcagacccgtatgcttttgttaccacggaaaacgttattgccgtacgtgatgt

SEQ ID NO: 347443 - DNA, 60 bp, Artificial
  Synthetic oligonucleotide
cagcagaccttaaaagcactcaagccgccattgaccagatcaatggaaaactgaaccgag

SEQ ID NO: 347444 - DNA, 55 bp, Artificial
  Synthetic oligonucleotide
cagcagacggcgaagtttacataaggaatggtcagaggggtagtggccaacccga

SEQ ID NO: 347445 - DNA, 56 bp, Artificial
  Synthetic oligonucleotide
cagcagacgtaactgctagccgtcggataaccagggcatgacaggtgagtcgtgcg

SEQ ID NO: 347446 - DNA, 55 bp, Artificial
  Synthetic oligonucleotide
cagcagactcgaggtttgttaagcaccatcgtaacgagcctcaccggcagggaca

SEQ ID NO: 347447 - DNA, 55 bp, Artificial
  Synthetic oligonucleotide
cagcagagacaaggtaagtatcggaaaaaggtaagtgaagacattttgaatgggg

SEQ ID NO: 347448 - DNA, 60 bp, Artificial
  Synthetic oligonucleotide
cagcagagagcatctgcagggcaaatcagcgtacagcccaccttctctgtgcagagaaac

SEQ ID NO: 347449 - DNA, 55 bp, Artificial
  Synthetic oligonucleotide
cagcagagatagtactgaaccaactatgcgttaggttctttggactcgacctgga

SEQ ID NO: 347450 - DNA, 55 bp, Artificial
  Synthetic oligonucleotide
cagcagagcagacaaaactctatcaaaacccaaacacctatgtttccgttggaac

SEQ ID NO: 347451 - DNA, 55 bp, Artificial
  Synthetic oligonucleotide
cagcagagttccttcagttgctctcgaatgctcacttccggggaacagagttgtt

SEQ ID NO: 347452 - DNA, 58 bp, Artificial
  Synthetic oligonucleotide
cagcagatataatcatttccacgcccgtttcgaaggtacgccgccgtctcaacttcga

SEQ ID NO: 347453 - DNA, 55 bp, Artificial
  Synthetic oligonucleotide
cagcagatccaacaacgatcccacaaactgaaagaatgatgcgaataaactggaa

SEQ ID NO: 347454 - DNA, 60 bp, Artificial
  Synthetic oligonucleotide
cagcagatgcgtcggcttgcgatcgctttacagaaagaaatcggtgaaagaacacacgcg

SEQ ID NO: 347455 - DNA, 60 bp, Artificial
  Synthetic oligonucleotide
cagcagattacgctcagagatattatggcgctacttggaatcaagcttatgacattagtg

SEQ ID NO: 347456 - DNA, 60 bp, Artificial
  Synthetic oligonucleotide
cagcagattatggcattaaaggtagatccaggtagtgatggaccatggcaagccacatat

SEQ ID NO: 347457 - DNA, 60 bp, Artificial
  Synthetic oligonucleotide
cagcagattggtatactattggagtctatgtaataggttttacaattcctatcattttga

SEQ ID NO: 347458 - DNA, 60 bp, Artificial
  Synthetic oligonucleotide
cagcagcaaaacaacatgctgagagctatagcagctcagcaagaattgctgagactctct

SEQ ID NO: 347459 - DNA, 55 bp, Artificial
  Synthetic oligonucleotide
cagcagcacaaagagcaatgatggaccaagtgcgggagagccgaaatcctgggaa

SEQ ID NO: 347460 - DNA, 55 bp, Artificial
  Synthetic oligonucleotide
cagcagcaggaattaatgtcggaccaatctcacctgactatacgcaacatatggc

SEQ ID NO: 347461 - DNA, 60 bp, Artificial
  Synthetic oligonucleotide
cagcagcagtctcaagtgcttgtgaatattctagttggcgtgactgtcttttgccagatt

SEQ ID NO: 347462 - DNA, 59 bp, Artificial
  Synthetic oligonucleotide
cagcagcatattcagtaattaagggggcttataacaacacaggaaaccagccaatcctc

SEQ ID NO: 347463 - DNA, 58 bp, Artificial
  Synthetic oligonucleotide
cagcagccaacccaatgcttgtcattttccaatcttttggatcccgattgtttgatca

SEQ ID NO: 347464 - DNA, 53 bp, Artificial
  Synthetic oligonucleotide
cagcagcccgcaacaccctggggtttacgaacctcttttcacctgggccggcc

SEQ ID NO: 347465 - DNA, 59 bp, Artificial
  Synthetic oligonucleotide
cagcagccgtttactacagaatctaaatatatcttaagttagaactgtatgatgtgacc

SEQ ID NO: 347466 - DNA, 60 bp, Artificial
  Synthetic oligonucleotide
cagcagcgaccaacagcgactgtggcccttgcggtttcgtacagattaatgcaaatcaag

SEQ ID NO: 347467 - DNA, 59 bp, Artificial
  Synthetic oligonucleotide
cagcagcgggatttgcggagtatcaaaggttcgtaggaaaatcatgcgacttctacgtc

SEQ ID NO: 347468 - DNA, 60 bp, Artificial
  Synthetic oligonucleotide
cagcagctaataatcctgacttggcctggctggaagcacaggagggtgaggaagtaggct

SEQ ID NO: 347469 - DNA, 55 bp, Artificial
  Synthetic oligonucleotide
cagcagctactactggccttggaaggcaggagtgacaccagtcaccttcccatct

SEQ ID NO: 347470 - DNA, 55 bp, Artificial
  Synthetic oligonucleotide
cagcagctccaatcgacacattactggctggtaaagtttgtgttgacgacttcaa

SEQ ID NO: 347471 - DNA, 55 bp, Artificial
  Synthetic oligonucleotide
cagcagctgggataaatgtagcaaaggagtcagaagagtgcaacaggaatatctc

SEQ ID NO: 347472 - DNA, 55 bp, Artificial
  Synthetic oligonucleotide
cagcagctggttagcaacgggatctttgaacgtgttacaatgagctgtgcagggg

SEQ ID NO: 347473 - DNA, 55 bp, Artificial
  Synthetic oligonucleotide
cagcagcttcaaacttgcaaggccgtgggagtttcactggtcggtgtctacctct

SEQ ID NO: 347474 - DNA, 55 bp, Artificial
  Synthetic oligonucleotide
cagcagctttgttcagtgccacaggtacgactctgaggtaccaccggcagtgacc

SEQ ID NO: 347475 - DNA, 60 bp, Artificial
  Synthetic oligonucleotide
cagcaggaagcactatgggcgcagcgtcagtaacgctgacggtacaggccagacaattat

SEQ ID NO: 347476 - DNA, 55 bp, Artificial
  Synthetic oligonucleotide
cagcaggacaaagggattgccatcccacatgatattgatctcggtgagtcccgag

SEQ ID NO: 347477 - DNA, 60 bp, Artificial
  Synthetic oligonucleotide
cagcaggagatgtcaatcgtaatatgcacaccatgcttggtgtgcgtatttagagtatcc

SEQ ID NO: 347478 - DNA, 55 bp, Artificial
  Synthetic oligonucleotide
cagcaggaggatgtcaacaaataatggaacagttacaatcagctctcgggacagg

SEQ ID NO: 347479 - DNA, 55 bp, Artificial
  Synthetic oligonucleotide
cagcaggcacttctttaaccgtgcaggtgttcagggtgagactgtgccggagtca

SEQ ID NO: 347480 - DNA, 60 bp, Artificial
  Synthetic oligonucleotide
cagcaggcattgatccaaattgattaatcaatagtgaactatccttgatgtcccaaacct

SEQ ID NO: 347481 - DNA, 55 bp, Artificial
  Synthetic oligonucleotide
cagcaggccgattactgtgacaaggtctcagctgtgctccgacgcttgagcctca

SEQ ID NO: 347482 - DNA, 60 bp, Artificial
  Synthetic oligonucleotide
cagcaggccttgcaggggtctgttgcatcgcctacacgaagcgggggagtttgcgggatg

SEQ ID NO: 347483 - DNA, 55 bp, Artificial
  Synthetic oligonucleotide
cagcaggcctttgaatgggccaagactgctctaagtggctcagaacttgcacgtg

SEQ ID NO: 347484 - DNA, 55 bp, Artificial
  Synthetic oligonucleotide
cagcaggctgtagtgattatgggtgatttgtgtcaggattccaggtggcaaggac

SEQ ID NO: 347485 - DNA, 60 bp, Artificial
  Synthetic oligonucleotide
cagcagggattaatgtgggaccaatttcgccggattatgtgcaacatatggcaacaatcg

SEQ ID NO: 347486 - DNA, 54 bp, Artificial
  Synthetic oligonucleotide
cagcaggtagaatcgggattggggacgggacaaagtttaaattctagcgcgcgg

SEQ ID NO: 347487 - DNA, 55 bp, Artificial
  Synthetic oligonucleotide
cagcaggtcataagtgggaacaaggctcaatcgctactccttggatgccatcagc

SEQ ID NO: 347488 - DNA, 60 bp, Artificial
  Synthetic oligonucleotide
cagcaggttatattagggtaagcagactaggaactcgaggcaccattcgcactcgttctg

SEQ ID NO: 347489 - DNA, 55 bp, Artificial
  Synthetic oligonucleotide
cagcagtaaagaacagtctgatcggtatcgttactacccagaaaggcacacgtcc

SEQ ID NO: 347490 - DNA, 55 bp, Artificial
  Synthetic oligonucleotide
cagcagtaacgtggcagcaagcatgtggcaataactctcgttgcccaacacccca

SEQ ID NO: 347491 - DNA, 54 bp, Artificial
  Synthetic oligonucleotide
cagcagtaatgtttactctagaagctccctggcaagatcttaggttagcctttg

SEQ ID NO: 347492 - DNA, 60 bp, Artificial
  Synthetic oligonucleotide
cagcagtagaatgcttagatctactagatcgattatatgcagtcagacatgatgttgtgg

SEQ ID NO: 347493 - DNA, 60 bp, Artificial
  Synthetic oligonucleotide
cagcagtaggagacggatttgaccacttgacaccggatgtgatgatcagaatgccttcag

SEQ ID NO: 347494 - DNA, 55 bp, Artificial
  Synthetic oligonucleotide
cagcagtcaaaaccctcattgactgtcttttatatgctgaagggtagccaaatga

SEQ ID NO: 347495 - DNA, 55 bp, Artificial
  Synthetic oligonucleotide
cagcagtcccgattgggacttcaacacagacaaggacaattggccaatggcaaac

SEQ ID NO: 347496 - DNA, 55 bp, Artificial
  Synthetic oligonucleotide
cagcagtcctgaggcaatgccagaccatgagacacatctttgcaggatcgggcca

SEQ ID NO: 347497 - DNA, 58 bp, Artificial
  Synthetic oligonucleotide
cagcagtgatttggtacaaagggaggcctatcacagaaatcaatacgtgggcccgaaa

SEQ ID NO: 347498 - DNA, 60 bp, Artificial
  Synthetic oligonucleotide
cagcagtgcctgtcgattgggttcctactggccgtacgacatggagcatccatgccagtg

SEQ ID NO: 347499 - DNA, 58 bp, Artificial
  Synthetic oligonucleotide
cagcagtgtcattgttatttaaacgtgtatgggccaaattatacccagagttagagtg

SEQ ID NO: 347500 - DNA, 60 bp, Artificial
  Synthetic oligonucleotide
cagcagtgttcgagtgctttaattcaaatgaggccaatcattgtcaaagatatcctatgt

SEQ ID NO: 347501 - DNA, 55 bp, Artificial
  Synthetic oligonucleotide
cagcagttaactcgtttgcttattcttactgtaatgttccagtggagagttggga

SEQ ID NO: 347502 - DNA, 60 bp, Artificial
  Synthetic oligonucleotide
cagcagttatcgctgtcgaaccacatgtcagtcaaacaaataggcaatatgttttatttg

SEQ ID NO: 347503 - DNA, 60 bp, Artificial
  Synthetic oligonucleotide
cagcagttcatacagaaggccagttggaatttccagtatggtggaggccatggtttctag

SEQ ID NO: 347504 - DNA, 55 bp, Artificial
  Synthetic oligonucleotide
cagcagttcgactcaaacagatcaaaagtcgagtatgtagagaacctccttggtt

SEQ ID NO: 347505 - DNA, 54 bp, Artificial
  Synthetic oligonucleotide
cagcagttctcagacgtccgaggtttattgtgtgatgaggaggctccgacaaag

SEQ ID NO: 347506 - DNA, 51 bp, Artificial
  Synthetic oligonucleotide
cagcagttgcaaatggagaggctacagagcaacagcgcccaagcaagtttt

SEQ ID NO: 347507 - DNA, 60 bp, Artificial
  Synthetic oligonucleotide
cagcagtttgagctgatagacaatgagttcaatgagatagaacaacaaataggaaatgtc

SEQ ID NO: 347508 - DNA, 56 bp, Artificial
  Synthetic oligonucleotide
cagcataaattagtactctcacaaaaagactgtaacccgagcagaaaacagaaacc

SEQ ID NO: 347509 - DNA, 52 bp, Artificial
  Synthetic oligonucleotide
cagcataccacaaggtgttatgtatacacctcaccctgaacctataattctc

SEQ ID NO: 347510 - DNA, 59 bp, Artificial
  Synthetic oligonucleotide
cagcatacccgaaattccaagcctatgatagtgaagccgagtatttggaagattgtggg

SEQ ID NO: 347511 - DNA, 53 bp, Artificial
  Synthetic oligonucleotide
cagcatacttccaaggactgggtgatgacctctctaaggtgataacgagtgtt

SEQ ID NO: 347512 - DNA, 50 bp, Artificial
  Synthetic oligonucleotide
cagcatagatatgctcacccaacaagccggggtcctcaccggactcaata

SEQ ID NO: 347513 - DNA, 52 bp, Artificial
  Synthetic oligonucleotide
cagcatagggaaaatgttcgaagcaaccgctcgaggagcacgaaggatggct

SEQ ID NO: 347514 - DNA, 60 bp, Artificial
  Synthetic oligonucleotide
cagcatatccttttgtggtgtagatagtgacactgtgggttggtcttggccagacggtgc

SEQ ID NO: 347515 - DNA, 60 bp, Artificial
  Synthetic oligonucleotide
cagcatatctatgaaacttatggggacacttggccaggagtggaagcccataataagaac

SEQ ID NO: 347516 - DNA, 55 bp, Artificial
  Synthetic oligonucleotide
cagcatatctcataaaatcaaagatacccattctgctcaatttggtgacagttcc

SEQ ID NO: 347517 - DNA, 60 bp, Artificial
  Synthetic oligonucleotide
cagcatatgacctggaactcataacatcgtgctcctccaatgtttccgtcgcacacgacg

SEQ ID NO: 347518 - DNA, 60 bp, Artificial
  Synthetic oligonucleotide
cagcatatgcaaattcgtcacagcaagagacatttttaacttcaacgttgtgtttatatt

SEQ ID NO: 347519 - DNA, 57 bp, Artificial
  Synthetic oligonucleotide
cagcatatttgatcagcatcttcttacatcttataaagataccaacacacagacacg

SEQ ID NO: 347520 - DNA, 60 bp, Artificial
  Synthetic oligonucleotide
cagcatcaacgggcgagcccgtatgcgccccacaaggccgtgtcgccgacttgcgataag

SEQ ID NO: 347521 - DNA, 60 bp, Artificial
  Synthetic oligonucleotide
cagcatccagaactaacagggctggattgtataagaccttgcttctgggttgaactaatc

SEQ ID NO: 347522 - DNA, 60 bp, Artificial
  Synthetic oligonucleotide
cagcatccagggaagcagtagtcagctatgtcaacgttaatatgggcctaaaagtcagac

SEQ ID NO: 347523 - DNA, 55 bp, Artificial
  Synthetic oligonucleotide
cagcatcccttattgcaattacacaaagttttggtatgtcaaccacactggactt

SEQ ID NO: 347524 - DNA, 55 bp, Artificial
  Synthetic oligonucleotide
cagcatcgagcatataacctatataaaccgatgcacttccgcatttcgtcagact

SEQ ID NO: 347525 - DNA, 55 bp, Artificial
  Synthetic oligonucleotide
cagcatcgcgcaggacattaagcacgcaatcatggaaagcgggctggcacgcaaa

SEQ ID NO: 347526 - DNA, 55 bp, Artificial
  Synthetic oligonucleotide
cagcatcggagaggtgcaaaataacttctctaaaatactaggcgaacgactgttg

SEQ ID NO: 347527 - DNA, 60 bp, Artificial
  Synthetic oligonucleotide
cagcatcgtttgtgagcgcgtactcaacgcgctcagattggatgtacccacccactccaa

SEQ ID NO: 347528 - DNA, 55 bp, Artificial
  Synthetic oligonucleotide
cagcatctcaagacttagataaacatggggcacttacacccagcaacacagccgg

SEQ ID NO: 347529 - DNA, 60 bp, Artificial
  Synthetic oligonucleotide
cagcatctcacaagccctgaccaccctaggcgcgtctgccaccaacctcactccactatc

SEQ ID NO: 347530 - DNA, 54 bp, Artificial
  Synthetic oligonucleotide
cagcatctcgctaggacggacaagtggactaaccaagttcgcgctactgatcta

SEQ ID NO: 347531 - DNA, 56 bp, Artificial
  Synthetic oligonucleotide
cagcatctgacacgaataacggtcgagtgtggtggtctaacccttacccgtgttta

SEQ ID NO: 347532 - DNA, 52 bp, Artificial
  Synthetic oligonucleotide
cagcatgaggatactgtacgtgtgcaacggagatgatttgcttatcaatgcc

SEQ ID NO: 347533 - DNA, 60 bp, Artificial
  Synthetic oligonucleotide
cagcatgataactcattctcaacataagggtttccgctagattctttataaataacatca

SEQ ID NO: 347534 - DNA, 56 bp, Artificial
  Synthetic oligonucleotide
cagcatgatcgcttaggggaattcagttttgtgggaaaggtccagtggaaagtctt

SEQ ID NO: 347535 - DNA, 55 bp, Artificial
  Synthetic oligonucleotide
cagcatgatttatttgaacacgatccggcaattcgccagttaatcggacatattg

SEQ ID NO: 347536 - DNA, 60 bp, Artificial
  Synthetic oligonucleotide
cagcatgctgcaaggaccctctaataatatacctccaggtaagtatagaaggttaagata

SEQ ID NO: 347537 - DNA, 55 bp, Artificial
  Synthetic oligonucleotide
cagcatgctgcgagagcaaaacgtagattccgtgggacgcgcgaatacgtaaatg

SEQ ID NO: 347538 - DNA, 51 bp, Artificial
  Synthetic oligonucleotide
cagcatggagccatgacccgcagcccatcatagctacgggatggggagatg

SEQ ID NO: 347539 - DNA, 55 bp, Artificial
  Synthetic oligonucleotide
cagcatggctaagataaaccttcccctactgaatgaggacataacctgtgacaca

SEQ ID NO: 347540 - DNA, 60 bp, Artificial
  Synthetic oligonucleotide
cagcatgggagggataggggcggtccggggagtggctaaccctcagatgctgcatataag

SEQ ID NO: 347541 - DNA, 60 bp, Artificial
  Synthetic oligonucleotide
cagcatggttgaggatattgagtcaccatcatcgatatgggtttttgccggagcaccaga

SEQ ID NO: 347542 - DNA, 60 bp, Artificial
  Synthetic oligonucleotide
cagcatgtagctatatcaagctactcagactctataagtaagggtgtgatttcacattca

SEQ ID NO: 347543 - DNA, 60 bp, Artificial
  Synthetic oligonucleotide
cagcatgtattgggctccaaggacggtggaacgcctcactcatacaacgcgatctcatga

SEQ ID NO: 347544 - DNA, 60 bp, Artificial
  Synthetic oligonucleotide
cagcatgtccacgctcggggtgtggactagacacactagcaagagattactacaagattg

SEQ ID NO: 347545 - DNA, 60 bp, Artificial
  Synthetic oligonucleotide
cagcatgtgcttaccagtggttctatgatggatatccaacttttggcagtcaccccgctt

SEQ ID NO: 347546 - DNA, 53 bp, Artificial
  Synthetic oligonucleotide
cagcattaataacaccaaaaaagacaaagccgcctttgcctagtgttaggaag

SEQ ID NO: 347547 - DNA, 57 bp, Artificial
  Synthetic oligonucleotide
cagcattaataactccaaaaaggaaaaagccacctctgcctagtgttgcgaaactga

SEQ ID NO: 347548 - DNA, 60 bp, Artificial
  Synthetic oligonucleotide
cagcattaatagaaccaagaaagattaagccacctctgcctagtgtcacgaaactgacag

SEQ ID NO: 347549 - DNA, 57 bp, Artificial
  Synthetic oligonucleotide
cagcattatgaacatgacggtaagaacgtgcctaaggagatcaagaccggggaacgc

SEQ ID NO: 347550 - DNA, 59 bp, Artificial
  Synthetic oligonucleotide
cagcattatgcggcggtttatcggactcgctcgtttataccctcccaataacacatcca

SEQ ID NO: 347551 - DNA, 55 bp, Artificial
  Synthetic oligonucleotide
cagcattcaagatcaaccaactttagggactacgtctctctaagtgctaacccgg

SEQ ID NO: 347552 - DNA, 59 bp, Artificial
  Synthetic oligonucleotide
cagcattcatttgcgtgaggatactcaatacgttaagaattgaagtaatagggtcggaa

SEQ ID NO: 347553 - DNA, 60 bp, Artificial
  Synthetic oligonucleotide
cagcattgagtggggatgccaaactgcaaacccgacttctgtgcgctgaatatggcacag

SEQ ID NO: 347554 - DNA, 53 bp, Artificial
  Synthetic oligonucleotide
cagcattgcactaaatttgacaatagacttagagtggctaaggcagggcagac

SEQ ID NO: 347555 - DNA, 60 bp, Artificial
  Synthetic oligonucleotide
cagcattgccggatggctccttgggaatccagaatgtgatatacttctaactgtgccaga

SEQ ID NO: 347556 - DNA, 57 bp, Artificial
  Synthetic oligonucleotide
cagcattgcggggtggctccttggaaatccggaatgtgaccggctcttaaatgtacc

SEQ ID NO: 347557 - DNA, 50 bp, Artificial
  Synthetic oligonucleotide
cagcattgcgtcgtagtcgtatgagatctgcagtcgcaggttcatccatc

SEQ ID NO: 347558 - DNA, 55 bp, Artificial
  Synthetic oligonucleotide
cagcattgctgctgttagtggcacactatgccatcataggtcccggactccaagc

SEQ ID NO: 347559 - DNA, 52 bp, Artificial
  Synthetic oligonucleotide
cagcattgtcagccccttggtgtcttcactataaggcactagaatcttacct

SEQ ID NO: 347560 - DNA, 57 bp, Artificial
  Synthetic oligonucleotide
cagcatttaattcttgcaaggacaaattctctaaatatcacatagcttgtgagaaca

SEQ ID NO: 347561 - DNA, 55 bp, Artificial
  Synthetic oligonucleotide
cagcatttcatggactaccctatggagcatgataataaatcgtatcggtgtcctc

SEQ ID NO: 347562 - DNA, 55 bp, Artificial
  Synthetic oligonucleotide
cagccaaaccatgacctcaggaaggaaagtgcatgactcacaggggaatgcagcc

SEQ ID NO: 347563 - DNA, 55 bp, Artificial
  Synthetic oligonucleotide
cagccaacaaggtaggagagattctacagcaacatggggaatggacaggggcgag

SEQ ID NO: 347564 - DNA, 60 bp, Artificial
  Synthetic oligonucleotide
cagccaacgattgttttaagactttgattgcggcaatgttgagtcaacgcactatgtcac

SEQ ID NO: 347565 - DNA, 55 bp, Artificial
  Synthetic oligonucleotide
cagccaacgtagaaaactttggtacaggtgtagccccttggacggaagcctatgc

SEQ ID NO: 347566 - DNA, 60 bp, Artificial
  Synthetic oligonucleotide
cagccaactcgccacaatatcacttcctacactctctcactcaatctatgacatagcaaa

SEQ ID NO: 347567 - DNA, 55 bp, Artificial
  Synthetic oligonucleotide
cagccaacttcccctgccgatcaaaaataccgggctatcttgaagctccctaccc

SEQ ID NO: 347568 - DNA, 58 bp, Artificial
  Synthetic oligonucleotide
cagccaagaaaaatagctaaatttcgctttgtcaggaagcctttagatatcaatgact

SEQ ID NO: 347569 - DNA, 55 bp, Artificial
  Synthetic oligonucleotide
cagccaagcaattgtgagtttctacaagaagagcagtgatcataagccttcaagg

SEQ ID NO: 347570 - DNA, 54 bp, Artificial
  Synthetic oligonucleotide
cagccaagtgtcccttggactacatttctctaagggcggctcttccatgaccct

SEQ ID NO: 347571 - DNA, 55 bp, Artificial
  Synthetic oligonucleotide
cagccaagtgttcagtctaatccgaccaaatgaaaatccagcacacaagagccaa

SEQ ID NO: 347572 - DNA, 55 bp, Artificial
  Synthetic oligonucleotide
cagccaatgattaccaattctcatcacagtaccaagcaggtggagtgacaatcac

SEQ ID NO: 347573 - DNA, 55 bp, Artificial
  Synthetic oligonucleotide
cagccacaaatccgaataatgctaaagattttcacgaaataacgggaaggttctc

SEQ ID NO: 347574 - DNA, 55 bp, Artificial
  Synthetic oligonucleotide
cagccacaccaccaggacgtgaaaccgaattttccacacagtatcctgttcagct

SEQ ID NO: 347575 - DNA, 60 bp, Artificial
  Synthetic oligonucleotide
cagccacagacgatgacgcaataatagaatacatttactcagatgaattagacttccaga

SEQ ID NO: 347576 - DNA, 60 bp, Artificial
  Synthetic oligonucleotide
cagccacaggtcctggtgacatgaggcgttcgctaatgcatgagaagaaacaggtgttcg

SEQ ID NO: 347577 - DNA, 60 bp, Artificial
  Synthetic oligonucleotide
cagccacatacgatagaggcaggattagagcgctagagctatgcaatatcctttccacga

SEQ ID NO: 347578 - DNA, 50 bp, Artificial
  Synthetic oligonucleotide
cagccaccatggtgaagctaacattgttaacactcatggaagacaaggca

SEQ ID NO: 347579 - DNA, 55 bp, Artificial
  Synthetic oligonucleotide
cagccacccttcctgagtttgtttctcatttaccaagacttgtctataaggatag

SEQ ID NO: 347580 - DNA, 55 bp, Artificial
  Synthetic oligonucleotide
cagccaccgcccctagagacgtcatacacccctgggatgtggatgcttccggaac

SEQ ID NO: 347581 - DNA, 55 bp, Artificial
  Synthetic oligonucleotide
cagccaccgctattcacactgcagcactacctggtactggacaggtcagggtgca

SEQ ID NO: 347582 - DNA, 60 bp, Artificial
  Synthetic oligonucleotide
cagccacgcagtccttccttgccacagctgttaatggggtcctctggacggtctaccatg

SEQ ID NO: 347583 - DNA, 60 bp, Artificial
  Synthetic oligonucleotide
cagccacgcggctgactacaaaaaatatgaccccttcggaggtggctacagcaccatgca

SEQ ID NO: 347584 - DNA, 55 bp, Artificial
  Synthetic oligonucleotide
cagccacgttgcctgcccaagttgcctgcgtgcatcaagggatgtgagctcggct

SEQ ID NO: 347585 - DNA, 55 bp, Artificial
  Synthetic oligonucleotide
cagccactatactagccaagatggcaactaggttggattccagcggggagagggg

SEQ ID NO: 347586 - DNA, 55 bp, Artificial
  Synthetic oligonucleotide
cagccactgataaagtgctcgctgccgaaagatactatactttcaaaatagccac

SEQ ID NO: 347587 - DNA, 60 bp, Artificial
  Synthetic oligonucleotide
cagccacttcattagcctgttttgttctcagagatggatttatggtctttgagaactcaa

SEQ ID NO: 347588 - DNA, 60 bp, Artificial
  Synthetic oligonucleotide
cagccagaagtcgccacccgcattagtttcttggcttcgcagccactcggtcatggttgc

SEQ ID NO: 347589 - DNA, 60 bp, Artificial
  Synthetic oligonucleotide
cagccagatctctgttctggtgtcctatagacgtccttgtcgtgtgtagtgcggtctggc

SEQ ID NO: 347590 - DNA, 60 bp, Artificial
  Synthetic oligonucleotide
cagccagcccacgataatttgatgggaacaatgtggttaaatgcagggtcagagatacag

SEQ ID NO: 347591 - DNA, 57 bp, Artificial
  Synthetic oligonucleotide
cagccaggaagggaaaccttgtgctattgggcccggctgacgatatgcggacaggcg

SEQ ID NO: 347592 - DNA, 54 bp, Artificial
  Synthetic oligonucleotide
cagccagggacgtgttgtatcctaggcagtggcccacccataggtcacaatgtc

SEQ ID NO: 347593 - DNA, 60 bp, Artificial
  Synthetic oligonucleotide
cagccagggtaccacactaaggggtcgacatgcaaatgggactatacatgacagaagccc

SEQ ID NO: 347594 - DNA, 55 bp, Artificial
  Synthetic oligonucleotide
cagccagtatggcatcctgagtttcaggcgggagagttgtgtccacaagcccggc

SEQ ID NO: 347595 - DNA, 57 bp, Artificial
  Synthetic oligonucleotide
cagccagtcacgcatcggtcaagcacttctgtttccccggtccttacggatcgttac

SEQ ID NO: 347596 - DNA, 60 bp, Artificial
  Synthetic oligonucleotide
cagccagtgcacataagccaatgtgtatctggtcgtaatgagtaattgcgggatgggacc

SEQ ID NO: 347597 - DNA, 60 bp, Artificial
  Synthetic oligonucleotide
cagccagtggcttgcaaaagacaccaatgctggcgatcaagcattaaaaacccacacaca

SEQ ID NO: 347598 - DNA, 55 bp, Artificial
  Synthetic oligonucleotide
cagccataaagacccagaattatagtgcattacctgaagctgtgtttgagctaga

SEQ ID NO: 347599 - DNA, 55 bp, Artificial
  Synthetic oligonucleotide
cagccatactagccatggagagtttagtttcagactgccgggccatctatgtcga

SEQ ID NO: 347600 - DNA, 60 bp, Artificial
  Synthetic oligonucleotide
cagccatatccctccggggattcatgttgtgcagaaccaccagcacagtgtatccggtgc

SEQ ID NO: 347601 - DNA, 58 bp, Artificial
  Synthetic oligonucleotide
cagccatattggtattcagtaataatctcggcggtgaggccctgttaaaggaggctag

SEQ ID NO: 347602 - DNA, 55 bp, Artificial
  Synthetic oligonucleotide
cagccatcgtagagagcactactaattccattagtcccgccgctgcactacttaa

SEQ ID NO: 347603 - DNA, 60 bp, Artificial
  Synthetic oligonucleotide
cagccatctggttaaactggtatgcagtggcgagttagaagctccagtaggaggagggac

SEQ ID NO: 347604 - DNA, 56 bp, Artificial
  Synthetic oligonucleotide
cagccatctgttggtggggaaagatagagcactcatttggggtaccctacaacccc

SEQ ID NO: 347605 - DNA, 56 bp, Artificial
  Synthetic oligonucleotide
cagccatcttggccgtgacgtcaacgtcacgtggggaggacggcgtgtaacccgga

SEQ ID NO: 347606 - DNA, 59 bp, Artificial
  Synthetic oligonucleotide
cagccatggtcatcattattagaaatagttctgatccacaaacaataatagccacattg

SEQ ID NO: 347607 - DNA, 55 bp, Artificial
  Synthetic oligonucleotide
cagccatggttacgtcatcgtccaagtgcatcgtcttccagatctgctactgaac

SEQ ID NO: 347608 - DNA, 55 bp, Artificial
  Synthetic oligonucleotide
cagccatggttatagtaatcagaaattcggacgatttggttacagtgactgccac

SEQ ID NO: 347609 - DNA, 57 bp, Artificial
  Synthetic oligonucleotide
cagccatgtgtaaagttaactcctctctgcgttactttaaattgtaccaatgctacg

SEQ ID NO: 347610 - DNA, 57 bp, Artificial
  Synthetic oligonucleotide
cagccatgtgtaaagttaactcctctctgtgttactttacattgtaccaaggctagt

SEQ ID NO: 347611 - DNA, 60 bp, Artificial
  Synthetic oligonucleotide
cagccattcgatggttgaaaatcaatcagatcgcttcccctcacctcaacctgtctgtca

SEQ ID NO: 347612 - DNA, 51 bp, Artificial
  Synthetic oligonucleotide
cagccattgatataaatgctgaaggggtttgtgcaggatgtattaattgct

SEQ ID NO: 347613 - DNA, 55 bp, Artificial
  Synthetic oligonucleotide
cagccattggatgaagaaggaacggctaagggaggcacggcagatttgggagctc

SEQ ID NO: 347614 - DNA, 50 bp, Artificial
  Synthetic oligonucleotide
cagccattgttgcaataacaagatcaaaggtcggctttgactttatcctt

SEQ ID NO: 347615 - DNA, 55 bp, Artificial
  Synthetic oligonucleotide
cagccatttgaacatcatgccacagtaggacttacactgagaattgaatctgcgg

SEQ ID NO: 347616 - DNA, 55 bp, Artificial
  Synthetic oligonucleotide
cagccatttgtgcctgagtcttattaattgcctttctttggttggctagcctttc

SEQ ID NO: 347617 - DNA, 51 bp, Artificial
  Synthetic oligonucleotide
cagcccaacaaagatgaagatcggagttaaggtagtagattttctaggaag

SEQ ID NO: 347618 - DNA, 55 bp, Artificial
  Synthetic oligonucleotide
cagcccaattcatcttggtgactgcagctttgagggatggattgtaggaaaccca

SEQ ID NO: 347619 - DNA, 56 bp, Artificial
  Synthetic oligonucleotide
cagcccacaacttggcctacttgaacacccgtgaaaacacgcttagcgaggcgaaa

SEQ ID NO: 347620 - DNA, 55 bp, Artificial
  Synthetic oligonucleotide
cagcccaccacatttaacctgccaatcgactattggatgctgattgcgcctactc

SEQ ID NO: 347621 - DNA, 60 bp, Artificial
  Synthetic oligonucleotide
cagcccacgtttgtgccctacacaaggacatctacatctataagaatgccataggcactc

SEQ ID NO: 347622 - DNA, 55 bp, Artificial
  Synthetic oligonucleotide
cagcccagcagctaaagtggtcttaccactatctataggtcccttaaacaaccag

SEQ ID NO: 347623 - DNA, 57 bp, Artificial
  Synthetic oligonucleotide
cagcccagtacgccatctcggcgggactagccaactacgtctcccggttcgctcagt

SEQ ID NO: 347624 - DNA, 55 bp, Artificial
  Synthetic oligonucleotide
cagcccatacatggggcgtgctgctgtccccactgtccgcgtcaccagaaagcaa

SEQ ID NO: 347625 - DNA, 55 bp, Artificial
  Synthetic oligonucleotide
cagcccatgagcatcagcaatagtggctccagctccattcggaaggtccagatca

SEQ ID NO: 347626 - DNA, 54 bp, Artificial
  Synthetic oligonucleotide
cagcccatggagcccggccgtaccccgtctcggcaagtggccggtacggtcgtc

SEQ ID NO: 347627 - DNA, 55 bp, Artificial
  Synthetic oligonucleotide
cagccccaaggaaatgaaagcaatgttgcgagctcctcaatctttgacgatctgg

SEQ ID NO: 347628 - DNA, 55 bp, Artificial
  Synthetic oligonucleotide
cagccccaaggcggctggccgctacgaccgagaagttggagataggatggaaagc

SEQ ID NO: 347629 - DNA, 58 bp, Artificial
  Synthetic oligonucleotide
cagcccccagatgtggccagtttcctggccaacctcaccccagagtgtgtcctacagg

SEQ ID NO: 347630 - DNA, 55 bp, Artificial
  Synthetic oligonucleotide
cagccccgcttaggattgtatagcaaggctaatcaacaggttagggttactaacc

SEQ ID NO: 347631 - DNA, 60 bp, Artificial
  Synthetic oligonucleotide
cagccccggcagcttgtcttccgacctgaggttctgtggaatcacccaatccagcgcgta

SEQ ID NO: 347632 - DNA, 55 bp, Artificial
  Synthetic oligonucleotide
cagccccgtcaaatcctgctgcctgttggcactgtctgcaccagggttgactcgg

SEQ ID NO: 347633 - DNA, 55 bp, Artificial
  Synthetic oligonucleotide
cagccccgtggtagtggggacgacggacagagccggcgttcctacctacagatgg

SEQ ID NO: 347634 - DNA, 55 bp, Artificial
  Synthetic oligonucleotide
cagcccctggcgcattcattagctcaaacttgggctaactttaggggtacccagg

SEQ ID NO: 347635 - DNA, 55 bp, Artificial
  Synthetic oligonucleotide
cagcccgaagtaccggcctggcactaatgagtcttacgttaaggagaactcgcag

SEQ ID NO: 347636 - DNA, 54 bp, Artificial
  Synthetic oligonucleotide
cagcccgctcaagatgacctactgctgcgcccgtgactgtgtgtgcctggtcct

SEQ ID NO: 347637 - DNA, 60 bp, Artificial
  Synthetic oligonucleotide
cagcccgggaagcaccgatcattgaggcggagtcccctggatccagcatacttgtgctga

SEQ ID NO: 347638 - DNA, 55 bp, Artificial
  Synthetic oligonucleotide
cagcccggggaattgctcctggacacaggtaggaggataggggcagtgccaattg

SEQ ID NO: 347639 - DNA, 60 bp, Artificial
  Synthetic oligonucleotide
cagcccggtcagccaaaattaccctatagtgcagaatcttcaggggcaaatggtacatca

SEQ ID NO: 347640 - DNA, 55 bp, Artificial
  Synthetic oligonucleotide
cagcccgtgacgcttctacgatttataccgcggtagactctcacggtagggcacc

SEQ ID NO: 347641 - DNA, 55 bp, Artificial
  Synthetic oligonucleotide
cagcccgtgtaattgaggctgaaaactttgatggtgtgaaattgcaagctgctgc

SEQ ID NO: 347642 - DNA, 54 bp, Artificial
  Synthetic oligonucleotide
cagccctaggagggggtttggtatggcttattcgaagcagtcgtgggagaacgt

SEQ ID NO: 347643 - DNA, 59 bp, Artificial
  Synthetic oligonucleotide
cagccctagtcgtctggccaagttcctcagggaaaacggctacaagattctgcagccac

SEQ ID NO: 347644 - DNA, 59 bp, Artificial
  Synthetic oligonucleotide
cagccctagtggtatcgcagttactccggatcccacaagccgtcgtggacatggtagcg

SEQ ID NO: 347645 - DNA, 60 bp, Artificial
  Synthetic oligonucleotide
cagccctcccttatgcacaactaatggagctggttcagtgcaagggcccaccaatacaaa

SEQ ID NO: 347646 - DNA, 55 bp, Artificial
  Synthetic oligonucleotide
cagccctcgttgaggaataccaaaatcctgtctcagctaaggagcttcaagcaga

SEQ ID NO: 347647 - DNA, 55 bp, Artificial
  Synthetic oligonucleotide
cagccctctctcagagtgacacgtccacggccatccaggatatacaccccagccc

SEQ ID NO: 347648 - DNA, 57 bp, Artificial
  Synthetic oligonucleotide
cagcccttacattgcaaggggcaaccacaactgaggcctccaatatcctgcgctctt

SEQ ID NO: 347649 - DNA, 55 bp, Artificial
  Synthetic oligonucleotide
cagcccttcttttattggtagcacattatgccattatagggccaggacttcaagc

SEQ ID NO: 347650 - DNA, 55 bp, Artificial
  Synthetic oligonucleotide
cagccctttaccatttcaaaacatcgatagtagggctgtcggaaagtgccccaga

SEQ ID NO: 347651 - DNA, 54 bp, Artificial
  Synthetic oligonucleotide
cagccctttcgagagttagtcggtatgaagaaccgcaacgtggaaggacttacc

SEQ ID NO: 347652 - DNA, 55 bp, Artificial
  Synthetic oligonucleotide
cagccgaaaaccccttcatatcgttagtgacgtggccgccatagcctcgggcggc

SEQ ID NO: 347653 - DNA, 59 bp, Artificial
  Synthetic oligonucleotide
cagccgaatgtgctaaagaaagttgcaccattgttgtataagtctgggaagtcaagaat

SEQ ID NO: 347654 - DNA, 59 bp, Artificial
  Synthetic oligonucleotide
cagccgactgatttagttcacattgttgacacacgatctggtctaatagttatcacccc

SEQ ID NO: 347655 - DNA, 57 bp, Artificial
  Synthetic oligonucleotide
cagccgagcttgttactccaccgcctttcaactggctggtcaaaggcggatggtggt

SEQ ID NO: 347656 - DNA, 55 bp, Artificial
  Synthetic oligonucleotide
cagccgatccacttctcaatgttacacatgctgggtttcaactttatcacacgta

SEQ ID NO: 347657 - DNA, 55 bp, Artificial
  Synthetic oligonucleotide
cagccgatgattaccaattctcatcacagtaccaacaaggtggggtaacgatcac

SEQ ID NO: 347658 - DNA, 59 bp, Artificial
  Synthetic oligonucleotide
cagccgcaagagcgtgaagcccaccataatcgaggaaggtgacggaagagtcatcttgg

SEQ ID NO: 347659 - DNA, 50 bp, Artificial
  Synthetic oligonucleotide
cagccgcagagaaacacaagtataagggtcgctatgcatggaccaaaacc

SEQ ID NO: 347660 - DNA, 55 bp, Artificial
  Synthetic oligonucleotide
cagccgcagttaagatcaattcgtctacggcgagttacccgtctcttcgccgccc

SEQ ID NO: 347661 - DNA, 60 bp, Artificial
  Synthetic oligonucleotide
cagccgcggctgtgcacgcacgctcgttggccagcaccgatttatggtctcttggtggat

SEQ ID NO: 347662 - DNA, 60 bp, Artificial
  Synthetic oligonucleotide
cagccgctaagacgttatgcggggtgattgcgaagttgagttcgcagccgtattgtcaaa

SEQ ID NO: 347663 - DNA, 55 bp, Artificial
  Synthetic oligonucleotide
cagccgctcccagcggaggtcaagggaactaagttactagcccactgggattcag

SEQ ID NO: 347664 - DNA, 55 bp, Artificial
  Synthetic oligonucleotide
cagccgcttccgggcggatcaaagggactaaattgttagcccactgggattcagg

SEQ ID NO: 347665 - DNA, 55 bp, Artificial
  Synthetic oligonucleotide
cagccggccttacacatattatgatttggcactccaatctgaatgatgccaccta

SEQ ID NO: 347666 - DNA, 58 bp, Artificial
  Synthetic oligonucleotide
cagccggcgtcctctcaatagggatgaccggccttctctgggcgattggccgctttac

SEQ ID NO: 347667 - DNA, 60 bp, Artificial
  Synthetic oligonucleotide
cagccggctgcaactgcattagctaatactatagaggtcttcagatcgaacggtttaacg

SEQ ID NO: 347668 - DNA, 55 bp, Artificial
  Synthetic oligonucleotide
cagccggctgcgactgctcttgctaatactatagaagtcttcagatcgaatggtc

SEQ ID NO: 347669 - DNA, 55 bp, Artificial
  Synthetic oligonucleotide
cagccgggataaatgttggaccaatatcaccggattacacacagcacatggcgac

SEQ ID NO: 347670 - DNA, 55 bp, Artificial
  Synthetic oligonucleotide
cagccggtctggagcacgcatcattgggacggacaattctgttgtcctctcccgc

SEQ ID NO: 347671 - DNA, 58 bp, Artificial
  Synthetic oligonucleotide
cagccggtcttgatggtaccgccacctctggtagcacccttaccgaaaagatcatgtg

SEQ ID NO: 347672 - DNA, 56 bp, Artificial
  Synthetic oligonucleotide
cagccgtaacacaagcctgtccaaaggtcacttttgacccaattcctgtacattat

SEQ ID NO: 347673 - DNA, 55 bp, Artificial
  Synthetic oligonucleotide
cagccgtagtccagtaggaactaaggccttatcccgcgccctcacgactacgtag

SEQ ID NO: 347674 - DNA, 55 bp, Artificial
  Synthetic oligonucleotide
cagccgtcaaggctaggtatggtgcaaatttcaatctgtacaagggcatggctcg

SEQ ID NO: 347675 - DNA, 55 bp, Artificial
  Synthetic oligonucleotide
cagccgtcctttgttaactcaacgataaccgatgtgttcttcttcaggaaccgct

SEQ ID NO: 347676 - DNA, 60 bp, Artificial
  Synthetic oligonucleotide
cagccgtgaggaatgaacatcagggcaatgagatagttgacgtgatgtgccatgccacgc

SEQ ID NO: 347677 - DNA, 55 bp, Artificial
  Synthetic oligonucleotide
cagccgtggtgcaggagattcaacaatgagagacaaggatgtgaacgcaggctcc

SEQ ID NO: 347678 - DNA, 60 bp, Artificial
  Synthetic oligonucleotide
cagccgtggtgtgtggcccagatatgatccaagtgtcgttgaatgccggtgctagaggtg

SEQ ID NO: 347679 - DNA, 58 bp, Artificial
  Synthetic oligonucleotide
cagccgttgaaagaagtgggacatgcttttaaatacagaatgacgatcttgcccggtg

SEQ ID NO: 347680 - DNA, 56 bp, Artificial
  Synthetic oligonucleotide
cagccgttttccagatcacgacaaatctggtttctgggatttcccaacccagagta

SEQ ID NO: 347681 - DNA, 52 bp, Artificial
  Synthetic oligonucleotide
cagcctaaccggacgtgacaaaaacgaggtcgaaggggaggtacaggtggtc

SEQ ID NO: 347682 - DNA, 58 bp, Artificial
  Synthetic oligonucleotide
cagcctaccaagtacgcaattcctcgggcctttatcatgttaccaatgattgccctaa

SEQ ID NO: 347683 - DNA, 60 bp, Artificial
  Synthetic oligonucleotide
cagcctaccaatcaactggtggtgcatggcactatgtagctgttcgtgagaatggggttg

SEQ ID NO: 347684 - DNA, 60 bp, Artificial
  Synthetic oligonucleotide
cagcctaccacgacacaggcgacctctcagcctccccggtactgacgactctgtgcgccc

SEQ ID NO: 347685 - DNA, 55 bp, Artificial
  Synthetic oligonucleotide
cagcctaccggaaataccccgacgacgaaggacatcttcggctatagtgactccc

SEQ ID NO: 347686 - DNA, 55 bp, Artificial
  Synthetic oligonucleotide
cagcctactaaactcagttggtaatgcgaaaatctactcaaaattcgacctgaag

SEQ ID NO: 347687 - DNA, 54 bp, Artificial
  Synthetic oligonucleotide
cagcctactcgcgcgcattggagcacgtgtcaaagtcgaccatcagcccgtccc

SEQ ID NO: 347688 - DNA, 60 bp, Artificial
  Synthetic oligonucleotide
cagcctatgcgcctggtctgtacaccgttcatctatcctcgttcaaaattggtcagttcg

SEQ ID NO: 347689 - DNA, 50 bp, Artificial
  Synthetic oligonucleotide
cagcctatgtgaaacgacatgatgggaaacgacgtggaagtcgatatgtc

SEQ ID NO: 347690 - DNA, 60 bp, Artificial
  Synthetic oligonucleotide
cagcctatttgatcactgtcttcttgcatctaatgagaataccaacacacagacatgtga

SEQ ID NO: 347691 - DNA, 52 bp, Artificial
  Synthetic oligonucleotide
cagcctcaaaaagagtggaactttcaacttcctcaactgggtacaactctgt

SEQ ID NO: 347692 - DNA, 55 bp, Artificial
  Synthetic oligonucleotide
cagcctcattaacgatttggctcagagacgtgtttacgataacgctgtcgaagag

SEQ ID NO: 347693 - DNA, 55 bp, Artificial
  Synthetic oligonucleotide
cagcctcattgagtcccggaatgatgatgggaatgttcaacatgctaagtacagt

SEQ ID NO: 347694 - DNA, 56 bp, Artificial
  Synthetic oligonucleotide
cagcctccaaggactccacctcgccttccaactgtctagtatagccatcaaccccc

SEQ ID NO: 347695 - DNA, 55 bp, Artificial
  Synthetic oligonucleotide
cagcctccacaggacccatgccaataccttcggagtgacttgagctcacatagca

SEQ ID NO: 347696 - DNA, 52 bp, Artificial
  Synthetic oligonucleotide
cagcctccaggtaagtcgttatttctatgctttagttaaattaacattcttt

SEQ ID NO: 347697 - DNA, 59 bp, Artificial
  Synthetic oligonucleotide
cagcctcgtgtcccaatgcatccgtgaattggttaggggacactataagtctaggctta

SEQ ID NO: 347698 - DNA, 55 bp, Artificial
  Synthetic oligonucleotide
cagcctcttattcagacccttgttccttaaagtgcccatacctggggtgccaatc

SEQ ID NO: 347699 - DNA, 60 bp, Artificial
  Synthetic oligonucleotide
cagcctcttggtgtggaacctcacagtgtcactggcgaggccgtaatgcaggacacaagc

SEQ ID NO: 347700 - DNA, 55 bp, Artificial
  Synthetic oligonucleotide
cagcctgaaagcttaaataaaattggcgcctctttaaatgcttggccgctacgtt

SEQ ID NO: 347701 - DNA, 59 bp, Artificial
  Synthetic oligonucleotide
cagcctgaacgggatagctcccctacaactggggaagtgcaatgtggcgggatggctcc

SEQ ID NO: 347702 - DNA, 55 bp, Artificial
  Synthetic oligonucleotide
cagcctgacaattgaacctagcgagttctttgagatgcctcgaggtatgcagagc

SEQ ID NO: 347703 - DNA, 60 bp, Artificial
  Synthetic oligonucleotide
cagcctgagggtccggatgacattgctgtgctagaggtaaggccaacagaacatgatcag

SEQ ID NO: 347704 - DNA, 55 bp, Artificial
  Synthetic oligonucleotide
cagcctgcgtggcggccaacccagcttttgctgggacgcttactgacagacatgg

SEQ ID NO: 347705 - DNA, 55 bp, Artificial
  Synthetic oligonucleotide
cagcctggcacttaggtcatcttattcgagacataacagaaagcttgatagcaca

SEQ ID NO: 347706 - DNA, 59 bp, Artificial
  Synthetic oligonucleotide
cagcctgtaaactgagatacactatattagcaactcaaagacatcgtaaattactaacc

SEQ ID NO: 347707 - DNA, 60 bp, Artificial
  Synthetic oligonucleotide
cagcctgtcagtagaagagccaccattcgctattgcacgtactagagtgtcaggcttgta

SEQ ID NO: 347708 - DNA, 60 bp, Artificial
  Synthetic oligonucleotide
cagcctgtcatctttagaatggcaggactaggtgatccagaagtagaggttggctactta

SEQ ID NO: 347709 - DNA, 55 bp, Artificial
  Synthetic oligonucleotide
cagccttacagaatgtgcatcgtttctcacatcaatcaaagcatgtgattctgcc

SEQ ID NO: 347710 - DNA, 53 bp, Artificial
  Synthetic oligonucleotide
cagccttagacttggacagggacccctgtttgttaactctgcccacaacttgg

SEQ ID NO: 347711 - DNA, 55 bp, Artificial
  Synthetic oligonucleotide
cagccttaggtgccatattcactgacgagaacaagtggaagtcggcacgtgaggc

SEQ ID NO: 347712 - DNA, 55 bp, Artificial
  Synthetic oligonucleotide
cagccttagtcccaggtaaagcgaccttcaatgcacagactttcccgctaccggg

SEQ ID NO: 347713 - DNA, 55 bp, Artificial
  Synthetic oligonucleotide
cagccttattcgctttcctctgtagtatgcaaagtattggtctgaagcttgacag

SEQ ID NO: 347714 - DNA, 55 bp, Artificial
  Synthetic oligonucleotide
cagccttgtttgtggagatggctcaggaggtgttgccagttacttgtgtagatcc

SEQ ID NO: 347715 - DNA, 55 bp, Artificial
  Synthetic oligonucleotide
cagcctttaaatatgcaggtcgcggatttgttatcgggtgagacgtcacagaccg

SEQ ID NO: 347716 - DNA, 55 bp, Artificial
  Synthetic oligonucleotide
cagcctttcctcatcgggccctcaatgtctatacagatagtgcatacttagctca

SEQ ID NO: 347717 - DNA, 54 bp, Artificial
  Synthetic oligonucleotide
cagccttttgtggtgacgatagtgtcgtctacttacccaagggtacggtagtcg

SEQ ID NO: 347718 - DNA, 60 bp, Artificial
  Synthetic oligonucleotide
cagcgaaaatactgagaggcacactgcaagggacgtcaatcaaaacatgcacacacttct

SEQ ID NO: 347719 - DNA, 55 bp, Artificial
  Synthetic oligonucleotide
cagcgaaacttgaccgactatagcttggctcgatacgcatttgatttctacgaga

SEQ ID NO: 347720 - DNA, 56 bp, Artificial
  Synthetic oligonucleotide
cagcgaaagggtactcagcatatgaaatccgcaagcatccaaatggtataaggaag

SEQ ID NO: 347721 - DNA, 54 bp, Artificial
  Synthetic oligonucleotide
cagcgaaatatcataatcccgattggcctcccttcctaacccgtccacctcctt

SEQ ID NO: 347722 - DNA, 50 bp, Artificial
  Synthetic oligonucleotide
cagcgaacgcacgaggttacattctttagtcgacagacgcggccgaatgt

SEQ ID NO: 347723 - DNA, 60 bp, Artificial
  Synthetic oligonucleotide
cagcgaagatacttacagatcaacactactactgcctcctcgtattaacaaagcgaaata

SEQ ID NO: 347724 - DNA, 55 bp, Artificial
  Synthetic oligonucleotide
cagcgaaggttagtcccggtttgtgcattgctggtgataaaggtatagctcctaa

SEQ ID NO: 347725 - DNA, 56 bp, Artificial
  Synthetic oligonucleotide
cagcgaatcccttccgccacagctctcccggtctagagttcgggtacaagtccgaa

SEQ ID NO: 347726 - DNA, 57 bp, Artificial
  Synthetic oligonucleotide
cagcgaatgcccccacccaaaacttggatccagcagccttcactgacccagtcacag

SEQ ID NO: 347727 - DNA, 60 bp, Artificial
  Synthetic oligonucleotide
cagcgaatggctccagaaaaacgtggtcaaagccgcatacatgcggttcttcaaagagca

SEQ ID NO: 347728 - DNA, 54 bp, Artificial
  Synthetic oligonucleotide
cagcgacaatggttggggtttgaacgaaagagtaaagtgaatttgtaagaaaga

SEQ ID NO: 347729 - DNA, 60 bp, Artificial
  Synthetic oligonucleotide
cagcgacatctagcggcaggtcaagaaactaccccattcaggttgttaatcaacaggcag

SEQ ID NO: 347730 - DNA, 60 bp, Artificial
  Synthetic oligonucleotide
cagcgacatgacatcttacacactggtaaggttatatgcatatctgacgttactcgcggt

SEQ ID NO: 347731 - DNA, 60 bp, Artificial
  Synthetic oligonucleotide
cagcgacatgacggacagtgacttcctgtgggcggagaaagcaccgtcagaggcgccgta

SEQ ID NO: 347732 - DNA, 58 bp, Artificial
  Synthetic oligonucleotide
cagcgacatgatatagcccatactgggaaggttatttgtatttccgatgttactaggg

SEQ ID NO: 347733 - DNA, 60 bp, Artificial
  Synthetic oligonucleotide
cagcgacgaagacctcctcaaggcagtcagaataatcaagtttctctatcaaagcagtaa

SEQ ID NO: 347734 - DNA, 55 bp, Artificial
  Synthetic oligonucleotide
cagcgacgcaaccccgggtggcacgtgtcagccgacgaggtccaattccacgtcc

SEQ ID NO: 347735 - DNA, 55 bp, Artificial
  Synthetic oligonucleotide
cagcgactactaccaccggcaactcacgcgctttgctcgctggaacggcaaagac

SEQ ID NO: 347736 - DNA, 60 bp, Artificial
  Synthetic oligonucleotide
cagcgactatgaaggaaggctgatccaaaacagcataacaatagagagaatggttctatc

SEQ ID NO: 347737 - DNA, 55 bp, Artificial
  Synthetic oligonucleotide
cagcgagaaagagtacaacttcatcgtcgggaaggaggtggtcgagataagagca

SEQ ID NO: 347738 - DNA, 51 bp, Artificial
  Synthetic oligonucleotide
cagcgagaccggcggacggacgaggaggaagtgatgagcacgcggcccggt

SEQ ID NO: 347739 - DNA, 55 bp, Artificial
  Synthetic oligonucleotide
cagcgagatcgtgtcagtctgaggggtggggagcacattcagcgaagatcagaga

SEQ ID NO: 347740 - DNA, 56 bp, Artificial
  Synthetic oligonucleotide
cagcgagcactcgacgaaggcccggagaactatcctggtctcttcccggaagacga

SEQ ID NO: 347741 - DNA, 59 bp, Artificial
  Synthetic oligonucleotide
cagcgagctcggaagacggacgaagctcgcgattactgcatgaaagaggaaactagggt

SEQ ID NO: 347742 - DNA, 60 bp, Artificial
  Synthetic oligonucleotide
cagcgaggactgcagcgtagacgctttgtccaaaatgccctaaatggaaatggagaccca

SEQ ID NO: 347743 - DNA, 55 bp, Artificial
  Synthetic oligonucleotide
cagcgaggactgtggagatcctgggacacaacagtctcaagggactgagacgggg

SEQ ID NO: 347744 - DNA, 55 bp, Artificial
  Synthetic oligonucleotide
cagcgaggatctagcagtctatgcaatttcagcttaaaacaaacagtttcacttg

SEQ ID NO: 347745 - DNA, 60 bp, Artificial
  Synthetic oligonucleotide
cagcgaggattgtggaacttctgggacgcagggtgtgggagatcctcaagtattggtgga

SEQ ID NO: 347746 - DNA, 51 bp, Artificial
  Synthetic oligonucleotide
cagcgagggagacaagtggccgacggattggcctctcgtcgtcagcggtca

SEQ ID NO: 347747 - DNA, 56 bp, Artificial
  Synthetic oligonucleotide
cagcgagggtagtggaacttctgggacgcagcgggtgggaagcccttaagtatctg

SEQ ID NO: 347748 - DNA, 60 bp, Artificial
  Synthetic oligonucleotide
cagcgaggttgggacatctgcaaccagaatcgattttagtcttcatgcataaaaagctta

SEQ ID NO: 347749 - DNA, 60 bp, Artificial
  Synthetic oligonucleotide
cagcgagtactgaatcagtacgcgagatactactagcaagcaaagatttagtatgtaaac

SEQ ID NO: 347750 - DNA, 60 bp, Artificial
  Synthetic oligonucleotide
cagcgagtcatacataatgagctggagcagtattgccgtgctcgagctggtcgctgcctg

SEQ ID NO: 347751 - DNA, 58 bp, Artificial
  Synthetic oligonucleotide
cagcgataaatcaagtcagatcccttataggcaatgaggaatacacagactacatgcc

SEQ ID NO: 347752 - DNA, 60 bp, Artificial
  Synthetic oligonucleotide
cagcgataatgacacacagtattttaccgtgctataagataacctgccctacctgtgccc

SEQ ID NO: 347753 - DNA, 55 bp, Artificial
  Synthetic oligonucleotide
cagcgatagagtcagatcaatcaccctggggaactctaccatcaccacgcaggag

SEQ ID NO: 347754 - DNA, 60 bp, Artificial
  Synthetic oligonucleotide
cagcgatcatttggcttatacagactgaaaactccaaattcggtaacaaacacatgattg

SEQ ID NO: 347755 - DNA, 60 bp, Artificial
  Synthetic oligonucleotide
cagcgatcgcgttatgaaaatgcaccagtgtcgagaatgtgtgttctcaatctgtcatca

SEQ ID NO: 347756 - DNA, 55 bp, Artificial
  Synthetic oligonucleotide
cagcgatctattcgacgtaattacacatctaactaacgctgggtcggctgaggga

SEQ ID NO: 347757 - DNA, 57 bp, Artificial
  Synthetic oligonucleotide
cagcgatcttgaccgggattcatgtaatggcgtttacggtaacataaccaagaacgc

SEQ ID NO: 347758 - DNA, 60 bp, Artificial
  Synthetic oligonucleotide
cagcgatggctcaacgtatgctggcagacctagctaacgacgagaagcgcaccccacaac

SEQ ID NO: 347759 - DNA, 60 bp, Artificial
  Synthetic oligonucleotide
cagcgatgtgggcagagcccacagcgatgcttaaccagtgcgtgtctgcgttgtcgcagt

SEQ ID NO: 347760 - DNA, 60 bp, Artificial
  Synthetic oligonucleotide
cagcgatgtgggttggtatcggtttcccacagatctcacaattctgaccccttctgagca

SEQ ID NO: 347761 - DNA, 60 bp, Artificial
  Synthetic oligonucleotide
cagcgattatactcttcaccattccgcacgtgagtcaaagtacgccacagccatgcacgt

SEQ ID NO: 347762 - DNA, 57 bp, Artificial
  Synthetic oligonucleotide
cagcgattcacaaatatttaatcgtccctactggctacaaaggtcacaaggcctaaa

SEQ ID NO: 347763 - DNA, 56 bp, Artificial
  Synthetic oligonucleotide
cagcgattccttcagccacgtaatttccggcctccgtaagaaattgtctatccgct

SEQ ID NO: 347764 - DNA, 58 bp, Artificial
  Synthetic oligonucleotide
cagcgattggcacggaccctgacacagattggaccgctttcgcctttcaactcttaca

SEQ ID NO: 347765 - DNA, 55 bp, Artificial
  Synthetic oligonucleotide
cagcgattggggcgagtgggaagatcaaagcctggaactgcattgcggattggac

SEQ ID NO: 347766 - DNA, 60 bp, Artificial
  Synthetic oligonucleotide
cagcgattttgtgtcaagccatgtatccatgtggccgaatcacttgcacaaagtgtgttg

SEQ ID NO: 347767 - DNA, 55 bp, Artificial
  Synthetic oligonucleotide
cagcgcaaattagagaggaaccccacttgggatgaatttatacagatggctgaag

SEQ ID NO: 347768 - DNA, 60 bp, Artificial
  Synthetic oligonucleotide
cagcgcaatccaggtgacagtggaaacaaggccaagtgaagactttgagttcgtgatgat

SEQ ID NO: 347769 - DNA, 55 bp, Artificial
  Synthetic oligonucleotide
cagcgcaatcctgtcagaaggtgaaatgagcatctggcaaaacgggcaggcaatc

SEQ ID NO: 347770 - DNA, 60 bp, Artificial
  Synthetic oligonucleotide
cagcgcaatttggaacgcatatcctctagagatattcttcagactcgtgatctgcattcc

SEQ ID NO: 347771 - DNA, 60 bp, Artificial
  Synthetic oligonucleotide
cagcgcacacatgtttccgattaccgacactcgtagggagatgacgactatgccgaccac

SEQ ID NO: 347772 - DNA, 60 bp, Artificial
  Synthetic oligonucleotide
cagcgcacaccacatgctcagttaatggagttaacaattttagttacaatggcggttcgc

SEQ ID NO: 347773 - DNA, 55 bp, Artificial
  Synthetic oligonucleotide
cagcgcacttagaactgttcatgaacatccgaataaattcatcgaagccgcagtc

SEQ ID NO: 347774 - DNA, 55 bp, Artificial
  Synthetic oligonucleotide
cagcgcagattgtacaataggtgtagacaaagagactgcgcaggtcagacttcag

SEQ ID NO: 347775 - DNA, 55 bp, Artificial
  Synthetic oligonucleotide
cagcgcagttagttgtacatttgacgaagaagtcagacctccagaactccaactt

SEQ ID NO: 347776 - DNA, 55 bp, Artificial
  Synthetic oligonucleotide
cagcgcagttggttgtgacccagatctattctggagcaagatcccagtgctgatg

SEQ ID NO: 347777 - DNA, 55 bp, Artificial
  Synthetic oligonucleotide
cagcgcatcctcgctgaagcagttatgacacttgcttacagacacaaggtggtga

SEQ ID NO: 347778 - DNA, 60 bp, Artificial
  Synthetic oligonucleotide
cagcgccaagatgtacttgacaagaatcatgtggcagacattgataaactaattgactat

SEQ ID NO: 347779 - DNA, 60 bp, Artificial
  Synthetic oligonucleotide
cagcgcccaagttgcaagaggcagtcaatgaatttgaggtgattgagcgaacagtcaata

SEQ ID NO: 347780 - DNA, 58 bp, Artificial
  Synthetic oligonucleotide
cagcgcccacgccatccactccccccggttccaactggtggcgcctctgcccctagca

SEQ ID NO: 347781 - DNA, 55 bp, Artificial
  Synthetic oligonucleotide
cagcgccccatcttctgtctatctcgaactgtccgtcaaaagacaatgggtgcac

SEQ ID NO: 347782 - DNA, 55 bp, Artificial
  Synthetic oligonucleotide
cagcgccggacaggattccgttacttacgggcatcctatacgatttttgtaagga

SEQ ID NO: 347783 - DNA, 50 bp, Artificial
  Synthetic oligonucleotide
cagcgccttaaaatgaaggtaggtaaaacccgggagttctaattaattct

SEQ ID NO: 347784 - DNA, 55 bp, Artificial
  Synthetic oligonucleotide
cagcgcgaagcattactcgcgataaagaagaggaacatgaacgtgcctgagctgc

SEQ ID NO: 347785 - DNA, 55 bp, Artificial
  Synthetic oligonucleotide
cagcgcgaccggtcgaagagtttctatcttccgtgtttgtatcgttgttcgaggc

SEQ ID NO: 347786 - DNA, 55 bp, Artificial
  Synthetic oligonucleotide
cagcgcgagaacgaatagctgtgcagaaacgggcaggtaggataagaaagccttg

SEQ ID NO: 347787 - DNA, 55 bp, Artificial
  Synthetic oligonucleotide
cagcgcggaagtcaacgtaccgttggtgaacgctctgcgctgcaactgtgctacc

SEQ ID NO: 347788 - DNA, 53 bp, Artificial
  Synthetic oligonucleotide
cagcgcggcggcattgttagttaacccgtgtgttacaaccgttcgggaagccg

SEQ ID NO: 347789 - DNA, 59 bp, Artificial
  Synthetic oligonucleotide
cagcgcgttagttgagctcgaaggggacagtccccgactggctgtggttaagcgcacac

SEQ ID NO: 347790 - DNA, 55 bp, Artificial
  Synthetic oligonucleotide
cagcgctaaaaggctacattttgcctgacaatatggacggatatacgaggctaga

SEQ ID NO: 347791 - DNA, 55 bp, Artificial
  Synthetic oligonucleotide
cagcgctatacgagagaaggatgagtttaatcctggccattgccttgtgcatggg

SEQ ID NO: 347792 - DNA, 60 bp, Artificial
  Synthetic oligonucleotide
cagcgctccaagccgctgaaattggagcatcgtcaaatgctagtgatgagagtatgatcg

SEQ ID NO: 347793 - DNA, 55 bp, Artificial
  Synthetic oligonucleotide
cagcgctcctctgagattcgacaacttcaaaggacagatctacgtgtcagacacc

SEQ ID NO: 347794 - DNA, 55 bp, Artificial
  Synthetic oligonucleotide
cagcgctcctgcccaccaggtctatccagctgtatccgcccttatcgctcgtgag

SEQ ID NO: 347795 - DNA, 58 bp, Artificial
  Synthetic oligonucleotide
cagcgctgaattcaccgagtgcggaggagtgcggatatagcgacagggtgcgttcact

SEQ ID NO: 347796 - DNA, 59 bp, Artificial
  Synthetic oligonucleotide
cagcgctgacaacgttcttcgccttttcaacgagctgtctaagtactatgtcaacattg

SEQ ID NO: 347797 - DNA, 60 bp, Artificial
  Synthetic oligonucleotide
cagcgctgcagacctaatattctgagaccctcggcccagcgtgtgtcatcccggaaacgt

SEQ ID NO: 347798 - DNA, 55 bp, Artificial
  Synthetic oligonucleotide
cagcgctgcatgactataacttgcggccgatccagttgcacgactggtggtcccc

SEQ ID NO: 347799 - DNA, 50 bp, Artificial
  Synthetic oligonucleotide
cagcgctgcgtaccttaccccgctctgcagtgtgtgctgggtgttgtgat

SEQ ID NO: 347800 - DNA, 60 bp, Artificial
  Synthetic oligonucleotide
cagcgctggttccagagatgatagatttgaacgaagtagtggaatctaaatcaccatctg

SEQ ID NO: 347801 - DNA, 60 bp, Artificial
  Synthetic oligonucleotide
cagcggaacagcttttggacgatggactcaagggattggcgtgtatggacatctcatatg

SEQ ID NO: 347802 - DNA, 56 bp, Artificial
  Synthetic oligonucleotide
cagcggaacgcagagtgggtgtccgggacggcagtgttcacccgggacgagttaga

SEQ ID NO: 347803 - DNA, 55 bp, Artificial
  Synthetic oligonucleotide
cagcggaagagtacactgattcactaatggatccagcgattctaacatccttgtc

SEQ ID NO: 347804 - DNA, 55 bp, Artificial
  Synthetic oligonucleotide
cagcggaagagttaagaggggcgtttaagtctcaaataagcaagtacgttgatcg

SEQ ID NO: 347805 - DNA, 51 bp, Artificial
  Synthetic oligonucleotide
cagcggaaggctgttctttcaacgctcgtggggaggtatggccgtaagacg

SEQ ID NO: 347806 - DNA, 51 bp, Artificial
  Synthetic oligonucleotide
cagcggaatggaatagcacctcagtctgatgctctaaggaaattgtcaggc

SEQ ID NO: 347807 - DNA, 55 bp, Artificial
  Synthetic oligonucleotide
cagcggacaaaagaataatggagatgatccctgaaagaaatgaacaaggacagac

SEQ ID NO: 347808 - DNA, 55 bp, Artificial
  Synthetic oligonucleotide
cagcggacccattagcatccttgctggaaatgtgccacagcacacagattggagg

SEQ ID NO: 347809 - DNA, 60 bp, Artificial
  Synthetic oligonucleotide
cagcggaccgcattaccctctcgctctgctctatgagggactcgtctcgcaacagaacct

SEQ ID NO: 347810 - DNA, 60 bp, Artificial
  Synthetic oligonucleotide
cagcggactagaactgtcatttaatgaagctcaagattttactcagcagactgtggaggt

SEQ ID NO: 347811 - DNA, 55 bp, Artificial
  Synthetic oligonucleotide
cagcggagaagacacagacacacgcaaaatgtggaatctatatcccgcaagatcg

SEQ ID NO: 347812 - DNA, 59 bp, Artificial
  Synthetic oligonucleotide
cagcggagacttatttatcactgagttcacgtcctacaagctgagcaaattaactaact

SEQ ID NO: 347813 - DNA, 57 bp, Artificial
  Synthetic oligonucleotide
cagcggagcccatcaaattcgacccagacctttggtggaaatgtgccgatgaggtgc

SEQ ID NO: 347814 - DNA, 57 bp, Artificial
  Synthetic oligonucleotide
cagcggaggaatatacggactcactaatggatccagcaattttaacttcgctatcat

SEQ ID NO: 347815 - DNA, 50 bp, Artificial
  Synthetic oligonucleotide
cagcggagtcgcgcaggggcaagtaatttcaaatgaacgctctccaagaa

SEQ ID NO: 347816 - DNA, 55 bp, Artificial
  Synthetic oligonucleotide
cagcggagtcgctggcggtggttggggttcttagccctgctcatcgtagcactct

SEQ ID NO: 347817 - DNA, 55 bp, Artificial
  Synthetic oligonucleotide
cagcggatactctcagattgaagggtgtgcatgcgacactagcactgatgtctcg

SEQ ID NO: 347818 - DNA, 55 bp, Artificial
  Synthetic oligonucleotide
cagcggatatcaattctgtcacgtacatgggaacttgctccgaaggctcgttggc

SEQ ID NO: 347819 - DNA, 57 bp, Artificial
  Synthetic oligonucleotide
cagcggatatggtgttcggctggtggtgatttcgtaacgaacagacttgagggtaat

SEQ ID NO: 347820 - DNA, 54 bp, Artificial
  Synthetic oligonucleotide
cagcggatccacacctggtaacaggtgcccctggggccgaaagccaaggtttaa

SEQ ID NO: 347821 - DNA, 60 bp, Artificial
  Synthetic oligonucleotide
cagcggattcactacacggttcacggattattgtatattgggtgatgatattgtcattgc

SEQ ID NO: 347822 - DNA, 55 bp, Artificial
  Synthetic oligonucleotide
cagcggcaacaacataacagatctgtccatgtgcaattcccgaagggtcacacct

SEQ ID NO: 347823 - DNA, 55 bp, Artificial
  Synthetic oligonucleotide
cagcggcaacaacctatacgaggaggccacgtcatcctacgcgatacggtctccc

SEQ ID NO: 347824 - DNA, 60 bp, Artificial
  Synthetic oligonucleotide
cagcggcaagaccgaataattcacaagaatattatgagatagctgggagattttcattaa

SEQ ID NO: 347825 - DNA, 55 bp, Artificial
  Synthetic oligonucleotide
cagcggcatgttcacattttctatgacccgctatagagtctcagtccgtgagagt

SEQ ID NO: 347826 - DNA, 55 bp, Artificial
  Synthetic oligonucleotide
cagcggcctatcacacggtgatgtattgcatattaccagggagtgtccatcttcg

SEQ ID NO: 347827 - DNA, 55 bp, Artificial
  Synthetic oligonucleotide
cagcggcgaacccaaataataacgtggagtattatgaaatagccggacgattctc

SEQ ID NO: 347828 - DNA, 55 bp, Artificial
  Synthetic oligonucleotide
cagcggcgacagcctaggtagtgatgcagctaggctgttacatgattggatgttt

SEQ ID NO: 347829 - DNA, 55 bp, Artificial
  Synthetic oligonucleotide
cagcggcgatcgatggattagtacagggaagcgtacattcaatcataacgggcga

SEQ ID NO: 347830 - DNA, 59 bp, Artificial
  Synthetic oligonucleotide
cagcggctatggcaatatggaagtggaaactaactcggaggtaactgtagcacctaata

SEQ ID NO: 347831 - DNA, 55 bp, Artificial
  Synthetic oligonucleotide
cagcgggaacgaatcatgtatgctgatatttctgagagagataaacttgaagcag

SEQ ID NO: 347832 - DNA, 55 bp, Artificial
  Synthetic oligonucleotide
cagcgggacagcaccaaggcgaataacctaaccctctacccacataaagagcgcg

SEQ ID NO: 347833 - DNA, 58 bp, Artificial
  Synthetic oligonucleotide
cagcgggagttttgtccagcatccagaattaaccggattggattgtattagaccttgc

SEQ ID NO: 347834 - DNA, 55 bp, Artificial
  Synthetic oligonucleotide
cagcgggatacagtaacgggacaaactgttcctccagtgacacgaattgcggtgg

SEQ ID NO: 347835 - DNA, 51 bp, Artificial
  Synthetic oligonucleotide
cagcgggatgacagggttccagtgtcagcggcaccgccagtagatgtattt

SEQ ID NO: 347836 - DNA, 57 bp, Artificial
  Synthetic oligonucleotide
cagcgggggagacatttatcacagcgtgtctcatgcccggccccgctggttttggtt

SEQ ID NO: 347837 - DNA, 55 bp, Artificial
  Synthetic oligonucleotide
cagcggtaagggtaaatcgcaggacgttattagtgttgtgtacaattcgttggct

SEQ ID NO: 347838 - DNA, 59 bp, Artificial
  Synthetic oligonucleotide
cagcggtagacagaactgtctagcgactgggcgggtgccggaggatccctgatccggag

SEQ ID NO: 347839 - DNA, 59 bp, Artificial
  Synthetic oligonucleotide
cagcggtagacagaactgtctagcgagggtgccggaggatccctgatccggagtcaagg

SEQ ID NO: 347840 - DNA, 55 bp, Artificial
  Synthetic oligonucleotide
cagcggtatctccgcacccaggctatatccaaggggatgcgtcgtctggaacggg

SEQ ID NO: 347841 - DNA, 60 bp, Artificial
  Synthetic oligonucleotide
cagcggtatggctcttctcatattggcgctactgcaaaggatatttctaatgtcgtcact

SEQ ID NO: 347842 - DNA, 52 bp, Artificial
  Synthetic oligonucleotide
cagcggtatgttatggatggctgatgtcccactccaatggatcgcgtctgcc

SEQ ID NO: 347843 - DNA, 55 bp, Artificial
  Synthetic oligonucleotide
cagcggtcgttactgctgtaaacaaatttggccgataatttggtccagctgcgac

SEQ ID NO: 347844 - DNA, 59 bp, Artificial
  Synthetic oligonucleotide
cagcggtgcactctgcctggcctaaggtcgaacagttctggcaaaaacacctgtggaac

SEQ ID NO: 347845 - DNA, 56 bp, Artificial
  Synthetic oligonucleotide
cagcggtggcaggacttttagtttattgtgtgaaggcgagtggtaccgtccgatgg

SEQ ID NO: 347846 - DNA, 60 bp, Artificial
  Synthetic oligonucleotide
cagcggtggtgggcccttcttcacttgcagaggtctcactctcccaggtcgctaacatcg

SEQ ID NO: 347847 - DNA, 57 bp, Artificial
  Synthetic oligonucleotide
cagcggttcccagaatcgtttgatcccgccgagtttatcatgtcggacgggtttgca

SEQ ID NO: 347848 - DNA, 60 bp, Artificial
  Synthetic oligonucleotide
cagcggttgggttgatgtttgccattgtgggaggtctagccgagttggacatcgaatcta

SEQ ID NO: 347849 - DNA, 50 bp, Artificial
  Synthetic oligonucleotide
cagcgtaacaccactactccgggtcagatggctaacatcttcgcctacta

SEQ ID NO: 347850 - DNA, 53 bp, Artificial
  Synthetic oligonucleotide
cagcgtaagttgattggctcgaatggccgtggtaaactggatgagacccgcgt

SEQ ID NO: 347851 - DNA, 50 bp, Artificial
  Synthetic oligonucleotide
cagcgtaccgagaaacttgctctcgccgaggtaccgctgcctacccagcc

SEQ ID NO: 347852 - DNA, 55 bp, Artificial
  Synthetic oligonucleotide
cagcgtacgcatcagctggcttcgtgccgaacaacaaccaggcgaagctcgccga

SEQ ID NO: 347853 - DNA, 55 bp, Artificial
  Synthetic oligonucleotide
cagcgtagcccgtatgacttcacgaaggtaatcgacgatcctgctaaccctccgg

SEQ ID NO: 347854 - DNA, 60 bp, Artificial
  Synthetic oligonucleotide
cagcgtatatcttgatgcgttctgtcaggatagttatctcgcagagttattatcttggca

SEQ ID NO: 347855 - DNA, 58 bp, Artificial
  Synthetic oligonucleotide
cagcgtatccagtaatcaggggaacttacaataacactggaaaacagccaatcctcta

SEQ ID NO: 347856 - DNA, 55 bp, Artificial
  Synthetic oligonucleotide
cagcgtatcgtcgtatggggcagacaggccgtgattgcgcactcattgacgccac

SEQ ID NO: 347857 - DNA, 60 bp, Artificial
  Synthetic oligonucleotide
cagcgtatgagagagccggaaacagcttcaaaagaccaagagctatagcatgtttatttc

SEQ ID NO: 347858 - DNA, 52 bp, Artificial
  Synthetic oligonucleotide
cagcgtatgcgtcgttggcagattgtttacctcctcgagctgatctgccatc

SEQ ID NO: 347859 - DNA, 55 bp, Artificial
  Synthetic oligonucleotide
cagcgtatggtggtccgtcatttttccggaacatggtctggttgacaaagaaagg

SEQ ID NO: 347860 - DNA, 57 bp, Artificial
  Synthetic oligonucleotide
cagcgtattgctgaccgttaatattaagaactgcacccctaagcaacgacacgaact

SEQ ID NO: 347861 - DNA, 60 bp, Artificial
  Synthetic oligonucleotide
cagcgtcataactgtgattaactacggtctataccaagagagtgaccatcaagtgtccat

SEQ ID NO: 347862 - DNA, 60 bp, Artificial
  Synthetic oligonucleotide
cagcgtcatgacatttcccatgttggtaaggtcatgtgcctttctgacataacacgtggc

SEQ ID NO: 347863 - DNA, 55 bp, Artificial
  Synthetic oligonucleotide
cagcgtcctcacatggaacgtggtcaaggcgtcttccattgagccgttgtatacc

SEQ ID NO: 347864 - DNA, 55 bp, Artificial
  Synthetic oligonucleotide
cagcgtcgtgacggaatcaaaaggaatcgccacgtctttcagtgtgcggaagttc

SEQ ID NO: 347865 - DNA, 55 bp, Artificial
  Synthetic oligonucleotide
cagcgtcgtgcactgtgttgacaattagagaccgaccaccaaagttaccccgtgc

SEQ ID NO: 347866 - DNA, 56 bp, Artificial
  Synthetic oligonucleotide
cagcgtcttaatctaagctatcgctatgttttcaaggattctaagggaaaattaat

SEQ ID NO: 347867 - DNA, 53 bp, Artificial
  Synthetic oligonucleotide
cagcgtgaacttgccattgggtcacttatagtgcccatgaatttgaacagagc

SEQ ID NO: 347868 - DNA, 55 bp, Artificial
  Synthetic oligonucleotide
cagcgtgaatatcaaaggatcatgcaaacgtattctaaaagccatcatcgagcct

SEQ ID NO: 347869 - DNA, 55 bp, Artificial
  Synthetic oligonucleotide
cagcgtgataagttagcatcattcttccaatcggtgctagaacgtaagaatgcgg

SEQ ID NO: 347870 - DNA, 60 bp, Artificial
  Synthetic oligonucleotide
cagcgtggacagccgccaggtcgtttcgtttgagggcgacgacatctgcgacgccaatga

SEQ ID NO: 347871 - DNA, 52 bp, Artificial
  Synthetic oligonucleotide
cagcgtggagggggccacatcaggaccatactgggcggatgtgcgtgaagac

SEQ ID NO: 347872 - DNA, 58 bp, Artificial
  Synthetic oligonucleotide
cagcgtgggggcatgtccgacagggatgacccgaaaacgcgcctgatatggatttacc

SEQ ID NO: 347873 - DNA, 60 bp, Artificial
  Synthetic oligonucleotide
cagcgtgggttagcatggaagctgttgataggcgtatcactaagatgtttgatacaaaag

SEQ ID NO: 347874 - DNA, 55 bp, Artificial
  Synthetic oligonucleotide
cagcgtggtgagtgtgccgccgggattggagtcctggttgtcattcagcgcaacg

SEQ ID NO: 347875 - DNA, 60 bp, Artificial
  Synthetic oligonucleotide
cagcgtgtaaacgaggagttccccatcaagaagagagagcgtcagcatttgactccggtc

SEQ ID NO: 347876 - DNA, 55 bp, Artificial
  Synthetic oligonucleotide
cagcgtgtatattgaggtgttgcacttgacccaagggacatgctgggagcagatg

SEQ ID NO: 347877 - DNA, 53 bp, Artificial
  Synthetic oligonucleotide
cagcgtgtcaccacgtttcgctcctgaatgtccccaggtaaagggacacccca

SEQ ID NO: 347878 - DNA, 55 bp, Artificial
  Synthetic oligonucleotide
cagcgtgtcccatgagggatttagctgtcgatgcttttaaacggggcgaatgtgt

SEQ ID NO: 347879 - DNA, 55 bp, Artificial
  Synthetic oligonucleotide
cagcgtgtcccatgctcggccccgcctcttctggttctgcctactcctactttcc

SEQ ID NO: 347880 - DNA, 55 bp, Artificial
  Synthetic oligonucleotide
cagcgttaactagagccaagcaccattgtgagataatagtatacggttacccaat

SEQ ID NO: 347881 - DNA, 55 bp, Artificial
  Synthetic oligonucleotide
cagcgttaaggatggaaacggtgttcttcgtgtgcagataggtcaaataacgggg

SEQ ID NO: 347882 - DNA, 55 bp, Artificial
  Synthetic oligonucleotide
cagcgttaattggagtgaaacaccaactatgggctagtcatgaaatcagagtagc

SEQ ID NO: 347883 - DNA, 60 bp, Artificial
  Synthetic oligonucleotide
cagcgttacggactcgatcaaagagagttaggcatcgcgcttgataaatggagcatttac

SEQ ID NO: 347884 - DNA, 54 bp, Artificial
  Synthetic oligonucleotide
cagcgttagcctcagccttaaacgtaaacttatacttagccctagacgtggact

SEQ ID NO: 347885 - DNA, 55 bp, Artificial
  Synthetic oligonucleotide
cagcgttccattagtcatttataaaggtggagagctgaagagcaaacgagtagtt

SEQ ID NO: 347886 - DNA, 55 bp, Artificial
  Synthetic oligonucleotide
cagcgttctccacttttgacctttggactcctcagttttctgctaggacgacttc

SEQ ID NO: 347887 - DNA, 60 bp, Artificial
  Synthetic oligonucleotide
cagcgttgacccatctatttggcccatttgcatacaatgagaaagacccgaagatattcg

SEQ ID NO: 347888 - DNA, 55 bp, Artificial
  Synthetic oligonucleotide
cagcgttggcatcactgtaggaccggagattggtcagggtcttcggagtaccacc

SEQ ID NO: 347889 - DNA, 55 bp, Artificial
  Synthetic oligonucleotide
cagcgttggttagtgagcaagcaagtgagaagtggttatatgcacaacttcaagg

SEQ ID NO: 347890 - DNA, 60 bp, Artificial
  Synthetic oligonucleotide
cagcgtttacaggaaatactgagggcagaacatctgacatgaggaccgaaattataagga

SEQ ID NO: 347891 - DNA, 60 bp, Artificial
  Synthetic oligonucleotide
cagcgtttctatatcagacatgttatgaagcgtgtactatctgtagagcggaacacattg

SEQ ID NO: 347892 - DNA, 55 bp, Artificial
  Synthetic oligonucleotide
cagcgtttgaagacctgagagtatcaagtttcatccgagggacaagagtggtccc

SEQ ID NO: 347893 - DNA, 55 bp, Artificial
  Synthetic oligonucleotide
cagctaaaaatatgtacgagaacgtttgactttcccgggcaacaataaagtgata

SEQ ID NO: 347894 - DNA, 55 bp, Artificial
  Synthetic oligonucleotide
cagctaaaagaagaagccatgcatggacaagtagattgcagtccaaagatatggc

SEQ ID NO: 347895 - DNA, 60 bp, Artificial
  Synthetic oligonucleotide
cagctaaaaggggaagccatgcatggacaagtggactgtagtccagggatatggcagtta

SEQ ID NO: 347896 - DNA, 55 bp, Artificial
  Synthetic oligonucleotide
cagctaaaaggggaagccatgcatggacaggtagactgcagtccaggaatatggc

SEQ ID NO: 347897 - DNA, 55 bp, Artificial
  Synthetic oligonucleotide
cagctaaacccgacccggctccacgggtgatacagcctagggatcctaggtataa

SEQ ID NO: 347898 - DNA, 55 bp, Artificial
  Synthetic oligonucleotide
cagctaaacttattggcgggttccgttctcaggacccggactttatgccggctga

SEQ ID NO: 347899 - DNA, 56 bp, Artificial
  Synthetic oligonucleotide
cagctaaagacgtggaacataaagctttctcgattaacaaacttcgcattagtcct

SEQ ID NO: 347900 - DNA, 60 bp, Artificial
  Synthetic oligonucleotide
cagctaaaggatgctattttggcaccattatctatggggttaagaaatcagattcagcgt

SEQ ID NO: 347901 - DNA, 60 bp, Artificial
  Synthetic oligonucleotide
cagctaacaatggtgaggtggtgtctaagctcaacgtcatgttcatcgacgcgaccacta

SEQ ID NO: 347902 - DNA, 53 bp, Artificial
  Synthetic oligonucleotide
cagctaactcctctctgcgttactttacattgtaccaatgctaatttgaaggc

SEQ ID NO: 347903 - DNA, 56 bp, Artificial
  Synthetic oligonucleotide
cagctaactcgttcgcacacctaactatatgcaggcaagggtaccctaaccctacc

SEQ ID NO: 347904 - DNA, 55 bp, Artificial
  Synthetic oligonucleotide
cagctaagcgactactctggtcacacttggaagtcatgtcatcaagagctgagac

SEQ ID NO: 347905 - DNA, 55 bp, Artificial
  Synthetic oligonucleotide
cagctaagctcaggccaagttataatactaataacgttatgcccatcttaacaag

SEQ ID NO: 347906 - DNA, 55 bp, Artificial
  Synthetic oligonucleotide
cagctaagctgtactcttgtttcgattggttgcgacgtcaatccaataacgattc

SEQ ID NO: 347907 - DNA, 58 bp, Artificial
  Synthetic oligonucleotide
cagctaaggacaacaagggaacacggatcagatttaaggatgacagttcttttgagga

SEQ ID NO: 347908 - DNA, 55 bp, Artificial
  Synthetic oligonucleotide
cagctaataatgctgattgcgcctggctagaagcacaagagaatgaggaggtggg

SEQ ID NO: 347909 - DNA, 60 bp, Artificial
  Synthetic oligonucleotide
cagctaatagtgagtgggagagacgaacagtcaattgctgaggcaataattgtggccatg

SEQ ID NO: 347910 - DNA, 60 bp, Artificial
  Synthetic oligonucleotide
cagctaatctacttagtaacgaggatttgtcagcagaggcggagcacgagtcagaccaca

SEQ ID NO: 347911 - DNA, 60 bp, Artificial
  Synthetic oligonucleotide
cagctacaaactactctcagctactgcagcatggcagcgggaaacacttactcggaagag

SEQ ID NO: 347912 - DNA, 56 bp, Artificial
  Synthetic oligonucleotide
cagctacaaaggtgcccgctacactcttggggctaacaaatttgttcaattttgag

SEQ ID NO: 347913 - DNA, 60 bp, Artificial
  Synthetic oligonucleotide
cagctacagctgaaggaggagaaattgtatttcaaaacactgctttcactatgtggaaac

SEQ ID NO: 347914 - DNA, 58 bp, Artificial
  Synthetic oligonucleotide
cagctacagtatactatgaccgaagactcactaccacaataaaaacgtgggcaagaaa

SEQ ID NO: 347915 - DNA, 53 bp, Artificial
  Synthetic oligonucleotide
cagctacatctgctgctgcagaatacaaggcctctaactttaaggaatttctg

SEQ ID NO: 347916 - DNA, 60 bp, Artificial
  Synthetic oligonucleotide
cagctacatggtttcaatactatacagaggaccaaggtcactttcccttacaacatgcat

SEQ ID NO: 347917 - DNA, 60 bp, Artificial
  Synthetic oligonucleotide
cagctacatgtgctacgaggcccgctacatttccaaaggcgaactataatggcggcgctt

SEQ ID NO: 347918 - DNA, 55 bp, Artificial
  Synthetic oligonucleotide
cagctaccattactctgctccctgactcagaaagattcggctttccaagagttgt

SEQ ID NO: 347919 - DNA, 57 bp, Artificial
  Synthetic oligonucleotide
cagctacccttattttaccttatgttaatgctgtaccaatggattctatgcttagac

SEQ ID NO: 347920 - DNA, 55 bp, Artificial
  Synthetic oligonucleotide
cagctaccgtgaagaacgatcttcgtgatcgttatcaagtcatgcaccggttcca

SEQ ID NO: 347921 - DNA, 55 bp, Artificial
  Synthetic oligonucleotide
cagctacgtccaacttgggtgaaaagaactgtaaggatgtaaagggtgttgtgtg

SEQ ID NO: 347922 - DNA, 55 bp, Artificial
  Synthetic oligonucleotide
cagctactaacagtgctaaaacgaaagtatgttagtcctagcccgaagcagcggg

SEQ ID NO: 347923 - DNA, 60 bp, Artificial
  Synthetic oligonucleotide
cagctactcgctgcctttgtgtgattctggcacagggcagacgaagcatggaggtaggac

SEQ ID NO: 347924 - DNA, 60 bp, Artificial
  Synthetic oligonucleotide
cagctagaagcaattggaaaaatgagatgggtgtataaagggacaccaggcttgcggcga

SEQ ID NO: 347925 - DNA, 55 bp, Artificial
  Synthetic oligonucleotide
cagctagaatggcatcctgagtatcaggtggaagagtagtgtcaacaaggcctgc

SEQ ID NO: 347926 - DNA, 60 bp, Artificial
  Synthetic oligonucleotide
cagctagagaagcagtaacacatagagtaagtgttaatgaagacatcgttatatctaaaa

SEQ ID NO: 347927 - DNA, 55 bp, Artificial
  Synthetic oligonucleotide
cagctagagcgagagaggctcacatccaaatgagggccgcagctgttatgcacgc

SEQ ID NO: 347928 - DNA, 60 bp, Artificial
  Synthetic oligonucleotide
cagctagatctgttcaggtacatggtagacggtgcagcagtcggcattgcaagtctactg

SEQ ID NO: 347929 - DNA, 55 bp, Artificial
  Synthetic oligonucleotide
cagctagcaccttgcgacatatatgtcatagagacgctgtgctttgggtgctcgc

SEQ ID NO: 347930 - DNA, 58 bp, Artificial
  Synthetic oligonucleotide
cagctagccatagtgaatacaatagtgtatccagcgtttggaatgcagcggatgcatt

SEQ ID NO: 347931 - DNA, 58 bp, Artificial
  Synthetic oligonucleotide
cagctagccgacaaagtgggacccactcacgtgattagcacttgccttgtaccttcct

SEQ ID NO: 347932 - DNA, 55 bp, Artificial
  Synthetic oligonucleotide
cagctagctctgcaggactcacaatcagaagtaaacatagtaacagactcacagt

SEQ ID NO: 347933 - DNA, 51 bp, Artificial
  Synthetic oligonucleotide
cagctagctgcaaacataattccagtcacgggtacatttgggcacttggcg

SEQ ID NO: 347934 - DNA, 55 bp, Artificial
  Synthetic oligonucleotide
cagctaggacaagcagtagcacgtgatgctgaagctcagatgagctcaacactag

SEQ ID NO: 347935 - DNA, 59 bp, Artificial
  Synthetic oligonucleotide
cagctaggagaaagtccaggttgagatatctgccgttagtagaccccagatcgttagag

SEQ ID NO: 347936 - DNA, 59 bp, Artificial
  Synthetic oligonucleotide
cagctagggggactgagtaaccttcaatactcaaggctctacacgagaaacatcggtga

SEQ ID NO: 347937 - DNA, 53 bp, Artificial
  Synthetic oligonucleotide
cagctagtaacgtgggaatggagttcggtagatttttaagaggaaaattctac

SEQ ID NO: 347938 - DNA, 60 bp, Artificial
  Synthetic oligonucleotide
cagctagtactgaaacatatgaggtggtatctaacaatacccaactagcgcttattgacg

SEQ ID NO: 347939 - DNA, 60 bp, Artificial
  Synthetic oligonucleotide
cagctagtactggggcaaatgaacaaagtgaaacgactcatgtattcgatcatttaccca

SEQ ID NO: 347940 - DNA, 56 bp, Artificial
  Synthetic oligonucleotide
cagctagtctcagggaagaaatggagtacccaaaaagacgaccacaaacagagacg

SEQ ID NO: 347941 - DNA, 55 bp, Artificial
  Synthetic oligonucleotide
cagctagtggagaatttgacatagatagactgtcaagaaatcctttagcgattag

SEQ ID NO: 347942 - DNA, 59 bp, Artificial
  Synthetic oligonucleotide
cagctagtgttatactatcctttatataccagtctagcccagatataagaaataagtta

SEQ ID NO: 347943 - DNA, 60 bp, Artificial
  Synthetic oligonucleotide
cagctagttgatttaactaggttgttggcttacaattatgaaacactaatggcatgcatt

SEQ ID NO: 347944 - DNA, 55 bp, Artificial
  Synthetic oligonucleotide
cagctataacgtccagacggggtcttgtgcgttttagtcgcattgggcaacgggg

SEQ ID NO: 347945 - DNA, 54 bp, Artificial
  Synthetic oligonucleotide
cagctataatattacctgagtgccccgcgaccggtgtattggggttactttaac

SEQ ID NO: 347946 - DNA, 55 bp, Artificial
  Synthetic oligonucleotide
cagctataccgacggtagaggccccgaccaacgcccatactgctggcactacccc

SEQ ID NO: 347947 - DNA, 60 bp, Artificial
  Synthetic oligonucleotide
cagctatactcagaaaagcaaccaggagattaattcaactgatagtgagtggaagagacg

SEQ ID NO: 347948 - DNA, 60 bp, Artificial
  Synthetic oligonucleotide
cagctatactcagaaaagcaactaggagattggttcaactaatagtgagtggaagagatg

SEQ ID NO: 347949 - DNA, 57 bp, Artificial
  Synthetic oligonucleotide
cagctatagaagatgattatatcgatatacctatgccaagcactaattggttcacac

SEQ ID NO: 347950 - DNA, 55 bp, Artificial
  Synthetic oligonucleotide
cagctatagcagtagctgaggggaccgataggattatagaaatagcacaaggaat

SEQ ID NO: 347951 - DNA, 55 bp, Artificial
  Synthetic oligonucleotide
cagctatatcataatatcgatattgtagacggctttgacagacgtgacatccggc

SEQ ID NO: 347952 - DNA, 51 bp, Artificial
  Synthetic oligonucleotide
cagctatcactccgaatcttccgcagatatctgttcccgatacatctctgt

SEQ ID NO: 347953 - DNA, 60 bp, Artificial
  Synthetic oligonucleotide
cagctatcgaagcgtcctctactggtaaagcgctcagcgttctcgctgattgctcatcct

SEQ ID NO: 347954 - DNA, 60 bp, Artificial
  Synthetic oligonucleotide
cagctatcgaatcattgttccccttgaccactaatcatgtatatgaagaagtgacactac

SEQ ID NO: 347955 - DNA, 55 bp, Artificial
  Synthetic oligonucleotide
cagctatctccacatttatcagttatcccatcttgggcaagtccgaagctagtcg

SEQ ID NO: 347956 - DNA, 60 bp, Artificial
  Synthetic oligonucleotide
cagctatgaaagatgaataccactgtatatcgacttacttgcttccacaaccgggagcgg

SEQ ID NO: 347957 - DNA, 55 bp, Artificial
  Synthetic oligonucleotide
cagctatgcactcaatgtttgagggccatataagatcaatagagtgcaccaactg

SEQ ID NO: 347958 - DNA, 55 bp, Artificial
  Synthetic oligonucleotide
cagctatgctaatggaagcgactccgaccaacgcccctactgctggcactacccc

SEQ ID NO: 347959 - DNA, 51 bp, Artificial
  Synthetic oligonucleotide
cagctatggtctggtgcgagtgcgtacccggacccaacccgtgcgggctac

SEQ ID NO: 347960 - DNA, 60 bp, Artificial
  Synthetic oligonucleotide
cagctatggtgatcgtcgacattaacttctacacccgtcaggtcattgacccgcggctgt

SEQ ID NO: 347961 - DNA, 57 bp, Artificial
  Synthetic oligonucleotide
cagctatgtgttatggatcaactactgctaatttggtgagaggtcagaatacagttc

SEQ ID NO: 347962 - DNA, 60 bp, Artificial
  Synthetic oligonucleotide
cagctatgttgcctgtaagaattttctgctgtttagtcacggcaaatagtttatcagtgc

SEQ ID NO: 347963 - DNA, 60 bp, Artificial
  Synthetic oligonucleotide
cagctattagttattttcatctgaatccagggtttcatacaggtgttgctattggcatag

SEQ ID NO: 347964 - DNA, 56 bp, Artificial
  Synthetic oligonucleotide
cagctattcattaaagactacaggtatacataccgatgccacagaggtgacacgca

SEQ ID NO: 347965 - DNA, 58 bp, Artificial
  Synthetic oligonucleotide
cagctattcgactttaattcacctgatctagaaaagctgatcagaataccgtttaaag

SEQ ID NO: 347966 - DNA, 60 bp, Artificial
  Synthetic oligonucleotide
cagctattgagctcaataaagttcttgtcacaaagtcacaggttgtggcaaatagtattc

SEQ ID NO: 347967 - DNA, 58 bp, Artificial
  Synthetic oligonucleotide
cagctatttgtcacagtggtggacaacacccgaaataccaactttagcattgctgtta

SEQ ID NO: 347968 - DNA, 55 bp, Artificial
  Synthetic oligonucleotide
cagctcaaatggtctgaacctaacctcaaagaggctttgagttggcctctaggtg

SEQ ID NO: 347969 - DNA, 55 bp, Artificial
  Synthetic oligonucleotide
cagctcaaattcgtttacaaactgacaacacaaaccactttgaggttgctggtac

SEQ ID NO: 347970 - DNA, 60 bp, Artificial
  Synthetic oligonucleotide
cagctcaagaccattccctgtggaagcgctccgatcaccgaagaagtcaaccctggttgc

SEQ ID NO: 347971 - DNA, 55 bp, Artificial
  Synthetic oligonucleotide
cagctcaagaccggagcaagcaactccctcctgtctatgcttgacaagctgagca

SEQ ID NO: 347972 - DNA, 60 bp, Artificial
  Synthetic oligonucleotide
cagctcaagtagctcctatagtagctggaccaatgggagcaacttacacagcttttaatc

SEQ ID NO: 347973 - DNA, 55 bp, Artificial
  Synthetic oligonucleotide
cagctcacaagggactgggtggtaatcaggaagtagaccacctagtgagccaagg

SEQ ID NO: 347974 - DNA, 60 bp, Artificial
  Synthetic oligonucleotide
cagctcacactaatgatgtaaggcaactatcagaagtagtgcaaaaagtggccacagaaa

SEQ ID NO: 347975 - DNA, 55 bp, Artificial
  Synthetic oligonucleotide
cagctcacgctgcgcaaagacctttcacccaagtcaagatcctccgttgcgtctc

SEQ ID NO: 347976 - DNA, 60 bp, Artificial
  Synthetic oligonucleotide
cagctcacggcccagccaagagcatggaatatgatgctgttgctactacgcactcctgga

SEQ ID NO: 347977 - DNA, 55 bp, Artificial
  Synthetic oligonucleotide
cagctcactacaatgcacacctgggattaaacctgtggtatcaactcaattgctg

SEQ ID NO: 347978 - DNA, 60 bp, Artificial
  Synthetic oligonucleotide
cagctcagactaatgtcacagtaaatgtgatgaatgagacggtgaatatatcaatagaca

SEQ ID NO: 347979 - DNA, 54 bp, Artificial
  Synthetic oligonucleotide
cagctcagatatgtgcgaatttcccaagagcgaactggacagaacggataaaat

SEQ ID NO: 347980 - DNA, 55 bp, Artificial
  Synthetic oligonucleotide
cagctcatatgaggatgtcaatggaatcagaaagcccaaacatctgtatgtgtca

SEQ ID NO: 347981 - DNA, 60 bp, Artificial
  Synthetic oligonucleotide
cagctcatcgcctctatcatcctgtgcttggttcttggttgtttaagtgccccgtttatg

SEQ ID NO: 347982 - DNA, 60 bp, Artificial
  Synthetic oligonucleotide
cagctcatgaagtgttacacccagcattaggacacctttggagacgcggtggacgtgacc

SEQ ID NO: 347983 - DNA, 59 bp, Artificial
  Synthetic oligonucleotide
cagctccaaatgaggattttagagaccttgtaactttaagcagaccctattacagcaga

SEQ ID NO: 347984 - DNA, 55 bp, Artificial
  Synthetic oligonucleotide
cagctccaactctactgactcgcccagcaccatagggtccaccatgtagtcctca

SEQ ID NO: 347985 - DNA, 55 bp, Artificial
  Synthetic oligonucleotide
cagctccaagccagaatgcttgcagtagagaaatatatcagggatcaacagcttt

SEQ ID NO: 347986 - DNA, 55 bp, Artificial
  Synthetic oligonucleotide
cagctccaataaaatgagctcccgctggtgactcatactcgggagcatggtactg

SEQ ID NO: 347987 - DNA, 56 bp, Artificial
  Synthetic oligonucleotide
cagctccacagtttcgggattggtctgagttccaatggttactgtaggtacaaaac

SEQ ID NO: 347988 - DNA, 60 bp, Artificial
  Synthetic oligonucleotide
cagctccactgggaatagatccaaagtgcctagagatataccagagctagagactaacac

SEQ ID NO: 347989 - DNA, 55 bp, Artificial
  Synthetic oligonucleotide
cagctccagaagatctatgcctccgttgtcgttccggctgagtcgagcttcacgc

SEQ ID NO: 347990 - DNA, 55 bp, Artificial
  Synthetic oligonucleotide
cagctccaggcaagaatcctggctgtggaaagatacctcaaggatcgacggctcc

SEQ ID NO: 347991 - DNA, 55 bp, Artificial
  Synthetic oligonucleotide
cagctccagggcagattacttgctgtagaaaggtacctacaggatcagcaaatcc

SEQ ID NO: 347992 - DNA, 55 bp, Artificial
  Synthetic oligonucleotide
cagctccatattcctgtccccaggaagagcatactttgagacccctggagcatac

SEQ ID NO: 347993 - DNA, 57 bp, Artificial
  Synthetic oligonucleotide
cagctccattgtgatgtgtggagttgattatgaagttgccgattggtcatggcacga

SEQ ID NO: 347994 - DNA, 55 bp, Artificial
  Synthetic oligonucleotide
cagctcccggacgcgttcgatgattggctggatcccgtgcatggacgtaaagttt

SEQ ID NO: 347995 - DNA, 60 bp, Artificial
  Synthetic oligonucleotide
cagctcccggcatagaggggcgcgtagcgtcgtatccagcgctcggtatccgcctttggc

SEQ ID NO: 347996 - DNA, 56 bp, Artificial
  Synthetic oligonucleotide
cagctccctctattggaaagtcagatcgtcacaatcgagcaaagcgcaccatccca

SEQ ID NO: 347997 - DNA, 56 bp, Artificial
  Synthetic oligonucleotide
cagctccgaataacctacgggaactccacagcacaagtagacgtatttgtcaacgg

SEQ ID NO: 347998 - DNA, 55 bp, Artificial
  Synthetic oligonucleotide
cagctccgagctcgcctgctagccatagaaacttacctaagagaccagcagctcc

SEQ ID NO: 347999 - DNA, 60 bp, Artificial
  Synthetic oligonucleotide
cagctccgatgacgctattgttatctcatcattgactgtcaccctggataggggtagaag

SEQ ID NO: 348000 - DNA, 55 bp, Artificial
  Synthetic oligonucleotide
cagctccgtgcaaaagtccttgctatagaaagataccttagggatcagcaaatcc

SEQ ID NO: 348001 - DNA, 60 bp, Artificial
  Synthetic oligonucleotide
cagctcctaaggcgactgcaccagtggatatcctcggagtgtaccactccatgctccggt

SEQ ID NO: 348002 - DNA, 55 bp, Artificial
  Synthetic oligonucleotide
cagctcctaatgcagccagagctagactagcttacatggaacataagagcttagg

SEQ ID NO: 348003 - DNA, 58 bp, Artificial
  Synthetic oligonucleotide
cagctcctagaagatacgtgccaagaccggtggtcgagttaccctggccgctggagac

SEQ ID NO: 348004 - DNA, 60 bp, Artificial
  Synthetic oligonucleotide
cagctcctcggctagccaactgtccgctccatccctcaaggcaacttgcaccgccaacca

SEQ ID NO: 348005 - DNA, 60 bp, Artificial
  Synthetic oligonucleotide
cagctcctgaggcgactacaccagtggataagctcagagtgtaccactccgtgttccgat

SEQ ID NO: 348006 - DNA, 60 bp, Artificial
  Synthetic oligonucleotide
cagctcctgaggcgactacaccagtggataagctcggagtgcaccactccatgctccggc

SEQ ID NO: 348007 - DNA, 60 bp, Artificial
  Synthetic oligonucleotide
cagctcctgaggcgactgcaccagtggataagctcggagagtatgactccatgctccggt

SEQ ID NO: 348008 - DNA, 60 bp, Artificial
  Synthetic oligonucleotide
cagctcctgaggcgactgcaccagtggataagctcggattgtactactccatgctctgac

SEQ ID NO: 348009 - DNA, 59 bp, Artificial
  Synthetic oligonucleotide
cagctcctgtctgtaaagatgcaggtagccaactagggttgtgtcctcctttagaatta

SEQ ID NO: 348010 - DNA, 55 bp, Artificial
  Synthetic oligonucleotide
cagctccttgttgaggcgatactcttcggagtccttccaatacccttcgtcgggg

SEQ ID NO: 348011 - DNA, 55 bp, Artificial
  Synthetic oligonucleotide
cagctcctttgaggatgtgaacggaatccggaagccaaaacatctctatgtgtcc

SEQ ID NO: 348012 - DNA, 60 bp, Artificial
  Synthetic oligonucleotide
cagctcgaattactacgtcatgccaggttgtccgtgctatagtgacgccgcgactacgat

SEQ ID NO: 348013 - DNA, 55 bp, Artificial
  Synthetic oligonucleotide
cagctcgacacacaaatagttgcgttaccattcacagtagcattacctatacccg

SEQ ID NO: 348014 - DNA, 55 bp, Artificial
  Synthetic oligonucleotide
cagctcgcaacggcgttcggtcagatcgctggcgcggtgctgcagttggtcccga

SEQ ID NO: 348015 - DNA, 55 bp, Artificial
  Synthetic oligonucleotide
cagctcgcaccctgaggagggttgtggctcagaggttaaaatagctcgagccgca

SEQ ID NO: 348016 - DNA, 55 bp, Artificial
  Synthetic oligonucleotide
cagctcgcagacgcagtcattgtaatagatcaagaacgacgttcgcgtatgtgaa

SEQ ID NO: 348017 - DNA, 60 bp, Artificial
  Synthetic oligonucleotide
cagctcgcatgcggtagatccagttttgcgaatggtcgcgggagtattgggccatgtaat

SEQ ID NO: 348018 - DNA, 55 bp, Artificial
  Synthetic oligonucleotide
cagctcgctaatttggatactatcgatataagttacggtgtagatgtgagaggag

SEQ ID NO: 348019 - DNA, 55 bp, Artificial
  Synthetic oligonucleotide
cagctcgctatcaccatacttgatcaatgcagtactcaacatccgcttagagttc

SEQ ID NO: 348020 - DNA, 58 bp, Artificial
  Synthetic oligonucleotide
cagctcgcttcatcgtattcccagacttgggggtacgcgtgtgcgagaaaatggccct

SEQ ID NO: 348021 - DNA, 55 bp, Artificial
  Synthetic oligonucleotide
cagctcgtttatctggagacatcagttttacaggtgtgagtgcaggatacccaac

SEQ ID NO: 348022 - DNA, 54 bp, Artificial
  Synthetic oligonucleotide
cagctctaatgctagtgatgagggcatgatggaaactagacatgtcgtcaatac

SEQ ID NO: 348023 - DNA, 50 bp, Artificial
  Synthetic oligonucleotide
cagctctacaaaagtagatgatggagaacagattgtgcattactataaga

SEQ ID NO: 348024 - DNA, 59 bp, Artificial
  Synthetic oligonucleotide
cagctctacagaacgcaggttacacgaatgttgtcgcaagagaacggagatttccaaac

SEQ ID NO: 348025 - DNA, 55 bp, Artificial
  Synthetic oligonucleotide
cagctctagtaactgctactactcttcacaatgacggattcacaacaatacatcc

SEQ ID NO: 348026 - DNA, 60 bp, Artificial
  Synthetic oligonucleotide
cagctctagtgatactctgcagggaacagcatttgcaggtgttccaatgtatagctcttt

SEQ ID NO: 348027 - DNA, 60 bp, Artificial
  Synthetic oligonucleotide
cagctctatggagatactgttgaaactctatcagttaatcctcctgagtcttactcagcg

SEQ ID NO: 348028 - DNA, 60 bp, Artificial
  Synthetic oligonucleotide
cagctctcactttagtcctaatgactggcaacacctggtcaacgactacgagagattcag

SEQ ID NO: 348029 - DNA, 60 bp, Artificial
  Synthetic oligonucleotide
cagctctccagcgaggacttttttgtcaacagccaaggagacaaatatatgacccttaga

SEQ ID NO: 348030 - DNA, 52 bp, Artificial
  Synthetic oligonucleotide
cagctctcttcaggatttttcctcctcctatacaaaattccccctcggtaga

SEQ ID NO: 348031 - DNA, 59 bp, Artificial
  Synthetic oligonucleotide
cagctctgaaaacgatgagaaaatggaaggcggagctcttgccaaaagagtttactcta

SEQ ID NO: 348032 - DNA, 59 bp, Artificial
  Synthetic oligonucleotide
cagctctgaaaggacaaccaaagcatccctcaagacggttctgttatatacaacaacga

SEQ ID NO: 348033 - DNA, 53 bp, Artificial
  Synthetic oligonucleotide
cagctctgactattagttcttgcccctctgtgaggcttgccagtcttaaattt

SEQ ID NO: 348034 - DNA, 60 bp, Artificial
  Synthetic oligonucleotide
cagctctgtatcgggatgcgttagagtcaccggaacattgcacccccaatcataccgctc

SEQ ID NO: 348035 - DNA, 60 bp, Artificial
  Synthetic oligonucleotide
cagctgaaataagattgatgtgcacagagacttatttggacacccccagaccggatgatg

SEQ ID NO: 348036 - DNA, 60 bp, Artificial
  Synthetic oligonucleotide
cagctgaaattctcaagcactttctattctgtatactacaaggtccatacagtgagagct

SEQ ID NO: 348037 - DNA, 55 bp, Artificial
  Synthetic oligonucleotide
cagctgaacaaacaaaactctaccagaacccgaacacttatgtgtctgtaggaac

SEQ ID NO: 348038 - DNA, 58 bp, Artificial
  Synthetic oligonucleotide
cagctgaagcgtatatagagtacagaaactctactgagcgatacatgccaagatacgg

SEQ ID NO: 348039 - DNA, 55 bp, Artificial
  Synthetic oligonucleotide
cagctgaattatccacgatgcagatggatgtacagcagctgaggatgatgcgagc

SEQ ID NO: 348040 - DNA, 60 bp, Artificial
  Synthetic oligonucleotide
cagctgacattgaattggttctttgaatgccaacaagctgtaaaatctcagacctccttg

SEQ ID NO: 348041 - DNA, 55 bp, Artificial
  Synthetic oligonucleotide
cagctgaccgactacggaacccttacattagattgttcacctaggacagggctag

SEQ ID NO: 348042 - DNA, 60 bp, Artificial
  Synthetic oligonucleotide
cagctgactattgcctatacgaattatgtgggtgatgtgcgaagtctgactccagttata

SEQ ID NO: 348043 - DNA, 60 bp, Artificial
  Synthetic oligonucleotide
cagctgagagaaccaaggggaagtgacatagcaggaaccactagtacccctcaagagcaa

SEQ ID NO: 348044 - DNA, 51 bp, Artificial
  Synthetic oligonucleotide
cagctgagcagggctgactaccgcggtaatcaccgcgcaccttggtagcct

SEQ ID NO: 348045 - DNA, 60 bp, Artificial
  Synthetic oligonucleotide
cagctgaggatgatgcgagctagagttccggacactgtgattaatgcgacgccaagtcaa

SEQ ID NO: 348046 - DNA, 60 bp, Artificial
  Synthetic oligonucleotide
cagctgataatgtactaataacttctgagcattacatgccgatgataaatcattacattc

SEQ ID NO: 348047 - DNA, 55 bp, Artificial
  Synthetic oligonucleotide
cagctgatactcctcatacagccagcgtgtgtgtgctggcatctgttacatcaga

SEQ ID NO: 348048 - DNA, 60 bp, Artificial
  Synthetic oligonucleotide
cagctgatgattggattgatccaaatctctttggcattcgtggacagcacaatcagatta

SEQ ID NO: 348049 - DNA, 55 bp, Artificial
  Synthetic oligonucleotide
cagctgatgcttagatcataaccacacatgtaaacaactggcctatataagctgc

SEQ ID NO: 348050 - DNA, 53 bp, Artificial
  Synthetic oligonucleotide
cagctgatggcggggactggaaaccaattgtgcagtttttaagatatcaggga

SEQ ID NO: 348051 - DNA, 60 bp, Artificial
  Synthetic oligonucleotide
cagctgatgtcgtgatatcaccttatgggcaaggctaaagctgtgcataactatataagc

SEQ ID NO: 348052 - DNA, 52 bp, Artificial
  Synthetic oligonucleotide
cagctgatgtggcaaggggagttagagagaagatattaaagtatcaaggggg

SEQ ID NO: 348053 - DNA, 60 bp, Artificial
  Synthetic oligonucleotide
cagctgattatgactcagcgctagcagctgcttaaccgcaaaaccacatcctatgtaaag

SEQ ID NO: 348054 - DNA, 60 bp, Artificial
  Synthetic oligonucleotide
cagctgatttacaacttgacgctatgtgagctgaatggcacagattggctagctaacaga

SEQ ID NO: 348055 - DNA, 60 bp, Artificial
  Synthetic oligonucleotide
cagctgatttaccacagactgctgaatataatgcttacaatgggactggttttttgcctt

SEQ ID NO: 348056 - DNA, 55 bp, Artificial
  Synthetic oligonucleotide
cagctgcaacccaaacactcaacactaccaaccaaactagctatgtgagagaggc

SEQ ID NO: 348057 - DNA, 55 bp, Artificial
  Synthetic oligonucleotide
cagctgcaaggactcggaagacaatagcctgctacgatctaacatgcaatcagac

SEQ ID NO: 348058 - DNA, 58 bp, Artificial
  Synthetic oligonucleotide
cagctgcaatcgtggtctagactcgactcatccagatcagcgctcttgcgcaatctac

SEQ ID NO: 348059 - DNA, 58 bp, Artificial
  Synthetic oligonucleotide
cagctgcaattgcaccgcggaggtacgagatcgacctcccatcccaacgcctaccccc

SEQ ID NO: 348060 - DNA, 60 bp, Artificial
  Synthetic oligonucleotide
cagctgcacaacgagctatgatggatcaggtcagagaaagccgtagtcctggaaatgctg

SEQ ID NO: 348061 - DNA, 60 bp, Artificial
  Synthetic oligonucleotide
cagctgcagaacttacaaacccatggctcagagacaccacaaaaagcccagtaattggct

SEQ ID NO: 348062 - DNA, 60 bp, Artificial
  Synthetic oligonucleotide
cagctgcatgggtctcatatacaacaggatgggaacggtgaccgcagaagtggcttttgg

SEQ ID NO: 348063 - DNA, 55 bp, Artificial
  Synthetic oligonucleotide
cagctgcatttctggctagcaattgtcaggctaaatatttgaaggatgcatgcac

SEQ ID NO: 348064 - DNA, 55 bp, Artificial
  Synthetic oligonucleotide
cagctgccatcaaggatagcaaagcagtccatgctgacatggggtactggatgga

SEQ ID NO: 348065 - DNA, 60 bp, Artificial
  Synthetic oligonucleotide
cagctgcccgcgtcaccgctatactcagcagccttactgtgacccagctcctaaggagat

SEQ ID NO: 348066 - DNA, 55 bp, Artificial
  Synthetic oligonucleotide
cagctgccgacccctcaccgattatgcccagggctggggccctatcagctatacc

SEQ ID NO: 348067 - DNA, 60 bp, Artificial
  Synthetic oligonucleotide
cagctgctcattatacagcccagttatccactctagatatagactccacaccattaagtc

SEQ ID NO: 348068 - DNA, 55 bp, Artificial
  Synthetic oligonucleotide
cagctgctgagattagctatgtcaagatgatacaagatgatgtgcacccacatgc

SEQ ID NO: 348069 - DNA, 55 bp, Artificial
  Synthetic oligonucleotide
cagctgctgccgtaacagctggtgtagcacttgcaaagacaattagattagaggg

SEQ ID NO: 348070 - DNA, 55 bp, Artificial
  Synthetic oligonucleotide
cagctgctggaaagaatctatgcattgtcagagcaatggatgtgggatacatgtg

SEQ ID NO: 348071 - DNA, 60 bp, Artificial
  Synthetic oligonucleotide
cagctgctgggatcatgaagaaccccacggtggacgggataacagtaatagatctagaac

SEQ ID NO: 348072 - DNA, 55 bp, Artificial
  Synthetic oligonucleotide
cagctgctgtctgggcctggtttgatgtgaagactattcctgcacatgacagcat

SEQ ID NO: 348073 - DNA, 56 bp, Artificial
  Synthetic oligonucleotide
cagctgcttaccgcttgtaccgggtctcggttagagaaccaggtctgagcccggga

SEQ ID NO: 348074 - DNA, 51 bp, Artificial
  Synthetic oligonucleotide
cagctggaccatctcccctagggcttcccgtcgcctaaactagggtgccac

SEQ ID NO: 348075 - DNA, 55 bp, Artificial
  Synthetic oligonucleotide
cagctggagaacaaccaacctcaagacaggaataggctagacatagcagacagaa

SEQ ID NO: 348076 - DNA, 59 bp, Artificial
  Synthetic oligonucleotide
cagctggatattgaagagccgcttaatcttacgactgtttaatatcacagtttacgatt

SEQ ID NO: 348077 - DNA, 50 bp, Artificial
  Synthetic oligonucleotide
cagctggatattgaagagtcacctaattatacgactgtttaatatcacag

SEQ ID NO: 348078 - DNA, 55 bp, Artificial
  Synthetic oligonucleotide
cagctggcaagaaacagtgttgggcctattagaagaagagcccaatgaccgtatt

SEQ ID NO: 348079 - DNA, 51 bp, Artificial
  Synthetic oligonucleotide
cagctggcacagatccaaactggttaatcaagagtgatgagtcctttatat

SEQ ID NO: 348080 - DNA, 60 bp, Artificial
  Synthetic oligonucleotide
cagctggcagatatcatatcacgtcaaaagatggatgagaaacctgtggatccaactggt

SEQ ID NO: 348081 - DNA, 60 bp, Artificial
  Synthetic oligonucleotide
cagctggcagcagttcgagtaacacatcaaaccactccaagacaacaccccagctaacat

SEQ ID NO: 348082 - DNA, 53 bp, Artificial
  Synthetic oligonucleotide
cagctggccagcgtactaggcccagcccgaaaagccttccccacatccgtcat

SEQ ID NO: 348083 - DNA, 60 bp, Artificial
  Synthetic oligonucleotide
cagctggcgtgatagactcggagcgaggacgaacctattgtggagtgaagttgaagacag

SEQ ID NO: 348084 - DNA, 55 bp, Artificial
  Synthetic oligonucleotide
cagctgggaaactataaaagagcaagtcgcaagggccaaggcagagcttctacgc

SEQ ID NO: 348085 - DNA, 59 bp, Artificial
  Synthetic oligonucleotide
cagctggtacagacctgcatgagggtaagtacaccgtaggcccttggacagacaaacta

SEQ ID NO: 348086 - DNA, 60 bp, Artificial
  Synthetic oligonucleotide
cagctggtacatcactcaaagggttaatcactagtgcatggaatggcataaaatcaataa

SEQ ID NO: 348087 - DNA, 60 bp, Artificial
  Synthetic oligonucleotide
cagctggtagtgttgtcggctcattagcatgctccccaggcattggtgtagttcgcgttt

SEQ ID NO: 348088 - DNA, 60 bp, Artificial
  Synthetic oligonucleotide
cagctggtatgtacagaaatgtcgggaccagcaatatacagatacctcaatgactacttc

SEQ ID NO: 348089 - DNA, 54 bp, Artificial
  Synthetic oligonucleotide
cagctggtcgtccaactattaaccacccaacctttgtaggaactgaacgttgta

SEQ ID NO: 348090 - DNA, 55 bp, Artificial
  Synthetic oligonucleotide
cagctggtgacgttagtcgcaacatacactcccttttgggagtccagcaggggca

SEQ ID NO: 348091 - DNA, 60 bp, Artificial
  Synthetic oligonucleotide
cagctggtgcttatggtggcttcagtatttcctgaccagagcagaagcgctactgcacgt

SEQ ID NO: 348092 - DNA, 55 bp, Artificial
  Synthetic oligonucleotide
cagctggttatgcgattctaaagtgtaatgataagacatttaacgggacaggacc

SEQ ID NO: 348093 - DNA, 60 bp, Artificial
  Synthetic oligonucleotide
cagctgtaaaccatctgatctcagataatgtacttatgaagaatagaattcatgagttga

SEQ ID NO: 348094 - DNA, 58 bp, Artificial
  Synthetic oligonucleotide
cagctgtacggtcccgaaagagataaaacttacaccatggatggagagtaccgactca

SEQ ID NO: 348095 - DNA, 60 bp, Artificial
  Synthetic oligonucleotide
cagctgtagaagtcgacgtgaaggacataccagcacaggaagtggagcatgaagctaaat

SEQ ID NO: 348096 - DNA, 55 bp, Artificial
  Synthetic oligonucleotide
cagctgtatcatgttctcatggatcgtgcatatcaactcatcaggctccatctac

SEQ ID NO: 348097 - DNA, 56 bp, Artificial
  Synthetic oligonucleotide
cagctgtcactattaggggtagtggcgaagttgtgagtcccctcttcctccctagg

SEQ ID NO: 348098 - DNA, 60 bp, Artificial
  Synthetic oligonucleotide
cagctgtctgacgacctcctctagcagatcgtccgtcgatctgaaatgttccccagtcga

SEQ ID NO: 348099 - DNA, 55 bp, Artificial
  Synthetic oligonucleotide
cagctgtctggttcaccgttctttatgaagccaactatgcgcatgcgtggcaaca

SEQ ID NO: 348100 - DNA, 60 bp, Artificial
  Synthetic oligonucleotide
cagctgtgacaaatgtcagctaaaaggggaagccatacatggacaagtagactgtagtcc

SEQ ID NO: 348101 - DNA, 60 bp, Artificial
  Synthetic oligonucleotide
cagctgtgataaatgtcagttaaaaggggaggccatgcatggacaggtagactgtagtcc

SEQ ID NO: 348102 - DNA, 55 bp, Artificial
  Synthetic oligonucleotide
cagctgtggcaaaatgcaatgtaaatcatgatgaggagttttgtgatatgcttcg

SEQ ID NO: 348103 - DNA, 55 bp, Artificial
  Synthetic oligonucleotide
cagctgtgggataagtgtgatgagtgtagtggaacaacttacaggcagaagccct

SEQ ID NO: 348104 - DNA, 55 bp, Artificial
  Synthetic oligonucleotide
cagctgtggtcgcctcagcaatagacgtgagcccagagagcttcgcttctccttc

SEQ ID NO: 348105 - DNA, 60 bp, Artificial
  Synthetic oligonucleotide
cagctgttaaaagatttcagtcttcaattgctatacctgcaagctgcactggcgaaagca

SEQ ID NO: 348106 - DNA, 59 bp, Artificial
  Synthetic oligonucleotide
cagctgttactcggaaacgcagctcttgggaacggcccacagtatgccacgggcgctac

SEQ ID NO: 348107 - DNA, 57 bp, Artificial
  Synthetic oligonucleotide
cagctgttccctgccgatagccggtccaagtcggtcgtcgacagccctggcgggacc

SEQ ID NO: 348108 - DNA, 60 bp, Artificial
  Synthetic oligonucleotide
cagctgttggccgttgctgatttgtgtaagtgttccgaagtccttgcatttggtgacact

SEQ ID NO: 348109 - DNA, 51 bp, Artificial
  Synthetic oligonucleotide
cagctgttgtgtggtagagaagtatgagacgtagaagagattcgaagggtc

SEQ ID NO: 348110 - DNA, 55 bp, Artificial
  Synthetic oligonucleotide
cagctgtttatgcacagatggagagaggacgttggttatacgaccaactgcacgg

SEQ ID NO: 348111 - DNA, 55 bp, Artificial
  Synthetic oligonucleotide
cagctgtttgctacaccctataagccagcagggaatggatgatgatcacagagaa

SEQ ID NO: 348112 - DNA, 55 bp, Artificial
  Synthetic oligonucleotide
cagctgtttgtgcgtcagattacctccggtggttagagattctgcgctagtccgg

SEQ ID NO: 348113 - DNA, 55 bp, Artificial
  Synthetic oligonucleotide
cagcttaaagcgggagacaacccatatataaaattcaatcacgctgaccaggact

SEQ ID NO: 348114 - DNA, 60 bp, Artificial
  Synthetic oligonucleotide
cagcttaagaatctaaatgcgacgatacgacgccttgatgcttgtcagaatctcacgccc

SEQ ID NO: 348115 - DNA, 55 bp, Artificial
  Synthetic oligonucleotide
cagcttaattagcagaaccattcctgggcgggaaactgcagtataaaagccactc

SEQ ID NO: 348116 - DNA, 55 bp, Artificial
  Synthetic oligonucleotide
cagcttacagacgggtttcctcgcttccttgttttacacccacaagttcaacagc

SEQ ID NO: 348117 - DNA, 60 bp, Artificial
  Synthetic oligonucleotide
cagcttacagcggtattgtttagcgagatattatgatgtacgaccgggattgatgggacg

SEQ ID NO: 348118 - DNA, 60 bp, Artificial
  Synthetic oligonucleotide
cagcttacataaccgtgatctccctgccattgtctccttccatcctacttatgactgtcc

SEQ ID NO: 348119 - DNA, 55 bp, Artificial
  Synthetic oligonucleotide
cagcttaccacaaggaaccgctcacacggctggcactgccttacacggctccaca

SEQ ID NO: 348120 - DNA, 52 bp, Artificial
  Synthetic oligonucleotide
cagcttagaagaaagttagagctatttacttatgtcaggtttgattcagagt

SEQ ID NO: 348121 - DNA, 55 bp, Artificial
  Synthetic oligonucleotide
cagcttaggagaacaagagctggggatgggcaggaagaccatcctgaaaggcaag

SEQ ID NO: 348122 - DNA, 52 bp, Artificial
  Synthetic oligonucleotide
cagcttaggatccgtagcaccgcccccgttactaggaaacaggccggaagcc

SEQ ID NO: 348123 - DNA, 55 bp, Artificial
  Synthetic oligonucleotide
cagcttagtgtgtcgccttccgcacacaacatgctgagtaagttaacaccgttgg

SEQ ID NO: 348124 - DNA, 57 bp, Artificial
  Synthetic oligonucleotide
cagcttatatacggtactttcgtggaatccaagagtacatcaagaccgttagaccta

SEQ ID NO: 348125 - DNA, 60 bp, Artificial
  Synthetic oligonucleotide
cagcttatcaccttctactgctttaatggccttaaggatatgtctccaagaatttagagc

SEQ ID NO: 348126 - DNA, 52 bp, Artificial
  Synthetic oligonucleotide
cagcttatgaatcaggagatgacatactactggaaatcgggagagttttcct

SEQ ID NO: 348127 - DNA, 55 bp, Artificial
  Synthetic oligonucleotide
cagcttatgctctcgatttgactgctgcccttactgctaatttaggtgctaagca

SEQ ID NO: 348128 - DNA, 59 bp, Artificial
  Synthetic oligonucleotide
cagcttatgctttgcagcactaacactaacttacacatttctacctcaaccacttaccc

SEQ ID NO: 348129 - DNA, 60 bp, Artificial
  Synthetic oligonucleotide
cagcttatgtgactgttgctaaggtctcgcacctgctcacgtataagcgtggttttcttg

SEQ ID NO: 348130 - DNA, 57 bp, Artificial
  Synthetic oligonucleotide
cagcttcaaatgtcataatgatgcagaaaggcaattataggggccagagaaagattg

SEQ ID NO: 348131 - DNA, 55 bp, Artificial
  Synthetic oligonucleotide
cagcttcagatcacagtcatacatgatctttatgtacatcaggtgggcgcctcga

SEQ ID NO: 348132 - DNA, 60 bp, Artificial
  Synthetic oligonucleotide
cagcttcagcggaggccatatagaagaatgctcatgctaccccaatgaaggtaaggtgga

SEQ ID NO: 348133 - DNA, 55 bp, Artificial
  Synthetic oligonucleotide
cagcttcagttggggaatgtatgtcaatagggtaaatgcctcagggtcacatgta

SEQ ID NO: 348134 - DNA, 55 bp, Artificial
  Synthetic oligonucleotide
cagcttccatgcgagcccgaaccggatgttacagtgctcacctccatgctcaccg

SEQ ID NO: 348135 - DNA, 55 bp, Artificial
  Synthetic oligonucleotide
cagcttccttcaggtagcgtggacctgggtgactcagacgctgggtgctgcttgg

SEQ ID NO: 348136 - DNA, 60 bp, Artificial
  Synthetic oligonucleotide
cagcttcctttgacagagtgcatctgggatatgtaaggaaatagttctttgcgtttatct

SEQ ID NO: 348137 - DNA, 55 bp, Artificial
  Synthetic oligonucleotide
cagcttctaacccatcagatgcaccaccaactgctactcaagctggtgcccagag

SEQ ID NO: 348138 - DNA, 55 bp, Artificial
  Synthetic oligonucleotide
cagcttctacacctagaggtatgaactatatcgaaagtggggcatccgtggaagg

SEQ ID NO: 348139 - DNA, 55 bp, Artificial
  Synthetic oligonucleotide
cagcttctctggaaacccacggaggaagccgataggggagggtggaccgagtgga

SEQ ID NO: 348140 - DNA, 55 bp, Artificial
  Synthetic oligonucleotide
cagcttctgtccagaaagtgcaggccatatttgatggacatccatctgatgtgac

SEQ ID NO: 348141 - DNA, 55 bp, Artificial
  Synthetic oligonucleotide
cagcttgaccaagaatgccaatttcctgtggggccagagggaataccatgctaca

SEQ ID NO: 348142 - DNA, 55 bp, Artificial
  Synthetic oligonucleotide
cagcttgaccgagataaccttaaggaactagtagttattgcaaatgatgatgaca

SEQ ID NO: 348143 - DNA, 58 bp, Artificial
  Synthetic oligonucleotide
cagcttgatactgtcattgacttcgaacgcgcatataaatcatggcgatttgacgcca

SEQ ID NO: 348144 - DNA, 55 bp, Artificial
  Synthetic oligonucleotide
cagcttgcaaaacagaaccaggaacggttaacagagttgaatgagctaaaacgtg

SEQ ID NO: 348145 - DNA, 55 bp, Artificial
  Synthetic oligonucleotide
cagcttgcaagatgccttcaccaaccggtaggtaggcagaataatggatctgcga

SEQ ID NO: 348146 - DNA, 55 bp, Artificial
  Synthetic oligonucleotide
cagcttgcagacgggtttcctcgcttccctgttttacgtcaggaacttcaacagc

SEQ ID NO: 348147 - DNA, 55 bp, Artificial
  Synthetic oligonucleotide
cagcttgcgggatggcaggatgggagctcccaaaactctatgtaaccggtgcgcc

SEQ ID NO: 348148 - DNA, 60 bp, Artificial
  Synthetic oligonucleotide
cagcttgcgtcatctactgtccattcctactcagctgacatactggggcatggactcaag

SEQ ID NO: 348149 - DNA, 59 bp, Artificial
  Synthetic oligonucleotide
cagcttgctagcttggcgtcaacggaggcgtagtggtcctacggatagtttggaattca

SEQ ID NO: 348150 - DNA, 60 bp, Artificial
  Synthetic oligonucleotide
cagcttgctccgaacgccttactttgtgcgcgcacatatccttttacgcgcgtgcatggt

SEQ ID NO: 348151 - DNA, 60 bp, Artificial
  Synthetic oligonucleotide
cagcttgcttaacgtcacagctatagcagtagctgagggaacagatagagttatagaaat

SEQ ID NO: 348152 - DNA, 60 bp, Artificial
  Synthetic oligonucleotide
cagcttgcttcgctaagtcaacaattttcacgattggatgaatgctatggtttcatcagg

SEQ ID NO: 348153 - DNA, 55 bp, Artificial
  Synthetic oligonucleotide
cagcttggagcaagaccctttgcgctttattcggcccctggttccgggccataga

SEQ ID NO: 348154 - DNA, 58 bp, Artificial
  Synthetic oligonucleotide
cagcttggtttcgaccggagtttcgactcgattggcacttcacgtgtcatccgtgtcg

SEQ ID NO: 348155 - DNA, 60 bp, Artificial
  Synthetic oligonucleotide
cagcttgtagtcgtaactgccagtgtagcatgtctcaaagtaattcacactagccctgtt

SEQ ID NO: 348156 - DNA, 55 bp, Artificial
  Synthetic oligonucleotide
cagcttgtatgtacctcacagtgtggtttcctgacacagcaagtgctgaattgcc

SEQ ID NO: 348157 - DNA, 55 bp, Artificial
  Synthetic oligonucleotide
cagcttgtcagtatactatgtgtgaatatcctcacactgtttgtaagtctaaggg

SEQ ID NO: 348158 - DNA, 60 bp, Artificial
  Synthetic oligonucleotide
cagcttgtgatctgcatcttactgggacatgggacactctcattgagcgaaagaatgcca

SEQ ID NO: 348159 - DNA, 60 bp, Artificial
  Synthetic oligonucleotide
cagcttgttcaatactatagctatagcagtagctgagggaacagatagggttatagaagt

SEQ ID NO: 348160 - DNA, 53 bp, Artificial
  Synthetic oligonucleotide
cagcttgttcatagcttaatcttgtgtcacgaatagtgactacgactgatcct

SEQ ID NO: 348161 - DNA, 56 bp, Artificial
  Synthetic oligonucleotide
cagctttaaagcgctccccctcggaaatgagctcggtccaggcctccccgaggagc

SEQ ID NO: 348162 - DNA, 55 bp, Artificial
  Synthetic oligonucleotide
cagctttaacttacccttaaacttcgcgaagtgggtcctctgctgaacattcgtg

SEQ ID NO: 348163 - DNA, 60 bp, Artificial
  Synthetic oligonucleotide
cagctttaagtggatcaacaaaatatgccgctgttgctctcgatttctcacaatatgatt

SEQ ID NO: 348164 - DNA, 56 bp, Artificial
  Synthetic oligonucleotide
cagctttataggggtcccttggacttgacaataattataactggggctactgatgt

SEQ ID NO: 348165 - DNA, 55 bp, Artificial
  Synthetic oligonucleotide
cagctttatgaagtccattatggccacacagttaagggacctagcaacgtgggtg

SEQ ID NO: 348166 - DNA, 60 bp, Artificial
  Synthetic oligonucleotide
cagctttccacaagaaccccggtgttgtgacaggatcagctgtcgggtgtgacccagatc

SEQ ID NO: 348167 - DNA, 55 bp, Artificial
  Synthetic oligonucleotide
cagctttgcagctaggaagaaaattgtactcttggtattgtaaacctccttacag

SEQ ID NO: 348168 - DNA, 56 bp, Artificial
  Synthetic oligonucleotide
cagctttggacgtgtgatccacattttgtccaccgaatactgtaaccgttggttac

SEQ ID NO: 348169 - DNA, 60 bp, Artificial
  Synthetic oligonucleotide
cagctttggcggttcaacctcctatgatgccgataaccgaccgttgcttgttatgcacac

SEQ ID NO: 348170 - DNA, 59 bp, Artificial
  Synthetic oligonucleotide
cagctttggtcgatgtgttgtccattgctcctgttaaagaccgaggtgtgttctataag

SEQ ID NO: 348171 - DNA, 60 bp, Artificial
  Synthetic oligonucleotide
cagcttttagatccacttacagaagattttagtcagtcacacttggtgcttactagtagc

SEQ ID NO: 348172 - DNA, 60 bp, Artificial
  Synthetic oligonucleotide
cagcttttgaggcgtcttcaccagtggataagctcggattgtaccactccatgctccggt

SEQ ID NO: 348173 - DNA, 60 bp, Artificial
  Synthetic oligonucleotide
caggaaaagactatggattagtcatgacaccagcagacaagggtgctaccttcacagatg

SEQ ID NO: 348174 - DNA, 55 bp, Artificial
  Synthetic oligonucleotide
caggaaaagccaaagtgtgttgtgttaaattaactgctatggacttagaattacc

SEQ ID NO: 348175 - DNA, 55 bp, Artificial
  Synthetic oligonucleotide
caggaaaaggtctcccacaaggaccttgcctggaacattcaagtctttggtttca

SEQ ID NO: 348176 - DNA, 55 bp, Artificial
  Synthetic oligonucleotide
caggaaaagtcagttgaccatcaagcaagtaagagaccatcggaggctaaactgg

SEQ ID NO: 348177 - DNA, 55 bp, Artificial
  Synthetic oligonucleotide
caggaaacccaggtggggcaccaagctatccattcaataccgcccctgacgttcg

SEQ ID NO: 348178 - DNA, 55 bp, Artificial
  Synthetic oligonucleotide
caggaaaccctaccgcctacaacaaagcgccgttcacgagacttgcgctccccta

SEQ ID NO: 348179 - DNA, 51 bp, Artificial
  Synthetic oligonucleotide
caggaaacctgtgggtcacggtatactatggggtacccgtgtggagagatg

SEQ ID NO: 348180 - DNA, 53 bp, Artificial
  Synthetic oligonucleotide
caggaaactaatttacctaccgcaactctgttcggtgtgcgttatcgtaaccc

SEQ ID NO: 348181 - DNA, 55 bp, Artificial
  Synthetic oligonucleotide
caggaaagatattcatatcgcgtgcgtacattggatatctgcacgccactacgcc

SEQ ID NO: 348182 - DNA, 55 bp, Artificial
  Synthetic oligonucleotide
caggaaaggcgacaatcaaccgtaaagcagaaacttcatcggctcatgacgtagc

SEQ ID NO: 348183 - DNA, 55 bp, Artificial
  Synthetic oligonucleotide
caggaaaggctaaaatatgttgcgttaaaatgactgccatggatttagagctacc

SEQ ID NO: 348184 - DNA, 53 bp, Artificial
  Synthetic oligonucleotide
caggaaataaacttcaaatttatggaacgacttaagctgaaacttttgtccga

SEQ ID NO: 348185 - DNA, 55 bp, Artificial
  Synthetic oligonucleotide
caggaaataacagcagaggacaactacagataggaccaggggtatccttctataa

SEQ ID NO: 348186 - DNA, 51 bp, Artificial
  Synthetic oligonucleotide
caggaaatctacgtagccccctaggagttcacaaaacccctcaaaccctaa

SEQ ID NO: 348187 - DNA, 55 bp, Artificial
  Synthetic oligonucleotide
caggaaatgaggtgtttctgggcggatgcaagtgaaaacgggccattttcgcgcg

SEQ ID NO: 348188 - DNA, 55 bp, Artificial
  Synthetic oligonucleotide
caggaaatgctgagattgaagatctcacttttctggcacggtctgcactcatatt

SEQ ID NO: 348189 - DNA, 54 bp, Artificial
  Synthetic oligonucleotide
caggaaattaaagaacagggtgttggattgatagcagagtgcgcaactttcttg

SEQ ID NO: 348190 - DNA, 54 bp, Artificial
  Synthetic oligonucleotide
caggaaattaaagaacagggtgttgggttgatagcagagtgtagaacttttcta

SEQ ID NO: 348191 - DNA, 57 bp, Artificial
  Synthetic oligonucleotide
caggaaattaaggacctaagagaaatcttagaataccttaagcaccaatctacatga

SEQ ID NO: 348192 - DNA, 55 bp, Artificial
  Synthetic oligonucleotide
caggaaattctggagacaccccaacaatgcaatgtgacatgatccagttaaagcc

SEQ ID NO: 348193 - DNA, 56 bp, Artificial
  Synthetic oligonucleotide
caggaaattctgtttaacaacgtgaggtggttatccatacagtcaaaaagattcgc

SEQ ID NO: 348194 - DNA, 58 bp, Artificial
  Synthetic oligonucleotide
caggaaattgagttatctcgagtcactacgacaaatcaatgaagatgtttacgctttt

SEQ ID NO: 348195 - DNA, 60 bp, Artificial
  Synthetic oligonucleotide
caggaacaaaggaactcatatcattatacaatacagttgcagttctctattgtgtacatg

SEQ ID NO: 348196 - DNA, 55 bp, Artificial
  Synthetic oligonucleotide
caggaacaaatagagtggaccttcaatgccaatccaagaatagacgtaggggcac

SEQ ID NO: 348197 - DNA, 60 bp, Artificial
  Synthetic oligonucleotide
caggaacaaatagcatggatgacaaacaacccacctattccagtgggagacatctataaa

SEQ ID NO: 348198 - DNA, 51 bp, Artificial
  Synthetic oligonucleotide
caggaacaagtaacatggatgacaagtaatccacctatcccagtaggagag

SEQ ID NO: 348199 - DNA, 55 bp, Artificial
  Synthetic oligonucleotide
caggaacaccaatttactcatcccctggatgctgactaatcagaggaacgtcagc

SEQ ID NO: 348200 - DNA, 60 bp, Artificial
  Synthetic oligonucleotide
caggaacacgcaatcaaacagctggagatactacgcctgaagcgggaactagaaatgaaa

SEQ ID NO: 348201 - DNA, 60 bp, Artificial
  Synthetic oligonucleotide
caggaacacgcagtgtttgcgtgtgtcacttctgacgggtggtacgcgattgatgacgag

SEQ ID NO: 348202 - DNA, 55 bp, Artificial
  Synthetic oligonucleotide
caggaacatacagccagagtggcactaccattactatcacggagaactcacacgg

SEQ ID NO: 348203 - DNA, 58 bp, Artificial
  Synthetic oligonucleotide
caggaacccccagcaccaatgagacaaactccacaaccacaataatcaactacaacac

SEQ ID NO: 348204 - DNA, 59 bp, Artificial
  Synthetic oligonucleotide
caggaaccctagggttcgagttgtgttccgatctcatccgcatactgcgggtcaagcag

SEQ ID NO: 348205 - DNA, 56 bp, Artificial
  Synthetic oligonucleotide
caggaaccgaccatcgagttcaagacatataaatactactcggaaaagaaagtcta

SEQ ID NO: 348206 - DNA, 55 bp, Artificial
  Synthetic oligonucleotide
caggaaccgcacacattgaagccagccaaggttgaagttgatgaagacagctggg

SEQ ID NO: 348207 - DNA, 55 bp, Artificial
  Synthetic oligonucleotide
caggaaccgcactcagaattggccatacagagcgtggtctcagtgaagtgcctag

SEQ ID NO: 348208 - DNA, 52 bp, Artificial
  Synthetic oligonucleotide
caggaaccggaaagacgactttagccactagagaaaacaacgcttttattat

SEQ ID NO: 348209 - DNA, 51 bp, Artificial
  Synthetic oligonucleotide
caggaacgagtgtccactctaataccccgaggaatgctacgcaggtacccc

SEQ ID NO: 348210 - DNA, 55 bp, Artificial
  Synthetic oligonucleotide
caggaacgcaacccatcacggttatgacgtatggttatgcattgaatcacttcca

SEQ ID NO: 348211 - DNA, 57 bp, Artificial
  Synthetic oligonucleotide
caggaacggactacgggtgatggtgtttataagtcactaatttttatgagacgctca

SEQ ID NO: 348212 - DNA, 55 bp, Artificial
  Synthetic oligonucleotide
caggaacgggatgctagatggtatacgagaagcgatgcgcagatatcaacatctg

SEQ ID NO: 348213 - DNA, 51 bp, Artificial
  Synthetic oligonucleotide
caggaacgttagtaaaagaggatgataagaacggactaacgtaagtttggg

SEQ ID NO: 348214 - DNA, 51 bp, Artificial
  Synthetic oligonucleotide
caggaactgatagacaaggaaccgatagacaaggagacatatcccttagcc

SEQ ID NO: 348215 - DNA, 58 bp, Artificial
  Synthetic oligonucleotide
caggaacttgatcaaaggaagaacataggaagggagaaacataaggagctggtggctc

SEQ ID NO: 348216 - DNA, 53 bp, Artificial
  Synthetic oligonucleotide
caggaacttgcgtattagctacccttctgccagatatagatattgtccctggt

SEQ ID NO: 348217 - DNA, 55 bp, Artificial
  Synthetic oligonucleotide
caggaacttggaccacccacacattttacctgtgggttatccaactgggctcgtg

SEQ ID NO: 348218 - DNA, 56 bp, Artificial
  Synthetic oligonucleotide
caggaagaacagtcagcatttcgtcccgaagtggttttgaaatcctactaatagaa

SEQ ID NO: 348219 - DNA, 54 bp, Artificial
  Synthetic oligonucleotide
caggaagaacggatagtaaatttccaacctgactatcccattacagctagaatt

SEQ ID NO: 348220 - DNA, 60 bp, Artificial
  Synthetic oligonucleotide
caggaagaattatcagggcttattgagatggggcaccttgctccttgggatattgatgat

SEQ ID NO: 348221 - DNA, 60 bp, Artificial
  Synthetic oligonucleotide
caggaagaattggcagcaatggtggagagggggcaccttgctccttgggatgttgttgat

SEQ ID NO: 348222 - DNA, 55 bp, Artificial
  Synthetic oligonucleotide
caggaagacaccctatcagcatggttgcactatcacctctcggtgctttggtagc

SEQ ID NO: 348223 - DNA, 60 bp, Artificial
  Synthetic oligonucleotide
caggaagacaggagaagaatcctgctctcagaatgaaatggatgatggcgatgaaatacc

SEQ ID NO: 348224 - DNA, 55 bp, Artificial
  Synthetic oligonucleotide
caggaagagcgatcgagggcgcgtataaactaaaaaaggtgataaacgcattaag

SEQ ID NO: 348225 - DNA, 52 bp, Artificial
  Synthetic oligonucleotide
caggaagagggttcgcggccctgtaaaaggaaatttagggcgccgaggcctc

SEQ ID NO: 348226 - DNA, 57 bp, Artificial
  Synthetic oligonucleotide
caggaagaggtgaccaatgctactgaaacagtggagagtacaagtttaaacaggtta

SEQ ID NO: 348227 - DNA, 55 bp, Artificial
  Synthetic oligonucleotide
caggaagagtcttgaactaccaagtagatgcagacgggaacatttacttcctttc

SEQ ID NO: 348228 - DNA, 51 bp, Artificial
  Synthetic oligonucleotide
caggaagagttagaacagatcagacaaacgcaaatcgatatgcaggaggaa

SEQ ID NO: 348229 - DNA, 55 bp, Artificial
  Synthetic oligonucleotide
caggaagatagtgggaattccacctttaatcatggctggctttccgtacttcgtg

SEQ ID NO: 348230 - DNA, 59 bp, Artificial
  Synthetic oligonucleotide
caggaagcatctcaagggacttagcggtgtaaccaaggtagctcaattcgtctggcgtg

SEQ ID NO: 348231 - DNA, 55 bp, Artificial
  Synthetic oligonucleotide
caggaagccgctaagaactatgcggaacagtttggtatcgacgagaccgatgagc

SEQ ID NO: 348232 - DNA, 54 bp, Artificial
  Synthetic oligonucleotide
caggaagctctcgaagagttctatagaaacgaaatccttgacttagagtgggtg

SEQ ID NO: 348233 - DNA, 55 bp, Artificial
  Synthetic oligonucleotide
caggaaggaaagtgcatgactgggcagccagccagtggcagttaatttgcgagcc

SEQ ID NO: 348234 - DNA, 56 bp, Artificial
  Synthetic oligonucleotide
caggaagggtctattgactcccgtgtttggggacgtgttggtgattgtctgaacga

SEQ ID NO: 348235 - DNA, 55 bp, Artificial
  Synthetic oligonucleotide
caggaaggtgatgattttcaagacaggtgataaccaccttgaagctgcctgtgac

SEQ ID NO: 348236 - DNA, 55 bp, Artificial
  Synthetic oligonucleotide
caggaagtagtgcttgacacgagggttggccggttcgttggagtccatcagggac

SEQ ID NO: 348237 - DNA, 57 bp, Artificial
  Synthetic oligonucleotide
caggaagtcaagcttaaaaagagtgaaggaaccatagcaggcaactcaggtcgttcg

SEQ ID NO: 348238 - DNA, 55 bp, Artificial
  Synthetic oligonucleotide
caggaagtcgcttccggctcgctatactggctacgagacattacggctaggccct

SEQ ID NO: 348239 - DNA, 57 bp, Artificial
  Synthetic oligonucleotide
caggaagtgaccccagttacgagcgtgccgcttgggatgtgttcctcagtgggaacc

SEQ ID NO: 348240 - DNA, 55 bp, Artificial
  Synthetic oligonucleotide
caggaagtgctcaacatgtagaggagtgttcctgttatccccgatatcctaacgt

SEQ ID NO: 348241 - DNA, 55 bp, Artificial
  Synthetic oligonucleotide
caggaagtgctcagcatatagaggaatgctcttgttatccccaatatccagacgt

SEQ ID NO: 348242 - DNA, 55 bp, Artificial
  Synthetic oligonucleotide
caggaagtggagtgtgcaggatcttcagaggattatgcaggtctggtcacgcagc

SEQ ID NO: 348243 - DNA, 60 bp, Artificial
  Synthetic oligonucleotide
caggaagttgaaaagagagataacattccatggggctaaggaggtcgcaatcagctactc

SEQ ID NO: 348244 - DNA, 55 bp, Artificial
  Synthetic oligonucleotide
caggaagttgaagcccgccccgattgtcaaatcaaatctcaatactctgatgtcg

SEQ ID NO: 348245 - DNA, 60 bp, Artificial
  Synthetic oligonucleotide
caggaagttgcgatcatcgaagacttcgacaaggtccattcagttcttggacatcacctc

SEQ ID NO: 348246 - DNA, 57 bp, Artificial
  Synthetic oligonucleotide
caggaatacgcactcgaccccgtactcccagccccgcgcgttagctacgatctccta

SEQ ID NO: 348247 - DNA, 55 bp, Artificial
  Synthetic oligonucleotide
caggaatactattgacaagagatggtggtgctaataatgcgactaacgagacctt

SEQ ID NO: 348248 - DNA, 58 bp, Artificial
  Synthetic oligonucleotide
caggaatagactctcctattagtgtagcactccttgaccggagaatgaaaaacgctaa

SEQ ID NO: 348249 - DNA, 60 bp, Artificial
  Synthetic oligonucleotide
caggaataggagatcagtgatatgctatgacttgtcttgcaattcaacacattgtaagcc

SEQ ID NO: 348250 - DNA, 60 bp, Artificial
  Synthetic oligonucleotide
caggaatatggcagctagattgcacacacctagaaggaaaagttatcctggtagcagtcc

SEQ ID NO: 348251 - DNA, 55 bp, Artificial
  Synthetic oligonucleotide
caggaatcagccagccgcaactgcattagccaatactatagaggtcttcagatca

SEQ ID NO: 348252 - DNA, 55 bp, Artificial
  Synthetic oligonucleotide
caggaatcagccggctgcaactgcgttagctaacactatagaggttttcagatca

SEQ ID NO: 348253 - DNA, 55 bp, Artificial
  Synthetic oligonucleotide
caggaatcatcaactcaaatgcatcaatgggtgaatgtgatgcgaagtgccagac

SEQ ID NO: 348254 - DNA, 60 bp, Artificial
  Synthetic oligonucleotide
caggaatcccgggaatgctgagatcgaagaccttatctttctggcacggtctgcgctcat

SEQ ID NO: 348255 - DNA, 57 bp, Artificial
  Synthetic oligonucleotide
caggaatctcaggtaagctcattgtgcctcttggagtctcagctgacatgtagccca

SEQ ID NO: 348256 - DNA, 60 bp, Artificial
  Synthetic oligonucleotide
caggaatctgaatgcgtttgcatcaatgggacttgtgcagtagtaatgacagatgggagt

SEQ ID NO: 348257 - DNA, 60 bp, Artificial
  Synthetic oligonucleotide
caggaatctgtacatatgatcagtcatcaggtgatagggtcatggagggcccacattgac

SEQ ID NO: 348258 - DNA, 56 bp, Artificial
  Synthetic oligonucleotide
caggaatgacgttttctcctggtgggtctactttcctcatcactaatttccctcaa

SEQ ID NO: 348259 - DNA, 55 bp, Artificial
  Synthetic oligonucleotide
caggaatgattgatggatggtacggttatcatcaccaaaatgagcagggatcagg

SEQ ID NO: 348260 - DNA, 55 bp, Artificial
  Synthetic oligonucleotide
caggaatgcattaggcagtgggtggtagctggtctggtgtcagcggcgaaggggc

SEQ ID NO: 348261 - DNA, 55 bp, Artificial
  Synthetic oligonucleotide
caggaatggacgggcaatttgaattaaagcacggcgccttactttgtggtcttgg

SEQ ID NO: 348262 - DNA, 55 bp, Artificial
  Synthetic oligonucleotide
caggaatgggtgatttgggcaaccgagtcactactaatgagcggtctatcgtctc

SEQ ID NO: 348263 - DNA, 60 bp, Artificial
  Synthetic oligonucleotide
caggaatgttcctgtcgctggtacatctggcaccatccggccgtatagttcgatcgtttc

SEQ ID NO: 348264 - DNA, 55 bp, Artificial
  Synthetic oligonucleotide
caggaattagcaacacacgcgccagagattgatggaactataccagaagtagcac

SEQ ID NO: 348265 - DNA, 60 bp, Artificial
  Synthetic oligonucleotide
caggacaaacctcagaagatggtaacacctcagatcaaggagcaaatgaagaagcatatg

SEQ ID NO: 348266 - DNA, 56 bp, Artificial
  Synthetic oligonucleotide
caggacaaactgcaaacattagcccaagttggagtgaagtacaaaacacaaaacta

SEQ ID NO: 348267 - DNA, 60 bp, Artificial
  Synthetic oligonucleotide
caggacaacagggcagagcgaatgcagactagcaagcaaagatagaggtcctccaatgca

SEQ ID NO: 348268 - DNA, 60 bp, Artificial
  Synthetic oligonucleotide
caggacaagccatctatgtaacaggtgctgtaacaggggacataagaaaagcacattgta

SEQ ID NO: 348269 - DNA, 55 bp, Artificial
  Synthetic oligonucleotide
caggacaatcattctatgcaacaggtgatataataggagacataagacaagctgc

SEQ ID NO: 348270 - DNA, 57 bp, Artificial
  Synthetic oligonucleotide
caggacagaaaggctgctatgttgggtacccatgtcatatgggatattggattgcaa

SEQ ID NO: 348271 - DNA, 60 bp, Artificial
  Synthetic oligonucleotide
caggacagagtgtatgctggtgtctcatccacctcttctgattttagagatcgcccagac

SEQ ID NO: 348272 - DNA, 60 bp, Artificial
  Synthetic oligonucleotide
caggacagcaatttgtggattataccctgctcaaatcaaagctagacagatggttagtcc

SEQ ID NO: 348273 - DNA, 60 bp, Artificial
  Synthetic oligonucleotide
caggacagccacacattaggctcaattcttgagttctataaggccatgaaagttgaatac

SEQ ID NO: 348274 - DNA, 60 bp, Artificial
  Synthetic oligonucleotide
caggacagtgtcggcactgctggaccagtaagcgagaggaccgcagacgcatacgtcaag

SEQ ID NO: 348275 - DNA, 55 bp, Artificial
  Synthetic oligonucleotide
caggacataaggcatgtaggaatgtaacagtatcagcttgcactaggttaatcaa

SEQ ID NO: 348276 - DNA, 57 bp, Artificial
  Synthetic oligonucleotide
caggacatggaaccaggtgacaagttaagtggcctatttatccttactgtcttgtta

SEQ ID NO: 348277 - DNA, 55 bp, Artificial
  Synthetic oligonucleotide
caggacatggacattgtggcctctgaacatctgctgcatcagtctcttgttggaa

SEQ ID NO: 348278 - DNA, 52 bp, Artificial
  Synthetic oligonucleotide
caggaccaatcttgaccttgtgggaaggcaacccgggaaggttttggaacac

SEQ ID NO: 348279 - DNA, 60 bp, Artificial
  Synthetic oligonucleotide
caggaccacttaaggtgtacgcgcctttgtcatgggatagcatcaataagcgaattgtgt

SEQ ID NO: 348280 - DNA, 54 bp, Artificial
  Synthetic oligonucleotide
caggaccatcttgagttttgggagggcgtcttcacgggtttaacccatatagac

SEQ ID NO: 348281 - DNA, 55 bp, Artificial
  Synthetic oligonucleotide
caggaccattcacgactttctccagaagccccacctcacgctagtagacgccgag

SEQ ID NO: 348282 - DNA, 59 bp, Artificial
  Synthetic oligonucleotide
caggacccatcaaccacgatagtggttccatatccaggactgtccattgcatccggagg

SEQ ID NO: 348283 - DNA, 48 bp, Artificial
  Synthetic oligonucleotide
caggaccccctttcgaaaagaccgaggggggtggctaggaacacgggg

SEQ ID NO: 348284 - DNA, 55 bp, Artificial
  Synthetic oligonucleotide
caggacccttaccggagctgcaaccttttcagatgacccggtttccacaacgatc

SEQ ID NO: 348285 - DNA, 55 bp, Artificial
  Synthetic oligonucleotide
caggaccgtaacaaagcttccacagatagaatgacatttaggttgtgtgcacccc

SEQ ID NO: 348286 - DNA, 60 bp, Artificial
  Synthetic oligonucleotide
caggacctataagccatggctctcactcacagaacgccagtagaggaggtaatcgcccgt

SEQ ID NO: 348287 - DNA, 59 bp, Artificial
  Synthetic oligonucleotide
caggacctgtgcgacgttaacctgttgcaacttgtggttactgcggctgactttcaaca

SEQ ID NO: 348288 - DNA, 60 bp, Artificial
  Synthetic oligonucleotide
caggaccttgctagcaaaatccgtattcaacagtctatatgcatctccacaactcgaggg

SEQ ID NO: 348289 - DNA, 54 bp, Artificial
  Synthetic oligonucleotide
caggacgaacctcaggagttaatccaaattggacttccgtacaaaacacaacac

SEQ ID NO: 348290 - DNA, 57 bp, Artificial
  Synthetic oligonucleotide
caggacgaaggaaatgacgtaagccatgacgtctaatcccacaagaatttccttata

SEQ ID NO: 348291 - DNA, 55 bp, Artificial
  Synthetic oligonucleotide
caggacgagggttaacggattcatataagtcaaagctgttagatataacaccgcc

SEQ ID NO: 348292 - DNA, 55 bp, Artificial
  Synthetic oligonucleotide
caggacgagttcgctgcgatcggccaactcggccggaagacattggcgttctacg

SEQ ID NO: 348293 - DNA, 60 bp, Artificial
  Synthetic oligonucleotide
caggacgatattgcagcaacccgactgtgcatagaaatctggaggtggtgtaaggcaaat

SEQ ID NO: 348294 - DNA, 52 bp, Artificial
  Synthetic oligonucleotide
caggacgcctttaatcatggaatacaattacggtggcggttggttctagaat

SEQ ID NO: 348295 - DNA, 55 bp, Artificial
  Synthetic oligonucleotide
caggacgggtatgtgatggagcatcgttacataatgtccttacatttaggtagac

SEQ ID NO: 348296 - DNA, 60 bp, Artificial
  Synthetic oligonucleotide
caggacgtggcgcaattgaagcaacagggattgtcaacagcgatgatgtacaaggacttg

SEQ ID NO: 348297 - DNA, 58 bp, Artificial
  Synthetic oligonucleotide
caggactaacagggaacttattgaaactagtccgtaagtctcagaaatatgatgaagc

SEQ ID NO: 348298 - DNA, 57 bp, Artificial
  Synthetic oligonucleotide
caggactacacagtgacattatgttctacacaatagaaaatgcagtaccaattcatc

SEQ ID NO: 348299 - DNA, 55 bp, Artificial
  Synthetic oligonucleotide
caggactactattgacacgggatggaggaataaaggataacacaacagacataac

SEQ ID NO: 348300 - DNA, 55 bp, Artificial
  Synthetic oligonucleotide
caggactactattgacacgtgatggaggaaacaatagcacaaacggaacagagac

SEQ ID NO: 348301 - DNA, 55 bp, Artificial
  Synthetic oligonucleotide
caggactagagttagtgcggttatctttacaacgcctagcccggaagacctggcg

SEQ ID NO: 348302 - DNA, 55 bp, Artificial
  Synthetic oligonucleotide
caggactaggaacgaatttatgtttaggttatgcgatttgcaatggtaataacgg

SEQ ID NO: 348303 - DNA, 59 bp, Artificial
  Synthetic oligonucleotide
caggactattggtatcagatgggggaccaaacttatacaatatccggaatcttcacatc

SEQ ID NO: 348304 - DNA, 55 bp, Artificial
  Synthetic oligonucleotide
caggactcattgttggaccccattttgagtgatcataagaacatgacaaatcacc

SEQ ID NO: 348305 - DNA, 60 bp, Artificial
  Synthetic oligonucleotide
caggactcgtcatcgggctagttgcgaaattcgcatcaagtctaccattcgtcggtcagt

SEQ ID NO: 348306 - DNA, 55 bp, Artificial
  Synthetic oligonucleotide
caggactgacgagcacatttctgaactgcgagagttctaggtttagacgcagtcg

SEQ ID NO: 348307 - DNA, 55 bp, Artificial
  Synthetic oligonucleotide
caggactgaggaatgtgccccaaagagaaacaagaggtctgtttggagcaatagc

SEQ ID NO: 348308 - DNA, 58 bp, Artificial
  Synthetic oligonucleotide
caggactgcaagattgcccctttaatggttgcgtacatgttggaaagagaactggttc

SEQ ID NO: 348309 - DNA, 60 bp, Artificial
  Synthetic oligonucleotide
caggactgctctttgaaacagtgtagtgcagttgcgttaggaacgttgattgttgtacga

SEQ ID NO: 348310 - DNA, 51 bp, Artificial
  Synthetic oligonucleotide
caggactgggcccactcgggcttgcgagacctcgcggtagcagttgagccc

SEQ ID NO: 348311 - DNA, 56 bp, Artificial
  Synthetic oligonucleotide
caggactggtcggtaatttactgcgacaagttctaaagtctcaaaagtatgaggag

SEQ ID NO: 348312 - DNA, 58 bp, Artificial
  Synthetic oligonucleotide
caggactgtaaaatcgcccctttaatggtggcatacatgttggaaagagagctggttc

SEQ ID NO: 348313 - DNA, 60 bp, Artificial
  Synthetic oligonucleotide
caggactgttggtaatatcaggactattcccagtgtcaatcccaatcacagctgcggctt

SEQ ID NO: 348314 - DNA, 58 bp, Artificial
  Synthetic oligonucleotide
caggactgttggtttcagatggagggccaaacttatacaatatccggaatctccacat

SEQ ID NO: 348315 - DNA, 55 bp, Artificial
  Synthetic oligonucleotide
caggactgtttaatgacacaggactgaatggcactatcactactatcattctccc

SEQ ID NO: 348316 - DNA, 55 bp, Artificial
  Synthetic oligonucleotide
caggactgtttaatgacacaggatccaatggcactatcactctcctatgtcgcat

SEQ ID NO: 348317 - DNA, 55 bp, Artificial
  Synthetic oligonucleotide
caggactttcttcttaactcagggagcccttctcaatgacaagcattcaaatggg

SEQ ID NO: 348318 - DNA, 51 bp, Artificial
  Synthetic oligonucleotide
caggagaaaagaggcccgctctcgccagaagaggggcagacgaggacgcaa

SEQ ID NO: 348319 - DNA, 60 bp, Artificial
  Synthetic oligonucleotide
caggagaaactcttgacgagcagccaataacaaacttggatatggtagcagcacacttta

SEQ ID NO: 348320 - DNA, 55 bp, Artificial
  Synthetic oligonucleotide
caggagaaagcgcaagtggtgggcatgttattatctcaagtcaattcaatgcaga

SEQ ID NO: 348321 - DNA, 55 bp, Artificial
  Synthetic oligonucleotide
caggagaacaggatctatatgcatcctgctgtgttgacagccggcagaatcagtg

SEQ ID NO: 348322 - DNA, 54 bp, Artificial
  Synthetic oligonucleotide
caggagaacccaaaacactggaccaagcaatgcaagcaacttacgccatttggg

SEQ ID NO: 348323 - DNA, 60 bp, Artificial
  Synthetic oligonucleotide
caggagaagatatcagattaatataccccctacagccaatatcagtcgcgcgttctatgc

SEQ ID NO: 348324 - DNA, 55 bp, Artificial
  Synthetic oligonucleotide
caggagaaggctgtagacaaatattgggacagctacagtcatcccttcagacagg

SEQ ID NO: 348325 - DNA, 55 bp, Artificial
  Synthetic oligonucleotide
caggagaaggtggccgcatatgccagcggcaaatttccggtggtaaagtccacca

SEQ ID NO: 348326 - DNA, 54 bp, Artificial
  Synthetic oligonucleotide
caggagacaagtgttggaattaaaacaattactcttgttactcctaaaggtgcc

SEQ ID NO: 348327 - DNA, 55 bp, Artificial
  Synthetic oligonucleotide
caggagacagtgtgataaggccaaaactatttgcagtcaagatacctgcccaatg

SEQ ID NO: 348328 - DNA, 56 bp, Artificial
  Synthetic oligonucleotide
caggagaccggttggaatttccagtatggtggaggccatggtatctagggcccgaa

SEQ ID NO: 348329 - DNA, 53 bp, Artificial
  Synthetic oligonucleotide
caggagacgatccactcctggggacccactcactcttggagactcatccgctt

SEQ ID NO: 348330 - DNA, 55 bp, Artificial
  Synthetic oligonucleotide
caggagagattaaggggattatgcaagcagggagaagatctttgaaaccccaacc

SEQ ID NO: 348331 - DNA, 60 bp, Artificial
  Synthetic oligonucleotide
caggagaggctatattaattcctgaacatataggaggaactctgcagcagcaaactccag

SEQ ID NO: 348332 - DNA, 60 bp, Artificial
  Synthetic oligonucleotide
caggagagtcgcgaaattaagagcgctagtaagcagactatctcacattcctgcttcggc

SEQ ID NO: 348333 - DNA, 55 bp, Artificial
  Synthetic oligonucleotide
caggagataagattgacatgactccgagagccggagtcttgatgctggagagccc

SEQ ID NO: 348334 - DNA, 55 bp, Artificial
  Synthetic oligonucleotide
caggagatactaaggtatcgcaatttagatttaataagcgattgagcaccaggcg

SEQ ID NO: 348335 - DNA, 60 bp, Artificial
  Synthetic oligonucleotide
caggagatagctggcatgagcgcggatatcctagaagccgcgtcggaagaggtgcctttc

SEQ ID NO: 348336 - DNA, 54 bp, Artificial
  Synthetic oligonucleotide
caggagatatcagcctattctcggtcaatctcgactgccgtgtacgagaaatgc

SEQ ID NO: 348337 - DNA, 55 bp, Artificial
  Synthetic oligonucleotide
caggagatgatatgtgtgcaaatcgtaggttaagactcaagactgagcatgcggg

SEQ ID NO: 348338 - DNA, 59 bp, Artificial
  Synthetic oligonucleotide
caggagattcgtcgggggacagccaacaaggtaggagagattctacagcaacatgggga

SEQ ID NO: 348339 - DNA, 59 bp, Artificial
  Synthetic oligonucleotide
caggagattctaaccaggttaacacctttggaagcaacaggcagtgagaatctcaagtc

SEQ ID NO: 348340 - DNA, 60 bp, Artificial
  Synthetic oligonucleotide
caggagattttaccaactatgaggaactgagggagcaattgagctctgtatcatcattcg

SEQ ID NO: 348341 - DNA, 55 bp, Artificial
  Synthetic oligonucleotide
caggagcaagcgtgtcaagccctcgatcttctagtactagcaattcaagcggagg

SEQ ID NO: 348342 - DNA, 60 bp, Artificial
  Synthetic oligonucleotide
caggagcatattggagtgcatagttgtttctgcgacctgggtggtagagattgttctaga

SEQ ID NO: 348343 - DNA, 55 bp, Artificial
  Synthetic oligonucleotide
caggagccataataggagatataagacaagcacattgtaacattagtggagcaag

SEQ ID NO: 348344 - DNA, 58 bp, Artificial
  Synthetic oligonucleotide
caggagccgaggggagccgactgagtacgccataatttttgactagcggaggctagaa

SEQ ID NO: 348345 - DNA, 55 bp, Artificial
  Synthetic oligonucleotide
caggagcgcaggcggattcgcaaaggggcgtcggcatgacgtacgacgaaacgag

SEQ ID NO: 348346 - DNA, 60 bp, Artificial
  Synthetic oligonucleotide
caggagcggaggaaacaccaaccaacagagagcatctgcaggacaaatcagcgtacaacc

SEQ ID NO: 348347 - DNA, 55 bp, Artificial
  Synthetic oligonucleotide
caggagctcaaagacaccctaatcgaacttctcccaaatgatatagcggaatcag

SEQ ID NO: 348348 - DNA, 56 bp, Artificial
  Synthetic oligonucleotide
caggagctcggttgttgggcactgataactccgtggtcctctccggtaagctaact

SEQ ID NO: 348349 - DNA, 60 bp, Artificial
  Synthetic oligonucleotide
caggagctctggtttccagacctctttatcgaatcttccgacacgcatccgtggtacaca

SEQ ID NO: 348350 - DNA, 57 bp, Artificial
  Synthetic oligonucleotide
caggagctgaacgaggcaacttaccaagacttcttaaattattagataatcttgatg

SEQ ID NO: 348351 - DNA, 60 bp, Artificial
  Synthetic oligonucleotide
caggagctgctgacacggacatatacaccacgagttctcaggacgctatagtgtggaatc

SEQ ID NO: 348352 - DNA, 53 bp, Artificial
  Synthetic oligonucleotide
caggaggaacagccgtgacatggactggtgaccccgtatggcttgaagacgtt

SEQ ID NO: 348353 - DNA, 60 bp, Artificial
  Synthetic oligonucleotide
caggaggagtggtctgggcgggactggggagtggtcaacccccgatgctgcatataagca

SEQ ID NO: 348354 - DNA, 50 bp, Artificial
  Synthetic oligonucleotide
caggaggatcatcagtggtggtcaacccttctgagacaagatggaaccta

SEQ ID NO: 348355 - DNA, 60 bp, Artificial
  Synthetic oligonucleotide
caggaggattgtatgataaaggcagtccgaggtgatctgaattttgttaatagagcaaac

SEQ ID NO: 348356 - DNA, 60 bp, Artificial
  Synthetic oligonucleotide
caggaggattgtggtgccttgccgagaacaggacgagctcattgggagaggaagggtgtc

SEQ ID NO: 348357 - DNA, 60 bp, Artificial
  Synthetic oligonucleotide
caggaggcaataccactacacatgttcattctatgccacttcgggagagagttgttcaat

SEQ ID NO: 348358 - DNA, 55 bp, Artificial
  Synthetic oligonucleotide
caggaggcaccttttataagatggtaagagatgataaaaccatctacttcagccc

SEQ ID NO: 348359 - DNA, 60 bp, Artificial
  Synthetic oligonucleotide
caggaggcagcgaagtatgaaaatcatactgagaatgcgttgttgttgtatatggcttgt

SEQ ID NO: 348360 - DNA, 58 bp, Artificial
  Synthetic oligonucleotide
caggaggcatgaagagacaaattctgttgttgtcaaccctaaaactggcaggtgggac

SEQ ID NO: 348361 - DNA, 56 bp, Artificial
  Synthetic oligonucleotide
caggaggccaaaactgccatacactcgctcactgagagactctacgtaggagggcc

SEQ ID NO: 348362 - DNA, 57 bp, Artificial
  Synthetic oligonucleotide
caggaggctagcggactcgtcacacaggagacccagacggaccagctcgccagagat

SEQ ID NO: 348363 - DNA, 60 bp, Artificial
  Synthetic oligonucleotide
caggaggctgattcaactgatagtgagtgggagagacgaacaatcaatcgctgaggcgat

SEQ ID NO: 348364 - DNA, 57 bp, Artificial
  Synthetic oligonucleotide
caggaggggcatatacaggtttgtgactccaggggaacggccctcgggcatgttcga

SEQ ID NO: 348365 - DNA, 54 bp, Artificial
  Synthetic oligonucleotide
caggaggggtgacacccgcggcgcgctgttaagccccaggccaatttccaccct

SEQ ID NO: 348366 - DNA, 57 bp, Artificial
  Synthetic oligonucleotide
caggaggtatttgcagccgtagtccagtaggaactaaggccttatcccgcgccctca

SEQ ID NO: 348367 - DNA, 60 bp, Artificial
  Synthetic oligonucleotide
caggaggtcattatcattttgcacatccagttggccaatggccatacatgacaggtggag

SEQ ID NO: 348368 - DNA, 52 bp, Artificial
  Synthetic oligonucleotide
caggaggtccttcgcaagaggtggacggccagactaacgatccctgcggttt

SEQ ID NO: 348369 - DNA, 55 bp, Artificial
  Synthetic oligonucleotide
caggaggtggttctatcactcagtctggtttgtatactgctccgagtgcgtctca

SEQ ID NO: 348370 - DNA, 57 bp, Artificial
  Synthetic oligonucleotide
caggaggtgttaggcagcggaacactgaggtgcttttcagagaaaaattgaacaagg

SEQ ID NO: 348371 - DNA, 57 bp, Artificial
  Synthetic oligonucleotide
caggaggttatgaaaactgaccagttcataaagttgctgcctttttgtttctcacca

SEQ ID NO: 348372 - DNA, 55 bp, Artificial
  Synthetic oligonucleotide
caggagtaagtagcaatgtaaagctgaaagggacaatacatcccttattcgaggt

SEQ ID NO: 348373 - DNA, 55 bp, Artificial
  Synthetic oligonucleotide
caggagtaatcggtttggctctcatattctccgtattaacatctaaaattaactt

SEQ ID NO: 348374 - DNA, 55 bp, Artificial
  Synthetic oligonucleotide
caggagtacaggtcactgacgagcgagaatagaagcccagttcccagctactcgg

SEQ ID NO: 348375 - DNA, 52 bp, Artificial
  Synthetic oligonucleotide
caggagtaccaccctaactgtcgtgactgtagtgatgacaggtgtttgatac

SEQ ID NO: 348376 - DNA, 53 bp, Artificial
  Synthetic oligonucleotide
caggagtagggggcgggtcttttattgacaatcgcgtatggttcccagtttac

SEQ ID NO: 348377 - DNA, 58 bp, Artificial
  Synthetic oligonucleotide
caggagtaggtaatgcagtatatgtagtactattaaaagataacgtagacgataatcc

SEQ ID NO: 348378 - DNA, 52 bp, Artificial
  Synthetic oligonucleotide
caggagtcagtacagacaccagtggtaccaacggccccaccactggagatgc

SEQ ID NO: 348379 - DNA, 55 bp, Artificial
  Synthetic oligonucleotide
caggagtccatgactctaagagactccatagcaccagacctacgacttcaggctc

SEQ ID NO: 348380 - DNA, 55 bp, Artificial
  Synthetic oligonucleotide
caggagtcccagttaggactctaaaaacatgggtggaggctgtgaactccaaaaa

SEQ ID NO: 348381 - DNA, 51 bp, Artificial
  Synthetic oligonucleotide
caggagtcccatgtacatcacaatggaactcaatagcacactggatcctaa

SEQ ID NO: 348382 - DNA, 56 bp, Artificial
  Synthetic oligonucleotide
caggagtctccttagtgatcaaatgacataagtatgacacattcaacatgaacttg

SEQ ID NO: 348383 - DNA, 55 bp, Artificial
  Synthetic oligonucleotide
caggagtgatggattacatggttttctccatgattagttctatgatcgcaaacgc

SEQ ID NO: 348384 - DNA, 60 bp, Artificial
  Synthetic oligonucleotide
caggagtgatttgaacattgaatcttgctcaactaaatgccagtctgaaattggaggaat

SEQ ID NO: 348385 - DNA, 60 bp, Artificial
  Synthetic oligonucleotide
caggagtggaggaaacaccaaccaacatagggcatctgcagggcaaatcagtgtgcaacc

SEQ ID NO: 348386 - DNA, 60 bp, Artificial
  Synthetic oligonucleotide
caggagtggaggaaacaccagtcaacaaagagcatctgcagggcaaatcagtgtacagcc

SEQ ID NO: 348387 - DNA, 55 bp, Artificial
  Synthetic oligonucleotide
caggagtgtagactacaatgagagacttgacttcgaggctccaccaagcgtctgg

SEQ ID NO: 348388 - DNA, 60 bp, Artificial
  Synthetic oligonucleotide
caggagtgtgccaataggaagagcattattgctcccagagtactcaacattgtaccgccg

SEQ ID NO: 348389 - DNA, 55 bp, Artificial
  Synthetic oligonucleotide
caggagtgttgggacagtgttttcgatagaagtgtattagggtataaccctcctg

SEQ ID NO: 348390 - DNA, 55 bp, Artificial
  Synthetic oligonucleotide
caggagtgtttaggttttgtaattgggaaagtgcctcttctttggttagagagca

SEQ ID NO: 348391 - DNA, 60 bp, Artificial
  Synthetic oligonucleotide
caggagttacgtgctacaggcgctaggcatgccggcgcaccactatcccactcgcccggt

SEQ ID NO: 348392 - DNA, 54 bp, Artificial
  Synthetic oligonucleotide
caggagttatcactgccgtgtaacttttgcggtaatttcctctcggtttcggaa

SEQ ID NO: 348393 - DNA, 60 bp, Artificial
  Synthetic oligonucleotide
caggagttcacgattctgaagcatatgagcggcgaagacacgcagtaataagggtttctc

SEQ ID NO: 348394 - DNA, 52 bp, Artificial
  Synthetic oligonucleotide
caggagttccattaacattcaaagagcatccagtgagcagattaagtatggc

SEQ ID NO: 348395 - DNA, 55 bp, Artificial
  Synthetic oligonucleotide
caggagtttaaaatgaatccaaaccaaagaataataaccattgggacagtctgtc

SEQ ID NO: 348396 - DNA, 60 bp, Artificial
  Synthetic oligonucleotide
caggataaacgacagcaagtgtctggagacgatccagtgtaatgtcaagataaacctggg

SEQ ID NO: 348397 - DNA, 60 bp, Artificial
  Synthetic oligonucleotide
caggataaagtttgatgtagtggctataagaactgatggatcaaatatctcaacacagtg

SEQ ID NO: 348398 - DNA, 55 bp, Artificial
  Synthetic oligonucleotide
caggataaccggagtactacatcccaggtgcttagaggaactggctagtattgag

SEQ ID NO: 348399 - DNA, 55 bp, Artificial
  Synthetic oligonucleotide
caggataatttacaggttgtcgcaaaatgtccaggccaacttgtcaccaagcacg

SEQ ID NO: 348400 - DNA, 60 bp, Artificial
  Synthetic oligonucleotide
caggataccctgtatggatctggtgatagatacgttagaatgggaactgaaagcatgaat

SEQ ID NO: 348401 - DNA, 55 bp, Artificial
  Synthetic oligonucleotide
caggatagaaaatctatgtaagtatctggggatcacaaaaactacgggaataccc

SEQ ID NO: 348402 - DNA, 60 bp, Artificial
  Synthetic oligonucleotide
caggatagacagagccaacctaattggtggagaagttagcgcttccgttgagtgcatgga

SEQ ID NO: 348403 - DNA, 55 bp, Artificial
  Synthetic oligonucleotide
caggatagcgaggatgctatgtaaatctaagggctcatcccttgttatctcagga

SEQ ID NO: 348404 - DNA, 60 bp, Artificial
  Synthetic oligonucleotide
caggatagctctcctgggcacaagtgaaaactactgtcgtggcgagttagtagccagacg

SEQ ID NO: 348405 - DNA, 53 bp, Artificial
  Synthetic oligonucleotide
caggatagggtccatccttgtgcggggtataggggaaggggtaggcgtcgccc

SEQ ID NO: 348406 - DNA, 59 bp, Artificial
  Synthetic oligonucleotide
caggatataatggttgggcgacgatcgatgttgagtatagagaacccgcaccctacgta

SEQ ID NO: 348407 - DNA, 60 bp, Artificial
  Synthetic oligonucleotide
caggatatgacctactagctgaacaagaagttcacttaatgccaggagaagtaaggataa

SEQ ID NO: 348408 - DNA, 60 bp, Artificial
  Synthetic oligonucleotide
caggatatgcgtgaaacgcataaacggcctctggagtatttatatgattgtccgaatacc

SEQ ID NO: 348409 - DNA, 55 bp, Artificial
  Synthetic oligonucleotide
caggatattaaaaccgcgctaactgcgagttctcatgggaagtgtgcgttctgcg

SEQ ID NO: 348410 - DNA, 60 bp, Artificial
  Synthetic oligonucleotide
caggatattataagttaatatgtactcaacaaagtatcgacgaggattattagctaatca

SEQ ID NO: 348411 - DNA, 60 bp, Artificial
  Synthetic oligonucleotide
caggatcaagaaggagtttgttgaacgggtgcccaagatcaatctcgtcgcatgccgcaa

SEQ ID NO: 348412 - DNA, 55 bp, Artificial
  Synthetic oligonucleotide
caggatcaataggaaatttgtaccaacaaggatggccatctaatcaaaactggcc

SEQ ID NO: 348413 - DNA, 59 bp, Artificial
  Synthetic oligonucleotide
caggatcaatcctatttgaagaaccaatgataacaccagtaaatgtcggaacatggaaa

SEQ ID NO: 348414 - DNA, 55 bp, Artificial
  Synthetic oligonucleotide
caggatcaatttgacaaatggtatcaggctgttagcacagcatatgatgtaggcg

SEQ ID NO: 348415 - DNA, 55 bp, Artificial
  Synthetic oligonucleotide
caggatcactgagactctttccttctgaacgcgtgttaactacgaactctacgtt

SEQ ID NO: 348416 - DNA, 55 bp, Artificial
  Synthetic oligonucleotide
caggatcagtgtactttaaagaatatgctgatatagcggccttttcagtggaacc

SEQ ID NO: 348417 - DNA, 55 bp, Artificial
  Synthetic oligonucleotide
caggatcataaatgaaccatccgctgctgctatatactccgtctctaagtaccct

SEQ ID NO: 348418 - DNA, 56 bp, Artificial
  Synthetic oligonucleotide
caggatcatcttgaattttgggagggcgtgtttacaggcctcactcatatagacgc

SEQ ID NO: 348419 - DNA, 55 bp, Artificial
  Synthetic oligonucleotide
caggatcattagtggataatgactgtgaatcaaaatgcttttggaaaggtgggtc

SEQ ID NO: 348420 - DNA, 55 bp, Artificial
  Synthetic oligonucleotide
caggatccatgttcgagcatactagcatatttgtaacttcgtcgtacagcgttag

SEQ ID NO: 348421 - DNA, 59 bp, Artificial
  Synthetic oligonucleotide
caggatcccacaatgttgtataacaagatggaattcgagcctttccaatctctggttcc

SEQ ID NO: 348422 - DNA, 55 bp, Artificial
  Synthetic oligonucleotide
caggatcccctccctattgaccgcgccgccattagttcttatgcgcattacgctg

SEQ ID NO: 348423 - DNA, 55 bp, Artificial
  Synthetic oligonucleotide
caggatccctagcccaacaatactgaaagtcctaggacaggctgcgacgcgaagt

SEQ ID NO: 348424 - DNA, 59 bp, Artificial
  Synthetic oligonucleotide
caggatccgtcgttacggtcgctggggtgagcaacttcgagctgatcccaaatcctgaa

SEQ ID NO: 348425 - DNA, 59 bp, Artificial
  Synthetic oligonucleotide
caggatcgtacgcgtgcacgtagtaaacaacgtgaccatgattaacgttatatcgtcta

SEQ ID NO: 348426 - DNA, 59 bp, Artificial
  Synthetic oligonucleotide
caggatcgtggagtggataatggctccggatgaacccaaggccttagtatacgccgaca

SEQ ID NO: 348427 - DNA, 60 bp, Artificial
  Synthetic oligonucleotide
caggatctaccggacaatgagaacgcccgacgtgccagaggctgtgaagggccttgcaag

SEQ ID NO: 348428 - DNA, 55 bp, Artificial
  Synthetic oligonucleotide
caggatctgctttatctgtacattccctcgcaggagggttgaggtacttagaagg

SEQ ID NO: 348429 - DNA, 55 bp, Artificial
  Synthetic oligonucleotide
caggatctggacaatttatgactacagatgatttacaatctccatgtgctttacc

SEQ ID NO: 348430 - DNA, 55 bp, Artificial
  Synthetic oligonucleotide
caggatgaaagcaaattaaacaggcaggaaatagaatcggtaaagctagagagcc

SEQ ID NO: 348431 - DNA, 53 bp, Artificial
  Synthetic oligonucleotide
caggatgaattcataaacatggcagagttcattatgaagaaataccttacatc

SEQ ID NO: 348432 - DNA, 60 bp, Artificial
  Synthetic oligonucleotide
caggatgagtggggacatgaacacagctatgggcaattgcctgctggcttgtgctattac

SEQ ID NO: 348433 - DNA, 60 bp, Artificial
  Synthetic oligonucleotide
caggatgatagttcgaatgtggcgggaaacaaaaatggcgctgatgcggagttgtattcg

SEQ ID NO: 348434 - DNA, 55 bp, Artificial
  Synthetic oligonucleotide
caggatgatcaactaaatcccgccgatcaagcagatctggaagaggcagctgccc

SEQ ID NO: 348435 - DNA, 55 bp, Artificial
  Synthetic oligonucleotide
caggatgattccgatcaagaagaatccagaactgactcagtttatattggcatgt

SEQ ID NO: 348436 - DNA, 60 bp, Artificial
  Synthetic oligonucleotide
caggatgcgaccacttaaatggcgcagagtgggatgttttcatagagaggcccagtgcag

SEQ ID NO: 348437 - DNA, 55 bp, Artificial
  Synthetic oligonucleotide
caggatgctaaagatactacagaggagagtggaacagtcagaaaggatgatcctg

SEQ ID NO: 348438 - DNA, 54 bp, Artificial
  Synthetic oligonucleotide
caggatgctatttgctcctcttcgctacttaaagacgactgagactcgcgtcgc

SEQ ID NO: 348439 - DNA, 55 bp, Artificial
  Synthetic oligonucleotide
caggatggaagatgttcaaagagacttgagtgaaatggtgtcaattgttctgtcg

SEQ ID NO: 348440 - DNA, 60 bp, Artificial
  Synthetic oligonucleotide
caggatggacagatactgcacatggttcaggtgttgttcccatgagaactgacttagaac

SEQ ID NO: 348441 - DNA, 55 bp, Artificial
  Synthetic oligonucleotide
caggatggatagcgtcgagttcgccataataaacgaacaacgtcaacctgacgag

SEQ ID NO: 348442 - DNA, 60 bp, Artificial
  Synthetic oligonucleotide
caggatggcagtgatattattagtctgatgatatcggcggacggagttgaagcaacgaca

SEQ ID NO: 348443 - DNA, 57 bp, Artificial
  Synthetic oligonucleotide
caggatggctacctcgccgatggctccgatctacccccgaacagaccagggaaagcc

SEQ ID NO: 348444 - DNA, 55 bp, Artificial
  Synthetic oligonucleotide
caggatgggttcacaggctgccatcaagattggcaacgctgttgtgcacggacag

SEQ ID NO: 348445 - DNA, 59 bp, Artificial
  Synthetic oligonucleotide
caggatggtgttttctataacaccgtcccatgccggctctttttgtctcactgatgacg

SEQ ID NO: 348446 - DNA, 55 bp, Artificial
  Synthetic oligonucleotide
caggatggttcaaaagcacgacatatataactctagatcaaacctgcgaacacct

SEQ ID NO: 348447 - DNA, 60 bp, Artificial
  Synthetic oligonucleotide
caggatgtatagaagccctgatgtccctaagggatgtgaaggcccatgtaaggtccaatc

SEQ ID NO: 348448 - DNA, 59 bp, Artificial
  Synthetic oligonucleotide
caggatgtcaatattacaagaagtcgtagcagatgatccaactctacattggcctgacc

SEQ ID NO: 348449 - DNA, 60 bp, Artificial
  Synthetic oligonucleotide
caggatgtgcatattatgactatgtgggcgctttcggatcagggaccgatttatcacctg

SEQ ID NO: 348450 - DNA, 55 bp, Artificial
  Synthetic oligonucleotide
caggatgttatattagatttggtgccgcaacccgaaattgacctacagtgttacg

SEQ ID NO: 348451 - DNA, 60 bp, Artificial
  Synthetic oligonucleotide
caggatgtttgctctgagccaaggcacaacactcagagggcgacatgcaaatgggaccat

SEQ ID NO: 348452 - DNA, 57 bp, Artificial
  Synthetic oligonucleotide
caggattaagaaatgtccctcaaattgaatcaaggggattgtttggggcaatagctg

SEQ ID NO: 348453 - DNA, 55 bp, Artificial
  Synthetic oligonucleotide
caggattagtggaagctcaggtgatccctgaagaaacagcactacaagtagctct

SEQ ID NO: 348454 - DNA, 55 bp, Artificial
  Synthetic oligonucleotide
caggattatgtccagggtataaaagcttaagggctgcaagatctatgtgcaaatc

SEQ ID NO: 348455 - DNA, 56 bp, Artificial
  Synthetic oligonucleotide
caggattcctaggaccctgctcgtgttacaagcggggttttcttgttgacagaatc

SEQ ID NO: 348456 - DNA, 55 bp, Artificial
  Synthetic oligonucleotide
caggattccttcatacggggtcctgtctgttgatctgagtctgacagttgagctt

SEQ ID NO: 348457 - DNA, 56 bp, Artificial
  Synthetic oligonucleotide
caggattgaaagctgtccttgcttgtttaatcatgaccacttgcggtttaaaccca

SEQ ID NO: 348458 - DNA, 55 bp, Artificial
  Synthetic oligonucleotide
caggattgctaataggaccagtcctaactcaatctacattgaaggaaagttatcc

SEQ ID NO: 348459 - DNA, 54 bp, Artificial
  Synthetic oligonucleotide
caggattgctacgggaaaaaacctgggacaggatcgggatccaacaggggtaga

SEQ ID NO: 348460 - DNA, 56 bp, Artificial
  Synthetic oligonucleotide
caggattggaattttgtaatgttctccccgttcacttattacaaatgtgatttaga

SEQ ID NO: 348461 - DNA, 58 bp, Artificial
  Synthetic oligonucleotide
caggattggcaatgactggcacaggagaggcggttaccttaacgacataggttaagga

SEQ ID NO: 348462 - DNA, 57 bp, Artificial
  Synthetic oligonucleotide
caggattgggatagttacataacacgtttagatcgtatcccaaaatctattgaggga

SEQ ID NO: 348463 - DNA, 55 bp, Artificial
  Synthetic oligonucleotide
caggattggtgctgaaggtatgacatcagaagcagttgatggacgtagcaactca

SEQ ID NO: 348464 - DNA, 55 bp, Artificial
  Synthetic oligonucleotide
caggatttaatcatagactcaactaggactcaggccaacctaattccccacctgg

SEQ ID NO: 348465 - DNA, 50 bp, Artificial
  Synthetic oligonucleotide
caggatttatagtggaccttctgtcatcctctaaggatccaaaagttatt

SEQ ID NO: 348466 - DNA, 53 bp, Artificial
  Synthetic oligonucleotide
caggatttccctatattagtatgggtattaagaaaagggacctcattaacaac

SEQ ID NO: 348467 - DNA, 58 bp, Artificial
  Synthetic oligonucleotide
caggatttcctttgactgtcattgtcaactcaattctcaatgagattctgatcaaata

SEQ ID NO: 348468 - DNA, 56 bp, Artificial
  Synthetic oligonucleotide
caggatttgaaatactgaaagtcaggaatggttggacacaaaatagtaaagagcag

SEQ ID NO: 348469 - DNA, 60 bp, Artificial
  Synthetic oligonucleotide
caggattttagagacattgtttatttaagcagaccaacatacagtcgtgcccctgatggc

SEQ ID NO: 348470 - DNA, 55 bp, Artificial
  Synthetic oligonucleotide
caggattttctgggcactttggataggtaaggaacgtgttagcgttcctgtgtga

SEQ ID NO: 348471 - DNA, 56 bp, Artificial
  Synthetic oligonucleotide
caggattttggctctacagtgtttaatgtccctaccaaagtgttacgatatggtta

SEQ ID NO: 348472 - DNA, 60 bp, Artificial
  Synthetic oligonucleotide
caggcaaaaggggctgatgaaaaggtcagtcagaattatcctatagtgcagaatcttcaa

SEQ ID NO: 348473 - DNA, 55 bp, Artificial
  Synthetic oligonucleotide
caggcaaaatatgtaaaggactgtgccacaatgtgcaggcactacaaacgtgcag

SEQ ID NO: 348474 - DNA, 55 bp, Artificial
  Synthetic oligonucleotide
caggcaaagtcttgaaagtttcagcaacaccaccaggtcgtgaatgcgatttcac

SEQ ID NO: 348475 - DNA, 55 bp, Artificial
  Synthetic oligonucleotide
caggcaaatcatggctcactttagcaacgcggcagaggcatacattgcgaaaagg

SEQ ID NO: 348476 - DNA, 55 bp, Artificial
  Synthetic oligonucleotide
caggcaaatggcaacaacaaccaatccgctaatcagacatgagaaccgaatggtg

SEQ ID NO: 348477 - DNA, 60 bp, Artificial
  Synthetic oligonucleotide
caggcaacaagacaataaggaaccttcaaataggagcaggcatgactttctattcgcagc

SEQ ID NO: 348478 - DNA, 59 bp, Artificial
  Synthetic oligonucleotide
caggcaacaggtgccacaggaaatggccgcgaggtcagtcaaaattaccctataatgca

SEQ ID NO: 348479 - DNA, 55 bp, Artificial
  Synthetic oligonucleotide
caggcaacgaaccaattaagtcgttaagaagtcactgacacgagcgcgggatgca

SEQ ID NO: 348480 - DNA, 55 bp, Artificial
  Synthetic oligonucleotide
caggcaactattgtggtttcacacttcttgtctcactttcggaagagataccgtc

SEQ ID NO: 348481 - DNA, 55 bp, Artificial
  Synthetic oligonucleotide
caggcaactcaggactttgcagaggtccaacaggggataccacacccctctggac

SEQ ID NO: 348482 - DNA, 55 bp, Artificial
  Synthetic oligonucleotide
caggcaagagcatgcaactgttcgtgtactaaagaacggtacccgtgtgtaccga

SEQ ID NO: 348483 - DNA, 55 bp, Artificial
  Synthetic oligonucleotide
caggcaagctattttgtgctggggtgagttaatgactttggcttcctgggtgggc

SEQ ID NO: 348484 - DNA, 55 bp, Artificial
  Synthetic oligonucleotide
caggcaagctgttctgtgctggggtgagttgatgactctcgcttcctgggtgggc

SEQ ID NO: 348485 - DNA, 52 bp, Artificial
  Synthetic oligonucleotide
caggcaaggctttgaaggtggatctaacaccacacatgcccctcaaggtatg

SEQ ID NO: 348486 - DNA, 54 bp, Artificial
  Synthetic oligonucleotide
caggcaagtttgccaaacagagaacagcacacagtaacccctatcaacagttaa

SEQ ID NO: 348487 - DNA, 54 bp, Artificial
  Synthetic oligonucleotide
caggcaatccctcacatgttaaactaaaaccacctaccctacggcaagtggtgg

SEQ ID NO: 348488 - DNA, 60 bp, Artificial
  Synthetic oligonucleotide
caggcaatggctaatatgtgggataactagacagtgactatcattttgattcgaaatcta

SEQ ID NO: 348489 - DNA, 55 bp, Artificial
  Synthetic oligonucleotide
caggcaatggggccgaatccagaaatatctcgctgggataggggaagtctcccag

SEQ ID NO: 348490 - DNA, 60 bp, Artificial
  Synthetic oligonucleotide
caggcaatggtgacaagatgtgagccagtcgtttgctacctctatggaaagaggggtggc

SEQ ID NO: 348491 - DNA, 59 bp, Artificial
  Synthetic oligonucleotide
caggcaatgtgcattacgtagagcaccaagaagacctagtggactacgtgttggggaaa

SEQ ID NO: 348492 - DNA, 54 bp, Artificial
  Synthetic oligonucleotide
caggcaattgtgacacttatggttctaacacctggtctgctgctttggctttgc

SEQ ID NO: 348493 - DNA, 55 bp, Artificial
  Synthetic oligonucleotide
caggcacaaggtagtggagccaattgtgacgttatcaagaagggtcataacatcc

SEQ ID NO: 348494 - DNA, 55 bp, Artificial
  Synthetic oligonucleotide
caggcacagaacccacatcacttgtgatgttgaaagctaaagatctggctgtggg

SEQ ID NO: 348495 - DNA, 60 bp, Artificial
  Synthetic oligonucleotide
caggcacagaccgcctgattggacggctcttacatacacccctctctcgaaagcaatata

SEQ ID NO: 348496 - DNA, 55 bp, Artificial
  Synthetic oligonucleotide
caggcacgaaccatgtcagtgttcgagatcacaccattttacacaagccaggtgg

SEQ ID NO: 348497 - DNA, 55 bp, Artificial
  Synthetic oligonucleotide
caggcacgtgatcgctcgagggctgttttgtgaagataacgttccagatgagcgg

SEQ ID NO: 348498 - DNA, 55 bp, Artificial
  Synthetic oligonucleotide
caggcacgtttccgtccgcataaccccgtgataacccatggcgtcgttaatcctg

SEQ ID NO: 348499 - DNA, 57 bp, Artificial
  Synthetic oligonucleotide
caggcacgtttgtcatatccgggacgtatcggtgcctcacggcaacaacgttaggct

SEQ ID NO: 348500 - DNA, 56 bp, Artificial
  Synthetic oligonucleotide
caggcactaaatggaaagtttggttcagttatacggaataggaactggatgactga

SEQ ID NO: 348501 - DNA, 60 bp, Artificial
  Synthetic oligonucleotide
caggcactggtttgggtgagttggccataggcctctcgtttgtcagatcaattgttgtgt

SEQ ID NO: 348502 - DNA, 55 bp, Artificial
  Synthetic oligonucleotide
caggcactgtctgcaaatatccagattatattaaaatgggacaggaagtacatgg

SEQ ID NO: 348503 - DNA, 55 bp, Artificial
  Synthetic oligonucleotide
caggcacttagggacaatctggaaccaggaaccttcgatcttggagggctatatg

SEQ ID NO: 348504 - DNA, 55 bp, Artificial
  Synthetic oligonucleotide
caggcagaaagggttcggtggcaaggcacctgatatacaatggacggaaccgcgg

SEQ ID NO: 348505 - DNA, 60 bp, Artificial
  Synthetic oligonucleotide
caggcagaatgaactattattggacactattagatcaaggagacaccataacatttgagg

SEQ ID NO: 348506 - DNA, 60 bp, Artificial
  Synthetic oligonucleotide
caggcagaatttcacaatcgaaatcttcaaccatatggttcgataattcacctttaatca

SEQ ID NO: 348507 - DNA, 60 bp, Artificial
  Synthetic oligonucleotide
caggcagagagattcttcaagaagtatttgtttgattggacaactgataaagcttttgga

SEQ ID NO: 348508 - DNA, 55 bp, Artificial
  Synthetic oligonucleotide
caggcagaggtgcggggataagttggatgctctcttccagggagtagaggacgag

SEQ ID NO: 348509 - DNA, 60 bp, Artificial
  Synthetic oligonucleotide
caggcagagtcatcacacgactccggagcgggactaaccacctcatctgagacttccaga

SEQ ID NO: 348510 - DNA, 53 bp, Artificial
  Synthetic oligonucleotide
caggcagccattgatcagattaatgggaaactgaatcgtctcatcgagaaaac

SEQ ID NO: 348511 - DNA, 60 bp, Artificial
  Synthetic oligonucleotide
caggcagcccactctatacatctactggtgtgctgacagcaaaggatgatcctgtatatg

SEQ ID NO: 348512 - DNA, 60 bp, Artificial
  Synthetic oligonucleotide
caggcagcgagctctttcacgagcacgctgaatttctatgcaatttcggggccaattgcc

SEQ ID NO: 348513 - DNA, 50 bp, Artificial
  Synthetic oligonucleotide
caggcaggagatcacttcccctatctggtagcataccaagccacagtgtg

SEQ ID NO: 348514 - DNA, 55 bp, Artificial
  Synthetic oligonucleotide
caggcaggatatactgacaccccatcaaacgtctcacatccacaatcaggacatg

SEQ ID NO: 348515 - DNA, 56 bp, Artificial
  Synthetic oligonucleotide
caggcagggatactcacccttgtcattacagacccttaccccaagcccagagggac

SEQ ID NO: 348516 - DNA, 60 bp, Artificial
  Synthetic oligonucleotide
caggcagggcctattgcaccaggccagatgagagaaccaaggggaagtgacatagcagga

SEQ ID NO: 348517 - DNA, 55 bp, Artificial
  Synthetic oligonucleotide
caggcagtacgagcaacatctacaaggttggtcgcgtagttattacacccctgag

SEQ ID NO: 348518 - DNA, 60 bp, Artificial
  Synthetic oligonucleotide
caggcagtgcacatgtggtcaatatgaagatgccgcaggtttgatggcccacaggaaaac

SEQ ID NO: 348519 - DNA, 60 bp, Artificial
  Synthetic oligonucleotide
caggcagtgcagttggatgcgaccctgacctcttctggagtaagataccagtaatgttag

SEQ ID NO: 348520 - DNA, 59 bp, Artificial
  Synthetic oligonucleotide
caggcagtgccttggtagtatatgaacctaaaccagttgtcacttatgattcaaaactg

SEQ ID NO: 348521 - DNA, 60 bp, Artificial
  Synthetic oligonucleotide
caggcagttacagtcatggatgatttgtgtcaaaatccagatggtaaagatatggctcta

SEQ ID NO: 348522 - DNA, 58 bp, Artificial
  Synthetic oligonucleotide
caggcagttccagacttattacattaggccatccatattttgcactacctaaaaccag

SEQ ID NO: 348523 - DNA, 55 bp, Artificial
  Synthetic oligonucleotide
caggcagtttgcaggacacctacagatttgtgacctcttcagccataacttgcca

SEQ ID NO: 348524 - DNA, 55 bp, Artificial
  Synthetic oligonucleotide
caggcataaagagctcccgcttggtcctggacagcatacgtggactggagactgg

SEQ ID NO: 348525 - DNA, 60 bp, Artificial
  Synthetic oligonucleotide
caggcatacatagacattaagactaatgcacagattttcctaggcacattgtcaattatg

SEQ ID NO: 348526 - DNA, 57 bp, Artificial
  Synthetic oligonucleotide
caggcatagacccaaattggttgattaggagtgaactatccttgatgtcccacactt

SEQ ID NO: 348527 - DNA, 60 bp, Artificial
  Synthetic oligonucleotide
caggcatagcagcgaagattgaagcaatagaagacaaccatcatgaggttgaacatatcg

SEQ ID NO: 348528 - DNA, 60 bp, Artificial
  Synthetic oligonucleotide
caggcatcaaaactcagaaggcacaggacaggcagcagaccttaaaagcactcaagccgc

SEQ ID NO: 348529 - DNA, 51 bp, Artificial
  Synthetic oligonucleotide
caggcatcactttacccctagtgagcggcaattatgtctgtcgtcgatcca

SEQ ID NO: 348530 - DNA, 60 bp, Artificial
  Synthetic oligonucleotide
caggcatcattactgtacacctttggactcaggtcaaggtgaccacataaatagttatgt

SEQ ID NO: 348531 - DNA, 60 bp, Artificial
  Synthetic oligonucleotide
caggcatcccggccgccccggatcacccatcccgcagacacgagacaggaaccagcatca

SEQ ID NO: 348532 - DNA, 55 bp, Artificial
  Synthetic oligonucleotide
caggcatcggaggggccccgtcatagatctcccagacggtggcgtatatgagctc

SEQ ID NO: 348533 - DNA, 55 bp, Artificial
  Synthetic oligonucleotide
caggcatgagtataaatcattccaagagctaattctatcgtcaccatgcgatgtt

SEQ ID NO: 348534 - DNA, 55 bp, Artificial
  Synthetic oligonucleotide
caggcatggacaaacaggcctatgaacaggaaaccagaatgtaccggatgtacag

SEQ ID NO: 348535 - DNA, 55 bp, Artificial
  Synthetic oligonucleotide
caggcatggagctggtagatcctagcctagagccctggagccacccgggaagtca

SEQ ID NO: 348536 - DNA, 55 bp, Artificial
  Synthetic oligonucleotide
caggcatgtcaaccgcaaggagtgctgcttctgaattcgtcaaaagctatggcac

SEQ ID NO: 348537 - DNA, 56 bp, Artificial
  Synthetic oligonucleotide
caggcatgttgaaaagaaggttgggtttaatgagtttaagctgccaatcagtgtgt

SEQ ID NO: 348538 - DNA, 54 bp, Artificial
  Synthetic oligonucleotide
caggcattaatggtagttgagtctgcagactcgtccaaaaacgctagggcgatt

SEQ ID NO: 348539 - DNA, 60 bp, Artificial
  Synthetic oligonucleotide
caggcattataaaagagctgctatgctgagcctatccatgtctgcctacataaagcaacg

SEQ ID NO: 348540 - DNA, 60 bp, Artificial
  Synthetic oligonucleotide
caggcattcaacacacgttgcacttttgcaggaaatctgctttttgtcaatgacctctgt

SEQ ID NO: 348541 - DNA, 59 bp, Artificial
  Synthetic oligonucleotide
caggcattcacattagtgacgagggcatcgattccaacctatcggtttcctttggatta

SEQ ID NO: 348542 - DNA, 55 bp, Artificial
  Synthetic oligonucleotide
caggcattctttggcagttcgcattttcttagttagcgagcttaagagaggccgc

SEQ ID NO: 348543 - DNA, 55 bp, Artificial
  Synthetic oligonucleotide
caggcattgttaaacgagcaggaggcggatgctcattatgcagctgtgcaagacc

SEQ ID NO: 348544 - DNA, 60 bp, Artificial
  Synthetic oligonucleotide
caggcattgttccatgcgcaggaagttcagaatgatgcacaggtgttgcatcttttaaaa

SEQ ID NO: 348545 - DNA, 60 bp, Artificial
  Synthetic oligonucleotide
caggcatttttcagctgatggcaccacacttggctggtccacggccccagttgccccatg

SEQ ID NO: 348546 - DNA, 55 bp, Artificial
  Synthetic oligonucleotide
caggccaaatacgttagggattgtgcatccatgtgcaaacactataggttagcag

SEQ ID NO: 348547 - DNA, 51 bp, Artificial
  Synthetic oligonucleotide
caggccaaatgccagacaaaaacccctacgtaccaattacatggagaggca

SEQ ID NO: 348548 - DNA, 55 bp, Artificial
  Synthetic oligonucleotide
caggccaagaagagggttctcgaaccttttggtctggttgaggaaggtgctaaga

SEQ ID NO: 348549 - DNA, 55 bp, Artificial
  Synthetic oligonucleotide
caggccaagcgaagactgtttgtaccagacagcggatatggcaattcggaagtgg

SEQ ID NO: 348550 - DNA, 57 bp, Artificial
  Synthetic oligonucleotide
caggccaagtgggccgaaacgtgcctcaatgttaccaatctagcatcgggactaacc

SEQ ID NO: 348551 - DNA, 60 bp, Artificial
  Synthetic oligonucleotide
caggccagactagagctgccaccggaagttgagtagacggtgctgcctgcaactcaaccc

SEQ ID NO: 348552 - DNA, 60 bp, Artificial
  Synthetic oligonucleotide
caggccagctttaagctgccaccggatgtcgagtagacggtgctgcctgcagctcttccc

SEQ ID NO: 348553 - DNA, 55 bp, Artificial
  Synthetic oligonucleotide
caggccaggaacataggactgtgtgcagcatccttgactgagggaagactcggca

SEQ ID NO: 348554 - DNA, 55 bp, Artificial
  Synthetic oligonucleotide
caggccagttggatagggccctatgaaggggaagcgttattagattggcaagtcc

SEQ ID NO: 348555 - DNA, 57 bp, Artificial
  Synthetic oligonucleotide
caggccatatcacctagaactctgaatgcatgggttaaagtagtacaggaaaagggt

SEQ ID NO: 348556 - DNA, 55 bp, Artificial
  Synthetic oligonucleotide
caggccattctggctaaatcaggcccagggtctaaataatggcatagcctggaat

SEQ ID NO: 348557 - DNA, 60 bp, Artificial
  Synthetic oligonucleotide
caggccattgaaaggttgcgttgatagtagatcgcatcttgtatgacacatcgatcaact

SEQ ID NO: 348558 - DNA, 57 bp, Artificial
  Synthetic oligonucleotide
caggcccacgaaaaatttacctgctatagccccttcatacattggtgttactatcaa

SEQ ID NO: 348559 - DNA, 58 bp, Artificial
  Synthetic oligonucleotide
caggcccagatgctataactcaaattgaggcctacctaaatccaagaatgggaaacaa

SEQ ID NO: 348560 - DNA, 59 bp, Artificial
  Synthetic oligonucleotide
caggcccaggtctttggtgacattccagaaccccacatttgatgagtcagtggacttgt

SEQ ID NO: 348561 - DNA, 60 bp, Artificial
  Synthetic oligonucleotide
caggcccagtgaggaacccaagatgtcagcccaaaccatacatgaaaatcagtacggcac

SEQ ID NO: 348562 - DNA, 60 bp, Artificial
  Synthetic oligonucleotide
caggcccattatagagtttgtcaagtcactcatcgatttagagatgacctaaagaagact

SEQ ID NO: 348563 - DNA, 55 bp, Artificial
  Synthetic oligonucleotide
caggccccctcaaagacgaggtcgcacagggacttgaaggtgtttttgcagggaa

SEQ ID NO: 348564 - DNA, 55 bp, Artificial
  Synthetic oligonucleotide
caggccccgacacctgaactagcagcttacgaaactcctttgcacttctcagcac

SEQ ID NO: 348565 - DNA, 55 bp, Artificial
  Synthetic oligonucleotide
caggccccttgtctcaggtagagaccctgtccaggtaggacactttggctaaggt

SEQ ID NO: 348566 - DNA, 55 bp, Artificial
  Synthetic oligonucleotide
caggcccgcttcaaggatcctatgtcccaaatgctattggagggacagactgagg

SEQ ID NO: 348567 - DNA, 55 bp, Artificial
  Synthetic oligonucleotide
caggcccgtcatattagtctctgctcatttgactcgtaccaatctcagtccacta

SEQ ID NO: 348568 - DNA, 60 bp, Artificial
  Synthetic oligonucleotide
caggcccgtgtcaccaatgaggtgtcacgccagtgtgaggattggtacactctagctgta

SEQ ID NO: 348569 - DNA, 60 bp, Artificial
  Synthetic oligonucleotide
caggccctacgtgtttgcatcagttaaaggtgacatcgactagaggaactctgttgtgag

SEQ ID NO: 348570 - DNA, 59 bp, Artificial
  Synthetic oligonucleotide
caggccctatttcacagcacaactatcgccagggctatgccacgcagaccgtgggccca

SEQ ID NO: 348571 - DNA, 55 bp, Artificial
  Synthetic oligonucleotide
caggccctcacttactacttacatacgtctgaccaatcgagtgtagccatcctat

SEQ ID NO: 348572 - DNA, 60 bp, Artificial
  Synthetic oligonucleotide
caggccctgctcagaaatcataatatcgaggctgtcacttttggggtgcccgagaaagcc

SEQ ID NO: 348573 - DNA, 58 bp, Artificial
  Synthetic oligonucleotide
caggcccttctgccccgcttactatcgcgtaaggtcgtctatttgcaccacgttcgca

SEQ ID NO: 348574 - DNA, 59 bp, Artificial
  Synthetic oligonucleotide
caggccgaacagatttttgccttagtctacagtcagcgacctcaccgttccgcacctgc

SEQ ID NO: 348575 - DNA, 56 bp, Artificial
  Synthetic oligonucleotide
caggccgatgaaccgaaaacccagaatgtacagaatgtatagaagtccggacgttc

SEQ ID NO: 348576 - DNA, 56 bp, Artificial
  Synthetic oligonucleotide
caggccgcgcagcgtcgatgtcccgaaatttaattagaattctagaagtgttaacc

SEQ ID NO: 348577 - DNA, 57 bp, Artificial
  Synthetic oligonucleotide
caggccgctaacactttccttggggctatccaccttggcccacgcatcaacccatac

SEQ ID NO: 348578 - DNA, 57 bp, Artificial
  Synthetic oligonucleotide
caggccggattaagccatagcacgggaaaaactatgctacctgtgagccccgtccaa

SEQ ID NO: 348579 - DNA, 57 bp, Artificial
  Synthetic oligonucleotide
caggccgtggaggatacgtacgagcccaatacattgggccacgatttagtccgagat

SEQ ID NO: 348580 - DNA, 59 bp, Artificial
  Synthetic oligonucleotide
caggccgttgtcacgccaactcttatggcacaccctactcaagatgaaactgaagatca

SEQ ID NO: 348581 - DNA, 54 bp, Artificial
  Synthetic oligonucleotide
caggcctaactttgattgactttagggaaattcccccatcatccgagttgtgat

SEQ ID NO: 348582 - DNA, 55 bp, Artificial
  Synthetic oligonucleotide
caggcctaggggctacattcgcctcccacgtttcccttcgcgtgaggcatccgat

SEQ ID NO: 348583 - DNA, 55 bp, Artificial
  Synthetic oligonucleotide
caggcctagtacagaagataggaaaggaaagcatagtcatctggggacagatacc

SEQ ID NO: 348584 - DNA, 58 bp, Artificial
  Synthetic oligonucleotide
caggcctatcaaaagcggatgggagtgcagatgcaacgattcaagtgatcttctcgtt

SEQ ID NO: 348585 - DNA, 59 bp, Artificial
  Synthetic oligonucleotide
caggcctatgtacaggaagcccaagatatatcgaatgtacaggaaccccgatgttccaa

SEQ ID NO: 348586 - DNA, 55 bp, Artificial
  Synthetic oligonucleotide
caggcctcacagtgaatgtagaccacgcaggaagttcagatgactatgctaagtg

SEQ ID NO: 348587 - DNA, 55 bp, Artificial
  Synthetic oligonucleotide
caggcctcgcctcagtgactgagtccatctgaagctgggtatgtcacttgcacca

SEQ ID NO: 348588 - DNA, 55 bp, Artificial
  Synthetic oligonucleotide
caggcctctgcccggtggattcttgtaaaggtccccagctatgggtttgtggtag

SEQ ID NO: 348589 - DNA, 55 bp, Artificial
  Synthetic oligonucleotide
caggcctctgtagcatatatgctgctgcctgtgacctaaactacccacacatagg

SEQ ID NO: 348590 - DNA, 59 bp, Artificial
  Synthetic oligonucleotide
caggcctgctaagcgatcatagagaactggtgcggcttgccaaccgggtgtggatgaac

SEQ ID NO: 348591 - DNA, 55 bp, Artificial
  Synthetic oligonucleotide
caggcctgtacgggaaaccttcgggctacgccgcaacgatgcatcgcgagggatt

SEQ ID NO: 348592 - DNA, 60 bp, Artificial
  Synthetic oligonucleotide
caggcctgtatgggaaaccatcaggctatgctgctacgatgcaccgcgagggattcttgt

SEQ ID NO: 348593 - DNA, 55 bp, Artificial
  Synthetic oligonucleotide
caggccttaaaggagatcgaacgattggcatgttggtcggttaagcaagcgaatt

SEQ ID NO: 348594 - DNA, 59 bp, Artificial
  Synthetic oligonucleotide
caggccttattcaacaatgttcagtattactcacattactgtaggaagtacgcaccact

SEQ ID NO: 348595 - DNA, 53 bp, Artificial
  Synthetic oligonucleotide
caggccttattggttacatcaggctcaaggaaaaaataatggtattgcatggg

SEQ ID NO: 348596 - DNA, 50 bp, Artificial
  Synthetic oligonucleotide
caggcgaaggtccggttcctattagtccatcagacgttaagttaagggaa

SEQ ID NO: 348597 - DNA, 60 bp, Artificial
  Synthetic oligonucleotide
caggcgaatgaggacattgtcgtatctaaaacgtcattatggaaagagatgcagtacaat

SEQ ID NO: 348598 - DNA, 57 bp, Artificial
  Synthetic oligonucleotide
caggcgacaaaatagtacattgggagtataagttgcttaatgaagtacgagaggtta

SEQ ID NO: 348599 - DNA, 58 bp, Artificial
  Synthetic oligonucleotide
caggcgactcagcggctcacctataggggtgagcgtccccggacgttcctcgtaggca

SEQ ID NO: 348600 - DNA, 55 bp, Artificial
  Synthetic oligonucleotide
caggcgagaagaccgtaagtcggcccaagtaacagctgggcttgacaaggtcttc

SEQ ID NO: 348601 - DNA, 54 bp, Artificial
  Synthetic oligonucleotide
caggcgagcgatacgtggtcgatcatatcgttccgttgcgtgggaagacagtat

SEQ ID NO: 348602 - DNA, 52 bp, Artificial
  Synthetic oligonucleotide
caggcgagggggcagtgcagtggatgaaccggctaatagcctttgcttcccg

SEQ ID NO: 348603 - DNA, 60 bp, Artificial
  Synthetic oligonucleotide
caggcgatgattctctaggattttcagtgcttccccctgttggtgatccgagtaaattca

SEQ ID NO: 348604 - DNA, 55 bp, Artificial
  Synthetic oligonucleotide
caggcgatgcaccagaaaccgggtgtactttccgtcgcggcgcaatccaaccgag

SEQ ID NO: 348605 - DNA, 55 bp, Artificial
  Synthetic oligonucleotide
caggcgattacaccaccaagtgcaatcgcagcaatgtcaagggtacggataaata

SEQ ID NO: 348606 - DNA, 53 bp, Artificial
  Synthetic oligonucleotide
caggcgattactcagcataccgttttgagtggacgacaatgcggcacaaccca

SEQ ID NO: 348607 - DNA, 60 bp, Artificial
  Synthetic oligonucleotide
caggcgcacctgccatctctacaccgctcactttgcgccctccgcctgacaacacgaaag

SEQ ID NO: 348608 - DNA, 55 bp, Artificial
  Synthetic oligonucleotide
caggcgcacttatcaccccgtgtgccgcggaagaacaaaagttgcccatcaacgc

SEQ ID NO: 348609 - DNA, 55 bp, Artificial
  Synthetic oligonucleotide
caggcgcctgagtttagcctagaaccacacttctacttggaaacctcattccgag

SEQ ID NO: 348610 - DNA, 55 bp, Artificial
  Synthetic oligonucleotide
caggcgcgagttctaacactgaaccagaagaagccatacaaactcgcacagtgat

SEQ ID NO: 348611 - DNA, 50 bp, Artificial
  Synthetic oligonucleotide
caggcgctaaaggtgactgtccaccaatacagttggttaatgcacctata

SEQ ID NO: 348612 - DNA, 56 bp, Artificial
  Synthetic oligonucleotide
caggcggatacagggcgcgcaaggggaaaacaataaaaccgtgactgacattaata

SEQ ID NO: 348613 - DNA, 60 bp, Artificial
  Synthetic oligonucleotide
caggcggcaaggattcttctatacgaatatgatcgatggagcgccaccaattggagatgt

SEQ ID NO: 348614 - DNA, 55 bp, Artificial
  Synthetic oligonucleotide
caggcggcaccagtactatcagataagaataattggattgcgctggcacaaggag

SEQ ID NO: 348615 - DNA, 55 bp, Artificial
  Synthetic oligonucleotide
caggcggcgaacgctcgggttccagcgaaattctttgatacgcaagtgatgtcgg

SEQ ID NO: 348616 - DNA, 55 bp, Artificial
  Synthetic oligonucleotide
caggcggctaaccgcgacttcactaacgccggtaatgacgctgctgtcgtgtgtg

SEQ ID NO: 348617 - DNA, 60 bp, Artificial
  Synthetic oligonucleotide
caggcgggggaaagctttgcgtatctcgtagcttatcaagccacagtatgcgccagggcg

SEQ ID NO: 348618 - DNA, 56 bp, Artificial
  Synthetic oligonucleotide
caggcggtaattctaaatgtagtgggtggaggcgattcaatagctgaccccttaag

SEQ ID NO: 348619 - DNA, 55 bp, Artificial
  Synthetic oligonucleotide
caggcggtaggagagatagatgagatcgaagcacaacgagctgaaaagtccaatt

SEQ ID NO: 348620 - DNA, 52 bp, Artificial
  Synthetic oligonucleotide
caggcgtacgtctatgatgaattccatccctttctggtttttgtatttgatc

SEQ ID NO: 348621 - DNA, 58 bp, Artificial
  Synthetic oligonucleotide
caggcgtcacttgccctccgcgagatggcacttgtacggaagtgccacttccctcccc

SEQ ID NO: 348622 - DNA, 60 bp, Artificial
  Synthetic oligonucleotide
caggcgtcctgctctacaggtcgcagagtatctgtggacgacgaataaaacaggaatgac

SEQ ID NO: 348623 - DNA, 51 bp, Artificial
  Synthetic oligonucleotide
caggcgtgaaggtcggcgcaatggagccgcccggcgtccagtaccagcggt

SEQ ID NO: 348624 - DNA, 55 bp, Artificial
  Synthetic oligonucleotide
caggcgtgcctgagtacacacgaagagatgctaaactcccaactgagcctcaaaa

SEQ ID NO: 348625 - DNA, 56 bp, Artificial
  Synthetic oligonucleotide
caggcgttgacaaagtatcgcttgaagaccgtgttaaatgggtgaacgataacgag

SEQ ID NO: 348626 - DNA, 53 bp, Artificial
  Synthetic oligonucleotide
caggcgttgacgggactaccaccgtgacgggggggtcgcaagctcgaaccgtc

SEQ ID NO: 348627 - DNA, 55 bp, Artificial
  Synthetic oligonucleotide
caggctaaccgccgcgtgcaattggactcgaggagagcgctgtaacttggaggac

SEQ ID NO: 348628 - DNA, 59 bp, Artificial
  Synthetic oligonucleotide
caggctaagttttgtgtttattatcagatgaaaccactccatgctagtccatttgtatt

SEQ ID NO: 348629 - DNA, 60 bp, Artificial
  Synthetic oligonucleotide
caggctaattgaagaatcgcagacccagcaagaaaaaaatgagcaagacttattggcact

SEQ ID NO: 348630 - DNA, 52 bp, Artificial
  Synthetic oligonucleotide
caggctaattttttagggaagctctggccttcccacaaaggaaggccgggga

SEQ ID NO: 348631 - DNA, 55 bp, Artificial
  Synthetic oligonucleotide
caggctaccacacattgttttgcacacgagactttgctatgcgtaatgttagagc

SEQ ID NO: 348632 - DNA, 58 bp, Artificial
  Synthetic oligonucleotide
caggctaccctattgcgcacttgttccctgtgattcgtccgatcgccgttgttccaac

SEQ ID NO: 348633 - DNA, 55 bp, Artificial
  Synthetic oligonucleotide
caggctactgagaaaaccccaacatacaagcgtgctcttgcggcaaccgagccta

SEQ ID NO: 348634 - DNA, 55 bp, Artificial
  Synthetic oligonucleotide
caggctagacgtagttgtgtcaagcctcaacaacatgagcgaacgaccgcccact

SEQ ID NO: 348635 - DNA, 60 bp, Artificial
  Synthetic oligonucleotide
caggctagatttggaacaattatagctagaaactttgatacaatcagattgtcgttccag

SEQ ID NO: 348636 - DNA, 60 bp, Artificial
  Synthetic oligonucleotide
caggctaggcagatggtgcaggcaatgagaacaattgggactcatcctagctccagtgcc

SEQ ID NO: 348637 - DNA, 58 bp, Artificial
  Synthetic oligonucleotide
caggctagttacaagattttcaagtctcgtgagggaatggtgacaaatgaaagagaag

SEQ ID NO: 348638 - DNA, 51 bp, Artificial
  Synthetic oligonucleotide
caggctatataaagcccgtttgcccaactcgtaaatcagtatcgattgtgt

SEQ ID NO: 348639 - DNA, 55 bp, Artificial
  Synthetic oligonucleotide
caggctatcacacattgttctgcacacgggaatttgctatgcgtaatgtgagggc

SEQ ID NO: 348640 - DNA, 57 bp, Artificial
  Synthetic oligonucleotide
caggctatgtgggttggattagtgtcttactcgggaagcggtctaaattggcggata

SEQ ID NO: 348641 - DNA, 55 bp, Artificial
  Synthetic oligonucleotide
caggctattaaagatatatcaggcggaagcgaggtaagacaaagccgtgaattta

SEQ ID NO: 348642 - DNA, 60 bp, Artificial
  Synthetic oligonucleotide
caggctcaaaacgataaatctcaagtatactgagctcggtgaaaagcgtgacaatgagtt

SEQ ID NO: 348643 - DNA, 55 bp, Artificial
  Synthetic oligonucleotide
caggctcagagcttgcaaggtcttgccgcacaaactgacatgacgtttgagcagg

SEQ ID NO: 348644 - DNA, 53 bp, Artificial
  Synthetic oligonucleotide
caggctcatagcgtttgcctcacgtggaaatcacgtatcacccacgcactatg

SEQ ID NO: 348645 - DNA, 60 bp, Artificial
  Synthetic oligonucleotide
caggctctaccagtgattgaggtccttgacgcaatgtaaggccacccatctcctgatagg

SEQ ID NO: 348646 - DNA, 55 bp, Artificial
  Synthetic oligonucleotide
caggctctctgtactgatcaacgatcttttcaacagtctcccttagctgatcaaa

SEQ ID NO: 348647 - DNA, 56 bp, Artificial
  Synthetic oligonucleotide
caggctgaatcaatgttcgctgaggaaaccattccatgcatggcaagtgtaggtga

SEQ ID NO: 348648 - DNA, 53 bp, Artificial
  Synthetic oligonucleotide
caggctgagaaggaacaactgaagtcagcttttcctggtgtgaaagtgttaac

SEQ ID NO: 348649 - DNA, 55 bp, Artificial
  Synthetic oligonucleotide
caggctgagataagttatgtgagggagcatttgattaaaacagaagagagagctg

SEQ ID NO: 348650 - DNA, 55 bp, Artificial
  Synthetic oligonucleotide
caggctgaggcttctgaagtcggtaatctttggttacaagtgtttgttgtgtctc

SEQ ID NO: 348651 - DNA, 55 bp, Artificial
  Synthetic oligonucleotide
caggctgatagaacagaggaacagaggttgtggatatttgatgacgtttactcca

SEQ ID NO: 348652 - DNA, 60 bp, Artificial
  Synthetic oligonucleotide
caggctgccaggtggctccaacgcgcggagtcagccactatccctggcgcagaagcaaga

SEQ ID NO: 348653 - DNA, 55 bp, Artificial
  Synthetic oligonucleotide
caggctgcggggctgcattatcgagcacggcgatacaagtttgcgaggtccgcac

SEQ ID NO: 348654 - DNA, 53 bp, Artificial
  Synthetic oligonucleotide
caggctgctaagctacgtgatgagaagatgcaagctagattaagagattttac

SEQ ID NO: 348655 - DNA, 53 bp, Artificial
  Synthetic oligonucleotide
caggctgctagagtggcaagtcatgtggcaaagtctgctcatcggaggattag

SEQ ID NO: 348656 - DNA, 54 bp, Artificial
  Synthetic oligonucleotide
caggctgctgttaactttcaaacgcacgtacccgtgattacaaaatctcggatg

SEQ ID NO: 348657 - DNA, 60 bp, Artificial
  Synthetic oligonucleotide
caggctggcctaactagagtgccgtacttcgtgcgcgctcaagggctcatccgtgcatgc

SEQ ID NO: 348658 - DNA, 55 bp, Artificial
  Synthetic oligonucleotide
caggctggtgacattgctggccatgtattgtctggtacagctacctcgggtaccc

SEQ ID NO: 348659 - DNA, 58 bp, Artificial
  Synthetic oligonucleotide
caggctgtactggctgtgggctttacttagatcaattaaagccagtaggaacagcttt

SEQ ID NO: 348660 - DNA, 50 bp, Artificial
  Synthetic oligonucleotide
caggctgtggacatatgtaaagcagcaatgggtttaaagatcagttcatc

SEQ ID NO: 348661 - DNA, 55 bp, Artificial
  Synthetic oligonucleotide
caggcttaatagaatgtactcagcttcaggtgtgatcttcaaattatgctcttta

SEQ ID NO: 348662 - DNA, 59 bp, Artificial
  Synthetic oligonucleotide
caggcttatgctttttggtgcaactcttgacgaccaggctttttgctgttcgagactta

SEQ ID NO: 348663 - DNA, 54 bp, Artificial
  Synthetic oligonucleotide
caggcttcaggaagtgcgggaatatccccggttactaccacccccgcaccagag

SEQ ID NO: 348664 - DNA, 50 bp, Artificial
  Synthetic oligonucleotide
caggcttcatggttgcagaagttataccagatgagacaggaaaaacaacg

SEQ ID NO: 348665 - DNA, 55 bp, Artificial
  Synthetic oligonucleotide
caggcttcttgccctaaatatttgctttgagaaggcattcttagcaactgcagtt

SEQ ID NO: 348666 - DNA, 55 bp, Artificial
  Synthetic oligonucleotide
caggcttgatttgataacacatctgttaccaccctgcagcaacttcaacccttgc

SEQ ID NO: 348667 - DNA, 60 bp, Artificial
  Synthetic oligonucleotide
caggcttgtaggtacttggcatcgtatttggtgctcttaccagaaatcagtaggcagcct

SEQ ID NO: 348668 - DNA, 55 bp, Artificial
  Synthetic oligonucleotide
caggctttaaggatagcgagaacagaaacaactacagcaagcggatttgccgcta

SEQ ID NO: 348669 - DNA, 50 bp, Artificial
  Synthetic oligonucleotide
caggctttactggcgacttcgactctgtgatcgactgtaacacatgtgtt

SEQ ID NO: 348670 - DNA, 55 bp, Artificial
  Synthetic oligonucleotide
caggctttcacattctcgccaacttacaaggcctttctgtgtaaacaatacctgc

SEQ ID NO: 348671 - DNA, 55 bp, Artificial
  Synthetic oligonucleotide
caggctttgtagcacaactccaggtgaatgttgcccctggcagtagcggactgta

SEQ ID NO: 348672 - DNA, 60 bp, Artificial
  Synthetic oligonucleotide
caggcttttgcaggttcaggcccggcgatggttgtcatggccaattgagttcctgagtgc

SEQ ID NO: 348673 - DNA, 60 bp, Artificial
  Synthetic oligonucleotide
cagggaaaaactgtcggtatttaagcttcgcactgaagcccgagcacatatggaggatga

SEQ ID NO: 348674 - DNA, 54 bp, Artificial
  Synthetic oligonucleotide
cagggaaaggagttaaacttacagacgaatcagtactttcgggctatggtgacc

SEQ ID NO: 348675 - DNA, 55 bp, Artificial
  Synthetic oligonucleotide
cagggaaagttatatgtatatccgatattacacgtggtaatggtctgacacatcg

SEQ ID NO: 348676 - DNA, 51 bp, Artificial
  Synthetic oligonucleotide
cagggaaatccaaccccgagaagaacccggggaccgcagccaacccagtcg

SEQ ID NO: 348677 - DNA, 55 bp, Artificial
  Synthetic oligonucleotide
cagggaaatcgcaatggtgctggctcagtcctgctctaatatgccgttcgccccg

SEQ ID NO: 348678 - DNA, 60 bp, Artificial
  Synthetic oligonucleotide
cagggaacgataatgatgcaagtgcccagataatatatgcagggagaatgacagactcca

SEQ ID NO: 348679 - DNA, 55 bp, Artificial
  Synthetic oligonucleotide
cagggaactagaaagatttgcagtcaatcctggccttttagaaacatcggaaggc

SEQ ID NO: 348680 - DNA, 60 bp, Artificial
  Synthetic oligonucleotide
cagggaactttcttcagagcagaccagagccatcagccccaccagaagagagcttcggtt

SEQ ID NO: 348681 - DNA, 55 bp, Artificial
  Synthetic oligonucleotide
cagggaagaaacgacaggtcggaaacaaacttaactgatgagttagctgtagtcc

SEQ ID NO: 348682 - DNA, 55 bp, Artificial
  Synthetic oligonucleotide
cagggaagaacatccgggcaggaccgggatcctacaggggtagagccaggtgatc

SEQ ID NO: 348683 - DNA, 56 bp, Artificial
  Synthetic oligonucleotide
cagggaagcaaggtgcttacactggtaacatcaaaccagttatgcaaaaacctgtg

SEQ ID NO: 348684 - DNA, 59 bp, Artificial
  Synthetic oligonucleotide
cagggaaggaagagagagtaattgcaaaaaggtgcaccaatgttgtgacaggcagtggg

SEQ ID NO: 348685 - DNA, 52 bp, Artificial
  Synthetic oligonucleotide
cagggaaggcgtaaatttctttcgtccacggattaaggccgtactggttggc

SEQ ID NO: 348686 - DNA, 55 bp, Artificial
  Synthetic oligonucleotide
cagggaatataacacagtgtcctaagactattgttacatcagatgtagtaccacg

SEQ ID NO: 348687 - DNA, 58 bp, Artificial
  Synthetic oligonucleotide
cagggaatcgagccacagatcaacgactgggtcgccatcaccaaggtaaagaagggcg

SEQ ID NO: 348688 - DNA, 55 bp, Artificial
  Synthetic oligonucleotide
cagggaatctaatagagttcattgaggtaacagtaactgctgatgtagcaagggg

SEQ ID NO: 348689 - DNA, 55 bp, Artificial
  Synthetic oligonucleotide
cagggaatctaatcgcccctcggggttacttcaagatacgaagtggagaaagctc

SEQ ID NO: 348690 - DNA, 54 bp, Artificial
  Synthetic oligonucleotide
cagggaatgtatgggggaacctacctagtggaaaagcctaatctgaacagtaaa

SEQ ID NO: 348691 - DNA, 60 bp, Artificial
  Synthetic oligonucleotide
cagggaatgtgattaagtttaagagaaggttaatgtatgtgagtgctgatgccacaaagt

SEQ ID NO: 348692 - DNA, 55 bp, Artificial
  Synthetic oligonucleotide
cagggaattactgagaattggagcaaattcagtgtggattccagtctcttcgaat

SEQ ID NO: 348693 - DNA, 59 bp, Artificial
  Synthetic oligonucleotide
cagggaattgttggagatgcaaccaagattactatagaagtagagtttatcgggcagtc

SEQ ID NO: 348694 - DNA, 57 bp, Artificial
  Synthetic oligonucleotide
cagggaatttcaacgactatgaagaactgaaacacctattgagcagaataaaccatt

SEQ ID NO: 348695 - DNA, 58 bp, Artificial
  Synthetic oligonucleotide
cagggaattttgttcagagcagaccagagccaacagccccgccactagagagcttcag

SEQ ID NO: 348696 - DNA, 60 bp, Artificial
  Synthetic oligonucleotide
cagggacaaactgtggaagtaaaatatgactgtaatacagacaatagaatggattatgtg

SEQ ID NO: 348697 - DNA, 60 bp, Artificial
  Synthetic oligonucleotide
cagggacaaatatataaacctacatgatagtagagctctagagaaggaacctgacatatt

SEQ ID NO: 348698 - DNA, 57 bp, Artificial
  Synthetic oligonucleotide
cagggacaaatggtacatcaggccatctcccccaggactttaaatgcatgggtaaag

SEQ ID NO: 348699 - DNA, 55 bp, Artificial
  Synthetic oligonucleotide
cagggacaactggcaaggggctaacagaccagtgatcgaaatagatatgagtgcc

SEQ ID NO: 348700 - DNA, 60 bp, Artificial
  Synthetic oligonucleotide
cagggacaagtcgcacaaactctgctgagatgctgaaacattttatgttttgtgcgctac

SEQ ID NO: 348701 - DNA, 57 bp, Artificial
  Synthetic oligonucleotide
cagggacagcgcgtcaactggggagatgaacctaccaaaagacgtggtcgctctaac

SEQ ID NO: 348702 - DNA, 55 bp, Artificial
  Synthetic oligonucleotide
cagggacattagggcaatgataccagatcagataactgattacaatgaggccgtg

SEQ ID NO: 348703 - DNA, 55 bp, Artificial
  Synthetic oligonucleotide
cagggaccagaatttagagtccttacctgaggtatattggcgtatacgtccaaac

SEQ ID NO: 348704 - DNA, 55 bp, Artificial
  Synthetic oligonucleotide
cagggaccagcggccatacattatggaaggtctgtgggaaacgcttatcgcggac

SEQ ID NO: 348705 - DNA, 55 bp, Artificial
  Synthetic oligonucleotide
cagggaccatggattgagaaagatggaattgggattctaatgaaagagcaagcgg

SEQ ID NO: 348706 - DNA, 56 bp, Artificial
  Synthetic oligonucleotide
cagggaccgttgcaggtcgaggcaccccctagatctctaccgaaaggtagagtgag

SEQ ID NO: 348707 - DNA, 60 bp, Artificial
  Synthetic oligonucleotide
cagggacctatctgcttacactagtggtgacttgttcgaccactggtagcgtcacagtag

SEQ ID NO: 348708 - DNA, 55 bp, Artificial
  Synthetic oligonucleotide
cagggaccttgctgtagtgcgttatgccattccagaggttgaccaccccgctctg

SEQ ID NO: 348709 - DNA, 55 bp, Artificial
  Synthetic oligonucleotide
cagggacgaattgacaagtttcatatctatgagcacaaagcctggagatccctca

SEQ ID NO: 348710 - DNA, 55 bp, Artificial
  Synthetic oligonucleotide
cagggacgctaaagccggtcagtccatagtctgcttccagcattcagtactctgt

SEQ ID NO: 348711 - DNA, 55 bp, Artificial
  Synthetic oligonucleotide
cagggactacttggagcccttctcttgtggatggggttgcaggcccgcgacagga

SEQ ID NO: 348712 - DNA, 55 bp, Artificial
  Synthetic oligonucleotide
cagggactatcgagccaacgcccgcctcagacatgacgcccagaggcaactacag

SEQ ID NO: 348713 - DNA, 55 bp, Artificial
  Synthetic oligonucleotide
cagggactctatctgagaaactcacttcgatcactatgcttgccgttcattctgg

SEQ ID NO: 348714 - DNA, 56 bp, Artificial
  Synthetic oligonucleotide
cagggacttacgtttatatacgagtatgatagaacgatgaaccaaaaagcattccc

SEQ ID NO: 348715 - DNA, 56 bp, Artificial
  Synthetic oligonucleotide
cagggagaaatccaaacaaagatcctctaaaacttgggtacacctttgagagcatc

SEQ ID NO: 348716 - DNA, 55 bp, Artificial
  Synthetic oligonucleotide
cagggagaagggactagaggttagaggagaccccgcgttcagaagtgcacggccc

SEQ ID NO: 348717 - DNA, 59 bp, Artificial
  Synthetic oligonucleotide
cagggagaatgaactactactggacactagtagaacctggagatacaataacattcgaa

SEQ ID NO: 348718 - DNA, 60 bp, Artificial
  Synthetic oligonucleotide
cagggagagctgagaataccatctctagatagtgagaggcttggagaaattatgaagttg

SEQ ID NO: 348719 - DNA, 59 bp, Artificial
  Synthetic oligonucleotide
cagggagataggatggatggaaggaggtcagttggctctagggaatcctgcccctattc

SEQ ID NO: 348720 - DNA, 52 bp, Artificial
  Synthetic oligonucleotide
cagggagataggctatagtgaggaggcggtttcactcattgaggggatcaat

SEQ ID NO: 348721 - DNA, 60 bp, Artificial
  Synthetic oligonucleotide
cagggagatccactcagatgcacacggacactccaactgcgtgcagactgaagacaccac

SEQ ID NO: 348722 - DNA, 55 bp, Artificial
  Synthetic oligonucleotide
cagggagattttaagagaaccagtacatggagtgtattatgacccctcaaaggac

SEQ ID NO: 348723 - DNA, 57 bp, Artificial
  Synthetic oligonucleotide
cagggagccctcctcaatgacaagcattcgaacggaacagtaaaagacagaagtccc

SEQ ID NO: 348724 - DNA, 55 bp, Artificial
  Synthetic oligonucleotide
cagggagctggaaaggtttgcacttaaccctggccttttagaaacatcagaaggc

SEQ ID NO: 348725 - DNA, 59 bp, Artificial
  Synthetic oligonucleotide
cagggagcttggcctgctggggcgggaaggagagtaggattatcaaatccgactcctca

SEQ ID NO: 348726 - DNA, 57 bp, Artificial
  Synthetic oligonucleotide
cagggaggaagccccaggtttcaattcagttggatcctgtcccttcacagtctacaa

SEQ ID NO: 348727 - DNA, 55 bp, Artificial
  Synthetic oligonucleotide
cagggaggaagtgtatcagtgtattatgagaaaacccatccaggggaaaagggaa

SEQ ID NO: 348728 - DNA, 60 bp, Artificial
  Synthetic oligonucleotide
cagggaggggagaatttcgcctacctcgtggcctatcaagccaccgtgtgtgcgcgagca

SEQ ID NO: 348729 - DNA, 60 bp, Artificial
  Synthetic oligonucleotide
cagggagggggttgcagcatccattcaggcaaaaattgacgaattgaagagacaattggc

SEQ ID NO: 348730 - DNA, 51 bp, Artificial
  Synthetic oligonucleotide
cagggagtaaccagtacctcactgcagacgattatcagtccccgtgtgcaa

SEQ ID NO: 348731 - DNA, 60 bp, Artificial
  Synthetic oligonucleotide
cagggagtcctagtggccagattcttaggtcattcttcaaaatgactcctgataattaca

SEQ ID NO: 348732 - DNA, 60 bp, Artificial
  Synthetic oligonucleotide
cagggagtccttagtagcatggcaatgacagggactaaactgggcacaagaagaggccat

SEQ ID NO: 348733 - DNA, 60 bp, Artificial
  Synthetic oligonucleotide
cagggagtcgcaagagcactcaacggtatcagcccaaagactccaccagtaagcgctaac

SEQ ID NO: 348734 - DNA, 52 bp, Artificial
  Synthetic oligonucleotide
cagggagtctatgtgcgccgggaaggttctcgattacaatgccattcgactc

SEQ ID NO: 348735 - DNA, 60 bp, Artificial
  Synthetic oligonucleotide
cagggagttatgccatttctgtgaggataggtgtcatgtacaggcctttcaattcaaata

SEQ ID NO: 348736 - DNA, 60 bp, Artificial
  Synthetic oligonucleotide
cagggataaaaagtacagtagacatagcgaaatctatggctacaaatgtaatgaagagat

SEQ ID NO: 348737 - DNA, 52 bp, Artificial
  Synthetic oligonucleotide
cagggataaaacagtgtgaagtcactagtaattgttatgtatacactagtaa

SEQ ID NO: 348738 - DNA, 55 bp, Artificial
  Synthetic oligonucleotide
cagggatatatagaaagtgtgcagcaagccgtaatacagagagcgatacagtggt

SEQ ID NO: 348739 - DNA, 55 bp, Artificial
  Synthetic oligonucleotide
cagggatatgacaaagacacactgtttgcattagctttggctaaggatgccgttg

SEQ ID NO: 348740 - DNA, 60 bp, Artificial
  Synthetic oligonucleotide
cagggatatgaggtgatatgacgtcaagacacctgattgggtgggagggtctatataagg

SEQ ID NO: 348741 - DNA, 54 bp, Artificial
  Synthetic oligonucleotide
cagggatattcgggaagttgagtgggattcggaaacgattggtcaggttggccg

SEQ ID NO: 348742 - DNA, 51 bp, Artificial
  Synthetic oligonucleotide
cagggatcggagaccgtatgggacacctatggatttgggccaagtgtttaa

SEQ ID NO: 348743 - DNA, 55 bp, Artificial
  Synthetic oligonucleotide
cagggatctaccaggtccctgtgggattaagtttcgacgcctgggagcgtaacca

SEQ ID NO: 348744 - DNA, 59 bp, Artificial
  Synthetic oligonucleotide
cagggatctttgaaaactcatgtcttgaaacgatggaagttgttcagcaaacaagagtg

SEQ ID NO: 348745 - DNA, 60 bp, Artificial
  Synthetic oligonucleotide
cagggatggagccaaaggaatttcaagctctcaggcaacattcaaaggatgctggatgta

SEQ ID NO: 348746 - DNA, 58 bp, Artificial
  Synthetic oligonucleotide
cagggatggcgttcggttgagacctctggcgtcgctgaggaagaagcgacttctggcc

SEQ ID NO: 348747 - DNA, 58 bp, Artificial
  Synthetic oligonucleotide
cagggatgttacaaagatgcaagagtgtattgacaaatacggtcttaacctacccatg

SEQ ID NO: 348748 - DNA, 56 bp, Artificial
  Synthetic oligonucleotide
cagggattacatgaagctgaaccgtctgcggtacaagggtaccgttaccataaaca

SEQ ID NO: 348749 - DNA, 59 bp, Artificial
  Synthetic oligonucleotide
cagggattgcaaaacccataagtagaagagatgcaatgttaggtacccatgtagtgtgg

SEQ ID NO: 348750 - DNA, 55 bp, Artificial
  Synthetic oligonucleotide
cagggattggctgattgacgtggggctggtcttttcaaagtctcaattatgcacc

SEQ ID NO: 348751 - DNA, 60 bp, Artificial
  Synthetic oligonucleotide
cagggcaacagagtacataatgaagggagtgtacataaacacagctttactcaacgcctc

SEQ ID NO: 348752 - DNA, 60 bp, Artificial
  Synthetic oligonucleotide
cagggcaagaaacagccgtccctcactcctatttcatccacttccgctcattgggcctga

SEQ ID NO: 348753 - DNA, 57 bp, Artificial
  Synthetic oligonucleotide
cagggcacacgataccaccctcgggcttacctcgataccggcactaagcgcggtgtc

SEQ ID NO: 348754 - DNA, 58 bp, Artificial
  Synthetic oligonucleotide
cagggcacattggtgtcgggcgtgacgcacccgctcccctcagtcccctgtgtaacag

SEQ ID NO: 348755 - DNA, 55 bp, Artificial
  Synthetic oligonucleotide
cagggcaccaacccagcaagacagagtggtattgattggatcaaactttcaagag

SEQ ID NO: 348756 - DNA, 56 bp, Artificial
  Synthetic oligonucleotide
cagggcacttcccgaagtgttaagagaatgcctctttctatagggggaggagctgg

SEQ ID NO: 348757 - DNA, 55 bp, Artificial
  Synthetic oligonucleotide
cagggcagcgacggttcatttcgacgaagctctgatggcgcatgcaggaatggtt

SEQ ID NO: 348758 - DNA, 54 bp, Artificial
  Synthetic oligonucleotide
cagggcagggtatacgctagcctgacggctgcggcctcccttgacctggtagat

SEQ ID NO: 348759 - DNA, 60 bp, Artificial
  Synthetic oligonucleotide
cagggcaggtgaaagtattcaggcggatactaattacccaactgataatgtgattgtaca

SEQ ID NO: 348760 - DNA, 53 bp, Artificial
  Synthetic oligonucleotide
cagggcatcacagtatggactttggaaaattgccaagctacatgtgtatttca

SEQ ID NO: 348761 - DNA, 60 bp, Artificial
  Synthetic oligonucleotide
cagggcatgcaagaatcgagccctacaaggaagcagagctgactgcactcagtgtaagat

SEQ ID NO: 348762 - DNA, 58 bp, Artificial
  Synthetic oligonucleotide
cagggccaacaatggttcctaagaccatccaatgtcccagcagtcccaatggccccta

SEQ ID NO: 348763 - DNA, 55 bp, Artificial
  Synthetic oligonucleotide
cagggccagaattcaaccttaacctttcttattctgtagtattcaaagggcacag

SEQ ID NO: 348764 - DNA, 51 bp, Artificial
  Synthetic oligonucleotide
cagggccccacgccggttggtacccgggtggcttcccctcgttcacagggc

SEQ ID NO: 348765 - DNA, 52 bp, Artificial
  Synthetic oligonucleotide
cagggcccttataacaccattccccacatgtaccgccgtccagagaaaccct

SEQ ID NO: 348766 - DNA, 55 bp, Artificial
  Synthetic oligonucleotide
cagggccggaccgcaaaggtcctgagcctgcccgactcagtgtcgggatataaag

SEQ ID NO: 348767 - DNA, 55 bp, Artificial
  Synthetic oligonucleotide
cagggcctaaaaccagcacacctgaaactgatgcagtgactaaggtaagaggccg

SEQ ID NO: 348768 - DNA, 60 bp, Artificial
  Synthetic oligonucleotide
cagggcctatcgcaccaggccagatgagagaaccgagaggaagtgatatagcaggagcta

SEQ ID NO: 348769 - DNA, 55 bp, Artificial
  Synthetic oligonucleotide
cagggcctcacccctcttgacccgggcagataccaaactcgccgcggattagtct

SEQ ID NO: 348770 - DNA, 58 bp, Artificial
  Synthetic oligonucleotide
cagggcctcagcttgggttaatcgcccaatgtacaggaagccccgcatttatcgtatg

SEQ ID NO: 348771 - DNA, 54 bp, Artificial
  Synthetic oligonucleotide
cagggcctccaggaaccaaagttggcgcagtataacttgtttaatgtagggaag

SEQ ID NO: 348772 - DNA, 55 bp, Artificial
  Synthetic oligonucleotide
cagggcctgtcgtgatacgaacggattgtacaacaggagttggcaacctctggcc

SEQ ID NO: 348773 - DNA, 58 bp, Artificial
  Synthetic oligonucleotide
cagggcgaaaacaattgagatcgttatccgcaaagtgcctacgcgaagcctagtaaca

SEQ ID NO: 348774 - DNA, 57 bp, Artificial
  Synthetic oligonucleotide
cagggcgaatgcgcgttacgcggagatttcatccgtatggggggactccggcaagac

SEQ ID NO: 348775 - DNA, 55 bp, Artificial
  Synthetic oligonucleotide
cagggcgaccaattccccaaacactggatctacaactggtgtaattgtcccttca

SEQ ID NO: 348776 - DNA, 55 bp, Artificial
  Synthetic oligonucleotide
cagggcgagaatcaaaaccaggctgttcaccataagacaggaaatggccagcagg

SEQ ID NO: 348777 - DNA, 53 bp, Artificial
  Synthetic oligonucleotide
cagggcgagcaaggtaccccccatttgcaaggctacctccattttaaaactaa

SEQ ID NO: 348778 - DNA, 52 bp, Artificial
  Synthetic oligonucleotide
cagggcgaggggacacctcggcgacctcagacggggggacctcaccaaaacg

SEQ ID NO: 348779 - DNA, 55 bp, Artificial
  Synthetic oligonucleotide
cagggcgcaaatcaaggcccatttgcgaagtagttttaacatcctgcgttattga

SEQ ID NO: 348780 - DNA, 58 bp, Artificial
  Synthetic oligonucleotide
cagggcgcactgtgacattgcgtgggtctctcacgaaaggtacgactgcatggtgtgg

SEQ ID NO: 348781 - DNA, 54 bp, Artificial
  Synthetic oligonucleotide
cagggcgccacttcagctgcgacatgaactgagggaacttcatgcctgccactc

SEQ ID NO: 348782 - DNA, 55 bp, Artificial
  Synthetic oligonucleotide
cagggcgccctgagaaacagcgtcagttgttacgctatagtggtataggcggcca

SEQ ID NO: 348783 - DNA, 57 bp, Artificial
  Synthetic oligonucleotide
cagggcgcgcggagactcttaagccagttattacgggtgacggcattgaccccatat

SEQ ID NO: 348784 - DNA, 55 bp, Artificial
  Synthetic oligonucleotide
cagggcgctcgctttcgcgcgagaataataggagtgtgcgtggattgcggtagaa

SEQ ID NO: 348785 - DNA, 60 bp, Artificial
  Synthetic oligonucleotide
cagggcgggtaagcagtatggtgctatcacggctgaggcacggtattcattctggctggc

SEQ ID NO: 348786 - DNA, 59 bp, Artificial
  Synthetic oligonucleotide
cagggcgggtcgtgatgatgtgggataaggattccgaggatcccccaccaaatgatcga

SEQ ID NO: 348787 - DNA, 55 bp, Artificial
  Synthetic oligonucleotide
cagggcgtgtcatggaataggccagcaaatgttctctgtgttcaaggacacatac

SEQ ID NO: 348788 - DNA, 60 bp, Artificial
  Synthetic oligonucleotide
cagggctaatattgacacgtgatggaggaagtgacaatgggacagagacattcagacctg

SEQ ID NO: 348789 - DNA, 55 bp, Artificial
  Synthetic oligonucleotide
cagggctaggaatcaaggtcaacattgagcacatagatgggaaggacaacgtcct

SEQ ID NO: 348790 - DNA, 59 bp, Artificial
  Synthetic oligonucleotide
cagggctcaacctttcagaaggcactcctaattagccctcataggttcggagagatcaa

SEQ ID NO: 348791 - DNA, 60 bp, Artificial
  Synthetic oligonucleotide
cagggctcagaaactatccctcactgtaactgcacctcaggagtctattactctcagtac

SEQ ID NO: 348792 - DNA, 55 bp, Artificial
  Synthetic oligonucleotide
cagggctccgatgacagtagtatgatgatcagcttcccatgctctaatgaagatg

SEQ ID NO: 348793 - DNA, 55 bp, Artificial
  Synthetic oligonucleotide
cagggctcgtgttggaggaaggcgccccagaaggcactgtctgttctatactcat

SEQ ID NO: 348794 - DNA, 57 bp, Artificial
  Synthetic oligonucleotide
cagggctgctattaacaagagatgggggtattaagaacgagaacaagcccgagatct

SEQ ID NO: 348795 - DNA, 60 bp, Artificial
  Synthetic oligonucleotide
cagggctgctattaacaagagatggtggtaatcataatgacacgggcaatgacaccgaga

SEQ ID NO: 348796 - DNA, 57 bp, Artificial
  Synthetic oligonucleotide
cagggctgctattaacaagagatggtggtaatgggactaatgacaccaaccccgagg

SEQ ID NO: 348797 - DNA, 60 bp, Artificial
  Synthetic oligonucleotide
cagggctgctattaacaagagatggtggtaggggcaatgacacggacaataccaccgaga

SEQ ID NO: 348798 - DNA, 60 bp, Artificial
  Synthetic oligonucleotide
cagggctggaactgaccttgaccaacacgagcatactcaatcacaaattctgcaacctat

SEQ ID NO: 348799 - DNA, 60 bp, Artificial
  Synthetic oligonucleotide
cagggctgtctctaggcttaattccagacctctctgtgcttagggcaaacatcacttggc

SEQ ID NO: 348800 - DNA, 55 bp, Artificial
  Synthetic oligonucleotide
cagggcttaccatcaatgaacaagctgtttcgaaacctttcagtgctgattcgag

SEQ ID NO: 348801 - DNA, 55 bp, Artificial
  Synthetic oligonucleotide
cagggcttacccgcgggttactccctttggctgctgtaagatggaggaagactcg

SEQ ID NO: 348802 - DNA, 55 bp, Artificial
  Synthetic oligonucleotide
cagggcttgccaacaacactgacacctggctctgaacaatttctgactactgatg

SEQ ID NO: 348803 - DNA, 60 bp, Artificial
  Synthetic oligonucleotide
cagggcttgctctacatgccgcaggagctcacggtgtctaacagtgtcttggttttcgag

SEQ ID NO: 348804 - DNA, 55 bp, Artificial
  Synthetic oligonucleotide
caggggaaacaatgctatcaattacgattctgttcctgctcatagcagagggctc

SEQ ID NO: 348805 - DNA, 59 bp, Artificial
  Synthetic oligonucleotide
caggggaacggccctcgggcatgttcgattcttcggtcctgtgtgagtgctatgacgcg

SEQ ID NO: 348806 - DNA, 55 bp, Artificial
  Synthetic oligonucleotide
caggggaagaggagttgcgctcactgatgatgaatacgacgagtggcgcgaacat

SEQ ID NO: 348807 - DNA, 56 bp, Artificial
  Synthetic oligonucleotide
caggggaagcccctgactcggatccagacagcccagtctggaaggtaaagaaaagc

SEQ ID NO: 348808 - DNA, 58 bp, Artificial
  Synthetic oligonucleotide
caggggaattcccaagctttattgcaccagcaaataatgagggaggacaataggcagg

SEQ ID NO: 348809 - DNA, 57 bp, Artificial
  Synthetic oligonucleotide
caggggacaaagcgacgacgactcgatttaccagactccagagacaacacccagtac

SEQ ID NO: 348810 - DNA, 60 bp, Artificial
  Synthetic oligonucleotide
caggggacagaaaagttgacgataacatactcgtcgtcaatgatgtgggagatcaacggc

SEQ ID NO: 348811 - DNA, 55 bp, Artificial
  Synthetic oligonucleotide
caggggacagcgattgactgtctccatcctcgagtttgatctcgagttgcctcac

SEQ ID NO: 348812 - DNA, 55 bp, Artificial
  Synthetic oligonucleotide
caggggacatagacatacattttacagcattattgcgtgcaaacaataacagagc

SEQ ID NO: 348813 - DNA, 60 bp, Artificial
  Synthetic oligonucleotide
caggggaccacgctggacaacaaacattcaaatggcacaatacatgatagaatccctcat

SEQ ID NO: 348814 - DNA, 55 bp, Artificial
  Synthetic oligonucleotide
caggggacctgatcaatccacctttccacgaattcgcatacgaaggactcaagat

SEQ ID NO: 348815 - DNA, 57 bp, Artificial
  Synthetic oligonucleotide
caggggacgttcgagattccaagctacagatcactttacctgcgttgggtgaacgcc

SEQ ID NO: 348816 - DNA, 53 bp, Artificial
  Synthetic oligonucleotide
caggggagaccccaacgacatttaccagcttaggtttagactctaaggttcaa

SEQ ID NO: 348817 - DNA, 53 bp, Artificial
  Synthetic oligonucleotide
caggggagacccgagaatgaactaccaaccgtagattttgaaattaaagcggc

SEQ ID NO: 348818 - DNA, 55 bp, Artificial
  Synthetic oligonucleotide
caggggagataggagcgattgcactggacttcaagcctggaacttcaggatcccc

SEQ ID NO: 348819 - DNA, 60 bp, Artificial
  Synthetic oligonucleotide
caggggagatgtatttgtcatcagagagccgtttatttcgtgctctcacttggaatgcag

SEQ ID NO: 348820 - DNA, 53 bp, Artificial
  Synthetic oligonucleotide
caggggaggactccaggatagctctcgtctaaaacctactgttgttggagtcc

SEQ ID NO: 348821 - DNA, 60 bp, Artificial
  Synthetic oligonucleotide
caggggaggcgtggtctgggcgggactggggagtggcgagccctcagatgctgcatataa

SEQ ID NO: 348822 - DNA, 60 bp, Artificial
  Synthetic oligonucleotide
caggggagttcccaatgcatagcatgatgctcagaagatgggaaagaaacggcagatcgc

SEQ ID NO: 348823 - DNA, 51 bp, Artificial
  Synthetic oligonucleotide
caggggataaggggtttacttgatcgcagctctataataagacaattctat

SEQ ID NO: 348824 - DNA, 55 bp, Artificial
  Synthetic oligonucleotide
caggggatatctgcatggagtaaaaccttttgcgccctgtttggcccctggttcc

SEQ ID NO: 348825 - DNA, 55 bp, Artificial
  Synthetic oligonucleotide
caggggatccatgccagagtgattacgacagtgaattggatagaggcttcttcct

SEQ ID NO: 348826 - DNA, 54 bp, Artificial
  Synthetic oligonucleotide
caggggatcgtgagttagccttgctaaacgagcgtttcatccttgtttgcaacg

SEQ ID NO: 348827 - DNA, 56 bp, Artificial
  Synthetic oligonucleotide
caggggatggtactgttaaaacatataaagcttcgtacagaattaaagatggtgaa

SEQ ID NO: 348828 - DNA, 55 bp, Artificial
  Synthetic oligonucleotide
caggggatgtactggtaatcaatagtaacgggaacctaatcgctcctcgaggtta

SEQ ID NO: 348829 - DNA, 52 bp, Artificial
  Synthetic oligonucleotide
caggggatgtagatattcattatacagcattgttgcgttccagcaaccaaaa

SEQ ID NO: 348830 - DNA, 50 bp, Artificial
  Synthetic oligonucleotide
caggggattacagacccctaaagaaggggttttgtctgggttaaatagag

SEQ ID NO: 348831 - DNA, 59 bp, Artificial
  Synthetic oligonucleotide
caggggatttggagtgtggtctcgcactcctcctgcttacagaccaccaaatgccccta

SEQ ID NO: 348832 - DNA, 51 bp, Artificial
  Synthetic oligonucleotide
caggggcacccccgagacccaccgccttcggcggtgggtctcgggggcctg

SEQ ID NO: 348833 - DNA, 60 bp, Artificial
  Synthetic oligonucleotide
caggggcacggttcccgatgcgcgatgcagttctttcacccgatgtgataatacggagcg

SEQ ID NO: 348834 - DNA, 55 bp, Artificial
  Synthetic oligonucleotide
caggggccaacacccctgctgtataggctaggagccgtccaaaacgagattatcc

SEQ ID NO: 348835 - DNA, 57 bp, Artificial
  Synthetic oligonucleotide
caggggccccgatcgtagatggcaagcggacggtatgggctagcagcctgccagaag

SEQ ID NO: 348836 - DNA, 55 bp, Artificial
  Synthetic oligonucleotide
caggggccttatccagtcctcccgtgcacatgcaattgtcgcactcactcgtcac

SEQ ID NO: 348837 - DNA, 55 bp, Artificial
  Synthetic oligonucleotide
caggggcgatgttctatatgcccttagaactcgacaaattcgacgaggtattctc

SEQ ID NO: 348838 - DNA, 52 bp, Artificial
  Synthetic oligonucleotide
caggggcggggagtcttcgagatttcggacgaaaaggcaacgaacccgatcg

SEQ ID NO: 348839 - DNA, 56 bp, Artificial
  Synthetic oligonucleotide
caggggctaacctaacaaacccctggctcaggtcaggcacaaacagccctgtagtg

SEQ ID NO: 348840 - DNA, 55 bp, Artificial
  Synthetic oligonucleotide
caggggctgacgactcaatagtagcaggaatagagttagggagcaactatacccc

SEQ ID NO: 348841 - DNA, 60 bp, Artificial
  Synthetic oligonucleotide
caggggcttccatgacccgtgtgaggaagggaaagtgtgctacctgaccatcaatcagtg

SEQ ID NO: 348842 - DNA, 60 bp, Artificial
  Synthetic oligonucleotide
caggggcttccatgactcgtgtgaagaagggaaattgtgctatctgactatcaatcaatg

SEQ ID NO: 348843 - DNA, 60 bp, Artificial
  Synthetic oligonucleotide
cagggggagtgttattatcactatatgtgtcagccttactgtcatacttactgtattcgg

SEQ ID NO: 348844 - DNA, 60 bp, Artificial
  Synthetic oligonucleotide
cagggggatccagaaggatctctggctgttcagccatataggggccacctcattcgcagt

SEQ ID NO: 348845 - DNA, 59 bp, Artificial
  Synthetic oligonucleotide
cagggggcatggagttaacaagggaccctactgtttcagagcacgcatctctggttggc

SEQ ID NO: 348846 - DNA, 54 bp, Artificial
  Synthetic oligonucleotide
caggggggaagaaacgttataggctaaaacatttagtatgggcaagcagggagc

SEQ ID NO: 348847 - DNA, 54 bp, Artificial
  Synthetic oligonucleotide
caggggggaattacactttcgggaacaaattcttgctctcaaaactactagcca

SEQ ID NO: 348848 - DNA, 58 bp, Artificial
  Synthetic oligonucleotide
cagggggtcattgaaaccgtgtacctgagaactccgttctctgctggcaacgccacta

SEQ ID NO: 348849 - DNA, 55 bp, Artificial
  Synthetic oligonucleotide
cagggggtctctcgctccctggactggtccaaagttaccctcgatgggcgaccgc

SEQ ID NO: 348850 - DNA, 54 bp, Artificial
  Synthetic oligonucleotide
caggggtaataacaatcttcaaaagcttttcgattgacaggtacaggtagaccc

SEQ ID NO: 348851 - DNA, 60 bp, Artificial
  Synthetic oligonucleotide
caggggtaattgtgtagcagcagctctgaacacaactaacattgccggacaaatgagtat

SEQ ID NO: 348852 - DNA, 52 bp, Artificial
  Synthetic oligonucleotide
caggggtacataatttccgacccttgccggcaacttgccggtacttggaacc

SEQ ID NO: 348853 - DNA, 53 bp, Artificial
  Synthetic oligonucleotide
caggggtactagtggagtagcccgtctagtacccctaggttctggtgtccaac

SEQ ID NO: 348854 - DNA, 60 bp, Artificial
  Synthetic oligonucleotide
caggggtactttggggccggcagcaccatgatggtgcataatttgatcactggtgtgcgc

SEQ ID NO: 348855 - DNA, 57 bp, Artificial
  Synthetic oligonucleotide
caggggtatctccagttgaagggaaaaagaagccttgcgcaggtgaaggcactcttc

SEQ ID NO: 348856 - DNA, 58 bp, Artificial
  Synthetic oligonucleotide
caggggtatggagttaagggatttgggttcaggcagggcaatgatgtatggatgggaa

SEQ ID NO: 348857 - DNA, 60 bp, Artificial
  Synthetic oligonucleotide
caggggtcagatatccactgacctatggatggtgcttcaagctagtaccagttgacccaa

SEQ ID NO: 348858 - DNA, 57 bp, Artificial
  Synthetic oligonucleotide
caggggtcccctttctctcatgccagcgtgggtacaagggggtctggcgcggagatg

SEQ ID NO: 348859 - DNA, 56 bp, Artificial
  Synthetic oligonucleotide
caggggtcgagaagcccaagtttcttccggatctgtatgactatagggagaaccga

SEQ ID NO: 348860 - DNA, 51 bp, Artificial
  Synthetic oligonucleotide
caggggtcggcagtgctcggcacacataaaagcatgcgcgtcaggcgttgc

SEQ ID NO: 348861 - DNA, 55 bp, Artificial
  Synthetic oligonucleotide
caggggtgagggttggagtcaacgaattcgttgtcataaaaccaggtgcgttatg

SEQ ID NO: 348862 - DNA, 52 bp, Artificial
  Synthetic oligonucleotide
caggggtgtttagcagtaaactggtgtggaagaggtatgactggctgcaaga

SEQ ID NO: 348863 - DNA, 60 bp, Artificial
  Synthetic oligonucleotide
caggggttatgtgcctgacaactctgtcagttcggcactgatcccacgtcttgttgtcac

SEQ ID NO: 348864 - DNA, 60 bp, Artificial
  Synthetic oligonucleotide
caggggttgaacctggagaccatctaaaagagagatcaatgctcagctatgggaatgtat

SEQ ID NO: 348865 - DNA, 54 bp, Artificial
  Synthetic oligonucleotide
caggggtttccacgacccgtgtgaggaagggaagaagtgctacctaaccatcaa

SEQ ID NO: 348866 - DNA, 53 bp, Artificial
  Synthetic oligonucleotide
cagggtaattggggctagaatcttgctatacgctcctagaaagtactacgcgt

SEQ ID NO: 348867 - DNA, 55 bp, Artificial
  Synthetic oligonucleotide
cagggtacaccccagatgtcaacagctccgaatggagtgaatcacgctatgatac

SEQ ID NO: 348868 - DNA, 52 bp, Artificial
  Synthetic oligonucleotide
cagggtacattcctttggggggtaggcctagtacagttgtagatgttacccc

SEQ ID NO: 348869 - DNA, 60 bp, Artificial
  Synthetic oligonucleotide
cagggtacgcacacgtccttcacccatggagacgccaaccaagctggccactacaatatg

SEQ ID NO: 348870 - DNA, 55 bp, Artificial
  Synthetic oligonucleotide
cagggtacgggtgcaaattgtgatatgctggatgtttgtgataatatacttgtct

SEQ ID NO: 348871 - DNA, 55 bp, Artificial
  Synthetic oligonucleotide
cagggtacggtgccatggattttgccaatttacaggaatctaagtcagaggtgcc

SEQ ID NO: 348872 - DNA, 55 bp, Artificial
  Synthetic oligonucleotide
cagggtactgcggttggtggcgtcattgcccaacccagcgctcaaatgtcggcag

SEQ ID NO: 348873 - DNA, 55 bp, Artificial
  Synthetic oligonucleotide
cagggtagataatcactcaccgagtgacattcacatcatggcgtctcaaggcacc

SEQ ID NO: 348874 - DNA, 55 bp, Artificial
  Synthetic oligonucleotide
cagggtagtaagctgtcaggttcagaatgctacatactcttaacactaggccacc

SEQ ID NO: 348875 - DNA, 55 bp, Artificial
  Synthetic oligonucleotide
cagggtagtgtcccagattatcagtcccatggtaagatgattgatggccgaaagt

SEQ ID NO: 348876 - DNA, 59 bp, Artificial
  Synthetic oligonucleotide
cagggtatatctcgctctccaagttctcttatcatcttcttgtaaagattaactaaaga

SEQ ID NO: 348877 - DNA, 55 bp, Artificial
  Synthetic oligonucleotide
cagggtatggggcacatttatgggtgggaattattactcaggggtgggtcagtta

SEQ ID NO: 348878 - DNA, 54 bp, Artificial
  Synthetic oligonucleotide
cagggtattgggttcttttcccaccgtactttctagaatactgtatgcagaccc

SEQ ID NO: 348879 - DNA, 55 bp, Artificial
  Synthetic oligonucleotide
cagggtatttatggaaaagattagtttcacatagataacccaatatataattacg

SEQ ID NO: 348880 - DNA, 60 bp, Artificial
  Synthetic oligonucleotide
cagggtatttcgccgactatgaggaactgagggagcaattgagttcagtatcatcattcg

SEQ ID NO: 348881 - DNA, 55 bp, Artificial
  Synthetic oligonucleotide
cagggtattttccaaactgttgggagtggtcttgaccacatcctgtctttggcag

SEQ ID NO: 348882 - DNA, 51 bp, Artificial
  Synthetic oligonucleotide
cagggtcaatatcaaacaggttccagggcatctcacagaaagccctcttta

SEQ ID NO: 348883 - DNA, 54 bp, Artificial
  Synthetic oligonucleotide
cagggtcacctttattgggattcacagttttattgacagggataggtttagaca

SEQ ID NO: 348884 - DNA, 55 bp, Artificial
  Synthetic oligonucleotide
cagggtcactcgacaggagcattatgatcgttgaaactgaactcgttgcgcaacg

SEQ ID NO: 348885 - DNA, 57 bp, Artificial
  Synthetic oligonucleotide
cagggtcagccttgcataggttcaagtctgccagatacagcgaaggagggtattctt

SEQ ID NO: 348886 - DNA, 58 bp, Artificial
  Synthetic oligonucleotide
cagggtcagtcaccacagacaccaacggtagtcccaaatgcagtaattgagttcgaag

SEQ ID NO: 348887 - DNA, 58 bp, Artificial
  Synthetic oligonucleotide
cagggtcatcctaagcttactatggacggttactgtggagagaaacacagaggttatg

SEQ ID NO: 348888 - DNA, 55 bp, Artificial
  Synthetic oligonucleotide
cagggtcatgcatcagtcctatgggaaatcagggatatggagttaagggttttgg

SEQ ID NO: 348889 - DNA, 60 bp, Artificial
  Synthetic oligonucleotide
cagggtccaaagtacggatgaatatgtgcaaaggactaacatatactatcatgcatacag

SEQ ID NO: 348890 - DNA, 55 bp, Artificial
  Synthetic oligonucleotide
cagggtccagaagccgaaactgcaattcgtgcgctggggatcacggcacagcgag

SEQ ID NO: 348891 - DNA, 57 bp, Artificial
  Synthetic oligonucleotide
cagggtccatactctcccgaaaagaaactgcaaatggttatggaattgcttagtgtg

SEQ ID NO: 348892 - DNA, 56 bp, Artificial
  Synthetic oligonucleotide
cagggtcccatttgggccaagattcctcataccgatggacactttcacccctcacc

SEQ ID NO: 348893 - DNA, 60 bp, Artificial
  Synthetic oligonucleotide
cagggtcgagtgaacaagcagcggaggctatggaggtagccagtcaggctaggcagatgg

SEQ ID NO: 348894 - DNA, 55 bp, Artificial
  Synthetic oligonucleotide
cagggtcgcggctggccgtctgtactttgtatagtcagttgaaactcaccatggc

SEQ ID NO: 348895 - DNA, 55 bp, Artificial
  Synthetic oligonucleotide
cagggtcggttgttgtttcaaagtcgcaaacgtaaacacttctagccattcagaa

SEQ ID NO: 348896 - DNA, 55 bp, Artificial
  Synthetic oligonucleotide
cagggtcgtaatgatcccatgatgatatacttagtatggagaagaatcgaaaact

SEQ ID NO: 348897 - DNA, 55 bp, Artificial
  Synthetic oligonucleotide
cagggtctgcacggagtctgactatgaggcctttgactctagccaagatagcaac

SEQ ID NO: 348898 - DNA, 55 bp, Artificial
  Synthetic oligonucleotide
cagggtctggacaattcctcaccactgatgatagacaatcacccagtgcattgcc

SEQ ID NO: 348899 - DNA, 52 bp, Artificial
  Synthetic oligonucleotide
cagggtgactacatctgtgtccagagacaaacctgtaaaacgaaggcgcgga

SEQ ID NO: 348900 - DNA, 60 bp, Artificial
  Synthetic oligonucleotide
cagggtgcaagttaatttgacagtcaggtgaatggccgcgattggcgtgtggcctctaag

SEQ ID NO: 348901 - DNA, 60 bp, Artificial
  Synthetic oligonucleotide
cagggtgcatacactggcctgccaaacaaacgtcccaatgtgcccactatcaggacggca

SEQ ID NO: 348902 - DNA, 60 bp, Artificial
  Synthetic oligonucleotide
cagggtgcgaacgataactgtcgtcacaccaactccactatcacctacaagttgatgacc

SEQ ID NO: 348903 - DNA, 55 bp, Artificial
  Synthetic oligonucleotide
cagggtgctaccttcacagagaccacaatcatagcaacggctgatgccagaggcc

SEQ ID NO: 348904 - DNA, 55 bp, Artificial
  Synthetic oligonucleotide
cagggtggaatgtattggatggtcaagtacgagttgccatgatggtagagccagg

SEQ ID NO: 348905 - DNA, 58 bp, Artificial
  Synthetic oligonucleotide
cagggtggcacaaagttgtgttgtgtggaatgggagttcttcaagatcggtgttcctc

SEQ ID NO: 348906 - DNA, 52 bp, Artificial
  Synthetic oligonucleotide
cagggtgggtgaatgaaaccagcccttttacggaagaatacctccttcctcc

SEQ ID NO: 348907 - DNA, 55 bp, Artificial
  Synthetic oligonucleotide
cagggtggtgaatcaagcattcacattgactaacagagtgtcaatgccgacattt

SEQ ID NO: 348908 - DNA, 55 bp, Artificial
  Synthetic oligonucleotide
cagggtggtggacagatatagttatagaagcagtagtttacatagccagagggat

SEQ ID NO: 348909 - DNA, 55 bp, Artificial
  Synthetic oligonucleotide
cagggtggtttaggatgtcaccttaagtgactatttctgtatatatggatgtaga

SEQ ID NO: 348910 - DNA, 55 bp, Artificial
  Synthetic oligonucleotide
cagggtggttttcgtatcaatgcaatatgggtgggtttagggccaagctacctta

SEQ ID NO: 348911 - DNA, 59 bp, Artificial
  Synthetic oligonucleotide
cagggttaagcaactgggattagctagcatgtatgcagaaggactaacctggtagaggt

SEQ ID NO: 348912 - DNA, 55 bp, Artificial
  Synthetic oligonucleotide
cagggttaatggtattaccagggtttactaatcaatacactaatcaagtgaactg

SEQ ID NO: 348913 - DNA, 56 bp, Artificial
  Synthetic oligonucleotide
cagggttaccttcggatagtgggaccattaacagcaaaagtaccgagcaccagctc

SEQ ID NO: 348914 - DNA, 59 bp, Artificial
  Synthetic oligonucleotide
cagggttagagattgtgtgcactactcaattgagtttccacgtaacaaatggagtaatg

SEQ ID NO: 348915 - DNA, 60 bp, Artificial
  Synthetic oligonucleotide
cagggttcaacatacaagacatggacattgtggcttctgagcacctgctacaccaatccc

SEQ ID NO: 348916 - DNA, 55 bp, Artificial
  Synthetic oligonucleotide
cagggttcagtgggccagtgtttcaaattatgttcttgccaatccagatgctacc

SEQ ID NO: 348917 - DNA, 60 bp, Artificial
  Synthetic oligonucleotide
cagggttcatagcggccctcttctacacacataggttcaattctagtggctgtcccgaga

SEQ ID NO: 348918 - DNA, 51 bp, Artificial
  Synthetic oligonucleotide
cagggttcgagatgaaggattccaagtaatattggaaccctttaaaaacct

SEQ ID NO: 348919 - DNA, 55 bp, Artificial
  Synthetic oligonucleotide
cagggttctgcatccacgttcaatgtaacgctagcaaatttcaccaaggggcgct

SEQ ID NO: 348920 - DNA, 55 bp, Artificial
  Synthetic oligonucleotide
cagggttgaaaacaaagggcgtgtgtttacgtcagactatgtcatttgcacgtcc

SEQ ID NO: 348921 - DNA, 60 bp, Artificial
  Synthetic oligonucleotide
cagggttgctattaacaagagatggtggtaacaatagcgagaccaatgagaccttcagac

SEQ ID NO: 348922 - DNA, 58 bp, Artificial
  Synthetic oligonucleotide
cagggttggacccacctgataaacattactaatggtcgattgagttctgagatacaac

SEQ ID NO: 348923 - DNA, 55 bp, Artificial
  Synthetic oligonucleotide
cagggttggattttggtacgactttttcaacgatcagcgcttacgtcgatggtaa

SEQ ID NO: 348924 - DNA, 55 bp, Artificial
  Synthetic oligonucleotide
cagggttggcatgaacatgaatgaggatggacccataatatttgagaaacattcc

SEQ ID NO: 348925 - DNA, 60 bp, Artificial
  Synthetic oligonucleotide
cagggttgtaacgaattactaacatggggtttagctactctggcagcatgctgtgctcta

SEQ ID NO: 348926 - DNA, 55 bp, Artificial
  Synthetic oligonucleotide
cagggtttgccagttagaatgcccagtgggtccaatcagttcatgacaacagaag

SEQ ID NO: 348927 - DNA, 55 bp, Artificial
  Synthetic oligonucleotide
caggtaaaggtggtcatagtggttcaactttcaaatgctgtcatggagaagagtg

SEQ ID NO: 348928 - DNA, 58 bp, Artificial
  Synthetic oligonucleotide
caggtaaatcagaaaccagtgaatacgagagctttccagtatttactgcttagtgaac

SEQ ID NO: 348929 - DNA, 55 bp, Artificial
  Synthetic oligonucleotide
caggtaaatccgatggacatttgaatgatggtaattacgcacagactatcgccac

SEQ ID NO: 348930 - DNA, 55 bp, Artificial
  Synthetic oligonucleotide
caggtaacacatacccgatgctaaacgttactatgccaaacagtgacgatttcaa

SEQ ID NO: 348931 - DNA, 50 bp, Artificial
  Synthetic oligonucleotide
caggtaaccggtttggttacctttcgtacatggacaaatttgtcttttcc

SEQ ID NO: 348932 - DNA, 60 bp, Artificial
  Synthetic oligonucleotide
caggtaacggatggttgtcaagtgctatggatgttagtggtatggatgcaagcattcagg

SEQ ID NO: 348933 - DNA, 57 bp, Artificial
  Synthetic oligonucleotide
caggtaactgttgaggtcagtaacaatggccgcaacaggagtaaatcaagggcccga

SEQ ID NO: 348934 - DNA, 55 bp, Artificial
  Synthetic oligonucleotide
caggtaagagcagtttattagcacgtaccagcagaataggttttagcagttcacg

SEQ ID NO: 348935 - DNA, 55 bp, Artificial
  Synthetic oligonucleotide
caggtaagaggagccacctacgacatagtgactttcattcacgacaagcctctgg

SEQ ID NO: 348936 - DNA, 58 bp, Artificial
  Synthetic oligonucleotide
caggtaagcatcttagatgttatcgatcgtttagctcatacatcaatacctaatcttg

SEQ ID NO: 348937 - DNA, 58 bp, Artificial
  Synthetic oligonucleotide
caggtaaggatatcggggcgttgcacctgattgcaatcgcatcgcagcttcgcgtagg

SEQ ID NO: 348938 - DNA, 53 bp, Artificial
  Synthetic oligonucleotide
caggtaaggcgtttgtgataaaagctgctagaaatgctggatacacaagcatt

SEQ ID NO: 348939 - DNA, 55 bp, Artificial
  Synthetic oligonucleotide
caggtaaggttatgtgcatatccgacgtgacacgtggtaatggtatcactcaccg

SEQ ID NO: 348940 - DNA, 58 bp, Artificial
  Synthetic oligonucleotide
caggtaatatgagcaaccgcactttagatcaatgcgtcgtcgtcgaatcgtcttcttt

SEQ ID NO: 348941 - DNA, 59 bp, Artificial
  Synthetic oligonucleotide
caggtaatgaatactgaccataaggcctacttggacaaaaacaatgcttatccagttga

SEQ ID NO: 348942 - DNA, 55 bp, Artificial
  Synthetic oligonucleotide
caggtaatgattttactcatatgactaccactttcccatcaggttcaacagccac

SEQ ID NO: 348943 - DNA, 55 bp, Artificial
  Synthetic oligonucleotide
caggtacaatagaagatatcactagaattaaagatcttaaggtgcctcagttgcc

SEQ ID NO: 348944 - DNA, 55 bp, Artificial
  Synthetic oligonucleotide
caggtacaatgaatagtgttgttagtactattaacgggggattcagtaggataaa

SEQ ID NO: 348945 - DNA, 60 bp, Artificial
  Synthetic oligonucleotide
caggtacacataccggtgtcacaggggtgatacacaaattcaaacgaggagatcattcga

SEQ ID NO: 348946 - DNA, 55 bp, Artificial
  Synthetic oligonucleotide
caggtacaggaacaatctacgtagatacctactcagaaggtaccatgatagggac

SEQ ID NO: 348947 - DNA, 55 bp, Artificial
  Synthetic oligonucleotide
caggtacaggcggacgcactgggtatattccattaggaacaaggcctcccacagc

SEQ ID NO: 348948 - DNA, 55 bp, Artificial
  Synthetic oligonucleotide
caggtacccacacaccagtgggcagcctgtcgtaacgggcaactctgcagcggaa

SEQ ID NO: 348949 - DNA, 57 bp, Artificial
  Synthetic oligonucleotide
caggtaccgatacgcagcaaggccgtgtttggagaacgaacccttatccatgtttgc

SEQ ID NO: 348950 - DNA, 56 bp, Artificial
  Synthetic oligonucleotide
caggtaccgctaaggaagacacaagcgcaaggcagacgggtcaaaactaccctata

SEQ ID NO: 348951 - DNA, 54 bp, Artificial
  Synthetic oligonucleotide
caggtacctagcgtattaataggtcgctagaaatcgggcgggcttcaccttcgg

SEQ ID NO: 348952 - DNA, 55 bp, Artificial
  Synthetic oligonucleotide
caggtaccttaactatctgcccgtttatatttaactctgcacctcttattagacc

SEQ ID NO: 348953 - DNA, 60 bp, Artificial
  Synthetic oligonucleotide
caggtacgcaatatcatctactaatgagatagggttgctaggagccgaaggtctcaccac

SEQ ID NO: 348954 - DNA, 60 bp, Artificial
  Synthetic oligonucleotide
caggtacgtgtcaggagagagtggcaatttgaagataactgatgaaggagtcctctctga

SEQ ID NO: 348955 - DNA, 50 bp, Artificial
  Synthetic oligonucleotide
caggtactagggctaattacactagcggttatcatggcatgtacttctta

SEQ ID NO: 348956 - DNA, 59 bp, Artificial
  Synthetic oligonucleotide
caggtactatttttgcgttgacagagatctttcagtgacctacgaaaatcaagaaggca

SEQ ID NO: 348957 - DNA, 58 bp, Artificial
  Synthetic oligonucleotide
caggtactgaatgacaacattagaaatggtcatgttattaatcaactgatggaagctc

SEQ ID NO: 348958 - DNA, 55 bp, Artificial
  Synthetic oligonucleotide
caggtactgtcatggatctgacatgctaaaggaatactgccagctagcagcagcc

SEQ ID NO: 348959 - DNA, 55 bp, Artificial
  Synthetic oligonucleotide
caggtacttgcaaactcacctggccgagctgtgatttatgtatcaccaaggaagt

SEQ ID NO: 348960 - DNA, 55 bp, Artificial
  Synthetic oligonucleotide
caggtagaagtggtcactgcacgagaactggtagagtcacaaaccctcccggaac

SEQ ID NO: 348961 - DNA, 60 bp, Artificial
  Synthetic oligonucleotide
caggtagaataaagcccatgagaattgaaccctgacatctgcctgagagtattttcttat

SEQ ID NO: 348962 - DNA, 60 bp, Artificial
  Synthetic oligonucleotide
caggtagactgtagtccaggaatatggcaattagactgcacacacttggaaggaaagatc

SEQ ID NO: 348963 - DNA, 55 bp, Artificial
  Synthetic oligonucleotide
caggtagaggggcatgatacagttgaacaatgtagtatgggcagtggggatagta

SEQ ID NO: 348964 - DNA, 51 bp, Artificial
  Synthetic oligonucleotide
caggtagccggtggtaatgcgagctgcccttacccaggcgcaagagggtga

SEQ ID NO: 348965 - DNA, 60 bp, Artificial
  Synthetic oligonucleotide
caggtagcggtagaatctagctgggaagatatattagatggagagccacagtatgataca

SEQ ID NO: 348966 - DNA, 55 bp, Artificial
  Synthetic oligonucleotide
caggtagctcatgggccatcaacaaccctgggacatcagccatagaactggcgca

SEQ ID NO: 348967 - DNA, 55 bp, Artificial
  Synthetic oligonucleotide
caggtaggggaagtggtggtgcaacagggtatgtaccggtcggcgagacacctgg

SEQ ID NO: 348968 - DNA, 52 bp, Artificial
  Synthetic oligonucleotide
caggtaggttccggacaattgtgtgtggtttgttcccaacacagatccaggt

SEQ ID NO: 348969 - DNA, 60 bp, Artificial
  Synthetic oligonucleotide
caggtagtcattatcagactattatgtgtaatagtatgtagcttaggtgcaaccttctat

SEQ ID NO: 348970 - DNA, 58 bp, Artificial
  Synthetic oligonucleotide
caggtagtggattgacatactgtgtaagtggtgacaatatagcgtggcctttaaaggt

SEQ ID NO: 348971 - DNA, 55 bp, Artificial
  Synthetic oligonucleotide
caggtagtggctgattctttgcagatggctgaagatctggcgtggcgagagatgc

SEQ ID NO: 348972 - DNA, 53 bp, Artificial
  Synthetic oligonucleotide
caggtatacacagtgatgtatcctacgaagtataggcgtgggtcttcatatag

SEQ ID NO: 348973 - DNA, 55 bp, Artificial
  Synthetic oligonucleotide
caggtatactgctgcttaacggaaccgctaagttattcctactcctcatttagcc

SEQ ID NO: 348974 - DNA, 55 bp, Artificial
  Synthetic oligonucleotide
caggtatagttactggctcagcagtggggtgtgatcctgaggtattctggtcaac

SEQ ID NO: 348975 - DNA, 60 bp, Artificial
  Synthetic oligonucleotide
caggtatatgcacaaaatgagatgcttgcttatcaacagaaggagtctactgctcgcgtt

SEQ ID NO: 348976 - DNA, 55 bp, Artificial
  Synthetic oligonucleotide
caggtatcatagctagtgttaaggtccttacacctgtttactgggtccgtgtacc

SEQ ID NO: 348977 - DNA, 59 bp, Artificial
  Synthetic oligonucleotide
caggtatccccttcctctcgtgtcagaggggctacaggggagagtggcgtggagatggc

SEQ ID NO: 348978 - DNA, 56 bp, Artificial
  Synthetic oligonucleotide
caggtatccctccaaactgccgaccccattgccaaattgacagccccttaccgaca

SEQ ID NO: 348979 - DNA, 55 bp, Artificial
  Synthetic oligonucleotide
caggtatggagcatcgctttcgtggaatccctcgtggtcttatagaactcgaaga

SEQ ID NO: 348980 - DNA, 58 bp, Artificial
  Synthetic oligonucleotide
caggtcaacaaaataatttgaaatgttggagaaatcgctgtactacaaaatatgctag

SEQ ID NO: 348981 - DNA, 50 bp, Artificial
  Synthetic oligonucleotide
caggtcaacgttaatgatatcagggctgccaatattaaactcgacggact

SEQ ID NO: 348982 - DNA, 58 bp, Artificial
  Synthetic oligonucleotide
caggtcaatagacaggtcatagttgacaacaataattcgtccggatactctggtattt

SEQ ID NO: 348983 - DNA, 55 bp, Artificial
  Synthetic oligonucleotide
caggtcaatggacagagtgggcggattgattttcactggacactggtgcgaccgg

SEQ ID NO: 348984 - DNA, 51 bp, Artificial
  Synthetic oligonucleotide
caggtcacacgtaacgcttgacacgaaagcgggcgacgcttaggctagccc

SEQ ID NO: 348985 - DNA, 55 bp, Artificial
  Synthetic oligonucleotide
caggtcacgccagaaaccaagtgtatcaaataatgtacattcctcctggtgcacc

SEQ ID NO: 348986 - DNA, 55 bp, Artificial
  Synthetic oligonucleotide
caggtcactatcgttggtaggagtggagtgagaaatgaagtcatccgcaccaggg

SEQ ID NO: 348987 - DNA, 55 bp, Artificial
  Synthetic oligonucleotide
caggtcagacctcatcgggttatgggaagaccagatatactgcttggacatgtcc

SEQ ID NO: 348988 - DNA, 51 bp, Artificial
  Synthetic oligonucleotide
caggtcagactccagactgacacaacaaaccattttgagatagcaggcacg

SEQ ID NO: 348989 - DNA, 58 bp, Artificial
  Synthetic oligonucleotide
caggtcagccaaaattaccctatagtgcagaacctccaggggcaaatggtacatcaac

SEQ ID NO: 348990 - DNA, 59 bp, Artificial
  Synthetic oligonucleotide
caggtcaggatttgagatactaagagtaaagaacggctggacacagacaagtaaagagc

SEQ ID NO: 348991 - DNA, 58 bp, Artificial
  Synthetic oligonucleotide
caggtcagggaagaacctgacgaggctggatttggctcgtttggctcctgagattccg

SEQ ID NO: 348992 - DNA, 57 bp, Artificial
  Synthetic oligonucleotide
caggtcagtgggtagaggacctcatagctatggggtctaacagcccgtttgtaccca

SEQ ID NO: 348993 - DNA, 52 bp, Artificial
  Synthetic oligonucleotide
caggtcagtgtctactatgtactctgccgcagagacttccatcgaggcattt

SEQ ID NO: 348994 - DNA, 51 bp, Artificial
  Synthetic oligonucleotide
caggtcatcacccaccgttgtttcgtcgcatctggtgggtacccaactcgc

SEQ ID NO: 348995 - DNA, 60 bp, Artificial
  Synthetic oligonucleotide
caggtcatctctgcctgggtttccagatttcaggccatagatcgttattagcctcgatgc

SEQ ID NO: 348996 - DNA, 56 bp, Artificial
  Synthetic oligonucleotide
caggtcatgacccgcaatgaaaacttccttacgcgggccccgcaggcagttcagtt

SEQ ID NO: 348997 - DNA, 55 bp, Artificial
  Synthetic oligonucleotide
caggtcatggcaggaatacaaccctgagatgagaattgtgatacttactgatgca

SEQ ID NO: 348998 - DNA, 59 bp, Artificial
  Synthetic oligonucleotide
caggtccaccgagggtaggtcactttccacacataacgctgatcagtggttgcagtccc

SEQ ID NO: 348999 - DNA, 60 bp, Artificial
  Synthetic oligonucleotide
caggtccagatgtccacacaaatagttatgtggtcccaatgacctagcccacattgtctt

SEQ ID NO: 349000 - DNA, 60 bp, Artificial
  Synthetic oligonucleotide
caggtcccaatagcttctggcgtagtctctctgcgctaacacgatacaacttgagcgaag

SEQ ID NO: 349001 - DNA, 54 bp, Artificial
  Synthetic oligonucleotide
caggtccccgcgttgacgcccagtaccccgtgtggtcgttcatttacatgggtc

SEQ ID NO: 349002 - DNA, 57 bp, Artificial
  Synthetic oligonucleotide
caggtccgcaatatgatggagtacgtatcacaacgacttggtcagtctacgggtgac

SEQ ID NO: 349003 - DNA, 55 bp, Artificial
  Synthetic oligonucleotide
caggtccgcctcacagccttggaggaatacgtagcggaccaatcaaggctctcgg

SEQ ID NO: 349004 - DNA, 55 bp, Artificial
  Synthetic oligonucleotide
caggtccgtaaaatcattaatgagtacggtcgtggtgagacaacaggctcgcaac

SEQ ID NO: 349005 - DNA, 60 bp, Artificial
  Synthetic oligonucleotide
caggtcctccaagtgaccaaaactgcgtgtcacttgcttccatgatcactggatctctaa

SEQ ID NO: 349006 - DNA, 55 bp, Artificial
  Synthetic oligonucleotide
caggtcctgttgcgcatcaggtgatagtaaacaatcaaaactggtcagggtattc

SEQ ID NO: 349007 - DNA, 56 bp, Artificial
  Synthetic oligonucleotide
caggtcctttttcagttccgctaattcctaccaaagaatccagatctttccagaca

SEQ ID NO: 349008 - DNA, 57 bp, Artificial
  Synthetic oligonucleotide
caggtcgaacggtctaacagccaatgaatcggggagactaatagatttcctcaagga

SEQ ID NO: 349009 - DNA, 58 bp, Artificial
  Synthetic oligonucleotide
caggtcgaagaatcgcttattctggcatttgtattttccttcgaattggatgagcacg

SEQ ID NO: 349010 - DNA, 54 bp, Artificial
  Synthetic oligonucleotide
caggtcgaatagatccggacggtgtttcgtgatccctacggcacacgtgtaacg

SEQ ID NO: 349011 - DNA, 55 bp, Artificial
  Synthetic oligonucleotide
caggtcgacatctctcgaggtgttgatcaagctagcatcgatgcacaacatcagg

SEQ ID NO: 349012 - DNA, 57 bp, Artificial
  Synthetic oligonucleotide
caggtcgatacggccagtcaagactccgttaatgaggtgaacaccgaaaatgttcaa

SEQ ID NO: 349013 - DNA, 58 bp, Artificial
  Synthetic oligonucleotide
caggtcgccttgaatgccgtacggtgcttggaaataagaccttccgcacatcaataac

SEQ ID NO: 349014 - DNA, 54 bp, Artificial
  Synthetic oligonucleotide
caggtcgctggattcgactactcatgtgcaataaacgcgccagctaatacgcaa

SEQ ID NO: 349015 - DNA, 56 bp, Artificial
  Synthetic oligonucleotide
caggtcgggataagaaccaggtcgaaggagaggttcaagtggtctccaccgcaaca

SEQ ID NO: 349016 - DNA, 53 bp, Artificial
  Synthetic oligonucleotide
caggtcggtgccgttaacacaaattccgtgtgcggtaatgttttaggggagtg

SEQ ID NO: 349017 - DNA, 60 bp, Artificial
  Synthetic oligonucleotide
caggtcggtggctcagaggtattagatattacagcggatccaacaactgcaccacaaact

SEQ ID NO: 349018 - DNA, 58 bp, Artificial
  Synthetic oligonucleotide
caggtcggttcaatatgagcagcctgaaacaaactacgcagtaatgtaaccgttacta

SEQ ID NO: 349019 - DNA, 60 bp, Artificial
  Synthetic oligonucleotide
caggtcgtataccgacatgctggtctcatgccccgcgagggcgaagcgattcggttttgc

SEQ ID NO: 349020 - DNA, 55 bp, Artificial
  Synthetic oligonucleotide
caggtcgtctgcattgattgcggggtagtgtgcggctgttttagtgcatgcccgg

SEQ ID NO: 349021 - DNA, 51 bp, Artificial
  Synthetic oligonucleotide
caggtctaccctaggccacgcagtatgagagtagtcagacatcccatgaca

SEQ ID NO: 349022 - DNA, 55 bp, Artificial
  Synthetic oligonucleotide
caggtctagggatatatgatagaacactaatcctaccaacacatgcagatccagg

SEQ ID NO: 349023 - DNA, 55 bp, Artificial
  Synthetic oligonucleotide
caggtctccccagtgacactccaagaggagaagatagtcagttcacaggatcctg

SEQ ID NO: 349024 - DNA, 60 bp, Artificial
  Synthetic oligonucleotide
caggtctgagtcctatctcaaagtgctgggcttctatgtatctggatctgttgtcctgaa

SEQ ID NO: 349025 - DNA, 55 bp, Artificial
  Synthetic oligonucleotide
caggtctgcatagatgcaaaacataaggcaccaacgcagtttaaaagcccaccat

SEQ ID NO: 349026 - DNA, 53 bp, Artificial
  Synthetic oligonucleotide
caggtcttgggatatatgatcaggttatggtactcccaacacactctgatcca

SEQ ID NO: 349027 - DNA, 55 bp, Artificial
  Synthetic oligonucleotide
caggtgaaagtgccaaaaggagctccctgcaagatcccagtgatagtggctgatg

SEQ ID NO: 349028 - DNA, 55 bp, Artificial
  Synthetic oligonucleotide
caggtgaacagatgcgtaaatttgtacagtcacggttagaccctgtacttgagtc

SEQ ID NO: 349029 - DNA, 57 bp, Artificial
  Synthetic oligonucleotide
caggtgaactttgtttgtcagagagtggatatggatattgtagtttactgcaatggc

SEQ ID NO: 349030 - DNA, 58 bp, Artificial
  Synthetic oligonucleotide
caggtgaagcagattatgtcggagaagagagggtccgtccacttaattagtaagaaga

SEQ ID NO: 349031 - DNA, 60 bp, Artificial
  Synthetic oligonucleotide
caggtgaatcactcccaccatggggcaattcattagtttcatgcaggagatacctatttt

SEQ ID NO: 349032 - DNA, 55 bp, Artificial
  Synthetic oligonucleotide
caggtgaattaactatgaaacgtacactacaccagtctttgcaaaaagaccgaag

SEQ ID NO: 349033 - DNA, 54 bp, Artificial
  Synthetic oligonucleotide
caggtgacagggattcgtaacgatcagacgtaaagcttggcagctgaaatgttc

SEQ ID NO: 349034 - DNA, 56 bp, Artificial
  Synthetic oligonucleotide
caggtgactttaccctcagtcgggaacctaaataatatgcgtgccacctacttgga

SEQ ID NO: 349035 - DNA, 55 bp, Artificial
  Synthetic oligonucleotide
caggtgaggccagcacctttctcttcaataccatggctaatatgctattcacctt

SEQ ID NO: 349036 - DNA, 56 bp, Artificial
  Synthetic oligonucleotide
caggtgaggctatgccgccgaatgcaaggataccaaatccagagcatttctcaact

SEQ ID NO: 349037 - DNA, 55 bp, Artificial
  Synthetic oligonucleotide
caggtgagggaaagggataacatggcgagcatgacaattacgaggtacacggcgg

SEQ ID NO: 349038 - DNA, 57 bp, Artificial
  Synthetic oligonucleotide
caggtgcaaacttaactatcgaacagattcttaatatactaaatgcatcagatgcgg

SEQ ID NO: 349039 - DNA, 55 bp, Artificial
  Synthetic oligonucleotide
caggtgcaaagtgcaagacgcgggactcaaacccatcaacacaccagatcactca

SEQ ID NO: 349040 - DNA, 55 bp, Artificial
  Synthetic oligonucleotide
caggtgcaagcggattagttatagctggttctgcactgattaaaggtggttcgcc

SEQ ID NO: 349041 - DNA, 60 bp, Artificial
  Synthetic oligonucleotide
caggtgcaagtacaagaccctaggttcgttgagcagccacagtcaatggtcacttttgat

SEQ ID NO: 349042 - DNA, 59 bp, Artificial
  Synthetic oligonucleotide
caggtgccaacgccgatgtagttagttgtggcgataacatactagtatatgttgctagc

SEQ ID NO: 349043 - DNA, 53 bp, Artificial
  Synthetic oligonucleotide
caggtgcctctggggccgaaagccgaggtttagcagaccctttaggattggtt

SEQ ID NO: 349044 - DNA, 58 bp, Artificial
  Synthetic oligonucleotide
caggtgcgaagtgcactgtgccattagcccctgagcccgtgctgcgttttggttacag

SEQ ID NO: 349045 - DNA, 55 bp, Artificial
  Synthetic oligonucleotide
caggtgcgacgtccattcgcactcgaatgtcgcggtactccaggaagtttccatc

SEQ ID NO: 349046 - DNA, 55 bp, Artificial
  Synthetic oligonucleotide
caggtgcgattagtgtatatgatgaaggaactcttgttagtgctgcgagtagtgt

SEQ ID NO: 349047 - DNA, 60 bp, Artificial
  Synthetic oligonucleotide
caggtgcgtgtggagaatggcacctgtgtgatcctggctactgacatggggtcatggtgt

SEQ ID NO: 349048 - DNA, 60 bp, Artificial
  Synthetic oligonucleotide
caggtgcgttcgcacgtgtgtcagagctaactcaagccttgaccctgtatgagattgaag

SEQ ID NO: 349049 - DNA, 55 bp, Artificial
  Synthetic oligonucleotide
caggtgctacatgctctcccaaaaggttccacattaattcgaaacccttggagca

SEQ ID NO: 349050 - DNA, 60 bp, Artificial
  Synthetic oligonucleotide
caggtgctgaggaagtggcatgcaaccgttacaggtggccaatacgcatcgaaggagcaa

SEQ ID NO: 349051 - DNA, 55 bp, Artificial
  Synthetic oligonucleotide
caggtgctgaggaagtggcatgcaactgttactggtggacagtacgcctcaaagg

SEQ ID NO: 349052 - DNA, 57 bp, Artificial
  Synthetic oligonucleotide
caggtgcttacggtgttgacactcccgaagaagtagcctttattagagagcgtgacc

SEQ ID NO: 349053 - DNA, 58 bp, Artificial
  Synthetic oligonucleotide
caggtgcttcattacccagtactggggatatatttgatggtcctgtcccattcaaaaa

SEQ ID NO: 349054 - DNA, 60 bp, Artificial
  Synthetic oligonucleotide
caggtggaagctacgactttagtatacctgtaggtgcatggccagttatgaatggaggtg

SEQ ID NO: 349055 - DNA, 55 bp, Artificial
  Synthetic oligonucleotide
caggtggaagctcgtcatccagaccagtcatatgctcttctgtgactgcggtgac

SEQ ID NO: 349056 - DNA, 60 bp, Artificial
  Synthetic oligonucleotide
caggtggacaatatgcgtctaaggaacaagctatgatcaagcgtttctggaggttgaatc

SEQ ID NO: 349057 - DNA, 60 bp, Artificial
  Synthetic oligonucleotide
caggtggcattatactaggactacctctgcactacttaggagtgtctgctcgtccgaata

SEQ ID NO: 349058 - DNA, 53 bp, Artificial
  Synthetic oligonucleotide
caggtggcgccggcttagtttcggattctggagggtcgccagagctcactgac

SEQ ID NO: 349059 - DNA, 60 bp, Artificial
  Synthetic oligonucleotide
caggtgggagagcatatagcctctgcgtggggagaattccagattcccgttgcagttgga

SEQ ID NO: 349060 - DNA, 58 bp, Artificial
  Synthetic oligonucleotide
caggtgggagttataattttagattgcctgttggtgaatggcctattatgaatggtgg

SEQ ID NO: 349061 - DNA, 58 bp, Artificial
  Synthetic oligonucleotide
caggtgggccctatgatagtccgtgtccgcaaaagaaagtggaccccgcgcacgcatg

SEQ ID NO: 349062 - DNA, 55 bp, Artificial
  Synthetic oligonucleotide
caggtgggcctcttacccaactctagagccaacgagctagtgtactctcgtctct

SEQ ID NO: 349063 - DNA, 55 bp, Artificial
  Synthetic oligonucleotide
caggtggggttgaggtgcaggtactgctggctggaagtgcgtttacagcgggcaa

SEQ ID NO: 349064 - DNA, 57 bp, Artificial
  Synthetic oligonucleotide
caggtgggtatatattctcgtcggacaccggtccaggtcatttacaacagaagtcag

SEQ ID NO: 349065 - DNA, 55 bp, Artificial
  Synthetic oligonucleotide
caggtgggtggtgcgaatattttagacatcactgctgatccgacgaccgcaccac

SEQ ID NO: 349066 - DNA, 60 bp, Artificial
  Synthetic oligonucleotide
caggtggtatgcccatcaaacaagcgtattaccagtgcatgattcgaaacggcattaaca

SEQ ID NO: 349067 - DNA, 55 bp, Artificial
  Synthetic oligonucleotide
caggtggtgagattcttacaaaggtagctgacgatgcttcaaatcttctcggacc

SEQ ID NO: 349068 - DNA, 60 bp, Artificial
  Synthetic oligonucleotide
caggtgtaggcttcacactcacatgcttaatatcattaacagagtgccctactttcttaa

SEQ ID NO: 349069 - DNA, 54 bp, Artificial
  Synthetic oligonucleotide
caggtgtagtccatcaaaatcggacattattggggtattatttccaaagtaaaa

SEQ ID NO: 349070 - DNA, 54 bp, Artificial
  Synthetic oligonucleotide
caggtgtagttactatatggtaccaaaccaacttcgtagtcccaaatggagccc

SEQ ID NO: 349071 - DNA, 55 bp, Artificial
  Synthetic oligonucleotide
caggtgtatctgtgcaggatggcgattgccctccattggaattagttactagtgt

SEQ ID NO: 349072 - DNA, 60 bp, Artificial
  Synthetic oligonucleotide
caggtgtccagcggtacgccgtcatcgttggtgcaccggtacatgccgttggcatgcacc

SEQ ID NO: 349073 - DNA, 60 bp, Artificial
  Synthetic oligonucleotide
caggtgtgagaggttcttccgcagtcagcaccggcggacctatgctccgagatcgggaag

SEQ ID NO: 349074 - DNA, 54 bp, Artificial
  Synthetic oligonucleotide
caggtgtgccgatggacgaaggggaaaagcttcaagaacaaattaataaggtag

SEQ ID NO: 349075 - DNA, 59 bp, Artificial
  Synthetic oligonucleotide
caggtgtgtagatataaacacttgaaacgaataaattaatatattcctatcaactcata

SEQ ID NO: 349076 - DNA, 59 bp, Artificial
  Synthetic oligonucleotide
caggtgttacataggttttctgccacagttactgggggtcagtatgcgtctaaggagca

SEQ ID NO: 349077 - DNA, 55 bp, Artificial
  Synthetic oligonucleotide
caggtgttagtcgtacactgtatcggcgcatcagatagagttctgtctgtaagga

SEQ ID NO: 349078 - DNA, 56 bp, Artificial
  Synthetic oligonucleotide
caggtgttcaagagggtaacgattatgtcacttttgccttcacgcctggacctaac

SEQ ID NO: 349079 - DNA, 60 bp, Artificial
  Synthetic oligonucleotide
caggtgttcatcaagaatacaccagtgcttgcagaccctccagtagaatacgtgcaccag

SEQ ID NO: 349080 - DNA, 60 bp, Artificial
  Synthetic oligonucleotide
caggtgttcgctgaactgaggagagaagcacaggctttgagggtggcgaaagaggcgaga

SEQ ID NO: 349081 - DNA, 51 bp, Artificial
  Synthetic oligonucleotide
caggtgttgataatgatcagcttgccaatattttgcggcttaatcgaatcg

SEQ ID NO: 349082 - DNA, 60 bp, Artificial
  Synthetic oligonucleotide
caggtgttgccttgttaaagcctgaacatgtcattgtcactccgattatggcaggattgc

SEQ ID NO: 349083 - DNA, 51 bp, Artificial
  Synthetic oligonucleotide
caggtgttgcgtttacattatctgttcgaatgcgttattggagttaacggt

SEQ ID NO: 349084 - DNA, 56 bp, Artificial
  Synthetic oligonucleotide
caggttaaacagcctgggtggttgcagatgtggcaagtaccccaatctaaagaaac

SEQ ID NO: 349085 - DNA, 55 bp, Artificial
  Synthetic oligonucleotide
caggttaacaaacgtttagttgcgtacaaaggtaagatgcgtctaatggatgtaa

SEQ ID NO: 349086 - DNA, 60 bp, Artificial
  Synthetic oligonucleotide
caggttaactcatggtaaatggagtgttcaacgctatggtaatgatgctgagtggccagg

SEQ ID NO: 349087 - DNA, 53 bp, Artificial
  Synthetic oligonucleotide
caggttaactgtaggagaaccttcattttctataacgaggactagggtaagta

SEQ ID NO: 349088 - DNA, 60 bp, Artificial
  Synthetic oligonucleotide
caggttacagagactgagtgcctctgcccttatgaagcccttgtgctcagaaggcccctg

SEQ ID NO: 349089 - DNA, 55 bp, Artificial
  Synthetic oligonucleotide
caggttacagctatttcccttgactgcggatcaggtgtcacggatgtgtgtgctg

SEQ ID NO: 349090 - DNA, 60 bp, Artificial
  Synthetic oligonucleotide
caggttactgacagtactacagggcgtttatgcatgttagtagatcatgagtacaagtac

SEQ ID NO: 349091 - DNA, 54 bp, Artificial
  Synthetic oligonucleotide
caggttactttaccattagtacatatctcagaagttatgaatcccaattctgag

SEQ ID NO: 349092 - DNA, 55 bp, Artificial
  Synthetic oligonucleotide
caggttactttgccagtctttctgggctcctagaaactccttccaatgttttaga

SEQ ID NO: 349093 - DNA, 55 bp, Artificial
  Synthetic oligonucleotide
caggttagatcaacaactgtacctttagtcagaatcaatccagcagcagtgtgcc

SEQ ID NO: 349094 - DNA, 55 bp, Artificial
  Synthetic oligonucleotide
caggttaggtggctttgccataatgagattcacgggcgagttctcgactttcctg

SEQ ID NO: 349095 - DNA, 50 bp, Artificial
  Synthetic oligonucleotide
caggttagtaacttaggtagagtgaagagtttaaagtttggtaaagaacg

SEQ ID NO: 349096 - DNA, 55 bp, Artificial
  Synthetic oligonucleotide
caggttagtaggtagtgtcagtagattaacttgcatgatcttttcgagggcatgc

SEQ ID NO: 349097 - DNA, 60 bp, Artificial
  Synthetic oligonucleotide
caggttatgagactttcagagtcattggtggttggaccactgctaattccaaatcacagg

SEQ ID NO: 349098 - DNA, 51 bp, Artificial
  Synthetic oligonucleotide
caggttatggtgccatggactttagtacattacaggatactaaatgtgaag

SEQ ID NO: 349099 - DNA, 55 bp, Artificial
  Synthetic oligonucleotide
caggttcaaccactggccacttgacacattgtgctggttatcaacatgatgagat

SEQ ID NO: 349100 - DNA, 55 bp, Artificial
  Synthetic oligonucleotide
caggttcacccagcggcactcgcttactggtggattatggctacaccctgagggg

SEQ ID NO: 349101 - DNA, 59 bp, Artificial
  Synthetic oligonucleotide
caggttcagattggcggtgagtgaaccatcgttttctatttcgcgaactagaatgagtg

SEQ ID NO: 349102 - DNA, 54 bp, Artificial
  Synthetic oligonucleotide
caggttccagaggccaacgagggcccaaaggatgaagtgaccctcctgacccaa

SEQ ID NO: 349103 - DNA, 55 bp, Artificial
  Synthetic oligonucleotide
caggttccaggagacaaccccagctccgaagcaggagctgagagacagggaaccc

SEQ ID NO: 349104 - DNA, 55 bp, Artificial
  Synthetic oligonucleotide
caggttccgaaacaggttctgtaacttctcgagcagctgttgacgctcgtttctc

SEQ ID NO: 349105 - DNA, 54 bp, Artificial
  Synthetic oligonucleotide
caggttcctgcgcctagtgtggtcagctcctacgcttgatggtttagttgtagc

SEQ ID NO: 349106 - DNA, 55 bp, Artificial
  Synthetic oligonucleotide
caggttcgcaagcgctttaacagctctaaatgacatgggaaagattaggaaagac

SEQ ID NO: 349107 - DNA, 51 bp, Artificial
  Synthetic oligonucleotide
caggttcggagagtaacttggaactggagggttaggagtcgtttaaaattc

SEQ ID NO: 349108 - DNA, 55 bp, Artificial
  Synthetic oligonucleotide
caggttcgggagacctgccaagaggatcagccgctgcaagcgaggtatgttactc

SEQ ID NO: 349109 - DNA, 54 bp, Artificial
  Synthetic oligonucleotide
caggttctccctgatagcggcggacctctcattgaccttctcacagaggacccc

SEQ ID NO: 349110 - DNA, 50 bp, Artificial
  Synthetic oligonucleotide
caggttctgcaaggaatggggggtttgcaactctcacaccactcacaatg

SEQ ID NO: 349111 - DNA, 59 bp, Artificial
  Synthetic oligonucleotide
caggttctgcaatgggcgcgcggtccctgacgctgtcagcccagtcccggactttactg

SEQ ID NO: 349112 - DNA, 60 bp, Artificial
  Synthetic oligonucleotide
caggttgacacaataatggaaaagaacgttactgtcacacatgctcaagacatacttgaa

SEQ ID NO: 349113 - DNA, 60 bp, Artificial
  Synthetic oligonucleotide
caggttgaggtggatgcctccgctgtgtatgttacgcatactcaagctgagaaggccagt

SEQ ID NO: 349114 - DNA, 55 bp, Artificial
  Synthetic oligonucleotide
caggttgcaatgtcggcattccctcattcccaccgaaagaccattcccactgatg

SEQ ID NO: 349115 - DNA, 55 bp, Artificial
  Synthetic oligonucleotide
caggttgcactcggtgaatgtctctgtgttgactaaattctattgtccatcggct

SEQ ID NO: 349116 - DNA, 60 bp, Artificial
  Synthetic oligonucleotide
caggttgccgctgctagtcagtttcaaccattttcagattgccgctgccagtcagtttca

SEQ ID NO: 349117 - DNA, 55 bp, Artificial
  Synthetic oligonucleotide
caggttgcgaaatgcctcgaacgagcggtatgattgagaatcttcttgcgatgat

SEQ ID NO: 349118 - DNA, 60 bp, Artificial
  Synthetic oligonucleotide
caggttgggcggtccacatcgggaatgggcgcctggtcacttgcacgcatgtggccaaca

SEQ ID NO: 349119 - DNA, 60 bp, Artificial
  Synthetic oligonucleotide
caggttggtcagatacagctcatggtgttggcgagattccaatgaagacagacttagaac

SEQ ID NO: 349120 - DNA, 59 bp, Artificial
  Synthetic oligonucleotide
caggttggttgaagaagcatgtatgattcgggactaacctggaagatgttaggctggag

SEQ ID NO: 349121 - DNA, 55 bp, Artificial
  Synthetic oligonucleotide
caggttggtttgagcaatgtccagaactgggtgacatctaacctttataatgagg

SEQ ID NO: 349122 - DNA, 55 bp, Artificial
  Synthetic oligonucleotide
caggttgtcgcgttatatagaactgtcatctggttctagagagagaaatattgca

SEQ ID NO: 349123 - DNA, 54 bp, Artificial
  Synthetic oligonucleotide
caggttgtgctgttagtttgaccaagacatacactcctacagcctaccttgagc

SEQ ID NO: 349124 - DNA, 56 bp, Artificial
  Synthetic oligonucleotide
caggttgtggttgaaccgtatttggacgtggtagactctggtcctcgtgtatagta

SEQ ID NO: 349125 - DNA, 60 bp, Artificial
  Synthetic oligonucleotide
caggttgttctgcttcgtgtgttacggatatgcgccacgtgcagatgggacgataccgga

SEQ ID NO: 349126 - DNA, 53 bp, Artificial
  Synthetic oligonucleotide
caggtttaagagtaaataacttgagcaacaaagacaaattcccttatattccc

SEQ ID NO: 349127 - DNA, 59 bp, Artificial
  Synthetic oligonucleotide
caggtttaagttactctcatgattttaacacgctggcaaaatacatgactacaaatcaa

SEQ ID NO: 349128 - DNA, 56 bp, Artificial
  Synthetic oligonucleotide
caggtttaccggttccccagacactgtatttgaaggccactaggtggctcacactc

SEQ ID NO: 349129 - DNA, 55 bp, Artificial
  Synthetic oligonucleotide
caggtttagtgcaactgttactggtggacaatatgcgtctaaggaacaagctgtc

SEQ ID NO: 349130 - DNA, 60 bp, Artificial
  Synthetic oligonucleotide
caggtttccaaaagacgcataagcacagtgtggtctcactcagcgcggggcgagtctccc

SEQ ID NO: 349131 - DNA, 55 bp, Artificial
  Synthetic oligonucleotide
caggtttccatataggagacgttatatttagaccaacaccaatcggtctgaatga

SEQ ID NO: 349132 - DNA, 54 bp, Artificial
  Synthetic oligonucleotide
caggtttcccatcaacgctaccacgaccggtcctagcgtacccatccccgagcc

SEQ ID NO: 349133 - DNA, 57 bp, Artificial
  Synthetic oligonucleotide
caggtttctctttgttcccgttgatgtaccagcctttgcagctaaactgcgtgagtt

SEQ ID NO: 349134 - DNA, 52 bp, Artificial
  Synthetic oligonucleotide
caggtttgccagtgcccgacgtccccgtgggtaatatatgctttctacaact

SEQ ID NO: 349135 - DNA, 56 bp, Artificial
  Synthetic oligonucleotide
caggtttgcggcgtttgacacttttgattacgtaaccaatggggcagccatacaac

SEQ ID NO: 349136 - DNA, 55 bp, Artificial
  Synthetic oligonucleotide
caggtttggagtcctccgagcttagggtcgaaatgggtacaatgggaggaatcca

SEQ ID NO: 349137 - DNA, 50 bp, Artificial
  Synthetic oligonucleotide
caggtttgggggtaaagtaacgggagtggtaggagaagggctggggtatg

SEQ ID NO: 349138 - DNA, 58 bp, Artificial
  Synthetic oligonucleotide
caggtttgtctggcggacctagcactagtagaccccagcctagaccaaacatgggaga

SEQ ID NO: 349139 - DNA, 59 bp, Artificial
  Synthetic oligonucleotide
caggttttacatggattgcgatattgaggtaacagactcatacaaaacagacttgggta

SEQ ID NO: 349140 - DNA, 55 bp, Artificial
  Synthetic oligonucleotide
caggttttcgacatctcgaatgagccatggtgggtttgcatctcaaagcactgct

SEQ ID NO: 349141 - DNA, 55 bp, Artificial
  Synthetic oligonucleotide
caggttttggcccgatttcctacgttcgagtggatgaagatatgtggagtggaga

SEQ ID NO: 349142 - DNA, 56 bp, Artificial
  Synthetic oligonucleotide
caggttttgtgagtccaactgcctctttgaggggtgacgcaggcaaattacttggt

SEQ ID NO: 349143 - DNA, 56 bp, Artificial
  Synthetic oligonucleotide
caggtttttaagcgttcaaccatctccagacgagatgatgggaaacgtcggtctgg

SEQ ID NO: 349144 - DNA, 60 bp, Artificial
  Synthetic oligonucleotide
cagtaaacctgcattaggtatgttggagagagtgaccgaaactaccaatgcctcaattga

SEQ ID NO: 349145 - DNA, 59 bp, Artificial
  Synthetic oligonucleotide
cagtaaactcgaactgtgagacactcgctaaagacatttttggaacccatactctcagc

SEQ ID NO: 349146 - DNA, 56 bp, Artificial
  Synthetic oligonucleotide
cagtaaactttggggaaacaagtgtgtcaggatatacagagttgcccccactccca

SEQ ID NO: 349147 - DNA, 58 bp, Artificial
  Synthetic oligonucleotide
cagtaaagacggaatatggggagttcactatgttaggcatttatgacagatgggccgt

SEQ ID NO: 349148 - DNA, 59 bp, Artificial
  Synthetic oligonucleotide
cagtaaagacgtgtgatgaagaatgttgcccagtcaactttaagaagtgttgcccgcta

SEQ ID NO: 349149 - DNA, 58 bp, Artificial
  Synthetic oligonucleotide
cagtaaaggaaatataagtaagtgcacttccgaatggctgagtttatgccgccagcgg

SEQ ID NO: 349150 - DNA, 54 bp, Artificial
  Synthetic oligonucleotide
cagtaaagggagttggaacgatggtaatggaactaattcggatggtaaagcgag

SEQ ID NO: 349151 - DNA, 55 bp, Artificial
  Synthetic oligonucleotide
cagtaaatgtgatgaatgagacggtgaatatatcaatagacaattcgggttcgac

SEQ ID NO: 349152 - DNA, 55 bp, Artificial
  Synthetic oligonucleotide
cagtaaatgttccaccaccgcgctcaactgttatcactgtaagtaatccgtgtgc

SEQ ID NO: 349153 - DNA, 59 bp, Artificial
  Synthetic oligonucleotide
cagtaacaaccgttcagtatgatcccgcagcactatcgttcttgttgaacgctcgtgtt

SEQ ID NO: 349154 - DNA, 55 bp, Artificial
  Synthetic oligonucleotide
cagtaacacacatgtgtttcaccaatccaagagtgaagctgtggatgctggtttg

SEQ ID NO: 349155 - DNA, 55 bp, Artificial
  Synthetic oligonucleotide
cagtaacagactatacaacaggaacccaactttcatccataaacttacatacagg

SEQ ID NO: 349156 - DNA, 55 bp, Artificial
  Synthetic oligonucleotide
cagtaacagtaaggcaggatttagaacgccagcttaatgatttgcgagaagagtt

SEQ ID NO: 349157 - DNA, 55 bp, Artificial
  Synthetic oligonucleotide
cagtaacatgatgtcattcctatcgacatacaaagataccaagcctctgacatat

SEQ ID NO: 349158 - DNA, 55 bp, Artificial
  Synthetic oligonucleotide
cagtaaccgctgacaagttgagagttgaccaggctttctttaacaaactggtggc

SEQ ID NO: 349159 - DNA, 55 bp, Artificial
  Synthetic oligonucleotide
cagtaacgtcataaacaagtacgaagacgaagagcatcctgactctgactttgac

SEQ ID NO: 349160 - DNA, 60 bp, Artificial
  Synthetic oligonucleotide
cagtaactgcgcaagttatctggaagcattaccaagaaaggttagtcgtgtgtggcaatc

SEQ ID NO: 349161 - DNA, 54 bp, Artificial
  Synthetic oligonucleotide
cagtaagaacgtggtcgctaaagacggccggggtcttaataggcaactcgtcac

SEQ ID NO: 349162 - DNA, 58 bp, Artificial
  Synthetic oligonucleotide
cagtaagacactttcctaggccctggttgcaccaattgggacagcacgtttatgatac

SEQ ID NO: 349163 - DNA, 52 bp, Artificial
  Synthetic oligonucleotide
cagtaagctaacttcctatttaggtctagaaaaagatgaaagtgaaccgttc

SEQ ID NO: 349164 - DNA, 60 bp, Artificial
  Synthetic oligonucleotide
cagtaagctgtttactactttatatcacagactggcctatcatcttccaaagatggagta

SEQ ID NO: 349165 - DNA, 60 bp, Artificial
  Synthetic oligonucleotide
cagtaagctttgtattatgtaaaggtgtgaataagatgtctgaattatataatgcactct

SEQ ID NO: 349166 - DNA, 55 bp, Artificial
  Synthetic oligonucleotide
cagtaaggaaatcgggctgacgttctggcgatacattctcgccaacaccaccgtt

SEQ ID NO: 349167 - DNA, 60 bp, Artificial
  Synthetic oligonucleotide
cagtaaggctaggcaaatggtgcatgcgatgagaacaattgggactcatcccagctccag

SEQ ID NO: 349168 - DNA, 60 bp, Artificial
  Synthetic oligonucleotide
cagtaagtacatgtaatgttagagctaacagcaagagtagattatagattaggagtagga

SEQ ID NO: 349169 - DNA, 60 bp, Artificial
  Synthetic oligonucleotide
cagtaagtagtggggccgatacggaggatgtggtatgttgctccatgtcttattcctgga

SEQ ID NO: 349170 - DNA, 55 bp, Artificial
  Synthetic oligonucleotide
cagtaagttgatagaaggcttagatctccatggttatggtctcccctacgtcact

SEQ ID NO: 349171 - DNA, 58 bp, Artificial
  Synthetic oligonucleotide
cagtaataacataatgatgcagagaagcaattttaaagggcctagaagaagtgttaaa

SEQ ID NO: 349172 - DNA, 54 bp, Artificial
  Synthetic oligonucleotide
cagtaataacccaggactgtaataaagcatccacagatgaaataaaatttagac

SEQ ID NO: 349173 - DNA, 57 bp, Artificial
  Synthetic oligonucleotide
cagtaataggagagctgttcttcgagtacaccgtagtttatctcgaccctacctatg

SEQ ID NO: 349174 - DNA, 60 bp, Artificial
  Synthetic oligonucleotide
cagtaatagtatagtatcgatgtgttccagcacagaattccttggacaatggaactggcc

SEQ ID NO: 349175 - DNA, 55 bp, Artificial
  Synthetic oligonucleotide
cagtaatctatggaaatcccaagtgtgacatccatctaaaggatcaaggttggtc

SEQ ID NO: 349176 - DNA, 60 bp, Artificial
  Synthetic oligonucleotide
cagtaatctattatgatctagccggtaatagtacattctgtaagccaactgtctacatga

SEQ ID NO: 349177 - DNA, 60 bp, Artificial
  Synthetic oligonucleotide
cagtaatgacgcagaaatcacagggtcattcaacaccgatgagggtactgtcacaggtca

SEQ ID NO: 349178 - DNA, 60 bp, Artificial
  Synthetic oligonucleotide
cagtaatgatgggcgcagaagctagactgatacaagtcgggtccgatatctacctatacc

SEQ ID NO: 349179 - DNA, 55 bp, Artificial
  Synthetic oligonucleotide
cagtaatgcaacgggttaacactcagttcccagacattattgacgaagcgatcag

SEQ ID NO: 349180 - DNA, 55 bp, Artificial
  Synthetic oligonucleotide
cagtaatgcggttaaggccgcctgttggtgggcggagatcaagcaggaatttggc

SEQ ID NO: 349181 - DNA, 55 bp, Artificial
  Synthetic oligonucleotide
cagtaatggtatgcctggtgctcacagcgttggtaagaatgcctacttccgtcgt

SEQ ID NO: 349182 - DNA, 60 bp, Artificial
  Synthetic oligonucleotide
cagtaatgtattccccggtgcgagaatccatgattctggcacgagatatgcaggtaatat

SEQ ID NO: 349183 - DNA, 55 bp, Artificial
  Synthetic oligonucleotide
cagtaatgtgtacaggaggtgactatagctttgcgcttccagttggtaattatcc

SEQ ID NO: 349184 - DNA, 60 bp, Artificial
  Synthetic oligonucleotide
cagtaatgtgtctgggggcggtgatgaaggtcctatggacgcctcagcggcaagagcagg

SEQ ID NO: 349185 - DNA, 53 bp, Artificial
  Synthetic oligonucleotide
cagtaatgtttaccggaatacgtgtgttagacttcctatttgagggttctttg

SEQ ID NO: 349186 - DNA, 58 bp, Artificial
  Synthetic oligonucleotide
cagtaattacttaatcaccattatcgataggcactatcttccacactttcgacgggga

SEQ ID NO: 349187 - DNA, 60 bp, Artificial
  Synthetic oligonucleotide
cagtaatttcaccagtgctgcggtaaaagcagcctgttggtgggcaggtatccaacagga

SEQ ID NO: 349188 - DNA, 60 bp, Artificial
  Synthetic oligonucleotide
cagtaatttgttatgatctggcatgtaatacaacattttgtaagccaactgtctacatga

SEQ ID NO: 349189 - DNA, 59 bp, Artificial
  Synthetic oligonucleotide
cagtacaacactcaaccagctgcgtgacatttttccatttgaagtcccaattaatacta

SEQ ID NO: 349190 - DNA, 55 bp, Artificial
  Synthetic oligonucleotide
cagtacaacgtggtcacgaaccagtcgtacaacacgaaacgcgtgcacgacgccg

SEQ ID NO: 349191 - DNA, 55 bp, Artificial
  Synthetic oligonucleotide
cagtacaagcacttctgtttccccggagcggggtatagacggtcaccactgtcaa

SEQ ID NO: 349192 - DNA, 55 bp, Artificial
  Synthetic oligonucleotide
cagtacaagcagtctttcactacctgctgtttagtccaatcttgaagggcagagt

SEQ ID NO: 349193 - DNA, 60 bp, Artificial
  Synthetic oligonucleotide
cagtacaaggcgtggttaactccatttcgagagctggcgtgagatcgagagtcgtccatc

SEQ ID NO: 349194 - DNA, 60 bp, Artificial
  Synthetic oligonucleotide
cagtacaatctgacattttcagatgcacagagtgctataaaccaatgtaggacttttaga

SEQ ID NO: 349195 - DNA, 54 bp, Artificial
  Synthetic oligonucleotide
cagtacaatgacctttgcagaagttattaatagcactaactctatgcttgtgag

SEQ ID NO: 349196 - DNA, 55 bp, Artificial
  Synthetic oligonucleotide
cagtacaatttgctaattggtgagggtccttgtgaaccaggtgattgtggtggga

SEQ ID NO: 349197 - DNA, 54 bp, Artificial
  Synthetic oligonucleotide
cagtacacaataaagagagatgtaggcacaacaacagcagtgacaccctcatca

SEQ ID NO: 349198 - DNA, 52 bp, Artificial
  Synthetic oligonucleotide
cagtacacccgttcctggtacgtctggacggcccaggttgggactgtacagt

SEQ ID NO: 349199 - DNA, 60 bp, Artificial
  Synthetic oligonucleotide
cagtacactggcatttaagcacacagcccgagagctgcatccggagttctacaaggactg

SEQ ID NO: 349200 - DNA, 60 bp, Artificial
  Synthetic oligonucleotide
cagtacagaaagcttggagccgtgcctgggagctttggcagaactcaccctggaaggagc

SEQ ID NO: 349201 - DNA, 57 bp, Artificial
  Synthetic oligonucleotide
cagtacagaactgcaactgctcaatctatcccggccacgtaacaggtcaccgcatgg

SEQ ID NO: 349202 - DNA, 59 bp, Artificial
  Synthetic oligonucleotide
cagtacagaccaacaccatgcggagggctttattgttggtcgtagataagctgagggaa

SEQ ID NO: 349203 - DNA, 55 bp, Artificial
  Synthetic oligonucleotide
cagtacagagagatgcgggtgtacccctctatccagagttccagaaaaccgcacg

SEQ ID NO: 349204 - DNA, 60 bp, Artificial
  Synthetic oligonucleotide
cagtacagattgggttacttcggtcagtacacctcttcatggccctacactgcctataga

SEQ ID NO: 349205 - DNA, 60 bp, Artificial
  Synthetic oligonucleotide
cagtacagcaagcaatgatgatgctaacaagagtgttttcagttagacatctggaatcat

SEQ ID NO: 349206 - DNA, 55 bp, Artificial
  Synthetic oligonucleotide
cagtacaggtgtagtgcagaagagcttaagctggtttgataagaacaaagacttc

SEQ ID NO: 349207 - DNA, 55 bp, Artificial
  Synthetic oligonucleotide
cagtacatgacccctcttgatgtctacactttgttcgccacaagtccggagatgc

SEQ ID NO: 349208 - DNA, 60 bp, Artificial
  Synthetic oligonucleotide
cagtacatgctagagttgtcaataagattacacgaaggattggatcgaaatatgtacgca

SEQ ID NO: 349209 - DNA, 50 bp, Artificial
  Synthetic oligonucleotide
cagtacatggatgacatgtggataggatcagatttgccagagaaagaaca

SEQ ID NO: 349210 - DNA, 55 bp, Artificial
  Synthetic oligonucleotide
cagtacatgtgaagagtgaagacccagacatagttgctgctagctcaagtctcat

SEQ ID NO: 349211 - DNA, 55 bp, Artificial
  Synthetic oligonucleotide
cagtaccaattagactaggtaatgctctacgaattactggaactaagatcggtgt

SEQ ID NO: 349212 - DNA, 60 bp, Artificial
  Synthetic oligonucleotide
cagtaccactatataagaaggccatgactgcagatcagttcacttctcaacttgcggcaa

SEQ ID NO: 349213 - DNA, 54 bp, Artificial
  Synthetic oligonucleotide
cagtaccagacgttacgcaatcagatcacaacggcggagcgggccatgaaggtg

SEQ ID NO: 349214 - DNA, 55 bp, Artificial
  Synthetic oligonucleotide
cagtaccagcaggagaacagatgacactatctgtcccctcttattccaacaagcc

SEQ ID NO: 349215 - DNA, 55 bp, Artificial
  Synthetic oligonucleotide
cagtaccatacatttgttcgaagttcttactctctgacgagttcggtaatacttt

SEQ ID NO: 349216 - DNA, 50 bp, Artificial
  Synthetic oligonucleotide
cagtaccatcatcagcctattcgtactaaccgcctcctcagtcaatcacg

SEQ ID NO: 349217 - DNA, 60 bp, Artificial
  Synthetic oligonucleotide
cagtaccattacctgggtagggcaggctacactatacacgtgcagtgcaacgcatccaag

SEQ ID NO: 349218 - DNA, 55 bp, Artificial
  Synthetic oligonucleotide
cagtacccatgatttacggatacggttttgattatgtgggttggaatcagtacgg

SEQ ID NO: 349219 - DNA, 55 bp, Artificial
  Synthetic oligonucleotide
cagtaccccccaagccaccgaatgtcaacagaccagtcaacaccggaggtcttaa

SEQ ID NO: 349220 - DNA, 58 bp, Artificial
  Synthetic oligonucleotide
cagtacccctacgtctggcacccatggatatgaggaaatacctatggaggtatttgcc

SEQ ID NO: 349221 - DNA, 55 bp, Artificial
  Synthetic oligonucleotide
cagtacccctagacccggaatttagacaatacacagcattcactataccatcagt

SEQ ID NO: 349222 - DNA, 55 bp, Artificial
  Synthetic oligonucleotide
cagtacccgaaccagagcctcaagttggcgaaaccggtgacaacggaggctgcgc

SEQ ID NO: 349223 - DNA, 55 bp, Artificial
  Synthetic oligonucleotide
cagtaccctacgtgggaattgctaacgcgtattcccacttttatgatgggttcgc

SEQ ID NO: 349224 - DNA, 50 bp, Artificial
  Synthetic oligonucleotide
cagtaccgctcagacgattctacagtctctgaagacaagcattgatacgg

SEQ ID NO: 349225 - DNA, 51 bp, Artificial
  Synthetic oligonucleotide
cagtaccgggtggttcgcgctacaatccgttaccgcccgttggtaccaaac

SEQ ID NO: 349226 - DNA, 60 bp, Artificial
  Synthetic oligonucleotide
cagtacctattgtaagcctaccctgtacatgattgtaccaatccatgcatgcaacatgat

SEQ ID NO: 349227 - DNA, 60 bp, Artificial
  Synthetic oligonucleotide
cagtacctcaactaggcacagactatctgtacactttcaatccacaacgccgatcacata

SEQ ID NO: 349228 - DNA, 59 bp, Artificial
  Synthetic oligonucleotide
cagtacctcaaggatatcatacattttattgtcaaggctctattgccgggacgcctaag

SEQ ID NO: 349229 - DNA, 58 bp, Artificial
  Synthetic oligonucleotide
cagtaccttgggccacgatctggttagggatctagtctcagttatcagggctcgtaag

SEQ ID NO: 349230 - DNA, 51 bp, Artificial
  Synthetic oligonucleotide
cagtacgacgaacaacttcaatagttcacagttggagccgtccaaccgtac

SEQ ID NO: 349231 - DNA, 51 bp, Artificial
  Synthetic oligonucleotide
cagtacgactctccgttggcctgggacgtttagtaaagtctgacccccccc

SEQ ID NO: 349232 - DNA, 56 bp, Artificial
  Synthetic oligonucleotide
cagtacgatgcaagtggttgttggtttcttgaaaacctcgatgggtttacaatcca

SEQ ID NO: 349233 - DNA, 58 bp, Artificial
  Synthetic oligonucleotide
cagtacgcaggggacaaataacacagagctaaatgacacgataactctcccatgcaga

SEQ ID NO: 349234 - DNA, 55 bp, Artificial
  Synthetic oligonucleotide
cagtacgcagtatatgggtttcccaataaaacggaatcgcttataactgtcacgt

SEQ ID NO: 349235 - DNA, 56 bp, Artificial
  Synthetic oligonucleotide
cagtacggccaggacggataacatatttgatgacttcatgggtgatagcctccgaa

SEQ ID NO: 349236 - DNA, 55 bp, Artificial
  Synthetic oligonucleotide
cagtacggctacctaacactcaacaacggtagtcaggccgtgggacgctcctcct

SEQ ID NO: 349237 - DNA, 54 bp, Artificial
  Synthetic oligonucleotide
cagtacgtcgccaccattctcggggtcccttccacttcaaaggtctccggctac

SEQ ID NO: 349238 - DNA, 55 bp, Artificial
  Synthetic oligonucleotide
cagtacgtggagccaaatcccttgaagcgtaagcgcttcgagaaggagagccctt

SEQ ID NO: 349239 - DNA, 58 bp, Artificial
  Synthetic oligonucleotide
cagtactaaagacaaaactagataaatcagcacaaatttcacaaagtaccataccaga

SEQ ID NO: 349240 - DNA, 55 bp, Artificial
  Synthetic oligonucleotide
cagtactacatggtcatgggtcagtgcaggtagcaacgatagaataggacgctct

SEQ ID NO: 349241 - DNA, 60 bp, Artificial
  Synthetic oligonucleotide
cagtactacgttacaaactgtcttatcattggcagaatccatatgttattcttgacctct

SEQ ID NO: 349242 - DNA, 55 bp, Artificial
  Synthetic oligonucleotide
cagtactagttaaagacacttgaccaggatgactactaaacttttcaaacagacc

SEQ ID NO: 349243 - DNA, 60 bp, Artificial
  Synthetic oligonucleotide
cagtactagttacacctatatgttatctgataatatatacgtagcaaatgctagtggcgt

SEQ ID NO: 349244 - DNA, 58 bp, Artificial
  Synthetic oligonucleotide
cagtactatcaagaatagctaacaagtattcgtttgtcacaaaaataattagagtaga

SEQ ID NO: 349245 - DNA, 60 bp, Artificial
  Synthetic oligonucleotide
cagtactatcagcgaacggaatcaacattgaacatcctgacttttggatcaaagttcaag

SEQ ID NO: 349246 - DNA, 55 bp, Artificial
  Synthetic oligonucleotide
cagtactcgcgagatgggctgatatgatttaccaatactggccgcgtcccggtgc

SEQ ID NO: 349247 - DNA, 55 bp, Artificial
  Synthetic oligonucleotide
cagtactcggctgtagtgttgtccgtggggtagtacgtagggcgagaggtacgta

SEQ ID NO: 349248 - DNA, 55 bp, Artificial
  Synthetic oligonucleotide
cagtactctgatttaaaatttgagacatgggatccgctagatacaccatactcta

SEQ ID NO: 349249 - DNA, 54 bp, Artificial
  Synthetic oligonucleotide
cagtactcttccatgtcctgcgtgtagacgacatgcgagtgtagctatagagga

SEQ ID NO: 349250 - DNA, 56 bp, Artificial
  Synthetic oligonucleotide
cagtactgaacatgtatcctactaagtttagacgtggttggtcgtctactaaacga

SEQ ID NO: 349251 - DNA, 60 bp, Artificial
  Synthetic oligonucleotide
cagtactgaccggtctatatattgtttgctagacagtcattgtttagaggagtttgaggc

SEQ ID NO: 349252 - DNA, 53 bp, Artificial
  Synthetic oligonucleotide
cagtactgccatacttaagtgtagagggaagagaggtcggaaagaaggcaata

SEQ ID NO: 349253 - DNA, 55 bp, Artificial
  Synthetic oligonucleotide
cagtactggacataggggatgcctatttctcatgtcctttggatgaggactttag

SEQ ID NO: 349254 - DNA, 60 bp, Artificial
  Synthetic oligonucleotide
cagtactggttatctcgcctgatctcgcttacagagttgggtacttatgtgcggggctgc

SEQ ID NO: 349255 - DNA, 55 bp, Artificial
  Synthetic oligonucleotide
cagtacttaaacgagcgtgacgaattactccacgaagtggacgagctcaaacgtg

SEQ ID NO: 349256 - DNA, 56 bp, Artificial
  Synthetic oligonucleotide
cagtacttggcccaccagtagggtagaccgatttgtgtggcgcggaggtagggtgc

SEQ ID NO: 349257 - DNA, 57 bp, Artificial
  Synthetic oligonucleotide
cagtagaaaaacaacaccatagagaaaagagagcccttggactaggagcactgtttc

SEQ ID NO: 349258 - DNA, 57 bp, Artificial
  Synthetic oligonucleotide
cagtagaaagggacacctgggaacaatggtggacagactattggcaagtaacttgga

SEQ ID NO: 349259 - DNA, 59 bp, Artificial
  Synthetic oligonucleotide
cagtagaacgcacttatacattattcggtcagcagatacaaattacagtggaaaacaat

SEQ ID NO: 349260 - DNA, 55 bp, Artificial
  Synthetic oligonucleotide
cagtagaactcttgggacgcagcagtctcaagggactgagacgagggtgggaggg

SEQ ID NO: 349261 - DNA, 55 bp, Artificial
  Synthetic oligonucleotide
cagtagaagatcacaggctagaggacactactcacctacagtacgctccaaatgc

SEQ ID NO: 349262 - DNA, 58 bp, Artificial
  Synthetic oligonucleotide
cagtagaagtttcattctgcgtaagacaaatattaccactgagatatgagttctcatg

SEQ ID NO: 349263 - DNA, 55 bp, Artificial
  Synthetic oligonucleotide
cagtagacagcaggttagagttcattcattacttgcgctgtttgatatgtgccca

SEQ ID NO: 349264 - DNA, 59 bp, Artificial
  Synthetic oligonucleotide
cagtagacatgtctaagtatatgggtgagtctagaagtgcggctaaacggagggctacc

SEQ ID NO: 349265 - DNA, 60 bp, Artificial
  Synthetic oligonucleotide
cagtagacattcattataaagagttattacgtgccagcaacaataaggcgattcttatgg

SEQ ID NO: 349266 - DNA, 60 bp, Artificial
  Synthetic oligonucleotide
cagtagacgcacctactgagcctgacgcctctgctaacagattctacacactagaaagta

SEQ ID NO: 349267 - DNA, 60 bp, Artificial
  Synthetic oligonucleotide
cagtagactgaactggttgaccaaatcaggaagcacatatccagtgctgaatgtgactat

SEQ ID NO: 349268 - DNA, 60 bp, Artificial
  Synthetic oligonucleotide
cagtagagaggacacacgaaaatgtgttaacactaagcttgatcgaccacagagcatttt

SEQ ID NO: 349269 - DNA, 60 bp, Artificial
  Synthetic oligonucleotide
cagtagagcaggtctactcggagttccttggaaactaggtctctcagagctcattgagag

SEQ ID NO: 349270 - DNA, 55 bp, Artificial
  Synthetic oligonucleotide
cagtagaggcatgtggttattcagatagaataatgcaaatcacaaggggtgactc

SEQ ID NO: 349271 - DNA, 55 bp, Artificial
  Synthetic oligonucleotide
cagtagaggccccagccagaagatccagctgattaacaccaatggcagttggcac

SEQ ID NO: 349272 - DNA, 55 bp, Artificial
  Synthetic oligonucleotide
cagtagagttaccaccgacccgcttgggcgggatagctccgcaaaccgtgatggg

SEQ ID NO: 349273 - DNA, 59 bp, Artificial
  Synthetic oligonucleotide
cagtagagttttgataattgttgtgaaggtcgactcttcaacccttatagtctcaagca

SEQ ID NO: 349274 - DNA, 60 bp, Artificial
  Synthetic oligonucleotide
cagtagatcctcaggatttgctgtttggtgtatttggtattgttccacaatatcaaattc

SEQ ID NO: 349275 - DNA, 59 bp, Artificial
  Synthetic oligonucleotide
cagtagatgataatggtaatcctttgtatgaaattactgatgccaactggaaatctttt

SEQ ID NO: 349276 - DNA, 54 bp, Artificial
  Synthetic oligonucleotide
cagtagatggtggtatggggatgcacaatcttgccctcacggcgaagcattcta

SEQ ID NO: 349277 - DNA, 58 bp, Artificial
  Synthetic oligonucleotide
cagtagcaaccctttggtgtgtacatcaaaggatagatataaaagacaccaaggaagc

SEQ ID NO: 349278 - DNA, 60 bp, Artificial
  Synthetic oligonucleotide
cagtagcaactctctattgtgtacatgcagaaatagaagtacgagacaccaaagaagcct

SEQ ID NO: 349279 - DNA, 56 bp, Artificial
  Synthetic oligonucleotide
cagtagcaccggggccgggcaatccggcccctttctatgggggattggtgatgctc

SEQ ID NO: 349280 - DNA, 50 bp, Artificial
  Synthetic oligonucleotide
cagtagcaccggtagggccttggggacccgttaggtcttcgtagttaccc

SEQ ID NO: 349281 - DNA, 55 bp, Artificial
  Synthetic oligonucleotide
cagtagcaggcgggacaagtagtgtgtacattgaggtattgcacttgactcaggg

SEQ ID NO: 349282 - DNA, 55 bp, Artificial
  Synthetic oligonucleotide
cagtagcaggcgtggtttacgtcatgtacaggttgtttgcgggacaacaagggcc

SEQ ID NO: 349283 - DNA, 59 bp, Artificial
  Synthetic oligonucleotide
cagtagcagtagttcattatggaggggtgcctactgatgtcgttaattcctgggcaggg

SEQ ID NO: 349284 - DNA, 60 bp, Artificial
  Synthetic oligonucleotide
cagtagcatcatttaaatcatatatagcatcgacccccatgctaataaaagacttagcaa

SEQ ID NO: 349285 - DNA, 52 bp, Artificial
  Synthetic oligonucleotide
cagtagcatggtcagctactgcatgtcacgatgggaagaaatggatgacaat

SEQ ID NO: 349286 - DNA, 55 bp, Artificial
  Synthetic oligonucleotide
cagtagccaacaccggccggagaatagtaaagtaacgactcaagacgtgacagtc

SEQ ID NO: 349287 - DNA, 60 bp, Artificial
  Synthetic oligonucleotide
cagtagccaatggaaccattgtgaagactcttacaaatgaacaggaagaggtgaccaatg

SEQ ID NO: 349288 - DNA, 52 bp, Artificial
  Synthetic oligonucleotide
cagtagcgatgaagaacagccaaacagaccccaaagacaggctgagaaggag

SEQ ID NO: 349289 - DNA, 55 bp, Artificial
  Synthetic oligonucleotide
cagtagcggacatccaaaaccgcttgagaatacttgaaaggaccggtgcaacatc

SEQ ID NO: 349290 - DNA, 55 bp, Artificial
  Synthetic oligonucleotide
cagtagcggggtggacagatagggctatagaaatagcacaaagagcttgtagagc

SEQ ID NO: 349291 - DNA, 58 bp, Artificial
  Synthetic oligonucleotide
cagtagcgttactaactactgtaaccgagcaagtgaccccatagtgaattactatgcg

SEQ ID NO: 349292 - DNA, 55 bp, Artificial
  Synthetic oligonucleotide
cagtagctaacctgtccgacgatgaccctatcgacgtggctgtgtctcataaccg

SEQ ID NO: 349293 - DNA, 54 bp, Artificial
  Synthetic oligonucleotide
cagtagctaaggaggtttgtaagcggtttctataggtacgaaactgttgaccga

SEQ ID NO: 349294 - DNA, 55 bp, Artificial
  Synthetic oligonucleotide
cagtagctgactggacagatagggttatagagttaggacaaagatttggtagagc

SEQ ID NO: 349295 - DNA, 55 bp, Artificial
  Synthetic oligonucleotide
cagtagctgaggggacagattgggttatagaagtagtacaaagacttggcagagc

SEQ ID NO: 349296 - DNA, 55 bp, Artificial
  Synthetic oligonucleotide
cagtagcttccattagaagcatgcttgttaaatgaggaccgagctaattacttgg

SEQ ID NO: 349297 - DNA, 60 bp, Artificial
  Synthetic oligonucleotide
cagtaggaagctcgaaatatcagcaatcattcactccaagtccgggggcacggccacaag

SEQ ID NO: 349298 - DNA, 55 bp, Artificial
  Synthetic oligonucleotide
cagtaggacacaccactatggctggcattattaatttaagtaacacacctacagc

SEQ ID NO: 349299 - DNA, 55 bp, Artificial
  Synthetic oligonucleotide
cagtaggagacaatagtagaggaggagtgtttacaattagtgttccagtggacga

SEQ ID NO: 349300 - DNA, 59 bp, Artificial
  Synthetic oligonucleotide
cagtaggagatatttatagaagatggatagtcctggggttaaacagaattgtgagaatg

SEQ ID NO: 349301 - DNA, 55 bp, Artificial
  Synthetic oligonucleotide
cagtaggatgtggttttgtggttacgctacatcctggacctgtgtaccaacgaac

SEQ ID NO: 349302 - DNA, 60 bp, Artificial
  Synthetic oligonucleotide
cagtaggcacaactacaaaatgatatgtcagtgtattaatgcacactctatgtgtaagaa

SEQ ID NO: 349303 - DNA, 55 bp, Artificial
  Synthetic oligonucleotide
cagtaggcattacacgagaatatccgcatgttcagatatcatatagagcacaacg

SEQ ID NO: 349304 - DNA, 52 bp, Artificial
  Synthetic oligonucleotide
cagtaggccagcgacaagcaaataggaactctctctacgtcactataaagcg

SEQ ID NO: 349305 - DNA, 60 bp, Artificial
  Synthetic oligonucleotide
cagtaggcgccaggcagaacgtccagctgatcaacaccaacggtagttggcacatcaata

SEQ ID NO: 349306 - DNA, 60 bp, Artificial
  Synthetic oligonucleotide
cagtagggataagtggtgcagatgacgatgcttatgcagtaatccattatggggggatgc

SEQ ID NO: 349307 - DNA, 55 bp, Artificial
  Synthetic oligonucleotide
cagtaggtcaatgccccaaatacgtaaatcagaggagtttactgcttgcaacagg

SEQ ID NO: 349308 - DNA, 51 bp, Artificial
  Synthetic oligonucleotide
cagtaggtgcgactacccatcaggacataataaggtaggatccctacaata

SEQ ID NO: 349309 - DNA, 55 bp, Artificial
  Synthetic oligonucleotide
cagtaggttcagaaagttacaacaggaggttcactcctgaaatcagtacaaggcc

SEQ ID NO: 349310 - DNA, 60 bp, Artificial
  Synthetic oligonucleotide
cagtagtaatgccatcacatggtccagccaaaaccatggaatacgacgctgttgccacaa

SEQ ID NO: 349311 - DNA, 55 bp, Artificial
  Synthetic oligonucleotide
cagtagtacagcacagcttagaggactgtcaatttgacctatctcaaatggtaca

SEQ ID NO: 349312 - DNA, 55 bp, Artificial
  Synthetic oligonucleotide
cagtagtagacataggagatgcctatttcagtatccctttagatccaaattacag

SEQ ID NO: 349313 - DNA, 60 bp, Artificial
  Synthetic oligonucleotide
cagtagtagcaaaagagatagtagccagctgtgataaatgtcaactaaaaggggaagcca

SEQ ID NO: 349314 - DNA, 60 bp, Artificial
  Synthetic oligonucleotide
cagtagtagggaggacattatatgcaacaggggctataataggagatataagacaagcac

SEQ ID NO: 349315 - DNA, 59 bp, Artificial
  Synthetic oligonucleotide
cagtagtagtcagtggtacatatgtagatacggtcagtaacactacgacaacgtcggga

SEQ ID NO: 349316 - DNA, 55 bp, Artificial
  Synthetic oligonucleotide
cagtagtatcgctcagggcaatgtcgaaaagagtcgccctgagatgccactggca

SEQ ID NO: 349317 - DNA, 60 bp, Artificial
  Synthetic oligonucleotide
cagtagtcacagcatacattgagggtcagccagtagaagttttactagacacaggggctg

SEQ ID NO: 349318 - DNA, 60 bp, Artificial
  Synthetic oligonucleotide
cagtagtcaggagagttaggcagggctactcacctctctcgttgcagacccttatcccag

SEQ ID NO: 349319 - DNA, 60 bp, Artificial
  Synthetic oligonucleotide
cagtagtcagtcttgtcagaagtgaccagatttgcattggttaccatgcaaacaactcga

SEQ ID NO: 349320 - DNA, 55 bp, Artificial
  Synthetic oligonucleotide
cagtagtcccaggtgggacagaccttacccgtttctcagaagtgtttccaggcac

SEQ ID NO: 349321 - DNA, 52 bp, Artificial
  Synthetic oligonucleotide
cagtagtctagtagcgcgtatgggtcggagttgaatcgctcctggtaaaacc

SEQ ID NO: 349322 - DNA, 54 bp, Artificial
  Synthetic oligonucleotide
cagtagtgcagtaaaggcagcatgttggtgggcaaatatcacacaagaatttgg

SEQ ID NO: 349323 - DNA, 57 bp, Artificial
  Synthetic oligonucleotide
cagtagtgcgatatgttccttgcggggcgccatcagacttatctgaccaaaccatgc

SEQ ID NO: 349324 - DNA, 58 bp, Artificial
  Synthetic oligonucleotide
cagtagtgtgagagaacctccttctccaaatcgctggaagaaaacttcgtcacagtaa

SEQ ID NO: 349325 - DNA, 54 bp, Artificial
  Synthetic oligonucleotide
cagtagttaagatcttatacgaccactacatctcgacccctgcattaaacgatg

SEQ ID NO: 349326 - DNA, 50 bp, Artificial
  Synthetic oligonucleotide
cagtagttacttgtacacatggcatcagaccaacagtaagtactcaacta

SEQ ID NO: 349327 - DNA, 60 bp, Artificial
  Synthetic oligonucleotide
cagtagttcgactcacctgcaaatcactcatgaacggtaccaaatgctcctcaaatattt

SEQ ID NO: 349328 - DNA, 59 bp, Artificial
  Synthetic oligonucleotide
cagtagttctgggcagctaacatagaacgggtggtgcattattctagtatacactgggt

SEQ ID NO: 349329 - DNA, 59 bp, Artificial
  Synthetic oligonucleotide
cagtagttggcggaggatttctgacaacggtagaccagagttcagttagcacggctaca

SEQ ID NO: 349330 - DNA, 56 bp, Artificial
  Synthetic oligonucleotide
cagtagttgtgccgtccgaggcttctggcccaggatgttttacctgtccgtgttgg

SEQ ID NO: 349331 - DNA, 53 bp, Artificial
  Synthetic oligonucleotide
cagtagttgtgtctcccgaggcttcgggcccaggtagttttgccggtccgtgt

SEQ ID NO: 349332 - DNA, 55 bp, Artificial
  Synthetic oligonucleotide
cagtagtttcgatgggttgctttccaagcaagtgatgaaagccatgtctgacatg

SEQ ID NO: 349333 - DNA, 57 bp, Artificial
  Synthetic oligonucleotide
cagtataacctatcaacatcccctctcacctctcccgtggccaccggcacaaatttg

SEQ ID NO: 349334 - DNA, 60 bp, Artificial
  Synthetic oligonucleotide
cagtataagtacagaaatgttcccatcactaagcgtgcctgggctcagggggtcatgcct

SEQ ID NO: 349335 - DNA, 60 bp, Artificial
  Synthetic oligonucleotide
cagtataatttatccacatccccactcacgtctactattgccactggcactaatcttgtt

SEQ ID NO: 349336 - DNA, 50 bp, Artificial
  Synthetic oligonucleotide
cagtatacaatcactgggggaggatcaaagcgcatctgcttctagcggag

SEQ ID NO: 349337 - DNA, 55 bp, Artificial
  Synthetic oligonucleotide
cagtatacacagaagacggagaattgaccattccgaagcagttttctccgaccga

SEQ ID NO: 349338 - DNA, 58 bp, Artificial
  Synthetic oligonucleotide
cagtatacaggaactgatggaccgtgtaaaattcccatctcctcggtggcgtctctaa

SEQ ID NO: 349339 - DNA, 60 bp, Artificial
  Synthetic oligonucleotide
cagtatactgacagatccaaatttacttacgatagactttgaaaaggatgcgcatctgaa

SEQ ID NO: 349340 - DNA, 56 bp, Artificial
  Synthetic oligonucleotide
cagtatactgcttcaccccgagccctgtcgtggtggggacaaccgatcggttcggc

SEQ ID NO: 349341 - DNA, 57 bp, Artificial
  Synthetic oligonucleotide
cagtatagaaacgcgaagtcaagagccaaaccaaagtatcacctccgtgcggcggaa

SEQ ID NO: 349342 - DNA, 55 bp, Artificial
  Synthetic oligonucleotide
cagtatagagccttcagagtcacattaccagatcctaataagtttgccttggcag

SEQ ID NO: 349343 - DNA, 55 bp, Artificial
  Synthetic oligonucleotide
cagtatagagtctttagagtgcagctgccagaccctaatcaatttgcactgccag

SEQ ID NO: 349344 - DNA, 59 bp, Artificial
  Synthetic oligonucleotide
cagtatagattgtccagtctcaagccctatgataatttggcttgttacttaaacggcta

SEQ ID NO: 349345 - DNA, 60 bp, Artificial
  Synthetic oligonucleotide
cagtatagctcattgaattcgcctcgtcgagacgaatccaatgagctctcgtccatccca

SEQ ID NO: 349346 - DNA, 53 bp, Artificial
  Synthetic oligonucleotide
cagtatagggtattcagggtaaagttgccggaccccaattatttcgctattac

SEQ ID NO: 349347 - DNA, 58 bp, Artificial
  Synthetic oligonucleotide
cagtatagtttaattgagatgtttaaggatagattaattgttagtaacaagtatgagc

SEQ ID NO: 349348 - DNA, 59 bp, Artificial
  Synthetic oligonucleotide
cagtatatcagggcatgggaacatttatgggtgggaatcattactcaggggtgggtcag

SEQ ID NO: 349349 - DNA, 55 bp, Artificial
  Synthetic oligonucleotide
cagtatatgatacaggaagtcactaagattagaccttttggccaaacaacaacag

SEQ ID NO: 349350 - DNA, 60 bp, Artificial
  Synthetic oligonucleotide
cagtatatgtaatgacttctttagaaatctatgcaatagtagcactgatagtggcgctaa

SEQ ID NO: 349351 - DNA, 55 bp, Artificial
  Synthetic oligonucleotide
cagtatattgccgacgttcaatgagttgttcggggaatatgaatccgtgtacggc

SEQ ID NO: 349352 - DNA, 55 bp, Artificial
  Synthetic oligonucleotide
cagtatcaccatcgccgcataaaagaatggcacgatgggtccatgtcttcctacg

SEQ ID NO: 349353 - DNA, 58 bp, Artificial
  Synthetic oligonucleotide
cagtatcacggcaatggcaattggactaacattaaaccgagtgaagcttaaaacatcc

SEQ ID NO: 349354 - DNA, 58 bp, Artificial
  Synthetic oligonucleotide
cagtatcactgtccagtatccaattatagagggttggaagtccctgtacataacctta

SEQ ID NO: 349355 - DNA, 60 bp, Artificial
  Synthetic oligonucleotide
cagtatcagcagacccattggcctcgctcttggagatgtgtcatagtacacaaataggcg

SEQ ID NO: 349356 - DNA, 59 bp, Artificial
  Synthetic oligonucleotide
cagtatcatatatttgcccaaaggattggacttacctgatatacagattggggcaaatt

SEQ ID NO: 349357 - DNA, 54 bp, Artificial
  Synthetic oligonucleotide
cagtatccaacacagcaatgtgttgggggttacacccttcggggtactcttaac

SEQ ID NO: 349358 - DNA, 55 bp, Artificial
  Synthetic oligonucleotide
cagtatcccaagaccagacgcgaaacacgttctcgctctttcccgttctggcatc

SEQ ID NO: 349359 - DNA, 60 bp, Artificial
  Synthetic oligonucleotide
cagtatcccaccatgggatcttcggacgatatacaatattatcggaccgtgtagtatctc

SEQ ID NO: 349360 - DNA, 52 bp, Artificial
  Synthetic oligonucleotide
cagtatcgcgttgtccgtgccaccatccggtatcgcccactcgtgccgaacg

SEQ ID NO: 349361 - DNA, 55 bp, Artificial
  Synthetic oligonucleotide
cagtatcggcaaatgtctgttaataccagaatacagtgtcctacgccgacgatgg

SEQ ID NO: 349362 - DNA, 58 bp, Artificial
  Synthetic oligonucleotide
cagtatcgtgttgttcgtgccaccattcgatatcgccccttggtgccgaatgccgttg

SEQ ID NO: 349363 - DNA, 55 bp, Artificial
  Synthetic oligonucleotide
cagtatctcagcttatatgctcagcgcagaatccaaatggttgatttatcaagtc

SEQ ID NO: 349364 - DNA, 60 bp, Artificial
  Synthetic oligonucleotide
cagtatctcgagacctagaaaaacatggagcaatcacaagtaataacgcagcagctacta

SEQ ID NO: 349365 - DNA, 60 bp, Artificial
  Synthetic oligonucleotide
cagtatctcgagacttggcagaacgtggagcaatcacaagtggcaatgctaataatgctg

SEQ ID NO: 349366 - DNA, 51 bp, Artificial
  Synthetic oligonucleotide
cagtatctgaacaccaacaagtacggaaccgaagtccaatcggttacggaa

SEQ ID NO: 349367 - DNA, 58 bp, Artificial
  Synthetic oligonucleotide
cagtatctgcaacaccacaagagctgaaaaacccaagtttctcccagatttatacgac

SEQ ID NO: 349368 - DNA, 54 bp, Artificial
  Synthetic oligonucleotide
cagtatcttcgtcgaactactgccattcgagatgagcgttgaattcctactcgc

SEQ ID NO: 349369 - DNA, 60 bp, Artificial
  Synthetic oligonucleotide
cagtatgaacacggaggtgggcaaaccactacgctacgcagcagccttagctacgccgga

SEQ ID NO: 349370 - DNA, 60 bp, Artificial
  Synthetic oligonucleotide
cagtatgaacgactttcgatcggttatgatgcggacatgttgactagagctttcttgaag

SEQ ID NO: 349371 - DNA, 60 bp, Artificial
  Synthetic oligonucleotide
cagtatgattggataattacgccgacccaggcgaagggtatgtgtctaactgcatttcta

SEQ ID NO: 349372 - DNA, 60 bp, Artificial
  Synthetic oligonucleotide
cagtatgcaagcaaagagcaagcaatagtcaaaaggttcatgaagattaacaaccatgtc

SEQ ID NO: 349373 - DNA, 55 bp, Artificial
  Synthetic oligonucleotide
cagtatgcagggtctcaatgtctaagtaactgtgttatgtttttagtctcgagct

SEQ ID NO: 349374 - DNA, 60 bp, Artificial
  Synthetic oligonucleotide
cagtatgccagcaacgaacaggctatagtcaagaggttctggaaggtcaacaatcatgtg

SEQ ID NO: 349375 - DNA, 54 bp, Artificial
  Synthetic oligonucleotide
cagtatgccgaacgtttctttgactgttaagggtggggggcattataacgagga

SEQ ID NO: 349376 - DNA, 54 bp, Artificial
  Synthetic oligonucleotide
cagtatgctatgggtatcctatcggcagcacccgaccaatcagacaaccccata

SEQ ID NO: 349377 - DNA, 53 bp, Artificial
  Synthetic oligonucleotide
cagtatggaacgacaatgcccatggggtgggttctatcccaatgcatacagac

SEQ ID NO: 349378 - DNA, 55 bp, Artificial
  Synthetic oligonucleotide
cagtatggaattcccatgatgtcccgtagatggttcttcattataagttggtcat

SEQ ID NO: 349379 - DNA, 55 bp, Artificial
  Synthetic oligonucleotide
cagtatgggagaccttaattctcacctggtttggaagcgtgatgacggtaagttg

SEQ ID NO: 349380 - DNA, 58 bp, Artificial
  Synthetic oligonucleotide
cagtatgggcccggtttcacatggtgttggatttcacctgcaaaccccatctggccca

SEQ ID NO: 349381 - DNA, 59 bp, Artificial
  Synthetic oligonucleotide
cagtatgggctaacccataaggattggcgtctgtcacgcaataacgcacctgaccctat

SEQ ID NO: 349382 - DNA, 55 bp, Artificial
  Synthetic oligonucleotide
cagtatgggtgccattccctcatattattgagaaacctagctttgcaacaccatc

SEQ ID NO: 349383 - DNA, 50 bp, Artificial
  Synthetic oligonucleotide
cagtatgtagaggggaacactcttatttataagggtgtgcgctacactat

SEQ ID NO: 349384 - DNA, 60 bp, Artificial
  Synthetic oligonucleotide
cagtatgtccaaagtgtagtttaccactgcgactggtggtagagtgcagccacgcagata

SEQ ID NO: 349385 - DNA, 55 bp, Artificial
  Synthetic oligonucleotide
cagtatgttgagcagatcagaccattgatgcctcctgatctaactgagcccctcc

SEQ ID NO: 349386 - DNA, 54 bp, Artificial
  Synthetic oligonucleotide
cagtattaaaaggcgagaaattagatagatgggaaagaattaggttaaggccag

SEQ ID NO: 349387 - DNA, 55 bp, Artificial
  Synthetic oligonucleotide
cagtattacagtacaagaatgtgtgctctgtacgtcaaggtgtattacatgtcgg

SEQ ID NO: 349388 - DNA, 60 bp, Artificial
  Synthetic oligonucleotide
cagtattagatgaggttgagtggaaatatgtgtttgatggtcgaacgttccagagttatg

SEQ ID NO: 349389 - DNA, 60 bp, Artificial
  Synthetic oligonucleotide
cagtattcaccgagccacctggtgtcactgtaaaatggtaccatatgaatcaaatagtac

SEQ ID NO: 349390 - DNA, 52 bp, Artificial
  Synthetic oligonucleotide
cagtattcccttgcagggtacatgttttcgtcgcacaggtaagtacctacca

SEQ ID NO: 349391 - DNA, 58 bp, Artificial
  Synthetic oligonucleotide
cagtattctcccgcgtgcgaaaattcaagactatggtagctttcgatttcattaacga

SEQ ID NO: 349392 - DNA, 51 bp, Artificial
  Synthetic oligonucleotide
cagtattgaattatgcgcgtgaaaaacgtcgggacacaatcgtacgtgcct

SEQ ID NO: 349393 - DNA, 60 bp, Artificial
  Synthetic oligonucleotide
cagtattggatattagcaaatcctgatactgaaggagtgatagtcgaagcggacgccaca

SEQ ID NO: 349394 - DNA, 60 bp, Artificial
  Synthetic oligonucleotide
cagtattggtaggacctacacctatcaacataatcgggagaaatatgttgactcagattg

SEQ ID NO: 349395 - DNA, 56 bp, Artificial
  Synthetic oligonucleotide
cagtcaaaattgttaaagtttgggaaaatgacactgctaccgcgctagggtcaatg

SEQ ID NO: 349396 - DNA, 52 bp, Artificial
  Synthetic oligonucleotide
cagtcaaacaggcttgctcaaaagtaacctttgagccaattcctatacacta

SEQ ID NO: 349397 - DNA, 55 bp, Artificial
  Synthetic oligonucleotide
cagtcaaactattcatctccagattccggtagcgagtcatcctctggtcatgtgc

SEQ ID NO: 349398 - DNA, 55 bp, Artificial
  Synthetic oligonucleotide
cagtcaaagaattcgaactggatgtatcaagcccttagagataacttgcaggcag

SEQ ID NO: 349399 - DNA, 55 bp, Artificial
  Synthetic oligonucleotide
cagtcaaaggggaattcttgaggatgaacagatgtaccagaaatgctgcaatctg

SEQ ID NO: 349400 - DNA, 57 bp, Artificial
  Synthetic oligonucleotide
cagtcaaatttatgcagggattaagataaagcaactgtgtaaactcctcaggggaac

SEQ ID NO: 349401 - DNA, 60 bp, Artificial
  Synthetic oligonucleotide
cagtcaaccaataacatcgattgcccattcgattagatataatcctgtttactcgagtca

SEQ ID NO: 349402 - DNA, 56 bp, Artificial
  Synthetic oligonucleotide
cagtcaaccctcggtcctttcttgtctgtgccgggccttcaagagatcgcgcgata

SEQ ID NO: 349403 - DNA, 60 bp, Artificial
  Synthetic oligonucleotide
cagtcaacttcaagaaatgttgcccgctggtttgtgggaaagccattcaattcattgata

SEQ ID NO: 349404 - DNA, 58 bp, Artificial
  Synthetic oligonucleotide
cagtcaactttgagatttcgtgttccttggatttcagatactccttacagagttaaca

SEQ ID NO: 349405 - DNA, 55 bp, Artificial
  Synthetic oligonucleotide
cagtcaagaggccgtggcattggaaggtggacatggcacttatgtcggccacccc

SEQ ID NO: 349406 - DNA, 60 bp, Artificial
  Synthetic oligonucleotide
cagtcaagcgacagggcttcccacccgcactctctgggcagccctctgcgccaaccttcc

SEQ ID NO: 349407 - DNA, 60 bp, Artificial
  Synthetic oligonucleotide
cagtcaaggactagccgaacattgtgccgctggcatctacggcatggtgaacggctcaaa

SEQ ID NO: 349408 - DNA, 50 bp, Artificial
  Synthetic oligonucleotide
cagtcaagtagcttaactacattagacagtttaggccgtagtaggacaag

SEQ ID NO: 349409 - DNA, 59 bp, Artificial
  Synthetic oligonucleotide
cagtcaagtatactcacatctaggtctttacctacagcctatcgaaaagttagatccac

SEQ ID NO: 349410 - DNA, 60 bp, Artificial
  Synthetic oligonucleotide
cagtcaagtatgtccccgtccttctcgatgtatgccttaacgtctgaactggacttagca

SEQ ID NO: 349411 - DNA, 60 bp, Artificial
  Synthetic oligonucleotide
cagtcaagtgttcagtctcattagaccaaatgagaatccagcacacaagagccaactgat

SEQ ID NO: 349412 - DNA, 55 bp, Artificial
  Synthetic oligonucleotide
cagtcaataactctcaccactacattagcatggggacatctggactggagctaac

SEQ ID NO: 349413 - DNA, 55 bp, Artificial
  Synthetic oligonucleotide
cagtcaatatgtcatggggatagtaaaagatcatcccacaatgagtgagtctcct

SEQ ID NO: 349414 - DNA, 60 bp, Artificial
  Synthetic oligonucleotide
cagtcaatcacttccatctgggagatgatatggatccagaactcaggcagcttgctcaat

SEQ ID NO: 349415 - DNA, 56 bp, Artificial
  Synthetic oligonucleotide
cagtcaatccaggaccgttcgcacagaccgggtacgctccagttaattggggacac

SEQ ID NO: 349416 - DNA, 58 bp, Artificial
  Synthetic oligonucleotide
cagtcaattattcccaagagagataccatctcaacatatggtttagggcccaggtttg

SEQ ID NO: 349417 - DNA, 60 bp, Artificial
  Synthetic oligonucleotide
cagtcaattgaggtgaatggtgtaaggtgtttcttcagtgacatttacagctgtcgttgg

SEQ ID NO: 349418 - DNA, 55 bp, Artificial
  Synthetic oligonucleotide
cagtcacaacggaaaactatgcagactaaaaggaatagccccactacaattgggg

SEQ ID NO: 349419 - DNA, 60 bp, Artificial
  Synthetic oligonucleotide
cagtcacagaacaggcaatagaggatgtatggcatctctttgagacctcaataaagcctt

SEQ ID NO: 349420 - DNA, 60 bp, Artificial
  Synthetic oligonucleotide
cagtcacataccattaggtcgtgtaataacagttcaacatgcagattgctgcaccttagt

SEQ ID NO: 349421 - DNA, 55 bp, Artificial
  Synthetic oligonucleotide
cagtcacatacgcgggaagacactttggtggtgaaggtccatccaaagctagtgc

SEQ ID NO: 349422 - DNA, 54 bp, Artificial
  Synthetic oligonucleotide
cagtcacatttactgcaccttgggactgtactgcagaagttgaactcttttatc

SEQ ID NO: 349423 - DNA, 58 bp, Artificial
  Synthetic oligonucleotide
cagtcaccacgagttgtaccaccatgatgcaagggtctacccgattgtacttcaaagt

SEQ ID NO: 349424 - DNA, 55 bp, Artificial
  Synthetic oligonucleotide
cagtcaccctcactatgcagaggcttttggccaaccattcaagtgagcttccatc

SEQ ID NO: 349425 - DNA, 55 bp, Artificial
  Synthetic oligonucleotide
cagtcaccgacgtacacgagagtcgcgttgaaataacactcgatactgcatcgga

SEQ ID NO: 349426 - DNA, 58 bp, Artificial
  Synthetic oligonucleotide
cagtcacctagcacgcagacacatggcccgagagctacatccggagttttacaaggac

SEQ ID NO: 349427 - DNA, 60 bp, Artificial
  Synthetic oligonucleotide
cagtcacgaccgtgcatatacgcgtcgttgtaacgttataatcttgcgctttgtccactg

SEQ ID NO: 349428 - DNA, 60 bp, Artificial
  Synthetic oligonucleotide
cagtcacgagttcccgtgttatcgattatttgtcacactgtttgagcatcgttgacatgg

SEQ ID NO: 349429 - DNA, 55 bp, Artificial
  Synthetic oligonucleotide
cagtcacgcgaatcgacgtaagctgcactcccggcggatcgttccaccatatttt

SEQ ID NO: 349430 - DNA, 57 bp, Artificial
  Synthetic oligonucleotide
cagtcacgtcattatgcatgcttatcggaaatgcaaccgttatacctagcccgcaga

SEQ ID NO: 349431 - DNA, 54 bp, Artificial
  Synthetic oligonucleotide
cagtcactaaacagctttcagttacaaaacagctttcgaaaactttggaatttc

SEQ ID NO: 349432 - DNA, 58 bp, Artificial
  Synthetic oligonucleotide
cagtcactggcacgcgttagggatggcacaagaggccagtggacggactttaacggag

SEQ ID NO: 349433 - DNA, 55 bp, Artificial
  Synthetic oligonucleotide
cagtcacttgttggaaagaggtccccttttcagaatgcctacaacatccgaggga

SEQ ID NO: 349434 - DNA, 59 bp, Artificial
  Synthetic oligonucleotide
cagtcacttttggttacaaccgttagacaatactaaattaggtatgctagatgatgcca

SEQ ID NO: 349435 - DNA, 53 bp, Artificial
  Synthetic oligonucleotide
cagtcagaactcagggcatgctaggtcccaagtgtaccagattatgtacgtcc

SEQ ID NO: 349436 - DNA, 58 bp, Artificial
  Synthetic oligonucleotide
cagtcagaactctgaaccattgatcgtccccgcaaatagttcttcttttgcggcgacc

SEQ ID NO: 349437 - DNA, 50 bp, Artificial
  Synthetic oligonucleotide
cagtcagacaagttaatagcgaagctagacaatacgggggttagaacata

SEQ ID NO: 349438 - DNA, 55 bp, Artificial
  Synthetic oligonucleotide
cagtcagagggagatttaacccagttcttgagaaatgagcaagcggtactagacg

SEQ ID NO: 349439 - DNA, 60 bp, Artificial
  Synthetic oligonucleotide
cagtcagagtagtgaatgaatacaacccagctagaatctcatccaaagtgcgagtctata

SEQ ID NO: 349440 - DNA, 59 bp, Artificial
  Synthetic oligonucleotide
cagtcagagtgttatgtcatatgcacgcaagaaatgttgcaagataaaaaaagattcgt

SEQ ID NO: 349441 - DNA, 60 bp, Artificial
  Synthetic oligonucleotide
cagtcagcatgatggtcgttcaatttatctcatcgagaccaagccaatgatatcgggtac

SEQ ID NO: 349442 - DNA, 57 bp, Artificial
  Synthetic oligonucleotide
cagtcagccccaccatactgccttaagagttcgataaccctacgggcatcaaatcct

SEQ ID NO: 349443 - DNA, 60 bp, Artificial
  Synthetic oligonucleotide
cagtcagcgtcagcgaaacgaggtcgtgacattgatcctatctctgaattcgaacttgag

SEQ ID NO: 349444 - DNA, 55 bp, Artificial
  Synthetic oligonucleotide
cagtcaggcacccaactacacaccccatttattacgtacaacggggcagttatcg

SEQ ID NO: 349445 - DNA, 55 bp, Artificial
  Synthetic oligonucleotide
cagtcagggtgaaacacagagattttaacccgccattgtatgtagaggcagaagt

SEQ ID NO: 349446 - DNA, 57 bp, Artificial
  Synthetic oligonucleotide
cagtcaggtatacagcctaatcagaccaaacgagaatcccgcacacaagagtcagtt

SEQ ID NO: 349447 - DNA, 53 bp, Artificial
  Synthetic oligonucleotide
cagtcaggtatggataatgtagtaatatggtctatgaagagtaacaaactcat

SEQ ID NO: 349448 - DNA, 55 bp, Artificial
  Synthetic oligonucleotide
cagtcagtagatcagcttcagttagatcaattagcagtaatgcagcatcgcggat

SEQ ID NO: 349449 - DNA, 60 bp, Artificial
  Synthetic oligonucleotide
cagtcagtagtgaggccggcacggaggacgtcgtgtgctgctcaatgtcttattcctgga

SEQ ID NO: 349450 - DNA, 60 bp, Artificial
  Synthetic oligonucleotide
cagtcagtagtggggccaacgcggagaatgtcgtgtgctgctcaatgtcttattcctgga

SEQ ID NO: 349451 - DNA, 50 bp, Artificial
  Synthetic oligonucleotide
cagtcagtccaggtggtgctattgtgttgagttcagcacttaggtggggc

SEQ ID NO: 349452 - DNA, 59 bp, Artificial
  Synthetic oligonucleotide
cagtcataactggcccctcgcaccgggtaatgtgcgtctgggaagatatccggcctgct

SEQ ID NO: 349453 - DNA, 60 bp, Artificial
  Synthetic oligonucleotide
cagtcataaggaagttgaatccgtcaacaatgctgtggtaatgccagcccatggtccggc

SEQ ID NO: 349454 - DNA, 59 bp, Artificial
  Synthetic oligonucleotide
cagtcatacatgagaaaataggggatcaccaaacagcgattcgcccaacagtaacgacc

SEQ ID NO: 349455 - DNA, 57 bp, Artificial
  Synthetic oligonucleotide
cagtcatactggtaaggttatgtgtgtttccgatgtcactagaggaaacaaccttac

SEQ ID NO: 349456 - DNA, 58 bp, Artificial
  Synthetic oligonucleotide
cagtcatcacctgcctaacgtcaagccttcaatcatttgcagaggggaacccgtagat

SEQ ID NO: 349457 - DNA, 56 bp, Artificial
  Synthetic oligonucleotide
cagtcatcagggaatataatgagacagtaaggattgagaagataatacaatggcac

SEQ ID NO: 349458 - DNA, 55 bp, Artificial
  Synthetic oligonucleotide
cagtcatcaggtgatagggtcatggagggcccacattgacatgagcgaagtacag

SEQ ID NO: 349459 - DNA, 60 bp, Artificial
  Synthetic oligonucleotide
cagtcatcaggtgttataccagaaggaggtgttctattcactcagagcactgacacagtg

SEQ ID NO: 349460 - DNA, 55 bp, Artificial
  Synthetic oligonucleotide
cagtcatccttttgtcgtgaatctccactaccaccgtcccagaggcgttgatggg

SEQ ID NO: 349461 - DNA, 60 bp, Artificial
  Synthetic oligonucleotide
cagtcatcgccgactgcgtccaattgacagcagaagtctttaatcacgattataacctgt

SEQ ID NO: 349462 - DNA, 60 bp, Artificial
  Synthetic oligonucleotide
cagtcatcgtgctggggtgcaaaccatgctgcagcgctgtatacgtttaccggtgggggc

SEQ ID NO: 349463 - DNA, 55 bp, Artificial
  Synthetic oligonucleotide
cagtcatggacagatattctgtggatgctgacctacaaccgggtgagcttatctg

SEQ ID NO: 349464 - DNA, 55 bp, Artificial
  Synthetic oligonucleotide
cagtcatggctgtaatgtaatggacggtgggagaggcccgccgttaggggaggtc

SEQ ID NO: 349465 - DNA, 56 bp, Artificial
  Synthetic oligonucleotide
cagtcattacttatgacatacaagagtatgacctcgtcagaacagattactactac

SEQ ID NO: 349466 - DNA, 60 bp, Artificial
  Synthetic oligonucleotide
cagtcattcccggctcatgtcggttatggggaaggaagcgtttgattcattgatggcagc

SEQ ID NO: 349467 - DNA, 55 bp, Artificial
  Synthetic oligonucleotide
cagtcattcgctcgccatttatgggcacgagctggaactatgggtgattctatac

SEQ ID NO: 349468 - DNA, 55 bp, Artificial
  Synthetic oligonucleotide
cagtccaacagcaatttgcggatgcctggaaacctgtgcctagtatgacagtgag

SEQ ID NO: 349469 - DNA, 55 bp, Artificial
  Synthetic oligonucleotide
cagtccaaccagttgctatggaagattatcaagtgcttgcgcaggaaaggtagcg

SEQ ID NO: 349470 - DNA, 54 bp, Artificial
  Synthetic oligonucleotide
cagtccaaccctcagatgtttaatcgaatccgggatattaaccttcaaagaaac

SEQ ID NO: 349471 - DNA, 55 bp, Artificial
  Synthetic oligonucleotide
cagtccaatatcttgatggcagactaggtcgatgtagattctagtgaagtgtgcg

SEQ ID NO: 349472 - DNA, 60 bp, Artificial
  Synthetic oligonucleotide
cagtccaattaacttggactgtgaggaggagattgaaactgaggaagttgactgtcctgc

SEQ ID NO: 349473 - DNA, 51 bp, Artificial
  Synthetic oligonucleotide
cagtccacaatgaaggcagatgaactcactccaggtaggttccggaccatt

SEQ ID NO: 349474 - DNA, 60 bp, Artificial
  Synthetic oligonucleotide
cagtccacagtgtgtcttaccattgagagcacacacgctgacctattagtgttagaagac

SEQ ID NO: 349475 - DNA, 55 bp, Artificial
  Synthetic oligonucleotide
cagtccacctcaggcacgattccggtcgccctgtggatcaagcatggaagccgtc

SEQ ID NO: 349476 - DNA, 55 bp, Artificial
  Synthetic oligonucleotide
cagtccactaccggtacaaaaagatgagagtgttttgtccaagaccaactgtgtt

SEQ ID NO: 349477 - DNA, 60 bp, Artificial
  Synthetic oligonucleotide
cagtccagacatgccccaccggcttcctcgatcagaatgaccttgtgtctgcgccggatg

SEQ ID NO: 349478 - DNA, 59 bp, Artificial
  Synthetic oligonucleotide
cagtccagctggcccgagccctcagaagtcacatgtgggcgaaactcgcaagaggaagg

SEQ ID NO: 349479 - DNA, 60 bp, Artificial
  Synthetic oligonucleotide
cagtccatcccgcaagggcagcagccaccctggatagagtgatgccatttctcccgggtc

SEQ ID NO: 349480 - DNA, 60 bp, Artificial
  Synthetic oligonucleotide
cagtccatgcagggcctattgcaccaggacaactgagggagcctaggggaagtgacatag

SEQ ID NO: 349481 - DNA, 59 bp, Artificial
  Synthetic oligonucleotide
cagtccattcttcagtctctcacaaaaggcagaactgagccagtggcaatgctggttca

SEQ ID NO: 349482 - DNA, 59 bp, Artificial
  Synthetic oligonucleotide
cagtccattgacggtgcttggggctctggagtaggattcaccttaacatgtgttgtggg

SEQ ID NO: 349483 - DNA, 55 bp, Artificial
  Synthetic oligonucleotide
cagtcccaacatcgtagatgccactccctgccgtattatctaggacaacatctac

SEQ ID NO: 349484 - DNA, 60 bp, Artificial
  Synthetic oligonucleotide
cagtcccatacatgccacggtatgggcttcagcgcaatttaaccgacatgagtttagcgc

SEQ ID NO: 349485 - DNA, 55 bp, Artificial
  Synthetic oligonucleotide
cagtcccatgaacaacttgctgcgtacagccacgtggaagagtggaacagtccat

SEQ ID NO: 349486 - DNA, 50 bp, Artificial
  Synthetic oligonucleotide
cagtcccatggtacgtcgtttacaaaccgcggtcgtacttttacccaacc

SEQ ID NO: 349487 - DNA, 55 bp, Artificial
  Synthetic oligonucleotide
cagtccccacaatttatattgatgaaccaacgggaactaatcctattagagcaac

SEQ ID NO: 349488 - DNA, 59 bp, Artificial
  Synthetic oligonucleotide
cagtccccgctgtggtgacaccggcagtcgtgagttcggaagcagctcccgaaccagaa

SEQ ID NO: 349489 - DNA, 55 bp, Artificial
  Synthetic oligonucleotide
cagtcccgacagagatggttgggtgtattggcagagtgggcttttagcctggtcc

SEQ ID NO: 349490 - DNA, 53 bp, Artificial
  Synthetic oligonucleotide
cagtcccggtggggcctagggagcccgaactgtcacggccccgattgggcctc

SEQ ID NO: 349491 - DNA, 55 bp, Artificial
  Synthetic oligonucleotide
cagtccgatataaaacaccatgcattcctaacgttatcgttagatctctccagtg

SEQ ID NO: 349492 - DNA, 55 bp, Artificial
  Synthetic oligonucleotide
cagtccgatcgtcatccaggactgtgccgcggcagtgactgacgtcacgctcagt

SEQ ID NO: 349493 - DNA, 55 bp, Artificial
  Synthetic oligonucleotide
cagtccggctctcggctggtgggagcatttgggtaacaagagaaccttacgtgtc

SEQ ID NO: 349494 - DNA, 60 bp, Artificial
  Synthetic oligonucleotide
cagtccgttgataggactgcagtgactggtgcttcttatttcacttctgtggaccaatct

SEQ ID NO: 349495 - DNA, 54 bp, Artificial
  Synthetic oligonucleotide
cagtccgtttggtgtatcctttcgtaacgataatgacctcccctatttcctggc

SEQ ID NO: 349496 - DNA, 55 bp, Artificial
  Synthetic oligonucleotide
cagtcctagcctggctatgatggacgatgacaaagcttgtgttgatgatggttgt

SEQ ID NO: 349497 - DNA, 54 bp, Artificial
  Synthetic oligonucleotide
cagtcctagtggtatcgcactcaaatttatgtacagcaacttagacttaaaagc

SEQ ID NO: 349498 - DNA, 60 bp, Artificial
  Synthetic oligonucleotide
cagtcctatgcactcacatacctcctttgccaccacacgtaccagtaatgtgtccatacc

SEQ ID NO: 349499 - DNA, 60 bp, Artificial
  Synthetic oligonucleotide
cagtcctcaccgaatccttgatgggaaaaactgcacactgatagatgctctattgggaga

SEQ ID NO: 349500 - DNA, 60 bp, Artificial
  Synthetic oligonucleotide
cagtcctcccctactccatctctcaatcacacctttggcttaccgatctgactggcattc

SEQ ID NO: 349501 - DNA, 56 bp, Artificial
  Synthetic oligonucleotide
cagtcctctattgtgtacatacagggatagatgtacgtgacaccaaagaagcctta

SEQ ID NO: 349502 - DNA, 60 bp, Artificial
  Synthetic oligonucleotide
cagtcctctattgtgtgcatcaaaacatagagataaaagacaccaaggaagctttagacg

SEQ ID NO: 349503 - DNA, 60 bp, Artificial
  Synthetic oligonucleotide
cagtcctctgatgactttgctctcatagtgaatgcaccgaatcacgagggaatacaagca

SEQ ID NO: 349504 - DNA, 55 bp, Artificial
  Synthetic oligonucleotide
cagtcctcttggtacaccaaaggttcattggcccctattttgcctaccacttatc

SEQ ID NO: 349505 - DNA, 55 bp, Artificial
  Synthetic oligonucleotide
cagtcctgcaaggtccttatagtgatgaatcaaaactagacttgagtataaagtc

SEQ ID NO: 349506 - DNA, 55 bp, Artificial
  Synthetic oligonucleotide
cagtcctggcttttacttcactactaggtgtgatggtttgtcttgtgtgcctggt

SEQ ID NO: 349507 - DNA, 55 bp, Artificial
  Synthetic oligonucleotide
cagtccttcaagtcaggacatgacctgatccaagaaatcatagtgtcaatcatac

SEQ ID NO: 349508 - DNA, 60 bp, Artificial
  Synthetic oligonucleotide
cagtccttcaggtcaggacatgatctgatccatgaaatcatggtgttaatcatattgtgt

SEQ ID NO: 349509 - DNA, 59 bp, Artificial
  Synthetic oligonucleotide
cagtccttctggcagagtcctgccaatccaaagtgtttgggagcctaaatcgtatacta

SEQ ID NO: 349510 - DNA, 60 bp, Artificial
  Synthetic oligonucleotide
cagtccttttctacttgcatccacaaatgctggcaacatacatgcccccacaatatcaga

SEQ ID NO: 349511 - DNA, 60 bp, Artificial
  Synthetic oligonucleotide
cagtcgaaagaaaagcacaattctgactactgcagttcctataggatcctgcgttagtaa

SEQ ID NO: 349512 - DNA, 53 bp, Artificial
  Synthetic oligonucleotide
cagtcgacagagtgtgggccgagacctcagagcctcgcttgtctcgtactgcc

SEQ ID NO: 349513 - DNA, 58 bp, Artificial
  Synthetic oligonucleotide
cagtcgacgataaatttgaacctaatttcgatatccttatcagaattgtgcaaaaaga

SEQ ID NO: 349514 - DNA, 59 bp, Artificial
  Synthetic oligonucleotide
cagtcgacttcagcttggaccctaccttcaccattgagacgacgaccgtgcctcaagac

SEQ ID NO: 349515 - DNA, 55 bp, Artificial
  Synthetic oligonucleotide
cagtcgagccccttgatcaaagacactttagtgtccagagaaattcaacgagact

SEQ ID NO: 349516 - DNA, 55 bp, Artificial
  Synthetic oligonucleotide
cagtcgcaggagtagtgtatgtaatgtacaaactcttcgccggtcaacagggtgc

SEQ ID NO: 349517 - DNA, 60 bp, Artificial
  Synthetic oligonucleotide
cagtcgccattaagaacattgttgaaattgcataccacctgtgacacccagtcagagatt

SEQ ID NO: 349518 - DNA, 59 bp, Artificial
  Synthetic oligonucleotide
cagtcgccctggctaacgacgctgtagttctgatggaacactgtctaaaggaggtcgcc

SEQ ID NO: 349519 - DNA, 55 bp, Artificial
  Synthetic oligonucleotide
cagtcgcctggcactgaaacacagagcccaagagctgcatccggagtggttctgc

SEQ ID NO: 349520 - DNA, 50 bp, Artificial
  Synthetic oligonucleotide
cagtcgcgcccgctgtttcagatctccttgtccgagccccctccacacga

SEQ ID NO: 349521 - DNA, 60 bp, Artificial
  Synthetic oligonucleotide
cagtcgcttagaactctcgaactccaactcgaagctcgccatctcagatttaatgaagct

SEQ ID NO: 349522 - DNA, 52 bp, Artificial
  Synthetic oligonucleotide
cagtcgcttagacttactgcaagagcagctaatgaacctatatgaacaggac

SEQ ID NO: 349523 - DNA, 55 bp, Artificial
  Synthetic oligonucleotide
cagtcggcctaaggcggttgtccaaagaacgtttgaaagagaatacaatctgaag

SEQ ID NO: 349524 - DNA, 53 bp, Artificial
  Synthetic oligonucleotide
cagtcggctcaattgatttgactgatccgctttgcaggcctaccggtcctctc

SEQ ID NO: 349525 - DNA, 55 bp, Artificial
  Synthetic oligonucleotide
cagtcgggaagcgtaggctaatctggggttgcgatgttggcgttagcacggtctg

SEQ ID NO: 349526 - DNA, 60 bp, Artificial
  Synthetic oligonucleotide
cagtcgggaaggcaacctactccgatctctccacctctgagagacactcatcctcaggcc

SEQ ID NO: 349527 - DNA, 54 bp, Artificial
  Synthetic oligonucleotide
cagtcgggcgttgtttgaccctgcctgcgttttcgaccctacgcaggaagtggt

SEQ ID NO: 349528 - DNA, 59 bp, Artificial
  Synthetic oligonucleotide
cagtcggggagcgtatacttggggggaactgccagattggatagctcgtcaaacattgc

SEQ ID NO: 349529 - DNA, 55 bp, Artificial
  Synthetic oligonucleotide
cagtcggtgttagggggacgtatagtaatagaggtcagataggtagtagtctcgg

SEQ ID NO: 349530 - DNA, 55 bp, Artificial
  Synthetic oligonucleotide
cagtcgtcacaagggtacttacgttcctcatgtgtactcacgggaagccaagcag

SEQ ID NO: 349531 - DNA, 60 bp, Artificial
  Synthetic oligonucleotide
cagtcgtcccgggcccacgccatagttgcactcactcgccacacggagaagtgcgtcatt

SEQ ID NO: 349532 - DNA, 54 bp, Artificial
  Synthetic oligonucleotide
cagtcgttatcgggttgacgcacgtacacaactcggtaaacacacaggggaacc

SEQ ID NO: 349533 - DNA, 57 bp, Artificial
  Synthetic oligonucleotide
cagtcgttcgactatgtctacgatgtcgatcttttctatttttgccccgttgtaggc

SEQ ID NO: 349534 - DNA, 55 bp, Artificial
  Synthetic oligonucleotide
cagtcgttcgcactctgggacaacatcgctcgtggtagtgaagacctagcgaacc

SEQ ID NO: 349535 - DNA, 58 bp, Artificial
  Synthetic oligonucleotide
cagtcgtttccaagtgctgaggagtgggtttcttagtcttagtggtaatggtcttgca

SEQ ID NO: 349536 - DNA, 60 bp, Artificial
  Synthetic oligonucleotide
cagtcgtttgaacaacgccatgatgtgtctcatattggtaaggttatgtgtatatctgat

SEQ ID NO: 349537 - DNA, 53 bp, Artificial
  Synthetic oligonucleotide
cagtcgtttgcgattccgaggaaattgaattgaccgttgaaccgtttaccctg

SEQ ID NO: 349538 - DNA, 60 bp, Artificial
  Synthetic oligonucleotide
cagtctaaatcctgagtacaggatagtcgtcagtagttcaacgcaggcacggttctgcct

SEQ ID NO: 349539 - DNA, 56 bp, Artificial
  Synthetic oligonucleotide
cagtctaagacgctgactacggtcggtgtcaaggatccgaaacgtaagcaagtttc

SEQ ID NO: 349540 - DNA, 54 bp, Artificial
  Synthetic oligonucleotide
cagtctaagggtaagcactacccagtcaattttgagggaccgggtcttgtggaa

SEQ ID NO: 349541 - DNA, 55 bp, Artificial
  Synthetic oligonucleotide
cagtctaaggtggagtgcttgaacgaatattgggcttgtgagtcagtcccaagcg

SEQ ID NO: 349542 - DNA, 60 bp, Artificial
  Synthetic oligonucleotide
cagtctaatcagaccgaaagaaaatccagcacacaagagccagttggtgtggatggcatg

SEQ ID NO: 349543 - DNA, 58 bp, Artificial
  Synthetic oligonucleotide
cagtctacggagggcttaaacccaattcgcctagtgacatagcacaagaagggagata

SEQ ID NO: 349544 - DNA, 60 bp, Artificial
  Synthetic oligonucleotide
cagtctactgcgtaaactgcatgagtggatcaattccgattggtctactccgtgttctgg

SEQ ID NO: 349545 - DNA, 55 bp, Artificial
  Synthetic oligonucleotide
cagtctagcacagatcaacactatctgccctagcttacaggcttgcaaactgccc

SEQ ID NO: 349546 - DNA, 59 bp, Artificial
  Synthetic oligonucleotide
cagtctagcagaaaaagaggtagtaattagatctgagaattggacaaacaatgctaaaa

SEQ ID NO: 349547 - DNA, 60 bp, Artificial
  Synthetic oligonucleotide
cagtctagtggaaacacttagcttgcaatgtgggtgtatgcctggataagtcgtatggat

SEQ ID NO: 349548 - DNA, 55 bp, Artificial
  Synthetic oligonucleotide
cagtctatagactattccaagagttagccagaataccttctagaattagcactca

SEQ ID NO: 349549 - DNA, 58 bp, Artificial
  Synthetic oligonucleotide
cagtctatgggatgaaagcctaaagccatgtgtaaagctaacccctctctgtgttact

SEQ ID NO: 349550 - DNA, 58 bp, Artificial
  Synthetic oligonucleotide
cagtctatttgtacttgtaaatgattatttgagctgatcactcaacgtggatttcacg

SEQ ID NO: 349551 - DNA, 53 bp, Artificial
  Synthetic oligonucleotide
cagtctcaacctgggagactataaacttaccggagaaggaaaactccggtgaa

SEQ ID NO: 349552 - DNA, 59 bp, Artificial
  Synthetic oligonucleotide
cagtctcatttccctaatgcaacaatagaatttaactcatcctcaggaggggacctaga

SEQ ID NO: 349553 - DNA, 60 bp, Artificial
  Synthetic oligonucleotide
cagtctcctgttcaggagtacgaagcttactagattcatttaccgtcatcacgttgactg

SEQ ID NO: 349554 - DNA, 55 bp, Artificial
  Synthetic oligonucleotide
cagtctcggatcttttaccaccggacgatagctaccacccgagtcttggacggcc

SEQ ID NO: 349555 - DNA, 56 bp, Artificial
  Synthetic oligonucleotide
cagtctcgttgggcccccatgaattccttaaagtgctttagatagtgcgggtctac

SEQ ID NO: 349556 - DNA, 51 bp, Artificial
  Synthetic oligonucleotide
cagtctctgttcgcagtgaacctcattaaactcgcgatacaagtcgcgcac

SEQ ID NO: 349557 - DNA, 60 bp, Artificial
  Synthetic oligonucleotide
cagtctcttacatcaagcacaatttcccagatgcagttccatatatagatgagtatctta

SEQ ID NO: 349558 - DNA, 51 bp, Artificial
  Synthetic oligonucleotide
cagtctcttactaggagaccagcttgagcctgggtgttcgctggttagcct

SEQ ID NO: 349559 - DNA, 55 bp, Artificial
  Synthetic oligonucleotide
cagtctgaagcaactagccaggattccctactgcaactacaccaaattttggtac

SEQ ID NO: 349560 - DNA, 55 bp, Artificial
  Synthetic oligonucleotide
cagtctgaagctcgagctattactctttcgattccttatactagcgagtttcagg

SEQ ID NO: 349561 - DNA, 57 bp, Artificial
  Synthetic oligonucleotide
cagtctgaggctgtgaagtcatccagattcggtagactagaaaacacttgtgcactc

SEQ ID NO: 349562 - DNA, 57 bp, Artificial
  Synthetic oligonucleotide
cagtctgattggcacgtatgcccgggggtccggtgagggtgaacgccacaccaacga

SEQ ID NO: 349563 - DNA, 60 bp, Artificial
  Synthetic oligonucleotide
cagtctgccaaaccctggcacaccaatagttggcttgatgaagacagaaggtagcagtta

SEQ ID NO: 349564 - DNA, 51 bp, Artificial
  Synthetic oligonucleotide
cagtctgctccccggtttgatccctcccggggttatgtggtcgatgtttcg

SEQ ID NO: 349565 - DNA, 57 bp, Artificial
  Synthetic oligonucleotide
cagtctggcgcttacgaggactcctgggaagacgggcttaatccatttgacgaagac

SEQ ID NO: 349566 - DNA, 55 bp, Artificial
  Synthetic oligonucleotide
cagtctggtgtgcaggtgctgagcgcaacctctcacaaactcttaaaacaaacac

SEQ ID NO: 349567 - DNA, 58 bp, Artificial
  Synthetic oligonucleotide
cagtctgtcccaagaggtaggggtacaccctgccacacgcgattgaatcggcgaggga

SEQ ID NO: 349568 - DNA, 55 bp, Artificial
  Synthetic oligonucleotide
cagtctgtgcatgctagcagtaatatccacaatacgctatcgaaccctgcaaaga

SEQ ID NO: 349569 - DNA, 51 bp, Artificial
  Synthetic oligonucleotide
cagtctgtgttattttggttgtgtgtaaagtccactgtaactgtgaactct

SEQ ID NO: 349570 - DNA, 60 bp, Artificial
  Synthetic oligonucleotide
cagtctgttggtgcgccgagcataaactttgggaatggcgtggttcattctcaggcggta

SEQ ID NO: 349571 - DNA, 60 bp, Artificial
  Synthetic oligonucleotide
cagtcttaaaggagtgaggcccctcattctgaaggattgcagtgtcgctgggtggcttct

SEQ ID NO: 349572 - DNA, 51 bp, Artificial
  Synthetic oligonucleotide
cagtcttagatatgaaggatgcctattatagcatcccattagatccagact

SEQ ID NO: 349573 - DNA, 52 bp, Artificial
  Synthetic oligonucleotide
cagtcttagcgcttctaaccccgggaatgagggctctatacctagatactta

SEQ ID NO: 349574 - DNA, 55 bp, Artificial
  Synthetic oligonucleotide
cagtcttatctacagtctggatcggaccagaattaagaagtggatacgatgattt

SEQ ID NO: 349575 - DNA, 55 bp, Artificial
  Synthetic oligonucleotide
cagtcttcaattgctatacctgcaagctgcactggtgaaagtaatgttacacagt

SEQ ID NO: 349576 - DNA, 56 bp, Artificial
  Synthetic oligonucleotide
cagtcttcatgggacaccaaaggttcactggcccccattttgcccaccacctatcc

SEQ ID NO: 349577 - DNA, 57 bp, Artificial
  Synthetic oligonucleotide
cagtctttaattcgaaatgcctaagcgggatccctcatggcgcccaatggtggggac

SEQ ID NO: 349578 - DNA, 55 bp, Artificial
  Synthetic oligonucleotide
cagtctttacaacaaagacatccaagacccagtaaattttctaagaccagtcaaa

SEQ ID NO: 349579 - DNA, 51 bp, Artificial
  Synthetic oligonucleotide
cagtcttttgtaactaagtataacaaaggagagctgggtttagaagaaccc

SEQ ID NO: 349580 - DNA, 55 bp, Artificial
  Synthetic oligonucleotide
cagtgaaacaccaggctttattgtagatttactatcctcatccaaagaccctagg

SEQ ID NO: 349581 - DNA, 59 bp, Artificial
  Synthetic oligonucleotide
cagtgaaaccaagttgagctaaggcctcaatgccagaaatcccctctattgtcattaaa

SEQ ID NO: 349582 - DNA, 60 bp, Artificial
  Synthetic oligonucleotide
cagtgaaactgacggttagatctaatcgtccgttcagaacatactcagatgtggcagccg

SEQ ID NO: 349583 - DNA, 55 bp, Artificial
  Synthetic oligonucleotide
cagtgaaatacccgaactcacgttacttaactatgaacaaggaacacatagcagt

SEQ ID NO: 349584 - DNA, 60 bp, Artificial
  Synthetic oligonucleotide
cagtgaaattagcgggcaattcctctctctgccctgttagtggatgggctatatacagta

SEQ ID NO: 349585 - DNA, 55 bp, Artificial
  Synthetic oligonucleotide
cagtgaaattgagcagtggatacaaagacataatcttatggtttagcttcggggc

SEQ ID NO: 349586 - DNA, 60 bp, Artificial
  Synthetic oligonucleotide
cagtgaacaatgcagtgataatgccagcacatggtccagccaaaaacatggagtatgatg

SEQ ID NO: 349587 - DNA, 60 bp, Artificial
  Synthetic oligonucleotide
cagtgaacacactacatacagacaatggcagcaatttcacaagtactacggttaaggccg

SEQ ID NO: 349588 - DNA, 60 bp, Artificial
  Synthetic oligonucleotide
cagtgaacattacatctaggcagattaaagacgtaagagcccagatgaatgaggacatag

SEQ ID NO: 349589 - DNA, 55 bp, Artificial
  Synthetic oligonucleotide
cagtgaagaaaataatattagaccctataagttcaggttctgaaggtgctgcagc

SEQ ID NO: 349590 - DNA, 55 bp, Artificial
  Synthetic oligonucleotide
cagtgaagacctgtgatgaggagtgtagcccagtcaacttcaagaaatgttgccc

SEQ ID NO: 349591 - DNA, 60 bp, Artificial
  Synthetic oligonucleotide
cagtgaagactgagtatggtgaatttactatgctgggcatatacgacaggtgggccgttt

SEQ ID NO: 349592 - DNA, 55 bp, Artificial
  Synthetic oligonucleotide
cagtgaaggccaacttgctatccgtagaggaagcttgtaacctgacgcccccgca

SEQ ID NO: 349593 - DNA, 55 bp, Artificial
  Synthetic oligonucleotide
cagtgaaggtatcaggaaaaggtggtcatagtggttcaactttcaaatgttgcca

SEQ ID NO: 349594 - DNA, 59 bp, Artificial
  Synthetic oligonucleotide
cagtgaagtgtgccctgataacaacattgtagtaaaatctaactttacaacaatgccaa

SEQ ID NO: 349595 - DNA, 60 bp, Artificial
  Synthetic oligonucleotide
cagtgaatgcactgcaaagccaaagtggaactcaggcgccgtacaccagtgctctcttct

SEQ ID NO: 349596 - DNA, 60 bp, Artificial
  Synthetic oligonucleotide
cagtgacaatataactgtgtctcagtcctttgaagcggatcagccacaaatcaaggaaat

SEQ ID NO: 349597 - DNA, 55 bp, Artificial
  Synthetic oligonucleotide
cagtgacaatatgggatctcatggggtgtacattgatttcaacggcctagatgac

SEQ ID NO: 349598 - DNA, 60 bp, Artificial
  Synthetic oligonucleotide
cagtgacagaaagaaagatgttccctctacctgagactccactaagtgaggtgcattcaa

SEQ ID NO: 349599 - DNA, 56 bp, Artificial
  Synthetic oligonucleotide
cagtgacataaaggtagtaccaaggaggaaagcaaaaatcattagggactatggga

SEQ ID NO: 349600 - DNA, 55 bp, Artificial
  Synthetic oligonucleotide
cagtgacatcgattgccctaccggaatagtgtaaactatttgggctgtgtccgcc

SEQ ID NO: 349601 - DNA, 60 bp, Artificial
  Synthetic oligonucleotide
cagtgaccagataatattctgggaggcagtccgccgagaaaatgcgctgctgcattatgc

SEQ ID NO: 349602 - DNA, 58 bp, Artificial
  Synthetic oligonucleotide
cagtgaccaggataaaaattggacatgcacgagtgtaacacaaaacaacacgacttta

SEQ ID NO: 349603 - DNA, 55 bp, Artificial
  Synthetic oligonucleotide
cagtgaccggcgtgatgttaatcagcgtcaggaaagcggcggactgctggatctg

SEQ ID NO: 349604 - DNA, 54 bp, Artificial
  Synthetic oligonucleotide
cagtgaccttttcgaaggttacatgtccgaccataggtggtacaccaccggccg

SEQ ID NO: 349605 - DNA, 60 bp, Artificial
  Synthetic oligonucleotide
cagtgacgcattcagttgagctcctagagagtcaaaaggaggagagattgtgcagagtat

SEQ ID NO: 349606 - DNA, 59 bp, Artificial
  Synthetic oligonucleotide
cagtgacgcgcttggagttccgttccctcccctggtgcaaaaagatgagattctatgtc

SEQ ID NO: 349607 - DNA, 59 bp, Artificial
  Synthetic oligonucleotide
cagtgacgtcacagccgccattttaagtagctgacgtcaaggattgacgtagaggttaa

SEQ ID NO: 349608 - DNA, 60 bp, Artificial
  Synthetic oligonucleotide
cagtgacgtcacgagcgaagcggataatattctcatttacgtcgctagctacaatgaagt

SEQ ID NO: 349609 - DNA, 60 bp, Artificial
  Synthetic oligonucleotide
cagtgactacgaagggagattgatccaaaacagcataaccatagagagaatggttctctc

SEQ ID NO: 349610 - DNA, 55 bp, Artificial
  Synthetic oligonucleotide
cagtgactaggcgggaaccattgccagctgagtggttgaatcccatagctatggc

SEQ ID NO: 349611 - DNA, 60 bp, Artificial
  Synthetic oligonucleotide
cagtgactcgaatgatggactacattatatatagatctttgttaatttctgtagcattat

SEQ ID NO: 349612 - DNA, 60 bp, Artificial
  Synthetic oligonucleotide
cagtgacttggagtcatggggaagtgaatgattcgacaacgatagaaccagtactagatg

SEQ ID NO: 349613 - DNA, 56 bp, Artificial
  Synthetic oligonucleotide
cagtgagaccaagagtgggtgtaaaacctcaagacaatgaacccgaagttgtgtta

SEQ ID NO: 349614 - DNA, 55 bp, Artificial
  Synthetic oligonucleotide
cagtgagctttgtgtcctttatagctgcatttaagaggttcctaagaggagttcc

SEQ ID NO: 349615 - DNA, 55 bp, Artificial
  Synthetic oligonucleotide
cagtgaggcccaaaattcagatgtggtccgcctattcgaatatgcagcactcgaa

SEQ ID NO: 349616 - DNA, 60 bp, Artificial
  Synthetic oligonucleotide
cagtgaggcgttcggtgttgatcttgtttcggaggagagcaatctcagcgaccatcttga

SEQ ID NO: 349617 - DNA, 60 bp, Artificial
  Synthetic oligonucleotide
cagtgagggctagggaagcgcacatacaaatgaaggccgcagcattgaaatcagcccaac

SEQ ID NO: 349618 - DNA, 60 bp, Artificial
  Synthetic oligonucleotide
cagtgagtatcaatgttcagcataatgagcaatgcacggggtcttgccccagcagtatac

SEQ ID NO: 349619 - DNA, 60 bp, Artificial
  Synthetic oligonucleotide
cagtgagtatctctagtggagcagacctgagctctggattaagtcactattcgcaggcct

SEQ ID NO: 349620 - DNA, 55 bp, Artificial
  Synthetic oligonucleotide
cagtgagtttggtagtttcatttacagtacagtaggaaccctggttagcttgagc

SEQ ID NO: 349621 - DNA, 55 bp, Artificial
  Synthetic oligonucleotide
cagtgataacctggtcggcggagctacaaatctgcttgtcaggggaaactggatg

SEQ ID NO: 349622 - DNA, 53 bp, Artificial
  Synthetic oligonucleotide
cagtgatagctatggtggaccaggtgataagataaccatctgcaatggttcaa

SEQ ID NO: 349623 - DNA, 52 bp, Artificial
  Synthetic oligonucleotide
cagtgatcccacccacccaaccgcaccctcattactagcacactagtacacg

SEQ ID NO: 349624 - DNA, 55 bp, Artificial
  Synthetic oligonucleotide
cagtgatccgagcgagctctgacatatgtgcctcgatattgcttgtcgaaaatgg

SEQ ID NO: 349625 - DNA, 60 bp, Artificial
  Synthetic oligonucleotide
cagtgatcgactgtaatacatgtgtcacccagacagtcgacttcagcttggaccctacct

SEQ ID NO: 349626 - DNA, 55 bp, Artificial
  Synthetic oligonucleotide
cagtgatctcgacgtgcggcttgtacatttcgagcgcactcgtccaatcggcgtg

SEQ ID NO: 349627 - DNA, 60 bp, Artificial
  Synthetic oligonucleotide
cagtgatctgcgagtgctacgatgctgggtgcgcctggtacgagctgacaccggctgaaa

SEQ ID NO: 349628 - DNA, 51 bp, Artificial
  Synthetic oligonucleotide
cagtgatgaactgggactacaacccggaccctgacgccccgaaaaggggta

SEQ ID NO: 349629 - DNA, 55 bp, Artificial
  Synthetic oligonucleotide
cagtgatgacagcaaccggtatcaggctggagaagttacctgtggttagggccca

SEQ ID NO: 349630 - DNA, 55 bp, Artificial
  Synthetic oligonucleotide
cagtgatgccaatactcgcaaatcaaagcgtaagtaaggcttgcaacattgcttc

SEQ ID NO: 349631 - DNA, 60 bp, Artificial
  Synthetic oligonucleotide
cagtgatgctctcccccgtgcgtgaatccattttctgcgcaggcaatatgtacgaaaatt

SEQ ID NO: 349632 - DNA, 55 bp, Artificial
  Synthetic oligonucleotide
cagtgatgggctgcgagttgcggtgtcccaaacacttaaaacccgccccacagcc

SEQ ID NO: 349633 - DNA, 55 bp, Artificial
  Synthetic oligonucleotide
cagtgatggtgcgattgagacagtccggacattgggtggagctgcggggagggta

SEQ ID NO: 349634 - DNA, 53 bp, Artificial
  Synthetic oligonucleotide
cagtgatgtcaaagtctatgctatattgaataaactggggctcaaagaaaagg

SEQ ID NO: 349635 - DNA, 56 bp, Artificial
  Synthetic oligonucleotide
cagtgatgttactcgtggaactgggttgacccatcgagtgggtaagaggttttgtg

SEQ ID NO: 349636 - DNA, 59 bp, Artificial
  Synthetic oligonucleotide
cagtgatgttagcttaccaaggcgcttcactagaaggcaactggagtacatttggaggg

SEQ ID NO: 349637 - DNA, 60 bp, Artificial
  Synthetic oligonucleotide
cagtgatgttctcccctgtgcgtgaatccatgatctgcgcacttgatatggtaaaatatg

SEQ ID NO: 349638 - DNA, 55 bp, Artificial
  Synthetic oligonucleotide
cagtgattccgcctcgaggtcttcaaaccgtcaagacttcgcgcaagatcctggt

SEQ ID NO: 349639 - DNA, 57 bp, Artificial
  Synthetic oligonucleotide
cagtgcaaaaaatagccctagaaagcatagtaatatggggaaagactcctaaattca

SEQ ID NO: 349640 - DNA, 59 bp, Artificial
  Synthetic oligonucleotide
cagtgcaaaaagtatcccaagaatgtatagtgatatggggaaggattcctaaattcaga

SEQ ID NO: 349641 - DNA, 60 bp, Artificial
  Synthetic oligonucleotide
cagtgcaaactacgagtatttcgatagcttcgaccagattatcctgatgttcgacatgga

SEQ ID NO: 349642 - DNA, 55 bp, Artificial
  Synthetic oligonucleotide
cagtgcaacatttaacactcgccgcataccgctgaatcgtgatggatcctcaaga

SEQ ID NO: 349643 - DNA, 53 bp, Artificial
  Synthetic oligonucleotide
cagtgcaactacaagaattaagaaattcgattgagtggctggagcgattaggc

SEQ ID NO: 349644 - DNA, 60 bp, Artificial
  Synthetic oligonucleotide
cagtgcaagtgcgggaacccatcggaatgctcctctcgtgatacccggagatagatgggt

SEQ ID NO: 349645 - DNA, 55 bp, Artificial
  Synthetic oligonucleotide
cagtgcaatgcgagcaagttccatcagggtactctacttgttgttgctataccag

SEQ ID NO: 349646 - DNA, 55 bp, Artificial
  Synthetic oligonucleotide
cagtgcaatggtcgttggtgaatcaaatgagatctacaccttagacgacttacct

SEQ ID NO: 349647 - DNA, 55 bp, Artificial
  Synthetic oligonucleotide
cagtgcacatagtttcctgaagagggttggaaaactgccaattccacaggatcag

SEQ ID NO: 349648 - DNA, 60 bp, Artificial
  Synthetic oligonucleotide
cagtgcacatatccgagcgattgttaatgaatacgggcgctaaccgctcacgaaggaatg

SEQ ID NO: 349649 - DNA, 55 bp, Artificial
  Synthetic oligonucleotide
cagtgcacccagtagaggaatgtggtgagatggcaacagttgtgacacaagccct

SEQ ID NO: 349650 - DNA, 56 bp, Artificial
  Synthetic oligonucleotide
cagtgcacggtttcagtgtaggggagaatttttctattgtaacctcacaagaatgt

SEQ ID NO: 349651 - DNA, 60 bp, Artificial
  Synthetic oligonucleotide
cagtgcacgtaataggaggtacaacttatctcctagagcgtgagctcttaaaatgtaata

SEQ ID NO: 349652 - DNA, 55 bp, Artificial
  Synthetic oligonucleotide
cagtgcagacctactgtgccccactgattgtttcaggaagcatcccgaagctacc

SEQ ID NO: 349653 - DNA, 53 bp, Artificial
  Synthetic oligonucleotide
cagtgcagcccctccgagccgctgcggtgctgccagatcacgcacccgcaggg

SEQ ID NO: 349654 - DNA, 60 bp, Artificial
  Synthetic oligonucleotide
cagtgcaggatcataccctctgctctggagctatgccatgggagtaggggtggaacttga

SEQ ID NO: 349655 - DNA, 55 bp, Artificial
  Synthetic oligonucleotide
cagtgcaggcagggctggtattgagcggtgacacagtggatcagattgggtcaat

SEQ ID NO: 349656 - DNA, 60 bp, Artificial
  Synthetic oligonucleotide
cagtgcagggggattagtatcatcttggcctgatcctgtctgattcctggatacacggct

SEQ ID NO: 349657 - DNA, 60 bp, Artificial
  Synthetic oligonucleotide
cagtgcagtagtaatgcctgcgcatggccctgccaaaagcatggagtatgatgctgttgc

SEQ ID NO: 349658 - DNA, 60 bp, Artificial
  Synthetic oligonucleotide
cagtgcagttgtggaccccggaccacgtgttgtgtttggttatgacaatcctgcatatga

SEQ ID NO: 349659 - DNA, 53 bp, Artificial
  Synthetic oligonucleotide
cagtgcatatggccagggactggacgactacagtgcagtgtgtattgccaacc

SEQ ID NO: 349660 - DNA, 55 bp, Artificial
  Synthetic oligonucleotide
cagtgcatcatcgggttcattaccacttactactatcccagctgtaacaccactg

SEQ ID NO: 349661 - DNA, 58 bp, Artificial
  Synthetic oligonucleotide
cagtgcatgcctatgaagagaaaaggtataacatctacggtggcttgccatccgggtg

SEQ ID NO: 349662 - DNA, 55 bp, Artificial
  Synthetic oligonucleotide
cagtgcatggagacaatccggaacgggacctataacaggaggaagtataaagagg

SEQ ID NO: 349663 - DNA, 57 bp, Artificial
  Synthetic oligonucleotide
cagtgcatttatcttacgtcaaaatggctcttttcaattctcgtgagattatcaacc

SEQ ID NO: 349664 - DNA, 58 bp, Artificial
  Synthetic oligonucleotide
cagtgccaaatctccagtcactcaccaaccttttgtcctccaacttgtcctggttatc

SEQ ID NO: 349665 - DNA, 59 bp, Artificial
  Synthetic oligonucleotide
cagtgccacagaaaagggttgtgagatcgatagtgttccagtcaaatgcaaacaagggt

SEQ ID NO: 349666 - DNA, 60 bp, Artificial
  Synthetic oligonucleotide
cagtgccacgtctgctctgcggtcctatttagtcctctagatctagatgcccacgttgcc

SEQ ID NO: 349667 - DNA, 55 bp, Artificial
  Synthetic oligonucleotide
cagtgccagcactgttggcttcagagagagaactctcccgggacacacggtgagc

SEQ ID NO: 349668 - DNA, 57 bp, Artificial
  Synthetic oligonucleotide
cagtgccagccgtggacggtaatatttacggcgttagttgggatggatcctcatccg

SEQ ID NO: 349669 - DNA, 55 bp, Artificial
  Synthetic oligonucleotide
cagtgccctgattaaggattaattggttggattccggaaccctaatcctgccctg

SEQ ID NO: 349670 - DNA, 55 bp, Artificial
  Synthetic oligonucleotide
cagtgccgaagaggtgcactatgtcggatgtggtgacctacgtaccctaatgcag

SEQ ID NO: 349671 - DNA, 51 bp, Artificial
  Synthetic oligonucleotide
cagtgccgctgaaaagtccatctgccgaagcttgtggctatagcgatagag

SEQ ID NO: 349672 - DNA, 50 bp, Artificial
  Synthetic oligonucleotide
cagtgccgtcgctcatgaaatgcacgagctcaaccgtctaaaggaaagcg

SEQ ID NO: 349673 - DNA, 55 bp, Artificial
  Synthetic oligonucleotide
cagtgccgttgtgtgggacaccaaccagctctttaagcgtggctaggcagtccgc

SEQ ID NO: 349674 - DNA, 60 bp, Artificial
  Synthetic oligonucleotide
cagtgcctggtgtgccagtggtaataaccagcaatggtgacattacctttgttgtaagtg

SEQ ID NO: 349675 - DNA, 55 bp, Artificial
  Synthetic oligonucleotide
cagtgcctgttaattcagcaagtggtaaattcccagtgatttctaaatcaggttc

SEQ ID NO: 349676 - DNA, 60 bp, Artificial
  Synthetic oligonucleotide
cagtgccttcctgataatggtgattattcagagttagcattaaatgtcacagaggccttt

SEQ ID NO: 349677 - DNA, 55 bp, Artificial
  Synthetic oligonucleotide
cagtgcgagaacaagctagccattcagcatggatgtatgcggcgttgcaagggaa

SEQ ID NO: 349678 - DNA, 60 bp, Artificial
  Synthetic oligonucleotide
cagtgcgcaagctagtggaggcagtcaatcatgcttggggtgtcgagaagattagatatg

SEQ ID NO: 349679 - DNA, 60 bp, Artificial
  Synthetic oligonucleotide
cagtgcgcgcagtaccagttgacaaatcagctttgtatttgacttatactcaggctgaga

SEQ ID NO: 349680 - DNA, 55 bp, Artificial
  Synthetic oligonucleotide
cagtgcggactacctcgcgcactacacggccactatcgcaaacctgcacccgtac

SEQ ID NO: 349681 - DNA, 55 bp, Artificial
  Synthetic oligonucleotide
cagtgcgtattatcacaacaatcgtacgacccagacctagagggtgcacgtaggg

SEQ ID NO: 349682 - DNA, 55 bp, Artificial
  Synthetic oligonucleotide
cagtgcgtccgtctgtgtctgcgcaggaacgtggaggggatgtgctgtctctgct

SEQ ID NO: 349683 - DNA, 55 bp, Artificial
  Synthetic oligonucleotide
cagtgcgttgataactggaagtcatttgccggtgtgaggttcggttgcttcatgc

SEQ ID NO: 349684 - DNA, 56 bp, Artificial
  Synthetic oligonucleotide
cagtgctaagcgagacagacgccaatactcgtgccgagatgtgcaacgctatgtat

SEQ ID NO: 349685 - DNA, 60 bp, Artificial
  Synthetic oligonucleotide
cagtgctcagagatctggagtgtgtgagtagttacctgttagatatgtacaaagtcgatg

SEQ ID NO: 349686 - DNA, 57 bp, Artificial
  Synthetic oligonucleotide
cagtgctgaattggctcacataatcctttgctttaaaactattttcgtaggctaccg

SEQ ID NO: 349687 - DNA, 55 bp, Artificial
  Synthetic oligonucleotide
cagtgcttaatcaagatgagtatttcacgcagcgagataaccgatattggcggac

SEQ ID NO: 349688 - DNA, 58 bp, Artificial
  Synthetic oligonucleotide
cagtgctttcctcaggttgtagttgaactggacttggattgttattacgtcgtgatcc

SEQ ID NO: 349689 - DNA, 56 bp, Artificial
  Synthetic oligonucleotide
cagtggaaatgaaagtgaaggggacacagaggaattggcaatccttgtggaaaggg

SEQ ID NO: 349690 - DNA, 55 bp, Artificial
  Synthetic oligonucleotide
cagtggaaatttcacagttaacttacaatgcggatactattggcgattgggttcc

SEQ ID NO: 349691 - DNA, 60 bp, Artificial
  Synthetic oligonucleotide
cagtggaagtctgacagccgcctggcactgagacacatagccagggagagacatccggag

SEQ ID NO: 349692 - DNA, 55 bp, Artificial
  Synthetic oligonucleotide
cagtggaatcagatctttcagcaggactgaattgatcgcaccttcttcttgggga

SEQ ID NO: 349693 - DNA, 55 bp, Artificial
  Synthetic oligonucleotide
cagtggaatgctcgttcaaagaaaccttgtggaagtccctcatctgagcattgtg

SEQ ID NO: 349694 - DNA, 55 bp, Artificial
  Synthetic oligonucleotide
cagtggaatgggcttctgaaacagtattacgattagcgggctttacttatacatt

SEQ ID NO: 349695 - DNA, 54 bp, Artificial
  Synthetic oligonucleotide
cagtggaattattccagatgctcttttatatcgagttaggactgttgattccta

SEQ ID NO: 349696 - DNA, 60 bp, Artificial
  Synthetic oligonucleotide
cagtggacaaccatctacagttgttgacaatacgcttatggttgtcattgctatgtatta

SEQ ID NO: 349697 - DNA, 55 bp, Artificial
  Synthetic oligonucleotide
cagtggacgacaaaaggtcttgatgtagtatgggccggtgacgataaacgtcgag

SEQ ID NO: 349698 - DNA, 55 bp, Artificial
  Synthetic oligonucleotide
cagtggactgtatgcgtccttccgacaccactgattctaccgtggacgctctcct

SEQ ID NO: 349699 - DNA, 55 bp, Artificial
  Synthetic oligonucleotide
cagtggagacgtcctctcacgaggggtaggactttgaagttgaagatgtatgatg

SEQ ID NO: 349700 - DNA, 60 bp, Artificial
  Synthetic oligonucleotide
cagtggagagttgggattttaacatgattaaactgactgctgaaactagttgtgcttcac

SEQ ID NO: 349701 - DNA, 50 bp, Artificial
  Synthetic oligonucleotide
cagtggagatgactgtgttgtgaaacccttagatgacaggtttgcaagcg

SEQ ID NO: 349702 - DNA, 60 bp, Artificial
  Synthetic oligonucleotide
cagtggagctcctagagagcaagaaggagagtagattctgcagagtcttgaataaagcgc

SEQ ID NO: 349703 - DNA, 55 bp, Artificial
  Synthetic oligonucleotide
cagtggaggaagattaggagtgctttctccgaaactgaagacgtcacaccactgg

SEQ ID NO: 349704 - DNA, 60 bp, Artificial
  Synthetic oligonucleotide
cagtggaggagtgcgggtttagtgatagagttcgatcgatcacactagggaactcaacca

SEQ ID NO: 349705 - DNA, 55 bp, Artificial
  Synthetic oligonucleotide
cagtggaggtgcggtgttccgtcggcgtgtctctcggcggcgactctgatatatg

SEQ ID NO: 349706 - DNA, 59 bp, Artificial
  Synthetic oligonucleotide
cagtggaggttcttacagttttgcgttacctgtaggcaatcatccggtgatgagtggtg

SEQ ID NO: 349707 - DNA, 54 bp, Artificial
  Synthetic oligonucleotide
cagtggagtatgtgagctgggggtgtatttatgtgcaaagtacagaggacgaac

SEQ ID NO: 349708 - DNA, 59 bp, Artificial
  Synthetic oligonucleotide
cagtggagttgtgcaacccagaaaagtgcagaccagccaactataaaaagtgttgtcca

SEQ ID NO: 349709 - DNA, 57 bp, Artificial
  Synthetic oligonucleotide
cagtggatagagttcttatgattgtactatttagtcaccatttactatgggaagttt

SEQ ID NO: 349710 - DNA, 60 bp, Artificial
  Synthetic oligonucleotide
cagtggatcactacgcagggcaactggctactcttgacattagcactgaacccatgaaac

SEQ ID NO: 349711 - DNA, 60 bp, Artificial
  Synthetic oligonucleotide
cagtggatcatcagaaactgggaaactgttaaaattcagtggtctcagaatcctacaatg

SEQ ID NO: 349712 - DNA, 60 bp, Artificial
  Synthetic oligonucleotide
cagtggatgccaggaccatcgcttggatacattggaaacacacaaagcgcggctactcgg

SEQ ID NO: 349713 - DNA, 53 bp, Artificial
  Synthetic oligonucleotide
cagtggatggacaccacaaaagccatgcaaattgaggccctcaattcctccta

SEQ ID NO: 349714 - DNA, 50 bp, Artificial
  Synthetic oligonucleotide
cagtggatgggctgtctacagtaaggacaacggtataagaatcggttcca

SEQ ID NO: 349715 - DNA, 55 bp, Artificial
  Synthetic oligonucleotide
cagtggcaatcggggtgtaacccttcagtgatagcagatgtagaggggcctcctg

SEQ ID NO: 349716 - DNA, 60 bp, Artificial
  Synthetic oligonucleotide
cagtggcaatgagagtgatggggatacagaggaattgtcaacactggttgacatggggga

SEQ ID NO: 349717 - DNA, 55 bp, Artificial
  Synthetic oligonucleotide
cagtggcagcccaccactaacctcagactgacggtgaaaggactgataccagtgg

SEQ ID NO: 349718 - DNA, 55 bp, Artificial
  Synthetic oligonucleotide
cagtggccaaataaatgacttagggtcattcagtcaaatgtgtgggaatgttcag

SEQ ID NO: 349719 - DNA, 51 bp, Artificial
  Synthetic oligonucleotide
cagtggccaagcatgatggatctagcgacgtgttgttacttactttctctg

SEQ ID NO: 349720 - DNA, 60 bp, Artificial
  Synthetic oligonucleotide
cagtggcgtacatgacgtattccgatacccattcctcaagttcttgtggaactagatcga

SEQ ID NO: 349721 - DNA, 60 bp, Artificial
  Synthetic oligonucleotide
cagtggcgtcgtaccagataacagatgaatacgacgcatacttggacatggttgacgggt

SEQ ID NO: 349722 - DNA, 58 bp, Artificial
  Synthetic oligonucleotide
cagtggctagagtgactatccaacctatagccgcttggtggagggtttgttatatacc

SEQ ID NO: 349723 - DNA, 55 bp, Artificial
  Synthetic oligonucleotide
cagtggctagtgggctgagtgcattgttgagaaatgaatttcttggtctggtccc

SEQ ID NO: 349724 - DNA, 60 bp, Artificial
  Synthetic oligonucleotide
cagtggctatgatgaagagaaactccagtacagtgaagacagagtatggggagttcacca

SEQ ID NO: 349725 - DNA, 59 bp, Artificial
  Synthetic oligonucleotide
cagtggcttaagcgcaagttcacacctagggcagcggagcacctgaggaacctgggtcg

SEQ ID NO: 349726 - DNA, 60 bp, Artificial
  Synthetic oligonucleotide
cagtgggatcgagaactagagacctcggttaatcgcgactgacagtatgctgggtagtat

SEQ ID NO: 349727 - DNA, 55 bp, Artificial
  Synthetic oligonucleotide
cagtgggcaaccgtcaactgtcgtggacaacacacttatggtgttattagctctc

SEQ ID NO: 349728 - DNA, 60 bp, Artificial
  Synthetic oligonucleotide
cagtgggccacaaatttgtttgaaacaattggcagatactcttgggaatctgctcagagg

SEQ ID NO: 349729 - DNA, 51 bp, Artificial
  Synthetic oligonucleotide
cagtgggcgggtcttccggaagcatacaggtcgctacccgtatcgcggcgg

SEQ ID NO: 349730 - DNA, 58 bp, Artificial
  Synthetic oligonucleotide
cagtggggagtttctaaagtgatgagcattgatctaaataggttgttagccttaaaca

SEQ ID NO: 349731 - DNA, 55 bp, Artificial
  Synthetic oligonucleotide
cagtggggcggacacgggaccgaacaattcaaaaccagcatcggagaccctagca

SEQ ID NO: 349732 - DNA, 55 bp, Artificial
  Synthetic oligonucleotide
cagtgggtacgacttttgcgggatcgactgtggcgcgaggactccatcacgcgca

SEQ ID NO: 349733 - DNA, 58 bp, Artificial
  Synthetic oligonucleotide
cagtgggtctcggttgcattactaatccaagcgttatttttctatgccccatggtata

SEQ ID NO: 349734 - DNA, 59 bp, Artificial
  Synthetic oligonucleotide
cagtggtacgaataagagattctcgaaatcggctcattcccgtatgctgaataaccaaa

SEQ ID NO: 349735 - DNA, 60 bp, Artificial
  Synthetic oligonucleotide
cagtggtagaggaagccactacagaagagaacaacagtctattacaccccatttgccagc

SEQ ID NO: 349736 - DNA, 55 bp, Artificial
  Synthetic oligonucleotide
cagtggtagtggagcacttgtacagtcattttttagactatgggttcgaggtcgt

SEQ ID NO: 349737 - DNA, 54 bp, Artificial
  Synthetic oligonucleotide
cagtggtcccactaaagactgataccacagattccggggctgcatattacgggg

SEQ ID NO: 349738 - DNA, 60 bp, Artificial
  Synthetic oligonucleotide
cagtggtcctcccatgttgtattttgaattatcaggtactggtagctggtcattatacag

SEQ ID NO: 349739 - DNA, 57 bp, Artificial
  Synthetic oligonucleotide
cagtggtcggttcccatgatactgtttgacgacgcggtcaggttgataccggttgaa

SEQ ID NO: 349740 - DNA, 55 bp, Artificial
  Synthetic oligonucleotide
cagtggtctcaggaccccacgatgttgtacaataagatggagtttgaaccgttcc

SEQ ID NO: 349741 - DNA, 53 bp, Artificial
  Synthetic oligonucleotide
cagtggtctttgacggatgggacgcggacggacaacccgtcgggcgtccttgg

SEQ ID NO: 349742 - DNA, 54 bp, Artificial
  Synthetic oligonucleotide
cagtggtgaatagcatttgcaacaccacgggggttgaaaaacccaagtttcttc

SEQ ID NO: 349743 - DNA, 55 bp, Artificial
  Synthetic oligonucleotide
cagtggtgagcaggaacaccatccttggggtaaacgggtactttatcaaataagc

SEQ ID NO: 349744 - DNA, 60 bp, Artificial
  Synthetic oligonucleotide
cagtggtgcgctgttgagagacctggaggctgttgaaccgaaatacagacatccagctaa

SEQ ID NO: 349745 - DNA, 60 bp, Artificial
  Synthetic oligonucleotide
cagtggtgggataactactggcaagtgacatggatcccagagtgggacttcgtatctacc

SEQ ID NO: 349746 - DNA, 57 bp, Artificial
  Synthetic oligonucleotide
cagtggtgggattgttacagttgtaaccaacgttcccttgactggattcgccatcgc

SEQ ID NO: 349747 - DNA, 55 bp, Artificial
  Synthetic oligonucleotide
cagtggtgggttatggggtatggccacactatttaagtgcaaaagatgccactgc

SEQ ID NO: 349748 - DNA, 55 bp, Artificial
  Synthetic oligonucleotide
cagtggtgttagtagtcaggccagcagtagcaatggtagcatctcgaatgccctc

SEQ ID NO: 349749 - DNA, 55 bp, Artificial
  Synthetic oligonucleotide
cagtggttataatgtgtatgctgacagaaataaatctgatgctgatcgtgcgact

SEQ ID NO: 349750 - DNA, 60 bp, Artificial
  Synthetic oligonucleotide
cagtggttcaaggacatgcaacagcgtgctctcgctgtgaaagataaaggcctcttttcc

SEQ ID NO: 349751 - DNA, 55 bp, Artificial
  Synthetic oligonucleotide
cagtggttctatgatggataccccacatttggtacacaccctgcatctggtgata

SEQ ID NO: 349752 - DNA, 60 bp, Artificial
  Synthetic oligonucleotide
cagtggttggatagaccttgcgtcgatagccctcactgttggcactgcgtcgtccctata

SEQ ID NO: 349753 - DNA, 60 bp, Artificial
  Synthetic oligonucleotide
cagtggtttcagcacagatctagctatagccacagtgtcggcagctttgctaacctggac

SEQ ID NO: 349754 - DNA, 60 bp, Artificial
  Synthetic oligonucleotide
cagtggtttgagaatatcaaagacgttgtgaaaaagtgggcaaatactatgcatgagaag

SEQ ID NO: 349755 - DNA, 57 bp, Artificial
  Synthetic oligonucleotide
cagtggttttaggtgcaccgcaagcatctacgcaggcgaccgatactatggacgtgc

SEQ ID NO: 349756 - DNA, 55 bp, Artificial
  Synthetic oligonucleotide
cagtgtaatcagacagggataggatattctgtgtcggaatggtatggaatctgca

SEQ ID NO: 349757 - DNA, 57 bp, Artificial
  Synthetic oligonucleotide
cagtgtaattcaagaatcctgtgacaaacattattgggatgccttaaggtttaggta

SEQ ID NO: 349758 - DNA, 54 bp, Artificial
  Synthetic oligonucleotide
cagtgtacaacctaccttctcagtacaaaggaatcttcccttcgaaagggcaac

SEQ ID NO: 349759 - DNA, 55 bp, Artificial
  Synthetic oligonucleotide
cagtgtaccatcacaagcctcttcttgctgccagcaccgagttcgaacacagccc

SEQ ID NO: 349760 - DNA, 57 bp, Artificial
  Synthetic oligonucleotide
cagtgtacggttactgcgcgacacaacgcacatttcgcagacggccatgccacaagg

SEQ ID NO: 349761 - DNA, 58 bp, Artificial
  Synthetic oligonucleotide
cagtgtactaatacacctgtacaggctggtgactgcccgcccttagaacttattacca

SEQ ID NO: 349762 - DNA, 60 bp, Artificial
  Synthetic oligonucleotide
cagtgtagcattttctgacaatgagcaacagattgattatggcagcaagatttcatttta

SEQ ID NO: 349763 - DNA, 55 bp, Artificial
  Synthetic oligonucleotide
cagtgtaggaccctcgggaagcaatctacccttggatcgtggaacgatccgatgc

SEQ ID NO: 349764 - DNA, 60 bp, Artificial
  Synthetic oligonucleotide
cagtgtaggtgcttaaattgttacatactaatatggagaaccagcaggccagttggatag

SEQ ID NO: 349765 - DNA, 60 bp, Artificial
  Synthetic oligonucleotide
cagtgtatcaatccagtcaagtagcctgaccacactagacagcttgggtcgcagtaggac

SEQ ID NO: 349766 - DNA, 58 bp, Artificial
  Synthetic oligonucleotide
cagtgtatggacgggatggagtggataaaatacaagcctatggacttaagagtcgagg

SEQ ID NO: 349767 - DNA, 60 bp, Artificial
  Synthetic oligonucleotide
cagtgtcaacaggatatatgactatttagcctaatgattgaactagatatttctacagta

SEQ ID NO: 349768 - DNA, 55 bp, Artificial
  Synthetic oligonucleotide
cagtgtcacaatatataattctatcgtaacacgcttgtgccgctgttatagttgt

SEQ ID NO: 349769 - DNA, 55 bp, Artificial
  Synthetic oligonucleotide
cagtgtcagtagagtcgttatggtaaacagtgtactgagggccaaagccagtacc

SEQ ID NO: 349770 - DNA, 51 bp, Artificial
  Synthetic oligonucleotide
cagtgtccatactgcatgacaatgacagaatccacagagagtgctcttcag

SEQ ID NO: 349771 - DNA, 58 bp, Artificial
  Synthetic oligonucleotide
cagtgtcccctagaaacgctccaggtgaaatactatggagcgcgcccttgggccctga

SEQ ID NO: 349772 - DNA, 60 bp, Artificial
  Synthetic oligonucleotide
cagtgtccctcccaagaatcttggcacccacgagttgcagacacgccaagaaagtgtcta

SEQ ID NO: 349773 - DNA, 55 bp, Artificial
  Synthetic oligonucleotide
cagtgtccggggtcgctgtaggcttcgggctcggttttaggccttccagactaca

SEQ ID NO: 349774 - DNA, 55 bp, Artificial
  Synthetic oligonucleotide
cagtgtcgatatattgcctagatatcaaatggcgaggtttccgaggaaatcgatc

SEQ ID NO: 349775 - DNA, 55 bp, Artificial
  Synthetic oligonucleotide
cagtgtcggcgcaaccctcgaggcactgttccaaggccctccaatatacagggag

SEQ ID NO: 349776 - DNA, 57 bp, Artificial
  Synthetic oligonucleotide
cagtgtctaggatggcaccttcccaattgtagactgggagtctcctaggaaggtaat

SEQ ID NO: 349777 - DNA, 51 bp, Artificial
  Synthetic oligonucleotide
cagtgtctcacacgacaccgttcagtgctacatcttatgactcctgatgcc

SEQ ID NO: 349778 - DNA, 55 bp, Artificial
  Synthetic oligonucleotide
cagtgtcttaaagggcaggaatcactgagatataggccgctgcagtgggacactg

SEQ ID NO: 349779 - DNA, 55 bp, Artificial
  Synthetic oligonucleotide
cagtgtctttggcactgatggattagaggctcttgatttgaacactagcgcagga

SEQ ID NO: 349780 - DNA, 52 bp, Artificial
  Synthetic oligonucleotide
cagtgtgaacatttcgtgcgaaggctttcaatccgttgaccacattggtggt

SEQ ID NO: 349781 - DNA, 60 bp, Artificial
  Synthetic oligonucleotide
cagtgtgcactcaattatgacgggagagtcttacggtgaatcggtcaaacaggcagtact

SEQ ID NO: 349782 - DNA, 60 bp, Artificial
  Synthetic oligonucleotide
cagtgtgcccacacgcgggtggcgcagtatatacattccgtaagatggctttatctctga

SEQ ID NO: 349783 - DNA, 55 bp, Artificial
  Synthetic oligonucleotide
cagtgtgctctacaatgcaggagagcagttggttcaacaaaccgccattgttgga

SEQ ID NO: 349784 - DNA, 58 bp, Artificial
  Synthetic oligonucleotide
cagtgtgcttcaggtgtcagtagctaatttcagggaccatgtctggccgatgattcaa

SEQ ID NO: 349785 - DNA, 58 bp, Artificial
  Synthetic oligonucleotide
cagtgtggaaaggaccagcgcgactcatctggaaaggagaaggcgcggtggtaattaa

SEQ ID NO: 349786 - DNA, 60 bp, Artificial
  Synthetic oligonucleotide
cagtgtggcagtgcccggtgtgcctgtggttataaccagcaatggtgacattacatttgt

SEQ ID NO: 349787 - DNA, 55 bp, Artificial
  Synthetic oligonucleotide
cagtgtggcgcccatactgaggtgtccaattgggactgtattcctatttagagga

SEQ ID NO: 349788 - DNA, 55 bp, Artificial
  Synthetic oligonucleotide
cagtgtggctgcgccaccgcttctattttacagtgagggtagccctccgtgcttt

SEQ ID NO: 349789 - DNA, 60 bp, Artificial
  Synthetic oligonucleotide
cagtgtgggttgcttggaattattacaggaccacctcaatgtgatcaatttctcgagttc

SEQ ID NO: 349790 - DNA, 55 bp, Artificial
  Synthetic oligonucleotide
cagtgtggtttaactgtcttgaacaagtgctcatcaaattagggttcaaacatgc

SEQ ID NO: 349791 - DNA, 55 bp, Artificial
  Synthetic oligonucleotide
cagtgtgttagatttcccgaggcatggctttccaaggtaccagtaggactttaac

SEQ ID NO: 349792 - DNA, 55 bp, Artificial
  Synthetic oligonucleotide
cagtgttaagcgcctgggcgtaagcatcattagctgtctgtggacctcctcgtgc

SEQ ID NO: 349793 - DNA, 55 bp, Artificial
  Synthetic oligonucleotide
cagtgttaagtcgaaattgattttaacgtctctccatttatgagctcatggtcct

SEQ ID NO: 349794 - DNA, 60 bp, Artificial
  Synthetic oligonucleotide
cagtgttacacgagcgacgatttgtcgacaggcgattcaacaatcgtcaagtccatcccc

SEQ ID NO: 349795 - DNA, 57 bp, Artificial
  Synthetic oligonucleotide
cagtgttagttctccctaaagacggaaacaacgggagttgcaatgagacagtcatta

SEQ ID NO: 349796 - DNA, 60 bp, Artificial
  Synthetic oligonucleotide
cagtgttcaatactgctagcgattatgtcaatggacagtataaaattggatttagcgaag

SEQ ID NO: 349797 - DNA, 57 bp, Artificial
  Synthetic oligonucleotide
cagtgttccaccctgaaacacgtaatgccgagctacccaggattttagtggaccaca

SEQ ID NO: 349798 - DNA, 58 bp, Artificial
  Synthetic oligonucleotide
cagtgttccggtgttatctgttccgtaccagccggctacaattccattcagcgtgctt

SEQ ID NO: 349799 - DNA, 59 bp, Artificial
  Synthetic oligonucleotide
cagtgttcgacaatgactgccggtggatacgtcgcaggcttcgtaaaagacccagccga

SEQ ID NO: 349800 - DNA, 53 bp, Artificial
  Synthetic oligonucleotide
cagtgttcgcaaggtcgtaacgagcaattccgggacgggaccgactactttgg

SEQ ID NO: 349801 - DNA, 51 bp, Artificial
  Synthetic oligonucleotide
cagtgttgcacacgggaagtcccagctcaatacctaacctacacgtctacg

SEQ ID NO: 349802 - DNA, 55 bp, Artificial
  Synthetic oligonucleotide
cagtgttggttctccctggaaatggaaataatgggagctgcaatgagacagtcat

SEQ ID NO: 349803 - DNA, 55 bp, Artificial
  Synthetic oligonucleotide
cagtgttgtaacctggaccctgaggcccgcaaggtaataaccgcgctcacggaga

SEQ ID NO: 349804 - DNA, 55 bp, Artificial
  Synthetic oligonucleotide
cagtgttgtgaattacatcctggttgattacctcgctgcttgccagcagtgtgag

SEQ ID NO: 349805 - DNA, 55 bp, Artificial
  Synthetic oligonucleotide
cagtgttgttatccgaacgaaacccgtgtaatgcgtacaacggtacttcagtatg

SEQ ID NO: 349806 - DNA, 55 bp, Artificial
  Synthetic oligonucleotide
cagtgtttgtgggtttggtgtgtttgttatgaagtccgacaatgcaaaggttaca

SEQ ID NO: 349807 - DNA, 59 bp, Artificial
  Synthetic oligonucleotide
cagttaaaatcccctcatctgaggagcgggagcacgttatagagagatgctgtcgggcg

SEQ ID NO: 349808 - DNA, 51 bp, Artificial
  Synthetic oligonucleotide
cagttaaacagcatgtggggaaaagccagtttgtgatcaaaagagtcttaa

SEQ ID NO: 349809 - DNA, 52 bp, Artificial
  Synthetic oligonucleotide
cagttaaacatgatgaccatctacttcgtgattcagaattagctggattgtt

SEQ ID NO: 349810 - DNA, 53 bp, Artificial
  Synthetic oligonucleotide
cagttaaacatgggttcacaagtgtctactcagcgatccggctcccacgagaa

SEQ ID NO: 349811 - DNA, 50 bp, Artificial
  Synthetic oligonucleotide
cagttaaaccatgtgatggtgtatactgtggtatggcgtaaaacatcgga

SEQ ID NO: 349812 - DNA, 56 bp, Artificial
  Synthetic oligonucleotide
cagttaaaccgtggcaatacaaacagggaagacaaaaggcccgcaatgtctgacat

SEQ ID NO: 349813 - DNA, 55 bp, Artificial
  Synthetic oligonucleotide
cagttaaacggaagtatgcgggataatcaccggaagtaatcattcgttcggcaca

SEQ ID NO: 349814 - DNA, 53 bp, Artificial
  Synthetic oligonucleotide
cagttaaagatcaagaaggtataacaaacaaaaatagacccgaagatattagt

SEQ ID NO: 349815 - DNA, 59 bp, Artificial
  Synthetic oligonucleotide
cagttaaagtagacggtcaacaagtgattagttttcattggcagatagatgttgcgtta

SEQ ID NO: 349816 - DNA, 50 bp, Artificial
  Synthetic oligonucleotide
cagttaaataagacgggtagaagaggtagacctagcttcttcaaattcga

SEQ ID NO: 349817 - DNA, 60 bp, Artificial
  Synthetic oligonucleotide
cagttaaatgcaggcagggttattgcctgagaatcactcaggaagggaggggccatgtaa

SEQ ID NO: 349818 - DNA, 57 bp, Artificial
  Synthetic oligonucleotide
cagttaaccaaatcaatacgtgtgctggcaacttgaaagctatcgtcgggaaaatct

SEQ ID NO: 349819 - DNA, 58 bp, Artificial
  Synthetic oligonucleotide
cagttaacccctctctgcattaccttaacttgtaagaacatcaccaataacatctcca

SEQ ID NO: 349820 - DNA, 54 bp, Artificial
  Synthetic oligonucleotide
cagttaacgccatgtcttcgaaccagggcaaacggtggacaagtttcgaaccgc

SEQ ID NO: 349821 - DNA, 59 bp, Artificial
  Synthetic oligonucleotide
cagttaactctgcagaagccagcactggtgcaggcgggggagggagcaaccctacaaaa

SEQ ID NO: 349822 - DNA, 60 bp, Artificial
  Synthetic oligonucleotide
cagttaacttcctggccgattcgacaatggaatgtcgaccacgcagtgggcaagcagtac

SEQ ID NO: 349823 - DNA, 55 bp, Artificial
  Synthetic oligonucleotide
cagttaagcaggattatcgagaccgttttcaggtcatgagacgatggtacgtagg

SEQ ID NO: 349824 - DNA, 55 bp, Artificial
  Synthetic oligonucleotide
cagttaaggccgcctgttggtgggcggggataaagcaggaatttggcattcccta

SEQ ID NO: 349825 - DNA, 54 bp, Artificial
  Synthetic oligonucleotide
cagttaaggttgaggttcaggacgagagtgccaaccaactcaaaaaggtcttta

SEQ ID NO: 349826 - DNA, 60 bp, Artificial
  Synthetic oligonucleotide
cagttaagtcatggcatagctgatattcatctctatgtgactctatatagttgaaggcac

SEQ ID NO: 349827 - DNA, 55 bp, Artificial
  Synthetic oligonucleotide
cagttaagtctcttgcaggaggaaacaattggcactgggaggtcgctcgaggaaa

SEQ ID NO: 349828 - DNA, 55 bp, Artificial
  Synthetic oligonucleotide
cagttaatcccaatgataagcaaatgcagaacgaaagaagggaggcggaaaacaa

SEQ ID NO: 349829 - DNA, 55 bp, Artificial
  Synthetic oligonucleotide
cagttaatccgggaccattcgcgcagactgggtacgctccggttaactggggaca

SEQ ID NO: 349830 - DNA, 55 bp, Artificial
  Synthetic oligonucleotide
cagttaatcgaacagacatacgctccagatactcttggttacgatcttatacgag

SEQ ID NO: 349831 - DNA, 55 bp, Artificial
  Synthetic oligonucleotide
cagttaatggtgtaaataactttagctacaatggaggatcactgccaactgactt

SEQ ID NO: 349832 - DNA, 51 bp, Artificial
  Synthetic oligonucleotide
cagttaatgtagtcactggctcccaatatgtcttaggaatcatccactctc

SEQ ID NO: 349833 - DNA, 60 bp, Artificial
  Synthetic oligonucleotide
cagttaatgtggaggtatatggaacagccgcagttcaagtcaatccgtcgtcgacgtatg

SEQ ID NO: 349834 - DNA, 53 bp, Artificial
  Synthetic oligonucleotide
cagttaattcgcccacgacttgaaaaatgtagcccttaaccaattggcggccc

SEQ ID NO: 349835 - DNA, 50 bp, Artificial
  Synthetic oligonucleotide
cagttacaagggccaccattcaatgtgagcccgacacttcaaatgcgtgg

SEQ ID NO: 349836 - DNA, 55 bp, Artificial
  Synthetic oligonucleotide
cagttacatggagtttctagccgccctacaggctaccacctgcttctccgacact

SEQ ID NO: 349837 - DNA, 55 bp, Artificial
  Synthetic oligonucleotide
cagttaccgaaatacaggattacaggggttcagaaaattcaatgcagtaaacctg

SEQ ID NO: 349838 - DNA, 54 bp, Artificial
  Synthetic oligonucleotide
cagttacctccgacccgctagacatcttggacgaatacttgggcggccctaacc

SEQ ID NO: 349839 - DNA, 60 bp, Artificial
  Synthetic oligonucleotide
cagttacctgaggaggccgttacgcagaaagcgattggtagtgagtctgaggttatgagc

SEQ ID NO: 349840 - DNA, 60 bp, Artificial
  Synthetic oligonucleotide
cagttacgacgcgctctaaccactgcaacaataactctaataccagatgcagataaattc

SEQ ID NO: 349841 - DNA, 51 bp, Artificial
  Synthetic oligonucleotide
cagttacggtattggggcgaatgtgtttaccccctaaagccctagtttcta

SEQ ID NO: 349842 - DNA, 55 bp, Artificial
  Synthetic oligonucleotide
cagttacggttggctctcataaaattgcagacggttttctagttcgcaagtgtgc

SEQ ID NO: 349843 - DNA, 55 bp, Artificial
  Synthetic oligonucleotide
cagttactagagtattggaaaagtaatccatcagtgataccggacaacgtcgacc

SEQ ID NO: 349844 - DNA, 52 bp, Artificial
  Synthetic oligonucleotide
cagttactctctgaaggatactcaccagatacggttggttacgatctaatac

SEQ ID NO: 349845 - DNA, 60 bp, Artificial
  Synthetic oligonucleotide
cagttactttcatatggagatgttaccaggttcttatctaataatgctatggtattatat

SEQ ID NO: 349846 - DNA, 60 bp, Artificial
  Synthetic oligonucleotide
cagttagaaagcaatggcagatcaatggatgtatggtacaatgcatacctaacaggaaag

SEQ ID NO: 349847 - DNA, 55 bp, Artificial
  Synthetic oligonucleotide
cagttagacaagaatggtaactttgtttggggagagcgtggcaggcattcaaagc

SEQ ID NO: 349848 - DNA, 60 bp, Artificial
  Synthetic oligonucleotide
cagttagagacaacgttagggcagtaaggaatgtaggacccagtgatatgtatgtccatg

SEQ ID NO: 349849 - DNA, 56 bp, Artificial
  Synthetic oligonucleotide
cagttagattccgaaagtccctttgagctttgtaaaatggttcagtgggcctatga

SEQ ID NO: 349850 - DNA, 55 bp, Artificial
  Synthetic oligonucleotide
cagttagcaggtgttcgagttgtgagacagaaggatgtaacgacattactagccg

SEQ ID NO: 349851 - DNA, 55 bp, Artificial
  Synthetic oligonucleotide
cagttagccagaacactcagagcatatcctcattgggtgacagaatcaatgctgt

SEQ ID NO: 349852 - DNA, 58 bp, Artificial
  Synthetic oligonucleotide
cagttagcgaacgctatattcaagctcacataccaaaacaaagtggtcaaagttcaac

SEQ ID NO: 349853 - DNA, 60 bp, Artificial
  Synthetic oligonucleotide
cagttaggccaggactttattgacgacacgatgaaaggtcaagggctgagtctcgcgcaa

SEQ ID NO: 349854 - DNA, 59 bp, Artificial
  Synthetic oligonucleotide
cagttaggcgaattgagagaagaatttaattcgctgtcacaagaaatagccgtttctca

SEQ ID NO: 349855 - DNA, 55 bp, Artificial
  Synthetic oligonucleotide
cagttaggcgtcggtgcagtgctacgcgataggttgcgtttatggaagattgatc

SEQ ID NO: 349856 - DNA, 55 bp, Artificial
  Synthetic oligonucleotide
cagttagggacatggccatcactcttggatgtggcaagcgcatgctatctgctga

SEQ ID NO: 349857 - DNA, 54 bp, Artificial
  Synthetic oligonucleotide
cagttaggtccctatgaaatttgccataccagaaatgcctctgaattgattgat

SEQ ID NO: 349858 - DNA, 57 bp, Artificial
  Synthetic oligonucleotide
cagttagtagccacctgataggtggtctcccggaagtcagaacctacgacagtcagg

SEQ ID NO: 349859 - DNA, 55 bp, Artificial
  Synthetic oligonucleotide
cagttatacaggattcagccatcagtcaaggggttggccagatttcctggacaga

SEQ ID NO: 349860 - DNA, 55 bp, Artificial
  Synthetic oligonucleotide
cagttatacaggttggtggttcagacgtacttgacataacagctgatccaacgac

SEQ ID NO: 349861 - DNA, 56 bp, Artificial
  Synthetic oligonucleotide
cagttatactttaaccaaactccgccacagtttctgcgataatttagaaagagcgc

SEQ ID NO: 349862 - DNA, 55 bp, Artificial
  Synthetic oligonucleotide
cagttatagattgtacattaagactccggcttgcttgttaccactcagtgattac

SEQ ID NO: 349863 - DNA, 60 bp, Artificial
  Synthetic oligonucleotide
cagttatagtagtcgctgtgatgttgctagcaaagagagatccgactactgtccccttgg

SEQ ID NO: 349864 - DNA, 51 bp, Artificial
  Synthetic oligonucleotide
cagttatataaagttgggaaagtcccgataaatttaggaaatgcggaatct

SEQ ID NO: 349865 - DNA, 60 bp, Artificial
  Synthetic oligonucleotide
cagttatcagggcgcgtaattatgtcgaagcgaccaggagatatcatcatttccactcca

SEQ ID NO: 349866 - DNA, 58 bp, Artificial
  Synthetic oligonucleotide
cagttatccacaaagtagtgaggcttatctacacgacgtatagaggcagatgcgttac

SEQ ID NO: 349867 - DNA, 55 bp, Artificial
  Synthetic oligonucleotide
cagttatccgacaatcgtttcctattagatgggaagctgtgtcagtgaaaggagg

SEQ ID NO: 349868 - DNA, 52 bp, Artificial
  Synthetic oligonucleotide
cagttatctaccaaaagcactcccagtttaagttcagtttcgatgctgacta

SEQ ID NO: 349869 - DNA, 57 bp, Artificial
  Synthetic oligonucleotide
cagttatctgttatgatctatcttgtaatacgactttttgtaaaccaacagtttata

SEQ ID NO: 349870 - DNA, 54 bp, Artificial
  Synthetic oligonucleotide
cagttatgatccggcttgggcttcacaatttggggttgttactttaaggaccta

SEQ ID NO: 349871 - DNA, 60 bp, Artificial
  Synthetic oligonucleotide
cagttatgcacaggagtgaagactgttgattatgattccggcatatctgacgttgaataa

SEQ ID NO: 349872 - DNA, 55 bp, Artificial
  Synthetic oligonucleotide
cagttatggcacgcgctgcgttcctattcaagaccgttggattcggtgggctgca

SEQ ID NO: 349873 - DNA, 55 bp, Artificial
  Synthetic oligonucleotide
cagttatgtcagacaacacaacaccatctagtagtagtggtatagacaaatatgg

SEQ ID NO: 349874 - DNA, 55 bp, Artificial
  Synthetic oligonucleotide
cagttatgtcttttgaggtatgacaaactcgttctcaagccggctaacagctatc

SEQ ID NO: 349875 - DNA, 50 bp, Artificial
  Synthetic oligonucleotide
cagttattgacagtgtagtggctgacgctcgcaactatgctcgacgtaag

SEQ ID NO: 349876 - DNA, 55 bp, Artificial
  Synthetic oligonucleotide
cagttattgccaagtcaacaacttggtgtaacaccatcattgataaggtgcgtgc

SEQ ID NO: 349877 - DNA, 55 bp, Artificial
  Synthetic oligonucleotide
cagttattgtcctgctgcaactttccatcggctcatagacagcaggtaccatctt

SEQ ID NO: 349878 - DNA, 60 bp, Artificial
  Synthetic oligonucleotide
cagttcaaaacgcagctctcgccgagctcatggttcagtcctccccgtttcagacgatcc

SEQ ID NO: 349879 - DNA, 50 bp, Artificial
  Synthetic oligonucleotide
cagttcaacagtcacagggggtcaatatgcttctaaggaacaggcgttgg

SEQ ID NO: 349880 - DNA, 56 bp, Artificial
  Synthetic oligonucleotide
cagttcaagacattggtgctcgagtgagagatcctttcactcaacaacctgcatca

SEQ ID NO: 349881 - DNA, 60 bp, Artificial
  Synthetic oligonucleotide
cagttcaagagcaaacaccgtattgaaccagtatgtatgctaattcacggcactccaggc

SEQ ID NO: 349882 - DNA, 55 bp, Artificial
  Synthetic oligonucleotide
cagttcaatagcagcggagggaaaggcaccctacatttgttcgatggcactggag

SEQ ID NO: 349883 - DNA, 55 bp, Artificial
  Synthetic oligonucleotide
cagttcaatcagcacccattggtcaagggaagacaattgaggcataccgggccag

SEQ ID NO: 349884 - DNA, 55 bp, Artificial
  Synthetic oligonucleotide
cagttcaatgcagacaaatatggtatgaaacttacgtttcagaacggtctctctg

SEQ ID NO: 349885 - DNA, 60 bp, Artificial
  Synthetic oligonucleotide
cagttcaatggcgtggaggcgcggtctgaccagatcgactcgagtggcatgaccgcccta

SEQ ID NO: 349886 - DNA, 54 bp, Artificial
  Synthetic oligonucleotide
cagttcacaacagggagtatgaactctacgactactacaactcaaactatcgtg

SEQ ID NO: 349887 - DNA, 50 bp, Artificial
  Synthetic oligonucleotide
cagttcacacagttagttcaagacatacaggaagacttggaagattattg

SEQ ID NO: 349888 - DNA, 55 bp, Artificial
  Synthetic oligonucleotide
cagttcacccagaaagagtgcctggagcttaatgaagagtcagggcactgctcgc

SEQ ID NO: 349889 - DNA, 57 bp, Artificial
  Synthetic oligonucleotide
cagttcacgattgtaatacgagttgtcaaacacccaagggtgctataaacaccagcc

SEQ ID NO: 349890 - DNA, 60 bp, Artificial
  Synthetic oligonucleotide
cagttcagacaagtagttattgatggagtgttaaaccaagtcttgaatgataacataaga

SEQ ID NO: 349891 - DNA, 54 bp, Artificial
  Synthetic oligonucleotide
cagttcagacatggccttttacggtcttggacggacgtgttttgctagcacaga

SEQ ID NO: 349892 - DNA, 55 bp, Artificial
  Synthetic oligonucleotide
cagttcagagacatctttccacaaaccgacaggtggatcagccatagagatggca

SEQ ID NO: 349893 - DNA, 60 bp, Artificial
  Synthetic oligonucleotide
cagttcataattgcgacacaaggtgccagacccctcatggggccttgaacagtagcctcc

SEQ ID NO: 349894 - DNA, 55 bp, Artificial
  Synthetic oligonucleotide
cagttccaataggatcttgcgttagtaaatgccacaccgacaggggctcagtctc

SEQ ID NO: 349895 - DNA, 55 bp, Artificial
  Synthetic oligonucleotide
cagttccactccattttgagcgttaaatctatctcagcactcaccaggattgcaa

SEQ ID NO: 349896 - DNA, 55 bp, Artificial
  Synthetic oligonucleotide
cagttccagaaatagccacaagacctaaagtgaatggacaaggaggtagaatgga

SEQ ID NO: 349897 - DNA, 59 bp, Artificial
  Synthetic oligonucleotide
cagttccagccaacgccgactgactggtccgtcctactggctcaaccagctttccaggc

SEQ ID NO: 349898 - DNA, 55 bp, Artificial
  Synthetic oligonucleotide
cagttcccaataagccagtgctgagttcggaacgagcggagataaatcagtgcat

SEQ ID NO: 349899 - DNA, 55 bp, Artificial
  Synthetic oligonucleotide
cagttcctctagggaggatgctctacacaccaccatattccttgctgtaccgaca

SEQ ID NO: 349900 - DNA, 56 bp, Artificial
  Synthetic oligonucleotide
cagttcctcttacagccgatgtcatggctcacttaaatgtaatgaatcctaatatc

SEQ ID NO: 349901 - DNA, 55 bp, Artificial
  Synthetic oligonucleotide
cagttcctggctcggaaaggtacaggtcaaacatcaaggcaaacacaaccaaacc

SEQ ID NO: 349902 - DNA, 52 bp, Artificial
  Synthetic oligonucleotide
cagttccttatggggactggtcggggtcctaggttggacctctccggagagg

SEQ ID NO: 349903 - DNA, 55 bp, Artificial
  Synthetic oligonucleotide
cagttcgacgacgagcccgacagcaaaacgccggctcaggtcggtttcatggcct

SEQ ID NO: 349904 - DNA, 59 bp, Artificial
  Synthetic oligonucleotide
cagttcgacgcgtggattaagacaggagagttgcgaatccgcattgagatgggcgcgta

SEQ ID NO: 349905 - DNA, 55 bp, Artificial
  Synthetic oligonucleotide
cagttcgcattagaccaacaagttctaaaggacagtaattattatgctcctgagg

SEQ ID NO: 349906 - DNA, 60 bp, Artificial
  Synthetic oligonucleotide
cagttcgcgtcatctgacgctcttgctattcaccagactacgcattctattggttctaat

SEQ ID NO: 349907 - DNA, 55 bp, Artificial
  Synthetic oligonucleotide
cagttcgctaaggatctccccggatacatcgaagactacaatgaggatgtctttc

SEQ ID NO: 349908 - DNA, 60 bp, Artificial
  Synthetic oligonucleotide
cagttcggcacaacctacgtgctggagctccctacagatcacaagggtatctacgggcag

SEQ ID NO: 349909 - DNA, 55 bp, Artificial
  Synthetic oligonucleotide
cagttcgggaccatgccaagtctgacactggcatgtctgacaaaacaggggcagg

SEQ ID NO: 349910 - DNA, 55 bp, Artificial
  Synthetic oligonucleotide
cagttcgggagtaccgatatgatgagttaacgattatttggtatggagagactgg

SEQ ID NO: 349911 - DNA, 55 bp, Artificial
  Synthetic oligonucleotide
cagttcgggcgagacggagaagtactccgcgaacgaggggtgaatcactggcacg

SEQ ID NO: 349912 - DNA, 54 bp, Artificial
  Synthetic oligonucleotide
cagttcggtgttcacaataattcccttcgaaatctgaggcggggacttattgag

SEQ ID NO: 349913 - DNA, 58 bp, Artificial
  Synthetic oligonucleotide
cagttcgtatcgacatttatcgtgcctcggacaaaaattgaagcacttatgttagttg

SEQ ID NO: 349914 - DNA, 56 bp, Artificial
  Synthetic oligonucleotide
cagttcgtatctaagacccttataattacttctaatagggagcctcgtgattggta

SEQ ID NO: 349915 - DNA, 60 bp, Artificial
  Synthetic oligonucleotide
cagttcgtcaggaatatgctataccagtagggccagtatttccaccaggtatgaattgga

SEQ ID NO: 349916 - DNA, 55 bp, Artificial
  Synthetic oligonucleotide
cagttcgtggacatcggaagttgaaaatattatggcggagccatgtcaccgaagg

SEQ ID NO: 349917 - DNA, 60 bp, Artificial
  Synthetic oligonucleotide
cagttcgttaattggtagtggcttgataactggcaaccctatactatatgactcacagac

SEQ ID NO: 349918 - DNA, 55 bp, Artificial
  Synthetic oligonucleotide
cagttcgtttaattgggccatagacatggtaatgttggactcagccctatgggcc

SEQ ID NO: 349919 - DNA, 55 bp, Artificial
  Synthetic oligonucleotide
cagttctacaaaccaacataagtttgagttacgcctccgttctgaagaagacgca

SEQ ID NO: 349920 - DNA, 55 bp, Artificial
  Synthetic oligonucleotide
cagttctacaatttacaagacatacctctctataaggaagggtaagagcgacggc

SEQ ID NO: 349921 - DNA, 55 bp, Artificial
  Synthetic oligonucleotide
cagttctaggagtctcaatcctgaacctcgggcaaaagaggtacactaaaaccac

SEQ ID NO: 349922 - DNA, 60 bp, Artificial
  Synthetic oligonucleotide
cagttctcaagaccatctcctattggttatcttggtctcctctcacagaggactagagac

SEQ ID NO: 349923 - DNA, 50 bp, Artificial
  Synthetic oligonucleotide
cagttctcaatctattaagaattggagtgctcagtcaaggcgtgagaatc

SEQ ID NO: 349924 - DNA, 53 bp, Artificial
  Synthetic oligonucleotide
cagttctccttgaactaccgaagtatattaagggtttagtacaatacgtagtg

SEQ ID NO: 349925 - DNA, 58 bp, Artificial
  Synthetic oligonucleotide
cagttctcgagcttccgcctacacttccgacattaagaatagtagaactgggaagctc

SEQ ID NO: 349926 - DNA, 57 bp, Artificial
  Synthetic oligonucleotide
cagttctcgagtggaccatatctagttaaagacacaatcaaacttaaacaagaaaga

SEQ ID NO: 349927 - DNA, 55 bp, Artificial
  Synthetic oligonucleotide
cagttctctctaactttggcattttcggaggattggcgttaggagttggttctgc

SEQ ID NO: 349928 - DNA, 59 bp, Artificial
  Synthetic oligonucleotide
cagttctcttcgtggaactgcgttgcagaccaaactggccacgtcccgtatcattttga

SEQ ID NO: 349929 - DNA, 55 bp, Artificial
  Synthetic oligonucleotide
cagttctgacaagagtcttatccctgattagttagtaatggattacagtccttgg

SEQ ID NO: 349930 - DNA, 60 bp, Artificial
  Synthetic oligonucleotide
cagttctgcactgagctgtcatcaacagacacggacacctgaagattatgcttatcctcc

SEQ ID NO: 349931 - DNA, 55 bp, Artificial
  Synthetic oligonucleotide
cagttctgcgaggtgactaagagaataggcagggtcacaggtagcgacagtaagc

SEQ ID NO: 349932 - DNA, 60 bp, Artificial
  Synthetic oligonucleotide
cagttctgggaagagagaggtcacgaaactggaaatcctcacatgcacgggattattatg

SEQ ID NO: 349933 - DNA, 60 bp, Artificial
  Synthetic oligonucleotide
cagttctgtgttttgcagattcaggatgttgagaagtcagagcaatatcagaagggagtt

SEQ ID NO: 349934 - DNA, 60 bp, Artificial
  Synthetic oligonucleotide
cagttcttcagatttacagaaccttgactcagaccaggtatcaacaagtcaacttggtga

SEQ ID NO: 349935 - DNA, 55 bp, Artificial
  Synthetic oligonucleotide
cagttcttctcaacgtgttaggtacaggtgaagagttaccagatccactgagccc

SEQ ID NO: 349936 - DNA, 55 bp, Artificial
  Synthetic oligonucleotide
cagttgaaattaggaaacagaatatgagtgaatccatggagttgtggtctcaggg

SEQ ID NO: 349937 - DNA, 53 bp, Artificial
  Synthetic oligonucleotide
cagttgaaattcctcccgagaaaccaccaggcccttccacattcaaagggcgg

SEQ ID NO: 349938 - DNA, 55 bp, Artificial
  Synthetic oligonucleotide
cagttgaaccagtacttgatggaccatatcaaccaacgactttcaatccacccgt

SEQ ID NO: 349939 - DNA, 60 bp, Artificial
  Synthetic oligonucleotide
cagttgaagagccgtcattctcaatatcacgcacgcggataactagattgtatggcctac

SEQ ID NO: 349940 - DNA, 55 bp, Artificial
  Synthetic oligonucleotide
cagttgaaggtgaaccatcgcctatttcgcataaagataacacgcgcacggttgc

SEQ ID NO: 349941 - DNA, 60 bp, Artificial
  Synthetic oligonucleotide
cagttgaatcacttggtatgcgtaaggttaagaacttcactcttagcatcacacagtcac

SEQ ID NO: 349942 - DNA, 55 bp, Artificial
  Synthetic oligonucleotide
cagttgaatctccccgtgaggcacctgtatttagatgtacttgtcgattccttgg

SEQ ID NO: 349943 - DNA, 60 bp, Artificial
  Synthetic oligonucleotide
cagttgacagcagaatatgatagaactcaccctcctgatggtcctagaccattgccatac

SEQ ID NO: 349944 - DNA, 59 bp, Artificial
  Synthetic oligonucleotide
cagttgacccagaaatccaatgtatgggtttaatgatttatgatctgactggacaaaaa

SEQ ID NO: 349945 - DNA, 59 bp, Artificial
  Synthetic oligonucleotide
cagttgacgatcctaggttctggaacatggtgcagaaagaaagagatttacacctacaa

SEQ ID NO: 349946 - DNA, 55 bp, Artificial
  Synthetic oligonucleotide
cagttgacttatgctcttcgtgagaggtacaggaccactgaagatccgactgctg

SEQ ID NO: 349947 - DNA, 55 bp, Artificial
  Synthetic oligonucleotide
cagttgactttattgtaacctataacagaaactatcctatggtagtagacgaaaa

SEQ ID NO: 349948 - DNA, 58 bp, Artificial
  Synthetic oligonucleotide
cagttgagaaaagggaatggataggattacagccacttaacaccgcaacctatacgca

SEQ ID NO: 349949 - DNA, 55 bp, Artificial
  Synthetic oligonucleotide
cagttgagagttctacatatcagaacaactttgttccagttgttggggcaagacc

SEQ ID NO: 349950 - DNA, 58 bp, Artificial
  Synthetic oligonucleotide
cagttgaggtaaggccatatagtgacttttatataatttcaagatcacaggaatcagc

SEQ ID NO: 349951 - DNA, 50 bp, Artificial
  Synthetic oligonucleotide
cagttgagtgcggcgtagggaagcatagcgtgcgttccacctgcgtgcac

SEQ ID NO: 349952 - DNA, 59 bp, Artificial
  Synthetic oligonucleotide
cagttgataacacttcctactcggtctgtgtgggtactgcaataggtgtacaaacagta

SEQ ID NO: 349953 - DNA, 60 bp, Artificial
  Synthetic oligonucleotide
cagttgatcaatgtcactcgacattcaactagaatagctgatacacctgggcccaagatt

SEQ ID NO: 349954 - DNA, 59 bp, Artificial
  Synthetic oligonucleotide
cagttgatgacaaattgaaaaatcatttcagtgccaaccacgtaattctaatgcttaac

SEQ ID NO: 349955 - DNA, 55 bp, Artificial
  Synthetic oligonucleotide
cagttgatggaagctttgatgcaattatcaaggcaacaatttccaaccatgccag

SEQ ID NO: 349956 - DNA, 55 bp, Artificial
  Synthetic oligonucleotide
cagttgattcgggatgcatttattcagtccttctcgcgataaaaggtggtgatca

SEQ ID NO: 349957 - DNA, 56 bp, Artificial
  Synthetic oligonucleotide
cagttgattgagaaaagtagtgataagttgcaagatcatatactgtactggactgc

SEQ ID NO: 349958 - DNA, 60 bp, Artificial
  Synthetic oligonucleotide
cagttgcacctgacacgtggtccaaaacacactgatccaactgaagtccgtctgccccac

SEQ ID NO: 349959 - DNA, 60 bp, Artificial
  Synthetic oligonucleotide
cagttgcactagtgctcttcaccctgacccgaagcacgttgccacaagttggggacaata

SEQ ID NO: 349960 - DNA, 51 bp, Artificial
  Synthetic oligonucleotide
cagttgcacttagtgaaggaagtggtattggacagatttgagtccatactt

SEQ ID NO: 349961 - DNA, 60 bp, Artificial
  Synthetic oligonucleotide
cagttgcattcacccatgcaatagacctggtagatggggctaggcataccccactggtaa

SEQ ID NO: 349962 - DNA, 56 bp, Artificial
  Synthetic oligonucleotide
cagttgcccacgacggcactggaaagagggtctactacctgacccgtgaccccaca

SEQ ID NO: 349963 - DNA, 60 bp, Artificial
  Synthetic oligonucleotide
cagttgccccaaaaagaaatatggacagtcaatgacatccagaagctagtgggtgtccta

SEQ ID NO: 349964 - DNA, 60 bp, Artificial
  Synthetic oligonucleotide
cagttgccccagaaggaggtatggacagtcaatgacatccaaaagctagtgggcgtccta

SEQ ID NO: 349965 - DNA, 60 bp, Artificial
  Synthetic oligonucleotide
cagttgccctatccacttcagcagacaagatattcacccctgaacccacactcaaggaca

SEQ ID NO: 349966 - DNA, 55 bp, Artificial
  Synthetic oligonucleotide
cagttgcgacaacggagaagttggtgattacagatgttgtagatggtgtcaacca

SEQ ID NO: 349967 - DNA, 51 bp, Artificial
  Synthetic oligonucleotide
cagttgcgaggacaacctttcaatgttaaccccacattgcgcatgcgaggc

SEQ ID NO: 349968 - DNA, 55 bp, Artificial
  Synthetic oligonucleotide
cagttgcggcggcaattcctggatggggctggttgctccaaggagggtggtttgt

SEQ ID NO: 349969 - DNA, 60 bp, Artificial
  Synthetic oligonucleotide
cagttgcgtgtcagcggcctgtgagatgcgtacagaccctgttcccactctctcgcacat

SEQ ID NO: 349970 - DNA, 54 bp, Artificial
  Synthetic oligonucleotide
cagttgctctcggaaattacggaggtaccgtccggtctgaagtgcacttaccgg

SEQ ID NO: 349971 - DNA, 57 bp, Artificial
  Synthetic oligonucleotide
cagttgctgtggtcggggtttcaagtcccggaaaagccgcgaaagcattgtgcacac

SEQ ID NO: 349972 - DNA, 60 bp, Artificial
  Synthetic oligonucleotide
cagttgcttcgatggaaaggaatggatgcatgtttgcatgactgggaacgacaatgatgc

SEQ ID NO: 349973 - DNA, 57 bp, Artificial
  Synthetic oligonucleotide
cagttggaccatctgatttatatgtacactgtggagatcttatttacagaaatctgc

SEQ ID NO: 349974 - DNA, 54 bp, Artificial
  Synthetic oligonucleotide
cagttggacgttgtttgactctacctgctttttcaaccctgcgtaggaagtggt

SEQ ID NO: 349975 - DNA, 60 bp, Artificial
  Synthetic oligonucleotide
cagttggactgccagtctctctgggcccccataaattccttcatatgctttagatagtgc

SEQ ID NO: 349976 - DNA, 60 bp, Artificial
  Synthetic oligonucleotide
cagttggagaatatgagataatgttacgtgcatctaccaagcatcagaggattaagccag

SEQ ID NO: 349977 - DNA, 55 bp, Artificial
  Synthetic oligonucleotide
cagttggagggaccattttgcgcagtgatctgttggcaaatttcttgacagaagg

SEQ ID NO: 349978 - DNA, 55 bp, Artificial
  Synthetic oligonucleotide
cagttggataacgcccgtcgttcagtgctctccgctacagtcactcagatgccta

SEQ ID NO: 349979 - DNA, 59 bp, Artificial
  Synthetic oligonucleotide
cagttggatcatcaaaatactaccgaaggttcacaccagaaatagcagctagacctaaa

SEQ ID NO: 349980 - DNA, 60 bp, Artificial
  Synthetic oligonucleotide
cagttggatggtgcaccgatatatttccgtaggtctgatgtcgatctgcgcaataaccac

SEQ ID NO: 349981 - DNA, 55 bp, Artificial
  Synthetic oligonucleotide
cagttggcaagaatgctgtgtttaagttgaagccagctgatctgggcggccctag

SEQ ID NO: 349982 - DNA, 53 bp, Artificial
  Synthetic oligonucleotide
cagttggcagtaagtgtgctgaataaaaagacagctgtgaccgataactgtaa

SEQ ID NO: 349983 - DNA, 60 bp, Artificial
  Synthetic oligonucleotide
cagttggcagtccattcaggccccaagacttatcaaacctgggtggacacagtgcgtgcc

SEQ ID NO: 349984 - DNA, 60 bp, Artificial
  Synthetic oligonucleotide
cagttggccatgacgctccagttcatgaagtgctgcgaggaggtcaggatctccgagtag

SEQ ID NO: 349985 - DNA, 55 bp, Artificial
  Synthetic oligonucleotide
cagttggcctgaattttgtggttggctgattacaccaaaaggggtaatgaaagac

SEQ ID NO: 349986 - DNA, 60 bp, Artificial
  Synthetic oligonucleotide
cagttggcgtaaacttgccaaaaatgtatacatatgagaatctgccatactccaccataa

SEQ ID NO: 349987 - DNA, 60 bp, Artificial
  Synthetic oligonucleotide
cagttggctgatcctgtaacgattgattgtgtcagaactggcaacaatacaagaacaagt

SEQ ID NO: 349988 - DNA, 58 bp, Artificial
  Synthetic oligonucleotide
cagttgggcgtttgcatgcttcgcttcacgcggctcctttcaccctaagacaggtccc

SEQ ID NO: 349989 - DNA, 55 bp, Artificial
  Synthetic oligonucleotide
cagttggggacaacactcgtggtaccacactgaccattactgtaccaagtggtgg

SEQ ID NO: 349990 - DNA, 55 bp, Artificial
  Synthetic oligonucleotide
cagttgggtcatcaaagtataaccggagattcacacccgaaatagcagctagacc

SEQ ID NO: 349991 - DNA, 55 bp, Artificial
  Synthetic oligonucleotide
cagttggtctatagcgctctcctggtaccgccaagccttctcaatacctacccgg

SEQ ID NO: 349992 - DNA, 52 bp, Artificial
  Synthetic oligonucleotide
cagttggtctgctgcgtttactagtcctgctctgttagtgaaggaaagttgc

SEQ ID NO: 349993 - DNA, 55 bp, Artificial
  Synthetic oligonucleotide
cagttggtgaatcgtaccacatctgtgttactgccattaccaccctattggcaag

SEQ ID NO: 349994 - DNA, 53 bp, Artificial
  Synthetic oligonucleotide
cagttggttataggaaacaggcgaaacactgttagttatacagttccacgttt

SEQ ID NO: 349995 - DNA, 53 bp, Artificial
  Synthetic oligonucleotide
cagttggttctaaagaatgataggcggtttgtgtgtttaaacttgggcgggaa

SEQ ID NO: 349996 - DNA, 60 bp, Artificial
  Synthetic oligonucleotide
cagttgtattgtgattacaatttagtcctgatgaaatacgattcaactctagaattagat

SEQ ID NO: 349997 - DNA, 55 bp, Artificial
  Synthetic oligonucleotide
cagttgtcagatctttagaaaggccgtagtgttcaaagtttaggcccacagctga

SEQ ID NO: 349998 - DNA, 52 bp, Artificial
  Synthetic oligonucleotide
cagttgtcggttgtgtcaagaacacaacggtcggtcaacttgtatttaacgg

SEQ ID NO: 349999 - DNA, 55 bp, Artificial
  Synthetic oligonucleotide
cagttgtgaagtgaaaatgtttggtgaccaactgactgttaaatccgatggggag

SEQ ID NO: 350000 - DNA, 55 bp, Artificial
  Synthetic oligonucleotide
cagttgtgagcgtctacattacctccatcgcctctttgtctactgtcgaccgagc

SEQ ID NO: 350001 - DNA, 58 bp, Artificial
  Synthetic oligonucleotide
cagttgtgcctggctggaagcgcaagaggaaggagacgtaggcttcccagttaggcca

SEQ ID NO: 350002 - DNA, 58 bp, Artificial
  Synthetic oligonucleotide
cagttgtggttgttcagaatatttcgccaatttcgtttctgattacttaacatcaatc

SEQ ID NO: 350003 - DNA, 55 bp, Artificial
  Synthetic oligonucleotide
cagttgtgtatacgctacccaacaaattcgttctcaagccggcttacagctgatg

SEQ ID NO: 350004 - DNA, 57 bp, Artificial
  Synthetic oligonucleotide
cagttgttacctattgttaacaagcaaagctgcagcatatcaaacattgaaactgtg

SEQ ID NO: 350005 - DNA, 58 bp, Artificial
  Synthetic oligonucleotide
cagttgttccggtacctcgtgacgtcagtgtggagttgtcacggagttgtcacaactc

SEQ ID NO: 350006 - DNA, 60 bp, Artificial
  Synthetic oligonucleotide
cagttgttcctgagacgcctcgcagttcagacgtgcctgtagagcccgctcctctgcgac

SEQ ID NO: 350007 - DNA, 55 bp, Artificial
  Synthetic oligonucleotide
cagttgttcgtcttatacgttctggacacgatgtctctgttgctatttaccctaa

SEQ ID NO: 350008 - DNA, 52 bp, Artificial
  Synthetic oligonucleotide
cagttgttctactcccgccctgtcgtctcagccaatggcgaaccgactgtaa

SEQ ID NO: 350009 - DNA, 60 bp, Artificial
  Synthetic oligonucleotide
cagttgttggagcaagaccacaggtcaatggacagagtgggcggattgattttcactgga

SEQ ID NO: 350010 - DNA, 60 bp, Artificial
  Synthetic oligonucleotide
cagttgttggcgcaccattttacgatcttagtgatccggtcgtagtgtcacacacacgtg

SEQ ID NO: 350011 - DNA, 55 bp, Artificial
  Synthetic oligonucleotide
cagttgtttggcagaccatactggatacaaaaggctcagggccctaataatagtg

SEQ ID NO: 350012 - DNA, 50 bp, Artificial
  Synthetic oligonucleotide
cagtttaaacgcccccacggctcgacggacctggttgaggacccgtgttc

SEQ ID NO: 350013 - DNA, 60 bp, Artificial
  Synthetic oligonucleotide
cagtttaacaccacaagcacaccaatacctggagtgcgacctcctgcacgtgtggggctc

SEQ ID NO: 350014 - DNA, 55 bp, Artificial
  Synthetic oligonucleotide
cagtttaccaagcctgtaaggattaattgtaccagacctaacaacaatacaagag

SEQ ID NO: 350015 - DNA, 55 bp, Artificial
  Synthetic oligonucleotide
cagtttacccttgaacttcgcgaaatgcgtcctctgatggacgttcgagtcgcaa

SEQ ID NO: 350016 - DNA, 57 bp, Artificial
  Synthetic oligonucleotide
cagtttacggatagagttatcttcacaaagaacaagtcttatcctgttcatattgcg

SEQ ID NO: 350017 - DNA, 55 bp, Artificial
  Synthetic oligonucleotide
cagtttactaatgagttggtaagtattcattattatcctactttcttctatgagc

SEQ ID NO: 350018 - DNA, 56 bp, Artificial
  Synthetic oligonucleotide
cagtttactagtgccatttgttcagtggttcgtagggctttcccccactgtctggc

SEQ ID NO: 350019 - DNA, 60 bp, Artificial
  Synthetic oligonucleotide
cagtttactctctcccaccagattcagattatttggatggttacgagaatcaatattcag

SEQ ID NO: 350020 - DNA, 60 bp, Artificial
  Synthetic oligonucleotide
cagtttagcattggcccagtgcttctcatggtgttggtgggccttcactgactttaaaca

SEQ ID NO: 350021 - DNA, 51 bp, Artificial
  Synthetic oligonucleotide
cagtttagctactaagtgcccagccgatgtagtgccagagaaaaaggatcc

SEQ ID NO: 350022 - DNA, 60 bp, Artificial
  Synthetic oligonucleotide
cagtttaggactgataccccgctactgcgatacgtaaggatcggcagaacgactgagcat

SEQ ID NO: 350023 - DNA, 57 bp, Artificial
  Synthetic oligonucleotide
cagtttatactaatacattgtaatacctcgaccattgcacaggcttgtccaaaggtg

SEQ ID NO: 350024 - DNA, 58 bp, Artificial
  Synthetic oligonucleotide
cagtttataggtgcagaacgcttttaagtgagacctgagactgcgtcggaaccttaga

SEQ ID NO: 350025 - DNA, 57 bp, Artificial
  Synthetic oligonucleotide
cagtttatgggaccaaagcctaaagccatgtgtaaagttgaccccactctgtgtcac

SEQ ID NO: 350026 - DNA, 55 bp, Artificial
  Synthetic oligonucleotide
cagtttatgggatgaaagtctaaaaccatgtgtaaagttgaccccacttcgcgtc

SEQ ID NO: 350027 - DNA, 55 bp, Artificial
  Synthetic oligonucleotide
cagtttatgtatgtgccaccgggaggcccaattccaactagcgcctctagcttcg

SEQ ID NO: 350028 - DNA, 55 bp, Artificial
  Synthetic oligonucleotide
cagtttatgtgcaatgtgagcattgtgaaacgttgtataacattggtggaactgg

SEQ ID NO: 350029 - DNA, 51 bp, Artificial
  Synthetic oligonucleotide
cagtttatgttaaggaagcaattgatcgcaggcttcatttcaaggttgaag

SEQ ID NO: 350030 - DNA, 60 bp, Artificial
  Synthetic oligonucleotide
cagtttatgttacaccaggatctggacaatttatgactacagatgatttacaatctccat

SEQ ID NO: 350031 - DNA, 55 bp, Artificial
  Synthetic oligonucleotide
cagtttcaaacttagaaacgctacctgcagtaacaccgatagcttgtccaagatc

SEQ ID NO: 350032 - DNA, 55 bp, Artificial
  Synthetic oligonucleotide
cagtttcaaagttctcacaaggtgataccctagtattcctgggccctatggaagg

SEQ ID NO: 350033 - DNA, 58 bp, Artificial
  Synthetic oligonucleotide
cagtttcaatgtggcagtggaattgacgtgagttctgtggatgggagaggtcgaataa

SEQ ID NO: 350034 - DNA, 60 bp, Artificial
  Synthetic oligonucleotide
cagtttcacctttcacagcgataatgaacaagatgcacagcacgcctacccagggtcagt

SEQ ID NO: 350035 - DNA, 55 bp, Artificial
  Synthetic oligonucleotide
cagtttcagttaggtcaattggcagtaatgcaacatcgcggattagtacagccat

SEQ ID NO: 350036 - DNA, 52 bp, Artificial
  Synthetic oligonucleotide
cagtttcatgcaggcagcttgctagtgttcatggcgcctgaataccccaccc

SEQ ID NO: 350037 - DNA, 55 bp, Artificial
  Synthetic oligonucleotide
cagtttcatgctggctcgcttttagtctttatggctcctgagttttacaccgggc

SEQ ID NO: 350038 - DNA, 50 bp, Artificial
  Synthetic oligonucleotide
cagtttcctcgttgaattccactgtgcgacaccaatcccttgatgacatc

SEQ ID NO: 350039 - DNA, 60 bp, Artificial
  Synthetic oligonucleotide
cagtttcgagaatgctgacatgtcttctgagtgggtgtataaaaaactgtgtgaagcaag

SEQ ID NO: 350040 - DNA, 58 bp, Artificial
  Synthetic oligonucleotide
cagtttcggtctttgaactttgtccaaggaatgtattattcatagtgactaacatgaa

SEQ ID NO: 350041 - DNA, 55 bp, Artificial
  Synthetic oligonucleotide
cagtttctattagagcgacaagtatctccccaggacgacagctgtcgggcgtgtc

SEQ ID NO: 350042 - DNA, 55 bp, Artificial
  Synthetic oligonucleotide
cagtttctcgagtgttagtcgacgaagttgttttactacacttcggacaattatg

SEQ ID NO: 350043 - DNA, 57 bp, Artificial
  Synthetic oligonucleotide
cagtttctggatgtgctccaatgggtctttacagtgcagaatatgtatctaagatta

SEQ ID NO: 350044 - DNA, 55 bp, Artificial
  Synthetic oligonucleotide
cagtttgaacacaagatacgcagtgtgagcgctggtcgcgcactgtacattcccc

SEQ ID NO: 350045 - DNA, 51 bp, Artificial
  Synthetic oligonucleotide
cagtttgaccatgtgaacactcttcatttccttgtgagaagtaagtcgcat

SEQ ID NO: 350046 - DNA, 60 bp, Artificial
  Synthetic oligonucleotide
cagtttgactgcaatttcaggtgaccttaatgtgttcacatccataccaccaaattttga

SEQ ID NO: 350047 - DNA, 60 bp, Artificial
  Synthetic oligonucleotide
cagtttgagctgatagacaacgcgttcagtgagatagaacaacaaattggaaatgttatt

SEQ ID NO: 350048 - DNA, 57 bp, Artificial
  Synthetic oligonucleotide
cagtttgagtttgcctttgaatttggcaaaatgcgtcttttgttgaacatttgtatc

SEQ ID NO: 350049 - DNA, 55 bp, Artificial
  Synthetic oligonucleotide
cagtttgataaccctgcatttgaaggggacattagcctcgagtttgcgcgtgatg

SEQ ID NO: 350050 - DNA, 55 bp, Artificial
  Synthetic oligonucleotide
cagtttgatggcgtaggtcgcatgctcactccctcgcgtctattgcggtatcagg

SEQ ID NO: 350051 - DNA, 60 bp, Artificial
  Synthetic oligonucleotide
cagtttgcacttgggcagggaaccacgctggataacaaacactcgaatggcacaatacat

SEQ ID NO: 350052 - DNA, 59 bp, Artificial
  Synthetic oligonucleotide
cagtttgcacttgggcaggggaccacactgaacaacaaacactcaaacggcacaataca

SEQ ID NO: 350053 - DNA, 59 bp, Artificial
  Synthetic oligonucleotide
cagtttgcatatgaccataatatgttagaggagtgtgaaattgcttatgcatatgccag

SEQ ID NO: 350054 - DNA, 57 bp, Artificial
  Synthetic oligonucleotide
cagtttggcccttatctgggcaaatgttgttccgtcgatcacgtttgagtcttcgac

SEQ ID NO: 350055 - DNA, 60 bp, Artificial
  Synthetic oligonucleotide
cagtttggctggtatggtcgtcttgaccgcgccagcattgaccgccagcttctttggacc

SEQ ID NO: 350056 - DNA, 57 bp, Artificial
  Synthetic oligonucleotide
cagtttgggcccgaatttgtattggcccataatatggccttgtcctcgtacattagc

SEQ ID NO: 350057 - DNA, 60 bp, Artificial
  Synthetic oligonucleotide
cagtttgggtctttgcatgtgctccagatcgttgtccacctacagcattatatgtggccg

SEQ ID NO: 350058 - DNA, 59 bp, Artificial
  Synthetic oligonucleotide
cagtttggtactttgatcattacgacaaaggatccggagatatgtgtaccactcttatg

SEQ ID NO: 350059 - DNA, 53 bp, Artificial
  Synthetic oligonucleotide
cagtttgtcatgaatgctcagaattctgctacaatatcaaaatcgagggagca

SEQ ID NO: 350060 - DNA, 55 bp, Artificial
  Synthetic oligonucleotide
cagtttgtgaatcagtacttgccgacgcaagcgaaacaatgctagcaaatgtgac

SEQ ID NO: 350061 - DNA, 53 bp, Artificial
  Synthetic oligonucleotide
cagtttgttcatcaccaagccacgacatcacttgctaaagaccttaagctgaa

SEQ ID NO: 350062 - DNA, 55 bp, Artificial
  Synthetic oligonucleotide
cagttttaaactctcagaggaagaagaaaagcaactcaatttggagcgatcagat

SEQ ID NO: 350063 - DNA, 55 bp, Artificial
  Synthetic oligonucleotide
cagttttaaccgtttcttgggagaattcaacgccacaattagtgcctggacacta

SEQ ID NO: 350064 - DNA, 53 bp, Artificial
  Synthetic oligonucleotide
cagttttaagttggcaacgaattcttacttgggtaattccggttacatgaatg

SEQ ID NO: 350065 - DNA, 53 bp, Artificial
  Synthetic oligonucleotide
cagttttaattgtggaggggaatttttctactgtaatacatcaaaactgttta

SEQ ID NO: 350066 - DNA, 52 bp, Artificial
  Synthetic oligonucleotide
cagttttaccaccctgttgtagacctcaaactcctttagcggatgatgatct

SEQ ID NO: 350067 - DNA, 60 bp, Artificial
  Synthetic oligonucleotide
cagttttacggtgaactgcacagctagtaatttgcgtaatgccagtgggtgctgcggaaa

SEQ ID NO: 350068 - DNA, 57 bp, Artificial
  Synthetic oligonucleotide
cagttttatatacaaaagatggagattggtccgagagtaagcacacggattcggaat

SEQ ID NO: 350069 - DNA, 59 bp, Artificial
  Synthetic oligonucleotide
cagttttccaagagttattaattcagctgatggtgcaactacatggctcttcaatccag

SEQ ID NO: 350070 - DNA, 55 bp, Artificial
  Synthetic oligonucleotide
cagttttcgttgtagtccttggacaatatatttattgtcggaggtttgaatctaa

SEQ ID NO: 350071 - DNA, 60 bp, Artificial
  Synthetic oligonucleotide
cagttttcttactgtctcgttgcactgactagacacaaggtcacattccgctacgagcac

SEQ ID NO: 350072 - DNA, 55 bp, Artificial
  Synthetic oligonucleotide
cagttttgagacctgaattcgcgatccacggcgtaaatccaatgcccggcccgct

SEQ ID NO: 350073 - DNA, 52 bp, Artificial
  Synthetic oligonucleotide
cagttttgagggtccaggactagtagaggttcaggagagtgaatactacccc

SEQ ID NO: 350074 - DNA, 55 bp, Artificial
  Synthetic oligonucleotide
cagttttgcgttacctgtaggcaatcatccggtgatgagtggtggtgcagtgacc

SEQ ID NO: 350075 - DNA, 55 bp, Artificial
  Synthetic oligonucleotide
cagttttggaggaccagagccccataccagtcacaattagagagcatgctggaac

SEQ ID NO: 350076 - DNA, 52 bp, Artificial
  Synthetic oligonucleotide
cagttttggtacgccaatgctgggtctgcagtcgacaaccccatctcccagg

SEQ ID NO: 350077 - DNA, 54 bp, Artificial
  Synthetic oligonucleotide
cagtttttaggcgcaaaaagataagattctactttaaaaacgatgttgcgcaaa

SEQ ID NO: 350078 - DNA, 55 bp, Artificial
  Synthetic oligonucleotide
cagtttttcgacatttcgtttaaagtacacacccataaatcttcagaacaacatc

SEQ ID NO: 350079 - DNA, 58 bp, Artificial
  Synthetic oligonucleotide
cataaaaatgggcgtctaataatcaagatctttcgtcactccgaggctctattccaat

SEQ ID NO: 350080 - DNA, 55 bp, Artificial
  Synthetic oligonucleotide
cataaaacctggcaggccacgaagcacgagggtgccggtgctaacaaggccgagc

SEQ ID NO: 350081 - DNA, 53 bp, Artificial
  Synthetic oligonucleotide
cataaaacgccgtcggtgttcaatctcggtccgggagcaatgagacgcggggg

SEQ ID NO: 350082 - DNA, 55 bp, Artificial
  Synthetic oligonucleotide
cataaaagtatgtccactaaatacacaaactttaggaataggttgtaccaccaca

SEQ ID NO: 350083 - DNA, 57 bp, Artificial
  Synthetic oligonucleotide
cataaaagtatgtccattgaatacgcagactttaggaataggttgtattaccacaaa

SEQ ID NO: 350084 - DNA, 60 bp, Artificial
  Synthetic oligonucleotide
cataaaagtcaccttcaatccagacaaaatagcagcatggtggcctgcagtgggcactta

SEQ ID NO: 350085 - DNA, 55 bp, Artificial
  Synthetic oligonucleotide
cataaaattcaaacaattctactgaggtgatcccttggtagtcttattttgtccg

SEQ ID NO: 350086 - DNA, 55 bp, Artificial
  Synthetic oligonucleotide
cataaacaacatgaccttccgccaagtttgtgaagcttttgccccggaggcgaga

SEQ ID NO: 350087 - DNA, 51 bp, Artificial
  Synthetic oligonucleotide
cataaacaatgagacaccaggggttagatatcaatacaatgtgcttccaca

SEQ ID NO: 350088 - DNA, 55 bp, Artificial
  Synthetic oligonucleotide
cataaacatcttaggaagaaactatcttagtaagttaggagtaacactaaacatg

SEQ ID NO: 350089 - DNA, 55 bp, Artificial
  Synthetic oligonucleotide
cataaacatgcgagggatggtttgagtcgactgggatcggataaagaccgattcg

SEQ ID NO: 350090 - DNA, 60 bp, Artificial
  Synthetic oligonucleotide
cataaacattcctagtgctaacggagcaaacacctgcattgtgagggctctagacgtggg

SEQ ID NO: 350091 - DNA, 58 bp, Artificial
  Synthetic oligonucleotide
cataaaccaagtgagaaggctcattgggaatgagaattacctagactacatgacatca

SEQ ID NO: 350092 - DNA, 54 bp, Artificial
  Synthetic oligonucleotide
cataaaccgttgtccaaaactgaggtgaaggccttagtaacagaaattgccaaa

SEQ ID NO: 350093 - DNA, 60 bp, Artificial
  Synthetic oligonucleotide
cataaacgcaagctacaaaagagtatgggaactcatccgatctatatgggatcgatggat

SEQ ID NO: 350094 - DNA, 54 bp, Artificial
  Synthetic oligonucleotide
cataaacgccacgtctggccgataagtgttgcgcgacccgtacgtgacaacgcc

SEQ ID NO: 350095 - DNA, 53 bp, Artificial
  Synthetic oligonucleotide
cataaactaggtatgtgctgtgcttatcatgtggtgagctattttacccaagt

SEQ ID NO: 350096 - DNA, 57 bp, Artificial
  Synthetic oligonucleotide
cataaacttgtactctgactctatcaaatcactgactcttgaagatgttgacaagac

SEQ ID NO: 350097 - DNA, 60 bp, Artificial
  Synthetic oligonucleotide
cataaagaatggtctcactcaagaaactggagatgtaatcccacttggtgctggggagta

SEQ ID NO: 350098 - DNA, 60 bp, Artificial
  Synthetic oligonucleotide
cataaagagatgcgcatgcatctggatttcctatgttgatttgtgatggttcagtacctt

SEQ ID NO: 350099 - DNA, 55 bp, Artificial
  Synthetic oligonucleotide
cataaagagtatccatgtactttgtaactttggaaccctgtgaactgatctcgtg

SEQ ID NO: 350100 - DNA, 60 bp, Artificial
  Synthetic oligonucleotide
cataaagcaagggatgttgaccgctggcggcttcttccctgcggatgctgctagaggggc

SEQ ID NO: 350101 - DNA, 56 bp, Artificial
  Synthetic oligonucleotide
cataaagcaccctcgcaaattaagtgcccaccccttctcattacaactaacctcaa

SEQ ID NO: 350102 - DNA, 55 bp, Artificial
  Synthetic oligonucleotide
cataaagcctctaggactctaaaggacaggtgccctaatcgcggccatccatata

SEQ ID NO: 350103 - DNA, 54 bp, Artificial
  Synthetic oligonucleotide
cataaagcctctaggggacaccaaggggcaaaatcggccatccgcaataatatt

SEQ ID NO: 350104 - DNA, 55 bp, Artificial
  Synthetic oligonucleotide
cataaagcgaattggattagccatccggtgaaagtgagactcattatctacctgt

SEQ ID NO: 350105 - DNA, 57 bp, Artificial
  Synthetic oligonucleotide
cataaagcgaattggattggccatccagtgagaattagatcgatcatctaccttttt

SEQ ID NO: 350106 - DNA, 56 bp, Artificial
  Synthetic oligonucleotide
cataaagcgaattggattggccatccggtgaagtataaacatattatttacctgtt

SEQ ID NO: 350107 - DNA, 60 bp, Artificial
  Synthetic oligonucleotide
cataaagctatcgtatctcgagatacacataagtctttatcctggcgagagatggcgacg

SEQ ID NO: 350108 - DNA, 60 bp, Artificial
  Synthetic oligonucleotide
cataaaggagttgagagattgatactggagattaatacacgatacgtcgaacgtagcaat

SEQ ID NO: 350109 - DNA, 60 bp, Artificial
  Synthetic oligonucleotide
cataaaggatacgttgtatcgagacgtggagatctagaaacacttggatattgtatgatt

SEQ ID NO: 350110 - DNA, 53 bp, Artificial
  Synthetic oligonucleotide
cataaagggaaggtcccatttaagaaatgacactgacgtggtaaactttgtaa

SEQ ID NO: 350111 - DNA, 55 bp, Artificial
  Synthetic oligonucleotide
cataaagggtgagagctctggatcgtacttaacatccatggcaccgtatcgggtc

SEQ ID NO: 350112 - DNA, 58 bp, Artificial
  Synthetic oligonucleotide
cataaaggtaaaactgaaagaaggatgtaaaggaccacatgtacagcagtggccattg

SEQ ID NO: 350113 - DNA, 60 bp, Artificial
  Synthetic oligonucleotide
cataaagtacatacatagcttctatcatagactcgcaaaaatacttgacgtcagggttgt

SEQ ID NO: 350114 - DNA, 58 bp, Artificial
  Synthetic oligonucleotide
cataaagtcaatgacgggtcaatttttggatcctggaaagcatgccaaactctcgccc

SEQ ID NO: 350115 - DNA, 57 bp, Artificial
  Synthetic oligonucleotide
cataaagtcgctcacagagcggctctatatcgggggtcccctgactaactcaaaagg

SEQ ID NO: 350116 - DNA, 52 bp, Artificial
  Synthetic oligonucleotide
cataaatatggtcgcattaagagcgttaaacggattaaactctcacataact

SEQ ID NO: 350117 - DNA, 60 bp, Artificial
  Synthetic oligonucleotide
cataaatcatgcctacctgcctgtgtttatggccttgcagtagccagtgggtatgacttc

SEQ ID NO: 350118 - DNA, 55 bp, Artificial
  Synthetic oligonucleotide
cataaatcgttcaggggagaattggacacctttgtacttggatactgtgtctttc

SEQ ID NO: 350119 - DNA, 60 bp, Artificial
  Synthetic oligonucleotide
cataaatgtgatgatcagtgcatggagacaattcggaacgggacctataacatgagaaag

SEQ ID NO: 350120 - DNA, 55 bp, Artificial
  Synthetic oligonucleotide
cataaattagacgttacgactaatacgtgtactattaggaattgcaagaaattag

SEQ ID NO: 350121 - DNA, 55 bp, Artificial
  Synthetic oligonucleotide
cataaattgaacgtgacgaccaacacttgtacaatcagaaattgtaaaaaattag

SEQ ID NO: 350122 - DNA, 58 bp, Artificial
  Synthetic oligonucleotide
cataaatttggtgtgtcatggaacgatgttttatgggagtcggagaggaataactgcc

SEQ ID NO: 350123 - DNA, 53 bp, Artificial
  Synthetic oligonucleotide
cataacaaccagctttcttgccaggatgataacaaatgaaagtgatatctact

SEQ ID NO: 350124 - DNA, 55 bp, Artificial
  Synthetic oligonucleotide
cataacaacgttagcccagtctgctggcttaatctctactaaacttcctttgata

SEQ ID NO: 350125 - DNA, 59 bp, Artificial
  Synthetic oligonucleotide
cataacaactttgcgaggaccagtggtcaccttctacggaccagaacaggacaagatgc

SEQ ID NO: 350126 - DNA, 60 bp, Artificial
  Synthetic oligonucleotide
cataacaatggcatatgctggggcaatcaagtgtttttgacagtagttgacacaacacgg

SEQ ID NO: 350127 - DNA, 52 bp, Artificial
  Synthetic oligonucleotide
cataacacctgcagtttccccaccttttacttaccccagttaaagccttgat

SEQ ID NO: 350128 - DNA, 55 bp, Artificial
  Synthetic oligonucleotide
cataacacgcaacatgacctgggctgaaactttacgcctactcgccgagactgtg

SEQ ID NO: 350129 - DNA, 55 bp, Artificial
  Synthetic oligonucleotide
cataacactgctcactgattctggcctctataaaacacccagtatgatccaggac

SEQ ID NO: 350130 - DNA, 57 bp, Artificial
  Synthetic oligonucleotide
cataacacttgctgtaacttatcacaccgtttctacaggttagctaacgagtgtgcg

SEQ ID NO: 350131 - DNA, 59 bp, Artificial
  Synthetic oligonucleotide
cataacagagatagtgtatttgaataacaccaccatagagaaagagatttgccccgaag

SEQ ID NO: 350132 - DNA, 60 bp, Artificial
  Synthetic oligonucleotide
cataacagagtttgtatgctatttaacagaattggtgattagtaatgctactattggatt

SEQ ID NO: 350133 - DNA, 60 bp, Artificial
  Synthetic oligonucleotide
cataacagcaatgcagaccaccccctggtgcgtggtgaaagtacggtccatctggcagct

SEQ ID NO: 350134 - DNA, 60 bp, Artificial
  Synthetic oligonucleotide
cataacagtggaatgcagttttgatgttaaaggttgcatccatccaatgcccaaggactt

SEQ ID NO: 350135 - DNA, 50 bp, Artificial
  Synthetic oligonucleotide
cataacataatctgtccaacattaataccagcatcatggattaataatac

SEQ ID NO: 350136 - DNA, 60 bp, Artificial
  Synthetic oligonucleotide
cataacatgtagatcaaacatcacaggactactattggtacgtgatggagggagcaatga

SEQ ID NO: 350137 - DNA, 60 bp, Artificial
  Synthetic oligonucleotide
cataacattactagacgggtctatattagtcaactcattagtccattcggatgataacca

SEQ ID NO: 350138 - DNA, 53 bp, Artificial
  Synthetic oligonucleotide
cataaccaaggaccagtacggtttcatccccggattggcataagtaaatcccg

SEQ ID NO: 350139 - DNA, 55 bp, Artificial
  Synthetic oligonucleotide
cataaccatatcccaggttacgcgacacaggtttatggagcctggcatttaccga

SEQ ID NO: 350140 - DNA, 52 bp, Artificial
  Synthetic oligonucleotide
cataacccgggtaagttcaagcagtaccaaggcagcatacacgacatcgaca

SEQ ID NO: 350141 - DNA, 55 bp, Artificial
  Synthetic oligonucleotide
cataaccctcttgttacattttactctggtataattgtaaagtttgaacattgga

SEQ ID NO: 350142 - DNA, 53 bp, Artificial
  Synthetic oligonucleotide
cataaccctttgtcggagtacattagatacatctgaccaacacgatccaccag

SEQ ID NO: 350143 - DNA, 51 bp, Artificial
  Synthetic oligonucleotide
cataaccgcaaatgtaaacaagctgcctatataaaccctgcttgtactgag

SEQ ID NO: 350144 - DNA, 59 bp, Artificial
  Synthetic oligonucleotide
cataaccgcgtacccttgggatacatatgtgatgcaaactcgacattaacaatagacgt

SEQ ID NO: 350145 - DNA, 59 bp, Artificial
  Synthetic oligonucleotide
cataaccggaaagggctacttcaatgatgttctacagttcaggttacatgacgcactta

SEQ ID NO: 350146 - DNA, 60 bp, Artificial
  Synthetic oligonucleotide
cataacctcaacataggcgacgttatcacacaagaacaagcggaggcctttctgcgtgaa

SEQ ID NO: 350147 - DNA, 58 bp, Artificial
  Synthetic oligonucleotide
cataacgatagggggagatgctaggagttagaggagaccaagccgaggaggaaagcaa

SEQ ID NO: 350148 - DNA, 56 bp, Artificial
  Synthetic oligonucleotide
cataacgcttagctaagactttacggaacttagattccttaacagctgacttgttc

SEQ ID NO: 350149 - DNA, 60 bp, Artificial
  Synthetic oligonucleotide
cataacggacgtatgctaggcaaacactatagcaatcctgaagcagtaagtgacgctaat

SEQ ID NO: 350150 - DNA, 60 bp, Artificial
  Synthetic oligonucleotide
cataacggataacaaaactatagatacgtctagcataccgcctattattaggcacataga

SEQ ID NO: 350151 - DNA, 58 bp, Artificial
  Synthetic oligonucleotide
cataacgggcgaatcttacggcgaatctgtgaaacaagctgtattgttaaatgtgttg

SEQ ID NO: 350152 - DNA, 55 bp, Artificial
  Synthetic oligonucleotide
cataacggtggactaatagcacctagtagagtaagcaaattaaagggacgaggcc

SEQ ID NO: 350153 - DNA, 60 bp, Artificial
  Synthetic oligonucleotide
cataacgtaacaactagtttgctatccaagtgcacggtgaaccaggcacgttgtatgatg

SEQ ID NO: 350154 - DNA, 55 bp, Artificial
  Synthetic oligonucleotide
cataacgtacagctagaaagtctctatggttgctcaagacttataatgagccaga

SEQ ID NO: 350155 - DNA, 55 bp, Artificial
  Synthetic oligonucleotide
cataacgtcgaaccatatattagctgttctagaagaggttggaattgggttctcc

SEQ ID NO: 350156 - DNA, 50 bp, Artificial
  Synthetic oligonucleotide
cataacgtgctcttaacaggcagctaacgaagataagataactcagaagg

SEQ ID NO: 350157 - DNA, 55 bp, Artificial
  Synthetic oligonucleotide
cataactacattcctactgttgaagcaagcttcagtgaaatgacgcgtggtccag

SEQ ID NO: 350158 - DNA, 55 bp, Artificial
  Synthetic oligonucleotide
cataactagtcttaacgtctctgttccagctgattataaatgtaagcagcgtatg

SEQ ID NO: 350159 - DNA, 55 bp, Artificial
  Synthetic oligonucleotide
cataactcatctcaaggcagtgactttgagttctgtgtggcatcattcagagaat

SEQ ID NO: 350160 - DNA, 56 bp, Artificial
  Synthetic oligonucleotide
cataactcatgttgatgatcagaacccagacctatcaacatttgtcagagagtatt

SEQ ID NO: 350161 - DNA, 55 bp, Artificial
  Synthetic oligonucleotide
cataactcttgacatcctaacagagattgccactttgccaacttacctttcctct

SEQ ID NO: 350162 - DNA, 55 bp, Artificial
  Synthetic oligonucleotide
cataacttgttatggtggttccagttctgactgcctgatgagcggtgttggttct

SEQ ID NO: 350163 - DNA, 57 bp, Artificial
  Synthetic oligonucleotide
cataagaacagacagagggaatacggactggaaagaatggcgaaaagtggtagaaga

SEQ ID NO: 350164 - DNA, 55 bp, Artificial
  Synthetic oligonucleotide
cataagacagggaccaaagaaaccccttagagactatgtagacaggtcttataaa

SEQ ID NO: 350165 - DNA, 54 bp, Artificial
  Synthetic oligonucleotide
cataagagagcagtccagtttatccccctgcctgtaggtctagggattacaggg

SEQ ID NO: 350166 - DNA, 52 bp, Artificial
  Synthetic oligonucleotide
cataagagagttcgtggcatatgcttcgggacggcggagtcttggggacatg

SEQ ID NO: 350167 - DNA, 60 bp, Artificial
  Synthetic oligonucleotide
cataagagctcgaatatgatattagcgtctttcctattaagtatccaaactattactgga

SEQ ID NO: 350168 - DNA, 60 bp, Artificial
  Synthetic oligonucleotide
cataagaggactatcaattgtggggctgctgcctctcggacttccactgaatcgcataag

SEQ ID NO: 350169 - DNA, 59 bp, Artificial
  Synthetic oligonucleotide
cataagaggactcttggactcccagcaatgtcaacgaccgaccttgaggcctacttcaa

SEQ ID NO: 350170 - DNA, 58 bp, Artificial
  Synthetic oligonucleotide
cataagagtgttgtcatacggggatgatctccttgtggccacaaattatcaattggat

SEQ ID NO: 350171 - DNA, 60 bp, Artificial
  Synthetic oligonucleotide
cataagcacagtggacgtgacatctagcatagacccaatatcagacctgtctgtgactgg

SEQ ID NO: 350172 - DNA, 60 bp, Artificial
  Synthetic oligonucleotide
cataagcatatggagactgaatcccttagaccacagattaagggattacttaagacaaga

SEQ ID NO: 350173 - DNA, 50 bp, Artificial
  Synthetic oligonucleotide
cataagcattatcttaagtcgcacattaaacgtcatgttcgcctctgaat

SEQ ID NO: 350174 - DNA, 60 bp, Artificial
  Synthetic oligonucleotide
cataagccaatttgcaaggaggggctctggcactgcaagggaccttgacaatctcagatg

SEQ ID NO: 350175 - DNA, 57 bp, Artificial
  Synthetic oligonucleotide
cataagctcgaaatgaaaggggatagaggaaacactcgtcatgttggcgagtttatt

SEQ ID NO: 350176 - DNA, 59 bp, Artificial
  Synthetic oligonucleotide
cataagctgtacccacggctgaaagtgaatgatccgttatccgcttgggtacttcgaga

SEQ ID NO: 350177 - DNA, 51 bp, Artificial
  Synthetic oligonucleotide
cataagcttcaatccaggactcacatctgcgccgggtgtgggggcagcttt

SEQ ID NO: 350178 - DNA, 55 bp, Artificial
  Synthetic oligonucleotide
cataagcttgatgttaccacaactacttgtactattagaaattgtaaaaaattgg

SEQ ID NO: 350179 - DNA, 55 bp, Artificial
  Synthetic oligonucleotide
cataagctttcccatagttgtaagcatacgacaaattgtacttttgagtgtccgt

SEQ ID NO: 350180 - DNA, 60 bp, Artificial
  Synthetic oligonucleotide
cataaggaccagaagtggaggaaacactaatcaacagagggcatctgcaggccaaatcag

SEQ ID NO: 350181 - DNA, 51 bp, Artificial
  Synthetic oligonucleotide
cataaggatgctactgaatccaagaatactaagaatgctgataaatccaag

SEQ ID NO: 350182 - DNA, 55 bp, Artificial
  Synthetic oligonucleotide
cataaggcatttaggggtacaggaactgcatatattgcagaagctatggcccgaa

SEQ ID NO: 350183 - DNA, 55 bp, Artificial
  Synthetic oligonucleotide
cataaggccaataccaacgttacgacgtttcttagctgtatattccatggtcggg

SEQ ID NO: 350184 - DNA, 56 bp, Artificial
  Synthetic oligonucleotide
cataaggggttagtgattaaggaagaaccactaaagggatcagccaaacatattga

SEQ ID NO: 350185 - DNA, 56 bp, Artificial
  Synthetic oligonucleotide
cataaggtcgctcacagagcggctttacatcgggggtcccctgaccaattccaaag

SEQ ID NO: 350186 - DNA, 56 bp, Artificial
  Synthetic oligonucleotide
cataaggtcgctcacggagcggctttatgtcgggggtcctctgactaattcaaaag

SEQ ID NO: 350187 - DNA, 58 bp, Artificial
  Synthetic oligonucleotide
cataagtaaattctcaagatctccagatgaggtctcaaaaacacgttgttactacttc

SEQ ID NO: 350188 - DNA, 55 bp, Artificial
  Synthetic oligonucleotide
cataagtaatagagtgagcgcgactaccgactttcggactttctgccgcctagtg

SEQ ID NO: 350189 - DNA, 55 bp, Artificial
  Synthetic oligonucleotide
cataagtaattactggacactatagaacaataggtcggcttagttcggcctatga

SEQ ID NO: 350190 - DNA, 57 bp, Artificial
  Synthetic oligonucleotide
cataagtagcacaccccttcctggcgtgcgtagggttgcagggccccgcttgtacag

SEQ ID NO: 350191 - DNA, 60 bp, Artificial
  Synthetic oligonucleotide
cataagtcagaaagaggtatgcatatattttcaatatgacgagatatagttcgtggctct

SEQ ID NO: 350192 - DNA, 60 bp, Artificial
  Synthetic oligonucleotide
cataagtcatcccttaatggatgactatgtagagttctgtatatcaacagttggtcgaaa

SEQ ID NO: 350193 - DNA, 59 bp, Artificial
  Synthetic oligonucleotide
cataagtccagtcatgggtgttattgggttttcattctttgtgaaagactggcctgaga

SEQ ID NO: 350194 - DNA, 60 bp, Artificial
  Synthetic oligonucleotide
cataagtcctgcttgcctgcttgtgtgtacggacttgctgtggccagtggatatgacttc

SEQ ID NO: 350195 - DNA, 60 bp, Artificial
  Synthetic oligonucleotide
cataagtctcctaatttatgtctctagtaaatttggcaataggtctccttgcattcagca

SEQ ID NO: 350196 - DNA, 60 bp, Artificial
  Synthetic oligonucleotide
cataagtcttgcctgcctgcttgtgtgtatgggcttgcagtagcaagtgggcatgacttc

SEQ ID NO: 350197 - DNA, 58 bp, Artificial
  Synthetic oligonucleotide
cataagtgcctgtgtgttctcacctatagcagggagttatatgaggcgatttgtagca

SEQ ID NO: 350198 - DNA, 52 bp, Artificial
  Synthetic oligonucleotide
cataagttaaagtaactaaaggcgtgtaggacgacttgccggagtacccacg

SEQ ID NO: 350199 - DNA, 52 bp, Artificial
  Synthetic oligonucleotide
cataagttacgaacagctcgtttcgaacgcgatgaagttagtctatgacacg

SEQ ID NO: 350200 - DNA, 60 bp, Artificial
  Synthetic oligonucleotide
cataagttcactaaaacctgttgtggatctgcacatcctgctagagtatttccactatct

SEQ ID NO: 350201 - DNA, 58 bp, Artificial
  Synthetic oligonucleotide
cataataaacttaatctgtgtgtcctgttccaccccatgagtaagtgttgtagtgttg

SEQ ID NO: 350202 - DNA, 59 bp, Artificial
  Synthetic oligonucleotide
cataatacagcgttgtcgacgtttatcacctatcctactcttcgcaagagtgaacctaa

SEQ ID NO: 350203 - DNA, 56 bp, Artificial
  Synthetic oligonucleotide
cataatactcgagtttattggtattagattactttgagaagtgacgtgtaaacatc

SEQ ID NO: 350204 - DNA, 55 bp, Artificial
  Synthetic oligonucleotide
cataatacttggcccacgcaacagattatagatgagtttggagatcactggcatg

SEQ ID NO: 350205 - DNA, 60 bp, Artificial
  Synthetic oligonucleotide
cataataggagacataagacaggcacattgtgaaattaatgaaactagatggaacacaac

SEQ ID NO: 350206 - DNA, 60 bp, Artificial
  Synthetic oligonucleotide
cataataggttacagggatatatagaaagtgtgcagcaagccgtaatacagagagcgata

SEQ ID NO: 350207 - DNA, 56 bp, Artificial
  Synthetic oligonucleotide
cataatagtaggaggcttgataggtttaagaatagttttaggtgtactctctatag

SEQ ID NO: 350208 - DNA, 59 bp, Artificial
  Synthetic oligonucleotide
cataatattatctgcccaaatttggtaccagaaatatgggttaaaagcatcgatctcga

SEQ ID NO: 350209 - DNA, 55 bp, Artificial
  Synthetic oligonucleotide
cataatattatggactataacgtttggatctggacactcaggtgctattgggtca

SEQ ID NO: 350210 - DNA, 57 bp, Artificial
  Synthetic oligonucleotide
cataatcaccgcttaacagtgttgtaactgtaaacgtagcaatacgtcttgttctta

SEQ ID NO: 350211 - DNA, 57 bp, Artificial
  Synthetic oligonucleotide
cataatcagagtcatgagaaaacacttttcttcccagttaaattcatagctctctac

SEQ ID NO: 350212 - DNA, 60 bp, Artificial
  Synthetic oligonucleotide
cataatcagggccataagaaggatagctgtgccggtggtttctacattgttcccaccagc

SEQ ID NO: 350213 - DNA, 55 bp, Artificial
  Synthetic oligonucleotide
cataatcatagctgcgcttctattaataccggccatacagtgtaccaatacggga

SEQ ID NO: 350214 - DNA, 59 bp, Artificial
  Synthetic oligonucleotide
cataatcatcccatatacgtatgtcaactaccggggcctcatgcatcatcagtatatct

SEQ ID NO: 350215 - DNA, 60 bp, Artificial
  Synthetic oligonucleotide
cataatcatggcgtcccaaggcaccaaacggtcttacgaacagatggagactgatgggga

SEQ ID NO: 350216 - DNA, 51 bp, Artificial
  Synthetic oligonucleotide
cataatcattcaaatgatcatagatatagagaccaacctcccacaggtcct

SEQ ID NO: 350217 - DNA, 57 bp, Artificial
  Synthetic oligonucleotide
cataatcctctgaacattgctgacctcagagaagtctaacccattaagaaggctagt

SEQ ID NO: 350218 - DNA, 60 bp, Artificial
  Synthetic oligonucleotide
cataatcgacattggtaaagaggttgttggattcgtgcgcaaaggggttgacatcatcca

SEQ ID NO: 350219 - DNA, 59 bp, Artificial
  Synthetic oligonucleotide
cataatctttgggagctaattccctaattatattaagagcctctgacttactgcctgtg

SEQ ID NO: 350220 - DNA, 60 bp, Artificial
  Synthetic oligonucleotide
cataatctttgggagctttctcccttaatatattgagtgccgatgacttagatcctgagt

SEQ ID NO: 350221 - DNA, 52 bp, Artificial
  Synthetic oligonucleotide
cataatgcaattcaccaaggcaaccgctaatgcccttggtctgcgagttaca

SEQ ID NO: 350222 - DNA, 60 bp, Artificial
  Synthetic oligonucleotide
cataatgcctgcatttatagacctaaacgtgagatatttagtgttgttgtgtggttgtga

SEQ ID NO: 350223 - DNA, 55 bp, Artificial
  Synthetic oligonucleotide
cataatgctgattgtcctagatgtgattattgggatgatgtttaccgtaagcact

SEQ ID NO: 350224 - DNA, 57 bp, Artificial
  Synthetic oligonucleotide
cataatggatggaacgccgtatgctacaatgaactcgttttttgagcatacttcgtc

SEQ ID NO: 350225 - DNA, 57 bp, Artificial
  Synthetic oligonucleotide
cataatggggcttccttgaagttgccacaacagggggattatacgtcctacgtgaca

SEQ ID NO: 350226 - DNA, 55 bp, Artificial
  Synthetic oligonucleotide
cataatggtaattaggtagaactattttcaaaatgtgaaccaaaagcggccatcc

SEQ ID NO: 350227 - DNA, 60 bp, Artificial
  Synthetic oligonucleotide
cataatgtatcagaaattcatacagacaatggacctaattttgcaaattcaaggatggaa

SEQ ID NO: 350228 - DNA, 55 bp, Artificial
  Synthetic oligonucleotide
cataatgtgactaggaatctgaccactcagttgcatagtctgatggaagaactct

SEQ ID NO: 350229 - DNA, 60 bp, Artificial
  Synthetic oligonucleotide
cataatgttttgcctgtccgtgaaggaccctcgaccactaatgacaatggtctcattggc

SEQ ID NO: 350230 - DNA, 60 bp, Artificial
  Synthetic oligonucleotide
cataattatactgattgtgtcctcgttgatagagactatcatctgtcattcatctcaaga

SEQ ID NO: 350231 - DNA, 60 bp, Artificial
  Synthetic oligonucleotide
cataattcacgatggctcactcttttttggtactcgcgatcaagctacaggtcagattaa

SEQ ID NO: 350232 - DNA, 60 bp, Artificial
  Synthetic oligonucleotide
cataattctctgaacattgctaacttcagagaagtctaatccatttaaaaggctcgttgc

SEQ ID NO: 350233 - DNA, 60 bp, Artificial
  Synthetic oligonucleotide
cataattctctgaacgttgctaacttcagagaagtcaagtccattgagaagactagtggc

SEQ ID NO: 350234 - DNA, 60 bp, Artificial
  Synthetic oligonucleotide
cataattgcgctgctgattataatttatattgtgctacccatatgcttcaagctgagaga

SEQ ID NO: 350235 - DNA, 51 bp, Artificial
  Synthetic oligonucleotide
cataattggaaggaacaagtctgaaataaaggagtttctagggtcttcaat

SEQ ID NO: 350236 - DNA, 50 bp, Artificial
  Synthetic oligonucleotide
cataattggtctgttgagagtgatgaattatgctgatattgggtgttctg

SEQ ID NO: 350237 - DNA, 59 bp, Artificial
  Synthetic oligonucleotide
cataatttatcatgtgtgcaaggggagtgcccatattgctttacgcactgtgaaccgac

SEQ ID NO: 350238 - DNA, 57 bp, Artificial
  Synthetic oligonucleotide
cataatttttgtaatatacaaactcttttgttcactacaaggaccatactcaggtga

SEQ ID NO: 350239 - DNA, 59 bp, Artificial
  Synthetic oligonucleotide
catacaaaacagcaaaggatcttttggctatgtacatagaaagaaaagcatccaacaac

SEQ ID NO: 350240 - DNA, 53 bp, Artificial
  Synthetic oligonucleotide
catacaaaaccttggtagaggtatccgtaacgtacctcgaagaataagacagg

SEQ ID NO: 350241 - DNA, 57 bp, Artificial
  Synthetic oligonucleotide
catacaaacactgtgcattcaaatttgtgagaaagcaagctgttacgaaagtttacg

SEQ ID NO: 350242 - DNA, 55 bp, Artificial
  Synthetic oligonucleotide
catacaaagacagacaacaaatacgaccccacaaaatgccgatacatggtagaag

SEQ ID NO: 350243 - DNA, 60 bp, Artificial
  Synthetic oligonucleotide
catacaaagagcgttcatgtctttatcgagtcagaagtcgggaatagctgatgagatagc

SEQ ID NO: 350244 - DNA, 55 bp, Artificial
  Synthetic oligonucleotide
catacaaagcttacagtttctggactttagatatgacagagcgcttctcgtctga

SEQ ID NO: 350245 - DNA, 55 bp, Artificial
  Synthetic oligonucleotide
catacaaatcgttgacccgagatacaactcaccggaacttaccatccatgcctgg

SEQ ID NO: 350246 - DNA, 58 bp, Artificial
  Synthetic oligonucleotide
catacaaatgaggacccaagtggaattactagacgaacacatctctgtagactgcgat

SEQ ID NO: 350247 - DNA, 60 bp, Artificial
  Synthetic oligonucleotide
catacaacaagtggtggaacggattcatacaggaagacacaaagagagtcgtgattgatg

SEQ ID NO: 350248 - DNA, 59 bp, Artificial
  Synthetic oligonucleotide
catacaacagtagatgtaatttgttctatggaaggaggttttcccatcatattagaagc

SEQ ID NO: 350249 - DNA, 57 bp, Artificial
  Synthetic oligonucleotide
catacaaccgtaccgtggcagtggaataataggacccctgattggaataatatgact

SEQ ID NO: 350250 - DNA, 53 bp, Artificial
  Synthetic oligonucleotide
catacaaggaaaaaacgttaagtacactaaacaacgttaggctagacgatgag

SEQ ID NO: 350251 - DNA, 60 bp, Artificial
  Synthetic oligonucleotide
catacaatatctgatagtatgaaatctatcatgtatgatctgtcgggatatgtaaatact

SEQ ID NO: 350252 - DNA, 60 bp, Artificial
  Synthetic oligonucleotide
catacaatgcagaattgctagtactgcttgaaaatcaaaaaacactcgatgagcatgatg

SEQ ID NO: 350253 - DNA, 60 bp, Artificial
  Synthetic oligonucleotide
catacaatgccgaactgctcgtcctacttgaaaatgaaaggactctggacttccatgact

SEQ ID NO: 350254 - DNA, 57 bp, Artificial
  Synthetic oligonucleotide
catacaatggaacctggtgacaaaatgaacggtgtttttgttttatctgtcttgctg

SEQ ID NO: 350255 - DNA, 55 bp, Artificial
  Synthetic oligonucleotide
catacaattactccagtccaaatgaggtatactgcatagtgcaaggtaaaatggg

SEQ ID NO: 350256 - DNA, 60 bp, Artificial
  Synthetic oligonucleotide
catacaattgatctgactgattctgaaatgaacaaactattcgaaaaaacaaggaggcaa

SEQ ID NO: 350257 - DNA, 60 bp, Artificial
  Synthetic oligonucleotide
catacacaatagcatacatgttcacgatatatgacataatgtaactgataccaacgactc

SEQ ID NO: 350258 - DNA, 55 bp, Artificial
  Synthetic oligonucleotide
catacacacaaaaaggggaagtgaacctgattggacgaaaccagaagacctcatt

SEQ ID NO: 350259 - DNA, 53 bp, Artificial
  Synthetic oligonucleotide
catacacacagctcacagggtgtgtggcggtatctcgactgatacctgggcac

SEQ ID NO: 350260 - DNA, 60 bp, Artificial
  Synthetic oligonucleotide
catacacacattgctgtgcctagatatcgcagaccagtacgaggcaaacccatacacgaa

SEQ ID NO: 350261 - DNA, 57 bp, Artificial
  Synthetic oligonucleotide
catacacatacaggaattgctgatggtatgtttagccaagttaatgattaaacccag

SEQ ID NO: 350262 - DNA, 56 bp, Artificial
  Synthetic oligonucleotide
catacacctattatactaggatgctcaggtagacaaatttactcttacactttctg

SEQ ID NO: 350263 - DNA, 50 bp, Artificial
  Synthetic oligonucleotide
catacacgaatcaatcaggtggaccaaggatccaaagaatacccaagacc

SEQ ID NO: 350264 - DNA, 56 bp, Artificial
  Synthetic oligonucleotide
catacactaaagtagtgtattttcacaagggattagtgattaaagaagaaccgcta

SEQ ID NO: 350265 - DNA, 58 bp, Artificial
  Synthetic oligonucleotide
catacactactgacaacgacccagttcttaactagtattggtaacctgcagagtacaa

SEQ ID NO: 350266 - DNA, 55 bp, Artificial
  Synthetic oligonucleotide
catacagacaatggcggcaatttcaccagtcaggtggttaaggctgcctgttggt

SEQ ID NO: 350267 - DNA, 55 bp, Artificial
  Synthetic oligonucleotide
catacagacgttccagggaacgtactaggccctagaccggtctggacacactggc

SEQ ID NO: 350268 - DNA, 55 bp, Artificial
  Synthetic oligonucleotide
catacagagtgagctcgcatacataagatatctttacttccggctgagggaagct

SEQ ID NO: 350269 - DNA, 60 bp, Artificial
  Synthetic oligonucleotide
catacagatgtgcactgaactcaaactcagcgactatgaagggagactgatccaaaacag

SEQ ID NO: 350270 - DNA, 60 bp, Artificial
  Synthetic oligonucleotide
catacagatgtgcactgaactcaagctcagtgacaatgagggacgattgatccaaaacag

SEQ ID NO: 350271 - DNA, 55 bp, Artificial
  Synthetic oligonucleotide
catacagctacggctgagtctggcgcttatatgagccgctgcagaaggaaactgc

SEQ ID NO: 350272 - DNA, 60 bp, Artificial
  Synthetic oligonucleotide
catacagcttatcagactaatgacagcgttagagcatgataaaagagatgattgctgcca

SEQ ID NO: 350273 - DNA, 55 bp, Artificial
  Synthetic oligonucleotide
catacagtgtgcacaacctgagttctttagacttgaatgtgctgggttctgtgat

SEQ ID NO: 350274 - DNA, 59 bp, Artificial
  Synthetic oligonucleotide
catacagttcaagagcaaacaccgtattgaaccagtatgtttattagtacacggcagcc

SEQ ID NO: 350275 - DNA, 60 bp, Artificial
  Synthetic oligonucleotide
catacagttcaagtccaaatgccgtattgaaccagtatgcctgctcttgcacggaagccc

SEQ ID NO: 350276 - DNA, 60 bp, Artificial
  Synthetic oligonucleotide
catacatagagaagcgtaatgcagagaaaccatatatgccaaggtatggtttacagcgca

SEQ ID NO: 350277 - DNA, 60 bp, Artificial
  Synthetic oligonucleotide
catacatagccagacaagatggtcccagatgcacatgggaattacactgtagctataaat

SEQ ID NO: 350278 - DNA, 55 bp, Artificial
  Synthetic oligonucleotide
catacatagtagcgccttcaattgacgaacccattctggctgcgaacagaatcgc

SEQ ID NO: 350279 - DNA, 60 bp, Artificial
  Synthetic oligonucleotide
catacatcactgtgttctttgacttactaaaacagagtctgcagtctttgaatgtgaacc

SEQ ID NO: 350280 - DNA, 51 bp, Artificial
  Synthetic oligonucleotide
catacatcaggcaatccaacaatgcacaatggggcgttatctcctccttgt

SEQ ID NO: 350281 - DNA, 50 bp, Artificial
  Synthetic oligonucleotide
catacatcatttctccatcgcctcgtgaggccgaataccacggatcacgt

SEQ ID NO: 350282 - DNA, 50 bp, Artificial
  Synthetic oligonucleotide
catacatccttgagacttcaataacacaaaaacatgttttgaagatcatg

SEQ ID NO: 350283 - DNA, 55 bp, Artificial
  Synthetic oligonucleotide
catacatctctgtttcccagtataggatgacgagcggtgagaatacggcaatatc

SEQ ID NO: 350284 - DNA, 59 bp, Artificial
  Synthetic oligonucleotide
catacatgacaccttgaaaccccacccgtgacagcatgggctggcctctaaccctctgg

SEQ ID NO: 350285 - DNA, 56 bp, Artificial
  Synthetic oligonucleotide
catacatgagaaaataggggaccaccaaacagtgattcacccaacaataacgaccc

SEQ ID NO: 350286 - DNA, 60 bp, Artificial
  Synthetic oligonucleotide
catacatgataggagcccattcagagccctcataagctgggaaatgggtcaagcacccag

SEQ ID NO: 350287 - DNA, 55 bp, Artificial
  Synthetic oligonucleotide
catacatgcctaggtatggattacaacgtaacttgactgatatgagtcttgcgcg

SEQ ID NO: 350288 - DNA, 59 bp, Artificial
  Synthetic oligonucleotide
catacatgctagaaagagagctggtccgcaaaacgaggttcctcccggtggctggtgga

SEQ ID NO: 350289 - DNA, 56 bp, Artificial
  Synthetic oligonucleotide
catacatgggtcttcctgacttgacgcttcaagcaatgtttgtacccactggtgcc

SEQ ID NO: 350290 - DNA, 60 bp, Artificial
  Synthetic oligonucleotide
catacatgtgtacacctagtggttccatggtgtctagtgatactcagatctttaatagac

SEQ ID NO: 350291 - DNA, 51 bp, Artificial
  Synthetic oligonucleotide
catacattagctattgtccctatatcataatcttcctctacgtctatatcc

SEQ ID NO: 350292 - DNA, 60 bp, Artificial
  Synthetic oligonucleotide
catacattataccatatcaaacggcaggattctgggcatcaatgtgggaccaaggagaaa

SEQ ID NO: 350293 - DNA, 60 bp, Artificial
  Synthetic oligonucleotide
catacattgacataagtaataccaatttaattgcagaacagactgtagctccagtaacac

SEQ ID NO: 350294 - DNA, 58 bp, Artificial
  Synthetic oligonucleotide
catacattgtggaaagacctactgctcaaaatgggatctgctacccaggaaccttaaa

SEQ ID NO: 350295 - DNA, 60 bp, Artificial
  Synthetic oligonucleotide
cataccaaaaatagatgctgatacatatgtcgggtcaaagatttattctcaagataaata

SEQ ID NO: 350296 - DNA, 59 bp, Artificial
  Synthetic oligonucleotide
cataccaaaacagcgcaggaacaaacttccgaggcacactggtatagctgagaacctta

SEQ ID NO: 350297 - DNA, 60 bp, Artificial
  Synthetic oligonucleotide
cataccaaagcgggacagagtacttgtccctaagacatatagcattactgccggcttaca

SEQ ID NO: 350298 - DNA, 56 bp, Artificial
  Synthetic oligonucleotide
cataccaaatgcgaatgtacaaagatgattctacaccagattactgttatagcgag

SEQ ID NO: 350299 - DNA, 60 bp, Artificial
  Synthetic oligonucleotide
cataccaaatgtaattgccacagaggctgcttttctatgctttgtgtatggcctcccagt

SEQ ID NO: 350300 - DNA, 54 bp, Artificial
  Synthetic oligonucleotide
cataccaacaatcaccggagtttcacccttattacgtattgatacgagaactga

SEQ ID NO: 350301 - DNA, 54 bp, Artificial
  Synthetic oligonucleotide
cataccaacagtgtcatgttttggttggttagggataggagaccctacggtacg

SEQ ID NO: 350302 - DNA, 55 bp, Artificial
  Synthetic oligonucleotide
cataccaaccaaccactttcaatccaccaacaagctattgggtactacttgcgcc

SEQ ID NO: 350303 - DNA, 58 bp, Artificial
  Synthetic oligonucleotide
cataccaactactacgtcgtgtataacggacctcatgccggtatatacgatgactggg

SEQ ID NO: 350304 - DNA, 56 bp, Artificial
  Synthetic oligonucleotide
cataccaagactgtaaagaagggacacagaagctcttacaagaattaagtaagttg

SEQ ID NO: 350305 - DNA, 55 bp, Artificial
  Synthetic oligonucleotide
cataccaatttctatccacactgtcctacgagtctataggtacctccggtctttg

SEQ ID NO: 350306 - DNA, 60 bp, Artificial
  Synthetic oligonucleotide
cataccagaaagttgttctgtaagcccaggtggtgcaattgttctgagctctgcactaag

SEQ ID NO: 350307 - DNA, 55 bp, Artificial
  Synthetic oligonucleotide
cataccagaatcgtaggtatatcctgcacttgtaggacgattactctatcggaag

SEQ ID NO: 350308 - DNA, 50 bp, Artificial
  Synthetic oligonucleotide
cataccagagcaccctcacctccacgagcaacttccactccaggaaatat

SEQ ID NO: 350309 - DNA, 60 bp, Artificial
  Synthetic oligonucleotide
cataccagttattgatgacctttattaactactctgacgagaatattccgtctgaaatgc

SEQ ID NO: 350310 - DNA, 55 bp, Artificial
  Synthetic oligonucleotide
cataccatctacaaaagagcgacgccatgactgctgaagcctccgataatgtgag

SEQ ID NO: 350311 - DNA, 56 bp, Artificial
  Synthetic oligonucleotide
cataccatgcagtcttgagggcagaaccatacagagtgaccatggatgtataccat

SEQ ID NO: 350312 - DNA, 58 bp, Artificial
  Synthetic oligonucleotide
cataccattattaatcacattagcacgtacgataacaaggctttagtgtggaagaatg

SEQ ID NO: 350313 - DNA, 60 bp, Artificial
  Synthetic oligonucleotide
catacccatccaaatgcaggggcattgtgccacaggccccatccagcggaaagggccgcc

SEQ ID NO: 350314 - DNA, 58 bp, Artificial
  Synthetic oligonucleotide
catacccatgggacgtcaactgggccaacagtaccatgtactgggagtcgcagccctg

SEQ ID NO: 350315 - DNA, 55 bp, Artificial
  Synthetic oligonucleotide
catacccccagacgattccaggccgttagagaggcaaataagacccgtacagggc

SEQ ID NO: 350316 - DNA, 55 bp, Artificial
  Synthetic oligonucleotide
cataccctgaaggtggttcagccaatatccttatcatggatacagatgtcggtgt

SEQ ID NO: 350317 - DNA, 53 bp, Artificial
  Synthetic oligonucleotide
cataccctgtaacctcccttttgtcaagtttgttttcaagtcttatgcctaaa

SEQ ID NO: 350318 - DNA, 60 bp, Artificial
  Synthetic oligonucleotide
catacccttcatgttgttgtatttgattgtcatctttacttcttgtgaattattcatgag

SEQ ID NO: 350319 - DNA, 58 bp, Artificial
  Synthetic oligonucleotide
cataccgaggagtccatacccccaggatcaacacccgtctcttgcattcggtgcgtac

SEQ ID NO: 350320 - DNA, 60 bp, Artificial
  Synthetic oligonucleotide
cataccgcaacatttcgtagacacgtggttcaatgcccacgagaggagtcatatacgaga

SEQ ID NO: 350321 - DNA, 59 bp, Artificial
  Synthetic oligonucleotide
cataccgccttgtctcaatacaattgtaagaaggagttagaggtcgcagtctgtaagtg

SEQ ID NO: 350322 - DNA, 60 bp, Artificial
  Synthetic oligonucleotide
cataccggttaaacctggacagactattgcatcatttatgcaagagactgttatgctgta

SEQ ID NO: 350323 - DNA, 55 bp, Artificial
  Synthetic oligonucleotide
cataccgtgttcgtcctaacatgctcggattaggtcgaccgccaaaggacctttg

SEQ ID NO: 350324 - DNA, 60 bp, Artificial
  Synthetic oligonucleotide
cataccgttgctcaatctctatacagtcatgaactgctgtagtatggtaaccgcttattg

SEQ ID NO: 350325 - DNA, 57 bp, Artificial
  Synthetic oligonucleotide
cataccgtttttacagatgaggagttacgcaaaaaatacaacagtgttgagctctac

SEQ ID NO: 350326 - DNA, 57 bp, Artificial
  Synthetic oligonucleotide
catacctaaggtttgatatggaagttacttttgtgatcaccagttcacaagatgatg

SEQ ID NO: 350327 - DNA, 56 bp, Artificial
  Synthetic oligonucleotide
catacctacaagaatcagacagggcctcgaaagagctttgctataagatgggaggc

SEQ ID NO: 350328 - DNA, 57 bp, Artificial
  Synthetic oligonucleotide
catacctacctttaacgcccatcgtgcacggcccgactcagtgtgcctcccgtgaat

SEQ ID NO: 350329 - DNA, 57 bp, Artificial
  Synthetic oligonucleotide
catacctacgccggacacagtctatgggaatccaacttgatcaaagaataatccttt

SEQ ID NO: 350330 - DNA, 55 bp, Artificial
  Synthetic oligonucleotide
catacctactacactagaagaactacgacgctcgaataaactgttgaaccgattg

SEQ ID NO: 350331 - DNA, 54 bp, Artificial
  Synthetic oligonucleotide
catacctagaagaatcagacagggttttgaagcagctttgcagtaacatgggga

SEQ ID NO: 350332 - DNA, 56 bp, Artificial
  Synthetic oligonucleotide
catacctagtatacttgagtcttccaccggtgttttgacgttgaaattgttcaaca

SEQ ID NO: 350333 - DNA, 57 bp, Artificial
  Synthetic oligonucleotide
catacctatgtcttcaaaaataatgggcgggttgaaccttatataacaatggcgcaa

SEQ ID NO: 350334 - DNA, 55 bp, Artificial
  Synthetic oligonucleotide
catacctccgtggcattagttataaggtgacagttggcgcgctagtcgcaaacga

SEQ ID NO: 350335 - DNA, 60 bp, Artificial
  Synthetic oligonucleotide
catacctgatgccaacgaagacttctgggaaggtatgcctatcagatccacgtcaactac

SEQ ID NO: 350336 - DNA, 60 bp, Artificial
  Synthetic oligonucleotide
catacctggatggagataatacctggctagggaggacaataagcacagcttcaagatccg

SEQ ID NO: 350337 - DNA, 60 bp, Artificial
  Synthetic oligonucleotide
catacctggcaaatacgatcattacattatccgctttggcatatatgtatgatcttttag

SEQ ID NO: 350338 - DNA, 51 bp, Artificial
  Synthetic oligonucleotide
catacctgtaatccacggtattagcttcaataaaggtgtgtttaaccgttg

SEQ ID NO: 350339 - DNA, 57 bp, Artificial
  Synthetic oligonucleotide
cataccttcaacttgattcactttataggttgttatatgggtcagataagatctcta

SEQ ID NO: 350340 - DNA, 57 bp, Artificial
  Synthetic oligonucleotide
cataccttttagacttacctgtgctactactagacaggttgtcaatgttataactac

SEQ ID NO: 350341 - DNA, 54 bp, Artificial
  Synthetic oligonucleotide
cataccttttcaaaactttcccacacacggacagccagtccttactattcccta

SEQ ID NO: 350342 - DNA, 58 bp, Artificial
  Synthetic oligonucleotide
catacgaatacagttatgttcttcttggtccgtgataggaggccctatgggactccta

SEQ ID NO: 350343 - DNA, 56 bp, Artificial
  Synthetic oligonucleotide
catacgaatgtgtgaccatagatcaaggagaagaacccgtggacgtggactgtttc

SEQ ID NO: 350344 - DNA, 60 bp, Artificial
  Synthetic oligonucleotide
catacgaattggctccaaaggagatgtttttgtcataagagaacctttcatatcatgttc

SEQ ID NO: 350345 - DNA, 60 bp, Artificial
  Synthetic oligonucleotide
catacgacatgctcggttaatggtgtgaatgatttcagttataatggtggtacgttgcca

SEQ ID NO: 350346 - DNA, 60 bp, Artificial
  Synthetic oligonucleotide
catacgagcccactaccttgggccacgatctggttagagatctagtcgcagttatcaggg

SEQ ID NO: 350347 - DNA, 55 bp, Artificial
  Synthetic oligonucleotide
catacgagctggtaattctctctgtgtctgagctgcactttgaaaactgttacaa

SEQ ID NO: 350348 - DNA, 60 bp, Artificial
  Synthetic oligonucleotide
catacgagtgtgtgaccatagaccagggggaggaaccggttgatgtggattgcttctgca

SEQ ID NO: 350349 - DNA, 55 bp, Artificial
  Synthetic oligonucleotide
catacgcaacctgtcacctttattcggtgggatcgttcctgcaactacggaagaa

SEQ ID NO: 350350 - DNA, 59 bp, Artificial
  Synthetic oligonucleotide
catacgcatcacggggtctctgtactcaaccctgacgcggtcggaattgactactccgc

SEQ ID NO: 350351 - DNA, 51 bp, Artificial
  Synthetic oligonucleotide
catacgccgcccgccggatagcacggtgtcgtttaagcaacgtaaaccggc

SEQ ID NO: 350352 - DNA, 58 bp, Artificial
  Synthetic oligonucleotide
catacgcgctaaaggaaccggtaatgaagagcgacgcatgggcggtggtacgcgtcca

SEQ ID NO: 350353 - DNA, 54 bp, Artificial
  Synthetic oligonucleotide
catacgctaatgtgttgtctttcgtcgagtctattaggtctagagtcataatta

SEQ ID NO: 350354 - DNA, 60 bp, Artificial
  Synthetic oligonucleotide
catacgctagaaactctgttcctaacaatgagatatctatggctatgactgatgctgaca

SEQ ID NO: 350355 - DNA, 52 bp, Artificial
  Synthetic oligonucleotide
catacgctgtgagaaagcccggactaacatcagtgaacggcactctggtacc

SEQ ID NO: 350356 - DNA, 58 bp, Artificial
  Synthetic oligonucleotide
catacggaggagagaaatgatgaggatgattccggtggggaaagtgatgttgcccggg

SEQ ID NO: 350357 - DNA, 55 bp, Artificial
  Synthetic oligonucleotide
catacggcgcataaggatgaaacacggaacgaaatatcgacggcaggcggaagag

SEQ ID NO: 350358 - DNA, 60 bp, Artificial
  Synthetic oligonucleotide
catacgggagttcttgaaactgcactcgtccatcaatgcacaaactctcggcactcctga

SEQ ID NO: 350359 - DNA, 59 bp, Artificial
  Synthetic oligonucleotide
catacgggattctctcaagaccacacgccatttactgagggtgctaatttgcgttcact

SEQ ID NO: 350360 - DNA, 55 bp, Artificial
  Synthetic oligonucleotide
catacggtaccgggtgcagaccggaccgtataacgtaacacgcataagcactacc

SEQ ID NO: 350361 - DNA, 55 bp, Artificial
  Synthetic oligonucleotide
catacggtcatccgtccttcaagtttgcgcttccacaagcgtgtacgcctcgggc

SEQ ID NO: 350362 - DNA, 55 bp, Artificial
  Synthetic oligonucleotide
catacgtaaaggaatactgcaacgctctggagtgcctgaaaagtaccttggcgtg

SEQ ID NO: 350363 - DNA, 55 bp, Artificial
  Synthetic oligonucleotide
catacgtaacaaacatctctgatgaagttagtgagattggagctagaaagacgac

SEQ ID NO: 350364 - DNA, 54 bp, Artificial
  Synthetic oligonucleotide
catacgtatagtggtcaaacgccaaacgcaaccactggctattattcagctaca

SEQ ID NO: 350365 - DNA, 56 bp, Artificial
  Synthetic oligonucleotide
catacgtcgttgtatggtggcgcattcagtgcgtttacgagtaccagaaggtaaca

SEQ ID NO: 350366 - DNA, 57 bp, Artificial
  Synthetic oligonucleotide
catacgtgatgacctaaataagcacgcagcaatgggtgctcagtacgttggtaaaaa

SEQ ID NO: 350367 - DNA, 60 bp, Artificial
  Synthetic oligonucleotide
catacgtgatgtctacgccatcctagggctagatcccctgggcagacctatgcaacaaac

SEQ ID NO: 350368 - DNA, 59 bp, Artificial
  Synthetic oligonucleotide
catacgtgtataacttgttgtctattaattatggatgctatcaactattcgactttaat

SEQ ID NO: 350369 - DNA, 60 bp, Artificial
  Synthetic oligonucleotide
catacgttgacagcagattacattaactaccacatgaacctatcaaccacatctggcagt

SEQ ID NO: 350370 - DNA, 59 bp, Artificial
  Synthetic oligonucleotide
catacgttgatatgcttcgtgactttcagttaatgtttagtgtggcgggtactgttcat

SEQ ID NO: 350371 - DNA, 60 bp, Artificial
  Synthetic oligonucleotide
catacgtttgcggaaattgcgtatacattatgtcaagcttcagccaatagaccttgggag

SEQ ID NO: 350372 - DNA, 56 bp, Artificial
  Synthetic oligonucleotide
catactaaactcgtgggaatattaaaatatggtggtagaatatggacgtttcatgg

SEQ ID NO: 350373 - DNA, 60 bp, Artificial
  Synthetic oligonucleotide
catactaaaggccctatatatgctgtcaacccgtggaagacagactgtgaaagacaacaa

SEQ ID NO: 350374 - DNA, 56 bp, Artificial
  Synthetic oligonucleotide
catactaacaccgttttattctggatagttagggatcgcagtcctactggaacgcc

SEQ ID NO: 350375 - DNA, 55 bp, Artificial
  Synthetic oligonucleotide
catactaactgttccaagtaagcgagttcaggtttacctgcaggggtttagatac

SEQ ID NO: 350376 - DNA, 60 bp, Artificial
  Synthetic oligonucleotide
catactacagcggtgcgaaactccgtacttacacacgggctgtggagagtctgcatatca

SEQ ID NO: 350377 - DNA, 55 bp, Artificial
  Synthetic oligonucleotide
catactactaggaggaaaagaatggtcctacatcgttgaaaggtcgtcagccgtc

SEQ ID NO: 350378 - DNA, 55 bp, Artificial
  Synthetic oligonucleotide
catactactgcaaaagtaaagaccgctattaccctgtgagtgtggtttcacacgc

SEQ ID NO: 350379 - DNA, 56 bp, Artificial
  Synthetic oligonucleotide
catactacttagtaacatgggcgaattcttcaattgagatgttaatgtcggttttt

SEQ ID NO: 350380 - DNA, 55 bp, Artificial
  Synthetic oligonucleotide
catactagaccgcgtacgtcgcaaagcgacggggacaccagtgcgtcgacgccta

SEQ ID NO: 350381 - DNA, 55 bp, Artificial
  Synthetic oligonucleotide
catactatactgatactacgatttcacagggcaaagtagatacgcccgtgattgc

SEQ ID NO: 350382 - DNA, 60 bp, Artificial
  Synthetic oligonucleotide
catactatatactcaaattagcaggaagatggccagtcaaagtcatacatacagacaatg

SEQ ID NO: 350383 - DNA, 51 bp, Artificial
  Synthetic oligonucleotide
catactatcttaatgtacacaatgtagatattctcaatgatccaatatacc

SEQ ID NO: 350384 - DNA, 55 bp, Artificial
  Synthetic oligonucleotide
catactatgacggtgatggagttgaagaaacaaccgtggtcagcgtaaaaggtgc

SEQ ID NO: 350385 - DNA, 57 bp, Artificial
  Synthetic oligonucleotide
catactcaaaacctacaagctggatgacaggaccaggtttcctaggtgggcaaagag

SEQ ID NO: 350386 - DNA, 60 bp, Artificial
  Synthetic oligonucleotide
catactcaatgccagttgagaccatccacacacgtgcggccaactatcaagtcgctaaaa

SEQ ID NO: 350387 - DNA, 57 bp, Artificial
  Synthetic oligonucleotide
catactcacccagcaaggccgcacgctcgtctttgcccactccgactacgagatgtt

SEQ ID NO: 350388 - DNA, 56 bp, Artificial
  Synthetic oligonucleotide
catactcacccgcctcttgcgggcatattgtgaaggaacgaggagtgccggcttcc

SEQ ID NO: 350389 - DNA, 60 bp, Artificial
  Synthetic oligonucleotide
catactcacccggtctgttctgcggatgcgtcgacgtccaatcagccccactcgcgcttt

SEQ ID NO: 350390 - DNA, 60 bp, Artificial
  Synthetic oligonucleotide
catactcatgcttgttccaatcatagatcttcttggtaagattaacccttattccagcaa

SEQ ID NO: 350391 - DNA, 59 bp, Artificial
  Synthetic oligonucleotide
catactccatacccgcaacactgttggtctggcatacttggcaaaagcaaacccaaaga

SEQ ID NO: 350392 - DNA, 50 bp, Artificial
  Synthetic oligonucleotide
catactcgatcgcctggtttgcattcgcccagtgtggttagtcggtagtg

SEQ ID NO: 350393 - DNA, 60 bp, Artificial
  Synthetic oligonucleotide
catactctacttggagtcaagaacatgtgattgtgctgcctctccggacgatatataagt

SEQ ID NO: 350394 - DNA, 55 bp, Artificial
  Synthetic oligonucleotide
catactctcatcaagctgcctatatgcttactcttagtgtgctggatgccacgac

SEQ ID NO: 350395 - DNA, 60 bp, Artificial
  Synthetic oligonucleotide
catactctcttactcagcatcagactcagatctcagccctgcaagcttgaggattaatga

SEQ ID NO: 350396 - DNA, 60 bp, Artificial
  Synthetic oligonucleotide
catactctggtgcccccaagcaaactctcaagaaaccagttctccgtacagcaacagtgc

SEQ ID NO: 350397 - DNA, 58 bp, Artificial
  Synthetic oligonucleotide
catactcttgacaagaggtcctgatcgtcctataataagcaggtaatcaaacgaaccc

SEQ ID NO: 350398 - DNA, 59 bp, Artificial
  Synthetic oligonucleotide
catactcttgacctcaattcaggggaggctctcaagctcttatttgaaaaagtggctac

SEQ ID NO: 350399 - DNA, 60 bp, Artificial
  Synthetic oligonucleotide
catactgaatcatatgtttgcagcgcagattgtacaataggtgtagacaaagagactgcg

SEQ ID NO: 350400 - DNA, 55 bp, Artificial
  Synthetic oligonucleotide
catactgacacgtcgaggtttgcgtaaagttgacaagccgtgtccgttaaccacg

SEQ ID NO: 350401 - DNA, 60 bp, Artificial
  Synthetic oligonucleotide
catactgagaatgccttagttttgtatatggcttgtactcatgctagcaatcctgtgtat

SEQ ID NO: 350402 - DNA, 60 bp, Artificial
  Synthetic oligonucleotide
catactgagtatagagctgtgtcatgcgattttaataatgggatcaccattcagtacaat

SEQ ID NO: 350403 - DNA, 60 bp, Artificial
  Synthetic oligonucleotide
catactggactcaatgttcattcattacccagatgttggctcacaaagaatggtagttac

SEQ ID NO: 350404 - DNA, 60 bp, Artificial
  Synthetic oligonucleotide
catactggaggactggaactttggtttgcagcctcctccgtctggctccttgcaggacac

SEQ ID NO: 350405 - DNA, 56 bp, Artificial
  Synthetic oligonucleotide
catactggggtagcgtgaaagaagaccgtatagcttatggaggcccatggagattt

SEQ ID NO: 350406 - DNA, 58 bp, Artificial
  Synthetic oligonucleotide
catactggtacattattatgtgtgtccgatgttactcgtggaaatgggttaacccatc

SEQ ID NO: 350407 - DNA, 56 bp, Artificial
  Synthetic oligonucleotide
catactggtggcattggaacacagcctcagaaagagtggaattttcaactgccaca

SEQ ID NO: 350408 - DNA, 55 bp, Artificial
  Synthetic oligonucleotide
catactgtaacatcagtcgggaaaattggactgaaactgtacaaagggtaagagg

SEQ ID NO: 350409 - DNA, 60 bp, Artificial
  Synthetic oligonucleotide
catactgtcctccctcactgtgacatcactcctcagacggctccacaagtggattaatga

SEQ ID NO: 350410 - DNA, 60 bp, Artificial
  Synthetic oligonucleotide
catactgtcctggtgcaatcgcaaatgctatttctcgccttatggctggctttgtacctc

SEQ ID NO: 350411 - DNA, 60 bp, Artificial
  Synthetic oligonucleotide
catactgtcgacggtgaggatcattggtggtatgatgttactcgcagatcgaagatcctt

SEQ ID NO: 350412 - DNA, 60 bp, Artificial
  Synthetic oligonucleotide
catactgttggtatatatggaaaaaagcaagatatgtatcaggatacagcctatggagta

SEQ ID NO: 350413 - DNA, 57 bp, Artificial
  Synthetic oligonucleotide
catacttaaaggtagacagaagtctgattcccataccgttaggtggtgatggttcta

SEQ ID NO: 350414 - DNA, 58 bp, Artificial
  Synthetic oligonucleotide
catacttagcgaaattggataaaattgatgattggtccttaattgcaaaattgattat

SEQ ID NO: 350415 - DNA, 55 bp, Artificial
  Synthetic oligonucleotide
catacttatatttctcgccagcagatcaacgctttatagatcaaactaaggacgc

SEQ ID NO: 350416 - DNA, 51 bp, Artificial
  Synthetic oligonucleotide
catacttcatgaagaaggttagacacgggttagagactaatgatggaacaa

SEQ ID NO: 350417 - DNA, 55 bp, Artificial
  Synthetic oligonucleotide
catacttcatgtgtcgcagatgctttgagaagtttattgtatcatgcgaggatga

SEQ ID NO: 350418 - DNA, 59 bp, Artificial
  Synthetic oligonucleotide
catacttgaaaggacacacaacgggaagctctgcagtctaaatggagtgaagcccctca

SEQ ID NO: 350419 - DNA, 55 bp, Artificial
  Synthetic oligonucleotide
catacttgatcgtcataatgaattctgtgaggtgaaacatgagtgcctctcatta

SEQ ID NO: 350420 - DNA, 51 bp, Artificial
  Synthetic oligonucleotide
catacttggatattgacatgctcagcattttcaacctagtcatgtctagtg

SEQ ID NO: 350421 - DNA, 55 bp, Artificial
  Synthetic oligonucleotide
catacttgggctacaacccagatggggacacacttgaaggccccagagttgcccc

SEQ ID NO: 350422 - DNA, 55 bp, Artificial
  Synthetic oligonucleotide
catacttggtggcatatcaagccactgtctgcgctcgtgcaaaggcgagcccacc

SEQ ID NO: 350423 - DNA, 60 bp, Artificial
  Synthetic oligonucleotide
catacttgtgcgtattatactgtttaacaaactggcaaccaatagcattgactgcacttt

SEQ ID NO: 350424 - DNA, 57 bp, Artificial
  Synthetic oligonucleotide
catactttaagcttcgcgccctcatttacctagatctccctgatcgctacactttag

SEQ ID NO: 350425 - DNA, 59 bp, Artificial
  Synthetic oligonucleotide
catactttcgcacacatgttcggcacttggatggttcaaaaccacgttatgaccttgtg

SEQ ID NO: 350426 - DNA, 55 bp, Artificial
  Synthetic oligonucleotide
catactttctgtataaatgtacccgctgctcgcattgtattcagtcgctctgcgg

SEQ ID NO: 350427 - DNA, 60 bp, Artificial
  Synthetic oligonucleotide
catactttgtaacaagtgaggctaatctgcccatacagtatcagaaatttatgccgactt

SEQ ID NO: 350428 - DNA, 55 bp, Artificial
  Synthetic oligonucleotide
catacttttcgcctttgcttgggaagtatgacaaaagcagattaaacagagcagc

SEQ ID NO: 350429 - DNA, 55 bp, Artificial
  Synthetic oligonucleotide
catagaaaatacgtcggccaacctatctttagcagccatcgccaaccaggcagcc

SEQ ID NO: 350430 - DNA, 54 bp, Artificial
  Synthetic oligonucleotide
catagaaagggtcgaaaggtcttttcattggagaattgttacgatgaccccttg

SEQ ID NO: 350431 - DNA, 54 bp, Artificial
  Synthetic oligonucleotide
catagaaagggtttaatagcatttcatagtcgcttgttctaatagtgacctgtc

SEQ ID NO: 350432 - DNA, 52 bp, Artificial
  Synthetic oligonucleotide
catagaagagaccgtgacgtggtgaccctgagtggtatcttcggttcaccaa

SEQ ID NO: 350433 - DNA, 60 bp, Artificial
  Synthetic oligonucleotide
catagaagagcaacagggtgagtatctagctgaggaccagaaactcaagcgaatgttgtc

SEQ ID NO: 350434 - DNA, 58 bp, Artificial
  Synthetic oligonucleotide
catagaagccccagaccacttcctgcattggagggagacaacacgggggttatatcag

SEQ ID NO: 350435 - DNA, 52 bp, Artificial
  Synthetic oligonucleotide
catagaatcaccattgacttgtagggcgtagtcgtattcaggcacagtgccc

SEQ ID NO: 350436 - DNA, 55 bp, Artificial
  Synthetic oligonucleotide
catagaatggagacagaaaagatacagcacacaaatagatcctgacctagcagac

SEQ ID NO: 350437 - DNA, 60 bp, Artificial
  Synthetic oligonucleotide
catagaatgtttgatcagagtctcaatcaagtgcgcaaaagactcgggaattcgatttag

SEQ ID NO: 350438 - DNA, 53 bp, Artificial
  Synthetic oligonucleotide
catagacaaatatggactcaaccttcctatggttacttacgtgaaggatgagc

SEQ ID NO: 350439 - DNA, 59 bp, Artificial
  Synthetic oligonucleotide
catagacaagccctagtgcggaagagttgtgaacgcctgtatgaaggtcggatgggcgt

SEQ ID NO: 350440 - DNA, 55 bp, Artificial
  Synthetic oligonucleotide
catagacaagtcaacacgccaggcaaaatcaaccaatggaaaatacatccataac

SEQ ID NO: 350441 - DNA, 60 bp, Artificial
  Synthetic oligonucleotide
catagacaccctcaccctgatgctagactcatcaaacaaattcttgcccctttatgcact

SEQ ID NO: 350442 - DNA, 60 bp, Artificial
  Synthetic oligonucleotide
catagacaccctggcatcattttagggatgcccagtctattttcgtggcttgtgcgatgg

SEQ ID NO: 350443 - DNA, 59 bp, Artificial
  Synthetic oligonucleotide
catagacaggtaggatctttacaatacttggcactgacagcattagtaacaccaaaaaa

SEQ ID NO: 350444 - DNA, 58 bp, Artificial
  Synthetic oligonucleotide
catagacatgcctactcaacaagtcggagtcctcactgggcttagcgagggggggtcc

SEQ ID NO: 350445 - DNA, 57 bp, Artificial
  Synthetic oligonucleotide
catagacattggtctgtttttcaacatgttgcaaccctctttgggcggttggataac

SEQ ID NO: 350446 - DNA, 60 bp, Artificial
  Synthetic oligonucleotide
catagaccaaatattttcccatattctgcttcatttacattaaacagatcgcaacctgct

SEQ ID NO: 350447 - DNA, 60 bp, Artificial
  Synthetic oligonucleotide
catagaccgcactttgatacattactgtctaatctggtgaagtgcgctttaattatttca

SEQ ID NO: 350448 - DNA, 55 bp, Artificial
  Synthetic oligonucleotide
catagaccggaggcgatcgaacgcttaaggtatgtcttctgattgttgttaacaa

SEQ ID NO: 350449 - DNA, 55 bp, Artificial
  Synthetic oligonucleotide
catagacgagtgtcatgtgcaggatagtcacacaatagcgttcaattgtgcactt

SEQ ID NO: 350450 - DNA, 55 bp, Artificial
  Synthetic oligonucleotide
catagacgcgacaagagatcagtggcgttagctccccatgtcggcatgggactgg

SEQ ID NO: 350451 - DNA, 58 bp, Artificial
  Synthetic oligonucleotide
catagacgtcaaagcattcgaatcgattgttgggcgcaggagattaaaattaaggaag

SEQ ID NO: 350452 - DNA, 55 bp, Artificial
  Synthetic oligonucleotide
catagacttgggctgtggaagaggaggctggtcatattactgtgcaggactgaag

SEQ ID NO: 350453 - DNA, 60 bp, Artificial
  Synthetic oligonucleotide
catagagaaagaaatcgcctacatacaattgatcagacttatgacagcactggagcatga

SEQ ID NO: 350454 - DNA, 57 bp, Artificial
  Synthetic oligonucleotide
catagagaactggaatttgcaaaacaggagacaacgaacaggttttacatttcacaa

SEQ ID NO: 350455 - DNA, 51 bp, Artificial
  Synthetic oligonucleotide
catagagatcgttatcaggtgttaagaaagtggcatgcaacggtcactggg

SEQ ID NO: 350456 - DNA, 55 bp, Artificial
  Synthetic oligonucleotide
catagagattgaacgagagccgttatttcgtcgagcctcacctcctggtgggagc

SEQ ID NO: 350457 - DNA, 60 bp, Artificial
  Synthetic oligonucleotide
catagagcgacccaccgctgtggacacttgttatccatttgatgtgccagattaccagag

SEQ ID NO: 350458 - DNA, 60 bp, Artificial
  Synthetic oligonucleotide
catagagctaatgcggagtttgactatgactgaaatgttccatgttctgcaaggagccgc

SEQ ID NO: 350459 - DNA, 54 bp, Artificial
  Synthetic oligonucleotide
catagaggcagcagtgattgatatggaagttatctcagccacagctataacaca

SEQ ID NO: 350460 - DNA, 60 bp, Artificial
  Synthetic oligonucleotide
catagaggctagagctacaagtgccagcaagcgatacatgatgaactttaagtccccaca

SEQ ID NO: 350461 - DNA, 52 bp, Artificial
  Synthetic oligonucleotide
catagagggttactcggggacggaatttatataccaaagttggataaagaac

SEQ ID NO: 350462 - DNA, 55 bp, Artificial
  Synthetic oligonucleotide
catagagggttcataatgttgcgtcaaagggcaacacaaaggttcctgttggtcg

SEQ ID NO: 350463 - DNA, 60 bp, Artificial
  Synthetic oligonucleotide
catagagtacaatgatgcgcctggcttaaagcgcacgtccaaacctggcgtgtctggcat

SEQ ID NO: 350464 - DNA, 55 bp, Artificial
  Synthetic oligonucleotide
catagagtacggtaaggcacttgggagtacgtcttccgggagtaggatggagagc

SEQ ID NO: 350465 - DNA, 50 bp, Artificial
  Synthetic oligonucleotide
catagagtatattatgacccatcgaaagacttagtagctgaaatacagaa

SEQ ID NO: 350466 - DNA, 54 bp, Artificial
  Synthetic oligonucleotide
catagagtcctcccagagctcattcgccaatgcattgacagacgcctaaggaca

SEQ ID NO: 350467 - DNA, 51 bp, Artificial
  Synthetic oligonucleotide
catagagttagttaaaggtcttaaaccttattaccacccattaggtcaggg

SEQ ID NO: 350468 - DNA, 55 bp, Artificial
  Synthetic oligonucleotide
catagagttcgcgtaggtgcaaatcccccgccgatacggagcgatatccgtccca

SEQ ID NO: 350469 - DNA, 60 bp, Artificial
  Synthetic oligonucleotide
catagataactgcccgtctggcagaaatttatgtcacagtggtgttcgctgtgtgcggca

SEQ ID NO: 350470 - DNA, 57 bp, Artificial
  Synthetic oligonucleotide
catagataagccaactagacctgacacctcttccaataggttctatacactaaaaag

SEQ ID NO: 350471 - DNA, 55 bp, Artificial
  Synthetic oligonucleotide
catagataattatgcgggcctaaagacctagcccacatggttttgcccgtacgac

SEQ ID NO: 350472 - DNA, 55 bp, Artificial
  Synthetic oligonucleotide
catagatagctcgactcttgaaattaactctagcggacaattagccgtgaagtcg

SEQ ID NO: 350473 - DNA, 60 bp, Artificial
  Synthetic oligonucleotide
catagatatggatgattgttttgtgtctagacatgtcaaggtttgtataattggcacagt

SEQ ID NO: 350474 - DNA, 55 bp, Artificial
  Synthetic oligonucleotide
catagatccaacagatgatatgcctgcccctcttggcacaccagacttccaggcc

SEQ ID NO: 350475 - DNA, 50 bp, Artificial
  Synthetic oligonucleotide
catagatcccatgacaatcaggaatcggaacaaattgccatccactgtag

SEQ ID NO: 350476 - DNA, 57 bp, Artificial
  Synthetic oligonucleotide
catagatcccattgtaattgaccacttctcatgttccctaacttacttaaggcgagg

SEQ ID NO: 350477 - DNA, 55 bp, Artificial
  Synthetic oligonucleotide
catagatccgtgagaaatacgtttagccgcctttaatagaggaaatcccgccgcc

SEQ ID NO: 350478 - DNA, 59 bp, Artificial
  Synthetic oligonucleotide
catagatcgcgacacaggtggggaacaggcacagaatctgcttctgacacttctgcatc

SEQ ID NO: 350479 - DNA, 58 bp, Artificial
  Synthetic oligonucleotide
catagatgaatttcgggaagagacatctaaacaaattgagttaggtattcttagacaa

SEQ ID NO: 350480 - DNA, 60 bp, Artificial
  Synthetic oligonucleotide
catagatgagtctgtcccaacacaagggggcaaccgcattcaagtggtggcagaggtgca

SEQ ID NO: 350481 - DNA, 60 bp, Artificial
  Synthetic oligonucleotide
catagatgctggctgtaaccttattgaccatatagactcaccatcatcaatttgggtctt

SEQ ID NO: 350482 - DNA, 60 bp, Artificial
  Synthetic oligonucleotide
catagatggcataatatgaggatcttgtgctccccaaaatccactgcgtgcaatttgaga

SEQ ID NO: 350483 - DNA, 54 bp, Artificial
  Synthetic oligonucleotide
catagatgtcctgcggacgtctgtgagttaatccgtggtgcgtatccgaagatt

SEQ ID NO: 350484 - DNA, 60 bp, Artificial
  Synthetic oligonucleotide
catagattcattacgcttacacttccctgtcatagaagacgaaggtgcatggttaagtgt

SEQ ID NO: 350485 - DNA, 58 bp, Artificial
  Synthetic oligonucleotide
catagattggtacttatatacctgtaagacgtaaggctaagtctacctctggaactga

SEQ ID NO: 350486 - DNA, 60 bp, Artificial
  Synthetic oligonucleotide
catagatttaagacattttcactgtgcagaggagcagggcattacagactacattcatat

SEQ ID NO: 350487 - DNA, 57 bp, Artificial
  Synthetic oligonucleotide
catagatttataggaattactaatgacagttatgaatgtactagtttaattagttgt

SEQ ID NO: 350488 - DNA, 56 bp, Artificial
  Synthetic oligonucleotide
catagatttggtatattaattacggaccgatcttttaacaacttctggccatcgaa

SEQ ID NO: 350489 - DNA, 60 bp, Artificial
  Synthetic oligonucleotide
catagattttcaggctctggtgcgcatgatgaaaaatttggcgggccaatgtcatttcga

SEQ ID NO: 350490 - DNA, 56 bp, Artificial
  Synthetic oligonucleotide
catagcaaatttagttatgaatattgcaacgtgtctgccaactggggaatatatcg

SEQ ID NO: 350491 - DNA, 58 bp, Artificial
  Synthetic oligonucleotide
catagcaacattaattttccatccagtgagtatggtccgggctcttttcttttgtcac

SEQ ID NO: 350492 - DNA, 60 bp, Artificial
  Synthetic oligonucleotide
catagcaagcgtgagacttatctctggctcccagtcacgtacgcgtcgactgataatgga

SEQ ID NO: 350493 - DNA, 60 bp, Artificial
  Synthetic oligonucleotide
catagcaagtgagatgatctgccgtgaaggcactagcttttggacaagccactatactcc

SEQ ID NO: 350494 - DNA, 57 bp, Artificial
  Synthetic oligonucleotide
catagcaatgtaaaagaattggtattcaaatttggtatacctaggctagtagcaaaa

SEQ ID NO: 350495 - DNA, 60 bp, Artificial
  Synthetic oligonucleotide
catagcaccttgaaccgtaccggaatttaacgccgatgctacagcatcgtcagctgtctg

SEQ ID NO: 350496 - DNA, 60 bp, Artificial
  Synthetic oligonucleotide
catagcagaaacagcccttcgcaagctctatacggacaaagatgccaaaatggaggaaat

SEQ ID NO: 350497 - DNA, 51 bp, Artificial
  Synthetic oligonucleotide
catagcagacactctatgtcttctaggagtaatacagtaaagtatagcccc

SEQ ID NO: 350498 - DNA, 50 bp, Artificial
  Synthetic oligonucleotide
catagcagactggcaggtcagattgttctatgccgagaagaaccaataga

SEQ ID NO: 350499 - DNA, 60 bp, Artificial
  Synthetic oligonucleotide
catagcaggaactactagtaaccttcaggaacaaataggatggatgacacataatccacc

SEQ ID NO: 350500 - DNA, 60 bp, Artificial
  Synthetic oligonucleotide
catagcagggacaacaagcacagtagaagaacagatccagtggatgtttaggccacaaaa

SEQ ID NO: 350501 - DNA, 60 bp, Artificial
  Synthetic oligonucleotide
catagcatactcagagtgctttggggaggatctacacggcacaaagttccacacagtctg

SEQ ID NO: 350502 - DNA, 60 bp, Artificial
  Synthetic oligonucleotide
catagcatggtctagctcaagctgccatgacggaaaggcatggttacatgtttgtgtcac

SEQ ID NO: 350503 - DNA, 60 bp, Artificial
  Synthetic oligonucleotide
catagcattgaaaattcctcagtaaatgtgtccctaacagccatagctaaccaagccaca

SEQ ID NO: 350504 - DNA, 59 bp, Artificial
  Synthetic oligonucleotide
catagccagatctcctggtcaggattgtttaatcccttaactggtaattctctcaggga

SEQ ID NO: 350505 - DNA, 60 bp, Artificial
  Synthetic oligonucleotide
catagccagcaaggccttcttttcatctgaaaagttaagaccacaactgcgaggagaaca

SEQ ID NO: 350506 - DNA, 60 bp, Artificial
  Synthetic oligonucleotide
catagccggaagattatacttagcatattcaccttatgacgaccgagtggacccagcacg

SEQ ID NO: 350507 - DNA, 55 bp, Artificial
  Synthetic oligonucleotide
catagcgaggaatattcctatcccggaggctcccacaaaacaaggggatggccag

SEQ ID NO: 350508 - DNA, 60 bp, Artificial
  Synthetic oligonucleotide
catagcgattaacgcgaaagactctttgagacttgaagttccgcatagtgaatcagtcac

SEQ ID NO: 350509 - DNA, 55 bp, Artificial
  Synthetic oligonucleotide
catagcgctgtgcatactggcttgttaaacatgttgagtaagattcctggttctt

SEQ ID NO: 350510 - DNA, 55 bp, Artificial
  Synthetic oligonucleotide
catagcggcttgtggtaggcattttgagcgaattttcggatatgctgtgcacaaa

SEQ ID NO: 350511 - DNA, 60 bp, Artificial
  Synthetic oligonucleotide
catagcgtggtccagctcaagttgccatgatgggaaggcatggttgcacgtttgtgtcac

SEQ ID NO: 350512 - DNA, 55 bp, Artificial
  Synthetic oligonucleotide
catagcgttcgtcgtagggcagctgaggattgaccactcgggttaacacaaagtc

SEQ ID NO: 350513 - DNA, 55 bp, Artificial
  Synthetic oligonucleotide
catagctaatgaatacagcagtagggttagcgaaagcctgtgtagatacgacacg

SEQ ID NO: 350514 - DNA, 60 bp, Artificial
  Synthetic oligonucleotide
catagctacggctgacgctaggggtcttattcagtcatcccgagctcatgcaatagttgc

SEQ ID NO: 350515 - DNA, 59 bp, Artificial
  Synthetic oligonucleotide
catagctagtgtgggtactctttatgccacttatgaggttgaattatttgacccaataa

SEQ ID NO: 350516 - DNA, 55 bp, Artificial
  Synthetic oligonucleotide
catagctataggtacagaatttcatgcagtaattctcaagagcactggttctatg

SEQ ID NO: 350517 - DNA, 55 bp, Artificial
  Synthetic oligonucleotide
catagctcaccgccctatcgagttagctatcctaaagagaactaagccatccagc

SEQ ID NO: 350518 - DNA, 55 bp, Artificial
  Synthetic oligonucleotide
catagctccatatggtgatggtagagctttcgcgctcatggttgaccttgagtac

SEQ ID NO: 350519 - DNA, 55 bp, Artificial
  Synthetic oligonucleotide
catagctgcttttctcgtcaaccctaatgtcacaacagtacgagaggccggtgtg

SEQ ID NO: 350520 - DNA, 59 bp, Artificial
  Synthetic oligonucleotide
catagctggaaatggagaaatgggtgttgccatccccttcaatttccttaagaatgata

SEQ ID NO: 350521 - DNA, 53 bp, Artificial
  Synthetic oligonucleotide
catagctgggagtctgctaaccccttttgcggggagagtaccctttatacccg

SEQ ID NO: 350522 - DNA, 54 bp, Artificial
  Synthetic oligonucleotide
cataggaccaattccggtagacaaccattccgaactaacacctaacgcgtttgc

SEQ ID NO: 350523 - DNA, 60 bp, Artificial
  Synthetic oligonucleotide
cataggaccagggagaagatttcatgtaacaagagccgtaacaggagatataagacaagc

SEQ ID NO: 350524 - DNA, 55 bp, Artificial
  Synthetic oligonucleotide
cataggaccatgactcacctctcccatcgttcgtgcctctctctgtgagcctcgg

SEQ ID NO: 350525 - DNA, 60 bp, Artificial
  Synthetic oligonucleotide
cataggacgctctaaagtggacatggtgcgaagagtctattgagctagttagtagtcctc

SEQ ID NO: 350526 - DNA, 60 bp, Artificial
  Synthetic oligonucleotide
cataggagacatggtggacagattattggcaagccacctagattcctaagtaagagtttg

SEQ ID NO: 350527 - DNA, 55 bp, Artificial
  Synthetic oligonucleotide
cataggagggagaaaaggtcagtcgcacttgtcccacacgtaggaatggggctgg

SEQ ID NO: 350528 - DNA, 55 bp, Artificial
  Synthetic oligonucleotide
cataggatagataacccagagaaagaagtgctagtatggaagtttgacagccgcc

SEQ ID NO: 350529 - DNA, 60 bp, Artificial
  Synthetic oligonucleotide
cataggatgccagcatcaaatccaatgcagaagcagctgaatgcatctcgcccgctccaa

SEQ ID NO: 350530 - DNA, 54 bp, Artificial
  Synthetic oligonucleotide
cataggatgggccagcagtaactacacaacagcagggagcaaccaaaacagtgt

SEQ ID NO: 350531 - DNA, 60 bp, Artificial
  Synthetic oligonucleotide
cataggatttgcaaaggatggtatcaaggacatatcagctactccggacatactgttcaa

SEQ ID NO: 350532 - DNA, 60 bp, Artificial
  Synthetic oligonucleotide
cataggcaatgggcagtcccgatgatactatacgatgacacaattaaattgattcctgtg

SEQ ID NO: 350533 - DNA, 60 bp, Artificial
  Synthetic oligonucleotide
cataggcagtggagtatacctgtcctgctatacgctcatgacataaggataataccgtta

SEQ ID NO: 350534 - DNA, 59 bp, Artificial
  Synthetic oligonucleotide
cataggccacctccgagcgaagggagcgtgctggaaggatcagctcccgagaggggtaa

SEQ ID NO: 350535 - DNA, 50 bp, Artificial
  Synthetic oligonucleotide
cataggccatacggacggtagtccagttgacccaacgtatcctgatcatt

SEQ ID NO: 350536 - DNA, 60 bp, Artificial
  Synthetic oligonucleotide
cataggcctgaattgtgagcagattaccacccatcccttcgtgttgctcaattggattag

SEQ ID NO: 350537 - DNA, 53 bp, Artificial
  Synthetic oligonucleotide
cataggcctgcatttactacacgtaggggtggtgtacgctttagtaggcttgg

SEQ ID NO: 350538 - DNA, 59 bp, Artificial
  Synthetic oligonucleotide
cataggcggtactatgtcagattcgatgacgaggcccggaagtacggaacaacaggaca

SEQ ID NO: 350539 - DNA, 60 bp, Artificial
  Synthetic oligonucleotide
cataggctttgacatctgacgcgctcttagctccctgaatgttcggatggaaatttgctg

SEQ ID NO: 350540 - DNA, 58 bp, Artificial
  Synthetic oligonucleotide
catagggacagctgtcaaagggcatgtggcacttcatagtgacttgtcatactggatt

SEQ ID NO: 350541 - DNA, 55 bp, Artificial
  Synthetic oligonucleotide
catagggagaaagcaattgttaagatgtccaaatttgcagcaaatggtaagacac

SEQ ID NO: 350542 - DNA, 59 bp, Artificial
  Synthetic oligonucleotide
catagggagtgacgtggaactgcttccgttgcatcttataaacagtgatacaccactga

SEQ ID NO: 350543 - DNA, 60 bp, Artificial
  Synthetic oligonucleotide
catagggcaaactgccaatccctcacaagccaagatatcactgagatagactttgtttga

SEQ ID NO: 350544 - DNA, 57 bp, Artificial
  Synthetic oligonucleotide
catagggcgtaagcgtgtagtcggtcactacacgacgaaaagtcgtctgacatactt

SEQ ID NO: 350545 - DNA, 54 bp, Artificial
  Synthetic oligonucleotide
cataggggcgtctaagtgttacaaccggacatgtgtgccgggtatatcgtataa

SEQ ID NO: 350546 - DNA, 56 bp, Artificial
  Synthetic oligonucleotide
catagggttaaccctttaaatccacattgttgatgctttatgtcattgatgatgcc

SEQ ID NO: 350547 - DNA, 60 bp, Artificial
  Synthetic oligonucleotide
catagggttagctccaatacagcccccggtagggctcaatggatctcagagcgccgcagt

SEQ ID NO: 350548 - DNA, 50 bp, Artificial
  Synthetic oligonucleotide
catagggttggtaagcgtttctgtgttaaatccgtttacgttttgggtaa

SEQ ID NO: 350549 - DNA, 58 bp, Artificial
  Synthetic oligonucleotide
cataggtaaatataagtcttatgtcactgttatagataccgaaggagactcgttctta

SEQ ID NO: 350550 - DNA, 55 bp, Artificial
  Synthetic oligonucleotide
cataggtaattatgtgggcctaaagacctagcccacattgtcttcccagtacgac

SEQ ID NO: 350551 - DNA, 60 bp, Artificial
  Synthetic oligonucleotide
cataggtacttacctgctttgcagatgcctacgacgtgaagtcgtagatgccccgatagg

SEQ ID NO: 350552 - DNA, 53 bp, Artificial
  Synthetic oligonucleotide
cataggtagttatgaggacctaatgacctagcccacattgtcttgcctgtcct

SEQ ID NO: 350553 - DNA, 56 bp, Artificial
  Synthetic oligonucleotide
cataggtggaactcccactgtggttcgccctggggtcattccagaggtaataggcc

SEQ ID NO: 350554 - DNA, 55 bp, Artificial
  Synthetic oligonucleotide
cataggttgccttttgactcaccatcataagggtaaactttgcattgagagttct

SEQ ID NO: 350555 - DNA, 55 bp, Artificial
  Synthetic oligonucleotide
catagtaaaggcacaagaagagcaatacgtctcgataatcagaacaacgttaggg

SEQ ID NO: 350556 - DNA, 55 bp, Artificial
  Synthetic oligonucleotide
catagtaacagactctcaatatgcaatgggaattttgacagcacaacccacacaa

SEQ ID NO: 350557 - DNA, 58 bp, Artificial
  Synthetic oligonucleotide
catagtaacagattctcagtatgcattaggaatattaatgaactgtcctacatcctcg

SEQ ID NO: 350558 - DNA, 60 bp, Artificial
  Synthetic oligonucleotide
catagtaacagcagcacatgttgttggcaacaatacttttgtgaatgtgtgctatgaggg

SEQ ID NO: 350559 - DNA, 60 bp, Artificial
  Synthetic oligonucleotide
catagtaacagtattggtcctggggaatggtgggagcaatggagtctgtaatgagacgat

SEQ ID NO: 350560 - DNA, 55 bp, Artificial
  Synthetic oligonucleotide
catagtaacctgcggtcccttcgcctaccgagacgatgagaaaaactcccaactg

SEQ ID NO: 350561 - DNA, 53 bp, Artificial
  Synthetic oligonucleotide
catagtaacggttacattaatctaaagtttgtgttacacgccgctcttttgtt

SEQ ID NO: 350562 - DNA, 51 bp, Artificial
  Synthetic oligonucleotide
catagtaactacgacgattcttttcatcaagtatttgtcgagagtacagac

SEQ ID NO: 350563 - DNA, 60 bp, Artificial
  Synthetic oligonucleotide
catagtaacttgataattgaacatacttggatattgacatgctcagcattttcaacctag

SEQ ID NO: 350564 - DNA, 57 bp, Artificial
  Synthetic oligonucleotide
catagtaattagtgtctgtagtcaagtcttaggatagtaattagtgtctgtagtcaa

SEQ ID NO: 350565 - DNA, 57 bp, Artificial
  Synthetic oligonucleotide
catagtagagaaaccgaatcctatcaacggcatatgctacccgggtactctagaaaa

SEQ ID NO: 350566 - DNA, 58 bp, Artificial
  Synthetic oligonucleotide
catagtagattaatacctattaactttcctaataaaatgccaataaatgatgatggta

SEQ ID NO: 350567 - DNA, 60 bp, Artificial
  Synthetic oligonucleotide
catagtagcaaaagagatagtggctaactgtgataaatgtcaggtaaaaggagaggctct

SEQ ID NO: 350568 - DNA, 51 bp, Artificial
  Synthetic oligonucleotide
catagtagctggtatgtacaacatggggctgcatgacagagacggcaatgt

SEQ ID NO: 350569 - DNA, 60 bp, Artificial
  Synthetic oligonucleotide
catagtaggagcagagactttctatgtagatggggcagccaatagggagactaagctagg

SEQ ID NO: 350570 - DNA, 60 bp, Artificial
  Synthetic oligonucleotide
catagtaggctacatgccagtaatcatgtgtggagaaaacactctaataagaaactatgc

SEQ ID NO: 350571 - DNA, 55 bp, Artificial
  Synthetic oligonucleotide
catagtaggctgttacctggctcgaacccaggcggacgtcagctgacattcacgg

SEQ ID NO: 350572 - DNA, 59 bp, Artificial
  Synthetic oligonucleotide
catagtagtcattcgatattagtgatttatagtcgtcaatctgacaacgaccatgaagg

SEQ ID NO: 350573 - DNA, 54 bp, Artificial
  Synthetic oligonucleotide
catagtagtcgagaagatctttgctgggccaattatgggtccctctgctcaact

SEQ ID NO: 350574 - DNA, 60 bp, Artificial
  Synthetic oligonucleotide
catagtatactgtcctgagcaagatgatatgctgtctggagtttttgaggttgacgccac

SEQ ID NO: 350575 - DNA, 56 bp, Artificial
  Synthetic oligonucleotide
catagtatcttacggattgtaaggttctggccggggaacgtcgttcatcgcttcta

SEQ ID NO: 350576 - DNA, 51 bp, Artificial
  Synthetic oligonucleotide
catagtcaaccccccaaaatacgagttcccaaccatcactctcactacaaa

SEQ ID NO: 350577 - DNA, 59 bp, Artificial
  Synthetic oligonucleotide
catagtcaacgtcgtgaatgcttggtacaatgacggagaagttaatgcaagagcacgcc

SEQ ID NO: 350578 - DNA, 58 bp, Artificial
  Synthetic oligonucleotide
catagtcaggtaaggacactacagctcctagccttaagagtagtagtaaaagcaaaga

SEQ ID NO: 350579 - DNA, 52 bp, Artificial
  Synthetic oligonucleotide
catagtccagataaacacgggttacgtcgcatctactaacgtaataaggccg

SEQ ID NO: 350580 - DNA, 55 bp, Artificial
  Synthetic oligonucleotide
catagtccagcaggcgttacgtcaccaaatcggcttacgtattagtcttgacagc

SEQ ID NO: 350581 - DNA, 60 bp, Artificial
  Synthetic oligonucleotide
catagtcctcttgtcagagtgttgcaaaactgcgcttggttgagaggaacgatccatttt

SEQ ID NO: 350582 - DNA, 58 bp, Artificial
  Synthetic oligonucleotide
catagtcctgtcgttgccacacatttcctatcccatccaaatggcgtttccctctcct

SEQ ID NO: 350583 - DNA, 60 bp, Artificial
  Synthetic oligonucleotide
catagtcgctgcatggcacatcaagggcagggctgttccagcctttacctatggcatctt

SEQ ID NO: 350584 - DNA, 55 bp, Artificial
  Synthetic oligonucleotide
catagtcgttgcaaacgcgcaccacgtattggtagccgattaggaagtgcggcgg

SEQ ID NO: 350585 - DNA, 55 bp, Artificial
  Synthetic oligonucleotide
catagtctacttcggaatacgttcttatagatggattcccctctcttgttagacc

SEQ ID NO: 350586 - DNA, 60 bp, Artificial
  Synthetic oligonucleotide
catagtctttcaatctcctcaaacaatattatgagcgtaaacttccggcaatcaagggca

SEQ ID NO: 350587 - DNA, 55 bp, Artificial
  Synthetic oligonucleotide
catagtgaatgtgctctctggactgaaatggactcgctgcgtgatgaagcgcccc

SEQ ID NO: 350588 - DNA, 60 bp, Artificial
  Synthetic oligonucleotide
catagtgacagtcaaaagtgaaatcgagtacggcataccattattcgtgagagatgcgct

SEQ ID NO: 350589 - DNA, 55 bp, Artificial
  Synthetic oligonucleotide
catagtgagcaccgctatggttttgtgtgtcagcaaggtgaagttgagaccgtcc

SEQ ID NO: 350590 - DNA, 55 bp, Artificial
  Synthetic oligonucleotide
catagtgcagaccgggccctttagttacaaagacgagcttaaaaacagcaccctg

SEQ ID NO: 350591 - DNA, 51 bp, Artificial
  Synthetic oligonucleotide
catagtgcctcactgtgccactgtgtcttgtggcatgacacaattatagta

SEQ ID NO: 350592 - DNA, 58 bp, Artificial
  Synthetic oligonucleotide
catagtgctctttatggttgcctggggtaaagaggctgtggataatttccaccttgga

SEQ ID NO: 350593 - DNA, 60 bp, Artificial
  Synthetic oligonucleotide
catagtgctgtgcatactggtttgttaaatatgcttagcaaagtcccaggttctttgaaa

SEQ ID NO: 350594 - DNA, 50 bp, Artificial
  Synthetic oligonucleotide
catagtggagaggcctagcgcaccagagggaatgtgttaccctggatcta

SEQ ID NO: 350595 - DNA, 55 bp, Artificial
  Synthetic oligonucleotide
catagtggatgattatgatgttgttattgctaagttgatgcccatggtgtttgac

SEQ ID NO: 350596 - DNA, 55 bp, Artificial
  Synthetic oligonucleotide
catagtggctatccctccacttaaatcgaagggtctttcactgcggatatgtagg

SEQ ID NO: 350597 - DNA, 55 bp, Artificial
  Synthetic oligonucleotide
catagtgtaccggctcttctcaggcatgcaaggcccatactctgggatcgggtcc

SEQ ID NO: 350598 - DNA, 56 bp, Artificial
  Synthetic oligonucleotide
catagtgtactttactgttgtaggatttgcctacctatttagtaggaataagacga

SEQ ID NO: 350599 - DNA, 51 bp, Artificial
  Synthetic oligonucleotide
catagttatctctattcacccagtcaagttcattaataaatacactaatgt

SEQ ID NO: 350600 - DNA, 53 bp, Artificial
  Synthetic oligonucleotide
catagttgtcaaggttcaacattggactacgccagtatagatcttagagaaac

SEQ ID NO: 350601 - DNA, 58 bp, Artificial
  Synthetic oligonucleotide
catagtttacctcagtgttggcttgtacgtaatggctcctacttaaatgagacacact

SEQ ID NO: 350602 - DNA, 55 bp, Artificial
  Synthetic oligonucleotide
catagtttagataattataggggtataccaggagaacttggaacttgtatcttgg

SEQ ID NO: 350603 - DNA, 56 bp, Artificial
  Synthetic oligonucleotide
catagtttatttcatatcacattttccacccacgagtgctagcattatagaagtgg

SEQ ID NO: 350604 - DNA, 55 bp, Artificial
  Synthetic oligonucleotide
catagttttacaactagaccaggtagttccaacttcggaggaggagtccacaaca

SEQ ID NO: 350605 - DNA, 56 bp, Artificial
  Synthetic oligonucleotide
catagttttactcattgcggacaagcagcccttacacttcatggggccaccacaac

SEQ ID NO: 350606 - DNA, 53 bp, Artificial
  Synthetic oligonucleotide
catagttttataggtgtgctacgggccaatctagaggtatgttatggggccta

SEQ ID NO: 350607 - DNA, 60 bp, Artificial
  Synthetic oligonucleotide
catataaaaacgccattctttgcttgacgagcagtgatgtgttcccctgtgcgtgaatcc

SEQ ID NO: 350608 - DNA, 56 bp, Artificial
  Synthetic oligonucleotide
catataaaaccagtttacaaatatattactgcacaaggagtcgaaaactcagacgg

SEQ ID NO: 350609 - DNA, 60 bp, Artificial
  Synthetic oligonucleotide
catataaaagcatggtgtcctcgcccaccaagggctgttgcctatcaacacacacactca

SEQ ID NO: 350610 - DNA, 55 bp, Artificial
  Synthetic oligonucleotide
catataaaaggggaagcaattcatggtcaggtagactacagtccagaagtatggc

SEQ ID NO: 350611 - DNA, 51 bp, Artificial
  Synthetic oligonucleotide
catataaacggttcaaacttcgctttaaactgcgtttttgtggacgtaaaa

SEQ ID NO: 350612 - DNA, 54 bp, Artificial
  Synthetic oligonucleotide
catataaacgtgtcgctaaaccaaaacgacgcaaacgtgctcattctaaccgta

SEQ ID NO: 350613 - DNA, 59 bp, Artificial
  Synthetic oligonucleotide
catataaactaacacagccacggataaatcgtattaagctatgataagtctaggatagg

SEQ ID NO: 350614 - DNA, 60 bp, Artificial
  Synthetic oligonucleotide
catataaactcaagaaagtaataaacgccttgagtggaatcgatctgtcacatctgcgaa

SEQ ID NO: 350615 - DNA, 54 bp, Artificial
  Synthetic oligonucleotide
catataaagacgtaccaagccaaagctttaacttacgcaaacgttctgtccttc

SEQ ID NO: 350616 - DNA, 58 bp, Artificial
  Synthetic oligonucleotide
catataaagcaattccctgttgcagtcttggtcgccaagtatggatttgtgggaccct

SEQ ID NO: 350617 - DNA, 51 bp, Artificial
  Synthetic oligonucleotide
catataacctatgctcagatgtatggatgttcccaaatcaaatttgggaca

SEQ ID NO: 350618 - DNA, 55 bp, Artificial
  Synthetic oligonucleotide
catataacgctgagttgctcattttgctcgagaatgaaaggactctagatttcca

SEQ ID NO: 350619 - DNA, 52 bp, Artificial
  Synthetic oligonucleotide
catataagcaaagatcaaaggttgatcttagaagcatacatctaacagatta

SEQ ID NO: 350620 - DNA, 60 bp, Artificial
  Synthetic oligonucleotide
catataagcagcagtcactgctactgcacccagacaaaggtggaagccatgccttaatgc

SEQ ID NO: 350621 - DNA, 55 bp, Artificial
  Synthetic oligonucleotide
catataaggaatctgctggtgcgcatacgtgtgtaaccgcggaggctgggtcaac

SEQ ID NO: 350622 - DNA, 52 bp, Artificial
  Synthetic oligonucleotide
catataaggctaataattatcaatatacatatatgagggatggcatagaagt

SEQ ID NO: 350623 - DNA, 55 bp, Artificial
  Synthetic oligonucleotide
catataatcatcaggaggcagggaagtatgataatcacacggagaatgcattgct

SEQ ID NO: 350624 - DNA, 57 bp, Artificial
  Synthetic oligonucleotide
catataatgcagagctgctagtcgcactcgaaaaccaacacactatagatgtgactg

SEQ ID NO: 350625 - DNA, 60 bp, Artificial
  Synthetic oligonucleotide
catataatgcatgggggtgctgttatgattgagggacgtggattcagacaggcttatagt

SEQ ID NO: 350626 - DNA, 60 bp, Artificial
  Synthetic oligonucleotide
catataatggacaaggtgtgaagagccccgtgtgctcaccttgagtcctccggcccctga

SEQ ID NO: 350627 - DNA, 60 bp, Artificial
  Synthetic oligonucleotide
catataatggtcgctatcacaaggttcaacaaaggctactctttcgctctgggaagcaag

SEQ ID NO: 350628 - DNA, 59 bp, Artificial
  Synthetic oligonucleotide
catataattggaagagtgcagctactgaaaaacgtccctatcattatatcaaggaaggt

SEQ ID NO: 350629 - DNA, 60 bp, Artificial
  Synthetic oligonucleotide
catataattgggattatagccaacctatagccatggcaaatatggattatcctatagttc

SEQ ID NO: 350630 - DNA, 55 bp, Artificial
  Synthetic oligonucleotide
catatacaaacaacaaggggaaagaagtgcttgtactttggggagtgcatcatcc

SEQ ID NO: 350631 - DNA, 55 bp, Artificial
  Synthetic oligonucleotide
catatacaagcaatccaatacgaacattatggctcggcgtcaatcagagccacag

SEQ ID NO: 350632 - DNA, 55 bp, Artificial
  Synthetic oligonucleotide
catatacacatcctggacacagtccggacaattaacacagaacggtctttccgtg

SEQ ID NO: 350633 - DNA, 60 bp, Artificial
  Synthetic oligonucleotide
catatacatgggggaacctctggaaaatgatgaagactgtgcacactggaaagaagctaa

SEQ ID NO: 350634 - DNA, 59 bp, Artificial
  Synthetic oligonucleotide
catataccaggtgaggtgcgtaacctgatggaaattgcggaggtggactctgtagtgcc

SEQ ID NO: 350635 - DNA, 56 bp, Artificial
  Synthetic oligonucleotide
catatacggggatgcccaaccagaaacctaaagtgcccacactaagacaggctaag

SEQ ID NO: 350636 - DNA, 57 bp, Artificial
  Synthetic oligonucleotide
catatactaagagggccattacactttcaacggcgtgcaatattgggggcgcttaaa

SEQ ID NO: 350637 - DNA, 60 bp, Artificial
  Synthetic oligonucleotide
catatactagtcacaagggagccctacttgtcctgtgacccacaaggctgcaggatgttt

SEQ ID NO: 350638 - DNA, 55 bp, Artificial
  Synthetic oligonucleotide
catatactcatgaatagttttaaccactttctggacgatcaaatagaacagccgg

SEQ ID NO: 350639 - DNA, 55 bp, Artificial
  Synthetic oligonucleotide
catatagaatgtaggaaaccctataaagaattgagattggaagttgggaaacaaa

SEQ ID NO: 350640 - DNA, 58 bp, Artificial
  Synthetic oligonucleotide
catatagaatgtatttagggatcaactatgcactaatttacttatacgggtagtattg

SEQ ID NO: 350641 - DNA, 55 bp, Artificial
  Synthetic oligonucleotide
catatagaccaaaccggacgctgcctcagtctctcggtgcgtggaccaggcggtg

SEQ ID NO: 350642 - DNA, 60 bp, Artificial
  Synthetic oligonucleotide
catatagaggaatgttcctgttatccccgatacccaaacgtcagatgtgtctgcagggac

SEQ ID NO: 350643 - DNA, 51 bp, Artificial
  Synthetic oligonucleotide
catataggaaattagtcttgggctggtcctattaccgttgtgctatggagt

SEQ ID NO: 350644 - DNA, 51 bp, Artificial
  Synthetic oligonucleotide
catataggatccgggttgcacatacgcttacaaagaatcttagaaaagcat

SEQ ID NO: 350645 - DNA, 55 bp, Artificial
  Synthetic oligonucleotide
catataggccacaatggtattaagtccgttgggtatgacatagttatgtgctatg

SEQ ID NO: 350646 - DNA, 60 bp, Artificial
  Synthetic oligonucleotide
catatagtgttattatgtaagcgaatcaaatatcgtatatatcaagtgtttattacaatt

SEQ ID NO: 350647 - DNA, 55 bp, Artificial
  Synthetic oligonucleotide
catatagttcagctccgtagagtattaacaacggctacgataactcttttaccag

SEQ ID NO: 350648 - DNA, 60 bp, Artificial
  Synthetic oligonucleotide
catatataacaggatggggacggtgaccacagaagtggcttttggtctagtatgtgccac

SEQ ID NO: 350649 - DNA, 55 bp, Artificial
  Synthetic oligonucleotide
catatataagtgatgttggtcaccgagaacagcgtttggtggttgatgcgccggg

SEQ ID NO: 350650 - DNA, 55 bp, Artificial
  Synthetic oligonucleotide
catatatacaatacaattgtccaaccaacctaagatggctgaggaaatctttgcc

SEQ ID NO: 350651 - DNA, 60 bp, Artificial
  Synthetic oligonucleotide
catatatagtggaaagacctacagctcaaaatgggatctgctacccaggaggtttgaatg

SEQ ID NO: 350652 - DNA, 55 bp, Artificial
  Synthetic oligonucleotide
catatatagtggaaaggcctacagcccaaaatgggatatgctacccaggagtgct

SEQ ID NO: 350653 - DNA, 60 bp, Artificial
  Synthetic oligonucleotide
catatatagtggagagacccacagctcaaaatggcatctgctacccaggaactttgcatg

SEQ ID NO: 350654 - DNA, 54 bp, Artificial
  Synthetic oligonucleotide
catatatcaagttaaagcgacttcgttttaaaggaactctgaagattgaacggg

SEQ ID NO: 350655 - DNA, 60 bp, Artificial
  Synthetic oligonucleotide
catatatcatgatttatggacataattcatatacgtggtttaatatgtagcatatgaatg

SEQ ID NO: 350656 - DNA, 60 bp, Artificial
  Synthetic oligonucleotide
catatatccttttgacgaaaacaccctcaaaaagctgagataagaggcgcgtgcaattgc

SEQ ID NO: 350657 - DNA, 60 bp, Artificial
  Synthetic oligonucleotide
catatatcgaggcggttgggccatacacgttcagtgcaatgctaccaaatttcaccaagg

SEQ ID NO: 350658 - DNA, 55 bp, Artificial
  Synthetic oligonucleotide
catatatctcatatcgtcatactagaaaggacacagaccggtatatattaggcct

SEQ ID NO: 350659 - DNA, 60 bp, Artificial
  Synthetic oligonucleotide
catatatgccatttaaggcgttgcaaaataccagtccaactgggaataacaccagtcagc

SEQ ID NO: 350660 - DNA, 60 bp, Artificial
  Synthetic oligonucleotide
catatatgttccaacccttgatgactttagatcaatggaggcttttgctggtatctttaa

SEQ ID NO: 350661 - DNA, 59 bp, Artificial
  Synthetic oligonucleotide
catatattagttcacatggccatccaacgttaaagtcgtcgttgaaatccgcaatgacg

SEQ ID NO: 350662 - DNA, 55 bp, Artificial
  Synthetic oligonucleotide
catatattcgtatcatttgcacttgtgaaatctagtcacatgggagatctatggg

SEQ ID NO: 350663 - DNA, 60 bp, Artificial
  Synthetic oligonucleotide
catatattgaactgttctgacatatcttcatccacaatatgcaatgctatatacgggact

SEQ ID NO: 350664 - DNA, 60 bp, Artificial
  Synthetic oligonucleotide
catatattgatacaggtgcatcattatgcttattaccagaatataatttaccaaaacaat

SEQ ID NO: 350665 - DNA, 58 bp, Artificial
  Synthetic oligonucleotide
catatatttagcctataggatgtttgcctctaggcagggtccttattcaggagaatca

SEQ ID NO: 350666 - DNA, 60 bp, Artificial
  Synthetic oligonucleotide
catatcaaacagaggactgtttggagcgattgcagggttcatagaaggcggttggccagg

SEQ ID NO: 350667 - DNA, 55 bp, Artificial
  Synthetic oligonucleotide
catatcaaacggcaggattctgggcatcaatgtgggaccaaggagaaatcgaatc

SEQ ID NO: 350668 - DNA, 56 bp, Artificial
  Synthetic oligonucleotide
catatcaacaaatctggaatacatttggtccaggtattcctaaagattcaaggctc

SEQ ID NO: 350669 - DNA, 55 bp, Artificial
  Synthetic oligonucleotide
catatcaaccatggatgtcatgtcggagatgtgtcgcacatagccccaaagagag

SEQ ID NO: 350670 - DNA, 57 bp, Artificial
  Synthetic oligonucleotide
catatcaacctacttcattcaatctgccgattgattattggatgttgattgcaccta

SEQ ID NO: 350671 - DNA, 50 bp, Artificial
  Synthetic oligonucleotide
catatcaagatctattcacccctgattgctatcttatgttccataggacg

SEQ ID NO: 350672 - DNA, 60 bp, Artificial
  Synthetic oligonucleotide
catatcaagcttatggagtgtattctagttcgcgtgtatttaccatcactttcccgactg

SEQ ID NO: 350673 - DNA, 55 bp, Artificial
  Synthetic oligonucleotide
catatcaagtgggttaaagccccgtatgcttggagaccaggtttgtttgccgact

SEQ ID NO: 350674 - DNA, 60 bp, Artificial
  Synthetic oligonucleotide
catatcaagttgttgtgttttctgatcatcattaagtggccgtcatgggtgatatattag

SEQ ID NO: 350675 - DNA, 55 bp, Artificial
  Synthetic oligonucleotide
catatcacaagatcaggggagaaacagaacctttacgctcaagcccagatggagg

SEQ ID NO: 350676 - DNA, 60 bp, Artificial
  Synthetic oligonucleotide
catatcaccggcgggagcgcagtgtttgctttttcaaaggtcagagatatacatgtacag

SEQ ID NO: 350677 - DNA, 60 bp, Artificial
  Synthetic oligonucleotide
catatcagacttgcgaggttatggtttcgagacgtgtaactacgtcactgacgagaccga

SEQ ID NO: 350678 - DNA, 55 bp, Artificial
  Synthetic oligonucleotide
catatcagatgtgtttgtctgtctcacgtatgatatccctatcgcagggcgggtc

SEQ ID NO: 350679 - DNA, 60 bp, Artificial
  Synthetic oligonucleotide
catatcatatccagaaacaaggaatattccagaagttatatacactgagccagacacgac

SEQ ID NO: 350680 - DNA, 60 bp, Artificial
  Synthetic oligonucleotide
catatcatgatggcaacacaagagcctacgctactatgtggatgcaggaagcctgcaatc

SEQ ID NO: 350681 - DNA, 60 bp, Artificial
  Synthetic oligonucleotide
catatcatgctttttgctttgtgttgtgctgatggggttcattatgtgggcctgccagag

SEQ ID NO: 350682 - DNA, 53 bp, Artificial
  Synthetic oligonucleotide
catatccaactaactacagaatatgcaatgctaagtaagtactgtgactatta

SEQ ID NO: 350683 - DNA, 58 bp, Artificial
  Synthetic oligonucleotide
catatccaatattggcgatttgtcagtattcaggatcaaacatgtcaccgatattttt

SEQ ID NO: 350684 - DNA, 55 bp, Artificial
  Synthetic oligonucleotide
catatccaggtacttaaggacctgggttctgaaaactctcaagaaacgcccagtc

SEQ ID NO: 350685 - DNA, 51 bp, Artificial
  Synthetic oligonucleotide
catatccagtcatcaattacgtcatacaggctcatacgatgtaaagcatcg

SEQ ID NO: 350686 - DNA, 57 bp, Artificial
  Synthetic oligonucleotide
catatcccaatagaggaagctagattagtaattagaacatattggggtttacaacca

SEQ ID NO: 350687 - DNA, 55 bp, Artificial
  Synthetic oligonucleotide
catatcccttccaacaagccaatcttccatccaagatgatgaactcacacctgga

SEQ ID NO: 350688 - DNA, 56 bp, Artificial
  Synthetic oligonucleotide
catatcccttttacgtctgcccagggcataccccttcgatgagaccaaaggggaca

SEQ ID NO: 350689 - DNA, 52 bp, Artificial
  Synthetic oligonucleotide
catatccgtcttttatccgcatacattctagccgtactgatgattccgtcgc

SEQ ID NO: 350690 - DNA, 60 bp, Artificial
  Synthetic oligonucleotide
catatccttagaacaagctgtgtatggaatggagaacctggaaccactcgatcttaccac

SEQ ID NO: 350691 - DNA, 60 bp, Artificial
  Synthetic oligonucleotide
catatcgaagagcgaggacagctgggctatcatcgccacaaggggtaagatgaaccactt

SEQ ID NO: 350692 - DNA, 60 bp, Artificial
  Synthetic oligonucleotide
catatcgggattcgattggtcagtgcaacattgggagctaatggcggatgtcgaaatgag

SEQ ID NO: 350693 - DNA, 60 bp, Artificial
  Synthetic oligonucleotide
catatcggtggaacggtgggcaatatataccatgccctccaaatggcataattgtaatta

SEQ ID NO: 350694 - DNA, 59 bp, Artificial
  Synthetic oligonucleotide
catatctaaagatgctcttgagtttgagcacaagatgtggctcagcatgttccctaaaa

SEQ ID NO: 350695 - DNA, 60 bp, Artificial
  Synthetic oligonucleotide
catatctaaatggtggtgtgaatttcatagatattcctacataaaggataagagagctgg

SEQ ID NO: 350696 - DNA, 56 bp, Artificial
  Synthetic oligonucleotide
catatctataatacctatggggatacttgggaaggagttgaagcttttataagaac

SEQ ID NO: 350697 - DNA, 50 bp, Artificial
  Synthetic oligonucleotide
catatctcaataaacgctttcgtataccaccgcttcctttcttaacgcat

SEQ ID NO: 350698 - DNA, 55 bp, Artificial
  Synthetic oligonucleotide
catatctccagactacatacaaaatttagcaacaattggggttttagcgacacct

SEQ ID NO: 350699 - DNA, 51 bp, Artificial
  Synthetic oligonucleotide
catatctctgacagaaccagcacctccagccattgctgacctgttgtcatc

SEQ ID NO: 350700 - DNA, 60 bp, Artificial
  Synthetic oligonucleotide
catatctgaaaatatggccgcgcagcggaagtgttttgcgaataagaggatgttgatatc

SEQ ID NO: 350701 - DNA, 55 bp, Artificial
  Synthetic oligonucleotide
catatctgagacgatgttccgctgtcccagaccagtccagcaatggacgggccag

SEQ ID NO: 350702 - DNA, 59 bp, Artificial
  Synthetic oligonucleotide
catatctgatgtcacacgtggcaacggtataacccaccgtgtcggtaagcgtttctgcg

SEQ ID NO: 350703 - DNA, 54 bp, Artificial
  Synthetic oligonucleotide
catatctgctacttcaaatggtgttgtaggtctagtgctttccatatacaaccg

SEQ ID NO: 350704 - DNA, 60 bp, Artificial
  Synthetic oligonucleotide
catatctggatgggcttaatacatggctggggaggacaataagcatagcttcaagatccg

SEQ ID NO: 350705 - DNA, 60 bp, Artificial
  Synthetic oligonucleotide
catatcttgacggagcagacgtatcaacggataatgggcccattttatcagtgtttgcct

SEQ ID NO: 350706 - DNA, 60 bp, Artificial
  Synthetic oligonucleotide
catatcttgatacagacagcagaatgctgagcacaactaagacaagcatcaattatgggg

SEQ ID NO: 350707 - DNA, 58 bp, Artificial
  Synthetic oligonucleotide
catatctttaaagatcagatttatgtggtagaaggtggtatgccctccgggtgctctg

SEQ ID NO: 350708 - DNA, 56 bp, Artificial
  Synthetic oligonucleotide
catatctttaaatgtctggacagggactagagattactgtcaaataatgcatttca

SEQ ID NO: 350709 - DNA, 55 bp, Artificial
  Synthetic oligonucleotide
catatgaaacttgtagtatagacctagcaagaacactacgaaagttatcctgggc

SEQ ID NO: 350710 - DNA, 60 bp, Artificial
  Synthetic oligonucleotide
catatgaacatgtcgacgacatccggcagtgtggtcactgataaagtcgtccctctccta

SEQ ID NO: 350711 - DNA, 60 bp, Artificial
  Synthetic oligonucleotide
catatgaagctagcactgtagctggagattgtggttctttgatattggcagagattgatg

SEQ ID NO: 350712 - DNA, 60 bp, Artificial
  Synthetic oligonucleotide
catatgaatcgtcgtgtgaattgtcgtgtgaacgccgcacattgcgacttattgcgtcat

SEQ ID NO: 350713 - DNA, 59 bp, Artificial
  Synthetic oligonucleotide
catatgaatttggagtatcggccactatctggaagtactaggtatgtggcacgacctgg

SEQ ID NO: 350714 - DNA, 53 bp, Artificial
  Synthetic oligonucleotide
catatgacaggtgttgatatgtaacaacacatatgttgtaattggtacaacaa

SEQ ID NO: 350715 - DNA, 60 bp, Artificial
  Synthetic oligonucleotide
catatgacatccctgactatgcatcgctccgatccattgtagcatcctcaggaacattgg

SEQ ID NO: 350716 - DNA, 50 bp, Artificial
  Synthetic oligonucleotide
catatgacgcataaattcacaacctctgatggatgtgaactcgtctatgt

SEQ ID NO: 350717 - DNA, 58 bp, Artificial
  Synthetic oligonucleotide
catatgactaaccgacgatataactctcgttattctatgtttaaccgtatgaccgcta

SEQ ID NO: 350718 - DNA, 60 bp, Artificial
  Synthetic oligonucleotide
catatgacttgcggtggactagactggcattattagagtccacgacattaagtagcgcgt

SEQ ID NO: 350719 - DNA, 55 bp, Artificial
  Synthetic oligonucleotide
catatgagattgctcggttacaagcgaatatgggacagtttcgcgcggctctgcg

SEQ ID NO: 350720 - DNA, 60 bp, Artificial
  Synthetic oligonucleotide
catatgagattgtggctactacgaggcacagacgttcattggtgtactatactgcgatcg

SEQ ID NO: 350721 - DNA, 60 bp, Artificial
  Synthetic oligonucleotide
catatgaggttgaagattcacagatgggaattattctgaatggccttatggtgtggtgca

SEQ ID NO: 350722 - DNA, 60 bp, Artificial
  Synthetic oligonucleotide
catatgagtcgttggcagactgctgacctcctcttgcagatctgccgtcgacttggaatt

SEQ ID NO: 350723 - DNA, 57 bp, Artificial
  Synthetic oligonucleotide
catatgagtgggtctttgggctttctatgtctgaaagactcaccacttacactgtgg

SEQ ID NO: 350724 - DNA, 60 bp, Artificial
  Synthetic oligonucleotide
catatgatagctgggccattacagtgcgagacatggtgcagcttcgtaggaagtgtgaga

SEQ ID NO: 350725 - DNA, 60 bp, Artificial
  Synthetic oligonucleotide
catatgatcctgcacttggcttcttcctaatggataatcctaaatgtgctggcttgttgg

SEQ ID NO: 350726 - DNA, 60 bp, Artificial
  Synthetic oligonucleotide
catatgatctggggtatgtgagactcggtgaccccattcccgctatagggcttgacccaa

SEQ ID NO: 350727 - DNA, 60 bp, Artificial
  Synthetic oligonucleotide
catatgatggctgtttaggcatgttcggtctatcaatatcattagcttcaaagccgaccg

SEQ ID NO: 350728 - DNA, 56 bp, Artificial
  Synthetic oligonucleotide
catatgatgggtttacgacggagagtggatttcggtgtgatatgtggacactcaag

SEQ ID NO: 350729 - DNA, 60 bp, Artificial
  Synthetic oligonucleotide
catatgcaaaacctacaagttggatgactggaccaggtttactcagtgcacaaagagtag

SEQ ID NO: 350730 - DNA, 55 bp, Artificial
  Synthetic oligonucleotide
catatgcaagggcgaattcttctcttccaatgagacttatagcatcatcgaaagg

SEQ ID NO: 350731 - DNA, 59 bp, Artificial
  Synthetic oligonucleotide
catatgcacgttataatgctgtcaagcgttcatcaattgttaaacgggttaatgggaaa

SEQ ID NO: 350732 - DNA, 55 bp, Artificial
  Synthetic oligonucleotide
catatgcagccctgtcctcacagacaatccacgtcccaatgaccccgcggtaggc

SEQ ID NO: 350733 - DNA, 60 bp, Artificial
  Synthetic oligonucleotide
catatgccaacgcactggatttatcagccatcttgtgagtgatgcattgcttgttggatt

SEQ ID NO: 350734 - DNA, 57 bp, Artificial
  Synthetic oligonucleotide
catatgccaagttaacagggtgctaacatggtcctttccagaacgtacgtattgatc

SEQ ID NO: 350735 - DNA, 55 bp, Artificial
  Synthetic oligonucleotide
catatgccccgttttctttcagatgtcgttgtggcggcctagcgactccaaggta

SEQ ID NO: 350736 - DNA, 59 bp, Artificial
  Synthetic oligonucleotide
catatgcccgaggttcagatgagggcaatcgacacaccagcgaaaccctaacgtacaaa

SEQ ID NO: 350737 - DNA, 51 bp, Artificial
  Synthetic oligonucleotide
catatgccctcccgctatcccggcagccccatcgaaacccggcgttggtgg

SEQ ID NO: 350738 - DNA, 55 bp, Artificial
  Synthetic oligonucleotide
catatgccctgcatatctatgcaccgaggggaactccgatcactgaatatcatgc

SEQ ID NO: 350739 - DNA, 60 bp, Artificial
  Synthetic oligonucleotide
catatgcctgtagtgagctcccagctctatataaggactcattgtatcagttgcaagcat

SEQ ID NO: 350740 - DNA, 60 bp, Artificial
  Synthetic oligonucleotide
catatgcctgtgctaccagagatggtatgagtggtgctcctgttcttgacgttaatggaa

SEQ ID NO: 350741 - DNA, 60 bp, Artificial
  Synthetic oligonucleotide
catatgcgactgattattcgataaggttattgcaaccttcgcagcgtacggtcatcacaa

SEQ ID NO: 350742 - DNA, 53 bp, Artificial
  Synthetic oligonucleotide
catatgcgtcatttgcacattgaggaccgcctctatttgatctgccgtcgacc

SEQ ID NO: 350743 - DNA, 55 bp, Artificial
  Synthetic oligonucleotide
catatgctaaagggtcgttcttatgttcattgctgtaaccccatgttggacatta

SEQ ID NO: 350744 - DNA, 60 bp, Artificial
  Synthetic oligonucleotide
catatgctatcagaatggctgctcctggaggtcacgtcggcaatccatattagccctaat

SEQ ID NO: 350745 - DNA, 60 bp, Artificial
  Synthetic oligonucleotide
catatgctctgcggttcccgtgaactgggttccgataggccgcaccacctggagcatcca

SEQ ID NO: 350746 - DNA, 60 bp, Artificial
  Synthetic oligonucleotide
catatgcttcgcgggagatgatatgtgctcgaacaaaaagttgcacgtatccgacaaaca

SEQ ID NO: 350747 - DNA, 60 bp, Artificial
  Synthetic oligonucleotide
catatggaaaggattaagtgctgtatctactgtaggtttgcagggttgtatagaactgtc

SEQ ID NO: 350748 - DNA, 55 bp, Artificial
  Synthetic oligonucleotide
catatggaatcggtatgacctatcattgttataatgagatgctacgcatgctggt

SEQ ID NO: 350749 - DNA, 60 bp, Artificial
  Synthetic oligonucleotide
catatggacaggaaccctggtatctggcacaggtctcacatgacatgtatatgttacgtc

SEQ ID NO: 350750 - DNA, 55 bp, Artificial
  Synthetic oligonucleotide
catatggagcctgccccaaatacgttaagcagaacagcctgaagttggcaacagg

SEQ ID NO: 350751 - DNA, 55 bp, Artificial
  Synthetic oligonucleotide
catatggagcctgtcccaaatatgttaaacaaaacactctgaagttggcaacagg

SEQ ID NO: 350752 - DNA, 55 bp, Artificial
  Synthetic oligonucleotide
catatggccttgatttaccttatattacatatctaaaggatgagttgcggagtcc

SEQ ID NO: 350753 - DNA, 55 bp, Artificial
  Synthetic oligonucleotide
catatgggaaatgccctaagtatgtcaagcagagtactttgaagctggctaccgg

SEQ ID NO: 350754 - DNA, 55 bp, Artificial
  Synthetic oligonucleotide
catatgggaagtacatatggaaaccgagagtatttactgtcctgactctgtgtct

SEQ ID NO: 350755 - DNA, 60 bp, Artificial
  Synthetic oligonucleotide
catatgggttgtatactattatggttactgccgtcatttactccagcaatgtcattaatt

SEQ ID NO: 350756 - DNA, 60 bp, Artificial
  Synthetic oligonucleotide
catatggtagtcttgatagcctttaacaagcattaacgctgctttgctactaactgctat

SEQ ID NO: 350757 - DNA, 56 bp, Artificial
  Synthetic oligonucleotide
catatggtccgattcgctcgtataaatcaggtaataaatgaagatttacactcagc

SEQ ID NO: 350758 - DNA, 55 bp, Artificial
  Synthetic oligonucleotide
catatggtgaaatattcattattcgtggtaaccatgaaggaaagttgtacgacgc

SEQ ID NO: 350759 - DNA, 55 bp, Artificial
  Synthetic oligonucleotide
catatggtgcggactcttcctttgggaagtcacgaccctaatttcggtcgcaagg

SEQ ID NO: 350760 - DNA, 60 bp, Artificial
  Synthetic oligonucleotide
catatggttgaaattgcgtgactcctacacccaagtgtgtgaccatcgattaatgtcagc

SEQ ID NO: 350761 - DNA, 55 bp, Artificial
  Synthetic oligonucleotide
catatgtaaaacgtaccagtatattttatcatgcaggtagctctaggttgcttgc

SEQ ID NO: 350762 - DNA, 60 bp, Artificial
  Synthetic oligonucleotide
catatgtaggtgataacgatacaacatgggttataccagagtggagaattgaatgtcttg

SEQ ID NO: 350763 - DNA, 60 bp, Artificial
  Synthetic oligonucleotide
catatgtatgagcaggctgagtcaatgtcagtgtgtgtgtggggttgaagcattgacctt

SEQ ID NO: 350764 - DNA, 58 bp, Artificial
  Synthetic oligonucleotide
catatgtattgggtcataatcaagatactttaccaggtcatttaccaggagaaaatta

SEQ ID NO: 350765 - DNA, 55 bp, Artificial
  Synthetic oligonucleotide
catatgtcaaagatgagctaagatccaaaaccaaagtggagcagggaaagtccag

SEQ ID NO: 350766 - DNA, 60 bp, Artificial
  Synthetic oligonucleotide
catatgtcacctgctatgttggagtgtccgctcgtcaagcctcgcgcaatctgcgtgaca

SEQ ID NO: 350767 - DNA, 55 bp, Artificial
  Synthetic oligonucleotide
catatgtcatgtgtgcgatttctgcataggacaatacttccaggttcgatagcaa

SEQ ID NO: 350768 - DNA, 60 bp, Artificial
  Synthetic oligonucleotide
catatgtcccttgagaagaacacggacgtgtcttcatttgtgcaataccctgttcgtgga

SEQ ID NO: 350769 - DNA, 57 bp, Artificial
  Synthetic oligonucleotide
catatgtcgacatctacttaggaggcactattactaaggtgtgggttaacaacgact

SEQ ID NO: 350770 - DNA, 60 bp, Artificial
  Synthetic oligonucleotide
catatgtctcttgagaagaatacggatgtatcttcatttatgcaataccctgtacgtgga

SEQ ID NO: 350771 - DNA, 60 bp, Artificial
  Synthetic oligonucleotide
catatgtgaacattactaaagatgaaccatttctaacgtcaacattatgtttgtactatc

SEQ ID NO: 350772 - DNA, 58 bp, Artificial
  Synthetic oligonucleotide
catatgtgatcgtcattgttaattctatgggtctaaacatgagtttagtccccttaaa

SEQ ID NO: 350773 - DNA, 55 bp, Artificial
  Synthetic oligonucleotide
catatgtggtgaagtcgatggtcccattccagtagttgtgtcgtccgagacttct

SEQ ID NO: 350774 - DNA, 60 bp, Artificial
  Synthetic oligonucleotide
catatgtgtcgttagctgtctgctggcctcctctagcagatctgccgtcgatttggaatt

SEQ ID NO: 350775 - DNA, 50 bp, Artificial
  Synthetic oligonucleotide
catatgtgtctgaggttggattgagacgcttatacactagtaagcgtggg

SEQ ID NO: 350776 - DNA, 60 bp, Artificial
  Synthetic oligonucleotide
catatgttactgatcgtattggcttggttaactatgataagtactacagaacgatcagtc

SEQ ID NO: 350777 - DNA, 55 bp, Artificial
  Synthetic oligonucleotide
catatgttcactatggaccaactggtactggttggttgctctgctccaaccaacc

SEQ ID NO: 350778 - DNA, 55 bp, Artificial
  Synthetic oligonucleotide
catatgttggcaacttagatctggggaccaatacccagatgattataggatgtaa

SEQ ID NO: 350779 - DNA, 55 bp, Artificial
  Synthetic oligonucleotide
catatgtttgcagcgcagattgtaccataggtgtagacaaggagactgcacaggt

SEQ ID NO: 350780 - DNA, 60 bp, Artificial
  Synthetic oligonucleotide
catatgttttaggaaatttggacagcttataacatgcctataagaagaaagcgagcatca

SEQ ID NO: 350781 - DNA, 60 bp, Artificial
  Synthetic oligonucleotide
catattaacacaccagatacacatggattaattgttgagtgctatgagcaggtcggagat

SEQ ID NO: 350782 - DNA, 56 bp, Artificial
  Synthetic oligonucleotide
catattaactaattgcctaaatctatttaagtacgtcgtcccagaagctgtcagag

SEQ ID NO: 350783 - DNA, 58 bp, Artificial
  Synthetic oligonucleotide
catattaactttctgctccgtatcgatatacgtaatgacaagcctcataaaggagacg

SEQ ID NO: 350784 - DNA, 57 bp, Artificial
  Synthetic oligonucleotide
catattaaggtgtgggtaccaaggccaccacgtttggcaccatatattaaagctaca

SEQ ID NO: 350785 - DNA, 55 bp, Artificial
  Synthetic oligonucleotide
catattacaaggtacagatgatgactggttacatggttattgggcaggcgtaccg

SEQ ID NO: 350786 - DNA, 60 bp, Artificial
  Synthetic oligonucleotide
catattacccagcaccgcagttacgttcgcctcatcattaccaacatgcacacctgcgct

SEQ ID NO: 350787 - DNA, 60 bp, Artificial
  Synthetic oligonucleotide
catattactgacagcgagaggggtggaacttctgggacgcaacagcctcaggggactaca

SEQ ID NO: 350788 - DNA, 55 bp, Artificial
  Synthetic oligonucleotide
catattagtaataggcttaggcaaattatcgctatggattggaacttcctcatcc

SEQ ID NO: 350789 - DNA, 60 bp, Artificial
  Synthetic oligonucleotide
catattcaataacacaggaagagaagatgcgataattaggaagttatatggttatgggga

SEQ ID NO: 350790 - DNA, 56 bp, Artificial
  Synthetic oligonucleotide
catattcagggccgcggtgtgtacccgtggagtggctaaggcggtggactttatcc

SEQ ID NO: 350791 - DNA, 60 bp, Artificial
  Synthetic oligonucleotide
catattcatctcctatacgtatatcaactacaggggcctcatgcatcatcaatatatcaa

SEQ ID NO: 350792 - DNA, 60 bp, Artificial
  Synthetic oligonucleotide
catattccacctgcaattatgtgccatcgcttagcttataaggaagtgtcggggaaggta

SEQ ID NO: 350793 - DNA, 55 bp, Artificial
  Synthetic oligonucleotide
catattccctataaccccaccagctctggtctggtcgaaaggacaaatggtatcc

SEQ ID NO: 350794 - DNA, 53 bp, Artificial
  Synthetic oligonucleotide
catattcctggaccggggctctaataactccttgtagccccgaagaggaaaag

SEQ ID NO: 350795 - DNA, 59 bp, Artificial
  Synthetic oligonucleotide
catattcggattatcaatatctttatcatctaaacccaccggaaataatcatttattca

SEQ ID NO: 350796 - DNA, 55 bp, Artificial
  Synthetic oligonucleotide
catattcgggagacgtatgtcatgctcctccgctcaatgcatcaagaccccaccc

SEQ ID NO: 350797 - DNA, 55 bp, Artificial
  Synthetic oligonucleotide
catattcgtctcattcttttgcggctgcgcaccgcgtgtgtgagacggattacat

SEQ ID NO: 350798 - DNA, 60 bp, Artificial
  Synthetic oligonucleotide
catattcgtgccacatcctcgacagtcaaggactcgagtttgctgacgtttccaacggac

SEQ ID NO: 350799 - DNA, 55 bp, Artificial
  Synthetic oligonucleotide
catattctagaccgccgacccgtaggtgatcccaggcaccctgtcagcagcgtat

SEQ ID NO: 350800 - DNA, 55 bp, Artificial
  Synthetic oligonucleotide
catattctccagacactgttgggtacgatttaatcagggatttgatctccgttat

SEQ ID NO: 350801 - DNA, 60 bp, Artificial
  Synthetic oligonucleotide
catattctccggacacaatcggctacgatcttgtccgcgatcttattcttgctctccgtg

SEQ ID NO: 350802 - DNA, 59 bp, Artificial
  Synthetic oligonucleotide
catattctggcacttgaatttcccttcgaactggatgagaacatgcaagtgaggagtcc

SEQ ID NO: 350803 - DNA, 60 bp, Artificial
  Synthetic oligonucleotide
catattgacacctgggatagactaggagatcttctgcttagcacaaccagccacaaggca

SEQ ID NO: 350804 - DNA, 60 bp, Artificial
  Synthetic oligonucleotide
catattgacttacatgtgaaacctgctctggttcgctctggcgaacctccaaagatcaga

SEQ ID NO: 350805 - DNA, 60 bp, Artificial
  Synthetic oligonucleotide
catattgattgtgggacacagcagtctcagggggctgagactgggttgggagggcctcaa

SEQ ID NO: 350806 - DNA, 60 bp, Artificial
  Synthetic oligonucleotide
catattgcaagtaggaggaggaactacttctcagccgaagtgtcccattgcagggccact

SEQ ID NO: 350807 - DNA, 60 bp, Artificial
  Synthetic oligonucleotide
catattgcgagtatgaggaggaactacttcacagcagaagtgtctcattgcagggccact

SEQ ID NO: 350808 - DNA, 60 bp, Artificial
  Synthetic oligonucleotide
catattgctcgcgtatgtctgaggtatacagtttcgcgttacctatagtacatccatcaa

SEQ ID NO: 350809 - DNA, 56 bp, Artificial
  Synthetic oligonucleotide
catattggaagcgcagcgaaaaaggtagcgcagcggatatgcagtaaaacctgcga

SEQ ID NO: 350810 - DNA, 56 bp, Artificial
  Synthetic oligonucleotide
catattggaattcaacccgtacccgctctcacaacaacaagtataccttctacttc

SEQ ID NO: 350811 - DNA, 50 bp, Artificial
  Synthetic oligonucleotide
catattggagacgcggatgatatgctaaacgatatacgtcgatcatattg

SEQ ID NO: 350812 - DNA, 55 bp, Artificial
  Synthetic oligonucleotide
catattggaggaccatcggactcattacgtctacatctattgaggcttggatcag

SEQ ID NO: 350813 - DNA, 58 bp, Artificial
  Synthetic oligonucleotide
catattggagggtatccaaacattgccaccagttaatgtggatataggttcaacgggc

SEQ ID NO: 350814 - DNA, 55 bp, Artificial
  Synthetic oligonucleotide
catattggccgcgcagcgtaattggctctttaggtgaatgaactatgaaacgtac

SEQ ID NO: 350815 - DNA, 60 bp, Artificial
  Synthetic oligonucleotide
catattgggatgtagggcattgagccacataactgccgccattcggtgggctaaatgctc

SEQ ID NO: 350816 - DNA, 60 bp, Artificial
  Synthetic oligonucleotide
catattggtgggacggactccaatcctctgatgattttgctctcatcgtaaatgcaccga

SEQ ID NO: 350817 - DNA, 56 bp, Artificial
  Synthetic oligonucleotide
catattgtctgtttctttgtggcagtcaaaggaaacacctacaaacttttcgaaca

SEQ ID NO: 350818 - DNA, 55 bp, Artificial
  Synthetic oligonucleotide
catattgtgtgggcagcgaataaattggacagattcggattagcagagagcctgt

SEQ ID NO: 350819 - DNA, 52 bp, Artificial
  Synthetic oligonucleotide
catattgttcagaagcgacaacctggcgtgttgacagtgacgataacttagt

SEQ ID NO: 350820 - DNA, 60 bp, Artificial
  Synthetic oligonucleotide
catatttacgctgcaccttggattcagagcgacgtgttcatattgcattgtgttgcacca

SEQ ID NO: 350821 - DNA, 56 bp, Artificial
  Synthetic oligonucleotide
catatttagtgtatctgcttataccaattttttacccgttcgtgaagctttatggc

SEQ ID NO: 350822 - DNA, 57 bp, Artificial
  Synthetic oligonucleotide
catatttatgcggaatccacagagagttagtcaggcggctaaaagccgttttgaccc

SEQ ID NO: 350823 - DNA, 58 bp, Artificial
  Synthetic oligonucleotide
catatttattagacaaagctttagagagtttaggtgcattagaataagtggtagctag

SEQ ID NO: 350824 - DNA, 59 bp, Artificial
  Synthetic oligonucleotide
catatttcaaagaaagctaagggatggttttatagacatcactatgaaagccttcatcc

SEQ ID NO: 350825 - DNA, 52 bp, Artificial
  Synthetic oligonucleotide
catatttcagtcaaacacgcaatatcagtctcaagggaatgtctggggcatt

SEQ ID NO: 350826 - DNA, 56 bp, Artificial
  Synthetic oligonucleotide
catatttcgataattatatgagaaatgcattagatgggtatgcaataagtttagat

SEQ ID NO: 350827 - DNA, 60 bp, Artificial
  Synthetic oligonucleotide
catatttctcccagacctgttgatcaaactgcctggcttgctcagatgtaagcctaacat

SEQ ID NO: 350828 - DNA, 60 bp, Artificial
  Synthetic oligonucleotide
catatttctggcacgatctgcactcatcctgaggggatcagtggcccacaagtcctgcct

SEQ ID NO: 350829 - DNA, 60 bp, Artificial
  Synthetic oligonucleotide
catatttgtgtcactggggatgataggaatgcaactgctagtttcatttatgacgggatg

SEQ ID NO: 350830 - DNA, 54 bp, Artificial
  Synthetic oligonucleotide
catattttaacggaacaaaagtaattggcttaactaatggcgaccaatggacta

SEQ ID NO: 350831 - DNA, 60 bp, Artificial
  Synthetic oligonucleotide
catattttgaatggtctaggatgtccagctccgataaccaagtggtggtgtgatttccac

SEQ ID NO: 350832 - DNA, 52 bp, Artificial
  Synthetic oligonucleotide
catcaaaaagaacagaaccagttggggtgatattccatggagaacctggtac

SEQ ID NO: 350833 - DNA, 56 bp, Artificial
  Synthetic oligonucleotide
catcaaaacacacttttgtttggcgcctacgtagacatttacgatttaagcttgaa

SEQ ID NO: 350834 - DNA, 60 bp, Artificial
  Synthetic oligonucleotide
catcaaaacgcacaaggagaaggaactgcagctgactacaaaagcacccaatctgcaata

SEQ ID NO: 350835 - DNA, 56 bp, Artificial
  Synthetic oligonucleotide
catcaaaactgtttaatagtacttggaacagtagtagtacttggactactacagga

SEQ ID NO: 350836 - DNA, 59 bp, Artificial
  Synthetic oligonucleotide
catcaaaagggattgatcaaaaaatgagagttctaaacgcatgcttcagcgtaaaaaga

SEQ ID NO: 350837 - DNA, 60 bp, Artificial
  Synthetic oligonucleotide
catcaaaatcctatatcaaagcagtaagtaccatatagtggatgtaatggtaactccatc

SEQ ID NO: 350838 - DNA, 57 bp, Artificial
  Synthetic oligonucleotide
catcaaacaactacggaagaagcaccgttcaagtcccagacaatggctgttacgacc

SEQ ID NO: 350839 - DNA, 55 bp, Artificial
  Synthetic oligonucleotide
catcaaacagggaaaagactttgacagtgggctatactatcttagcaagttatcc

SEQ ID NO: 350840 - DNA, 55 bp, Artificial
  Synthetic oligonucleotide
catcaaacgggagtccggatccccgcgacactccgttacgccagtgcgtcgaaga

SEQ ID NO: 350841 - DNA, 60 bp, Artificial
  Synthetic oligonucleotide
catcaaactctgtatggcaagacgctacacttagtaagacttggcctgtgattcgttcaa

SEQ ID NO: 350842 - DNA, 55 bp, Artificial
  Synthetic oligonucleotide
catcaaagaatgatggagaagccctaatgacaagaccctgctcataaccccactc

SEQ ID NO: 350843 - DNA, 55 bp, Artificial
  Synthetic oligonucleotide
catcaaagacagtaagagagaagctgttgggcttcagtaacagggcaatatgctt

SEQ ID NO: 350844 - DNA, 60 bp, Artificial
  Synthetic oligonucleotide
catcaaagtcacagaagggtggatcaattctcccagccatgccaaatcagtcacacaaac

SEQ ID NO: 350845 - DNA, 59 bp, Artificial
  Synthetic oligonucleotide
catcaaagtcacagaggggtggatcaactccccaaaacatgccaagtcagttacacaaa

SEQ ID NO: 350846 - DNA, 59 bp, Artificial
  Synthetic oligonucleotide
catcaaagttacagaggggtggatcaactctcccaatcacgccaaatcagttacacaaa

SEQ ID NO: 350847 - DNA, 60 bp, Artificial
  Synthetic oligonucleotide
catcaaagttgcagtcgaagtggggagcaccaagttcaacctgaacgctatcctcgacac

SEQ ID NO: 350848 - DNA, 60 bp, Artificial
  Synthetic oligonucleotide
catcaaatagtgacccatccaacaataatgacccctgaagtaccgaactgcagtgacact

SEQ ID NO: 350849 - DNA, 53 bp, Artificial
  Synthetic oligonucleotide
catcaaatcgtgcacgttaacttcatcggcgctaaaattgtgcgcctctatag

SEQ ID NO: 350850 - DNA, 60 bp, Artificial
  Synthetic oligonucleotide
catcaaattcaaccattataaacccaacaaatgagacagatgatactgtagtgaacaagc

SEQ ID NO: 350851 - DNA, 60 bp, Artificial
  Synthetic oligonucleotide
catcaacaacctgcacaatgttgagggtataggcatcttgaatgcagtccaattacagag

SEQ ID NO: 350852 - DNA, 55 bp, Artificial
  Synthetic oligonucleotide
catcaacacagggccaacgcacagctccttctgggagaaacttgaggccacaccc

SEQ ID NO: 350853 - DNA, 60 bp, Artificial
  Synthetic oligonucleotide
catcaacacatctattgcacaatggggcagttcattagcttcatgcaagaaataccaacc

SEQ ID NO: 350854 - DNA, 58 bp, Artificial
  Synthetic oligonucleotide
catcaacactcccagtaagacgaaacttgagcctagcgttttccatcacgtatttgag

SEQ ID NO: 350855 - DNA, 60 bp, Artificial
  Synthetic oligonucleotide
catcaacagactgagcatctgaaattgatcctgttacccaacttggtcaacgggtttcag

SEQ ID NO: 350856 - DNA, 55 bp, Artificial
  Synthetic oligonucleotide
catcaacatctatgaacagttcaaccgttttgctatggtgctcctgggtgagcgg

SEQ ID NO: 350857 - DNA, 60 bp, Artificial
  Synthetic oligonucleotide
catcaacattaaggtggtttttcaatctgtttcagttgtatagaggaccattggatctga

SEQ ID NO: 350858 - DNA, 57 bp, Artificial
  Synthetic oligonucleotide
catcaaccaaccctagcgtcttctggacggaggggaacgccccagctcgtatgtcta

SEQ ID NO: 350859 - DNA, 60 bp, Artificial
  Synthetic oligonucleotide
catcaaccaatgttatgttgttagttatggggatgactgtgttctgtcagtgccagaggt

SEQ ID NO: 350860 - DNA, 60 bp, Artificial
  Synthetic oligonucleotide
catcaaccactgaagccatcttgcctgaatatggaacccttgggctagaatgctcaccac

SEQ ID NO: 350861 - DNA, 51 bp, Artificial
  Synthetic oligonucleotide
catcaaccggctctagaagattgctctccgaggagtctagcgacgactgca

SEQ ID NO: 350862 - DNA, 53 bp, Artificial
  Synthetic oligonucleotide
catcaaccgttattgttccttgcaatcgttcttcactttaagacgaaaagtga

SEQ ID NO: 350863 - DNA, 55 bp, Artificial
  Synthetic oligonucleotide
catcaacgaatagtaggatatcgtccataatggcacaggctaatcaccaaccaaa

SEQ ID NO: 350864 - DNA, 55 bp, Artificial
  Synthetic oligonucleotide
catcaactagtatattggctgcttcagaagacggtcgtttcatatttagtcctgg

SEQ ID NO: 350865 - DNA, 55 bp, Artificial
  Synthetic oligonucleotide
catcaactcttgagacacttccaaaaagacgcaaaagtgcttttccaaaactggg

SEQ ID NO: 350866 - DNA, 60 bp, Artificial
  Synthetic oligonucleotide
catcaactgacaagtcatatctccctcatgtgacagctaagtcatctgccggcctaccct

SEQ ID NO: 350867 - DNA, 55 bp, Artificial
  Synthetic oligonucleotide
catcaagacagtgagactcatcaagcagatctatcaaagcagtaagtagtacatg

SEQ ID NO: 350868 - DNA, 60 bp, Artificial
  Synthetic oligonucleotide
catcaagacagtgagactcatcaagttcctctatcaaagcagtatgtagtaaatgtaatg

SEQ ID NO: 350869 - DNA, 60 bp, Artificial
  Synthetic oligonucleotide
catcaagactaagaatcacactaacactgtcatgttctggttagttagggatagacgtcc

SEQ ID NO: 350870 - DNA, 55 bp, Artificial
  Synthetic oligonucleotide
catcaagagatatcgtaaattcaggacacgaattgttggcaatgttgattgcgtt

SEQ ID NO: 350871 - DNA, 55 bp, Artificial
  Synthetic oligonucleotide
catcaagaggaaagaatagtaagtttccagcctgactatccgattacggcaagaa

SEQ ID NO: 350872 - DNA, 57 bp, Artificial
  Synthetic oligonucleotide
catcaagaggaaagaatagtaagttttcaaccagattatcctattacagcaagaatt

SEQ ID NO: 350873 - DNA, 57 bp, Artificial
  Synthetic oligonucleotide
catcaagaggaaaggatagtcagttcccaacctgattatcccattactgcaagaatt

SEQ ID NO: 350874 - DNA, 60 bp, Artificial
  Synthetic oligonucleotide
catcaagatattctatataggaggcagttggtcctggattgcaaaggaagattgttggga

SEQ ID NO: 350875 - DNA, 60 bp, Artificial
  Synthetic oligonucleotide
catcaagatgcctaatgaggactatggacgttcattcgttgaagaataccttggagactt

SEQ ID NO: 350876 - DNA, 58 bp, Artificial
  Synthetic oligonucleotide
catcaagccactgtaatgctctttggaactatggcaagatacatgaggagaatgcggg

SEQ ID NO: 350877 - DNA, 56 bp, Artificial
  Synthetic oligonucleotide
catcaagccgcctaactatcctgagtttgcttcggaaaaacaacgtctagatacct

SEQ ID NO: 350878 - DNA, 60 bp, Artificial
  Synthetic oligonucleotide
catcaagcctgaatgactcagttaatatgagagtcaaattaggtcacttatacaaagcat

SEQ ID NO: 350879 - DNA, 60 bp, Artificial
  Synthetic oligonucleotide
catcaaggatgcctcccgccgttcccagcagacgtcttcatggtgccacagtatggatac

SEQ ID NO: 350880 - DNA, 55 bp, Artificial
  Synthetic oligonucleotide
catcaaggattcaaccgtagacagaggcaaaagctcaaatttagacaggcccgcg

SEQ ID NO: 350881 - DNA, 51 bp, Artificial
  Synthetic oligonucleotide
catcaagggtggaacagagtattctgaagcctgacagccccaaaataaaag

SEQ ID NO: 350882 - DNA, 55 bp, Artificial
  Synthetic oligonucleotide
catcaaggttaaaatacgtggaactaggctgagtatgtggcacagtaatgcggag

SEQ ID NO: 350883 - DNA, 60 bp, Artificial
  Synthetic oligonucleotide
catcaaggtttagcaaaatcagcattagactatacgtggaaatattttgcaagccacaat

SEQ ID NO: 350884 - DNA, 58 bp, Artificial
  Synthetic oligonucleotide
catcaagtctgactttaattccactgaatatgacgaacctccaattagcggatttaaa

SEQ ID NO: 350885 - DNA, 55 bp, Artificial
  Synthetic oligonucleotide
catcaagttaggggcacttaccggcacctatgtttataaccatctcactcccttg

SEQ ID NO: 350886 - DNA, 55 bp, Artificial
  Synthetic oligonucleotide
catcaagttaggggcgcttactggtacctatatctatgaccacctcactcccctc

SEQ ID NO: 350887 - DNA, 60 bp, Artificial
  Synthetic oligonucleotide
catcaagttgagacgactgcgtttcaaaggaactgtgaagattgaacgtgtccagtctga

SEQ ID NO: 350888 - DNA, 55 bp, Artificial
  Synthetic oligonucleotide
catcaataaaaccatgtgtcaagctaacacctctatgtgtggcaatgaattgtag

SEQ ID NO: 350889 - DNA, 60 bp, Artificial
  Synthetic oligonucleotide
catcaataaagaccaacgtgaaaagtacagacatgtgcatgactggtatgttgacaacct

SEQ ID NO: 350890 - DNA, 60 bp, Artificial
  Synthetic oligonucleotide
catcaataatgctagtgtcaaattcaatcgatgatgtggcacatgcgactgcgtacttca

SEQ ID NO: 350891 - DNA, 59 bp, Artificial
  Synthetic oligonucleotide
catcaataattaaatgtactagattaatgagggataagattgaacgtggtgaagtcgaa

SEQ ID NO: 350892 - DNA, 58 bp, Artificial
  Synthetic oligonucleotide
catcaataattccgactgctatgagtagcttctttttgtcctccctagtgaagaaccg

SEQ ID NO: 350893 - DNA, 55 bp, Artificial
  Synthetic oligonucleotide
catcaatacccaaggtattccacccgcgtatcgcaataagattactcgggttcca

SEQ ID NO: 350894 - DNA, 59 bp, Artificial
  Synthetic oligonucleotide
catcaatacctatcccattaggtggtgatggctcgatgtctatcatggaacttgctaca

SEQ ID NO: 350895 - DNA, 56 bp, Artificial
  Synthetic oligonucleotide
catcaatactcagagaaggggaagtggacaaaaaacaccgagactggggcacccca

SEQ ID NO: 350896 - DNA, 55 bp, Artificial
  Synthetic oligonucleotide
catcaatataaacgtggccgtggtaactctgtgccgttttgccgttggtagagag

SEQ ID NO: 350897 - DNA, 60 bp, Artificial
  Synthetic oligonucleotide
catcaatattacaagcttggtggcatataaaagacgcagccaacaaaccattactcaaat

SEQ ID NO: 350898 - DNA, 55 bp, Artificial
  Synthetic oligonucleotide
catcaatcactggacgacattttagaagatcttgatgaacgcaattgctcagtgc

SEQ ID NO: 350899 - DNA, 55 bp, Artificial
  Synthetic oligonucleotide
catcaatcaggttcgagcaccagctctggccagatttaggaccggttacagctcc

SEQ ID NO: 350900 - DNA, 50 bp, Artificial
  Synthetic oligonucleotide
catcaatcctcagagttacgattatcgggaccagacgaaaacagttgcga

SEQ ID NO: 350901 - DNA, 52 bp, Artificial
  Synthetic oligonucleotide
catcaatcgtgccgtcaagtacatcgtacaatacatgccgaatggctctaac

SEQ ID NO: 350902 - DNA, 60 bp, Artificial
  Synthetic oligonucleotide
catcaatctagaggctactaactacgatgagcagactgcctatcaacggaacttgccata

SEQ ID NO: 350903 - DNA, 60 bp, Artificial
  Synthetic oligonucleotide
catcaatgacgttgtaccaggcagcattattgtagacctttggactaaggtccaagtgtc

SEQ ID NO: 350904 - DNA, 60 bp, Artificial
  Synthetic oligonucleotide
catcaatgacgttgtaccaggcgtcgttactgtagacctttggactaagatccagatgtc

SEQ ID NO: 350905 - DNA, 60 bp, Artificial
  Synthetic oligonucleotide
catcaatgacgttgtaccaggcgtcgttgttgtatacctttggagacagatccagatgtc

SEQ ID NO: 350906 - DNA, 60 bp, Artificial
  Synthetic oligonucleotide
catcaatgacgttgtaccaggcgtcgtttgaatatatctttggagacagatccaggtgtc

SEQ ID NO: 350907 - DNA, 60 bp, Artificial
  Synthetic oligonucleotide
catcaatgactcatcagagccaggtatttctcgtgaactcttaagcatgtgcatctcagc

SEQ ID NO: 350908 - DNA, 60 bp, Artificial
  Synthetic oligonucleotide
catcaatgaggaagctgcagactgggataggctacatccagtgcatgtagggcctattgc

SEQ ID NO: 350909 - DNA, 60 bp, Artificial
  Synthetic oligonucleotide
catcaatggatcaatctgaggacaaacaactgcgccacgatagtgatgccatacattaat

SEQ ID NO: 350910 - DNA, 60 bp, Artificial
  Synthetic oligonucleotide
catcaatggggtatgctggactgtctaccatggggccgggacgaggaccatcgcgtcacc

SEQ ID NO: 350911 - DNA, 55 bp, Artificial
  Synthetic oligonucleotide
catcaatggtaggtgcccctcttgccgaaggttggctttgcggtcccgttcctgg

SEQ ID NO: 350912 - DNA, 57 bp, Artificial
  Synthetic oligonucleotide
catcaattagaccccacatcctggtgtggttaatccagtgaaaaatattaggaaatc

SEQ ID NO: 350913 - DNA, 59 bp, Artificial
  Synthetic oligonucleotide
catcaattcacgacacgcgcggcagagtgtacccctgggagggtaggtccacactaagc

SEQ ID NO: 350914 - DNA, 54 bp, Artificial
  Synthetic oligonucleotide
catcaatttgaccggacgtgaacgccctgtcgttccggcgtccgtcgttcggtc

SEQ ID NO: 350915 - DNA, 56 bp, Artificial
  Synthetic oligonucleotide
catcaatttttgatcgtttcggtgatgtttaataaatttaggcgtcgggcttcagc

SEQ ID NO: 350916 - DNA, 60 bp, Artificial
  Synthetic oligonucleotide
catcacaaagatctgccggtggatttttgttgcaagaagtttgaagactgcaatgtccag

SEQ ID NO: 350917 - DNA, 57 bp, Artificial
  Synthetic oligonucleotide
catcacaaataggaccaagtactttaccagatattgttactgaagcgtcggagaagt

SEQ ID NO: 350918 - DNA, 55 bp, Artificial
  Synthetic oligonucleotide
catcacaacaaaaccggtccgtgctcctttggtagcgccagaaggtcacggtcga

SEQ ID NO: 350919 - DNA, 58 bp, Artificial
  Synthetic oligonucleotide
catcacaaccaagcactatacatcaatctacccatcctcagtcaaggctgctaagcgt

SEQ ID NO: 350920 - DNA, 52 bp, Artificial
  Synthetic oligonucleotide
catcacaagaggtagggtacccggtgattaacgcaccgagtaaaaccaaact

SEQ ID NO: 350921 - DNA, 60 bp, Artificial
  Synthetic oligonucleotide
catcacaaggcacacactatcccgtgaggagtctgctttcagtcacgagccctaagccag

SEQ ID NO: 350922 - DNA, 55 bp, Artificial
  Synthetic oligonucleotide
catcacaatatacgcagttccgctatcctaatataaatgacactcctctactaag

SEQ ID NO: 350923 - DNA, 60 bp, Artificial
  Synthetic oligonucleotide
catcacaatccaatacaacctgacgttttcagatgcgcagagtgccatcaaccagtgcag

SEQ ID NO: 350924 - DNA, 55 bp, Artificial
  Synthetic oligonucleotide
catcacaatccaccaccatactagcttcaacaacaccaagtgctgagtcaacccc

SEQ ID NO: 350925 - DNA, 60 bp, Artificial
  Synthetic oligonucleotide
catcacagacatgtcctgcgaagtagcttcgtgtacccattcatctgattttggaggtgc

SEQ ID NO: 350926 - DNA, 55 bp, Artificial
  Synthetic oligonucleotide
catcacagaggccaccacaagtcccaccgaccaacccctagctgaaatccaggcc

SEQ ID NO: 350927 - DNA, 60 bp, Artificial
  Synthetic oligonucleotide
catcacaggaagacattctttaccgcagtgttggttagttcacaatggctcgtacctcaa

SEQ ID NO: 350928 - DNA, 55 bp, Artificial
  Synthetic oligonucleotide
catcacaggactactattggtacgtgatggagggagcaatgatacagagccagag

SEQ ID NO: 350929 - DNA, 59 bp, Artificial
  Synthetic oligonucleotide
catcacaggcgccagttgcgtcttcctaagctcgcagttatcaccccgacgactggtgg

SEQ ID NO: 350930 - DNA, 60 bp, Artificial
  Synthetic oligonucleotide
catcacatccactggccacaactttaattggtgagattgccagttacttcactcattgga

SEQ ID NO: 350931 - DNA, 52 bp, Artificial
  Synthetic oligonucleotide
catcacatcttgtatgcgcaggcatatcttcaaagacatggcaaactgcttc

SEQ ID NO: 350932 - DNA, 52 bp, Artificial
  Synthetic oligonucleotide
catcacatggcccgagagctgcacccggagttctacaaagactgctgacagc

SEQ ID NO: 350933 - DNA, 60 bp, Artificial
  Synthetic oligonucleotide
catcacatggcccgagagctgtatccggaatactacaagaactgatgacaccgagctttc

SEQ ID NO: 350934 - DNA, 55 bp, Artificial
  Synthetic oligonucleotide
catcacatggctcgagagaaacatccggagtactacaaagactgctgacatcgag

SEQ ID NO: 350935 - DNA, 50 bp, Artificial
  Synthetic oligonucleotide
catcaccaaattggacaagccttggtaccctaccatctcgtcaggtgcgt

SEQ ID NO: 350936 - DNA, 60 bp, Artificial
  Synthetic oligonucleotide
catcaccatagagagaatggtcctatcagcatttgatgagagaaggaacaagtacctgga

SEQ ID NO: 350937 - DNA, 56 bp, Artificial
  Synthetic oligonucleotide
catcaccatcctggagtcgtggggcccgtgccattcacttctcatccaaagagggc

SEQ ID NO: 350938 - DNA, 59 bp, Artificial
  Synthetic oligonucleotide
catcacccagtgcacgttccttaagcggggatttgtactggatggaagccttgtgcgcc

SEQ ID NO: 350939 - DNA, 59 bp, Artificial
  Synthetic oligonucleotide
catcaccgcgttgttggactccggagcggatatcactattatttcggaggaggattggc

SEQ ID NO: 350940 - DNA, 55 bp, Artificial
  Synthetic oligonucleotide
catcaccggatggctcttgggaaatccagaatgcgactcactgcttccagcgaga

SEQ ID NO: 350941 - DNA, 60 bp, Artificial
  Synthetic oligonucleotide
catcaccggtccttctgatgacagaccatactgctggcactacgcacctagaccttgtga

SEQ ID NO: 350942 - DNA, 58 bp, Artificial
  Synthetic oligonucleotide
catcacctaagaccgaaggtgttttctcgctggtcatagtcgtcgaccgcaaacctca

SEQ ID NO: 350943 - DNA, 53 bp, Artificial
  Synthetic oligonucleotide
catcacctaatgctaggctggagcgagtctggacccccagcgccgatcccaga

SEQ ID NO: 350944 - DNA, 55 bp, Artificial
  Synthetic oligonucleotide
catcacctttaaatggattatggaaaggtgcatctgagttcatctttactggtgc

SEQ ID NO: 350945 - DNA, 59 bp, Artificial
  Synthetic oligonucleotide
catcacgtacaacgtcggctcacctgtcgcacctcaagtttgcgtagtcgtaaatccaa

SEQ ID NO: 350946 - DNA, 60 bp, Artificial
  Synthetic oligonucleotide
catcacgtatatatggatttacaacatcggcattgttttgaaacacgatgtagggaagtg

SEQ ID NO: 350947 - DNA, 60 bp, Artificial
  Synthetic oligonucleotide
catcacgtgaagataacctacaacgtgtgtttactgtggcctccattagaagcatgcttg

SEQ ID NO: 350948 - DNA, 60 bp, Artificial
  Synthetic oligonucleotide
catcacgtgcaactaacaaatgcacgtgactgatatgtatgatataacggttcaatgaac

SEQ ID NO: 350949 - DNA, 60 bp, Artificial
  Synthetic oligonucleotide
catcacgtgcgtcaacaaatgcacgtgactgatataagggacataacgggtttagataac

SEQ ID NO: 350950 - DNA, 55 bp, Artificial
  Synthetic oligonucleotide
catcacgtggaaagatggagcgttaagcgttctgaatgatctgagcaaatgtgcg

SEQ ID NO: 350951 - DNA, 60 bp, Artificial
  Synthetic oligonucleotide
catcacgtggcccgagagatgcatccggaatattacaagaactgatgacagcgtgttttc

SEQ ID NO: 350952 - DNA, 56 bp, Artificial
  Synthetic oligonucleotide
catcactaagctgctgatagcaatattgggcccattatacttaatacaggccgcca

SEQ ID NO: 350953 - DNA, 51 bp, Artificial
  Synthetic oligonucleotide
catcactaagtaccaacaaaccaaagatggagtttgtatcgcaaatgatcg

SEQ ID NO: 350954 - DNA, 60 bp, Artificial
  Synthetic oligonucleotide
catcactagaagttgagggagacaatgtaaattcattgccatttctggtcttgacagaac

SEQ ID NO: 350955 - DNA, 55 bp, Artificial
  Synthetic oligonucleotide
catcactagataaatagtacacttcgcagtttgcgtggaaccaatccttcattgc

SEQ ID NO: 350956 - DNA, 55 bp, Artificial
  Synthetic oligonucleotide
catcactccacggtggctgatggcctcatcaccacactccactacccagctccca

SEQ ID NO: 350957 - DNA, 55 bp, Artificial
  Synthetic oligonucleotide
catcactcgcatgatagcctctcgtagtgtcacctctagaagaaccgcacgtcgc

SEQ ID NO: 350958 - DNA, 56 bp, Artificial
  Synthetic oligonucleotide
catcactctgcttaccatacgcagcgcgatcacgttgacacgtctgttccaatcga

SEQ ID NO: 350959 - DNA, 60 bp, Artificial
  Synthetic oligonucleotide
catcactctggatcgactactgagcagaccaaactctatggaagtggaaacaagttgata

SEQ ID NO: 350960 - DNA, 60 bp, Artificial
  Synthetic oligonucleotide
catcactggaagtgtaagataacacatccacatcatacagtttgtaaattgcatagttga

SEQ ID NO: 350961 - DNA, 56 bp, Artificial
  Synthetic oligonucleotide
catcactggttaccgaggaagaaactcgcgccgtagaagagggatgttgggacgcg

SEQ ID NO: 350962 - DNA, 55 bp, Artificial
  Synthetic oligonucleotide
catcactgtagaagacacacagaaagctctagaacagctaaagcggcatcatgga

SEQ ID NO: 350963 - DNA, 60 bp, Artificial
  Synthetic oligonucleotide
catcactgtctgtgtcactggtattagtgggaatcgtgacactgtacttgggagttatgg

SEQ ID NO: 350964 - DNA, 60 bp, Artificial
  Synthetic oligonucleotide
catcacttatgggctctggactctggggtctgatgagtgttttgcaaggagcaggaaata

SEQ ID NO: 350965 - DNA, 56 bp, Artificial
  Synthetic oligonucleotide
catcacttcaggaggacttaaacgcgacgggctttatgacaaacttattgaacgct

SEQ ID NO: 350966 - DNA, 59 bp, Artificial
  Synthetic oligonucleotide
catcacttcgtaccgcgagttatcatgcgaaaaccactatcgattccgtactcaatttc

SEQ ID NO: 350967 - DNA, 55 bp, Artificial
  Synthetic oligonucleotide
catcacttcgtgcagcattaagtctgacgtgtgctggaattcgaaagacgaatag

SEQ ID NO: 350968 - DNA, 55 bp, Artificial
  Synthetic oligonucleotide
catcacttgaacagggcagtcttggtagtgcagtccattgccactattgtagcag

SEQ ID NO: 350969 - DNA, 50 bp, Artificial
  Synthetic oligonucleotide
catcacttgcaatgatggacccagcctaattgacactgagttagtactca

SEQ ID NO: 350970 - DNA, 50 bp, Artificial
  Synthetic oligonucleotide
catcacttttggtacactaattttcctctccattacggttggcctatcat

SEQ ID NO: 350971 - DNA, 57 bp, Artificial
  Synthetic oligonucleotide
catcagaaaagaacggacgaaattcgcaagagtccaagtagcacacttactcgggaa

SEQ ID NO: 350972 - DNA, 60 bp, Artificial
  Synthetic oligonucleotide
catcagaaataaaaatgggcacatcatcggcccccacttgctatgatccatactgtagtt

SEQ ID NO: 350973 - DNA, 52 bp, Artificial
  Synthetic oligonucleotide
catcagaacacaactcttaggatgcgtggactaacgtcattcgggtcggcac

SEQ ID NO: 350974 - DNA, 55 bp, Artificial
  Synthetic oligonucleotide
catcagaacggatagccaggctattgtggcattctacaagaagcaagctgatcac

SEQ ID NO: 350975 - DNA, 55 bp, Artificial
  Synthetic oligonucleotide
catcagaactggtgtcaggactataacaacaggaggtcctattacctactctacc

SEQ ID NO: 350976 - DNA, 60 bp, Artificial
  Synthetic oligonucleotide
catcagaagcaaagcgacaagggacaacgcatatgccgataagctacccacatgcaatcg

SEQ ID NO: 350977 - DNA, 60 bp, Artificial
  Synthetic oligonucleotide
catcagaatgagcaaggatcaggatatgctgctgatcagaaaagcacacagaatgcgatc

SEQ ID NO: 350978 - DNA, 60 bp, Artificial
  Synthetic oligonucleotide
catcagaatgccgaccccgttgtgctagatgtgagctggatatcactctggtttgctttc

SEQ ID NO: 350979 - DNA, 60 bp, Artificial
  Synthetic oligonucleotide
catcagacaccgtgcaaacacgtcacgtcatccagaggcgaacgcgatcagagtccacgg

SEQ ID NO: 350980 - DNA, 60 bp, Artificial
  Synthetic oligonucleotide
catcagacggctgtagacaaatacttgtacagctacaaccatccctcaagacaggatcag

SEQ ID NO: 350981 - DNA, 55 bp, Artificial
  Synthetic oligonucleotide
catcagactagacgcgtgcccgtgggagcaggtgccttgacacctagaggcgtgt

SEQ ID NO: 350982 - DNA, 56 bp, Artificial
  Synthetic oligonucleotide
catcagactcggagaaaaatggtattagccctgatctgcagcaagttgcaaggtat

SEQ ID NO: 350983 - DNA, 59 bp, Artificial
  Synthetic oligonucleotide
catcagactgtggatatgggtatcccggtagtccattcggtagaggcaaacggtatcca

SEQ ID NO: 350984 - DNA, 55 bp, Artificial
  Synthetic oligonucleotide
catcagagaaagtggatttagtaactggaggacggtattgctggcttgtaagagg

SEQ ID NO: 350985 - DNA, 60 bp, Artificial
  Synthetic oligonucleotide
catcagagacagatgccatgaaccactgtggcaccgtagctaacggtgttcttgaagttt

SEQ ID NO: 350986 - DNA, 60 bp, Artificial
  Synthetic oligonucleotide
catcagagactatgaccactggcgctacgtctattgatattatgggcctgcaagctgctt

SEQ ID NO: 350987 - DNA, 55 bp, Artificial
  Synthetic oligonucleotide
catcagagcatgtgtcatttcgggtccgagtgctgcaacgtataatgaggaaggg

SEQ ID NO: 350988 - DNA, 60 bp, Artificial
  Synthetic oligonucleotide
catcagagctgactgggtgttcgccattcaagacggtgaagattgaagaacatgtgggga

SEQ ID NO: 350989 - DNA, 55 bp, Artificial
  Synthetic oligonucleotide
catcagaggaacaagaatagtcccaagaggacaactgtccaccagaggagttcag

SEQ ID NO: 350990 - DNA, 60 bp, Artificial
  Synthetic oligonucleotide
catcagaggatcttacaaggtatacaattcaggtatgcgactaggagttatagattctcg

SEQ ID NO: 350991 - DNA, 60 bp, Artificial
  Synthetic oligonucleotide
catcagagggctgtagacaaataatgggagccttacaatcgacccttcagacaggatcag

SEQ ID NO: 350992 - DNA, 55 bp, Artificial
  Synthetic oligonucleotide
catcagaggggcaagagtggttccaaggggacaactgtccaccagaggagttcag

SEQ ID NO: 350993 - DNA, 55 bp, Artificial
  Synthetic oligonucleotide
catcagagtcacaacttttcaataagccatactggttgcaacgtgcgcagggaca

SEQ ID NO: 350994 - DNA, 55 bp, Artificial
  Synthetic oligonucleotide
catcagagtgaagtgaactggcacagccctgtggctccgggttaattgagccaac

SEQ ID NO: 350995 - DNA, 60 bp, Artificial
  Synthetic oligonucleotide
catcagagtgggcatgtcaatgaacgaagatggccccttcatcttcgcaaggcacgccaa

SEQ ID NO: 350996 - DNA, 55 bp, Artificial
  Synthetic oligonucleotide
catcagatcatgacaccctattatttacttcatacaatgtaggtcccctcgggaa

SEQ ID NO: 350997 - DNA, 55 bp, Artificial
  Synthetic oligonucleotide
catcagatcttagcattaccgcttggatctcgcgttgagtgtgagagcgttgaag

SEQ ID NO: 350998 - DNA, 55 bp, Artificial
  Synthetic oligonucleotide
catcagatgcacattaggcatgtttatgggaatgttcaatcttagttctactcta

SEQ ID NO: 350999 - DNA, 60 bp, Artificial
  Synthetic oligonucleotide
catcagcaatataccccattgtagcatactggacatcagatggcaatacaaaaacatgca

SEQ ID NO: 351000 - DNA, 55 bp, Artificial
  Synthetic oligonucleotide
catcagcaatggtggccccagctccatttggcagatctaggtcaataatcccagc

SEQ ID NO: 351001 - DNA, 60 bp, Artificial
  Synthetic oligonucleotide
catcagcaggtcgtgcacgtatggcgttacgaacattgcttcttgctagacgttcaccaa

SEQ ID NO: 351002 - DNA, 55 bp, Artificial
  Synthetic oligonucleotide
catcagcatcaaatggagaatctagacaactaaaattcggtagaaaaacggtttt

SEQ ID NO: 351003 - DNA, 55 bp, Artificial
  Synthetic oligonucleotide
catcagccatccttatcagaaaggggcttcaatgagatcataacagagcattaca

SEQ ID NO: 351004 - DNA, 60 bp, Artificial
  Synthetic oligonucleotide
catcagcctcttacaccctatgagccagcatgggacggatgacccagagaaagaagtgtt

SEQ ID NO: 351005 - DNA, 55 bp, Artificial
  Synthetic oligonucleotide
catcagcgaatgtagatcactttctcggttcaagtgcatatgatttggctgaatc

SEQ ID NO: 351006 - DNA, 55 bp, Artificial
  Synthetic oligonucleotide
catcagctaaaatggtttacgagccattaggagaagatacagagtttatggagtg

SEQ ID NO: 351007 - DNA, 60 bp, Artificial
  Synthetic oligonucleotide
catcagctgcatcgacgtgaaaccagcccgctcttgaaggtcgttcgtgtgggacgcacc

SEQ ID NO: 351008 - DNA, 60 bp, Artificial
  Synthetic oligonucleotide
catcaggaacctcctgattgaccatccacaactagttgcgcggacttacggcaccccaga

SEQ ID NO: 351009 - DNA, 55 bp, Artificial
  Synthetic oligonucleotide
catcaggacaaacgcactacttgttgcatatgtcttcagtgaaaatatagagtgt

SEQ ID NO: 351010 - DNA, 60 bp, Artificial
  Synthetic oligonucleotide
catcaggacgcgaccgtcacctgtctgacctatcgagaccggcacaacgagtctcacgct

SEQ ID NO: 351011 - DNA, 60 bp, Artificial
  Synthetic oligonucleotide
catcaggactctcaaaaaacctgatctccaatcaggtatggcaaaacacagacagttggt

SEQ ID NO: 351012 - DNA, 55 bp, Artificial
  Synthetic oligonucleotide
catcaggagaagcgaatgaatctttatcgtatgcgtctaaaagtagacgattgtt

SEQ ID NO: 351013 - DNA, 60 bp, Artificial
  Synthetic oligonucleotide
catcaggagacagttgcatctgacacgtggtccaaaacacactgatccaactgaagtccg

SEQ ID NO: 351014 - DNA, 60 bp, Artificial
  Synthetic oligonucleotide
catcaggaggcagccaagtacgagaaccatactgaaaacgccttgttattgtatatggcc

SEQ ID NO: 351015 - DNA, 60 bp, Artificial
  Synthetic oligonucleotide
catcaggaggcagccaagtatgagaatcatactgagaatgctttgttgttgtatatggca

SEQ ID NO: 351016 - DNA, 55 bp, Artificial
  Synthetic oligonucleotide
catcaggattgtttaatgaatcaggagggaatgataccactatcacactcccatg

SEQ ID NO: 351017 - DNA, 60 bp, Artificial
  Synthetic oligonucleotide
catcaggcccatgtatcggaagcccaagatgtacaggatgtatcgaagcccagacgtccc

SEQ ID NO: 351018 - DNA, 51 bp, Artificial
  Synthetic oligonucleotide
catcaggcctcgagctccgctgtcttgctcattacctcgctccatttgata

SEQ ID NO: 351019 - DNA, 55 bp, Artificial
  Synthetic oligonucleotide
catcaggcgttgttaatgtcaaagtggcgtctgctgatcaagtaatggacgctgg

SEQ ID NO: 351020 - DNA, 58 bp, Artificial
  Synthetic oligonucleotide
catcagggagtgcaagaaaattcaaaatgcacgtcccaatacaattggtaagtactta

SEQ ID NO: 351021 - DNA, 55 bp, Artificial
  Synthetic oligonucleotide
catcagggatttacatgcgtacgaagaggaggccatggagcaaggaatcaccaac

SEQ ID NO: 351022 - DNA, 55 bp, Artificial
  Synthetic oligonucleotide
catcaggtttcattacacacatctcggccttgccacattattgatggtcacggat

SEQ ID NO: 351023 - DNA, 55 bp, Artificial
  Synthetic oligonucleotide
catcagtaattgggagatgtgacctctcatgggctactgttaactcagatgagag

SEQ ID NO: 351024 - DNA, 60 bp, Artificial
  Synthetic oligonucleotide
catcagtacacaagaggagaacactgagaggcacaccacagaagatgtgagccccaacat

SEQ ID NO: 351025 - DNA, 55 bp, Artificial
  Synthetic oligonucleotide
catcagtagaagactgctaggaacatttacatggacattgtcagattctgaaggc

SEQ ID NO: 351026 - DNA, 51 bp, Artificial
  Synthetic oligonucleotide
catcagtagtactgatgttgaagtactggttcgcgaggtcagagctactct

SEQ ID NO: 351027 - DNA, 60 bp, Artificial
  Synthetic oligonucleotide
catcagtcagtgatgcgcaacttgcaatctccagattggaaaattctgtcggagccctcc

SEQ ID NO: 351028 - DNA, 55 bp, Artificial
  Synthetic oligonucleotide
catcagtccacgaagcgacgagtttctagtagtggtgggaccctacatcagcgcc

SEQ ID NO: 351029 - DNA, 60 bp, Artificial
  Synthetic oligonucleotide
catcagtggatgggccatatacagcaaagacaacggcataagaatcggttccaaagggga

SEQ ID NO: 351030 - DNA, 60 bp, Artificial
  Synthetic oligonucleotide
catcagtggtcctctcatacccatcaagttctgccagaaaaaccctcatgtccttagtct

SEQ ID NO: 351031 - DNA, 51 bp, Artificial
  Synthetic oligonucleotide
catcagttattgtacgtatgaatgaggcaccagctagagtgcgagttccct

SEQ ID NO: 351032 - DNA, 60 bp, Artificial
  Synthetic oligonucleotide
catcagttccgtcctgactccctctgaaaaagcattggctgatcgctgggcgatccccta

SEQ ID NO: 351033 - DNA, 55 bp, Artificial
  Synthetic oligonucleotide
catcagttgcgaatcatgcagatagagtttacgctactttcaagagcaataacaa

SEQ ID NO: 351034 - DNA, 56 bp, Artificial
  Synthetic oligonucleotide
catcagtttcactcgttactttgcgtggaatcaaccgctgccctgacaaggattgc

SEQ ID NO: 351035 - DNA, 54 bp, Artificial
  Synthetic oligonucleotide
catcataaacggatcgcagcagcttttcaaccgatgtgcgcattcattgcctgg

SEQ ID NO: 351036 - DNA, 60 bp, Artificial
  Synthetic oligonucleotide
catcataaatcccaacttgacaatagaggacaagcctctgaagcatgtcactccagcaat

SEQ ID NO: 351037 - DNA, 58 bp, Artificial
  Synthetic oligonucleotide
catcatacaaacgatccgaggttcgttttatgaggactctcctggctatatatccttc

SEQ ID NO: 351038 - DNA, 58 bp, Artificial
  Synthetic oligonucleotide
catcatacaatacatgtgctactgctctaattacattattaagcgtaatgacacctaa

SEQ ID NO: 351039 - DNA, 60 bp, Artificial
  Synthetic oligonucleotide
catcatagagtatgggacaaccgacgatgaagtgtatatacaaagagcgtttatgtcatt

SEQ ID NO: 351040 - DNA, 58 bp, Artificial
  Synthetic oligonucleotide
catcatagcaacgagcagggaagtggatatgctgcagacaaagagtccactcagaaag

SEQ ID NO: 351041 - DNA, 55 bp, Artificial
  Synthetic oligonucleotide
catcatagggtcatataagggtgctcctaggaatagagaactctttgatgctgcc

SEQ ID NO: 351042 - DNA, 52 bp, Artificial
  Synthetic oligonucleotide
catcatagtcaagaggtgtatggttagtggcgactgcctgatagttccatcc

SEQ ID NO: 351043 - DNA, 60 bp, Artificial
  Synthetic oligonucleotide
catcatagtcccgactgtctcagacagtgacgccattagaagaaggttctacatggattg

SEQ ID NO: 351044 - DNA, 55 bp, Artificial
  Synthetic oligonucleotide
catcatatcgaatgggaaatgcagttggttttgagtttatggatgcgaagaagca

SEQ ID NO: 351045 - DNA, 58 bp, Artificial
  Synthetic oligonucleotide
catcatatgtatcgcagcctataagctcaagaaactctaaatagtcactgttatccat

SEQ ID NO: 351046 - DNA, 51 bp, Artificial
  Synthetic oligonucleotide
catcatatgtatgtctcaaggagagccaatggatggttgtacagacatcat

SEQ ID NO: 351047 - DNA, 60 bp, Artificial
  Synthetic oligonucleotide
catcatcacacactgaataagagtactcttcttgtcatcaaagaagagtctcttaataaa

SEQ ID NO: 351048 - DNA, 55 bp, Artificial
  Synthetic oligonucleotide
catcatcactggtacacacagtaaagtagctatcaccaaattcctttcttgctgc

SEQ ID NO: 351049 - DNA, 55 bp, Artificial
  Synthetic oligonucleotide
catcatcccttggcgatccccctcccaaggtgagtataactccacccacccccat

SEQ ID NO: 351050 - DNA, 57 bp, Artificial
  Synthetic oligonucleotide
catcatcctccggggagttgtccgcctcagcggcccctccggtaatcttctcgctta

SEQ ID NO: 351051 - DNA, 60 bp, Artificial
  Synthetic oligonucleotide
catcatcgatgacgttataccatgcgtcattagagtagatcttggggctcaagtctagat

SEQ ID NO: 351052 - DNA, 52 bp, Artificial
  Synthetic oligonucleotide
catcatcgcgtttgtctccaaacgcatatgcgtaaccacggattgtttgttc

SEQ ID NO: 351053 - DNA, 55 bp, Artificial
  Synthetic oligonucleotide
catcatcgtataatttgccaactccttttcctcaagctagtgtcgtccgcattgt

SEQ ID NO: 351054 - DNA, 60 bp, Artificial
  Synthetic oligonucleotide
catcatctagatctgctttcctgcagctaatactagatgagttcagttacaaggatgttc

SEQ ID NO: 351055 - DNA, 59 bp, Artificial
  Synthetic oligonucleotide
catcatctgtgctgatcttgccccccatgcccgggatttcttcactgcctcgggcaatg

SEQ ID NO: 351056 - DNA, 60 bp, Artificial
  Synthetic oligonucleotide
catcatcttagagcaggtgctctcagactgcccttggcttgcatagctcgtgtcgtactt

SEQ ID NO: 351057 - DNA, 60 bp, Artificial
  Synthetic oligonucleotide
catcatgaagtgaagtctctcttttgatgacaaccattgtcgatttgggccataatctct

SEQ ID NO: 351058 - DNA, 60 bp, Artificial
  Synthetic oligonucleotide
catcatgcacttgcattcaaggtgaatgttattgggtaatgacagatggaccagcaaaca

SEQ ID NO: 351059 - DNA, 55 bp, Artificial
  Synthetic oligonucleotide
catcatgcgcaacttaccgctgaatatgcaatgttgactagatactgtgactacc

SEQ ID NO: 351060 - DNA, 55 bp, Artificial
  Synthetic oligonucleotide
catcatgcgctggttctagttactccttagcaaacattgtcaatgctattagagc

SEQ ID NO: 351061 - DNA, 59 bp, Artificial
  Synthetic oligonucleotide
catcatggagggttacgcgtccgttccacccgcgaacgtaaccaatgctcaagctagca

SEQ ID NO: 351062 - DNA, 55 bp, Artificial
  Synthetic oligonucleotide
catcatggcgtgggttacgcaagcgtatagttcgggattgtcacagagcagtatt

SEQ ID NO: 351063 - DNA, 55 bp, Artificial
  Synthetic oligonucleotide
catcatggctttcaacccaccctggggagacattaacaagtcaggccgctcaggg

SEQ ID NO: 351064 - DNA, 55 bp, Artificial
  Synthetic oligonucleotide
catcatgggaccaggcaacagacatggagtgggaatcagaaatcgacagcctcac

SEQ ID NO: 351065 - DNA, 55 bp, Artificial
  Synthetic oligonucleotide
catcatgggtgacagaaagcgttatacgaaaactgtttgtgtctatgatccgcag

SEQ ID NO: 351066 - DNA, 55 bp, Artificial
  Synthetic oligonucleotide
catcatggtacggtgagcaagcctctccaatctctgatgtgcgtatcgttctggg

SEQ ID NO: 351067 - DNA, 60 bp, Artificial
  Synthetic oligonucleotide
catcatgtgatagatgcaaccggtattatcctcatcctgcgatggctggtttatgtgcta

SEQ ID NO: 351068 - DNA, 54 bp, Artificial
  Synthetic oligonucleotide
catcatgtgggatcctcttttaaacgagttccccgatacggttcacggattccg

SEQ ID NO: 351069 - DNA, 60 bp, Artificial
  Synthetic oligonucleotide
catcatgttcggtgactttatgtgctcacaggatgggcagggctgcatcctactgaagga

SEQ ID NO: 351070 - DNA, 55 bp, Artificial
  Synthetic oligonucleotide
catcattaaggacggagacctcgtggtgtgcgcgacagacgcgctatctacgggg

SEQ ID NO: 351071 - DNA, 57 bp, Artificial
  Synthetic oligonucleotide
catcattacttactggttggtccgagataggaggcccaataaggatccattgacgtt

SEQ ID NO: 351072 - DNA, 55 bp, Artificial
  Synthetic oligonucleotide
catcattagtgccctacgacaccatgtcggcttctgcactatccctggcatcgtc

SEQ ID NO: 351073 - DNA, 60 bp, Artificial
  Synthetic oligonucleotide
catcattattgtacactctcggactgaggtctaagtgaccacatagataattatgtggcc

SEQ ID NO: 351074 - DNA, 60 bp, Artificial
  Synthetic oligonucleotide
catcattcatctggagcctccctcaactcatgagccatctcaggataacgacaccgactg

SEQ ID NO: 351075 - DNA, 55 bp, Artificial
  Synthetic oligonucleotide
catcattcgaaataacacggacgcgtgaacgaagactatatggcctaccagctgc

SEQ ID NO: 351076 - DNA, 59 bp, Artificial
  Synthetic oligonucleotide
catcattcgagagattcgaaatattccctaaggaaagctcatggcctaaacacaacgta

SEQ ID NO: 351077 - DNA, 55 bp, Artificial
  Synthetic oligonucleotide
catcattcgagttatcaggttgcggagaattctcatcgtacggcccagtgaatcg

SEQ ID NO: 351078 - DNA, 55 bp, Artificial
  Synthetic oligonucleotide
catcattcggtggccttcatgaatgtcccttactatcacaatcaggagcaacacc

SEQ ID NO: 351079 - DNA, 60 bp, Artificial
  Synthetic oligonucleotide
catcattctatcagtcttatctcaggcgaacacaatcaatgggaatacaactggaccaaa

SEQ ID NO: 351080 - DNA, 60 bp, Artificial
  Synthetic oligonucleotide
catcattctcaagacttcccaggctaacagccaggccgttagctctcttgttgtgtcggt

SEQ ID NO: 351081 - DNA, 60 bp, Artificial
  Synthetic oligonucleotide
catcattctggatcagctactgaacagaccaaactatatgggagtgggaataaactaata

SEQ ID NO: 351082 - DNA, 59 bp, Artificial
  Synthetic oligonucleotide
catcattgacgggaagtcacgaaaggagtgccccttctctaacagagtgtggaactcat

SEQ ID NO: 351083 - DNA, 55 bp, Artificial
  Synthetic oligonucleotide
catcattgcaacagcagacgcccgtggcctcattcagtcgtcccgggctcatgcc

SEQ ID NO: 351084 - DNA, 60 bp, Artificial
  Synthetic oligonucleotide
catcattggtccccacttactgtggtccatgctgtagttcagtaacccttctcgcacatt

SEQ ID NO: 351085 - DNA, 53 bp, Artificial
  Synthetic oligonucleotide
catcattgtatctgttaaacgtactgagtatgcacgttaaaccgactattgat

SEQ ID NO: 351086 - DNA, 60 bp, Artificial
  Synthetic oligonucleotide
catcatttggtaacactttagtaacaatggctttattctcctggtgctatgacactgatc

SEQ ID NO: 351087 - DNA, 54 bp, Artificial
  Synthetic oligonucleotide
catccaaaaataagttcggaagtacacattccactaggggatgctagattggta

SEQ ID NO: 351088 - DNA, 55 bp, Artificial
  Synthetic oligonucleotide
catccaaatgtacaccaatgtggaccaagaccttgtgggttggaccgctcctcag

SEQ ID NO: 351089 - DNA, 55 bp, Artificial
  Synthetic oligonucleotide
catccaaatgtgcactgaactcaaactcagtgattatgatggacgactaatccag

SEQ ID NO: 351090 - DNA, 55 bp, Artificial
  Synthetic oligonucleotide
catccaaccgactgttacagatagtggatctggttgttgttcacatacgtctcgg

SEQ ID NO: 351091 - DNA, 56 bp, Artificial
  Synthetic oligonucleotide
catccaacggagcacaggagacagcattgacactcctaattatgatgtgcagaaac

SEQ ID NO: 351092 - DNA, 60 bp, Artificial
  Synthetic oligonucleotide
catccaagagatagagcattacgcagacccacaagcagctgatttctggaggggatatac

SEQ ID NO: 351093 - DNA, 51 bp, Artificial
  Synthetic oligonucleotide
catccaagcagcactaaaacaaagtgttggtactataagagggataactca

SEQ ID NO: 351094 - DNA, 53 bp, Artificial
  Synthetic oligonucleotide
catccaagctttaagaatcctcctcggtagcaccttgccaattgtcattgagt

SEQ ID NO: 351095 - DNA, 59 bp, Artificial
  Synthetic oligonucleotide
catccaaggggtcctggctgttcagcaacttgataccttggggacgcgtggagcacgtg

SEQ ID NO: 351096 - DNA, 55 bp, Artificial
  Synthetic oligonucleotide
catccaaggggtgaagatcatgatccaattcaaaactcacagggattcttacgga

SEQ ID NO: 351097 - DNA, 60 bp, Artificial
  Synthetic oligonucleotide
catccaaggtgattgctattgggtaatgactgacggtcctgccaacagacaggcacagta

SEQ ID NO: 351098 - DNA, 60 bp, Artificial
  Synthetic oligonucleotide
catccaataccaggccccttaccagcggggcagctcagagatccacgaggatctgacata

SEQ ID NO: 351099 - DNA, 53 bp, Artificial
  Synthetic oligonucleotide
catccaatactaaaccaagtccaatgtgatgtattagatgcccgggtaggcaa

SEQ ID NO: 351100 - DNA, 57 bp, Artificial
  Synthetic oligonucleotide
catccaatcacgaacaaacacgagatcgaactatcatactgagccaatggttgtaaa

SEQ ID NO: 351101 - DNA, 55 bp, Artificial
  Synthetic oligonucleotide
catccaatccccttgccactactttaattggtgaaatagctagttactttaccca

SEQ ID NO: 351102 - DNA, 50 bp, Artificial
  Synthetic oligonucleotide
catccaccgattgccatttactcctgtctatcggtgaatggtgacgcata

SEQ ID NO: 351103 - DNA, 55 bp, Artificial
  Synthetic oligonucleotide
catccaccgtccattccttcggaacttgaatctctggagttagtgcttggtactc

SEQ ID NO: 351104 - DNA, 55 bp, Artificial
  Synthetic oligonucleotide
catccacctgccaatttggggaccctggtgatattatgagtcccaaggataaggg

SEQ ID NO: 351105 - DNA, 56 bp, Artificial
  Synthetic oligonucleotide
catccacgaaaccgggtctcatcgaccgtcaaacgcggcggaggccggatgtagaa

SEQ ID NO: 351106 - DNA, 57 bp, Artificial
  Synthetic oligonucleotide
catccacggtgctcccattaattcgtttaccaattcagcctacaccggtgcattagg

SEQ ID NO: 351107 - DNA, 55 bp, Artificial
  Synthetic oligonucleotide
catccactattaatatcaacgactaaaggtttgagagtaattccgattgacgttt

SEQ ID NO: 351108 - DNA, 52 bp, Artificial
  Synthetic oligonucleotide
catccactggcgagcctaccagattgggaacaatcgtaccccgaaggcgcag

SEQ ID NO: 351109 - DNA, 57 bp, Artificial
  Synthetic oligonucleotide
catccagaaaactgttaccggtgatggtacccaatattctaatgaccttactggcac

SEQ ID NO: 351110 - DNA, 60 bp, Artificial
  Synthetic oligonucleotide
catccagaactgacgccagttcatgctgataattgaacttatataaaccgcgaatattaa

SEQ ID NO: 351111 - DNA, 57 bp, Artificial
  Synthetic oligonucleotide
catccagaagagaagcctatattcctcaacatgggttttaccgactgaactacgtgt

SEQ ID NO: 351112 - DNA, 55 bp, Artificial
  Synthetic oligonucleotide
catccagacaactgtcacttaaccactatctgttacctcctgactcctttgctgt

SEQ ID NO: 351113 - DNA, 59 bp, Artificial
  Synthetic oligonucleotide
catccagaggcgcgagcgaaggttcaaatgctgccactacaaggttttggtccaaccga

SEQ ID NO: 351114 - DNA, 60 bp, Artificial
  Synthetic oligonucleotide
catccagagttcattttccgtctgtggcgcacttgtgtggaacactggcatgacgtacat

SEQ ID NO: 351115 - DNA, 59 bp, Artificial
  Synthetic oligonucleotide
catccagatggtttgccgttttgcgaaatgaatctgccagttccgttttatcaaggcca

SEQ ID NO: 351116 - DNA, 60 bp, Artificial
  Synthetic oligonucleotide
catccagcattggctccagtgccgtgcttgaagtcgctcctgagcctacgcctcctacac

SEQ ID NO: 351117 - DNA, 56 bp, Artificial
  Synthetic oligonucleotide
catccagcccatcaaagttgaagttgccatgaaacctaacaagatgacaatcactg

SEQ ID NO: 351118 - DNA, 55 bp, Artificial
  Synthetic oligonucleotide
catccagcctagtgagtcgccaagtcacgactcagcgttgacaacacgagttgcg

SEQ ID NO: 351119 - DNA, 55 bp, Artificial
  Synthetic oligonucleotide
catccaggactgtgaaacttctgggacacatcattctcaagggactgatgcgggg

SEQ ID NO: 351120 - DNA, 60 bp, Artificial
  Synthetic oligonucleotide
catccaggccgctcaccatcattcctgataacgttggcaaacgttatctgcgcggcgatt

SEQ ID NO: 351121 - DNA, 59 bp, Artificial
  Synthetic oligonucleotide
catccagggaagcagtagtcggctatgttaatgttaatatgggcctaaaactcagacaa

SEQ ID NO: 351122 - DNA, 59 bp, Artificial
  Synthetic oligonucleotide
catccagggagtaccgcaagtgtatgcagtaactggcaaccgaagttctcatcgaagaa

SEQ ID NO: 351123 - DNA, 60 bp, Artificial
  Synthetic oligonucleotide
catccagtacatgcagggcctattgcaccaggccagatgagagaaccaaggggaagtgac

SEQ ID NO: 351124 - DNA, 60 bp, Artificial
  Synthetic oligonucleotide
catccagtgttagagtcggtcaccgactccataagacactctctcacgaactatccttgg

SEQ ID NO: 351125 - DNA, 60 bp, Artificial
  Synthetic oligonucleotide
catccagttccacaaaattttggcagatcttctcaattcgtgagaagagataacatatta

SEQ ID NO: 351126 - DNA, 53 bp, Artificial
  Synthetic oligonucleotide
catccatagttacgcttgcgttaacgttggccccgttcctttcctgaacggcc

SEQ ID NO: 351127 - DNA, 60 bp, Artificial
  Synthetic oligonucleotide
catccatcaaaaggtatcgtagttataggtatcattccagatactatctcgaatgcccaa

SEQ ID NO: 351128 - DNA, 57 bp, Artificial
  Synthetic oligonucleotide
catccatcgacttggtttagctaaaatgaatcccgcaagtaattctatcctaccggc

SEQ ID NO: 351129 - DNA, 52 bp, Artificial
  Synthetic oligonucleotide
catccatcggggggttaccaacccggctcactatccaatagtggcctggata

SEQ ID NO: 351130 - DNA, 55 bp, Artificial
  Synthetic oligonucleotide
catccatcttccaaaaccacaagtgatttacacagaaacagcttacacgcagggg

SEQ ID NO: 351131 - DNA, 54 bp, Artificial
  Synthetic oligonucleotide
catccatgacgactaaacctgccatttttcggctataaaaactgggtttttcca

SEQ ID NO: 351132 - DNA, 55 bp, Artificial
  Synthetic oligonucleotide
catccatgatgtgggagattaatggctcggaatcggtgctagtcaacacatacca

SEQ ID NO: 351133 - DNA, 60 bp, Artificial
  Synthetic oligonucleotide
catccatgctatctgacccaacacacataaccgcagaaacggcgggtcgacgcctcggaa

SEQ ID NO: 351134 - DNA, 60 bp, Artificial
  Synthetic oligonucleotide
catccatgtgacgtataatcatcaagaagctgcgaagtatgacaatccaccagagaatgc

SEQ ID NO: 351135 - DNA, 56 bp, Artificial
  Synthetic oligonucleotide
catccattaacaaccggggtgggcatactcatgtcactcgccagatgggcggagta

SEQ ID NO: 351136 - DNA, 55 bp, Artificial
  Synthetic oligonucleotide
catccattggatggataaagacgacgcaaatgagcgtcgtagagtcgcacagcaa

SEQ ID NO: 351137 - DNA, 55 bp, Artificial
  Synthetic oligonucleotide
catcccaacaacattcaattacgggataatttacacagaggcagaagtggacgtg

SEQ ID NO: 351138 - DNA, 60 bp, Artificial
  Synthetic oligonucleotide
catcccaacattagccagctgagcacgcaagtctcggacgtgcacattaacgagtcatcc

SEQ ID NO: 351139 - DNA, 58 bp, Artificial
  Synthetic oligonucleotide
catcccaggtgaagtgaagaacctcttagaaatttgccaagtggagtctattctcgag

SEQ ID NO: 351140 - DNA, 57 bp, Artificial
  Synthetic oligonucleotide
catcccagttcaaagtttatcttatctggagtacaatttacattcaaagacacaccc

SEQ ID NO: 351141 - DNA, 51 bp, Artificial
  Synthetic oligonucleotide
catcccataatacatgattacattctctaattacattattaatactaatta

SEQ ID NO: 351142 - DNA, 60 bp, Artificial
  Synthetic oligonucleotide
catcccatagtgcctcattaggccccatgaggttacagttacaatccacacacttatcta

SEQ ID NO: 351143 - DNA, 60 bp, Artificial
  Synthetic oligonucleotide
catcccatcttgtcttagttctaggagatgtcatcttgttggtgattgtgtgggtaacaa

SEQ ID NO: 351144 - DNA, 60 bp, Artificial
  Synthetic oligonucleotide
catcccatgtgaatctttggctcatcatagtgcactgatagttcggctgacgtggtcgca

SEQ ID NO: 351145 - DNA, 60 bp, Artificial
  Synthetic oligonucleotide
catcccatgttttgccgctcagaggaaccaggtctatcgttgacttggatgatggaagca

SEQ ID NO: 351146 - DNA, 59 bp, Artificial
  Synthetic oligonucleotide
catccccacaacttgagggattttcagcggaatctagaaaactgctcctcattgttcag

SEQ ID NO: 351147 - DNA, 60 bp, Artificial
  Synthetic oligonucleotide
catccccagaagctcttggtccaatcatgatgcctcatcaggagtgagctctgcatgtcc

SEQ ID NO: 351148 - DNA, 60 bp, Artificial
  Synthetic oligonucleotide
catccccaggaattcttggtccaatcatgatgcctcatcaggagtgagcgcagcatgttc

SEQ ID NO: 351149 - DNA, 55 bp, Artificial
  Synthetic oligonucleotide
catccccctgccagcgttggtctagtggaaagaactaacgctgacgggggcgatt

SEQ ID NO: 351150 - DNA, 57 bp, Artificial
  Synthetic oligonucleotide
catccccggggtggggccggtccttgcagggatcatccgcattctggcttccaacta

SEQ ID NO: 351151 - DNA, 52 bp, Artificial
  Synthetic oligonucleotide
catcccctctaccggtcccgggtggacgcttgccctcccttcgtggaggttc

SEQ ID NO: 351152 - DNA, 55 bp, Artificial
  Synthetic oligonucleotide
catcccgaaaagtgccatcaacctgtggtaatgtcggttttgcgcacgaaacccc

SEQ ID NO: 351153 - DNA, 56 bp, Artificial
  Synthetic oligonucleotide
catcccgagctcatgctatagttgcacttacccgccacacagagaagtgcgtcatc

SEQ ID NO: 351154 - DNA, 51 bp, Artificial
  Synthetic oligonucleotide
catcccgcattactacgttcaagtgaagcttttcccgttaatgcttataaa

SEQ ID NO: 351155 - DNA, 55 bp, Artificial
  Synthetic oligonucleotide
catcccgtagtaggcatagaatctgtcatagtcaggtcccactagtcgagtcgtg

SEQ ID NO: 351156 - DNA, 55 bp, Artificial
  Synthetic oligonucleotide
catcccgttaacatccaaaccgcctgtctcatcatggaaggtgctgagtttaccg

SEQ ID NO: 351157 - DNA, 60 bp, Artificial
  Synthetic oligonucleotide
catcccgttatggcaccattgctagtaatcacatggggacactgtgttctagaatagtta

SEQ ID NO: 351158 - DNA, 58 bp, Artificial
  Synthetic oligonucleotide
catcccgttccgtttgacaccatcagtttgcccggtcccactggctcacacacctaca

SEQ ID NO: 351159 - DNA, 59 bp, Artificial
  Synthetic oligonucleotide
catccctaaaatacccctatctctgtgtctggaaggcgcgtgggagtgcgctgcaaaag

SEQ ID NO: 351160 - DNA, 55 bp, Artificial
  Synthetic oligonucleotide
catccctagtgctcctggcttggacgtccagctgccttctgacgatactgattcc

SEQ ID NO: 351161 - DNA, 60 bp, Artificial
  Synthetic oligonucleotide
catccctatcaatggatctcgcgactttgttgcggatcctaccagactcgacagctctgt

SEQ ID NO: 351162 - DNA, 55 bp, Artificial
  Synthetic oligonucleotide
catccctatctaacaggcgttttaattgttgggcttcgtttaatgaccttgatcg

SEQ ID NO: 351163 - DNA, 55 bp, Artificial
  Synthetic oligonucleotide
catccctatgtcaacatatgggtggaatctagtgcgtcttcagagtggagttgac

SEQ ID NO: 351164 - DNA, 55 bp, Artificial
  Synthetic oligonucleotide
catccctcacatggtgggaacaatgagtggaaccacgactgagcgtgaattgtgg

SEQ ID NO: 351165 - DNA, 60 bp, Artificial
  Synthetic oligonucleotide
catccctccagtctcgatgcctgctaactacgccgaacttatctctaacttggagtctgt

SEQ ID NO: 351166 - DNA, 54 bp, Artificial
  Synthetic oligonucleotide
catccctcgatcttgcatggtccggagttgggccggtgatcactccggaagtgc

SEQ ID NO: 351167 - DNA, 60 bp, Artificial
  Synthetic oligonucleotide
catccctctgagactctatataattaaatgcgtttgggggattagctaattgagaatcca

SEQ ID NO: 351168 - DNA, 53 bp, Artificial
  Synthetic oligonucleotide
catccctgccatggttctagagaacggctgtcaggagggcgttgtcgcctcgg

SEQ ID NO: 351169 - DNA, 59 bp, Artificial
  Synthetic oligonucleotide
catccctgcccggtcttatcgagatagatacgcggactggacaatatattttcaacggc

SEQ ID NO: 351170 - DNA, 55 bp, Artificial
  Synthetic oligonucleotide
catccctgttcaacatgaacgcgggtttgggaagaagcaagtcatcatagactgc

SEQ ID NO: 351171 - DNA, 55 bp, Artificial
  Synthetic oligonucleotide
catcccttaggtccctagttgcctcatcaggcacattggagttcatcactgaggg

SEQ ID NO: 351172 - DNA, 55 bp, Artificial
  Synthetic oligonucleotide
catcccttttaacgaggcagtagaacaagtagagaatcaaagcgtagcaaatacg

SEQ ID NO: 351173 - DNA, 55 bp, Artificial
  Synthetic oligonucleotide
catcccttttccttgaaaatgcgcctagatggatctaagagcagcgagaactttg

SEQ ID NO: 351174 - DNA, 59 bp, Artificial
  Synthetic oligonucleotide
catccgaacatgacgaaccccatgaagcgagtctttccaacaatcactcgatgtacttt

SEQ ID NO: 351175 - DNA, 60 bp, Artificial
  Synthetic oligonucleotide
catccgaatgatactgtgcaccgacccagttttcaccaggattggggctatgtttgaaca

SEQ ID NO: 351176 - DNA, 56 bp, Artificial
  Synthetic oligonucleotide
catccgacaggaggggttccatggagtcgcccccgacccttactgccgacatcctg

SEQ ID NO: 351177 - DNA, 55 bp, Artificial
  Synthetic oligonucleotide
catccgacttggtgcccaacttcatgatgagagacccatcacatgcattcaatgg

SEQ ID NO: 351178 - DNA, 55 bp, Artificial
  Synthetic oligonucleotide
catccgagagtaatgatgagattcaaggttccacgatcgcagcagccccaaattc

SEQ ID NO: 351179 - DNA, 55 bp, Artificial
  Synthetic oligonucleotide
catccgagcactgacagggaacaaaccaacttatatgttcaagcatcagggaaag

SEQ ID NO: 351180 - DNA, 57 bp, Artificial
  Synthetic oligonucleotide
catccgagggacaagagtggtcccaagaggacaactatccaccagaggagttcaaat

SEQ ID NO: 351181 - DNA, 55 bp, Artificial
  Synthetic oligonucleotide
catccgagggtgatgatgaggttcaaggtcccacgatcacaacagcctcaaattc

SEQ ID NO: 351182 - DNA, 56 bp, Artificial
  Synthetic oligonucleotide
catccgaggtaacttaacatgtggatcaaacataactggaatgattctagaaatgg

SEQ ID NO: 351183 - DNA, 56 bp, Artificial
  Synthetic oligonucleotide
catccgagttcctgttaactctacggtgtatttggacccctgcatgggccctgccc

SEQ ID NO: 351184 - DNA, 60 bp, Artificial
  Synthetic oligonucleotide
catccgatcacggtagagtgtgtaagcaagtcacaaggtgactttgtccacgcgtgttgt

SEQ ID NO: 351185 - DNA, 60 bp, Artificial
  Synthetic oligonucleotide
catccgatccgtgaatgctgggaaaataacatgaacaatatggccgaagcaagatcactg

SEQ ID NO: 351186 - DNA, 54 bp, Artificial
  Synthetic oligonucleotide
catccgatcctaactggagttgggaccgtactcgttaccgtggccgtggaccta

SEQ ID NO: 351187 - DNA, 60 bp, Artificial
  Synthetic oligonucleotide
catccgatggaatcgtttagtgtgcatgcatttatagacttaatgaacagatattttgtg

SEQ ID NO: 351188 - DNA, 60 bp, Artificial
  Synthetic oligonucleotide
catccgattacgttctggcatccactaactccagcaccataacacccccaacagtcgctc

SEQ ID NO: 351189 - DNA, 60 bp, Artificial
  Synthetic oligonucleotide
catccgattccagaatggttaagggtgacaacaactatatgtatatgtcagctaaagata

SEQ ID NO: 351190 - DNA, 60 bp, Artificial
  Synthetic oligonucleotide
catccgatttatatgggatcgatggattatactgtaagttatgaacagctcgtttcgaac

SEQ ID NO: 351191 - DNA, 60 bp, Artificial
  Synthetic oligonucleotide
catccgcaaccatggttgtgccttggatcagcaacgtcatgtatcgcagatgcgtgaagg

SEQ ID NO: 351192 - DNA, 55 bp, Artificial
  Synthetic oligonucleotide
catccgccaaatggaagctgaaggagtcatcacacaagacgacatgcagaaccca

SEQ ID NO: 351193 - DNA, 60 bp, Artificial
  Synthetic oligonucleotide
catccgccgtactctggtgtgcaagtccattaggtgtcctggagggatcaactgccgtcg

SEQ ID NO: 351194 - DNA, 55 bp, Artificial
  Synthetic oligonucleotide
catccgcctcaacgttctcgtaccctccgaacgccatgatcatctcatgtcccgt

SEQ ID NO: 351195 - DNA, 57 bp, Artificial
  Synthetic oligonucleotide
catccgcgggtgtcttagtgcattacgataaacccactaacggaaatcattacattc

SEQ ID NO: 351196 - DNA, 54 bp, Artificial
  Synthetic oligonucleotide
catccgcgttctacgtccaacctacgacgttccagaccccacagagggccttgt

SEQ ID NO: 351197 - DNA, 55 bp, Artificial
  Synthetic oligonucleotide
catccgctatccacagatgtacaccatttataagcaaattcggtctaatttctgg

SEQ ID NO: 351198 - DNA, 55 bp, Artificial
  Synthetic oligonucleotide
catccgctgtgctcgctggtctaccgctgactgacgttgcccggaagtatcccac

SEQ ID NO: 351199 - DNA, 60 bp, Artificial
  Synthetic oligonucleotide
catccggaatttaaacttcagatatgtacaacgcatcttacatgcaaaggcgattgtcat

SEQ ID NO: 351200 - DNA, 60 bp, Artificial
  Synthetic oligonucleotide
catccggcagctcttaatatcgttatgacggaagagatgtatgttgactcgatcatgatc

SEQ ID NO: 351201 - DNA, 60 bp, Artificial
  Synthetic oligonucleotide
catccggcttgagagtgaagtcacagcaattaagaacgccctcaaaacgaccaatgaagc

SEQ ID NO: 351202 - DNA, 58 bp, Artificial
  Synthetic oligonucleotide
catccgggcgttcagaaaagtgggagttataacacatcaagctccaactcccggatca

SEQ ID NO: 351203 - DNA, 55 bp, Artificial
  Synthetic oligonucleotide
catccggggcacacgagtgctaccaaggggacaactgtcgaccaggggtgttcaa

SEQ ID NO: 351204 - DNA, 55 bp, Artificial
  Synthetic oligonucleotide
catccggtgagggatgggtgttcgccaacaacgactgcgttcacgaaaccgagag

SEQ ID NO: 351205 - DNA, 50 bp, Artificial
  Synthetic oligonucleotide
catccggtgagtgttgtatcgaatacttgactgtttgacagaactactgt

SEQ ID NO: 351206 - DNA, 53 bp, Artificial
  Synthetic oligonucleotide
catccgtaaaattagaagcgtcccagtcggacgttgcttaaccctccctgcgt

SEQ ID NO: 351207 - DNA, 55 bp, Artificial
  Synthetic oligonucleotide
catccgtaacccaatcgactaccaagatgactggactgcacctgacttcctaacc

SEQ ID NO: 351208 - DNA, 57 bp, Artificial
  Synthetic oligonucleotide
catccgtaactagtgaaaggggaaacaccatggaactcgacgcaagcgccgcattga

SEQ ID NO: 351209 - DNA, 55 bp, Artificial
  Synthetic oligonucleotide
catccgtaataacccgctttattggccttgcgcctgttaaagcgcagccgggttg

SEQ ID NO: 351210 - DNA, 55 bp, Artificial
  Synthetic oligonucleotide
catccgtaatggagtgttcagactaacgttactcaacgcttctcaacggtgacac

SEQ ID NO: 351211 - DNA, 60 bp, Artificial
  Synthetic oligonucleotide
catccgtagatctggctctgacgccatttgcgagccctctctcgtactggagacgagaga

SEQ ID NO: 351212 - DNA, 55 bp, Artificial
  Synthetic oligonucleotide
catccgtattcttaaagctggggttggtagtgatagagaggcacatgagctcaac

SEQ ID NO: 351213 - DNA, 55 bp, Artificial
  Synthetic oligonucleotide
catccgtcaataaagcagttttcgaatggaccctatttagttaaagatacgataa

SEQ ID NO: 351214 - DNA, 58 bp, Artificial
  Synthetic oligonucleotide
catccgtcctgagtggcctctggtgtggaaaccagagagtcttgcggtaaccaacgaa

SEQ ID NO: 351215 - DNA, 55 bp, Artificial
  Synthetic oligonucleotide
catccgtctagtactcaattgtgcgaatacaagtagttccgtttatcaggaccca

SEQ ID NO: 351216 - DNA, 60 bp, Artificial
  Synthetic oligonucleotide
catccgtgattgtgtaggtgttgaggttagacgtgctggtgggcttatggcagcttactt

SEQ ID NO: 351217 - DNA, 55 bp, Artificial
  Synthetic oligonucleotide
catccgtggagaaactatataataacttgggatcaagatataccctgtaaaccgc

SEQ ID NO: 351218 - DNA, 55 bp, Artificial
  Synthetic oligonucleotide
catccgtgggatgtatggcggtttgcgtattgaaggtcacacaatcaccttctac

SEQ ID NO: 351219 - DNA, 60 bp, Artificial
  Synthetic oligonucleotide
catccgtgtcatccacactccgccctggcgagggcggtatgcgtcaaatcgaatacattt

SEQ ID NO: 351220 - DNA, 60 bp, Artificial
  Synthetic oligonucleotide
catccgtgtctggtaaatctattctagacacttactggatacatgattatgagacaggca

SEQ ID NO: 351221 - DNA, 60 bp, Artificial
  Synthetic oligonucleotide
catccgttaactcggagcatatcttctcagtagaccacaattgtgagactattgccaagg

SEQ ID NO: 351222 - DNA, 58 bp, Artificial
  Synthetic oligonucleotide
catccgttacttatctaactcaagacataatcccagtcttttaaagctatatgaggaa

SEQ ID NO: 351223 - DNA, 60 bp, Artificial
  Synthetic oligonucleotide
catccgttgataaccgagtaacgcatcgcaacgtccggtcggcactgtgccttgtgtgca

SEQ ID NO: 351224 - DNA, 54 bp, Artificial
  Synthetic oligonucleotide
catccgtttgtaggctatgtcactggtgacactcaggagctagaaatgagtaaa

SEQ ID NO: 351225 - DNA, 50 bp, Artificial
  Synthetic oligonucleotide
catcctaaagctgtgactatggagactgaagtgtctgtattaccgaaatt

SEQ ID NO: 351226 - DNA, 59 bp, Artificial
  Synthetic oligonucleotide
catcctaacaggatgggggatagacgggacaaccaagctatgtattagcaatgagtccc

SEQ ID NO: 351227 - DNA, 54 bp, Artificial
  Synthetic oligonucleotide
catcctaaccaagcaaggtggaaagagaggttgtatttggttctatggaccggg

SEQ ID NO: 351228 - DNA, 60 bp, Artificial
  Synthetic oligonucleotide
catcctacaatgggagcatgtcatgggttggttgcactgagtaggcataggacggtattt

SEQ ID NO: 351229 - DNA, 57 bp, Artificial
  Synthetic oligonucleotide
catcctacactctccggggtgcatcccttgcgttcgcgagggtaacgcctcgaaatg

SEQ ID NO: 351230 - DNA, 52 bp, Artificial
  Synthetic oligonucleotide
catcctaccaagtcactgacgagtacgacgcgtacttggatatggtagacgg

SEQ ID NO: 351231 - DNA, 60 bp, Artificial
  Synthetic oligonucleotide
catcctacgctaccataccagaggcccgggagtcagacacgtgttcactcagtcacctta

SEQ ID NO: 351232 - DNA, 55 bp, Artificial
  Synthetic oligonucleotide
catcctagagaaagcatgctattgcaagtcatatggtgagcaatggtttgacgcg

SEQ ID NO: 351233 - DNA, 52 bp, Artificial
  Synthetic oligonucleotide
catcctagcgggctatggagcaggggtggcaggcgcactcgtggcctttaag

SEQ ID NO: 351234 - DNA, 60 bp, Artificial
  Synthetic oligonucleotide
catcctagctccagtgctggtctgaaagatgatctccttgaaaatttgcaggcctaccag

SEQ ID NO: 351235 - DNA, 55 bp, Artificial
  Synthetic oligonucleotide
catcctatccatgagtcccaaacctctctttgtgtaacccttgaggtatgcctca

SEQ ID NO: 351236 - DNA, 59 bp, Artificial
  Synthetic oligonucleotide
catcctatgactttgggatacgagaggtggctactaagttaggtgcacctggcaatacg

SEQ ID NO: 351237 - DNA, 55 bp, Artificial
  Synthetic oligonucleotide
catcctatgagccaacatggaacagatgacccggagagagaagtgctgatgtgga

SEQ ID NO: 351238 - DNA, 55 bp, Artificial
  Synthetic oligonucleotide
catcctatgcatagatgaccgtggtcaccacactttgtaacacgattgtaggagc

SEQ ID NO: 351239 - DNA, 57 bp, Artificial
  Synthetic oligonucleotide
catcctcaaaaactactaaaaactggtcaatagctactcctagctcaaagttcagcc

SEQ ID NO: 351240 - DNA, 55 bp, Artificial
  Synthetic oligonucleotide
catcctcaaactagtttggtcaaaccaaaacccctgggtcaattgtgaggaatga

SEQ ID NO: 351241 - DNA, 60 bp, Artificial
  Synthetic oligonucleotide
catcctcaacacaagccaaaggggaatccttgaggatgaacagatgtatcaaaagtgttg

SEQ ID NO: 351242 - DNA, 60 bp, Artificial
  Synthetic oligonucleotide
catcctcacacttggtgtccaaagcatactgtgtaactaatttccatgaaacctgcttag

SEQ ID NO: 351243 - DNA, 51 bp, Artificial
  Synthetic oligonucleotide
catcctcacgtaaacggggtgttttttaacggtataatactgggtcctgac

SEQ ID NO: 351244 - DNA, 60 bp, Artificial
  Synthetic oligonucleotide
catcctcactgcaacaaccactaaaggagagttcacaatgctgggagtgcatgataacgt

SEQ ID NO: 351245 - DNA, 51 bp, Artificial
  Synthetic oligonucleotide
catcctcatataattgagaaagctatgctaaaggataaaatcccagataat

SEQ ID NO: 351246 - DNA, 57 bp, Artificial
  Synthetic oligonucleotide
catcctcatgcggtacgctaacgctgaaacactccccgaacccgaagagaccaccag

SEQ ID NO: 351247 - DNA, 60 bp, Artificial
  Synthetic oligonucleotide
catcctccacccggtgtgtagaagtgcgatccagcttaccatcagacagtcactagctgt

SEQ ID NO: 351248 - DNA, 55 bp, Artificial
  Synthetic oligonucleotide
catcctccagggccctcatctttgtacgagcttcatcctctagccttccagatcg

SEQ ID NO: 351249 - DNA, 60 bp, Artificial
  Synthetic oligonucleotide
catcctcctgacaccaatgagcaaaatactctgtacggctctggtgatcgatacgttagg

SEQ ID NO: 351250 - DNA, 58 bp, Artificial
  Synthetic oligonucleotide
catcctcgctctcaacggctacgaccctgcctacgccggctccgtctttctcggctgg

SEQ ID NO: 351251 - DNA, 58 bp, Artificial
  Synthetic oligonucleotide
catcctcgggtggctacctcacctggcgccacaacggtactactttcccagctggctc

SEQ ID NO: 351252 - DNA, 55 bp, Artificial
  Synthetic oligonucleotide
catcctctccgccaaataacgggcgtctacctctactagtggattcgcgtagaga

SEQ ID NO: 351253 - DNA, 59 bp, Artificial
  Synthetic oligonucleotide
catcctcttattctagacacctgtaccattgaaggactaatctatggcaacccttcttg

SEQ ID NO: 351254 - DNA, 55 bp, Artificial
  Synthetic oligonucleotide
catcctgaaaccaggaatgccgagctcccgcgtattctggttgaccatgcgtgcc

SEQ ID NO: 351255 - DNA, 50 bp, Artificial
  Synthetic oligonucleotide
catcctgaatgaacaggtttgaggacggaagcctgcgccattatgcggca

SEQ ID NO: 351256 - DNA, 60 bp, Artificial
  Synthetic oligonucleotide
catcctgaggggagcagtatctcacaaatcatgcctgccggcctgtgtgtatggactggc

SEQ ID NO: 351257 - DNA, 55 bp, Artificial
  Synthetic oligonucleotide
catcctgcgcttacccaactaattagaggatacgaacctcttggatcatgcctgc

SEQ ID NO: 351258 - DNA, 55 bp, Artificial
  Synthetic oligonucleotide
catcctggacataaagcaaggaccaaaggagccgttcaaggactatgtggacagg

SEQ ID NO: 351259 - DNA, 60 bp, Artificial
  Synthetic oligonucleotide
catcctggcatttggaatatcgactctggtgttcatagctgtgccaggacgacccaatgg

SEQ ID NO: 351260 - DNA, 56 bp, Artificial
  Synthetic oligonucleotide
catcctggcgtttggccgcctggcttccttaacccccaactcatcaacccgcaaca

SEQ ID NO: 351261 - DNA, 60 bp, Artificial
  Synthetic oligonucleotide
catcctgtgcagcaatggatgattttcaattgatcccaatgataagcaaatgtagaacca

SEQ ID NO: 351262 - DNA, 55 bp, Artificial
  Synthetic oligonucleotide
catccttatatagaacgagagctggtggtagagattttgtctatactagtaatta

SEQ ID NO: 351263 - DNA, 55 bp, Artificial
  Synthetic oligonucleotide
catccttatgttagttctgacgatgtgctgccgactctcagaggtgtgtatgaca

SEQ ID NO: 351264 - DNA, 58 bp, Artificial
  Synthetic oligonucleotide
catccttcacatttcgttccgcccatgacgaaatgtaactgggaacattgtcgaaaga

SEQ ID NO: 351265 - DNA, 60 bp, Artificial
  Synthetic oligonucleotide
catccttcaggaaactttcagataaaatgcaacgtcgtgaagcaccttttactgatatca

SEQ ID NO: 351266 - DNA, 55 bp, Artificial
  Synthetic oligonucleotide
catccttcaggcacttggcacgcccttacaacgactgcgcatgcacaccaaaccc

SEQ ID NO: 351267 - DNA, 58 bp, Artificial
  Synthetic oligonucleotide
catccttctgtcgtggatctccacaattacagtacctattgcgtttatcggtacctgt

SEQ ID NO: 351268 - DNA, 56 bp, Artificial
  Synthetic oligonucleotide
catccttgctaggcttcttctcagctggttccttacctggagggacgaaggacttc

SEQ ID NO: 351269 - DNA, 55 bp, Artificial
  Synthetic oligonucleotide
catcctttaacagtagaaacattcatgaaagtaagatatggttattttaaaacaa

SEQ ID NO: 351270 - DNA, 53 bp, Artificial
  Synthetic oligonucleotide
catcctttcgcccggagccctcgtagtcggtgtggtctgcgcggcaatactac

SEQ ID NO: 351271 - DNA, 55 bp, Artificial
  Synthetic oligonucleotide
catcctttgttgtcccaatactactgaaggccttgtatatgttgacgacacgggg

SEQ ID NO: 351272 - DNA, 55 bp, Artificial
  Synthetic oligonucleotide
catccttttgtcgtgaatctccactattaccgacccagtggcgtttattggtact

SEQ ID NO: 351273 - DNA, 55 bp, Artificial
  Synthetic oligonucleotide
catcgaaaattcaagggacgcggggttcccagtgatcaacacacccagcaagacc

SEQ ID NO: 351274 - DNA, 60 bp, Artificial
  Synthetic oligonucleotide
catcgaaagccgaggtgatagaatggaaggatgagatggcggagagaccgtggcatgtcc

SEQ ID NO: 351275 - DNA, 53 bp, Artificial
  Synthetic oligonucleotide
catcgaaaggcgggaagggaatgatgtctgttatcctggaaaatttgtaaacg

SEQ ID NO: 351276 - DNA, 55 bp, Artificial
  Synthetic oligonucleotide
catcgaactcctccagcattgcgtcgtagtcgtatgagatctgcagtcgcaggtt

SEQ ID NO: 351277 - DNA, 59 bp, Artificial
  Synthetic oligonucleotide
catcgaactgcgtcccagttggtcgttagtattaaacatgcttggacaagaagtagtgc

SEQ ID NO: 351278 - DNA, 60 bp, Artificial
  Synthetic oligonucleotide
catcgaacttcctttggaatacaatgtctgtgtagagcaacttgaatctggtcctagtat

SEQ ID NO: 351279 - DNA, 60 bp, Artificial
  Synthetic oligonucleotide
catcgaagatataaagaggcgatgagtaagcttgtttgttacaataaatcgtacgatgga

SEQ ID NO: 351280 - DNA, 60 bp, Artificial
  Synthetic oligonucleotide
catcgaaggtgttcctgatgatcgaagtatcatctgggtatacggtcccaacggaggcga

SEQ ID NO: 351281 - DNA, 56 bp, Artificial
  Synthetic oligonucleotide
catcgaatgatgccatcctatccatgatggctaatatgtttctgattccctcttcc

SEQ ID NO: 351282 - DNA, 59 bp, Artificial
  Synthetic oligonucleotide
catcgaatgcgatgcatcagatgaccattggggagcaatcctcaaagcaaaacttccag

SEQ ID NO: 351283 - DNA, 54 bp, Artificial
  Synthetic oligonucleotide
catcgaattattggtccaatcgacccaaggtgaaccatctacccatacacgaac

SEQ ID NO: 351284 - DNA, 60 bp, Artificial
  Synthetic oligonucleotide
catcgaattggtggcggatggctttgcttcagtcaattcagatgtaactatggctggtgc

SEQ ID NO: 351285 - DNA, 60 bp, Artificial
  Synthetic oligonucleotide
catcgacaatgtaatgggaatgatcggaatattacctgatatgacaccaagtactgaaat

SEQ ID NO: 351286 - DNA, 60 bp, Artificial
  Synthetic oligonucleotide
catcgacaatgtcatggggatgattgggatattgcctgacatgacccccagcacggaaat

SEQ ID NO: 351287 - DNA, 60 bp, Artificial
  Synthetic oligonucleotide
catcgacaatgtgatgggaatgatcggaataatgcctgacatgaccccaagtactgagat

SEQ ID NO: 351288 - DNA, 60 bp, Artificial
  Synthetic oligonucleotide
catcgacaatgtgatgggaatgatcggaatactgcccgatatgaccccaagcacggaaat

SEQ ID NO: 351289 - DNA, 55 bp, Artificial
  Synthetic oligonucleotide
catcgacacgacgcggtacgttacgtgtgtaacgagaaccataagagcattcctt

SEQ ID NO: 351290 - DNA, 60 bp, Artificial
  Synthetic oligonucleotide
catcgacactgagcgggagaggggcgacttgactcagtttgatgttctcgcagcctcttc

SEQ ID NO: 351291 - DNA, 60 bp, Artificial
  Synthetic oligonucleotide
catcgacagcccatggtcgaggagcagtttcagcctacacgatcccgcatcggttgttat

SEQ ID NO: 351292 - DNA, 56 bp, Artificial
  Synthetic oligonucleotide
catcgacatcgctcaatataggcggcggtgttgtcaaatgaagaccgcccaaatat

SEQ ID NO: 351293 - DNA, 60 bp, Artificial
  Synthetic oligonucleotide
catcgacattatgccgttaacgatttacatcgaagtagtggtgacgatccgattagagag

SEQ ID NO: 351294 - DNA, 55 bp, Artificial
  Synthetic oligonucleotide
catcgacgaccctcagaagatttacgactacttacgcctaggggaaccgcttcga

SEQ ID NO: 351295 - DNA, 59 bp, Artificial
  Synthetic oligonucleotide
catcgagaaatgtgtaatgacgtggagcgttctctaccattcctggaacgttagatagt

SEQ ID NO: 351296 - DNA, 50 bp, Artificial
  Synthetic oligonucleotide
catcgagaagggttcacttaagtccttccggaacaaggtatcccagaagg

SEQ ID NO: 351297 - DNA, 60 bp, Artificial
  Synthetic oligonucleotide
catcgagagaaccatttaccggatggttgacttgcccgtgttgcagccgcggctgtgcac

SEQ ID NO: 351298 - DNA, 55 bp, Artificial
  Synthetic oligonucleotide
catcgagccttctacaagggactttccgctggggactttccagggaggtgtggcc

SEQ ID NO: 351299 - DNA, 55 bp, Artificial
  Synthetic oligonucleotide
catcgaggaggttgctctgtccaccactggggagatcccattctacggcaaggct

SEQ ID NO: 351300 - DNA, 55 bp, Artificial
  Synthetic oligonucleotide
catcgaggctctaggaacctctgcagacgtcatcacagtagctgactttgatagc

SEQ ID NO: 351301 - DNA, 55 bp, Artificial
  Synthetic oligonucleotide
catcgagtatatggtaactgcagcaatcgtggatccacatggccttctcggtgcc

SEQ ID NO: 351302 - DNA, 54 bp, Artificial
  Synthetic oligonucleotide
catcgagttgttaggtcttacatgcaacatagggtaatgggaggattcgtcccc

SEQ ID NO: 351303 - DNA, 60 bp, Artificial
  Synthetic oligonucleotide
catcgatattcgaggctgcagcttcacccctgatttcatagagtatgctaaaactcttag

SEQ ID NO: 351304 - DNA, 60 bp, Artificial
  Synthetic oligonucleotide
catcgatcagttggcagaggacatcttagtagacttgagagactacaaaaagaggcttgg

SEQ ID NO: 351305 - DNA, 60 bp, Artificial
  Synthetic oligonucleotide
catcgatcgttagccactttagcaaatcgtaatggaggcaaattactcgctgaacaacag

SEQ ID NO: 351306 - DNA, 60 bp, Artificial
  Synthetic oligonucleotide
catcgatctgaaactctccccactcgagagtgtctccgtccttgtcgatgtagtccttga

SEQ ID NO: 351307 - DNA, 60 bp, Artificial
  Synthetic oligonucleotide
catcgatctgaaactgaccccagtcgatgtaatcactgtccttctcgatgtaggacttga

SEQ ID NO: 351308 - DNA, 60 bp, Artificial
  Synthetic oligonucleotide
catcgatctgtcgcctcttaatacaacgatgcatttttacgaaatgctctcgccgttgag

SEQ ID NO: 351309 - DNA, 55 bp, Artificial
  Synthetic oligonucleotide
catcgatgacgttatactccacttgatctgaatatacctttgagttgaaatccag

SEQ ID NO: 351310 - DNA, 55 bp, Artificial
  Synthetic oligonucleotide
catcgatggttcgtcgtatttcgccagtgcttcgaagcctgttctgcttgcggcc

SEQ ID NO: 351311 - DNA, 60 bp, Artificial
  Synthetic oligonucleotide
catcgattaggtgatgttgcgattttgtcgtagcagtgactatgtctggatctagctact

SEQ ID NO: 351312 - DNA, 60 bp, Artificial
  Synthetic oligonucleotide
catcgatttcagaattctgcattaaagatgacgtttctatgttaaaatcagagattgtct

SEQ ID NO: 351313 - DNA, 55 bp, Artificial
  Synthetic oligonucleotide
catcgcaaccccgccgaactaacaccgacgctcatcgccgacattaactgcgccc

SEQ ID NO: 351314 - DNA, 60 bp, Artificial
  Synthetic oligonucleotide
catcgcaaccgcttgcaacaacattaattggtgaaatctcaagttattatacccaatgga

SEQ ID NO: 351315 - DNA, 55 bp, Artificial
  Synthetic oligonucleotide
catcgcaagtccccattcggcttgggtattttcatgtgcacctgatcgctgccca

SEQ ID NO: 351316 - DNA, 58 bp, Artificial
  Synthetic oligonucleotide
catcgcaatagcaatgctcttggcgagcacaaatgcatacgataggatatgcattggg

SEQ ID NO: 351317 - DNA, 55 bp, Artificial
  Synthetic oligonucleotide
catcgcactgcaatataccgatcgcgggcgttcgctgatgcgaaatataccgacc

SEQ ID NO: 351318 - DNA, 60 bp, Artificial
  Synthetic oligonucleotide
catcgcacttaaatccatattcgtcattgaatgtaggtggacggacacagcattctgtaa

SEQ ID NO: 351319 - DNA, 60 bp, Artificial
  Synthetic oligonucleotide
catcgcagaatatagcgtttgctgttgcccaattcttgagtgctccttgctctggtttgt

SEQ ID NO: 351320 - DNA, 58 bp, Artificial
  Synthetic oligonucleotide
catcgcattaggaaaaccattatatatcctaccaggtagttttgagtggaatgacgcc

SEQ ID NO: 351321 - DNA, 50 bp, Artificial
  Synthetic oligonucleotide
catcgccaaaccttggatgggcgaaatggtccgcgccttctatccggagc

SEQ ID NO: 351322 - DNA, 60 bp, Artificial
  Synthetic oligonucleotide
catcgccaaggaccaacactcgctaatcccatggactaatgtcaaagttgccaaacagtg

SEQ ID NO: 351323 - DNA, 60 bp, Artificial
  Synthetic oligonucleotide
catcgccatatggctagtatccgccctagcggccggcaccggtatagctggtggagttac

SEQ ID NO: 351324 - DNA, 60 bp, Artificial
  Synthetic oligonucleotide
catcgcccacaatactggctcattttgggtattggcgtatgcagcttccatcggaacatt

SEQ ID NO: 351325 - DNA, 60 bp, Artificial
  Synthetic oligonucleotide
catcgcccaccctccaatcacaaatcgactcaccgcaacaaaaacactcaacttgatctc

SEQ ID NO: 351326 - DNA, 58 bp, Artificial
  Synthetic oligonucleotide
catcgcccatgtcaattttagttgcgttagtagatataaatggtactttcattactaa

SEQ ID NO: 351327 - DNA, 60 bp, Artificial
  Synthetic oligonucleotide
catcgcccccaacacctatgcaacctggctactaaagatccacacgtacgaacagctcat

SEQ ID NO: 351328 - DNA, 55 bp, Artificial
  Synthetic oligonucleotide
catcgcccgtgcttcagggctcctccacgagaggctggatgagtacgagctgcaa

SEQ ID NO: 351329 - DNA, 55 bp, Artificial
  Synthetic oligonucleotide
catcgccttgtcctactctggttcaggagccctcaccttcccgaccgatggcttc

SEQ ID NO: 351330 - DNA, 52 bp, Artificial
  Synthetic oligonucleotide
catcgcgagtgtcacttcacccatcagtgatatcagcctccggcgaatcttc

SEQ ID NO: 351331 - DNA, 55 bp, Artificial
  Synthetic oligonucleotide
catcgcgcatatcaaagttgtctaattaacgcccacgtccatcaacgtaaaatcg

SEQ ID NO: 351332 - DNA, 51 bp, Artificial
  Synthetic oligonucleotide
catcgcgtatctgcggtcagagatccttagtaagtatagtgcgcaccctct

SEQ ID NO: 351333 - DNA, 60 bp, Artificial
  Synthetic oligonucleotide
catcgcgtcattcagcacttccactaattcattgtggtccatccctgtaacaccacttat

SEQ ID NO: 351334 - DNA, 55 bp, Artificial
  Synthetic oligonucleotide
catcgcgtcgggtaaattcggattcgttcggctccagaaacttctcagtaacgac

SEQ ID NO: 351335 - DNA, 52 bp, Artificial
  Synthetic oligonucleotide
catcgcgttggtaaacgtttttgtattaagtccgtatatgttttgggcaagg

SEQ ID NO: 351336 - DNA, 54 bp, Artificial
  Synthetic oligonucleotide
catcgctatcgatttggcccctcctgacgccgagggctgcagcggtaacaagtc

SEQ ID NO: 351337 - DNA, 60 bp, Artificial
  Synthetic oligonucleotide
catcgctcatacaggcaaatggcaacaacaaccaatccgctaatcagacatgagaaccga

SEQ ID NO: 351338 - DNA, 54 bp, Artificial
  Synthetic oligonucleotide
catcgctcctgctgcatttgtactgcgtaatagcctgatagaattatggcaacc

SEQ ID NO: 351339 - DNA, 60 bp, Artificial
  Synthetic oligonucleotide
catcgctcgttgaggatacttaagcccacctttaaacatgttagtgtgatatcaagacta

SEQ ID NO: 351340 - DNA, 54 bp, Artificial
  Synthetic oligonucleotide
catcgctgaggtagttgctactatttcaagcgatacagcgaatgcagaattcat

SEQ ID NO: 351341 - DNA, 53 bp, Artificial
  Synthetic oligonucleotide
catcgctgcagccatcgttgaagctcgtattggaagaggaggcatgggctgcc

SEQ ID NO: 351342 - DNA, 60 bp, Artificial
  Synthetic oligonucleotide
catcgctgctcgctcttaggcgcgagatgattcttaggagtgctgaagggcgtgttggag

SEQ ID NO: 351343 - DNA, 51 bp, Artificial
  Synthetic oligonucleotide
catcgctgctgtgcatgccagtatacgagatgagcatcaacaacccacact

SEQ ID NO: 351344 - DNA, 55 bp, Artificial
  Synthetic oligonucleotide
catcgctgtcactccgcagctggtatcgttcatgaatctctcgcgttcgcgcgcg

SEQ ID NO: 351345 - DNA, 55 bp, Artificial
  Synthetic oligonucleotide
catcgctgttgaagaagcgcacaagtccgaagccatgtcttgcgatgagtcaggc

SEQ ID NO: 351346 - DNA, 55 bp, Artificial
  Synthetic oligonucleotide
catcgcttcgtccttatcaggacgaccagaagttgtgtggtggatgaatgttccc

SEQ ID NO: 351347 - DNA, 54 bp, Artificial
  Synthetic oligonucleotide
catcggaaccttttcgctcccccctgggattctacgtgtcaacgaagttgctat

SEQ ID NO: 351348 - DNA, 55 bp, Artificial
  Synthetic oligonucleotide
catcggaatttgtcaacactggaaaacaaatcacatccattgcgttcttctgtcc

SEQ ID NO: 351349 - DNA, 55 bp, Artificial
  Synthetic oligonucleotide
catcggactcccctccactaacacaccaggtgatgtacgtaccaccgggaggtcc

SEQ ID NO: 351350 - DNA, 53 bp, Artificial
  Synthetic oligonucleotide
catcggactgtgtccctctaacatttaaagagtcgcatcctatactgtggggc

SEQ ID NO: 351351 - DNA, 55 bp, Artificial
  Synthetic oligonucleotide
catcggagacaacgtatatgtggctcagagagtttataaggtagaagctgagtgt

SEQ ID NO: 351352 - DNA, 60 bp, Artificial
  Synthetic oligonucleotide
catcggagatgtacaacaggaggtccgacgccaaacgtgcagcccgaatgttcatccgag

SEQ ID NO: 351353 - DNA, 50 bp, Artificial
  Synthetic oligonucleotide
catcggaggaatacgggggacccagatattatgtgttcgctttgctatat

SEQ ID NO: 351354 - DNA, 55 bp, Artificial
  Synthetic oligonucleotide
catcggagtctattcgacaatcaatggcacatctagtcttgacacagcaactatc

SEQ ID NO: 351355 - DNA, 60 bp, Artificial
  Synthetic oligonucleotide
catcggagttgttcgccgtaccaactatgtcgaagcgaccagcagatatcatcatttcca

SEQ ID NO: 351356 - DNA, 60 bp, Artificial
  Synthetic oligonucleotide
catcggatgcgtatgggagatggtttcatgcgaatcgagatgttgacgcaccatctttcg

SEQ ID NO: 351357 - DNA, 55 bp, Artificial
  Synthetic oligonucleotide
catcggcaagcaaacaccgacacacactaacaccaagtcactgtgtcaacctgag

SEQ ID NO: 351358 - DNA, 60 bp, Artificial
  Synthetic oligonucleotide
catcggcaatgctctggaggacatggaagcatataagcgatcactcgttttatctacatg

SEQ ID NO: 351359 - DNA, 51 bp, Artificial
  Synthetic oligonucleotide
catcggcagtgttggactggggaaggtcctcgtagacatccttgcggggta

SEQ ID NO: 351360 - DNA, 58 bp, Artificial
  Synthetic oligonucleotide
catcggccctcgggcaagtaccagatgggggaactcctctactctttgctctctcgga

SEQ ID NO: 351361 - DNA, 55 bp, Artificial
  Synthetic oligonucleotide
catcggccggagactgggccatggagtacctagcttgcaagatattcaacaggcc

SEQ ID NO: 351362 - DNA, 60 bp, Artificial
  Synthetic oligonucleotide
catcggctgatctatcaacactttctcaatccgctactagcaactcgaccggatttcttc

SEQ ID NO: 351363 - DNA, 55 bp, Artificial
  Synthetic oligonucleotide
catcggcttgcattttgttttggatatgccagatacaacagttggccatgatgtc

SEQ ID NO: 351364 - DNA, 60 bp, Artificial
  Synthetic oligonucleotide
catcggctttgcctggtgcgcagcagcatgtgattctacttttcacgacttttgtcgaaa

SEQ ID NO: 351365 - DNA, 59 bp, Artificial
  Synthetic oligonucleotide
catcgggaaccgcagatgacgcaaccaactaatgcttcttgtatgaaccaagcccttag

SEQ ID NO: 351366 - DNA, 52 bp, Artificial
  Synthetic oligonucleotide
catcgggatagtagcgttgcagcatctggacccaccgatgaacataacgcta

SEQ ID NO: 351367 - DNA, 55 bp, Artificial
  Synthetic oligonucleotide
catcgggatgcacgttggtgggaacggttcacacgggttcgcagcggccctaaaa

SEQ ID NO: 351368 - DNA, 60 bp, Artificial
  Synthetic oligonucleotide
catcgggatgcctggtcccgatagtccggttgagcagacgagttttctcgagacacatgg

SEQ ID NO: 351369 - DNA, 55 bp, Artificial
  Synthetic oligonucleotide
catcgggccgggattgaacttttacacggaaatattctgttcgatcccgacatgt

SEQ ID NO: 351370 - DNA, 55 bp, Artificial
  Synthetic oligonucleotide
catcggggccaatcacctcttcatcattcacaaagccgacatgataactcccggc

SEQ ID NO: 351371 - DNA, 56 bp, Artificial
  Synthetic oligonucleotide
catcggggcccaaaccgacttcctaagtggccaggacaagctcacggataatgagg

SEQ ID NO: 351372 - DNA, 57 bp, Artificial
  Synthetic oligonucleotide
catcggggtcgtgaccccgagggtgctgtctagcaagaccttctagtgacggttgtg

SEQ ID NO: 351373 - DNA, 60 bp, Artificial
  Synthetic oligonucleotide
catcgggtatatcagcaattgagcgccgtcactctgcttaatctgacaggcttcggtccg

SEQ ID NO: 351374 - DNA, 60 bp, Artificial
  Synthetic oligonucleotide
catcggtagagaaggagagcacgctcagatcaccatcgagaaagaaaagttggatatgct

SEQ ID NO: 351375 - DNA, 58 bp, Artificial
  Synthetic oligonucleotide
catcggtctcctcggccgcgcagcggggtcgctcctccacgacggatcaacaacgtta

SEQ ID NO: 351376 - DNA, 55 bp, Artificial
  Synthetic oligonucleotide
catcggtgacacaagacgaactggagcaagcttccaaacaactgctcgccatgac

SEQ ID NO: 351377 - DNA, 56 bp, Artificial
  Synthetic oligonucleotide
catcggttcattttcacttaacgacttatttccagttgaacgttcagtacataaca

SEQ ID NO: 351378 - DNA, 55 bp, Artificial
  Synthetic oligonucleotide
catcggtttgagataattgaaggaagagaccgaacaattgcctggacggtggtga

SEQ ID NO: 351379 - DNA, 55 bp, Artificial
  Synthetic oligonucleotide
catcggtttgtttagattgcgcgtatgatcggcatgtttgtggtatacggttagt

SEQ ID NO: 351380 - DNA, 58 bp, Artificial
  Synthetic oligonucleotide
catcgtaatcctacagattttatgtttatgcttcctaatataccatacctaactgaag

SEQ ID NO: 351381 - DNA, 57 bp, Artificial
  Synthetic oligonucleotide
catcgtacgtgagtctgtccctacgttcgtagtagtttctgcttatattgtacgcgt

SEQ ID NO: 351382 - DNA, 60 bp, Artificial
  Synthetic oligonucleotide
catcgtacgtgctgaactgctgccacgacttactggtcacgcagtccggcgcagtgacta

SEQ ID NO: 351383 - DNA, 53 bp, Artificial
  Synthetic oligonucleotide
catcgtatactcaaactccatgcgggagtgcatctacagttggatgaaagacg

SEQ ID NO: 351384 - DNA, 55 bp, Artificial
  Synthetic oligonucleotide
catcgtatcggaaacgtccaggacgcttgcagcgactcgttgtcagtcattctcc

SEQ ID NO: 351385 - DNA, 60 bp, Artificial
  Synthetic oligonucleotide
catcgtatgggtcgcaactgagggagccttgaatacaccgaaagatcacattggcacccg

SEQ ID NO: 351386 - DNA, 54 bp, Artificial
  Synthetic oligonucleotide
catcgtatgtttgtagatggaaaacgtgacataatgagaaacgttaacctattg

SEQ ID NO: 351387 - DNA, 60 bp, Artificial
  Synthetic oligonucleotide
catcgtattcatcacctacatctatatcttcaactggtgcctcttccatcattagtatat

SEQ ID NO: 351388 - DNA, 59 bp, Artificial
  Synthetic oligonucleotide
catcgtcaaatggttgaagaccccaaattcctgccgctcctgacgcgattgacctggaa

SEQ ID NO: 351389 - DNA, 54 bp, Artificial
  Synthetic oligonucleotide
catcgtcaatgacgttgtattccacttcgttcgagtaaaccttagaattgaagt

SEQ ID NO: 351390 - DNA, 59 bp, Artificial
  Synthetic oligonucleotide
catcgtcaggttcgaacgagatcgccagtacttcacttcaccattaagatcgttcagtt

SEQ ID NO: 351391 - DNA, 51 bp, Artificial
  Synthetic oligonucleotide
catcgtcatgaaggaaacacaagtgattagcggtatgagtggaactctgag

SEQ ID NO: 351392 - DNA, 60 bp, Artificial
  Synthetic oligonucleotide
catcgtccacatggcgctggacatgttcagatacttccagtaaacatgcactggtaacat

SEQ ID NO: 351393 - DNA, 55 bp, Artificial
  Synthetic oligonucleotide
catcgtccctgtggtgcacacagtcaagagtgcaccaggcgaggcattcgggtcc

SEQ ID NO: 351394 - DNA, 55 bp, Artificial
  Synthetic oligonucleotide
catcgtcgctgctggaggatgcctaccgcttcatcgactctgatgctacccgctg

SEQ ID NO: 351395 - DNA, 55 bp, Artificial
  Synthetic oligonucleotide
catcgtctcatctgtttaagctagttattaaacactgcgatctgaataaacgagg

SEQ ID NO: 351396 - DNA, 60 bp, Artificial
  Synthetic oligonucleotide
catcgtctttaatttgtactgtcacagagtgttggaccatctctgtgcactatcgacgac

SEQ ID NO: 351397 - DNA, 53 bp, Artificial
  Synthetic oligonucleotide
catcgtgacactctccccacccaggtaggtgtgaatccatattcgagggagtg

SEQ ID NO: 351398 - DNA, 59 bp, Artificial
  Synthetic oligonucleotide
catcgtgaccagaccagatcattaatggcgacctttacacgttgttaacatcaatgagc

SEQ ID NO: 351399 - DNA, 54 bp, Artificial
  Synthetic oligonucleotide
catcgtgaccagccaataattgccagtcatgctgatatctctcaattagctttt

SEQ ID NO: 351400 - DNA, 55 bp, Artificial
  Synthetic oligonucleotide
catcgtgaggccatttatgccgctgttaccaattttcttttgtctttgggcatac

SEQ ID NO: 351401 - DNA, 55 bp, Artificial
  Synthetic oligonucleotide
catcgtgagtatgttacccaagtctccggggtgggctccggattgttccagctca

SEQ ID NO: 351402 - DNA, 58 bp, Artificial
  Synthetic oligonucleotide
catcgtggacatcttagcgggctacggggcaggtgtctcaggtgctttggtggccttc

SEQ ID NO: 351403 - DNA, 60 bp, Artificial
  Synthetic oligonucleotide
catcgtggtggagtactcaagctcagtgaagttgacatcaggtcacctgaaatgcaggct

SEQ ID NO: 351404 - DNA, 60 bp, Artificial
  Synthetic oligonucleotide
catcgtgtactttcatgccagaagggaccgtgtgcggccaaaatgccttgtacccgatga

SEQ ID NO: 351405 - DNA, 60 bp, Artificial
  Synthetic oligonucleotide
catcgtgtaggcaagcgtttctgtgtcaagtctgcatatgttttgggtaagatatggatg

SEQ ID NO: 351406 - DNA, 60 bp, Artificial
  Synthetic oligonucleotide
catcgtgtgggaaagcgtttctgtgtgaagtctgtgtacatactagggaagatctggatg

SEQ ID NO: 351407 - DNA, 56 bp, Artificial
  Synthetic oligonucleotide
catcgtgttggtaagaggttttgtgttaaatctatttacgtcattgggaagatatg

SEQ ID NO: 351408 - DNA, 55 bp, Artificial
  Synthetic oligonucleotide
catcgttaaccgtaacattgttgcacagaagaacacaaagtctgtcaacttaccg

SEQ ID NO: 351409 - DNA, 50 bp, Artificial
  Synthetic oligonucleotide
catcgttcaagtggacaatcccagcggattttgccaacgacataccagat

SEQ ID NO: 351410 - DNA, 60 bp, Artificial
  Synthetic oligonucleotide
catcgttgacggtgtgttgaccacctcgtgcagatctgccatctatctgaaattctcccc

SEQ ID NO: 351411 - DNA, 56 bp, Artificial
  Synthetic oligonucleotide
catcgttgcctatcttcttgtacgctaatagaccgttgcctttgcctaggttcggg

SEQ ID NO: 351412 - DNA, 53 bp, Artificial
  Synthetic oligonucleotide
catcgttgtatcagtcagagtacaacgacgaccggtacgtgggttaacaggag

SEQ ID NO: 351413 - DNA, 57 bp, Artificial
  Synthetic oligonucleotide
catcgttgtccgtgctcctgtaaatgacagttgacgcacagccactcaacgtcgagc

SEQ ID NO: 351414 - DNA, 55 bp, Artificial
  Synthetic oligonucleotide
catcgtttaaacggtgtgcccatgtcgaaagcaagaaatagcgaagaaaccttgc

SEQ ID NO: 351415 - DNA, 55 bp, Artificial
  Synthetic oligonucleotide
catcgtttctagcaattgcgaacgcggtacacacagctttgcagcggcttctagg

SEQ ID NO: 351416 - DNA, 54 bp, Artificial
  Synthetic oligonucleotide
catcgtttgggtaagagggtgtgtattaagtccatgggtatcgatggtaaggtt

SEQ ID NO: 351417 - DNA, 60 bp, Artificial
  Synthetic oligonucleotide
catctaaaagattgcatggcgcgagcctgcaccttagaacgagaacgattgaagcgtaag

SEQ ID NO: 351418 - DNA, 54 bp, Artificial
  Synthetic oligonucleotide
catctaaaggaaggtacgggcgaaaagactctggtgctacaaccgcctccaggg

SEQ ID NO: 351419 - DNA, 60 bp, Artificial
  Synthetic oligonucleotide
catctaaataatcccttagatcatctaaattactcatgccaaaacccctgggcagctcat

SEQ ID NO: 351420 - DNA, 57 bp, Artificial
  Synthetic oligonucleotide
catctaacaagtgatgttaagttgattcatccacgtgtttctttaaagtagctttcg

SEQ ID NO: 351421 - DNA, 60 bp, Artificial
  Synthetic oligonucleotide
catctaacatcactggcctcctaatagacggagcgatgtatggacattccatcaatatga

SEQ ID NO: 351422 - DNA, 59 bp, Artificial
  Synthetic oligonucleotide
catctaagactaatggacactacaatgttcgtaggagaccctttcaatcctccaagtga

SEQ ID NO: 351423 - DNA, 60 bp, Artificial
  Synthetic oligonucleotide
catctaagactgctgtgaacactgggaggctttacgcctcatacaccatacggctgattg

SEQ ID NO: 351424 - DNA, 53 bp, Artificial
  Synthetic oligonucleotide
catctaagcaatcaaacgagttggtatctgacgttcgcggtttataaccctga

SEQ ID NO: 351425 - DNA, 55 bp, Artificial
  Synthetic oligonucleotide
catctaagcatgaataacgaagacgcatttgctggtttggaaatggtagaagatg

SEQ ID NO: 351426 - DNA, 60 bp, Artificial
  Synthetic oligonucleotide
catctaagttcagaaatactacaggactgctagatgtagcaaaggcactacaaccatgca

SEQ ID NO: 351427 - DNA, 55 bp, Artificial
  Synthetic oligonucleotide
catctaatatagttgccagctaccagggtaatgaaagttcacctctccaacctgc

SEQ ID NO: 351428 - DNA, 55 bp, Artificial
  Synthetic oligonucleotide
catctaatcccaaccctgaattcatggaattaatacgcacagctaatatagcccc

SEQ ID NO: 351429 - DNA, 55 bp, Artificial
  Synthetic oligonucleotide
catctaatcttttgggcgccgccacatcctgccctggtagttttgccagcacatc

SEQ ID NO: 351430 - DNA, 57 bp, Artificial
  Synthetic oligonucleotide
catctaatgactactttcttcctaaaactctattggcaagatttagttatactctta

SEQ ID NO: 351431 - DNA, 60 bp, Artificial
  Synthetic oligonucleotide
catctaattacgtgctagcctccaccaactccagtagaatatcacccccaactgtggctc

SEQ ID NO: 351432 - DNA, 55 bp, Artificial
  Synthetic oligonucleotide
catctaattcaaagggttggtggtggaaattaccagatgcccttaaagacatggg

SEQ ID NO: 351433 - DNA, 60 bp, Artificial
  Synthetic oligonucleotide
catctacaccgcggagatccataaaagcctcagtaccaatctagatgtgactaactcaat

SEQ ID NO: 351434 - DNA, 55 bp, Artificial
  Synthetic oligonucleotide
catctacaggtgtgcacacttaactgagcctaatgagaacactatacttctggcc

SEQ ID NO: 351435 - DNA, 55 bp, Artificial
  Synthetic oligonucleotide
catctacattcactagaggtgcacagaagctcttatccgaagctatcaacaagtc

SEQ ID NO: 351436 - DNA, 55 bp, Artificial
  Synthetic oligonucleotide
catctacctgcagatacacctgggtttattcaaatcgagctgttggattcgagac

SEQ ID NO: 351437 - DNA, 60 bp, Artificial
  Synthetic oligonucleotide
catctacctttaggagatttctcgccaggacgtttgtctagaacaatgatgcatagtgcg

SEQ ID NO: 351438 - DNA, 60 bp, Artificial
  Synthetic oligonucleotide
catctacgaggcagggttgtccctctggtgacgtatgggatatgcgggatgtggcccttc

SEQ ID NO: 351439 - DNA, 55 bp, Artificial
  Synthetic oligonucleotide
catctacgcatctgctctagtggaggcaaccaaattttgcgcacccatatacgag

SEQ ID NO: 351440 - DNA, 55 bp, Artificial
  Synthetic oligonucleotide
catctactatgtgtactttgaagatgaagctgcacagcatagcaggacagggcag

SEQ ID NO: 351441 - DNA, 60 bp, Artificial
  Synthetic oligonucleotide
catctactcatttacacatggaccacgactcagccgcagattagcttcctatgtggtaat

SEQ ID NO: 351442 - DNA, 60 bp, Artificial
  Synthetic oligonucleotide
catctagaaaactgaaaataagtactgagagaacaatagccaggatcaatgaagaaattg

SEQ ID NO: 351443 - DNA, 60 bp, Artificial
  Synthetic oligonucleotide
catctagagaggataatttacaacgtgtatttacagtagcttccattagaagcatgcttg

SEQ ID NO: 351444 - DNA, 50 bp, Artificial
  Synthetic oligonucleotide
catctagatatatgtgatcgtagatagtaatgagaacggtgaaaacgggg

SEQ ID NO: 351445 - DNA, 55 bp, Artificial
  Synthetic oligonucleotide
catctaggcagattaaagacgtaagagcccagatgaatgaggacatagtgatatc

SEQ ID NO: 351446 - DNA, 55 bp, Artificial
  Synthetic oligonucleotide
catctaggtctttacctacagcctatcgaaaagttagatccacttaccaaagttc

SEQ ID NO: 351447 - DNA, 60 bp, Artificial
  Synthetic oligonucleotide
catctaggttgacagaaaatttggctgttaatcaagttgatatccttcaacatgaggaag

SEQ ID NO: 351448 - DNA, 50 bp, Artificial
  Synthetic oligonucleotide
catctaggtttcaaaagacttggcatattaacccaagcagcatttccgtg

SEQ ID NO: 351449 - DNA, 55 bp, Artificial
  Synthetic oligonucleotide
catctagtagagtgggagtatatgaatccatgtcctaacacacaagtaaggagga

SEQ ID NO: 351450 - DNA, 59 bp, Artificial
  Synthetic oligonucleotide
catctagtatgggcaagcagggaactggagagatttgcacttaaccctggccttttaga

SEQ ID NO: 351451 - DNA, 56 bp, Artificial
  Synthetic oligonucleotide
catctataaagggcaggtgttgaggcttgtctgatgatttagttctggcgaatgat

SEQ ID NO: 351452 - DNA, 56 bp, Artificial
  Synthetic oligonucleotide
catctataactaagcaaaacccaaagattagtcttgcaagtctagatgaatccaca

SEQ ID NO: 351453 - DNA, 55 bp, Artificial
  Synthetic oligonucleotide
catctatacacgtgaaaataagctcctgaacgcctcaaagcaggtggggagcctc

SEQ ID NO: 351454 - DNA, 58 bp, Artificial
  Synthetic oligonucleotide
catctataggaaaggctctccaccaagtttttggagcaatttatggggctgccttcag

SEQ ID NO: 351455 - DNA, 59 bp, Artificial
  Synthetic oligonucleotide
catctatagttttataaagctcactataacattctcctgtcaaagcttttctcagttgg

SEQ ID NO: 351456 - DNA, 60 bp, Artificial
  Synthetic oligonucleotide
catctatatcagacaatgttctaaatcttattcgcggtaatcacaataagtacaacatct

SEQ ID NO: 351457 - DNA, 60 bp, Artificial
  Synthetic oligonucleotide
catctatatgtcacattgatgtccggcgcttatgtcacagatttgttctggtggtttaag

SEQ ID NO: 351458 - DNA, 60 bp, Artificial
  Synthetic oligonucleotide
catctatattacgccataacacactcaagaatgctatatcagatatgtcggatgatgtta

SEQ ID NO: 351459 - DNA, 60 bp, Artificial
  Synthetic oligonucleotide
catctatcaggcctgtgacctcaaggacgaggctaggagggtgataacttcactcacgga

SEQ ID NO: 351460 - DNA, 60 bp, Artificial
  Synthetic oligonucleotide
catctatcggcttgtatggcgaaccagttaatcactcaattgcattcagtcctgtttacc

SEQ ID NO: 351461 - DNA, 60 bp, Artificial
  Synthetic oligonucleotide
catctatcgtccctctgtgctggtttagcggattcggttgtctacacgctgccggtcgcg

SEQ ID NO: 351462 - DNA, 52 bp, Artificial
  Synthetic oligonucleotide
catctatgaaggggaggagtatcattgcgcttggttaactgtgcgtgacgac

SEQ ID NO: 351463 - DNA, 60 bp, Artificial
  Synthetic oligonucleotide
catctatgacatgtatgactacgttacaaccttcgatccaattggtgattttaagcggca

SEQ ID NO: 351464 - DNA, 60 bp, Artificial
  Synthetic oligonucleotide
catctatgtactactgcctatatgcttcaaattaagggatacccttagaaagcacgatga

SEQ ID NO: 351465 - DNA, 60 bp, Artificial
  Synthetic oligonucleotide
catctattagatctaacatatcatccatttcagtgtggacggatgtttccgaacagatag

SEQ ID NO: 351466 - DNA, 60 bp, Artificial
  Synthetic oligonucleotide
catctcaactggccatagtgaatacaatagtatatccagcgtttggaatgcaacgaatgc

SEQ ID NO: 351467 - DNA, 55 bp, Artificial
  Synthetic oligonucleotide
catctcaattgcccagaaacggttagagtgcctttctatgtcaacggtatacccg

SEQ ID NO: 351468 - DNA, 55 bp, Artificial
  Synthetic oligonucleotide
catctcacagcttctgacgtggctctaccaaaccttgaggaactgcgcctggctg

SEQ ID NO: 351469 - DNA, 60 bp, Artificial
  Synthetic oligonucleotide
catctcacatggtacaccgtcagaacctctttacacaacataccctgacaagcaccacga

SEQ ID NO: 351470 - DNA, 55 bp, Artificial
  Synthetic oligonucleotide
catctcactttggttcaactccaatcagtatcatgacaagtgggtatgcacttca

SEQ ID NO: 351471 - DNA, 55 bp, Artificial
  Synthetic oligonucleotide
catctcagatgcaggagcatgttctgtcactgtgccatctaatgtggcataatgg

SEQ ID NO: 351472 - DNA, 55 bp, Artificial
  Synthetic oligonucleotide
catctcagctgaatcagagatcagaaatcctgaagatgatggggatgggtacagg

SEQ ID NO: 351473 - DNA, 55 bp, Artificial
  Synthetic oligonucleotide
catctcagtgcacccctggtcagacgacgtttatttccagagacgtaagcgacgt

SEQ ID NO: 351474 - DNA, 60 bp, Artificial
  Synthetic oligonucleotide
catctcagttgcagttcacctgtcgacatcatgcatatatcattaatgtatgcagttctt

SEQ ID NO: 351475 - DNA, 55 bp, Artificial
  Synthetic oligonucleotide
catctcagttgtagccttccagccacctaccaacaccttaaatcaatttgtgagc

SEQ ID NO: 351476 - DNA, 60 bp, Artificial
  Synthetic oligonucleotide
catctcatactgaaccaagacatgtacctttcatctctctgaaaggagttggtaaagtgt

SEQ ID NO: 351477 - DNA, 55 bp, Artificial
  Synthetic oligonucleotide
catctcatagatgaggactggggctcctgatttgctgccatctatcgcgatcggg

SEQ ID NO: 351478 - DNA, 56 bp, Artificial
  Synthetic oligonucleotide
catctccaaggtttctgtaaccttaataaaccaacacgcttcagtaccatcaagaa

SEQ ID NO: 351479 - DNA, 51 bp, Artificial
  Synthetic oligonucleotide
catctccaatgtcaatcttagtcgctttagtggacattaatggaacgttta

SEQ ID NO: 351480 - DNA, 60 bp, Artificial
  Synthetic oligonucleotide
catctccacaactcgagggattttcggctgaatcgaggaaattgcttctcattgttcagg

SEQ ID NO: 351481 - DNA, 60 bp, Artificial
  Synthetic oligonucleotide
catctccacagcttgaggggttttcagctgaatctaggaaattactcctcattgttcagg

SEQ ID NO: 351482 - DNA, 60 bp, Artificial
  Synthetic oligonucleotide
catctccccagatctgttaacaagatactgcaagctaattagtcacaaatatccagacca

SEQ ID NO: 351483 - DNA, 51 bp, Artificial
  Synthetic oligonucleotide
catctcccctagggcttcccgtcgcctaaactagggtgccacctgtggcct

SEQ ID NO: 351484 - DNA, 53 bp, Artificial
  Synthetic oligonucleotide
catctccgacgactgtcttttacgaggataaacctgttagaaacgatatccat

SEQ ID NO: 351485 - DNA, 55 bp, Artificial
  Synthetic oligonucleotide
catctccggacatatctggtgtctgggtaatgatggatggggaaactcaagctga

SEQ ID NO: 351486 - DNA, 55 bp, Artificial
  Synthetic oligonucleotide
catctccttcaagattctgaattagcaggactgctctcaatgtcatcagcgtcaa

SEQ ID NO: 351487 - DNA, 60 bp, Artificial
  Synthetic oligonucleotide
catctcgcaggggcactgtgcgcttcagtagagtaggtcaaaagtttagcatgcgtactc

SEQ ID NO: 351488 - DNA, 60 bp, Artificial
  Synthetic oligonucleotide
catctcgcatttgaagagaagacggtacaacgttcatagttgttgtcctttattggatga

SEQ ID NO: 351489 - DNA, 58 bp, Artificial
  Synthetic oligonucleotide
catctcgccaggacggacaagtggactaaccaagttcgtgctactgatctacgaaagg

SEQ ID NO: 351490 - DNA, 59 bp, Artificial
  Synthetic oligonucleotide
catctcgcgtgaccgatcagtactcttaccaccttccgcctatttggtcgttagcgctg

SEQ ID NO: 351491 - DNA, 55 bp, Artificial
  Synthetic oligonucleotide
catctcgctgcactaggcatgcaactttgcaataaatcctgggtagtcagctgtt

SEQ ID NO: 351492 - DNA, 58 bp, Artificial
  Synthetic oligonucleotide
catctcgtacaacgagcagcttgaggcgggagacaacccctacctcaagtacaaccac

SEQ ID NO: 351493 - DNA, 60 bp, Artificial
  Synthetic oligonucleotide
catctcgtgacgttgacgtcatcattaacaacctcacctccaaggctagcgacttcttgt

SEQ ID NO: 351494 - DNA, 51 bp, Artificial
  Synthetic oligonucleotide
catctctacagttgctacgatttttacagttactatagtgattacatctgt

SEQ ID NO: 351495 - DNA, 60 bp, Artificial
  Synthetic oligonucleotide
catctctatgagattcaagataattgaaggcgctaggagcactcgccaaccccgcttcca

SEQ ID NO: 351496 - DNA, 55 bp, Artificial
  Synthetic oligonucleotide
catctctcttgattctcctcatcattcgctggacacttgctacctttgcaaagtc

SEQ ID NO: 351497 - DNA, 60 bp, Artificial
  Synthetic oligonucleotide
catctctgaaggatcggttctacatacgccatgtactgaagcgtgtgatatcagtcgaga

SEQ ID NO: 351498 - DNA, 51 bp, Artificial
  Synthetic oligonucleotide
catctctgaatgctctggccccgatatgcatttagggctaggagtgaatcc

SEQ ID NO: 351499 - DNA, 60 bp, Artificial
  Synthetic oligonucleotide
catctctgatcttagggtaatggcccgagcaatggtagttgtggcagctatggtagccat

SEQ ID NO: 351500 - DNA, 56 bp, Artificial
  Synthetic oligonucleotide
catctctgcagctgtattgaagacgaaactagacaaatcgacgcaaatttcacaac

SEQ ID NO: 351501 - DNA, 56 bp, Artificial
  Synthetic oligonucleotide
catctctgcatttcacaaggaccatcttgcaaccatcaattctcatgaacttaggc

SEQ ID NO: 351502 - DNA, 60 bp, Artificial
  Synthetic oligonucleotide
catctctggcacgctaattgcaaacagtcagcgaaccctaacatggtccaacactggtgt

SEQ ID NO: 351503 - DNA, 60 bp, Artificial
  Synthetic oligonucleotide
catctctggtgttgtagcaggaataactgcatggaatgctttacgcaagctgagtcatga

SEQ ID NO: 351504 - DNA, 59 bp, Artificial
  Synthetic oligonucleotide
catctgaaatgccagtaaatacaattggtgcttcctcagtaagtctattaactaaaagc

SEQ ID NO: 351505 - DNA, 60 bp, Artificial
  Synthetic oligonucleotide
catctgaaatggcaacaatcatgtttggagatttcactgtgcagctgaagcacaacacta

SEQ ID NO: 351506 - DNA, 60 bp, Artificial
  Synthetic oligonucleotide
catctgaacatgtgaaatgggcaaaccgctagctccgaagagccttagcttaacgccgga

SEQ ID NO: 351507 - DNA, 60 bp, Artificial
  Synthetic oligonucleotide
catctgaacatgttaaatgggcaaaccgctagctccaaagagccttgcgcatacgccgga

SEQ ID NO: 351508 - DNA, 53 bp, Artificial
  Synthetic oligonucleotide
catctgaaggtggattcattgacaaacccttcatgagcaagaacaagcagctt

SEQ ID NO: 351509 - DNA, 55 bp, Artificial
  Synthetic oligonucleotide
catctgaatccagggtttcatacaggtgttgctattggcatagatcctgatagac

SEQ ID NO: 351510 - DNA, 55 bp, Artificial
  Synthetic oligonucleotide
catctgaatctaccacaccagctatattagatgtgtctgtcaccacacatactac

SEQ ID NO: 351511 - DNA, 60 bp, Artificial
  Synthetic oligonucleotide
catctgaattagatgcatcggagttagcagatcttatattgaatgaatggctgtgcaatc

SEQ ID NO: 351512 - DNA, 55 bp, Artificial
  Synthetic oligonucleotide
catctgacatgtccaaagcatggtatcctatatatgaacaccaacaagaaccact

SEQ ID NO: 351513 - DNA, 56 bp, Artificial
  Synthetic oligonucleotide
catctgaccgttcgattattttacatgtccgtaattcgataaaacgtgtcgtactg

SEQ ID NO: 351514 - DNA, 54 bp, Artificial
  Synthetic oligonucleotide
catctgacctcataccccgtgactcagcccactggttgggaaaccgctggtgga

SEQ ID NO: 351515 - DNA, 60 bp, Artificial
  Synthetic oligonucleotide
catctgacgagctcttatctccctgaatgtttggatggaaatgtgctgacctacatgggg

SEQ ID NO: 351516 - DNA, 55 bp, Artificial
  Synthetic oligonucleotide
catctgactctaactcttgtggctctactgtatctagttcttgttctactaactc

SEQ ID NO: 351517 - DNA, 54 bp, Artificial
  Synthetic oligonucleotide
catctgagaagaatgaattcgctaacaagtcggaatgggaaaggacaatgtaca

SEQ ID NO: 351518 - DNA, 60 bp, Artificial
  Synthetic oligonucleotide
catctgagcttcaagacagagcgcactccaaagccgctcttctgcgggtattatgttggg

SEQ ID NO: 351519 - DNA, 59 bp, Artificial
  Synthetic oligonucleotide
catctgaggaatatgtgattcctaattttgctcagacgataaataatcgaactatcgtg

SEQ ID NO: 351520 - DNA, 55 bp, Artificial
  Synthetic oligonucleotide
catctgagtctacctcactgattaatccatgggagagggaaactatcatcccctt

SEQ ID NO: 351521 - DNA, 55 bp, Artificial
  Synthetic oligonucleotide
catctgataggaaaggtccaagacgcctgtagtgattcattgtccgtcattcttc

SEQ ID NO: 351522 - DNA, 56 bp, Artificial
  Synthetic oligonucleotide
catctgattcgagtaagtgcaaataaatttcagtatgcattcatcggttccaactg

SEQ ID NO: 351523 - DNA, 60 bp, Artificial
  Synthetic oligonucleotide
catctgattctttggaatacgagactccgagattagatgtagatcctttgccagatttgg

SEQ ID NO: 351524 - DNA, 55 bp, Artificial
  Synthetic oligonucleotide
catctgattgggccgttcctatcgtacttctggaagcccatgattctccaggccc

SEQ ID NO: 351525 - DNA, 60 bp, Artificial
  Synthetic oligonucleotide
catctgcaaaggtatccgtctagtgaacgtactgcatgaatgctggtacagagactacga

SEQ ID NO: 351526 - DNA, 60 bp, Artificial
  Synthetic oligonucleotide
catctgcaaggattctgtaatcttaccaaacccatgcgctttaacgcaatcaagcagcat

SEQ ID NO: 351527 - DNA, 55 bp, Artificial
  Synthetic oligonucleotide
catctgcaccactaacgtgccttggaacgtcagttggagtaataaatctaaggaa

SEQ ID NO: 351528 - DNA, 60 bp, Artificial
  Synthetic oligonucleotide
catctgcaccactaatgtgccttggaattctagttggagtaataaatcttatgagacaat

SEQ ID NO: 351529 - DNA, 55 bp, Artificial
  Synthetic oligonucleotide
catctgcaccgattacttgcctgatttcagtggaacagagaaccctggccaacac

SEQ ID NO: 351530 - DNA, 60 bp, Artificial
  Synthetic oligonucleotide
catctgcatggacagaaatctcgactacaattacagatacaactagtgcaactagttcaa

SEQ ID NO: 351531 - DNA, 60 bp, Artificial
  Synthetic oligonucleotide
catctgcattatatcgggaggccttagagtctccggaacattttacacctcaccatacag

SEQ ID NO: 351532 - DNA, 56 bp, Artificial
  Synthetic oligonucleotide
catctgccccacgttggtgacaacctccatcatttaccacacggcggaaattacgt

SEQ ID NO: 351533 - DNA, 56 bp, Artificial
  Synthetic oligonucleotide
catctgcgaaaggctttcgaaaccggatcacaccccgcaaacgtcgactactccaa

SEQ ID NO: 351534 - DNA, 55 bp, Artificial
  Synthetic oligonucleotide
catctgcgataacacaagagcagttaactcgtgtattaaagctactttctgaggt

SEQ ID NO: 351535 - DNA, 60 bp, Artificial
  Synthetic oligonucleotide
catctgcgcacccgaaccaacacctcaggataaactcatctggaaacttgtagcaacatg

SEQ ID NO: 351536 - DNA, 55 bp, Artificial
  Synthetic oligonucleotide
catctgctatacgtatatcaattactggggcttcttgcatcatcagcatatcaat

SEQ ID NO: 351537 - DNA, 60 bp, Artificial
  Synthetic oligonucleotide
catctgctgctctatgtcatactcctggacgggggccctcataacaccatgtgggcccga

SEQ ID NO: 351538 - DNA, 52 bp, Artificial
  Synthetic oligonucleotide
catctgcttaacccttcggcttagtacggaacggacgcgtagcaaacgatcc

SEQ ID NO: 351539 - DNA, 56 bp, Artificial
  Synthetic oligonucleotide
catctgcttcgggccggtaattctccatggcaactgactcagtttttagattgggt

SEQ ID NO: 351540 - DNA, 55 bp, Artificial
  Synthetic oligonucleotide
catctgcttctttaggttgaatagtagatgatacgtttagttctgcggacgatgc

SEQ ID NO: 351541 - DNA, 59 bp, Artificial
  Synthetic oligonucleotide
catctggaattgtaaaacaccgtgtatgcgacaagttcattctaaaacacaagtgcaag

SEQ ID NO: 351542 - DNA, 60 bp, Artificial
  Synthetic oligonucleotide
catctggatattgatgagcccacggggcaaacagcagattggctgagtattgttatttac

SEQ ID NO: 351543 - DNA, 59 bp, Artificial
  Synthetic oligonucleotide
catctggatctttttccacgaatatcgtggtgggcacatcctcaatacggaggacttgg

SEQ ID NO: 351544 - DNA, 55 bp, Artificial
  Synthetic oligonucleotide
catctggccaaaatcccacactctgtggagtaatggagttttggaaagtgaaatg

SEQ ID NO: 351545 - DNA, 50 bp, Artificial
  Synthetic oligonucleotide
catctggcgtgtcatgaccaacccagtagacgcctatggatccctggtta

SEQ ID NO: 351546 - DNA, 56 bp, Artificial
  Synthetic oligonucleotide
catctgggtgatgatatggatcctgagctcaggggacttgcacaagcacttattga

SEQ ID NO: 351547 - DNA, 60 bp, Artificial
  Synthetic oligonucleotide
catctgggttgtttgacaccgtcgtgctctgtgaggcgtatgacacggggtgcgcgtggt

SEQ ID NO: 351548 - DNA, 55 bp, Artificial
  Synthetic oligonucleotide
catctggtaacccatctctaacaagtagtcctaagataaggttaataccagggcc

SEQ ID NO: 351549 - DNA, 53 bp, Artificial
  Synthetic oligonucleotide
catctggtagatgcttgggtcacgtgaccttttatcaaacaagtcgcgtcgtg

SEQ ID NO: 351550 - DNA, 60 bp, Artificial
  Synthetic oligonucleotide
catctggtagtctgtatacatttgatgagctctttggagcaaggatacatagccatggta

SEQ ID NO: 351551 - DNA, 60 bp, Artificial
  Synthetic oligonucleotide
catctggtatccaatcttaattgatatgtagctacatcaagtcattcagactcttcaagt

SEQ ID NO: 351552 - DNA, 60 bp, Artificial
  Synthetic oligonucleotide
catctggtccactgaatacaatgacgggtcgctcttcgccacgaacactgacctgccggt

SEQ ID NO: 351553 - DNA, 60 bp, Artificial
  Synthetic oligonucleotide
catctggttctagagagagaaatattgcaatggcatatttgtaataagagaggtgtacac

SEQ ID NO: 351554 - DNA, 60 bp, Artificial
  Synthetic oligonucleotide
catctgtagctagtagtatttatgtacatacacctagtggctcattggtgtcttcagagg

SEQ ID NO: 351555 - DNA, 60 bp, Artificial
  Synthetic oligonucleotide
catctgtatactccttaccaccagatccgaaacattttgatggataccagcaacaagcag

SEQ ID NO: 351556 - DNA, 56 bp, Artificial
  Synthetic oligonucleotide
catctgtcgatggtgaccaacaaacggaaaaatttgttttcgtctcttgaagatta

SEQ ID NO: 351557 - DNA, 55 bp, Artificial
  Synthetic oligonucleotide
catctgtctaacaagcgttataattgttgggcatcgttcagtgatcttgaacggg

SEQ ID NO: 351558 - DNA, 55 bp, Artificial
  Synthetic oligonucleotide
catctgtgcttggccccggtataacacgggtcaccggagcgtgtgaagtcacctc

SEQ ID NO: 351559 - DNA, 58 bp, Artificial
  Synthetic oligonucleotide
catctgtgttgagggtccgaaatccgacattacatgaaacggctgatgaactaaaacg

SEQ ID NO: 351560 - DNA, 52 bp, Artificial
  Synthetic oligonucleotide
catctgttacgcgctgtattcggcaactactatgtgaatgattcgacaattg

SEQ ID NO: 351561 - DNA, 60 bp, Artificial
  Synthetic oligonucleotide
catctgttaggcgaagattgacatatgagccagtggagagaccgttggtccataatgttt

SEQ ID NO: 351562 - DNA, 60 bp, Artificial
  Synthetic oligonucleotide
catctgttcaattcagaaatgcatgactcaatcttagtatcctattcatcagatctagtc

SEQ ID NO: 351563 - DNA, 55 bp, Artificial
  Synthetic oligonucleotide
catctgttctgaaggatgtaatcagcgctctatacaatggagaatgtggtgtgtc

SEQ ID NO: 351564 - DNA, 55 bp, Artificial
  Synthetic oligonucleotide
catctgttgaattataagccggatcaagttcatctaagcaatacacgggcattac

SEQ ID NO: 351565 - DNA, 58 bp, Artificial
  Synthetic oligonucleotide
catctgttgacacgacttcacgatagactacaaaccgtagaaactagcactttaccca

SEQ ID NO: 351566 - DNA, 60 bp, Artificial
  Synthetic oligonucleotide
catctgttgagcttttagctccctgaatgttcggatggaaatgtgctgacctgcttgggg

SEQ ID NO: 351567 - DNA, 60 bp, Artificial
  Synthetic oligonucleotide
catctgttggctggataagttatccatccattgaaggtcagagatagcatcctcgagggt

SEQ ID NO: 351568 - DNA, 60 bp, Artificial
  Synthetic oligonucleotide
catctgttgggagaatggttggtggaatcgggaggttctacatacagatgtgcactgaac

SEQ ID NO: 351569 - DNA, 55 bp, Artificial
  Synthetic oligonucleotide
catcttaaaggccttgtacatgttgtcaactcgagggaggcagactgtgaaggaa

SEQ ID NO: 351570 - DNA, 59 bp, Artificial
  Synthetic oligonucleotide
catcttaactcttcttcccagtaggtgttgaactgtgaccaccactcatcccagtcagg

SEQ ID NO: 351571 - DNA, 60 bp, Artificial
  Synthetic oligonucleotide
catcttaatgaatctgtagagattgagtgtacaaggcctggcaataatacaagaagaagt

SEQ ID NO: 351572 - DNA, 55 bp, Artificial
  Synthetic oligonucleotide
catcttacccctcttcgggactgggcgcataacagcttacaagatctggctgtgg

SEQ ID NO: 351573 - DNA, 59 bp, Artificial
  Synthetic oligonucleotide
catcttactcatgtgtgttgtacacccgactttggtatttgacatcaccaaactcctac

SEQ ID NO: 351574 - DNA, 60 bp, Artificial
  Synthetic oligonucleotide
catcttagactcatggatactacgatgtttgtaggagacccttacaatcctccaagtgac

SEQ ID NO: 351575 - DNA, 60 bp, Artificial
  Synthetic oligonucleotide
catcttagagggtagatcattgatcggggcgacattaccatgtatggtggagcaattcaa

SEQ ID NO: 351576 - DNA, 60 bp, Artificial
  Synthetic oligonucleotide
catcttagcacttaatacagcaagatgggagcacaagtgtcaacgcagaaaactggcgca

SEQ ID NO: 351577 - DNA, 55 bp, Artificial
  Synthetic oligonucleotide
catcttagctagatcagttgtgccagaccttaaggaactagtgtccaccgaggct

SEQ ID NO: 351578 - DNA, 56 bp, Artificial
  Synthetic oligonucleotide
catcttagtattatgaagatttacgttttgaacgcttttagtcatctagttcttaa

SEQ ID NO: 351579 - DNA, 60 bp, Artificial
  Synthetic oligonucleotide
catcttagttatatatcatcgggcgctgagccggcggacatattggattccaagatggcg

SEQ ID NO: 351580 - DNA, 57 bp, Artificial
  Synthetic oligonucleotide
catcttataccgtaggtgtaatgttgcgtcatctcttttgggtgttagcttatttta

SEQ ID NO: 351581 - DNA, 55 bp, Artificial
  Synthetic oligonucleotide
catcttatgagtttccagattctaccccgtggtgtaataaccgcgtatctactgt

SEQ ID NO: 351582 - DNA, 60 bp, Artificial
  Synthetic oligonucleotide
catcttcaaactcacctcatgtggtcaaaacagctactcaaggggaagttaatgtgactg

SEQ ID NO: 351583 - DNA, 60 bp, Artificial
  Synthetic oligonucleotide
catcttcaggtctcctgcaaggtgagagtgtagaaagcacagatgttggtttactgttca

SEQ ID NO: 351584 - DNA, 55 bp, Artificial
  Synthetic oligonucleotide
catcttcccttaatgtctggagaagccaccacaatgcacattgttatgaggtgct

SEQ ID NO: 351585 - DNA, 59 bp, Artificial
  Synthetic oligonucleotide
catcttccgagtcaaaggtcatcactacgtcataagtcacgtggggacggctgtactta

SEQ ID NO: 351586 - DNA, 56 bp, Artificial
  Synthetic oligonucleotide
catcttccgggctgccgtgtgcactcggggggttgcgaaggcggtggactttatac

SEQ ID NO: 351587 - DNA, 55 bp, Artificial
  Synthetic oligonucleotide
catcttccgtagcccacatgtgagaaatccacatctttctcagagaactgtttgg

SEQ ID NO: 351588 - DNA, 55 bp, Artificial
  Synthetic oligonucleotide
catcttcctagcaatgttagtcaatgttaatgaggacgaagccaaagatttcacc

SEQ ID NO: 351589 - DNA, 55 bp, Artificial
  Synthetic oligonucleotide
catcttcgctggacgcgggtcgcaacgtgtaatcgatcaagatatgtggtagcct

SEQ ID NO: 351590 - DNA, 55 bp, Artificial
  Synthetic oligonucleotide
catcttcttcagtataatccgaaacaaattgacatctcaaacactcgcgccactc

SEQ ID NO: 351591 - DNA, 58 bp, Artificial
  Synthetic oligonucleotide
catcttcttttataatcgaacaccgtgggtatgtgagaaagacattcttggctctaat

SEQ ID NO: 351592 - DNA, 60 bp, Artificial
  Synthetic oligonucleotide
catcttgaacaagcagaccagagacaccaaggagatgcagaaactcttagacacatacgg

SEQ ID NO: 351593 - DNA, 57 bp, Artificial
  Synthetic oligonucleotide
catcttgagcattgcacctataatgttctcgaataaaatgacaaggttaggaaaagg

SEQ ID NO: 351594 - DNA, 55 bp, Artificial
  Synthetic oligonucleotide
catcttgagttttgggaggcagttttcaccggcctcacacacatagacgcccact

SEQ ID NO: 351595 - DNA, 57 bp, Artificial
  Synthetic oligonucleotide
catcttgattgcaaccaggacagtacaactcctgggacgcagcagtctccagggact

SEQ ID NO: 351596 - DNA, 57 bp, Artificial
  Synthetic oligonucleotide
catcttgattgcagcgaggacagtggaactcttgggacgccacagtctcaagggact

SEQ ID NO: 351597 - DNA, 60 bp, Artificial
  Synthetic oligonucleotide
catcttgattgcagcgaggactgtggaaattctgggacacagggtgtggcagatcctcaa

SEQ ID NO: 351598 - DNA, 55 bp, Artificial
  Synthetic oligonucleotide
catcttgcaatacgagctaattacaattgatagacaatcgcagatatccgtgttg

SEQ ID NO: 351599 - DNA, 58 bp, Artificial
  Synthetic oligonucleotide
catcttgcccgccgttatctggtcgaaggcacttgcaataagactggttaaccctcca

SEQ ID NO: 351600 - DNA, 60 bp, Artificial
  Synthetic oligonucleotide
catcttgcgctgctccgcgatgtacgggtcaggtataatgtgcagtttgactgaggggac

SEQ ID NO: 351601 - DNA, 59 bp, Artificial
  Synthetic oligonucleotide
catcttgctatgcatagtcttcttcggaatacgttcttataggtggactcccctccttg

SEQ ID NO: 351602 - DNA, 59 bp, Artificial
  Synthetic oligonucleotide
catcttggatctccgtactaacacagaaattgaccttgtggttccatatgtcaactacc

SEQ ID NO: 351603 - DNA, 56 bp, Artificial
  Synthetic oligonucleotide
catcttggcgtgtgaaatccaatgtgcccggactcaaaaagatcacccttaagggg

SEQ ID NO: 351604 - DNA, 55 bp, Artificial
  Synthetic oligonucleotide
catcttgggaggaatcagaattgcatatacatagaacatcaaagtggacacccta

SEQ ID NO: 351605 - DNA, 60 bp, Artificial
  Synthetic oligonucleotide
catcttgggcaacagctattcacaagtcgtgccccgtagtgaacctggcagcttcgtgtt

SEQ ID NO: 351606 - DNA, 58 bp, Artificial
  Synthetic oligonucleotide
catcttggtgataacgaggacagtagaacttctgggacgcagcagcctccagggactg

SEQ ID NO: 351607 - DNA, 58 bp, Artificial
  Synthetic oligonucleotide
catcttggttactcgcggtctctacgaattggctcagactaagagccgtcctttcgta

SEQ ID NO: 351608 - DNA, 60 bp, Artificial
  Synthetic oligonucleotide
catcttgtggcttcttgctatttcatctatgatagtaaagaagtgtacaataaaagggga

SEQ ID NO: 351609 - DNA, 55 bp, Artificial
  Synthetic oligonucleotide
catcttgtggtaggttcatctggggacccaaagtacattgacctcccttcagagg

SEQ ID NO: 351610 - DNA, 59 bp, Artificial
  Synthetic oligonucleotide
catcttgttacaccctatgtgtctacatggaatggaggacgcggagaaagaagtgttag

SEQ ID NO: 351611 - DNA, 60 bp, Artificial
  Synthetic oligonucleotide
catcttgttctatgtaattcagacacaactctcttaattctaaaatggtttcatccattg

SEQ ID NO: 351612 - DNA, 60 bp, Artificial
  Synthetic oligonucleotide
catcttgttgtcagcctctcttctttcattgcttgctgtaccctgggattattcctcact

SEQ ID NO: 351613 - DNA, 56 bp, Artificial
  Synthetic oligonucleotide
catctttattcgactttgttcccccagacaccttatattgcccggattcacaataa

SEQ ID NO: 351614 - DNA, 57 bp, Artificial
  Synthetic oligonucleotide
catctttcacgactataactaataccgatccggctctctactttaacattgagtttc

SEQ ID NO: 351615 - DNA, 55 bp, Artificial
  Synthetic oligonucleotide
catctttccctgtatcattgtggcaatttagtcactatccaccttgcactctgcg

SEQ ID NO: 351616 - DNA, 55 bp, Artificial
  Synthetic oligonucleotide
catctttctcaatattgcgaacacgtacggtgaatttgtacggattaccagcagc

SEQ ID NO: 351617 - DNA, 60 bp, Artificial
  Synthetic oligonucleotide
catctttctcgagcctttcatcacctgacatcgtcagtgccagtgtaatcacacctgtat

SEQ ID NO: 351618 - DNA, 60 bp, Artificial
  Synthetic oligonucleotide
catctttctcgcacggtctgctctcattctgagaggttcagtggctcataagtcctgtct

SEQ ID NO: 351619 - DNA, 60 bp, Artificial
  Synthetic oligonucleotide
catctttgatcacagcagctttcacatcggatgtgaagctctgtagctccctcctcagtg

SEQ ID NO: 351620 - DNA, 53 bp, Artificial
  Synthetic oligonucleotide
catctttggcagaagaagtgcaccgataacggtaagacttttcgtttttaacc

SEQ ID NO: 351621 - DNA, 55 bp, Artificial
  Synthetic oligonucleotide
catctttgtaatacaacccatagcagatagaactaccagtaaatccttggagatg

SEQ ID NO: 351622 - DNA, 56 bp, Artificial
  Synthetic oligonucleotide
catctttgtcgatgtatgccttgacgtctgaacttgatttagctccctgaatgttc

SEQ ID NO: 351623 - DNA, 55 bp, Artificial
  Synthetic oligonucleotide
catctttgtgcgaaaactgtttcgaatgaatcttgaccgtgggagcccggaaggg

SEQ ID NO: 351624 - DNA, 58 bp, Artificial
  Synthetic oligonucleotide
catcttttccaagtatgtcggtaacaaaactatgctaatggatgagtatatggaggaa

SEQ ID NO: 351625 - DNA, 60 bp, Artificial
  Synthetic oligonucleotide
catgaaaacagaatggtgctggctagcactacagctaaggctatggaacagatggctggg

SEQ ID NO: 351626 - DNA, 55 bp, Artificial
  Synthetic oligonucleotide
catgaaaattcagggtcgcactgttggtggacagatgggcatgctactcacaggg

SEQ ID NO: 351627 - DNA, 55 bp, Artificial
  Synthetic oligonucleotide
catgaaacccactgagaacatgcttgtggcagtagaccactatgctggacaactg

SEQ ID NO: 351628 - DNA, 55 bp, Artificial
  Synthetic oligonucleotide
catgaaaccgaaattggatgagtcccattatgacaaatatgcacctccgtccaac

SEQ ID NO: 351629 - DNA, 57 bp, Artificial
  Synthetic oligonucleotide
catgaaagaaaaaggactagtcactgctgtccaatccgtttggggaaaaggcagaga

SEQ ID NO: 351630 - DNA, 55 bp, Artificial
  Synthetic oligonucleotide
catgaaagattcattgtttataccggtacattgtcaacactcatcagtgctcgac

SEQ ID NO: 351631 - DNA, 57 bp, Artificial
  Synthetic oligonucleotide
catgaaagctccctcttcggggcagtcccagggtgctgttgtcaacaacgtagtacg

SEQ ID NO: 351632 - DNA, 55 bp, Artificial
  Synthetic oligonucleotide
catgaaagttgatgaagtgtcaagagcccagataaagaacttaatgctagcatgc

SEQ ID NO: 351633 - DNA, 54 bp, Artificial
  Synthetic oligonucleotide
catgaaatcaaatattcccattctactgagtttagtgacagtgcctatgaccac

SEQ ID NO: 351634 - DNA, 60 bp, Artificial
  Synthetic oligonucleotide
catgaaatgcctgagtctccctttgcccgtgcgtccccacaaggaagaggagtgtgccaa

SEQ ID NO: 351635 - DNA, 60 bp, Artificial
  Synthetic oligonucleotide
catgaaatggatcatatttgcattatgcgatctaacgcacttagatggctgcaagctgcg

SEQ ID NO: 351636 - DNA, 53 bp, Artificial
  Synthetic oligonucleotide
catgaaatgtttaaccgaaattatcgcaccccttttaaattacgacatagtaa

SEQ ID NO: 351637 - DNA, 55 bp, Artificial
  Synthetic oligonucleotide
catgaaattgatagaactcaataactcgagatctaggtgcagggatataggagga

SEQ ID NO: 351638 - DNA, 60 bp, Artificial
  Synthetic oligonucleotide
catgaacaatccatgagcatcagcaatggtggccccagctccatttggcagatctaggtc

SEQ ID NO: 351639 - DNA, 59 bp, Artificial
  Synthetic oligonucleotide
catgaacaatcgtatagttgaagctcgtgcccctgataccttacccggtatgactagac

SEQ ID NO: 351640 - DNA, 60 bp, Artificial
  Synthetic oligonucleotide
catgaacatccagttgatctcgccgattgatgctccaattttgcgacagtgggctgaaat

SEQ ID NO: 351641 - DNA, 54 bp, Artificial
  Synthetic oligonucleotide
catgaacccattcatgaacacgaacccattcctggaagagttggaccagccgat

SEQ ID NO: 351642 - DNA, 55 bp, Artificial
  Synthetic oligonucleotide
catgaaccctgttgatatgaactcccgttcaaattccgcagaaagccgttccact

SEQ ID NO: 351643 - DNA, 60 bp, Artificial
  Synthetic oligonucleotide
catgaacctatcagcaaccatgacgcccttagcaatctgcatcatgtcttcactgtaaga

SEQ ID NO: 351644 - DNA, 59 bp, Artificial
  Synthetic oligonucleotide
catgaacctggacggctcaagctctaagatcgaaggagttttcactatggtcgtcgttg

SEQ ID NO: 351645 - DNA, 60 bp, Artificial
  Synthetic oligonucleotide
catgaacgatgccatcttggccgcattcacactacttggcggtggctggatgatgtggga

SEQ ID NO: 351646 - DNA, 55 bp, Artificial
  Synthetic oligonucleotide
catgaacgccatgattgacgccaaactcacactggacgtcagcggtaccatcctg

SEQ ID NO: 351647 - DNA, 59 bp, Artificial
  Synthetic oligonucleotide
catgaacgttcctattctcaacactgtattgaatgtcgaagacgtcagtaacaaaattg

SEQ ID NO: 351648 - DNA, 60 bp, Artificial
  Synthetic oligonucleotide
catgaactcgtatcgtggttttgctgagtagcccagagagctgcgggtaacctgcgtaat

SEQ ID NO: 351649 - DNA, 60 bp, Artificial
  Synthetic oligonucleotide
catgaactctttaaagtgtttgaggaaatgcgggtcgacatcaatgacattataccaggc

SEQ ID NO: 351650 - DNA, 55 bp, Artificial
  Synthetic oligonucleotide
catgaagaaggagtatactgacttaagacttgacccaaggatagctctgtacaag

SEQ ID NO: 351651 - DNA, 55 bp, Artificial
  Synthetic oligonucleotide
catgaagaataaatggacactggcaatctacaaattcgatttggcaacagtcgct

SEQ ID NO: 351652 - DNA, 60 bp, Artificial
  Synthetic oligonucleotide
catgaagacagctattttgggaacttcccatgtcaattctatggatcttagcacctcagc

SEQ ID NO: 351653 - DNA, 60 bp, Artificial
  Synthetic oligonucleotide
catgaagacttggttacagttactgcaactttagcactactagggtgtgatggctcacct

SEQ ID NO: 351654 - DNA, 55 bp, Artificial
  Synthetic oligonucleotide
catgaagatgggactcgataagaatcggtggtcagcaatagtatacggtgatgac

SEQ ID NO: 351655 - DNA, 57 bp, Artificial
  Synthetic oligonucleotide
catgaagcaaagcatctaactggtgcagtggttatcacacaaatttctacagacaac

SEQ ID NO: 351656 - DNA, 54 bp, Artificial
  Synthetic oligonucleotide
catgaagcaagttcacgagttgaaaatttggcccgagttttattttagggtcgc

SEQ ID NO: 351657 - DNA, 58 bp, Artificial
  Synthetic oligonucleotide
catgaagcacaggttaacacagttacgcgatgtcatcaagtctagttacccgcgcttc

SEQ ID NO: 351658 - DNA, 59 bp, Artificial
  Synthetic oligonucleotide
catgaagccgtggaccactacgcaggacaactagccactttagatatcagtacagaacc

SEQ ID NO: 351659 - DNA, 55 bp, Artificial
  Synthetic oligonucleotide
catgaagcctcatcaggggtgagctcagcatgttcatacctgggagatccctcct

SEQ ID NO: 351660 - DNA, 55 bp, Artificial
  Synthetic oligonucleotide
catgaagcgtgccgaactctactgccccagaccactgttggcggtggaggtctcg

SEQ ID NO: 351661 - DNA, 60 bp, Artificial
  Synthetic oligonucleotide
catgaagcgttaaccaagtacaaattgagagattctgtgatcatgttaagaccaaatgca

SEQ ID NO: 351662 - DNA, 56 bp, Artificial
  Synthetic oligonucleotide
catgaagctcagggtaagactttcgacaatgtttatttctgtcgtttaactcgtac

SEQ ID NO: 351663 - DNA, 60 bp, Artificial
  Synthetic oligonucleotide
catgaagggttcgatggccagaggagagttacaattagctggtcttgctggagatcatcc

SEQ ID NO: 351664 - DNA, 50 bp, Artificial
  Synthetic oligonucleotide
catgaaggtaaatccaaccttgaaatcaatctggagcaagcaatggctat

SEQ ID NO: 351665 - DNA, 59 bp, Artificial
  Synthetic oligonucleotide
catgaaggtcaccgtcactgccgaatggcaggagtttcatcgcaacgacgtccacggtc

SEQ ID NO: 351666 - DNA, 60 bp, Artificial
  Synthetic oligonucleotide
catgaaggtgaacaaccatgttacttataatcatcaagaagctgcgaagtatgacaatca

SEQ ID NO: 351667 - DNA, 55 bp, Artificial
  Synthetic oligonucleotide
catgaagtcccaactttgcaccaaatttgacaacaggttcaggagtgccaaagct

SEQ ID NO: 351668 - DNA, 60 bp, Artificial
  Synthetic oligonucleotide
catgaagttcagataccaagtacgaatgagcacaaaattatacctagaatttcatctcta

SEQ ID NO: 351669 - DNA, 60 bp, Artificial
  Synthetic oligonucleotide
catgaatatagtccctcctcctcctaaaagagattgttctatcatgtatctatatttccc

SEQ ID NO: 351670 - DNA, 60 bp, Artificial
  Synthetic oligonucleotide
catgaatcagcaattctagtatacctagggctcatggtgtgcagtggggtccattttctg

SEQ ID NO: 351671 - DNA, 60 bp, Artificial
  Synthetic oligonucleotide
catgaatcggactgagctgattactaactattcaccatccagggaagataacttgcaacg

SEQ ID NO: 351672 - DNA, 51 bp, Artificial
  Synthetic oligonucleotide
catgaatgcgggggcaacatatccttcacccggcgctacctgctattccac

SEQ ID NO: 351673 - DNA, 53 bp, Artificial
  Synthetic oligonucleotide
catgaatgcgtgtggcgtgagggtcgcgcggatttggtggcttcgcttcgtgc

SEQ ID NO: 351674 - DNA, 59 bp, Artificial
  Synthetic oligonucleotide
catgaatggagatcatatgtaataacttgggatcaggatataccttgtaaaccattacc

SEQ ID NO: 351675 - DNA, 60 bp, Artificial
  Synthetic oligonucleotide
catgaatggtttgtgccgtgtgcaaaacatgagtcaggttgcagcaggatgctgcagaag

SEQ ID NO: 351676 - DNA, 58 bp, Artificial
  Synthetic oligonucleotide
catgaattccttaaagtgctttaggtagtggggatcgacgtcatcaatgacgttgtac

SEQ ID NO: 351677 - DNA, 60 bp, Artificial
  Synthetic oligonucleotide
catgaattcgcctacgagagcttgaggacacgaccagctgctccctaccaagtaccgacc

SEQ ID NO: 351678 - DNA, 56 bp, Artificial
  Synthetic oligonucleotide
catgaattgggacacatccccagggattaagtacaagggtgaaaccaaacgccagc

SEQ ID NO: 351679 - DNA, 56 bp, Artificial
  Synthetic oligonucleotide
catgaattgttcagctcaaacgtatatctatcagtgaagaaggcagatacatcttc

SEQ ID NO: 351680 - DNA, 57 bp, Artificial
  Synthetic oligonucleotide
catgacaaaggccgcaaagaggctgactccttcgttgaggacggccctaaggaggga

SEQ ID NO: 351681 - DNA, 50 bp, Artificial
  Synthetic oligonucleotide
catgacaattcagttatcatgccaatcacgaacatcgtcagcggcctccc

SEQ ID NO: 351682 - DNA, 55 bp, Artificial
  Synthetic oligonucleotide
catgacaccagagtcgaagctgtctgtaaatacaccatagagaacactttgattg

SEQ ID NO: 351683 - DNA, 60 bp, Artificial
  Synthetic oligonucleotide
catgacagacttggtgcctggcattcttgaaaagcagcgggacctcaacgaccccagcaa

SEQ ID NO: 351684 - DNA, 55 bp, Artificial
  Synthetic oligonucleotide
catgacagatttgtagctgagtacaaggcatccgtggaaatgccaacgatcgaca

SEQ ID NO: 351685 - DNA, 55 bp, Artificial
  Synthetic oligonucleotide
catgacagtctcaagcaacaccagtgccccggtggttgtgcctgccaacggatac

SEQ ID NO: 351686 - DNA, 60 bp, Artificial
  Synthetic oligonucleotide
catgacatacgctggctgccaaggtctcacaactaaagctgtccaaattctcttggatac

SEQ ID NO: 351687 - DNA, 60 bp, Artificial
  Synthetic oligonucleotide
catgacatagcccatactggtaaggttatttgtatctcagatgtcactcgtggtggtggg

SEQ ID NO: 351688 - DNA, 55 bp, Artificial
  Synthetic oligonucleotide
catgacatcccaactagagatcaccgcgggatggaggttgcggaaccagaggtat

SEQ ID NO: 351689 - DNA, 60 bp, Artificial
  Synthetic oligonucleotide
catgacatggaggcatttgtcagaaatgctatttgcctcctggaactccgtgagagaagt

SEQ ID NO: 351690 - DNA, 60 bp, Artificial
  Synthetic oligonucleotide
catgacatgtctggtgtttaggtatagctatcaggcaatcaacgccgttggagaaaacag

SEQ ID NO: 351691 - DNA, 60 bp, Artificial
  Synthetic oligonucleotide
catgacattccgagaggctgtgaagggccatgtaaagtccagtcatatgaacagcgccac

SEQ ID NO: 351692 - DNA, 60 bp, Artificial
  Synthetic oligonucleotide
catgacattgttgaccagatgataaaacatgaatggtcagacaataaagacagcgaggag

SEQ ID NO: 351693 - DNA, 55 bp, Artificial
  Synthetic oligonucleotide
catgaccaaaggagttcctctaaattctgattcaattggtatggccaaattggcg

SEQ ID NO: 351694 - DNA, 60 bp, Artificial
  Synthetic oligonucleotide
catgaccaattaatgacccaaaggatagggtatgtcacaatgcccattacatcgtaccag

SEQ ID NO: 351695 - DNA, 55 bp, Artificial
  Synthetic oligonucleotide
catgaccaccacagacacaatgagagacctgggagatcaaaattacgacttcatg

SEQ ID NO: 351696 - DNA, 52 bp, Artificial
  Synthetic oligonucleotide
catgaccactccctgggcaatgttcggaggggacttgttgagcgtctgttca

SEQ ID NO: 351697 - DNA, 55 bp, Artificial
  Synthetic oligonucleotide
catgaccactgatgactttcagtcacctagtgcgttaccatggtttcaccctacc

SEQ ID NO: 351698 - DNA, 58 bp, Artificial
  Synthetic oligonucleotide
catgaccccttcaacttacaacggtactgtttagcgagatattatgatgtacgaccag

SEQ ID NO: 351699 - DNA, 60 bp, Artificial
  Synthetic oligonucleotide
catgaccctgcgtttttacaacagccttccagtcttataacatatgacaatcctgtatat

SEQ ID NO: 351700 - DNA, 50 bp, Artificial
  Synthetic oligonucleotide
catgacctcccgaagtccaaacagacagttttggaattgtgcggaaaaga

SEQ ID NO: 351701 - DNA, 60 bp, Artificial
  Synthetic oligonucleotide
catgacctgtatgtctgcagatctggaggttatcaccagcacatgggtcctcgtgggtgg

SEQ ID NO: 351702 - DNA, 59 bp, Artificial
  Synthetic oligonucleotide
catgaccttggatgactgattctaaaacggttgctaaattagatgaagacgtgaataaa

SEQ ID NO: 351703 - DNA, 60 bp, Artificial
  Synthetic oligonucleotide
catgacgaactcataacgcggacacataacaagcgtagtgtcctcgacgattgccatcct

SEQ ID NO: 351704 - DNA, 58 bp, Artificial
  Synthetic oligonucleotide
catgacgaagccaaaacatactttgcccccctacttggaaagtatgataagagcagat

SEQ ID NO: 351705 - DNA, 60 bp, Artificial
  Synthetic oligonucleotide
catgacgaatccatgacatggacatgtaacaagcgttttgtcctcgatgattgccatcct

SEQ ID NO: 351706 - DNA, 55 bp, Artificial
  Synthetic oligonucleotide
catgacgacggttcacacgcaggttatgcaacttgcgtgactttacacgacagac

SEQ ID NO: 351707 - DNA, 60 bp, Artificial
  Synthetic oligonucleotide
catgacgcaaatgtgaataatctatacaacaaggtaaagagagccttgggatctaacgca

SEQ ID NO: 351708 - DNA, 55 bp, Artificial
  Synthetic oligonucleotide
catgacgcaggacccgagcctggtcgataaccatttgaagaagctcgccggcgag

SEQ ID NO: 351709 - DNA, 60 bp, Artificial
  Synthetic oligonucleotide
catgacgccatgacatacatacgtaacgctatggcgtgtacaagtggtatctatatcact

SEQ ID NO: 351710 - DNA, 55 bp, Artificial
  Synthetic oligonucleotide
catgacgctaatcaagtatgacaagaatcccgattttgactctacactgatgagt

SEQ ID NO: 351711 - DNA, 57 bp, Artificial
  Synthetic oligonucleotide
catgacggatggcttgtacataccgaaacttgaaccggagcgtattgtatccatact

SEQ ID NO: 351712 - DNA, 60 bp, Artificial
  Synthetic oligonucleotide
catgacggcatctcaagaatgtcaatctgcatgtcaggacctaataacaatgcttcggca

SEQ ID NO: 351713 - DNA, 56 bp, Artificial
  Synthetic oligonucleotide
catgacgggtccaaactccccctaagatgtgtactgggatgggtcgctttggccaa

SEQ ID NO: 351714 - DNA, 58 bp, Artificial
  Synthetic oligonucleotide
catgacgtgactatcccgacatcggtggtagtctcgcggccgaacacccaagcctcgg

SEQ ID NO: 351715 - DNA, 57 bp, Artificial
  Synthetic oligonucleotide
catgacgtgtaatcaagttattgtggccgggaaagccgcgtatcgtgtagaacgcgt

SEQ ID NO: 351716 - DNA, 54 bp, Artificial
  Synthetic oligonucleotide
catgacgttaaggtcgaaaaggacataggagttgacggggatggtttagcctgg

SEQ ID NO: 351717 - DNA, 60 bp, Artificial
  Synthetic oligonucleotide
catgactaagttgagagagtcttggtgagcctccattccgcactggtggatgattgggac

SEQ ID NO: 351718 - DNA, 59 bp, Artificial
  Synthetic oligonucleotide
catgactactgattgggtggaacaagcaaaatgtataatggggggcacacagtttagaa

SEQ ID NO: 351719 - DNA, 55 bp, Artificial
  Synthetic oligonucleotide
catgactactggcctaagcaaagctaaacgccgtcaaattgcccgtcgtgctgca

SEQ ID NO: 351720 - DNA, 55 bp, Artificial
  Synthetic oligonucleotide
catgactaggctacgtgagttggatccctaccaactaatgtggtcaaaatggtca

SEQ ID NO: 351721 - DNA, 55 bp, Artificial
  Synthetic oligonucleotide
catgactcaccagatcttgtgatgcaactccataaaccagtgattgactctgacc

SEQ ID NO: 351722 - DNA, 59 bp, Artificial
  Synthetic oligonucleotide
catgactcacctagccgcccggataggaggtggttgcccggacggcgtagtcagtgatg

SEQ ID NO: 351723 - DNA, 59 bp, Artificial
  Synthetic oligonucleotide
catgactcccagcacagagacgtcactgagaggagtgagaatcagtaagatgggagtgg

SEQ ID NO: 351724 - DNA, 53 bp, Artificial
  Synthetic oligonucleotide
catgactctaatgtgagaaatctgtacgagaaagtcaaatcgcaattgagaaa

SEQ ID NO: 351725 - DNA, 55 bp, Artificial
  Synthetic oligonucleotide
catgactgcaatctcatgcggagtaatggcatattcggagatactgtccgctccg

SEQ ID NO: 351726 - DNA, 54 bp, Artificial
  Synthetic oligonucleotide
catgactgcaatgcgtaatttataccgaaacacagtgagggctgcacatgcagg

SEQ ID NO: 351727 - DNA, 60 bp, Artificial
  Synthetic oligonucleotide
catgactgcacaagttagcacaagtctcataagcaactgcacagtgcaacaagctcgtac

SEQ ID NO: 351728 - DNA, 55 bp, Artificial
  Synthetic oligonucleotide
catgactggatgcgtttctgaattcaactgtaactcaattcagttttcgtgtctt

SEQ ID NO: 351729 - DNA, 59 bp, Artificial
  Synthetic oligonucleotide
catgactggtctgagtacaagaagtacctgagaggtgagcccttttcaaggaggggaca

SEQ ID NO: 351730 - DNA, 55 bp, Artificial
  Synthetic oligonucleotide
catgactgtggctctatcccttatgagcggtaccctcgctggctcggcagctctc

SEQ ID NO: 351731 - DNA, 57 bp, Artificial
  Synthetic oligonucleotide
catgactttgtcattctcagcttggggcctgtgaaaaaataccaacgacttttcgac

SEQ ID NO: 351732 - DNA, 60 bp, Artificial
  Synthetic oligonucleotide
catgagaacagaatggtactagccagcactacagctaaggccatggagcaaatggcggga

SEQ ID NO: 351733 - DNA, 60 bp, Artificial
  Synthetic oligonucleotide
catgagaaccgaaatcataaggatgatggaaagtgcaagaccagaagatgtgtctttcca

SEQ ID NO: 351734 - DNA, 57 bp, Artificial
  Synthetic oligonucleotide
catgagaagcaccatgtaatgatagacttagccaagacgatattggagatagaatgc

SEQ ID NO: 351735 - DNA, 55 bp, Artificial
  Synthetic oligonucleotide
catgagaaggcattaaagtggtctgagcttgaggaaccagcctacacgtaccagc

SEQ ID NO: 351736 - DNA, 54 bp, Artificial
  Synthetic oligonucleotide
catgagaatcaatacggtccagatttttcactggcccataatacagccgtctct

SEQ ID NO: 351737 - DNA, 60 bp, Artificial
  Synthetic oligonucleotide
catgagaatcaatatagtccagagtttgttatgtcacaaaactccgccatatcaaccttt

SEQ ID NO: 351738 - DNA, 55 bp, Artificial
  Synthetic oligonucleotide
catgagaatcgttgggcctagaacctgcagcaacacgtggcacggaacattcccc

SEQ ID NO: 351739 - DNA, 55 bp, Artificial
  Synthetic oligonucleotide
catgagaatctgcattctgatgttaaggactcaaagtaatcctctattagcctac

SEQ ID NO: 351740 - DNA, 57 bp, Artificial
  Synthetic oligonucleotide
catgagacctaggtgtttagactcgtcggattcctctcgacaaaacttaggctcgaa

SEQ ID NO: 351741 - DNA, 55 bp, Artificial
  Synthetic oligonucleotide
catgagagagctgatgatgagtacattttccccggatatgatagtgattttagtg

SEQ ID NO: 351742 - DNA, 55 bp, Artificial
  Synthetic oligonucleotide
catgagagcacgttcctgaagtggtacgaactgagacatgatctcgtttgcgtag

SEQ ID NO: 351743 - DNA, 60 bp, Artificial
  Synthetic oligonucleotide
catgagagtgtcaaatagcacagtcctggagctataggcacaggtatagttgtgtggtta

SEQ ID NO: 351744 - DNA, 60 bp, Artificial
  Synthetic oligonucleotide
catgagataattgtgtggacccagtgctcgtgcccacatcgtcttgcccgtcctcgagtc

SEQ ID NO: 351745 - DNA, 55 bp, Artificial
  Synthetic oligonucleotide
catgagataggcataaaccccaattacctcctggcttggaagcaggtactggcag

SEQ ID NO: 351746 - DNA, 55 bp, Artificial
  Synthetic oligonucleotide
catgagatccccgtcgttcacagacaactcctctccgccagcagtgccccagagc

SEQ ID NO: 351747 - DNA, 60 bp, Artificial
  Synthetic oligonucleotide
catgagattctacagctgtatttaaagaatgagcatggtgtgatagatgacatcacctat

SEQ ID NO: 351748 - DNA, 52 bp, Artificial
  Synthetic oligonucleotide
catgagcactccaagtcaagtagagatgctttggaaggatgtcgctcacaag

SEQ ID NO: 351749 - DNA, 60 bp, Artificial
  Synthetic oligonucleotide
catgagcaggagatagtcctacctattcatcccgcttgctttgtgtcgaccatcactgag

SEQ ID NO: 351750 - DNA, 55 bp, Artificial
  Synthetic oligonucleotide
catgagcattcacaaatggctgccaagtgccactggcaacatgcagaatgtgcct

SEQ ID NO: 351751 - DNA, 59 bp, Artificial
  Synthetic oligonucleotide
catgagccacgttccgagcgaagagacgcggggggaggatcagcgcccgagagggagta

SEQ ID NO: 351752 - DNA, 55 bp, Artificial
  Synthetic oligonucleotide
catgagccacttgtggttgatggggacacagtcaacgcgtcttatataacagctc

SEQ ID NO: 351753 - DNA, 55 bp, Artificial
  Synthetic oligonucleotide
catgagcccgcttctacaacagtgcattaggggtgacacttcatcttgtgctcgg

SEQ ID NO: 351754 - DNA, 60 bp, Artificial
  Synthetic oligonucleotide
catgagcgaaagtcgagaaacagacaggacaatagatgaattgggtttctattcgttcaa

SEQ ID NO: 351755 - DNA, 56 bp, Artificial
  Synthetic oligonucleotide
catgagcgccgggaccgctactgttcccgattgatcgcccggtttgcgagaccggg

SEQ ID NO: 351756 - DNA, 60 bp, Artificial
  Synthetic oligonucleotide
catgagcgtgattcctgggatgcaatgctaagaaatcatactgaagaaaagcggagattt

SEQ ID NO: 351757 - DNA, 59 bp, Artificial
  Synthetic oligonucleotide
catgaggataagtctcctagagagaacccactacatgttcaggaacgtcccctctagtc

SEQ ID NO: 351758 - DNA, 55 bp, Artificial
  Synthetic oligonucleotide
catgaggcaaacagtttcataattcgctgcaattgatgttctcaatggctggggt

SEQ ID NO: 351759 - DNA, 56 bp, Artificial
  Synthetic oligonucleotide
catgaggcaacgagtaaagtgcaattcttaatcggtgataggaaagaacaaccctt

SEQ ID NO: 351760 - DNA, 55 bp, Artificial
  Synthetic oligonucleotide
catgaggcatatctgacactggaagagacttgtgcggacactgttccagccctgg

SEQ ID NO: 351761 - DNA, 55 bp, Artificial
  Synthetic oligonucleotide
catgaggccaaagcatatcaaatgttgggcacccagaccatttaggatgttgcca

SEQ ID NO: 351762 - DNA, 60 bp, Artificial
  Synthetic oligonucleotide
catgagggaatacaagcaggagtggataggttctataggacttgcaaactagttggaatc

SEQ ID NO: 351763 - DNA, 53 bp, Artificial
  Synthetic oligonucleotide
catgagggcgtgcgtcaactaatttcccagtgcgtagatgctagtgttaaaac

SEQ ID NO: 351764 - DNA, 55 bp, Artificial
  Synthetic oligonucleotide
catgaggggtatgaggaattccccatggttgaccgaagggcaccagctatcttaa

SEQ ID NO: 351765 - DNA, 57 bp, Artificial
  Synthetic oligonucleotide
catgagggtggtccacttgaagaaattgggccgatgagttacaatgaattggttgtt

SEQ ID NO: 351766 - DNA, 55 bp, Artificial
  Synthetic oligonucleotide
catgagggtgtgctcaaatggctgcttgagacaatgcacctaagcatcagcaagc

SEQ ID NO: 351767 - DNA, 58 bp, Artificial
  Synthetic oligonucleotide
catgaggtacacatctgttctagaaactatcccaattcaagaactcacccatgtaaat

SEQ ID NO: 351768 - DNA, 53 bp, Artificial
  Synthetic oligonucleotide
catgaggtacattgagaaaaaattgaacgaggtgctgcccagaaagtactaca

SEQ ID NO: 351769 - DNA, 55 bp, Artificial
  Synthetic oligonucleotide
catgaggtctcccgtatacactgacaattccacccctccagccgtacctcagacc

SEQ ID NO: 351770 - DNA, 50 bp, Artificial
  Synthetic oligonucleotide
catgaggtgtgccatcaatatatgccattgcgtgaccatataatcgattg

SEQ ID NO: 351771 - DNA, 58 bp, Artificial
  Synthetic oligonucleotide
catgaggtgtgtaatgtacataggaacgaacatgtggcaagtggtgacgctattatga

SEQ ID NO: 351772 - DNA, 58 bp, Artificial
  Synthetic oligonucleotide
catgaggttttctgaaacagtgcacatagtttcctgaagagggttggaaaactgccaa

SEQ ID NO: 351773 - DNA, 60 bp, Artificial
  Synthetic oligonucleotide
catgagtactagcgatgaatctgagtgtgccgttgacttatcactaccgaagtctatagt

SEQ ID NO: 351774 - DNA, 55 bp, Artificial
  Synthetic oligonucleotide
catgagtaggtacttaaagcttctggttaaggcatctgggctattcaacacctca

SEQ ID NO: 351775 - DNA, 55 bp, Artificial
  Synthetic oligonucleotide
catgagtcatttatggccttgtatggatttgatgtctcgttggcatatcgcggtc

SEQ ID NO: 351776 - DNA, 50 bp, Artificial
  Synthetic oligonucleotide
catgagtcggaagccaaacagtatgtagccgaatataaggctcgactacc

SEQ ID NO: 351777 - DNA, 58 bp, Artificial
  Synthetic oligonucleotide
catgagtctcaaggcatctcagaagatcatgtgaccctcgtcaggctaaagagtacta

SEQ ID NO: 351778 - DNA, 55 bp, Artificial
  Synthetic oligonucleotide
catgagtgacgattttatcgttaagttagctgagtgtgtcaaagctgcaaagcca

SEQ ID NO: 351779 - DNA, 58 bp, Artificial
  Synthetic oligonucleotide
catgagtgaggaatccttgacatcccacactttcacaaccccgttcgtcccgactctc

SEQ ID NO: 351780 - DNA, 60 bp, Artificial
  Synthetic oligonucleotide
catgagtgcagttcccccccaaacaatcaagtaatgccatgtgaaccaatgataatagaa

SEQ ID NO: 351781 - DNA, 59 bp, Artificial
  Synthetic oligonucleotide
catgagtggaagaacataaagtctttcttgacggatcaaactttctcctataatggcta

SEQ ID NO: 351782 - DNA, 55 bp, Artificial
  Synthetic oligonucleotide
catgagtgtcgtacttggggcacgtgagtacaattacaaagtgcgaagccatcgg

SEQ ID NO: 351783 - DNA, 60 bp, Artificial
  Synthetic oligonucleotide
catgagttacagaagaacatctcagttgacggtttcagctcatgagaatagtctcagctc

SEQ ID NO: 351784 - DNA, 60 bp, Artificial
  Synthetic oligonucleotide
catgagttctcttaagaagcctgatgagcaatccgccgtggcaaagctaagacaactttg

SEQ ID NO: 351785 - DNA, 59 bp, Artificial
  Synthetic oligonucleotide
catgagttgattaacattccttattgcaactatactaaattctggtatgttaaccacac

SEQ ID NO: 351786 - DNA, 60 bp, Artificial
  Synthetic oligonucleotide
catgagtttgtcaagcgctatgcctcaagcaagtggtggatttgatcgtatgattgttac

SEQ ID NO: 351787 - DNA, 55 bp, Artificial
  Synthetic oligonucleotide
catgataagagataaggtaaatacttggaggtggttcagccacgtcgcaaattgg

SEQ ID NO: 351788 - DNA, 60 bp, Artificial
  Synthetic oligonucleotide
catgataccaccaaagtgtattcggtgatgatagggttcgtatgcaaatccgatggatat

SEQ ID NO: 351789 - DNA, 60 bp, Artificial
  Synthetic oligonucleotide
catgatacgtacactggcaatgaggtgtgcataattgatgaatttgattcctctgataag

SEQ ID NO: 351790 - DNA, 55 bp, Artificial
  Synthetic oligonucleotide
catgatagatacagagatgaggcactgaacaaccggttccatatcaaaggtgtcg

SEQ ID NO: 351791 - DNA, 60 bp, Artificial
  Synthetic oligonucleotide
catgataggtttcttgttatgccttctgagtgtgtgcctatggaggatacggtttgtatg

SEQ ID NO: 351792 - DNA, 52 bp, Artificial
  Synthetic oligonucleotide
catgatatctcccatcttggcaaggtaatgtgtatttcggacgtgacgcgtg

SEQ ID NO: 351793 - DNA, 55 bp, Artificial
  Synthetic oligonucleotide
catgatatctcccatgttggtaaggtgatgtgcatatcggacgtcacccgtggca

SEQ ID NO: 351794 - DNA, 60 bp, Artificial
  Synthetic oligonucleotide
catgatatgggcagactggtgtagcagagatgaggccgcctacagcccaacacaaagcaa

SEQ ID NO: 351795 - DNA, 51 bp, Artificial
  Synthetic oligonucleotide
catgatatgtgacattatgaagcaaataaccagtccactcaccattgatct

SEQ ID NO: 351796 - DNA, 60 bp, Artificial
  Synthetic oligonucleotide
catgatcaaggccgttcgaggtgacctgaactttgtcaatagggcaaaccagcgactgaa

SEQ ID NO: 351797 - DNA, 59 bp, Artificial
  Synthetic oligonucleotide
catgatccgtcgagctgttgtatcaagatccgctctgtcgggaacagtgtgtcggacac

SEQ ID NO: 351798 - DNA, 52 bp, Artificial
  Synthetic oligonucleotide
catgatcgcagtgtgtatttatcttctagcaccacacaccataacccctctt

SEQ ID NO: 351799 - DNA, 60 bp, Artificial
  Synthetic oligonucleotide
catgatcgtctttgagtctaggttgtttgtatggacatacatcagtcgtagatggaatgg

SEQ ID NO: 351800 - DNA, 55 bp, Artificial
  Synthetic oligonucleotide
catgatctagaggattttgtcgataatgcaactgtgtttcagggaaaccaccggg

SEQ ID NO: 351801 - DNA, 50 bp, Artificial
  Synthetic oligonucleotide
catgatctcgcttcatctaaaccgcagcaaagagttcctttcagtttgaa

SEQ ID NO: 351802 - DNA, 60 bp, Artificial
  Synthetic oligonucleotide
catgatctgtccggtgaggaagttgcaacttattcaattgccggtcaggttgagggcaaa

SEQ ID NO: 351803 - DNA, 55 bp, Artificial
  Synthetic oligonucleotide
catgatctgtttctttggacagtatgggacactctgaagagtgttcttttgaggc

SEQ ID NO: 351804 - DNA, 55 bp, Artificial
  Synthetic oligonucleotide
catgatgaacatttgagtcgctaactctgtagtacagcacccatggtattgggtc

SEQ ID NO: 351805 - DNA, 60 bp, Artificial
  Synthetic oligonucleotide
catgatgaccatgaccggaggagtcagggttccagtggaccagtcgaattttgatcgtca

SEQ ID NO: 351806 - DNA, 55 bp, Artificial
  Synthetic oligonucleotide
catgatgacccaaccccactcacgtggtcctggaccgaactgactcctcccagtg

SEQ ID NO: 351807 - DNA, 55 bp, Artificial
  Synthetic oligonucleotide
catgatgacggaaacaatagtgatccatctccgggaaattacagtcgaaatcggg

SEQ ID NO: 351808 - DNA, 60 bp, Artificial
  Synthetic oligonucleotide
catgatgacttctccatattttctgtgcgcgatggtcaggttgctttatgtgttaaagtc

SEQ ID NO: 351809 - DNA, 55 bp, Artificial
  Synthetic oligonucleotide
catgatgatatacctagtatggagaaggatcgaaaactttgcgatggcacaaggt

SEQ ID NO: 351810 - DNA, 60 bp, Artificial
  Synthetic oligonucleotide
catgatgatcatccagtttcggtagagcatatacatgatgccgatagttcgcctttaaac

SEQ ID NO: 351811 - DNA, 60 bp, Artificial
  Synthetic oligonucleotide
catgatgatcatttactacaagattctgaattagctggattgttatcaatgtcgtccgct

SEQ ID NO: 351812 - DNA, 59 bp, Artificial
  Synthetic oligonucleotide
catgatgatcgactctaatgtgccaccagctggttgggttaaacatgggctcccagaag

SEQ ID NO: 351813 - DNA, 55 bp, Artificial
  Synthetic oligonucleotide
catgatgcctccttgtgagaaggatgttcgggtggctgcttaagcgcttctatac

SEQ ID NO: 351814 - DNA, 55 bp, Artificial
  Synthetic oligonucleotide
catgatgcgaacgtcaactgtgaacctgactccctgcatgtttgttccgctcctc

SEQ ID NO: 351815 - DNA, 55 bp, Artificial
  Synthetic oligonucleotide
catgatgcggcattacctcaccggagtgctggccagtttccaagacaggctcgct

SEQ ID NO: 351816 - DNA, 58 bp, Artificial
  Synthetic oligonucleotide
catgatgctgcagatacattggaatattatggcattagctttctaagagaatattata

SEQ ID NO: 351817 - DNA, 60 bp, Artificial
  Synthetic oligonucleotide
catgatgctgtccgctgctggaataaacgtaggaccgatatctccagattatacccaaca

SEQ ID NO: 351818 - DNA, 55 bp, Artificial
  Synthetic oligonucleotide
catgatggatgctgacagatacccattacgcctgaacaatctaatcttcacctcg

SEQ ID NO: 351819 - DNA, 50 bp, Artificial
  Synthetic oligonucleotide
catgatggatggcacactaattggaaacagtctcattttcccacaccagt

SEQ ID NO: 351820 - DNA, 60 bp, Artificial
  Synthetic oligonucleotide
catgatggcactagttggttgacaattggaatttctggcccagacaatggggctgtggct

SEQ ID NO: 351821 - DNA, 59 bp, Artificial
  Synthetic oligonucleotide
catgatggtgctgaaatcatctacttcgagtaggaatgatttagaaaaaacacccttgt

SEQ ID NO: 351822 - DNA, 59 bp, Artificial
  Synthetic oligonucleotide
catgatgtaccggatgtacagaagccctgatgttccaagggggtgtgaaggcccttgta

SEQ ID NO: 351823 - DNA, 60 bp, Artificial
  Synthetic oligonucleotide
catgatgtcacgcacacggggggcgttctatgtatatctgacgtcacacgcggcaatggt

SEQ ID NO: 351824 - DNA, 60 bp, Artificial
  Synthetic oligonucleotide
catgatgtccaagacaaattttgtctgcatttgtggggatgactgccacaagggcgaaaa

SEQ ID NO: 351825 - DNA, 60 bp, Artificial
  Synthetic oligonucleotide
catgatgtgatggctcctcaattggctgtgacttccagtgatgacgtctcaaaggtttgt

SEQ ID NO: 351826 - DNA, 60 bp, Artificial
  Synthetic oligonucleotide
catgatgttatcagcagccgggataaacgttggaccaatatcacgagattacacacagca

SEQ ID NO: 351827 - DNA, 55 bp, Artificial
  Synthetic oligonucleotide
catgatgtttctaatctacgttcctggattaggaccactaaggtcaccggggacc

SEQ ID NO: 351828 - DNA, 55 bp, Artificial
  Synthetic oligonucleotide
catgattaatctattgtaaaactggccgcgcaccggaatggcttcacttcaagac

SEQ ID NO: 351829 - DNA, 54 bp, Artificial
  Synthetic oligonucleotide
catgattacaccgcttttccccaacgttaacgggatgtaaccacatgacaaacc

SEQ ID NO: 351830 - DNA, 60 bp, Artificial
  Synthetic oligonucleotide
catgattacacttgatggtgacacagtggtacctgtcgccccaacgctttctgcagaaca

SEQ ID NO: 351831 - DNA, 60 bp, Artificial
  Synthetic oligonucleotide
catgattacacttgatggtgatacggtggttcctgtcgctccgacaatgtcagcggaaca

SEQ ID NO: 351832 - DNA, 55 bp, Artificial
  Synthetic oligonucleotide
catgattcacctgatctcgttatgcagttacataaaccagtgattgactcggacc

SEQ ID NO: 351833 - DNA, 59 bp, Artificial
  Synthetic oligonucleotide
catgattcgttcggacctattgccaaatatggtacacgtaacgatctcgaactatgtcc

SEQ ID NO: 351834 - DNA, 60 bp, Artificial
  Synthetic oligonucleotide
catgattctttgaacgttgctgacctcagagaagtctagtccattcaaaaggctcgttgc

SEQ ID NO: 351835 - DNA, 60 bp, Artificial
  Synthetic oligonucleotide
catgattgaatgggggactgatattgttaatcactttcacttgggtgatgatatggaccc

SEQ ID NO: 351836 - DNA, 55 bp, Artificial
  Synthetic oligonucleotide
catgattggaagcattatggttcccttaaacaaggaatctagtgtttctgagagt

SEQ ID NO: 351837 - DNA, 55 bp, Artificial
  Synthetic oligonucleotide
catgattggttgtctgtcattcttacaacaagccactattgaatggcggacagcc

SEQ ID NO: 351838 - DNA, 57 bp, Artificial
  Synthetic oligonucleotide
catgattgtaacacgaagtgtcaaacacccaagggtgccttaaacaccagcctccca

SEQ ID NO: 351839 - DNA, 60 bp, Artificial
  Synthetic oligonucleotide
catgattgtgatgaccagattgtgaagtgtatcaattattccaagactctaagttctgga

SEQ ID NO: 351840 - DNA, 60 bp, Artificial
  Synthetic oligonucleotide
catgatttagagcgagagagagatagtctcgccgcaatgagagcagtcgcgatagatcac

SEQ ID NO: 351841 - DNA, 60 bp, Artificial
  Synthetic oligonucleotide
catgatttatccagaggcactgagtttaagcaatacttagacagtggagatttattcata

SEQ ID NO: 351842 - DNA, 60 bp, Artificial
  Synthetic oligonucleotide
catgatttcctatgatctcaaatctgtcttggggagctatcagcacagggataggtcgta

SEQ ID NO: 351843 - DNA, 53 bp, Artificial
  Synthetic oligonucleotide
catgatttgctgctctatgtcatactcctggacaggagcactgataacaccct

SEQ ID NO: 351844 - DNA, 57 bp, Artificial
  Synthetic oligonucleotide
catgattttctggaacataagttacatacgatctgtctgtcgcgaatcgtacagctc

SEQ ID NO: 351845 - DNA, 53 bp, Artificial
  Synthetic oligonucleotide
catgatttttcagttacacgctagtcacagatcatacataactagcgccactt

SEQ ID NO: 351846 - DNA, 55 bp, Artificial
  Synthetic oligonucleotide
catgcaaaagccataggaaattgcccaatatgggtgaaaacacccttgaagctgg

SEQ ID NO: 351847 - DNA, 60 bp, Artificial
  Synthetic oligonucleotide
catgcaaacaattctacggacactgtcgacacagtactggagaagaatgtaactgtgact

SEQ ID NO: 351848 - DNA, 60 bp, Artificial
  Synthetic oligonucleotide
catgcaacaggtaattactggatccccatagacagctcctttgtcacaggaaaaggacca

SEQ ID NO: 351849 - DNA, 60 bp, Artificial
  Synthetic oligonucleotide
catgcaacatcaagaataataggagacacaaggcgagcacattgtaatgttagtggagaa

SEQ ID NO: 351850 - DNA, 55 bp, Artificial
  Synthetic oligonucleotide
catgcaaccataattggcaggggcggggtccaggataccattatccgaacccagc

SEQ ID NO: 351851 - DNA, 55 bp, Artificial
  Synthetic oligonucleotide
catgcaaccctaccttgagtggtaaggatgtgactagacgggtggctgatctagc

SEQ ID NO: 351852 - DNA, 51 bp, Artificial
  Synthetic oligonucleotide
catgcaacgcttccgaatgggtggagtagaatcgctaactgtaaaatatca

SEQ ID NO: 351853 - DNA, 60 bp, Artificial
  Synthetic oligonucleotide
catgcaactggactcgaggggagcgctgtgacttggaggacagggataggtcagagctta

SEQ ID NO: 351854 - DNA, 59 bp, Artificial
  Synthetic oligonucleotide
catgcaagagggagtcttccacaccatgtggcacgttacaaaaggagccgcactgagga

SEQ ID NO: 351855 - DNA, 60 bp, Artificial
  Synthetic oligonucleotide
catgcaagattcagtcgtttgaacagcgtcatgatatctctcatactgggaaggtgatgt

SEQ ID NO: 351856 - DNA, 60 bp, Artificial
  Synthetic oligonucleotide
catgcaagccgcaatgtactacatactcaccagagggtggtcagacaacggcgacccaat

SEQ ID NO: 351857 - DNA, 57 bp, Artificial
  Synthetic oligonucleotide
catgcaagcggatttaatcaaaatcctaaactcgtttttaatcccaaagcagatcaa

SEQ ID NO: 351858 - DNA, 60 bp, Artificial
  Synthetic oligonucleotide
catgcaaggatgtccaagacattataccgtttatgaacgagtatatgcgaattgctgcaa

SEQ ID NO: 351859 - DNA, 52 bp, Artificial
  Synthetic oligonucleotide
catgcaaggccacaggcacctgccctcccgatgttatccctaaagtggaagg

SEQ ID NO: 351860 - DNA, 60 bp, Artificial
  Synthetic oligonucleotide
catgcaaggcctcaggcacctgcccacctgatgttatacccaaagttgaaggcactacta

SEQ ID NO: 351861 - DNA, 60 bp, Artificial
  Synthetic oligonucleotide
catgcaatacatgtatgttccgcctggagctcctaaacctgaaaagagagatgactacac

SEQ ID NO: 351862 - DNA, 60 bp, Artificial
  Synthetic oligonucleotide
catgcaatattgatgacttggagttatcagacgatgaatttggtgcaaaacttttcaaga

SEQ ID NO: 351863 - DNA, 55 bp, Artificial
  Synthetic oligonucleotide
catgcaatcatacaacccaatccttaggaatttaatgtctacactagatggggtt

SEQ ID NO: 351864 - DNA, 60 bp, Artificial
  Synthetic oligonucleotide
catgcaattgtagccctgactcgtcacacggagaagtgcgtggtggttgatgcaccgggg

SEQ ID NO: 351865 - DNA, 60 bp, Artificial
  Synthetic oligonucleotide
catgcacaacgctacatacgttattgtggcattgattcgcgtgagttgatcaatccaaca

SEQ ID NO: 351866 - DNA, 58 bp, Artificial
  Synthetic oligonucleotide
catgcacaactattactcaaaacaacactactgtagtggaaaacacatacgttaataa

SEQ ID NO: 351867 - DNA, 58 bp, Artificial
  Synthetic oligonucleotide
catgcacacctaaaagcttatgcgaaaattaatgaggaatcgctggatagggctagga

SEQ ID NO: 351868 - DNA, 55 bp, Artificial
  Synthetic oligonucleotide
catgcaccactcaccacgactctccagacgctgacctcatagaagccaacctcct

SEQ ID NO: 351869 - DNA, 55 bp, Artificial
  Synthetic oligonucleotide
catgcaccgagcatgacgagaaatgccataactgcaatgaggagttgcgatgaag

SEQ ID NO: 351870 - DNA, 55 bp, Artificial
  Synthetic oligonucleotide
catgcacgtgatgacatgaggcagcttcgagctctgctgatggagtcggtcgttc

SEQ ID NO: 351871 - DNA, 53 bp, Artificial
  Synthetic oligonucleotide
catgcactcaaagtccgggatgtatgtaaaaaaaggcctcatcagattgtgtg

SEQ ID NO: 351872 - DNA, 60 bp, Artificial
  Synthetic oligonucleotide
catgcactctctcctgggtatgcgcaattgaatactcgcgctagtgtgttcgtcgggcct

SEQ ID NO: 351873 - DNA, 52 bp, Artificial
  Synthetic oligonucleotide
catgcactgcttgtaagacaaaactttatgttaaacagaatacttaagtcta

SEQ ID NO: 351874 - DNA, 55 bp, Artificial
  Synthetic oligonucleotide
catgcacttacagcagactccgccttccgactggtccgctatgggtttccacccg

SEQ ID NO: 351875 - DNA, 60 bp, Artificial
  Synthetic oligonucleotide
catgcacttgcattcaaggtgaatgttattgggtaatgacggacgggccagcgaacaggc

SEQ ID NO: 351876 - DNA, 60 bp, Artificial
  Synthetic oligonucleotide
catgcacttgtagagacaactggcaaggctcaaatagaccagttatacaaataaatccca

SEQ ID NO: 351877 - DNA, 60 bp, Artificial
  Synthetic oligonucleotide
catgcagaacttgcacgactcctgctcaaggaaactctacgtatccctcctgttgctgta

SEQ ID NO: 351878 - DNA, 55 bp, Artificial
  Synthetic oligonucleotide
catgcagacgcaagagcaaaccggaacgaagccagaacatataaccctccaggac

SEQ ID NO: 351879 - DNA, 55 bp, Artificial
  Synthetic oligonucleotide
catgcagagtatcgttgagacttcccacaacggacgctgacgtcttttggataag

SEQ ID NO: 351880 - DNA, 60 bp, Artificial
  Synthetic oligonucleotide
catgcagagtgtactacggtcccgtggacatgtaaactcgagtacatcattacattggta

SEQ ID NO: 351881 - DNA, 55 bp, Artificial
  Synthetic oligonucleotide
catgcagcaatgtctggcacgggaccttccccataaacgcccataccaccgggcc

SEQ ID NO: 351882 - DNA, 55 bp, Artificial
  Synthetic oligonucleotide
catgcagcagatagagagagcttctgacaagatcgcacaaggagtaattattgca

SEQ ID NO: 351883 - DNA, 55 bp, Artificial
  Synthetic oligonucleotide
catgcagctgccacgaagtcaggtaacactgtagtatgtgctgttcaggctgggg

SEQ ID NO: 351884 - DNA, 60 bp, Artificial
  Synthetic oligonucleotide
catgcaggtgaggagatccatcttcgtgtagttccctacagattctgatgaataatttat

SEQ ID NO: 351885 - DNA, 60 bp, Artificial
  Synthetic oligonucleotide
catgcaggtgattagcagccgagagcactttctgctcgggtccaccctgctgcaccatgt

SEQ ID NO: 351886 - DNA, 59 bp, Artificial
  Synthetic oligonucleotide
catgcaggttgcgtgactactgagtttccccatacgtcactacgggattcgcctctccc

SEQ ID NO: 351887 - DNA, 60 bp, Artificial
  Synthetic oligonucleotide
catgcagtaccaaatgggacaatagtgaaaacaataacggatgatcaaattgaagtgact

SEQ ID NO: 351888 - DNA, 60 bp, Artificial
  Synthetic oligonucleotide
catgcagtccccaatggcaccatcgtaaagactctcacaactgaaaaggaagaggtgacc

SEQ ID NO: 351889 - DNA, 60 bp, Artificial
  Synthetic oligonucleotide
catgcagtcttttgtaagtacaatgacggctctcccatctctgatagcttatatcaatgc

SEQ ID NO: 351890 - DNA, 60 bp, Artificial
  Synthetic oligonucleotide
catgcagttctactatgacactcttcttcctggtaacagtactattcttaacgaatttga

SEQ ID NO: 351891 - DNA, 60 bp, Artificial
  Synthetic oligonucleotide
catgcatatccgggctgcaaaggcttatagtaaggctggaaagcttaatgtaagtcaagc

SEQ ID NO: 351892 - DNA, 60 bp, Artificial
  Synthetic oligonucleotide
catgcatatgcggcatggtctataattctacagaggctttaaaggtccatagacaatgca

SEQ ID NO: 351893 - DNA, 60 bp, Artificial
  Synthetic oligonucleotide
catgcatatgtgttatactgtcacatagcttagaccctacaactcatactacattcatac

SEQ ID NO: 351894 - DNA, 55 bp, Artificial
  Synthetic oligonucleotide
catgcatattcttcagtgtggttcccaccataagttatgtatgcttggtttcata

SEQ ID NO: 351895 - DNA, 60 bp, Artificial
  Synthetic oligonucleotide
catgcatcacttgacactgcagaatcctgctcatcataccttgccgagtgtaacgtaggg

SEQ ID NO: 351896 - DNA, 55 bp, Artificial
  Synthetic oligonucleotide
catgcatcttccattactggttgtcggtcttggagaagcgggttttacctcgcag

SEQ ID NO: 351897 - DNA, 60 bp, Artificial
  Synthetic oligonucleotide
catgcatcttcccaacagacgcacccttgtctgctccatcgaactgggaaactgaagtgt

SEQ ID NO: 351898 - DNA, 55 bp, Artificial
  Synthetic oligonucleotide
catgcatgctaactacattttctggaggaacacaaatcctatccagttgtcttcc

SEQ ID NO: 351899 - DNA, 60 bp, Artificial
  Synthetic oligonucleotide
catgcatggacaagtagattgtagtccagggatatggcaattagattgtacacatgtaga

SEQ ID NO: 351900 - DNA, 60 bp, Artificial
  Synthetic oligonucleotide
catgcatggtgaaaagtattacaggactgttgcttcccgggtctccaaggaagcagccca

SEQ ID NO: 351901 - DNA, 60 bp, Artificial
  Synthetic oligonucleotide
catgcatgttttaaacaccacatgtcatgtgttaggttcttccacaataccatattacct

SEQ ID NO: 351902 - DNA, 57 bp, Artificial
  Synthetic oligonucleotide
catgcattgcaggacgtggtaatgatataggtcacatagttatgcagtacatgtatg

SEQ ID NO: 351903 - DNA, 55 bp, Artificial
  Synthetic oligonucleotide
catgccaaatagattagtttgtaccgatttgggataagaagggtgggcactaagc

SEQ ID NO: 351904 - DNA, 58 bp, Artificial
  Synthetic oligonucleotide
catgccaacaattcaacaacaaaggtagatacgatactcgagaagaacgtaaccgtca

SEQ ID NO: 351905 - DNA, 55 bp, Artificial
  Synthetic oligonucleotide
catgccaacaattcaacaacacaagtggatactatacttgagaagaatgtcaccg

SEQ ID NO: 351906 - DNA, 55 bp, Artificial
  Synthetic oligonucleotide
catgccaacccaggcacggtcactggctcagctgtcgggtgtaacccagatgtgt

SEQ ID NO: 351907 - DNA, 59 bp, Artificial
  Synthetic oligonucleotide
catgccaacgactgctcctgcgttgcactccacacttacgtctgtgtacgcgcgggaac

SEQ ID NO: 351908 - DNA, 55 bp, Artificial
  Synthetic oligonucleotide
catgccaacgtgggtacaagggagtctggcggggagacggcatcatgcagaccac

SEQ ID NO: 351909 - DNA, 54 bp, Artificial
  Synthetic oligonucleotide
catgccaactccaccagtcgccatgtactccccgtggtcccgaagcctccggta

SEQ ID NO: 351910 - DNA, 56 bp, Artificial
  Synthetic oligonucleotide
catgccaaggggttaatatgtcaaccgctctcgtaagacggtggttggcggataac

SEQ ID NO: 351911 - DNA, 57 bp, Artificial
  Synthetic oligonucleotide
catgccaatgtccgtaaaaacctgtgacgaggagtgttgcccggccaatttcaagaa

SEQ ID NO: 351912 - DNA, 57 bp, Artificial
  Synthetic oligonucleotide
catgccaatttgggctcagccggcttataacccacctctcattgagacgtggaaaca

SEQ ID NO: 351913 - DNA, 55 bp, Artificial
  Synthetic oligonucleotide
catgccacaagagctcacagtgtccgatagcgtgttggtctttgaacttacggat

SEQ ID NO: 351914 - DNA, 56 bp, Artificial
  Synthetic oligonucleotide
catgccacatacaaacctgaatatcaagttttgaatcaatggtcaataccactagg

SEQ ID NO: 351915 - DNA, 58 bp, Artificial
  Synthetic oligonucleotide
catgccaccatttgacataaacaagttaacttacccagatatacagccacaaaactta

SEQ ID NO: 351916 - DNA, 60 bp, Artificial
  Synthetic oligonucleotide
catgccactggattgtcgtggccaagctttatctatctgtacgtgtactgtagatagtac

SEQ ID NO: 351917 - DNA, 55 bp, Artificial
  Synthetic oligonucleotide
catgccagccccaataacagatttggtttctcttgcgaaggtgccaaccttttgc

SEQ ID NO: 351918 - DNA, 60 bp, Artificial
  Synthetic oligonucleotide
catgccaggtggatcggtccacagtcaacatccagtcgaacaggacgtgattagagtatt

SEQ ID NO: 351919 - DNA, 55 bp, Artificial
  Synthetic oligonucleotide
catgccagtagtatgtactggagcaccgaacctccagttcgtctgcctgttcgga

SEQ ID NO: 351920 - DNA, 60 bp, Artificial
  Synthetic oligonucleotide
catgccatagatgctggttgtaacatcattgaccatattgactcaccgtcatcaatctgg

SEQ ID NO: 351921 - DNA, 59 bp, Artificial
  Synthetic oligonucleotide
catgcccctatgggcggcctgcacaggatatacagagttctgtgcaaagtacactggag

SEQ ID NO: 351922 - DNA, 60 bp, Artificial
  Synthetic oligonucleotide
catgcccctcattgactgtggaagatcgcgtgtcaaatttagagaaactgctagaacgag

SEQ ID NO: 351923 - DNA, 58 bp, Artificial
  Synthetic oligonucleotide
catgcccgttaacacgaacaacacaactgaagcaatgtatattaacggtaacatcgat

SEQ ID NO: 351924 - DNA, 58 bp, Artificial
  Synthetic oligonucleotide
catgccgacccgaagaggaaagaaggagcgagacgcgagcctgtgagtggaaacccgc

SEQ ID NO: 351925 - DNA, 56 bp, Artificial
  Synthetic oligonucleotide
catgccgacccgaagaggaaagaggaacacgagacgcgaatccgtgagtggaaatt

SEQ ID NO: 351926 - DNA, 56 bp, Artificial
  Synthetic oligonucleotide
catgccgacccgaagaggagggaaggacgcgagacggtgaacctgtgagtggaaac

SEQ ID NO: 351927 - DNA, 55 bp, Artificial
  Synthetic oligonucleotide
catgccgacggaaacgactccgaccaacgcccctactgctggcactaccccccaa

SEQ ID NO: 351928 - DNA, 55 bp, Artificial
  Synthetic oligonucleotide
catgccgcaagaacccgtacttgtacttgtgcccgctacgtatgtacgtccggag

SEQ ID NO: 351929 - DNA, 56 bp, Artificial
  Synthetic oligonucleotide
catgccgcatgtttgctcatagcaatcatttgtggtctgaatgataaggttacgtg

SEQ ID NO: 351930 - DNA, 55 bp, Artificial
  Synthetic oligonucleotide
catgccgcggtaacatttctcgtggacgcgcttctcagaaccgctaggaattgtt

SEQ ID NO: 351931 - DNA, 55 bp, Artificial
  Synthetic oligonucleotide
catgccgcttagcaaattgagctggaagttttgataagtgggagaaagtgacttg

SEQ ID NO: 351932 - DNA, 55 bp, Artificial
  Synthetic oligonucleotide
catgccggtaccttttgtctcactgatgacgtgacgactgaggatggtagggccg

SEQ ID NO: 351933 - DNA, 55 bp, Artificial
  Synthetic oligonucleotide
catgccggtctgcgtcgttctaaatactggtcagtacatgcatatgaccatggga

SEQ ID NO: 351934 - DNA, 58 bp, Artificial
  Synthetic oligonucleotide
catgccgttacttacaccgggtggtgcataatagatgggaattggctcaataattctt

SEQ ID NO: 351935 - DNA, 60 bp, Artificial
  Synthetic oligonucleotide
catgcctaacaaaacagatcactcatatcattacatcaaacgcctaaccgagtcggcagc

SEQ ID NO: 351936 - DNA, 58 bp, Artificial
  Synthetic oligonucleotide
catgcctaagaagattgacaaggattcagtagatgcaaatatcaaaagtttgataccg

SEQ ID NO: 351937 - DNA, 52 bp, Artificial
  Synthetic oligonucleotide
catgcctaccggtcgttaccttcccgttatcaaataggggacatcctccccg

SEQ ID NO: 351938 - DNA, 56 bp, Artificial
  Synthetic oligonucleotide
catgcctacgtcacaagtcacgtggggagggttgccgtgtaacccggaagtcaatc

SEQ ID NO: 351939 - DNA, 60 bp, Artificial
  Synthetic oligonucleotide
catgcctactgctcaatctacaatgaaagcagatgaaatcactcctgggaggttccgtac

SEQ ID NO: 351940 - DNA, 51 bp, Artificial
  Synthetic oligonucleotide
catgcctatatgagcttccgcaattttagaaaaaaactccttgtttctact

SEQ ID NO: 351941 - DNA, 60 bp, Artificial
  Synthetic oligonucleotide
catgcctatcaactgttataaaaccactgagatagatttcagaatgttcgataaatctca

SEQ ID NO: 351942 - DNA, 60 bp, Artificial
  Synthetic oligonucleotide
catgcctcaaaacctcattagagcctgcccacgaaacatctctattaacttgtgacactt

SEQ ID NO: 351943 - DNA, 58 bp, Artificial
  Synthetic oligonucleotide
catgcctctaatcccgtgtatgctactttgaaagtaaggagttatttctatgactccg

SEQ ID NO: 351944 - DNA, 58 bp, Artificial
  Synthetic oligonucleotide
catgcctctaatcctgtgtatgctacgcttaagattcgtatttacttctacgattctg

SEQ ID NO: 351945 - DNA, 55 bp, Artificial
  Synthetic oligonucleotide
catgcctgtttgtccactcaaacctggaatcaatatcaagaaaggcactacgagc

SEQ ID NO: 351946 - DNA, 55 bp, Artificial
  Synthetic oligonucleotide
catgccttaaaacgaaagtatggagcacacagcacagaaaacagtccatgtcgtg

SEQ ID NO: 351947 - DNA, 55 bp, Artificial
  Synthetic oligonucleotide
catgccttatttgatcgactttggattgtcttctaagtctccatattcttccgtc

SEQ ID NO: 351948 - DNA, 53 bp, Artificial
  Synthetic oligonucleotide
catgcgaaacaggctaccggaatgcgaccttattgcgaccttcagacgtcttt

SEQ ID NO: 351949 - DNA, 60 bp, Artificial
  Synthetic oligonucleotide
catgcgaacatattaaagtttcttgtggcaaaaaaacagtacaattccatgcgtgcttca

SEQ ID NO: 351950 - DNA, 56 bp, Artificial
  Synthetic oligonucleotide
catgcgaacggggcggagttacccgagcctgaggcctctcgtttagagttatcggc

SEQ ID NO: 351951 - DNA, 55 bp, Artificial
  Synthetic oligonucleotide
catgcgaactctacttaatatgggaggctactcaaggtcaaatcaaattactgac

SEQ ID NO: 351952 - DNA, 60 bp, Artificial
  Synthetic oligonucleotide
catgcgaatgcagcggagggcaggtatccgaggccccaccgaactccatccaacaggtaa

SEQ ID NO: 351953 - DNA, 60 bp, Artificial
  Synthetic oligonucleotide
catgcgacgctgagttttatttgataccaagatcgcaaactgaactatgtgcacaatata

SEQ ID NO: 351954 - DNA, 60 bp, Artificial
  Synthetic oligonucleotide
catgcgagccattggctttgcatacgctagttgcgctcagtcagaaacttttcacgcctt

SEQ ID NO: 351955 - DNA, 54 bp, Artificial
  Synthetic oligonucleotide
catgcgaggggcccaagccccgagcggtccccgtttgctttgttctaggtggat

SEQ ID NO: 351956 - DNA, 59 bp, Artificial
  Synthetic oligonucleotide
catgcgatgccttccttgttagtgccttcgctgaaaaaaaattggtacaatttatgatg

SEQ ID NO: 351957 - DNA, 60 bp, Artificial
  Synthetic oligonucleotide
catgcgattgatctccctgatctcgcctgtcaactctggcccagtccaagccaatgcttc

SEQ ID NO: 351958 - DNA, 55 bp, Artificial
  Synthetic oligonucleotide
catgcgattggcgttaagtcgtttgatgataaatatcacttgcatgactcgtgga

SEQ ID NO: 351959 - DNA, 50 bp, Artificial
  Synthetic oligonucleotide
catgcgcattaaatgttcataattgcaaatggtgtcaggttactagttgc

SEQ ID NO: 351960 - DNA, 60 bp, Artificial
  Synthetic oligonucleotide
catgcgcccagtacttctcccctcccacttactgcctgtgtatataagacaacgcattgc

SEQ ID NO: 351961 - DNA, 55 bp, Artificial
  Synthetic oligonucleotide
catgcgccttcgttcgaacagccgattccgtcctacttaatgaatgtccgaatgt

SEQ ID NO: 351962 - DNA, 59 bp, Artificial
  Synthetic oligonucleotide
catgcgcggacggttacggaggactggtgacgacagatccgaagacagctgaccccgcg

SEQ ID NO: 351963 - DNA, 55 bp, Artificial
  Synthetic oligonucleotide
catgcgctaggtgcggcgcaagaggcgaaggggcgtacgctcagtgaggcttatc

SEQ ID NO: 351964 - DNA, 51 bp, Artificial
  Synthetic oligonucleotide
catgcgctgtacacttgcaacttttgagaagtcaagaccagacaaaagagc

SEQ ID NO: 351965 - DNA, 55 bp, Artificial
  Synthetic oligonucleotide
catgcgcttacaggcagtggaataggaccaaggaagttgaggattcacagtgcgt

SEQ ID NO: 351966 - DNA, 55 bp, Artificial
  Synthetic oligonucleotide
catgcggaaactcttaaatgatttggccacaaagggcattgaggttcctctccct

SEQ ID NO: 351967 - DNA, 55 bp, Artificial
  Synthetic oligonucleotide
catgcggcttgctgtaagctcgtcggcaatgtagtctaactccatcgggaagtcg

SEQ ID NO: 351968 - DNA, 60 bp, Artificial
  Synthetic oligonucleotide
catgcgggatgactttgcacgccaaggtcgtttttggaggtatgatttgaatgtggatca

SEQ ID NO: 351969 - DNA, 55 bp, Artificial
  Synthetic oligonucleotide
catgcgggcatatcgttatccggtggagctagaatggtcaccactcgttcactac

SEQ ID NO: 351970 - DNA, 58 bp, Artificial
  Synthetic oligonucleotide
catgcgggcgggacagaacgttaccgcggtggtgagtggatcagacacggttcaagtg

SEQ ID NO: 351971 - DNA, 58 bp, Artificial
  Synthetic oligonucleotide
catgcggtggctcgggcaggactgtacctgcttcctccagcccgttgaggggagggtc

SEQ ID NO: 351972 - DNA, 55 bp, Artificial
  Synthetic oligonucleotide
catgcgtccttagtcaggttagaatcttataatgatttccaaaagctagtgcagg

SEQ ID NO: 351973 - DNA, 50 bp, Artificial
  Synthetic oligonucleotide
catgcgtcgatgatttcaacaaccaattttatgagctaaacataaaaggg

SEQ ID NO: 351974 - DNA, 51 bp, Artificial
  Synthetic oligonucleotide
catgcgtcgtcttaccaaagacccgcatattgtagctattcgtggtaaatg

SEQ ID NO: 351975 - DNA, 60 bp, Artificial
  Synthetic oligonucleotide
catgcgtcttatgccattcctcgaaacacacgtcgagtgcacaaaaggttccggtgcgac

SEQ ID NO: 351976 - DNA, 60 bp, Artificial
  Synthetic oligonucleotide
catgcgtgagacaatgagactctggattcgttcggcggcagatgactccgtggttacgtc

SEQ ID NO: 351977 - DNA, 60 bp, Artificial
  Synthetic oligonucleotide
catgcgtgccgctcaagcggtaactgcagtagtgtgtggtccggatatgattcaagtgtc

SEQ ID NO: 351978 - DNA, 59 bp, Artificial
  Synthetic oligonucleotide
catgcgtgcgcacacggccggctacgtcctatcgtagtcgggggctccggagtgcgaaa

SEQ ID NO: 351979 - DNA, 55 bp, Artificial
  Synthetic oligonucleotide
catgcgtgcgtcaagagccgaaaagaatttgtgcggaaaattaacaaggatgccg

SEQ ID NO: 351980 - DNA, 58 bp, Artificial
  Synthetic oligonucleotide
catgcgtggaacctttgtgtctccccggccgatccatactgcggaactcctggccgct

SEQ ID NO: 351981 - DNA, 55 bp, Artificial
  Synthetic oligonucleotide
catgcgttcaagaaaagatatcaaacgaacgcgattgatcgagagtgcaccacgc

SEQ ID NO: 351982 - DNA, 60 bp, Artificial
  Synthetic oligonucleotide
catgcgttctaaggtgcttaaagtcacgagcaggatttcccctgtgcttgcaaacacagt

SEQ ID NO: 351983 - DNA, 55 bp, Artificial
  Synthetic oligonucleotide
catgcgttgtacatgttgtgcaagagtgctaactacgtctgataagattgatctg

SEQ ID NO: 351984 - DNA, 57 bp, Artificial
  Synthetic oligonucleotide
catgctaaaacgaccccgcagacgtgtacttcgctgttcacttctatggttcggtaa

SEQ ID NO: 351985 - DNA, 60 bp, Artificial
  Synthetic oligonucleotide
catgctaagctgtgcatagttctgaggagttttgattcctattttataggaatgccctga

SEQ ID NO: 351986 - DNA, 60 bp, Artificial
  Synthetic oligonucleotide
catgctaattccatcttatataacagcgataatgccatttatgcctagacgtgaaatcga

SEQ ID NO: 351987 - DNA, 59 bp, Artificial
  Synthetic oligonucleotide
catgctacaatgtgtcagcagtaacctgcacacatggcattcaacccttagtagcaaca

SEQ ID NO: 351988 - DNA, 60 bp, Artificial
  Synthetic oligonucleotide
catgctacataagctctgtaaagcccatggtttacaccttccagggcatggcgagtgatc

SEQ ID NO: 351989 - DNA, 55 bp, Artificial
  Synthetic oligonucleotide
catgctaccccaatgagggtaaagtggagtgtgtttgtagagacaattggactgg

SEQ ID NO: 351990 - DNA, 60 bp, Artificial
  Synthetic oligonucleotide
catgctaccccggagaattcgctgattatgaggaattaagggagcagctgagttcagtct

SEQ ID NO: 351991 - DNA, 60 bp, Artificial
  Synthetic oligonucleotide
catgctactacactgatagtagcaagagtgcaggcatcgcccatggtttaccatgggtcc

SEQ ID NO: 351992 - DNA, 60 bp, Artificial
  Synthetic oligonucleotide
catgctactgagacatatgtagaggtcaatatgaccagtatacctcaaggggtgttatat

SEQ ID NO: 351993 - DNA, 60 bp, Artificial
  Synthetic oligonucleotide
catgctagctgatcgagttgatgatgcagtaactgatgtttggtcatacaatgctaaact

SEQ ID NO: 351994 - DNA, 53 bp, Artificial
  Synthetic oligonucleotide
catgctagtgtccaggcagaaatggagcaagttgtggaagtctatgagtatgc

SEQ ID NO: 351995 - DNA, 55 bp, Artificial
  Synthetic oligonucleotide
catgctatagttgagaaaatgttgcagtacgccaaacatacacgagaatacgctg

SEQ ID NO: 351996 - DNA, 60 bp, Artificial
  Synthetic oligonucleotide
catgctatgaacacacctcatctacgcagggcaatgctatatggagattacggtactgag

SEQ ID NO: 351997 - DNA, 58 bp, Artificial
  Synthetic oligonucleotide
catgctatggcgactttggggcaacccgttgcgaactaggccgcgttcccagtgatac

SEQ ID NO: 351998 - DNA, 60 bp, Artificial
  Synthetic oligonucleotide
catgctatgtatggccatccttcacctgaaagacagactttgtagaggatgttttcatat

SEQ ID NO: 351999 - DNA, 60 bp, Artificial
  Synthetic oligonucleotide
catgctattaccaacttcactaaagctgagatggcacttgaattcaatcgtgagttcctt

SEQ ID NO: 352000 - DNA, 60 bp, Artificial
  Synthetic oligonucleotide
catgctcaatgtaccagagcacttcagaagaccgttcaatataggtctttataagggaac

SEQ ID NO: 352001 - DNA, 60 bp, Artificial
  Synthetic oligonucleotide
catgctcatttgaaagcatacgctaagattaatgaggaatccttggataaggctaggaga

SEQ ID NO: 352002 - DNA, 58 bp, Artificial
  Synthetic oligonucleotide
catgctcatttgaaagcttatgctaagatcaacgaggaatccctggatagggctagga

SEQ ID NO: 352003 - DNA, 60 bp, Artificial
  Synthetic oligonucleotide
catgctcctaagaactgcaataggccaggtgtcaaggcccatgttcctgtatgtgagaac

SEQ ID NO: 352004 - DNA, 60 bp, Artificial
  Synthetic oligonucleotide
catgctcctacgaactgcaattggccaagtgtcgaggccgatgtttctgtatgtgagaac

SEQ ID NO: 352005 - DNA, 60 bp, Artificial
  Synthetic oligonucleotide
catgctctacgagctgacagggaggtacaggatgtttccttcagcttcgtattaaaaatg

SEQ ID NO: 352006 - DNA, 60 bp, Artificial
  Synthetic oligonucleotide
catgctctcagacgccgcactcatggtgctccaccgtgggaaccgcgtgagagacatcac

SEQ ID NO: 352007 - DNA, 60 bp, Artificial
  Synthetic oligonucleotide
catgctctcagatgccgcgctgatggttctccactctggaaaccgtgtgcgcgatctcac

SEQ ID NO: 352008 - DNA, 59 bp, Artificial
  Synthetic oligonucleotide
catgctcttcggttttcgatgtcaaggtttaggcaatgttgatgttgttaattcttcac

SEQ ID NO: 352009 - DNA, 60 bp, Artificial
  Synthetic oligonucleotide
catgctcttgaataatcaaccagtagcgctagttggagctcttccatttgttacagactc

SEQ ID NO: 352010 - DNA, 55 bp, Artificial
  Synthetic oligonucleotide
catgctgaaaggtaacttgatgaacacagagccaacagttgctgagcttgtcagc

SEQ ID NO: 352011 - DNA, 55 bp, Artificial
  Synthetic oligonucleotide
catgctgaagcaagcttttgcactaacatgtatttggcagcttatgtgttggcag

SEQ ID NO: 352012 - DNA, 60 bp, Artificial
  Synthetic oligonucleotide
catgctgcagatagttctactccagatcgtaagatcattggggagacatccctttcttac

SEQ ID NO: 352013 - DNA, 60 bp, Artificial
  Synthetic oligonucleotide
catgctgccgcacctcatctagataaagtcaacgggatctcagagatggaaaacagtaaa

SEQ ID NO: 352014 - DNA, 55 bp, Artificial
  Synthetic oligonucleotide
catgctgctcgaacccacttactaatttcctgatcgcatttacatactgtattac

SEQ ID NO: 352015 - DNA, 60 bp, Artificial
  Synthetic oligonucleotide
catgctgctggagccactgattgcccaactgcctgacaagtacgaccgtgagctacgtga

SEQ ID NO: 352016 - DNA, 55 bp, Artificial
  Synthetic oligonucleotide
catgctggacgagatccaacactaagcgtgccacagttattatcgcacatcgcgg

SEQ ID NO: 352017 - DNA, 54 bp, Artificial
  Synthetic oligonucleotide
catgctggcaactttcgctttgttagtacaacgtggtcgtgggttgggggtaat

SEQ ID NO: 352018 - DNA, 58 bp, Artificial
  Synthetic oligonucleotide
catgctggccgtcgtcccaaggacgtcccaaggcctctgcagaatcccaaacatcttt

SEQ ID NO: 352019 - DNA, 60 bp, Artificial
  Synthetic oligonucleotide
catgctggccttgttcctgctatccggcccgagctggttccaacaaagtggtggcacctc

SEQ ID NO: 352020 - DNA, 55 bp, Artificial
  Synthetic oligonucleotide
catgctggtaggcacatattttagctttgtaaacttactaagtgcatagttggca

SEQ ID NO: 352021 - DNA, 55 bp, Artificial
  Synthetic oligonucleotide
catgctggtatcaaaccaactttgtgttcccaccaaacacaccgagcactgcaga

SEQ ID NO: 352022 - DNA, 55 bp, Artificial
  Synthetic oligonucleotide
catgctggtctaagatttattatcaattgctcaacggtggctgggtgtgtgttgc

SEQ ID NO: 352023 - DNA, 59 bp, Artificial
  Synthetic oligonucleotide
catgctgtaactcatagagttaattttagtttctctagtagctataggactttgctgta

SEQ ID NO: 352024 - DNA, 55 bp, Artificial
  Synthetic oligonucleotide
catgctgtccctgcccatatctgggaccgtctcatgttgttcggggccaccctag

SEQ ID NO: 352025 - DNA, 60 bp, Artificial
  Synthetic oligonucleotide
catgctgtggcaaatgggacaaaagtgaacacactaacagagaggggaattgaagtagtg

SEQ ID NO: 352026 - DNA, 55 bp, Artificial
  Synthetic oligonucleotide
catgctgtgtctgcagtaaaacgaaagtttacaagcagtccggaaaatgctgggc

SEQ ID NO: 352027 - DNA, 51 bp, Artificial
  Synthetic oligonucleotide
catgcttaccgacccttcccacattacagctgagacggccaagcgtaggct

SEQ ID NO: 352028 - DNA, 59 bp, Artificial
  Synthetic oligonucleotide
catgcttacgtgaatacaaccacaaaggtcaatgtaccactagctctcaaccaccaaaa

SEQ ID NO: 352029 - DNA, 57 bp, Artificial
  Synthetic oligonucleotide
catgcttacttcgaagaagctgaggatggttctttgcaacttaagaaagggggtatg

SEQ ID NO: 352030 - DNA, 60 bp, Artificial
  Synthetic oligonucleotide
catgcttgctttaatcagcacatgtcatgtgtgcgattcctgcataggacaatacttcca

SEQ ID NO: 352031 - DNA, 55 bp, Artificial
  Synthetic oligonucleotide
catgcttgggaggataccagggtccatattagcaagagtacactgtgaagtggct

SEQ ID NO: 352032 - DNA, 59 bp, Artificial
  Synthetic oligonucleotide
catgcttggggatcattagatacctatgaacaagactcgttaggtaactctattcgtac

SEQ ID NO: 352033 - DNA, 55 bp, Artificial
  Synthetic oligonucleotide
catgcttggtgtcagagacagacttgcagtgcttccaagacatgcaaagccaggc

SEQ ID NO: 352034 - DNA, 60 bp, Artificial
  Synthetic oligonucleotide
catgcttgttaagtgaggactgaactaacaattcagtatccgatcttaatcagcatgtag

SEQ ID NO: 352035 - DNA, 60 bp, Artificial
  Synthetic oligonucleotide
catgctttacaagactgacaaggcccagccccagcacgtcatgtggtaccaggataccta

SEQ ID NO: 352036 - DNA, 58 bp, Artificial
  Synthetic oligonucleotide
catgctttccttcgtctaccaacaattagtttgtcgcgttctcatccagttaatgcgg

SEQ ID NO: 352037 - DNA, 60 bp, Artificial
  Synthetic oligonucleotide
catgctttgagcttgaggtctctccctatttagagcagtgtcaagataccatggaggcca

SEQ ID NO: 352038 - DNA, 60 bp, Artificial
  Synthetic oligonucleotide
catgctttgcattcacggatcacctgtgaactcctataccaatacgccttacactggtgc

SEQ ID NO: 352039 - DNA, 55 bp, Artificial
  Synthetic oligonucleotide
catggaaaggggtagacaccaacagtggggtgacaaaggcttgcccttatactag

SEQ ID NO: 352040 - DNA, 60 bp, Artificial
  Synthetic oligonucleotide
catggaaagtgtgaagaacggcacatatgactatcccaaatattcagaagagtccaaatt

SEQ ID NO: 352041 - DNA, 57 bp, Artificial
  Synthetic oligonucleotide
catggaaatttagctgtaagttctgcgttgaaggaccgtttttacatacggcatgtg

SEQ ID NO: 352042 - DNA, 60 bp, Artificial
  Synthetic oligonucleotide
catggaacacctcatgtatagaaaccgctggagtcaaagcaactgtggctttgacctagc

SEQ ID NO: 352043 - DNA, 60 bp, Artificial
  Synthetic oligonucleotide
catggaacacctcatgtgtagaaacaggtggagtcaaagcaactgcggctttgacttggc

SEQ ID NO: 352044 - DNA, 55 bp, Artificial
  Synthetic oligonucleotide
catggaacagatggcagggtcgagtgagcaagcagcagaggctatggaggttgcc

SEQ ID NO: 352045 - DNA, 60 bp, Artificial
  Synthetic oligonucleotide
catggaaccagctgatgtgacccacctctttgaccgttgccacaatcttaaaacactgat

SEQ ID NO: 352046 - DNA, 52 bp, Artificial
  Synthetic oligonucleotide
catggaaccatcacctgtggtatcctctgccattgaagctttgaaagcacca

SEQ ID NO: 352047 - DNA, 55 bp, Artificial
  Synthetic oligonucleotide
catggaaccccttggttaggaggatttgtctgctcaccttatcaagtgaaccatg

SEQ ID NO: 352048 - DNA, 58 bp, Artificial
  Synthetic oligonucleotide
catggaacctagtgaggggccctccggggtgtgctcagcacctagcctaagctaagtc

SEQ ID NO: 352049 - DNA, 54 bp, Artificial
  Synthetic oligonucleotide
catggaaccttcggccctgtccacttccgaaaccaagtcaaaatacgtcgcagg

SEQ ID NO: 352050 - DNA, 49 bp, Artificial
  Synthetic oligonucleotide
catggaacctttggtcccgtttacttccgaaaccaagttaaaatacgcc

SEQ ID NO: 352051 - DNA, 55 bp, Artificial
  Synthetic oligonucleotide
catggaagaatcctgaagaccgatttaaatagtggcaactgcgtagtacagtgcc

SEQ ID NO: 352052 - DNA, 58 bp, Artificial
  Synthetic oligonucleotide
catggaagatatactccaggtgtcattcctccagtaaacgtaaatagaccaattccat

SEQ ID NO: 352053 - DNA, 57 bp, Artificial
  Synthetic oligonucleotide
catggaagcaatagctatggaaggcaagaaatatggattgaccattacccctgctga

SEQ ID NO: 352054 - DNA, 59 bp, Artificial
  Synthetic oligonucleotide
catggaagggaacgtcagagtgacctccgcagcgtcgtttgtgagagcgtactctacac

SEQ ID NO: 352055 - DNA, 58 bp, Artificial
  Synthetic oligonucleotide
catggaaggtcacgggaccaggttgggtgagcgcgtatgcgatctcgtttaacgatgt

SEQ ID NO: 352056 - DNA, 59 bp, Artificial
  Synthetic oligonucleotide
catggaatacggccaagttaggctccatcaaggtcacgcggaggtggaagtaatacatc

SEQ ID NO: 352057 - DNA, 60 bp, Artificial
  Synthetic oligonucleotide
catggaatatggcgtggtatgatggacggaatagatatgcagattgacatagataataag

SEQ ID NO: 352058 - DNA, 60 bp, Artificial
  Synthetic oligonucleotide
catggaatcaagccagtagtgtcaactcaactgctgttgaatggcagtctagcaacaaag

SEQ ID NO: 352059 - DNA, 60 bp, Artificial
  Synthetic oligonucleotide
catggaatggaatgacattgcgagagaatggtccagcatcagagttttcggttagcaagc

SEQ ID NO: 352060 - DNA, 60 bp, Artificial
  Synthetic oligonucleotide
catggaatggactggtttggccaatagattattgagtaagggcaacgatattctgtgttg

SEQ ID NO: 352061 - DNA, 55 bp, Artificial
  Synthetic oligonucleotide
catggaatggatgatagcgagggagaagtattaatgtggaagtttgacagttcac

SEQ ID NO: 352062 - DNA, 55 bp, Artificial
  Synthetic oligonucleotide
catggaatggatgtgcctgaccaggtagacctggaggaaccttatggctggcaac

SEQ ID NO: 352063 - DNA, 60 bp, Artificial
  Synthetic oligonucleotide
catggaattagaccagtagtgtccactcaactgctgttaaatggcagtctagcagaggaa

SEQ ID NO: 352064 - DNA, 58 bp, Artificial
  Synthetic oligonucleotide
catggaattcacctttgtggttactgcaaacttcactgagaccaacaatggacatgct

SEQ ID NO: 352065 - DNA, 51 bp, Artificial
  Synthetic oligonucleotide
catggaattgaacgtgggcgcgatgacaaacgtcgaactccaactggctcg

SEQ ID NO: 352066 - DNA, 55 bp, Artificial
  Synthetic oligonucleotide
catggacactcgttatcgacggcactgtgtacagccctaaagtctctgatctaga

SEQ ID NO: 352067 - DNA, 60 bp, Artificial
  Synthetic oligonucleotide
catggacaggcgccttgatcacgccatgcgctgcggaggaaagtaaactgcccattaatg

SEQ ID NO: 352068 - DNA, 55 bp, Artificial
  Synthetic oligonucleotide
catggacaggtgccctgatcacaccatgcgctgcggaggagagcaagctgcccat

SEQ ID NO: 352069 - DNA, 60 bp, Artificial
  Synthetic oligonucleotide
catggacatcggaagtagataatataatggcggagccatgtcatcgaaggataatttggg

SEQ ID NO: 352070 - DNA, 55 bp, Artificial
  Synthetic oligonucleotide
catggacatctggagtgcagtatagatacacagatccggacacatacaccagtgc

SEQ ID NO: 352071 - DNA, 60 bp, Artificial
  Synthetic oligonucleotide
catggacattgtagcctctgagcacctgctgcaccagtctcttgtcggcaagcagtctcc

SEQ ID NO: 352072 - DNA, 55 bp, Artificial
  Synthetic oligonucleotide
catggacattgtggcttctgagcacctgctacaccaatcccttgtcggcaaacag

SEQ ID NO: 352073 - DNA, 60 bp, Artificial
  Synthetic oligonucleotide
catggaccaacaattacgcgcatatgtatgactgcaggccatggagtctaaagccctacg

SEQ ID NO: 352074 - DNA, 60 bp, Artificial
  Synthetic oligonucleotide
catggaccaacacccctgctgtacagattgggcgctgttcagaacgaagttactctgacg

SEQ ID NO: 352075 - DNA, 55 bp, Artificial
  Synthetic oligonucleotide
catggaccacctgacacgggaaaatcaatgtttacaatgtcactaatatctgtgt

SEQ ID NO: 352076 - DNA, 58 bp, Artificial
  Synthetic oligonucleotide
catggacccgcatctgatgggcttcctttcccatcttccgtagtcgacgtgggagaag

SEQ ID NO: 352077 - DNA, 60 bp, Artificial
  Synthetic oligonucleotide
catggaccctgaactcaggcagcttgcacaatccctggttgacactaaggtgaaagagat

SEQ ID NO: 352078 - DNA, 60 bp, Artificial
  Synthetic oligonucleotide
catggacctcattgattttgctgaaactgagtctgcaacattgtttcaagatattgcaac

SEQ ID NO: 352079 - DNA, 60 bp, Artificial
  Synthetic oligonucleotide
catggacctgatgtatggaggcgacgcgagggtgtcaactgagctcaaaaacctgattga

SEQ ID NO: 352080 - DNA, 60 bp, Artificial
  Synthetic oligonucleotide
catggaccttcaagaattgcagcgacatgttatctaactgcgacaaatttggctagacag

SEQ ID NO: 352081 - DNA, 51 bp, Artificial
  Synthetic oligonucleotide
catggacgaacattgacatacagcccgcccgatcctggggaacctatgtgc

SEQ ID NO: 352082 - DNA, 55 bp, Artificial
  Synthetic oligonucleotide
catggacgcgcgctttctaagaaacaggaacagtcagcttatcatgcggcccttg

SEQ ID NO: 352083 - DNA, 51 bp, Artificial
  Synthetic oligonucleotide
catggacgcgggatccaccgcataagtattgcctttctgaacagtcacgga

SEQ ID NO: 352084 - DNA, 55 bp, Artificial
  Synthetic oligonucleotide
catggacgctgacttaattgtgacatccaaattccgcaacagtgctggattgtta

SEQ ID NO: 352085 - DNA, 60 bp, Artificial
  Synthetic oligonucleotide
catggacggatgtttcaacgagtgtaagcgacatatcgtcaactgtaagcagcgtttcat

SEQ ID NO: 352086 - DNA, 55 bp, Artificial
  Synthetic oligonucleotide
catggacgggagttagagtgataataagaatcctgcaacaattactgtttactca

SEQ ID NO: 352087 - DNA, 60 bp, Artificial
  Synthetic oligonucleotide
catggactatgaaaatcctcataggagtcatcatcacatggataggaatgaattcacgta

SEQ ID NO: 352088 - DNA, 60 bp, Artificial
  Synthetic oligonucleotide
catggactatgaagtgaatatagcaaaaaacatggttactcctatcactttcttctacgc

SEQ ID NO: 352089 - DNA, 55 bp, Artificial
  Synthetic oligonucleotide
catggactgacttgtatggacatggatctaaattggattatcctttacttgtggt

SEQ ID NO: 352090 - DNA, 55 bp, Artificial
  Synthetic oligonucleotide
catggactgccagaggcttaagcctattacggcttggtatcgacacggaataagc

SEQ ID NO: 352091 - DNA, 60 bp, Artificial
  Synthetic oligonucleotide
catggactgctaatgaatggaaatatggagtttgtgtacaatctaatgtatcatctaaac

SEQ ID NO: 352092 - DNA, 55 bp, Artificial
  Synthetic oligonucleotide
catggactgtccaacgaaacccaacatggtaatgcaagcaccataaaggcgcccg

SEQ ID NO: 352093 - DNA, 60 bp, Artificial
  Synthetic oligonucleotide
catggagaaaggacatattgagaactcaggagtccgaatgtcaatgcattggcggaactt

SEQ ID NO: 352094 - DNA, 58 bp, Artificial
  Synthetic oligonucleotide
catggagaacatcgcatcaggactcctaggacccctgctcgtgttacaggcggggttt

SEQ ID NO: 352095 - DNA, 60 bp, Artificial
  Synthetic oligonucleotide
catggagaaccattttctatatatgggagatttctactcacagcagtaggagactgtgcc

SEQ ID NO: 352096 - DNA, 55 bp, Artificial
  Synthetic oligonucleotide
catggagaagtgttatcacgacagcagaaccattggatagcgtatgcctgctttg

SEQ ID NO: 352097 - DNA, 60 bp, Artificial
  Synthetic oligonucleotide
catggagacacaccacaattagatttgaaagctagaccaacttatggtgcaggtgaaatc

SEQ ID NO: 352098 - DNA, 55 bp, Artificial
  Synthetic oligonucleotide
catggagaccgacgggcggattggttcggacattcctccctcgaatgcaagttgg

SEQ ID NO: 352099 - DNA, 56 bp, Artificial
  Synthetic oligonucleotide
catggagactactatgcggtctccggttttcacagacaactcgtcccccccggctg

SEQ ID NO: 352100 - DNA, 55 bp, Artificial
  Synthetic oligonucleotide
catggagactttgcccctggaaactatccagcactgtggagctacgcaatgggcg

SEQ ID NO: 352101 - DNA, 60 bp, Artificial
  Synthetic oligonucleotide
catggagagagttaaactggcgggaaaaatttcaatcaatctggcatgcacgaaaatcaa

SEQ ID NO: 352102 - DNA, 56 bp, Artificial
  Synthetic oligonucleotide
catggagagagttcagcagttatgctctactacctgatggggttggtaaccgcaag

SEQ ID NO: 352103 - DNA, 55 bp, Artificial
  Synthetic oligonucleotide
catggagatacaccacagttagatctgaaggtaagaccaacctacggcgcaggag

SEQ ID NO: 352104 - DNA, 57 bp, Artificial
  Synthetic oligonucleotide
catggagatgcgttgtgcttgtgaagaacggtccgcatggcaattacagtcttttcg

SEQ ID NO: 352105 - DNA, 55 bp, Artificial
  Synthetic oligonucleotide
catggagcaataacaagtagcaatacagcaaccaataaccctgatgttgcctggc

SEQ ID NO: 352106 - DNA, 55 bp, Artificial
  Synthetic oligonucleotide
catggagcacttacaaccagcaacacagcccacaataatgctgattgtgcttggc

SEQ ID NO: 352107 - DNA, 55 bp, Artificial
  Synthetic oligonucleotide
catggagcacttacaaccagtaacacagctagcaataatgctgcttgtgcatggc

SEQ ID NO: 352108 - DNA, 55 bp, Artificial
  Synthetic oligonucleotide
catggagcacttacaagcagcaacacaggcgccactaattctgatgttgcctggc

SEQ ID NO: 352109 - DNA, 57 bp, Artificial
  Synthetic oligonucleotide
catggagcagtcacaagtagtaatacaggggaaactaatgcagcttgcgcctggtta

SEQ ID NO: 352110 - DNA, 60 bp, Artificial
  Synthetic oligonucleotide
catggagcatattatgacccatcaaaagatctgatagctgaaatacagaaacaggggcat

SEQ ID NO: 352111 - DNA, 55 bp, Artificial
  Synthetic oligonucleotide
catggagccacataacccgctacgtgttggccatcgcacgaacaacatagctggg

SEQ ID NO: 352112 - DNA, 55 bp, Artificial
  Synthetic oligonucleotide
catggagcctcgggaccaggacaagtggcgtttcggcacctgggagtcctcattg

SEQ ID NO: 352113 - DNA, 55 bp, Artificial
  Synthetic oligonucleotide
catggaggactgcagtacaccctctctctgtggtagtagccgagagatgccagtg

SEQ ID NO: 352114 - DNA, 55 bp, Artificial
  Synthetic oligonucleotide
catggaggcaattgctaaggaaggcaccaaatatggattggcaataactcctgct

SEQ ID NO: 352115 - DNA, 59 bp, Artificial
  Synthetic oligonucleotide
catggagggctgcaaccagcgggcaccgtcggcctatcgcagatcccaaaagggataac

SEQ ID NO: 352116 - DNA, 55 bp, Artificial
  Synthetic oligonucleotide
catggagggtgacctagaaacaggtacagacccaggagaaggaccgagctcgggg

SEQ ID NO: 352117 - DNA, 51 bp, Artificial
  Synthetic oligonucleotide
catggaggtcgttttcccaaacaaagtcggggccaggatattgacatcaga

SEQ ID NO: 352118 - DNA, 59 bp, Artificial
  Synthetic oligonucleotide
catggaggtcgttttcccaaatgaagtgggagctagaatattgacatcagaatcgcaat

SEQ ID NO: 352119 - DNA, 58 bp, Artificial
  Synthetic oligonucleotide
catggagtaagaggactacttgaccgtagttcaatccttagacaattctactatataa

SEQ ID NO: 352120 - DNA, 55 bp, Artificial
  Synthetic oligonucleotide
catggagtagaagactcggagagacaagtgttagtgtggaggtttgacagccgcc

SEQ ID NO: 352121 - DNA, 56 bp, Artificial
  Synthetic oligonucleotide
catggagtcccttcatccctcggtttacactctcctctacagggacgaccgattcc

SEQ ID NO: 352122 - DNA, 58 bp, Artificial
  Synthetic oligonucleotide
catggagttaatcagaatgatcaaacgcgggatcaatgaccgaaacttctggaggggg

SEQ ID NO: 352123 - DNA, 55 bp, Artificial
  Synthetic oligonucleotide
catggataatctgtccagatctgacaggtctctcatcctaacgacaatccccaaa

SEQ ID NO: 352124 - DNA, 60 bp, Artificial
  Synthetic oligonucleotide
catggatatacgtccgattgggacacaatatccattgagtggtcagtctcggatatagtc

SEQ ID NO: 352125 - DNA, 55 bp, Artificial
  Synthetic oligonucleotide
catggatattacgcaagcgcttaaggtgggcaccaagctagcagctccgaccgtg

SEQ ID NO: 352126 - DNA, 58 bp, Artificial
  Synthetic oligonucleotide
catggatattactgccagggaaagaagaagattggagactagaattacaattagggaa

SEQ ID NO: 352127 - DNA, 52 bp, Artificial
  Synthetic oligonucleotide
catggatcaattaagaactctcactccaatgccaaccagtgcaaacttaact

SEQ ID NO: 352128 - DNA, 60 bp, Artificial
  Synthetic oligonucleotide
catggatcagatagaacgcgcatcagatcaaactgcgcaaggagttattattgcgtaccg

SEQ ID NO: 352129 - DNA, 60 bp, Artificial
  Synthetic oligonucleotide
catggatccagagctgagagagctggcacaagctctcgttgacgttaaggtcagggaaat

SEQ ID NO: 352130 - DNA, 53 bp, Artificial
  Synthetic oligonucleotide
catggatccctagctgacctggataagaaactagacaacgcccctaaggacaa

SEQ ID NO: 352131 - DNA, 60 bp, Artificial
  Synthetic oligonucleotide
catggatcctcagagtgctatctatactctccctcgggtacccacatcagctccgacaac

SEQ ID NO: 352132 - DNA, 60 bp, Artificial
  Synthetic oligonucleotide
catggatctccactactactgaacccacggcgttaatgggtacctgctgtctgtattcta

SEQ ID NO: 352133 - DNA, 56 bp, Artificial
  Synthetic oligonucleotide
catggatctctacaataaccgacccagtggcgttaattggtacttgctgtctatat

SEQ ID NO: 352134 - DNA, 58 bp, Artificial
  Synthetic oligonucleotide
catggatctggatcctattagacttgggccttggaccagtttcctctgctggggtttc

SEQ ID NO: 352135 - DNA, 56 bp, Artificial
  Synthetic oligonucleotide
catggatgacatcttaatagctagtgatagaacagatttagaacatgacagggtag

SEQ ID NO: 352136 - DNA, 57 bp, Artificial
  Synthetic oligonucleotide
catggatgactccccaatacataacaccgaggtacagcgttatcatgtttatgatca

SEQ ID NO: 352137 - DNA, 59 bp, Artificial
  Synthetic oligonucleotide
catggatgagttcaggggttcctggattaacagtaaagcaaatagctgctaccactaaa

SEQ ID NO: 352138 - DNA, 59 bp, Artificial
  Synthetic oligonucleotide
catggatgattagaatcctaattgggttcttagtgttgtggattggcacgaactcaagg

SEQ ID NO: 352139 - DNA, 60 bp, Artificial
  Synthetic oligonucleotide
catggatgccatatccagcagttatcctagggcgatgatgcatcccagctttgctggact

SEQ ID NO: 352140 - DNA, 60 bp, Artificial
  Synthetic oligonucleotide
catggatgcttctccacgaaattgcgtttcgtctactggatcttaagagagtctgtgttg

SEQ ID NO: 352141 - DNA, 55 bp, Artificial
  Synthetic oligonucleotide
catggatgcttctccgcgagttagcgtttagttgtttacttgagtcgtgcgtttc

SEQ ID NO: 352142 - DNA, 60 bp, Artificial
  Synthetic oligonucleotide
catggatggtccaaagatccttagctcaagagcatggaatagagactccaaagtatctgg

SEQ ID NO: 352143 - DNA, 60 bp, Artificial
  Synthetic oligonucleotide
catggatggttgttgtaaatccagacggagctgctattaactcaggaatggcaggaattg

SEQ ID NO: 352144 - DNA, 60 bp, Artificial
  Synthetic oligonucleotide
catggatgtcctgtactccttgtcaaaaactcttaaagatgccagagacaaaatcgtcga

SEQ ID NO: 352145 - DNA, 60 bp, Artificial
  Synthetic oligonucleotide
catggattaagacgggagaactgcgaatacgtattgagatgggcgcctacccatacatgc

SEQ ID NO: 352146 - DNA, 55 bp, Artificial
  Synthetic oligonucleotide
catggattccaagggcacccagagctttgccatatgtgtcaataggacgcactaa

SEQ ID NO: 352147 - DNA, 51 bp, Artificial
  Synthetic oligonucleotide
catggattgcatagtggtgtattagacctcaaactccaatggagtctgaac

SEQ ID NO: 352148 - DNA, 55 bp, Artificial
  Synthetic oligonucleotide
catggcaacactctctcatatgcagttcgcactcaagacggaatgtcaggtgcac

SEQ ID NO: 352149 - DNA, 54 bp, Artificial
  Synthetic oligonucleotide
catggcacaagtggctgcccattctgagtgcagccgggttcaaaggcaatcaga

SEQ ID NO: 352150 - DNA, 55 bp, Artificial
  Synthetic oligonucleotide
catggcacacacaactgcgtcataggttacacgcaccactgaacgaccccagcga

SEQ ID NO: 352151 - DNA, 55 bp, Artificial
  Synthetic oligonucleotide
catggcacatggagttggaatgcgcctcatatcttcgcttacgatagcatcagcg

SEQ ID NO: 352152 - DNA, 60 bp, Artificial
  Synthetic oligonucleotide
catggcactatgatgaggacaatccgtacaaaacatgggcctatcatggatcatatgagg

SEQ ID NO: 352153 - DNA, 55 bp, Artificial
  Synthetic oligonucleotide
catggcacttctgctgtggccgacagcgcccactaatgtagtgactgactccgcg

SEQ ID NO: 352154 - DNA, 51 bp, Artificial
  Synthetic oligonucleotide
catggcagaacaaatgcaagaggacattattagtttatgggaacagagctt

SEQ ID NO: 352155 - DNA, 55 bp, Artificial
  Synthetic oligonucleotide
catggcagaacaatatactgaggacccaagagtcagaatgccaatgtctatacgg

SEQ ID NO: 352156 - DNA, 60 bp, Artificial
  Synthetic oligonucleotide
catggcagaaccgcatcacaaatattgcgattaactctggtggctacccagtctggggag

SEQ ID NO: 352157 - DNA, 55 bp, Artificial
  Synthetic oligonucleotide
catggcagcgttacacactatatctcccattcggtaagagaaccacccaaaaccg

SEQ ID NO: 352158 - DNA, 55 bp, Artificial
  Synthetic oligonucleotide
catggcagctaaggcagggttggactttggtaccactttctcgactattagtgca

SEQ ID NO: 352159 - DNA, 59 bp, Artificial
  Synthetic oligonucleotide
catggcaggtgctcgattgggttccaacgctttacgttctggtggactcaacgttggca

SEQ ID NO: 352160 - DNA, 60 bp, Artificial
  Synthetic oligonucleotide
catggcatattctgtcgaaagacaacgcaataaggataggtgaggatgctcatatactag

SEQ ID NO: 352161 - DNA, 60 bp, Artificial
  Synthetic oligonucleotide
catggcatatttgccgttaaaagggatgctaaatattatatgcgtatgacaaaaatctat

SEQ ID NO: 352162 - DNA, 55 bp, Artificial
  Synthetic oligonucleotide
catggcatgtactcatgcctcaaaccccgtgtatgcaacattgaaaattcgaatc

SEQ ID NO: 352163 - DNA, 55 bp, Artificial
  Synthetic oligonucleotide
catggcatgtcattttggaccatagacatttctaaatctttaactcgggatcttg

SEQ ID NO: 352164 - DNA, 55 bp, Artificial
  Synthetic oligonucleotide
catggcatgtgctcggccccttaccgggcgaacgctaccggctgatgaatcacct

SEQ ID NO: 352165 - DNA, 60 bp, Artificial
  Synthetic oligonucleotide
catggccaaatcatgagacaaccaaaggtgtcacagcttcatgcccccacgctggagccc

SEQ ID NO: 352166 - DNA, 60 bp, Artificial
  Synthetic oligonucleotide
catggccaaatcatgatacaaccagaggtaccacagtttcatgctcccactctggagcca

SEQ ID NO: 352167 - DNA, 58 bp, Artificial
  Synthetic oligonucleotide
catggccaacctgtctcctttgctgtccgcagtacctttgaaagttatagcaaacaag

SEQ ID NO: 352168 - DNA, 60 bp, Artificial
  Synthetic oligonucleotide
catggccactgggatatccttgttctgagtttatacaactcagcaatgaagcaagatctg

SEQ ID NO: 352169 - DNA, 60 bp, Artificial
  Synthetic oligonucleotide
catggccagacggagctgatctgccattcaccattgacaagtagtttatccaaaaaactc

SEQ ID NO: 352170 - DNA, 60 bp, Artificial
  Synthetic oligonucleotide
catggcccaatcggcctgttaacagcaggcgggagcgggtatgtatgcttcgcagatatt

SEQ ID NO: 352171 - DNA, 56 bp, Artificial
  Synthetic oligonucleotide
catggcccgatccagtcggttcgattggcacgtgcggctgggtttagggttgaccc

SEQ ID NO: 352172 - DNA, 60 bp, Artificial
  Synthetic oligonucleotide
catggccgcagggcttcccttacagcgtgatgcactcatcgcagccggagagcgtttgtt

SEQ ID NO: 352173 - DNA, 60 bp, Artificial
  Synthetic oligonucleotide
catggccgccctcaaagctcaatggtggtgtttcactgtcttctttctgtccgctacggc

SEQ ID NO: 352174 - DNA, 60 bp, Artificial
  Synthetic oligonucleotide
catggccgtatcggatcatgacggccctctttgccacgctggtgttcttgttcttattga

SEQ ID NO: 352175 - DNA, 55 bp, Artificial
  Synthetic oligonucleotide
catggcctaaaccttataaaatgtttgataaactatcagtaactccgaggtctag

SEQ ID NO: 352176 - DNA, 59 bp, Artificial
  Synthetic oligonucleotide
catggcctcggtagtacatactgagaatcttcccgcttacgaacggggccatgttgtga

SEQ ID NO: 352177 - DNA, 59 bp, Artificial
  Synthetic oligonucleotide
catggcctcggtagtgcataccgataaacttcccgaatatgaacggggccatgttgtga

SEQ ID NO: 352178 - DNA, 60 bp, Artificial
  Synthetic oligonucleotide
catggcctgagttctgcggcaatctgatcaccccacggggctacctcaaggatcccatga

SEQ ID NO: 352179 - DNA, 60 bp, Artificial
  Synthetic oligonucleotide
catggcctgctttatgtcaggtctgctggtaggggctctaatgtggttcctgaagcgcaa

SEQ ID NO: 352180 - DNA, 55 bp, Artificial
  Synthetic oligonucleotide
catggcctgggctcttcggaggcacctgaagtggtctggacagtggcaactcatc

SEQ ID NO: 352181 - DNA, 55 bp, Artificial
  Synthetic oligonucleotide
catggcgacatctcaaaagctcatgctgaaggattacgcaaatatgcaagtttgt

SEQ ID NO: 352182 - DNA, 56 bp, Artificial
  Synthetic oligonucleotide
catggcgccggctcaaagaccctagccggcccaaaaggtccaattacccagatgta

SEQ ID NO: 352183 - DNA, 55 bp, Artificial
  Synthetic oligonucleotide
catggcgcctagcacagaacacatttacgatagtgttgctggaagcacgctgcta

SEQ ID NO: 352184 - DNA, 50 bp, Artificial
  Synthetic oligonucleotide
catggcgctttggggtattaccgacgctgacgaatctaaacccaagtggg

SEQ ID NO: 352185 - DNA, 60 bp, Artificial
  Synthetic oligonucleotide
catggcggaattgacccgatcctatgtggaacggaattaggatcaccactagtgcttgat

SEQ ID NO: 352186 - DNA, 52 bp, Artificial
  Synthetic oligonucleotide
catggcgggagcgcgcattaatgaatttctgttcaaagcagacgcgtttgta

SEQ ID NO: 352187 - DNA, 59 bp, Artificial
  Synthetic oligonucleotide
catggcgtcaaggatactcaagctggaaggatttctctaactttccgacttcaatccag

SEQ ID NO: 352188 - DNA, 50 bp, Artificial
  Synthetic oligonucleotide
catggcgtcataaccactgagagacaaggtgactcatggcaatcattgtt

SEQ ID NO: 352189 - DNA, 60 bp, Artificial
  Synthetic oligonucleotide
catggcgtctcaaggcaccaaacgatcctatgaacaaatggaaactggtggagaacgcca

SEQ ID NO: 352190 - DNA, 55 bp, Artificial
  Synthetic oligonucleotide
catggcgtttaatggcggggacctcaaaggtttcccgctctgctaattattctcc

SEQ ID NO: 352191 - DNA, 58 bp, Artificial
  Synthetic oligonucleotide
catggctaccgaattcgcttgtcgcgagttcgaggaaaagttcacaggtgcacctagg

SEQ ID NO: 352192 - DNA, 60 bp, Artificial
  Synthetic oligonucleotide
catggctactgaaatcttctctgatgttgttaaggctgtttggtcgcacgttacggccaa

SEQ ID NO: 352193 - DNA, 57 bp, Artificial
  Synthetic oligonucleotide
catggctaggcgacatctagcagaggggaaggtggacactggagtggccgtgtcgag

SEQ ID NO: 352194 - DNA, 52 bp, Artificial
  Synthetic oligonucleotide
catggctagtacatctaagattagccggggcgttaataattctccacgtgca

SEQ ID NO: 352195 - DNA, 59 bp, Artificial
  Synthetic oligonucleotide
catggctattgggaccttgatacaacgggaagttgggagggagcagccagggattctga

SEQ ID NO: 352196 - DNA, 60 bp, Artificial
  Synthetic oligonucleotide
catggctcagagtccccatcgtgcgacactggctccgcgcgccatgagcgcaactaggtc

SEQ ID NO: 352197 - DNA, 60 bp, Artificial
  Synthetic oligonucleotide
catggctcaggctaaattgatgcataaatcggcggaaaccggaagttcaatctggaggtc

SEQ ID NO: 352198 - DNA, 55 bp, Artificial
  Synthetic oligonucleotide
catggctccgtctattgcggagctggacactaacgtcagtccgactacacctccc

SEQ ID NO: 352199 - DNA, 55 bp, Artificial
  Synthetic oligonucleotide
catggctctgacgctattcattttcgtcctgtgccactgtacgttgaaataaccg

SEQ ID NO: 352200 - DNA, 55 bp, Artificial
  Synthetic oligonucleotide
catggctgaaaactacctctcaggttaaatatgttaaagactgtgcacagatggt

SEQ ID NO: 352201 - DNA, 57 bp, Artificial
  Synthetic oligonucleotide
catggctgaaagtggggatccttatatccccttacaatcatacctggacaccatggg

SEQ ID NO: 352202 - DNA, 55 bp, Artificial
  Synthetic oligonucleotide
catggctgagataaacagtggaggagatgtcacacatctggctctgctagcggtt

SEQ ID NO: 352203 - DNA, 56 bp, Artificial
  Synthetic oligonucleotide
catggctggtttaaatggctacggaaacttaaagcaagagagaagaccatcccggc

SEQ ID NO: 352204 - DNA, 55 bp, Artificial
  Synthetic oligonucleotide
catggctgtatgacactcttagcacttcattcgctgaacttggtctcaattacaa

SEQ ID NO: 352205 - DNA, 58 bp, Artificial
  Synthetic oligonucleotide
catggctgtctctatgacgggagtcatgcgggggaactactatgcctttgtaggagtc

SEQ ID NO: 352206 - DNA, 55 bp, Artificial
  Synthetic oligonucleotide
catggctgtgtatcaacccaacggtgacgccaccacagaaggccaatcgttgctg

SEQ ID NO: 352207 - DNA, 60 bp, Artificial
  Synthetic oligonucleotide
catggcttaagttaaacacatatgctgacagtctagatttcataacgaagatctccgaag

SEQ ID NO: 352208 - DNA, 55 bp, Artificial
  Synthetic oligonucleotide
catggcttaggacaacacatctatgaaacctatggggatacttggccaggggttg

SEQ ID NO: 352209 - DNA, 55 bp, Artificial
  Synthetic oligonucleotide
catggcttgtactcatgctagcaacccagtttatgctacgcttaagattcggatt

SEQ ID NO: 352210 - DNA, 55 bp, Artificial
  Synthetic oligonucleotide
catgggaaagctgatactcgtctcgatgggactctatgtaattgaaggcgttcgg

SEQ ID NO: 352211 - DNA, 56 bp, Artificial
  Synthetic oligonucleotide
catgggaacttctgggttggagttaacttttacaaatgactccattataacacaca

SEQ ID NO: 352212 - DNA, 56 bp, Artificial
  Synthetic oligonucleotide
catgggaagcgaatcgttagtttgcgaatggttgagaaagcagactccagctacac

SEQ ID NO: 352213 - DNA, 57 bp, Artificial
  Synthetic oligonucleotide
catgggaatatccaattagtgttttccggtcgttcatacgcttatcatttacattac

SEQ ID NO: 352214 - DNA, 55 bp, Artificial
  Synthetic oligonucleotide
catgggaatgcattgcgcttgtctgtatggcaatcgtagtctcgtggtgcagcct

SEQ ID NO: 352215 - DNA, 59 bp, Artificial
  Synthetic oligonucleotide
catgggaattaactggaccgtatagcattaccactaatcggacaatactactaatgaca

SEQ ID NO: 352216 - DNA, 55 bp, Artificial
  Synthetic oligonucleotide
catgggacaccaaaggttcactggcccccattttgcccaccacctatcccgatgg

SEQ ID NO: 352217 - DNA, 55 bp, Artificial
  Synthetic oligonucleotide
catgggacagaccgtaactacccctctgagtctaaccttgcagcactggggagat

SEQ ID NO: 352218 - DNA, 50 bp, Artificial
  Synthetic oligonucleotide
catgggacaggaacaggatacaccatggatactgtgaacagaacacatca

SEQ ID NO: 352219 - DNA, 55 bp, Artificial
  Synthetic oligonucleotide
catgggaccaattgatatcttttcttgctgcatcatatcaatgctacatcacagg

SEQ ID NO: 352220 - DNA, 54 bp, Artificial
  Synthetic oligonucleotide
catgggacggaggacccggagaaagaagtgttaaaatgggagtttgacagccgc

SEQ ID NO: 352221 - DNA, 55 bp, Artificial
  Synthetic oligonucleotide
catgggacgtcacagtaaagtggctttgcgactgtatcgcaacttaggtttgagg

SEQ ID NO: 352222 - DNA, 60 bp, Artificial
  Synthetic oligonucleotide
catgggactcccgaaggagccgattcaattcgatgagggcttgtggaatgtctgtgcaga

SEQ ID NO: 352223 - DNA, 58 bp, Artificial
  Synthetic oligonucleotide
catgggagacgtcctccgactcagacagggagtccactggaacccagtcctataatac

SEQ ID NO: 352224 - DNA, 60 bp, Artificial
  Synthetic oligonucleotide
catgggagataaagaatgatttggctgaaaacacgcaagcatcatcaacaagtttccaga

SEQ ID NO: 352225 - DNA, 53 bp, Artificial
  Synthetic oligonucleotide
catgggagccccggagtggggaaatcggttgctaccaacctgattgggcgctc

SEQ ID NO: 352226 - DNA, 59 bp, Artificial
  Synthetic oligonucleotide
catgggaggatgaactattactggaccttgctagaacccggagacacaataatatttga

SEQ ID NO: 352227 - DNA, 53 bp, Artificial
  Synthetic oligonucleotide
catgggaggtccggcttccaaacctcgacgaggcatggggacgaatctttctg

SEQ ID NO: 352228 - DNA, 55 bp, Artificial
  Synthetic oligonucleotide
catgggaggttggccttccaaacctcgaaaaggcatggggacaaatctttctgtc

SEQ ID NO: 352229 - DNA, 51 bp, Artificial
  Synthetic oligonucleotide
catgggatagatgacccagagaaagaagtattacagtggagatttgacagc

SEQ ID NO: 352230 - DNA, 60 bp, Artificial
  Synthetic oligonucleotide
catgggatagatgttacagatcttttttccacacaacccgggctgacaagtgctgtcata

SEQ ID NO: 352231 - DNA, 55 bp, Artificial
  Synthetic oligonucleotide
catgggatatgtaattgggagttggggcacattgccacaggaacatatcgtacag

SEQ ID NO: 352232 - DNA, 60 bp, Artificial
  Synthetic oligonucleotide
catgggatattcaccacagtgattgtacgtgacaagagaccctgccagttctctgcggtg

SEQ ID NO: 352233 - DNA, 58 bp, Artificial
  Synthetic oligonucleotide
catgggatcaagccagtagtatcaactcagctgctgttaaatggcagcctagcagaaa

SEQ ID NO: 352234 - DNA, 55 bp, Artificial
  Synthetic oligonucleotide
catgggatgacgaggcagagtttgtaggcctgcaaatcagagtgagtgccagaca

SEQ ID NO: 352235 - DNA, 60 bp, Artificial
  Synthetic oligonucleotide
catgggatgagtatatagaatatttgaagtcagtaaaccctcaaatagttcagtttgcac

SEQ ID NO: 352236 - DNA, 54 bp, Artificial
  Synthetic oligonucleotide
catgggatgctccttccgattccgtccatccccctccccccgagggtcgcccag

SEQ ID NO: 352237 - DNA, 57 bp, Artificial
  Synthetic oligonucleotide
catgggatgctcttcccgatgctcgattccgactcccccccaagggtcgcccaggaa

SEQ ID NO: 352238 - DNA, 59 bp, Artificial
  Synthetic oligonucleotide
catgggcaactgcaatcgaactcagaaacccagttcgtcttctaacaacctcgagaagc

SEQ ID NO: 352239 - DNA, 55 bp, Artificial
  Synthetic oligonucleotide
catgggcaagaggagtgtggcccaaaagaagagccatatggctgtggggcccagc

SEQ ID NO: 352240 - DNA, 60 bp, Artificial
  Synthetic oligonucleotide
catgggcaatctggcatgttactcaccggggcaaatgctaagggcatggaccttggaacc

SEQ ID NO: 352241 - DNA, 58 bp, Artificial
  Synthetic oligonucleotide
catgggcagacccgtctgtactttaagagtgtcggcaaccagtgatgaataaaaactc

SEQ ID NO: 352242 - DNA, 60 bp, Artificial
  Synthetic oligonucleotide
catgggcaggagtagacaccaatagtggggtatcaagtgcttgcccatatactactggtt

SEQ ID NO: 352243 - DNA, 59 bp, Artificial
  Synthetic oligonucleotide
catgggcaggagtagacaccagcagtggggtaacaagagcttgcccttataacagtggt

SEQ ID NO: 352244 - DNA, 60 bp, Artificial
  Synthetic oligonucleotide
catgggcaggagtagataccaacagtggggtgacaaatgcttgtccttctgatactattg

SEQ ID NO: 352245 - DNA, 57 bp, Artificial
  Synthetic oligonucleotide
catgggcaggagtagataccagtaggggggtgacaaacgcttgcccttcttatacta

SEQ ID NO: 352246 - DNA, 58 bp, Artificial
  Synthetic oligonucleotide
catgggcaggggtagacaccagcagaggggtgacaaacgcttgtccttcctatactat

SEQ ID NO: 352247 - DNA, 55 bp, Artificial
  Synthetic oligonucleotide
catgggcatggctgggctgcacattaccactgagccatcttataagcgtgttccg

SEQ ID NO: 352248 - DNA, 54 bp, Artificial
  Synthetic oligonucleotide
catgggccaattccgagcgaagagtccgcgggggaaggatcagtgcccgagagg

SEQ ID NO: 352249 - DNA, 54 bp, Artificial
  Synthetic oligonucleotide
catgggccacagctccgagcgaagagaccccgggggaggaaggggacccgagag

SEQ ID NO: 352250 - DNA, 60 bp, Artificial
  Synthetic oligonucleotide
catgggccatctccatgcgaaaatggcgcgctggaaggatcagctcccgagaggggtaaa

SEQ ID NO: 352251 - DNA, 59 bp, Artificial
  Synthetic oligonucleotide
catgggccatctccgagcgaagaggacgcgccggaaggatcagctcccgagaggggtaa

SEQ ID NO: 352252 - DNA, 60 bp, Artificial
  Synthetic oligonucleotide
catgggccatctccgagcgaagggaacgcgctggagagatcatctcccgagaggggatga

SEQ ID NO: 352253 - DNA, 57 bp, Artificial
  Synthetic oligonucleotide
catgggccctgtctatcatagagccccattagagtttttcgatgaggcccaattctg

SEQ ID NO: 352254 - DNA, 58 bp, Artificial
  Synthetic oligonucleotide
catgggcctactgagcttctattgtccgatgttaattcaggtgtcccacaagtacccc

SEQ ID NO: 352255 - DNA, 59 bp, Artificial
  Synthetic oligonucleotide
catgggccttatatacaacagaatgggaactgtgaccactgaaggggcatttggcctgg

SEQ ID NO: 352256 - DNA, 60 bp, Artificial
  Synthetic oligonucleotide
catgggctaacacccctgtctacacagatgatgagaaatgaatttagagtcagtacaaca

SEQ ID NO: 352257 - DNA, 56 bp, Artificial
  Synthetic oligonucleotide
catgggctaatggatgatggaataagggcccatcgggcccgttaagatgggttttg

SEQ ID NO: 352258 - DNA, 54 bp, Artificial
  Synthetic oligonucleotide
catgggctaatggattgtggatatagggcccaaagggcccgtttagatgggttt

SEQ ID NO: 352259 - DNA, 60 bp, Artificial
  Synthetic oligonucleotide
catgggctatctacactcacgccaaagtaagtcaacgtataaacgatatgcccacattat

SEQ ID NO: 352260 - DNA, 57 bp, Artificial
  Synthetic oligonucleotide
catggggaactctaaattgtataccagagggaggaatatctccagaggtttcaataa

SEQ ID NO: 352261 - DNA, 60 bp, Artificial
  Synthetic oligonucleotide
catggggactaacagataccagtcatgaactgtatacaacaccaccggagaacacattta

SEQ ID NO: 352262 - DNA, 60 bp, Artificial
  Synthetic oligonucleotide
catggggccaaagaggtatcactcagttattccactggtgcactcgcaagttgcatgggc

SEQ ID NO: 352263 - DNA, 60 bp, Artificial
  Synthetic oligonucleotide
catggggcgcgcatacccgaggacgcactggtcgcaccactgtagacgatgttattgact

SEQ ID NO: 352264 - DNA, 58 bp, Artificial
  Synthetic oligonucleotide
catggggctgaaaatcagacaactattgtggtttcacatttcttgtcttaccttcgga

SEQ ID NO: 352265 - DNA, 56 bp, Artificial
  Synthetic oligonucleotide
catgggggtttaccaagtccttgctatttacgctacagtagcaggttccctgtcac

SEQ ID NO: 352266 - DNA, 54 bp, Artificial
  Synthetic oligonucleotide
catggggtaaaacccttaggtaggagccgatgggctctgctatttttgatttgg

SEQ ID NO: 352267 - DNA, 59 bp, Artificial
  Synthetic oligonucleotide
catggggtgtattatgacccaacaaaagacttaatagcagaactacagaagcaggggca

SEQ ID NO: 352268 - DNA, 55 bp, Artificial
  Synthetic oligonucleotide
catggggtgttgccaggatgcgagcatatactgcctgtatgattatataacctac

SEQ ID NO: 352269 - DNA, 55 bp, Artificial
  Synthetic oligonucleotide
catggggttatggagagctaacacatcaaattcgtaggttttaccaatgggttct

SEQ ID NO: 352270 - DNA, 58 bp, Artificial
  Synthetic oligonucleotide
catggggtttgtggaggtcctaggaagaatgccagaacacttcgctgggaagactaga

SEQ ID NO: 352271 - DNA, 60 bp, Artificial
  Synthetic oligonucleotide
catgggtaatgacagattacacagaaggaaagtcagtatcatgcctttcaaattttgaag

SEQ ID NO: 352272 - DNA, 55 bp, Artificial
  Synthetic oligonucleotide
catgggtacaacagatggatcaccctcgaggatatccgatctagatcatccctac

SEQ ID NO: 352273 - DNA, 55 bp, Artificial
  Synthetic oligonucleotide
catgggtacactgtgtatgaggatggttacagatcaacaacaacataaggtcaca

SEQ ID NO: 352274 - DNA, 60 bp, Artificial
  Synthetic oligonucleotide
catgggtatctttcaatcaaaatttggagtatcgaataggatatatatgcagtggagttt

SEQ ID NO: 352275 - DNA, 60 bp, Artificial
  Synthetic oligonucleotide
catgggtatttgcatgtgcaccagatagatgcccccctacatgtatttatattgctggga

SEQ ID NO: 352276 - DNA, 54 bp, Artificial
  Synthetic oligonucleotide
catgggtcagctaattagacgactggcgcgaataatcgagctaagagttctaga

SEQ ID NO: 352277 - DNA, 60 bp, Artificial
  Synthetic oligonucleotide
catgggtcatcagaggcgagttcaaagacacgtgcactgagtcagactatgaagcctttg

SEQ ID NO: 352278 - DNA, 55 bp, Artificial
  Synthetic oligonucleotide
catgggtcgataagtcaacaggagcagtgtcatcttttgtagagaaacggtgttt

SEQ ID NO: 352279 - DNA, 60 bp, Artificial
  Synthetic oligonucleotide
catgggtgcacgagaggacttcgctatgctaacacattacgctagaggtgaaagggatat

SEQ ID NO: 352280 - DNA, 56 bp, Artificial
  Synthetic oligonucleotide
catgggtgccggcccgcatagcctcgtgtatgagctcacctccagcgggcttcagg

SEQ ID NO: 352281 - DNA, 55 bp, Artificial
  Synthetic oligonucleotide
catgggtggcaagtggtcaaaatgcagtttgggaggatggtctactgtaagagaa

SEQ ID NO: 352282 - DNA, 58 bp, Artificial
  Synthetic oligonucleotide
catgggtgtagttaagaaggcatttcaagcagtaggtctggcacaaaaggcacctcgc

SEQ ID NO: 352283 - DNA, 60 bp, Artificial
  Synthetic oligonucleotide
catgggttagtgccagccattttagatacacatctagggatgaacattcagcagctgggt

SEQ ID NO: 352284 - DNA, 56 bp, Artificial
  Synthetic oligonucleotide
catgggttcgacaaatggtccttctcgtccacgcactaccgacaatacaaaaactg

SEQ ID NO: 352285 - DNA, 59 bp, Artificial
  Synthetic oligonucleotide
catgggttgttctgaatccacatgggaggacgttcgaaaggctgagggtatggagcacg

SEQ ID NO: 352286 - DNA, 59 bp, Artificial
  Synthetic oligonucleotide
catgggtttcacaggtctatgtgaagctatgcattcccacggggtgcgtattttgcggg

SEQ ID NO: 352287 - DNA, 55 bp, Artificial
  Synthetic oligonucleotide
catgggtttgcgtcgccaggtgattgtggcggaatactcagatgtcaacatggag

SEQ ID NO: 352288 - DNA, 60 bp, Artificial
  Synthetic oligonucleotide
catgggtttttctcacgaactcattctgcaccttcggtggttcgatacatgctcagaatc

SEQ ID NO: 352289 - DNA, 60 bp, Artificial
  Synthetic oligonucleotide
catggtaaaggtcactatagagtcgttaaatactcatcagttgctaatcacgccgataga

SEQ ID NO: 352290 - DNA, 55 bp, Artificial
  Synthetic oligonucleotide
catggtaacctcagcgtaacacccgcgttgaaagatcgatactacattcgccacg

SEQ ID NO: 352291 - DNA, 55 bp, Artificial
  Synthetic oligonucleotide
catggtaacgaagacgaacgccatcgtcaagttgccagtttaccggccaatggcg

SEQ ID NO: 352292 - DNA, 60 bp, Artificial
  Synthetic oligonucleotide
catggtacaactataccatgttggccactctcctgagtgcacttggcttcgaccccaaac

SEQ ID NO: 352293 - DNA, 60 bp, Artificial
  Synthetic oligonucleotide
catggtaccgatctatgtcaaagtacctctcgtcacgagtagtgcaaggcttgatgcatt

SEQ ID NO: 352294 - DNA, 51 bp, Artificial
  Synthetic oligonucleotide
catggtacttggtacggcgacctcccgtagcatgggaacatgccttaacgg

SEQ ID NO: 352295 - DNA, 57 bp, Artificial
  Synthetic oligonucleotide
catggtaggtccgtgtattgtatggatgaactaaccgaggatataaccgtgtggacc

SEQ ID NO: 352296 - DNA, 54 bp, Artificial
  Synthetic oligonucleotide
catggtagtgtgccacggagcccctttcaaccactaccgtgacactcagtacct

SEQ ID NO: 352297 - DNA, 60 bp, Artificial
  Synthetic oligonucleotide
catggtatacgtcagatcgctagctgctgacttaaactctgtaacgtgtaatggcggtga

SEQ ID NO: 352298 - DNA, 60 bp, Artificial
  Synthetic oligonucleotide
catggtatatctatgtgcgcaaaagcggcgagtacgttgaacagattgacagttattata

SEQ ID NO: 352299 - DNA, 60 bp, Artificial
  Synthetic oligonucleotide
catggtatgcttcccgatggagtcaaggcaatcaactggcctcttggcaatggtagagga

SEQ ID NO: 352300 - DNA, 55 bp, Artificial
  Synthetic oligonucleotide
catggtatgtacgtccgtcacatttacgcgttgcatagttgattaataaaaggtg

SEQ ID NO: 352301 - DNA, 54 bp, Artificial
  Synthetic oligonucleotide
catggtattttaacccagttgttcaaagaccaagtaatgtggaggttgagtttc

SEQ ID NO: 352302 - DNA, 60 bp, Artificial
  Synthetic oligonucleotide
catggtcagattatacctaagacaagaaatgagagatatgagcgtgtcacaatggatttg

SEQ ID NO: 352303 - DNA, 51 bp, Artificial
  Synthetic oligonucleotide
catggtcaggagtaaacactaacaatggggtaacaagagcttgccccgaca

SEQ ID NO: 352304 - DNA, 60 bp, Artificial
  Synthetic oligonucleotide
catggtcaggcaaatttccaacaatagatcacgtattagaccatgtgcaaacaatggagg

SEQ ID NO: 352305 - DNA, 60 bp, Artificial
  Synthetic oligonucleotide
catggtccaattgggctcctgacagctggaggtagtggctatgtatgttttgcagacatt

SEQ ID NO: 352306 - DNA, 50 bp, Artificial
  Synthetic oligonucleotide
catggtcctaagttgcttggttactctgatactttttccgttcacaacca

SEQ ID NO: 352307 - DNA, 57 bp, Artificial
  Synthetic oligonucleotide
catggtcctacatagtagagaaaccgaatcccatcaatggaatatgttacccgggta

SEQ ID NO: 352308 - DNA, 55 bp, Artificial
  Synthetic oligonucleotide
catggtcctacatagtggaaacgtctaattcggacaatgggacgtgttacccagg

SEQ ID NO: 352309 - DNA, 54 bp, Artificial
  Synthetic oligonucleotide
catggtcctatattgtggagaagcctaacccaacaaacggaatttgttacccag

SEQ ID NO: 352310 - DNA, 56 bp, Artificial
  Synthetic oligonucleotide
catggtcctgatgacagaccagcaccgtggggacaggtgcagaagagtcccccatt

SEQ ID NO: 352311 - DNA, 55 bp, Artificial
  Synthetic oligonucleotide
catggtcgctagtggagtcttgctggccgctcactatgctttcctgatcccagga

SEQ ID NO: 352312 - DNA, 54 bp, Artificial
  Synthetic oligonucleotide
catggtcggaaccgcccgaagtcctctcttaaaatcattctggaaggtagtccc

SEQ ID NO: 352313 - DNA, 60 bp, Artificial
  Synthetic oligonucleotide
catggtctacacaagtattaagcactgtcaatcctcagaaagatgggtgtccccacttgt

SEQ ID NO: 352314 - DNA, 55 bp, Artificial
  Synthetic oligonucleotide
catggtctcgacttttcgagcttcgacaccaaagtaccttcttggttaatccgcg

SEQ ID NO: 352315 - DNA, 59 bp, Artificial
  Synthetic oligonucleotide
catggtctgatgaacagggcagagttcgaggttttattaccttggactactgctccggc

SEQ ID NO: 352316 - DNA, 58 bp, Artificial
  Synthetic oligonucleotide
catggtgaaacaccgagggctactactgatagctcaaacactgcaaatttaaacggta

SEQ ID NO: 352317 - DNA, 55 bp, Artificial
  Synthetic oligonucleotide
catggtgaacggggtagtaaaactgctaacaaaaccctgggatgtgattccaatg

SEQ ID NO: 352318 - DNA, 57 bp, Artificial
  Synthetic oligonucleotide
catggtgaagtcggacgtgaaaccttctgtgaccgatactctaaacgttgacaggcc

SEQ ID NO: 352319 - DNA, 55 bp, Artificial
  Synthetic oligonucleotide
catggtgaatattgtgataatagaagtcccgtcttctggatgagcagttgtgtat

SEQ ID NO: 352320 - DNA, 60 bp, Artificial
  Synthetic oligonucleotide
catggtgacaactcaagcgtttgcaacagattctagccatccgtatgtcatagaaaaatg

SEQ ID NO: 352321 - DNA, 55 bp, Artificial
  Synthetic oligonucleotide
catggtgacggctcaagaatatgacacgttaatgagctacacacagctgactcca

SEQ ID NO: 352322 - DNA, 56 bp, Artificial
  Synthetic oligonucleotide
catggtgagacaccgaacgctaccaccgattattcaacaacgtcaaacttaaacga

SEQ ID NO: 352323 - DNA, 55 bp, Artificial
  Synthetic oligonucleotide
catggtgcccccattaattcgtttaccaattcagcctacaccggtgcattaggtt

SEQ ID NO: 352324 - DNA, 59 bp, Artificial
  Synthetic oligonucleotide
catggtggcctacggagatgatgtactggctagctacccatttcccatcgactgtttgg

SEQ ID NO: 352325 - DNA, 56 bp, Artificial
  Synthetic oligonucleotide
catggtgggaatgcttatgttaaacttatccaacaaattatagcagcgactttagc

SEQ ID NO: 352326 - DNA, 59 bp, Artificial
  Synthetic oligonucleotide
catggtgggacacttctcttctattgacgacgtacttcgtcacatacgtcacttacaaa

SEQ ID NO: 352327 - DNA, 54 bp, Artificial
  Synthetic oligonucleotide
catggtgggagaggaggacatcatttcaaaattcctcgaagaacttgagttatc

SEQ ID NO: 352328 - DNA, 60 bp, Artificial
  Synthetic oligonucleotide
catggtgggctaatataactttagtgggaccctcagatattccagtcacatggtatgata

SEQ ID NO: 352329 - DNA, 57 bp, Artificial
  Synthetic oligonucleotide
catggtggtacggtgatggaagatccaacgtctaagattgaaggggttttctctatg

SEQ ID NO: 352330 - DNA, 55 bp, Artificial
  Synthetic oligonucleotide
catggtgtaagacgttcatatgtttcaccacgtgttaatggtaggcgtcgtgtta

SEQ ID NO: 352331 - DNA, 60 bp, Artificial
  Synthetic oligonucleotide
catggtgtatgttagatcattagccgccaatttaaattccataacgtgcagtggtggtga

SEQ ID NO: 352332 - DNA, 60 bp, Artificial
  Synthetic oligonucleotide
catggtgtctagggcccgaattgatgcacgaatagatttcgagtctggacggattaagaa

SEQ ID NO: 352333 - DNA, 57 bp, Artificial
  Synthetic oligonucleotide
catggtgtgggcctgcaggggcattgaggttggtagggggcagccattgggggttgg

SEQ ID NO: 352334 - DNA, 55 bp, Artificial
  Synthetic oligonucleotide
catggtgtgttcttagagttcacacgagcaaccgccgaaagcgtgtgtaatgtga

SEQ ID NO: 352335 - DNA, 60 bp, Artificial
  Synthetic oligonucleotide
catggtgttccactctgtcctatctctagcaaaaagatagcattccgaagtgtggtttct

SEQ ID NO: 352336 - DNA, 53 bp, Artificial
  Synthetic oligonucleotide
catggttaaaggttacagtactgactatgttatcatgtgcgtgatagtgagtg

SEQ ID NO: 352337 - DNA, 56 bp, Artificial
  Synthetic oligonucleotide
catggttacccacgaggtgcagtggtcttgtattacggtacatttccataccagtt

SEQ ID NO: 352338 - DNA, 58 bp, Artificial
  Synthetic oligonucleotide
catggttatcacatcagtcattcagcagtgtaaaactctaggatatttggttaaagag

SEQ ID NO: 352339 - DNA, 51 bp, Artificial
  Synthetic oligonucleotide
catggttatgatcttcccttctctacttatctaaaggatgaacttagaccc

SEQ ID NO: 352340 - DNA, 60 bp, Artificial
  Synthetic oligonucleotide
catggttcctcaaagcaggtagagcccacacaaggttcttgacaagctatccacatgatg

SEQ ID NO: 352341 - DNA, 55 bp, Artificial
  Synthetic oligonucleotide
catggttcgagacccacgagtagccctatccaaggatttgacttgtctattgccc

SEQ ID NO: 352342 - DNA, 60 bp, Artificial
  Synthetic oligonucleotide
catggttgaggttgaacctccatacggagatagtaacatcattgttggaagttatgacaa

SEQ ID NO: 352343 - DNA, 57 bp, Artificial
  Synthetic oligonucleotide
catggttgatgttcccaaactagacatcgttagcgcgcttaactataaaccaacgag

SEQ ID NO: 352344 - DNA, 54 bp, Artificial
  Synthetic oligonucleotide
catggttgctgccaatgcgatggtcggctacgaaaacctgccaatggatgaccc

SEQ ID NO: 352345 - DNA, 60 bp, Artificial
  Synthetic oligonucleotide
catggttggcacagtgtattccgatatagattgtgcaaccacagtccaggtcaaccctcc

SEQ ID NO: 352346 - DNA, 60 bp, Artificial
  Synthetic oligonucleotide
catggttgggattaaattcaaggagcacgtcactttcgatgacgtgcattgtagttggca

SEQ ID NO: 352347 - DNA, 55 bp, Artificial
  Synthetic oligonucleotide
catggttgttcccaccatgattacctacgggtgtagtatacttgtattccggtac

SEQ ID NO: 352348 - DNA, 56 bp, Artificial
  Synthetic oligonucleotide
catggtttggctgtaacttagaccaacctggggtggtcctgcagcacctggggttg

SEQ ID NO: 352349 - DNA, 55 bp, Artificial
  Synthetic oligonucleotide
catggttttgaatcaaccatggctaactatacacatcattggggaaaagtaccag

SEQ ID NO: 352350 - DNA, 55 bp, Artificial
  Synthetic oligonucleotide
catgtaaaattgcacaagccaagggtgagacaccagcatacatacctcaaggagg

SEQ ID NO: 352351 - DNA, 53 bp, Artificial
  Synthetic oligonucleotide
catgtaacaaatgtggcaaatggcttaacggatttggttatttcggattggag

SEQ ID NO: 352352 - DNA, 55 bp, Artificial
  Synthetic oligonucleotide
catgtaactatggagctaaggtgtgcctaaagatcaagtcgagtgggaatgggga

SEQ ID NO: 352353 - DNA, 51 bp, Artificial
  Synthetic oligonucleotide
catgtaagatataattcagataagcctatcccgactaaaagggttcttaac

SEQ ID NO: 352354 - DNA, 60 bp, Artificial
  Synthetic oligonucleotide
catgtaaggtgcaatcttttgaatccaggcacgatgtctcccatattggtaaggtgatgt

SEQ ID NO: 352355 - DNA, 55 bp, Artificial
  Synthetic oligonucleotide
catgtaaggttgatcacaacaacgaggaatgtggtgaaatggcagcagttctcag

SEQ ID NO: 352356 - DNA, 58 bp, Artificial
  Synthetic oligonucleotide
catgtaagttaagtgtaacgtccaatgggatataccaatgtccagttgcatcaagctg

SEQ ID NO: 352357 - DNA, 55 bp, Artificial
  Synthetic oligonucleotide
catgtaatagaccccggtggaaacatatcagctagtgtcaaaggcaagctgtatc

SEQ ID NO: 352358 - DNA, 59 bp, Artificial
  Synthetic oligonucleotide
catgtaatagcacattctgtaaaccaacagtatatatgatagtcccaattcatgcttgc

SEQ ID NO: 352359 - DNA, 54 bp, Artificial
  Synthetic oligonucleotide
catgtaataggcgccggaccaaccggtatgtcagtcgcgtgggaaatactcagg

SEQ ID NO: 352360 - DNA, 60 bp, Artificial
  Synthetic oligonucleotide
catgtaatgcaatccctagaaatactagcaatagtagcattagtagtagctgcaatatta

SEQ ID NO: 352361 - DNA, 60 bp, Artificial
  Synthetic oligonucleotide
catgtaatggtgcctatgctaatattgctaagaacgctttattagtgtattattgttgga

SEQ ID NO: 352362 - DNA, 60 bp, Artificial
  Synthetic oligonucleotide
catgtaattaatcagttgatggaagctttgatgcaattatcaaggcaacaatttccaacc

SEQ ID NO: 352363 - DNA, 60 bp, Artificial
  Synthetic oligonucleotide
catgtacaacacccactccatgtggaactgtggttggcgcgtgcaggtcaccgtcaacgg

SEQ ID NO: 352364 - DNA, 60 bp, Artificial
  Synthetic oligonucleotide
catgtacagaaagtgttatcggcaagcacagtatgtaagttgcagagttgcacacatggt

SEQ ID NO: 352365 - DNA, 50 bp, Artificial
  Synthetic oligonucleotide
catgtacataaacgagcgtatcagcagcatgtgcaaccgctctaattaca

SEQ ID NO: 352366 - DNA, 52 bp, Artificial
  Synthetic oligonucleotide
catgtacatacccgtaggccaggtaactgactatggttttttgaacctaggt

SEQ ID NO: 352367 - DNA, 56 bp, Artificial
  Synthetic oligonucleotide
catgtaccgtgaaagtgtgtccgctaaatacacaaacgttagggataggttgtcaa

SEQ ID NO: 352368 - DNA, 53 bp, Artificial
  Synthetic oligonucleotide
catgtacctggaattatctggtataaggtcaaaaacagtaatacaaggactcc

SEQ ID NO: 352369 - DNA, 55 bp, Artificial
  Synthetic oligonucleotide
catgtacgaaataaatgagccgtttggaactcgataatttcccttagctgctgca

SEQ ID NO: 352370 - DNA, 55 bp, Artificial
  Synthetic oligonucleotide
catgtacgatacggggtctaatggattagagtgtttggaacacgatttacaatac

SEQ ID NO: 352371 - DNA, 58 bp, Artificial
  Synthetic oligonucleotide
catgtacggcattgcatgcgtgataagagcgtgtcttagcaacgacaacgatgcagat

SEQ ID NO: 352372 - DNA, 55 bp, Artificial
  Synthetic oligonucleotide
catgtacggccggcctgtggggaacgcgaacggcgagcctgaggtgaaactgtat

SEQ ID NO: 352373 - DNA, 58 bp, Artificial
  Synthetic oligonucleotide
catgtacgttggcttccctgaaaacttcgtggatgactatcttagcaacgacttatta

SEQ ID NO: 352374 - DNA, 60 bp, Artificial
  Synthetic oligonucleotide
catgtactacatccttaccagaggatggtccgacaacggtgaccccatgttcaatcagac

SEQ ID NO: 352375 - DNA, 58 bp, Artificial
  Synthetic oligonucleotide
catgtactattcgaaattgtaagaagttaggtccaagagagaacgtggctgtaataca

SEQ ID NO: 352376 - DNA, 60 bp, Artificial
  Synthetic oligonucleotide
catgtactattgtgtgccctagctgtgcacagcaataaacaccatctgcaatggatgacc

SEQ ID NO: 352377 - DNA, 55 bp, Artificial
  Synthetic oligonucleotide
catgtactcatatgatgcagacgacttctcttttgtaaggtatgtggatcctctc

SEQ ID NO: 352378 - DNA, 55 bp, Artificial
  Synthetic oligonucleotide
catgtactcttttccatgacagaatcttaatagggccagataatcacaagtatgc

SEQ ID NO: 352379 - DNA, 60 bp, Artificial
  Synthetic oligonucleotide
catgtactgcgcggccctgtgcattttcagaggaggacgattgtggcggcactgaagtat

SEQ ID NO: 352380 - DNA, 55 bp, Artificial
  Synthetic oligonucleotide
catgtacttctaccatctggtgaagtcaccttgcagacacgaggcaatccatctg

SEQ ID NO: 352381 - DNA, 54 bp, Artificial
  Synthetic oligonucleotide
catgtagatgttggatatgtcaagaagaaggacactatgccaacgaatgtccca

SEQ ID NO: 352382 - DNA, 55 bp, Artificial
  Synthetic oligonucleotide
catgtagccagtggattcatagaagcagaggtgatcccaagagaaactgggaagg

SEQ ID NO: 352383 - DNA, 60 bp, Artificial
  Synthetic oligonucleotide
catgtaggatttgacatcgcttgagctcttagctccctgaatgttcggatggaaatgtgc

SEQ ID NO: 352384 - DNA, 57 bp, Artificial
  Synthetic oligonucleotide
catgtaggggcgttgggatctattccccccataaggtccttcaataacattgtctga

SEQ ID NO: 352385 - DNA, 50 bp, Artificial
  Synthetic oligonucleotide
catgtagggtccgctgcaagtctccgcgttgagccgaacgatggtgcaca

SEQ ID NO: 352386 - DNA, 60 bp, Artificial
  Synthetic oligonucleotide
catgtaggtcttaacgtccgaagagctcttagctccctgaatgttcggatggaaatgtgc

SEQ ID NO: 352387 - DNA, 55 bp, Artificial
  Synthetic oligonucleotide
catgtagtccgcgggaaatgtcaacattttagccgatacttagctgaacataagg

SEQ ID NO: 352388 - DNA, 60 bp, Artificial
  Synthetic oligonucleotide
catgtagtgttacaggacggctgtgggtcacagtctactatggggtacctgtgtggagag

SEQ ID NO: 352389 - DNA, 60 bp, Artificial
  Synthetic oligonucleotide
catgtataactgctcacaggtggggcggcagtaccgctgtggtaatgcgcgcagcccccg

SEQ ID NO: 352390 - DNA, 56 bp, Artificial
  Synthetic oligonucleotide
catgtatactcacgatggaaaactgggaataagaattgggggtccactaagagtag

SEQ ID NO: 352391 - DNA, 60 bp, Artificial
  Synthetic oligonucleotide
catgtatcataataggaatagacgtggatggtcatataccccacgacgaggttatgcacg

SEQ ID NO: 352392 - DNA, 55 bp, Artificial
  Synthetic oligonucleotide
catgtatcatgagaggccgataatctacatggtaggatcagcaccttcatattgg

SEQ ID NO: 352393 - DNA, 55 bp, Artificial
  Synthetic oligonucleotide
catgtatcgccaaacgccgagctcgcaaccacggccagtagagtttcaggcaccc

SEQ ID NO: 352394 - DNA, 60 bp, Artificial
  Synthetic oligonucleotide
catgtatcggaagcccagggtgtacagaatgtacaggagctctgatgtacctaaggggtg

SEQ ID NO: 352395 - DNA, 60 bp, Artificial
  Synthetic oligonucleotide
catgtatcggaggcgatagttatggttcaagtttatgacgtaccgctacatgagttgtgt

SEQ ID NO: 352396 - DNA, 60 bp, Artificial
  Synthetic oligonucleotide
catgtatcgtctgaagaaaatgacactccgttatgtcccgatcgtgaccgtgcaaaattc

SEQ ID NO: 352397 - DNA, 60 bp, Artificial
  Synthetic oligonucleotide
catgtatcttgatatatgaacacaattcaattacgtggtctggtctatatcacacaaatt

SEQ ID NO: 352398 - DNA, 55 bp, Artificial
  Synthetic oligonucleotide
catgtatgatcctagccctatatcagagagagattttccgagactcgacctagct

SEQ ID NO: 352399 - DNA, 55 bp, Artificial
  Synthetic oligonucleotide
catgtatgggtttgagcccgggcaattttcttacatcaaatttgttgatccgctc

SEQ ID NO: 352400 - DNA, 53 bp, Artificial
  Synthetic oligonucleotide
catgtatgtacccgtcggtgcagtaaccgaacaagggtacttaaacttgggtg

SEQ ID NO: 352401 - DNA, 55 bp, Artificial
  Synthetic oligonucleotide
catgtatgttttgggtagttagagataggcgcccttatggacctagtccccagga

SEQ ID NO: 352402 - DNA, 54 bp, Artificial
  Synthetic oligonucleotide
catgtattccaatagggccttgggtaaattcttttgcggtagggcaagcctaga

SEQ ID NO: 352403 - DNA, 59 bp, Artificial
  Synthetic oligonucleotide
catgtatttacgcaggacaaattcgagctaacgcttggattgaagtggaccggctcata

SEQ ID NO: 352404 - DNA, 58 bp, Artificial
  Synthetic oligonucleotide
catgtatttggcaagcttaactatgatggaacaaagcaaaagaatactctccaaagat

SEQ ID NO: 352405 - DNA, 60 bp, Artificial
  Synthetic oligonucleotide
catgtcaaaaagaaagtcagacagccgccctgagacaagtcagaactatccagtggtagc

SEQ ID NO: 352406 - DNA, 59 bp, Artificial
  Synthetic oligonucleotide
catgtcaaaattgttctaaacagatgcaaagccctaggaatagtgcttagcaaaaagaa

SEQ ID NO: 352407 - DNA, 58 bp, Artificial
  Synthetic oligonucleotide
catgtcaaccacagcccctaattccagtctccatctgggaccgagtccgactttcggc

SEQ ID NO: 352408 - DNA, 56 bp, Artificial
  Synthetic oligonucleotide
catgtcaacgcttgtcaaaaattactacaaggaccatgcaacaagtactggtccat

SEQ ID NO: 352409 - DNA, 60 bp, Artificial
  Synthetic oligonucleotide
catgtcaagaatgtcaatatgcatgtcaggaccgaacaacaatgcatcagcagtggtgtg

SEQ ID NO: 352410 - DNA, 60 bp, Artificial
  Synthetic oligonucleotide
catgtcaaggtatgcataattggtacagtctctaaattttcccagggtgacacgctatta

SEQ ID NO: 352411 - DNA, 53 bp, Artificial
  Synthetic oligonucleotide
catgtcaatgcggaaccagaaacacccaacatggacgtcattggagaaagaat

SEQ ID NO: 352412 - DNA, 55 bp, Artificial
  Synthetic oligonucleotide
catgtcaatgctggcgtttgtcagtgcgtgcaatgacttctccgctagactgctc

SEQ ID NO: 352413 - DNA, 53 bp, Artificial
  Synthetic oligonucleotide
catgtcaattatggtctgacatgtctcttcagacacaaaggtctgaggaggac

SEQ ID NO: 352414 - DNA, 60 bp, Artificial
  Synthetic oligonucleotide
catgtcacaacaggaaatacgcgatagattttcaacagtaattgagcagcatgagaaaac

SEQ ID NO: 352415 - DNA, 55 bp, Artificial
  Synthetic oligonucleotide
catgtcaccatttccccatagtcatgaccttgcgcagaatccggaacgcgacggc

SEQ ID NO: 352416 - DNA, 60 bp, Artificial
  Synthetic oligonucleotide
catgtcacctcgagctctatgcagctagaactagctcaactgattcgccaaagtcgtaca

SEQ ID NO: 352417 - DNA, 55 bp, Artificial
  Synthetic oligonucleotide
catgtcactattacttctatgtgcaaatcaggaattacgtacataggtgacacac

SEQ ID NO: 352418 - DNA, 60 bp, Artificial
  Synthetic oligonucleotide
catgtcagttagctatagtgaatacaatagtgtatccagcatttggaatgcagcgaatgc

SEQ ID NO: 352419 - DNA, 60 bp, Artificial
  Synthetic oligonucleotide
catgtcatatatacatgaactgaagaagattggagggtaccgtggttggtacagagatgg

SEQ ID NO: 352420 - DNA, 55 bp, Artificial
  Synthetic oligonucleotide
catgtcatcttgcctaatggcaacttcatccaagcacagtgtttcggtacccgag

SEQ ID NO: 352421 - DNA, 60 bp, Artificial
  Synthetic oligonucleotide
catgtcatgggttggttgcactgagtaggcataggacggtatttagatactatactacgg

SEQ ID NO: 352422 - DNA, 54 bp, Artificial
  Synthetic oligonucleotide
catgtccacaaaacacggacctgactttaaccggttggtgtccgcttttgagga

SEQ ID NO: 352423 - DNA, 56 bp, Artificial
  Synthetic oligonucleotide
catgtccatacaaaacggcagttataggtgtcttcggagtaccgggttctggcaag

SEQ ID NO: 352424 - DNA, 58 bp, Artificial
  Synthetic oligonucleotide
catgtccatacattgggaggtcctcctttttaagaaatgtggtatggctgatcaaaaa

SEQ ID NO: 352425 - DNA, 55 bp, Artificial
  Synthetic oligonucleotide
catgtccatattgtctgaatcctgctgaagcaacaacatctgctttacaggccca

SEQ ID NO: 352426 - DNA, 59 bp, Artificial
  Synthetic oligonucleotide
catgtcccaagtatgtcaagcagggcactctgaagttggcaacaggaatgaggaacgta

SEQ ID NO: 352427 - DNA, 55 bp, Artificial
  Synthetic oligonucleotide
catgtcccatctatgtgtgtctctctgactactaagatgtaggctgggtcaaagt

SEQ ID NO: 352428 - DNA, 56 bp, Artificial
  Synthetic oligonucleotide
catgtccgccccgttctcaaagaatccctagtcaactgcccctatgccctttctaa

SEQ ID NO: 352429 - DNA, 51 bp, Artificial
  Synthetic oligonucleotide
catgtccgtaagtgtcacaaggtgggccctaagtgagcgacgacaaaccaa

SEQ ID NO: 352430 - DNA, 55 bp, Artificial
  Synthetic oligonucleotide
catgtcctcttgcttgaattctgttatggtcgattctttgtacatcacatctagc

SEQ ID NO: 352431 - DNA, 60 bp, Artificial
  Synthetic oligonucleotide
catgtcctgtgatagtgaatccatggttgctcataacttccttgacgtggttggatatct

SEQ ID NO: 352432 - DNA, 55 bp, Artificial
  Synthetic oligonucleotide
catgtcgctataattacaaccacgagcgtgtacggacattattagttttaagtac

SEQ ID NO: 352433 - DNA, 59 bp, Artificial
  Synthetic oligonucleotide
catgtcggaagacatgccgtcggtctttgatcgatgaggtgcctttgaaccctttatcc

SEQ ID NO: 352434 - DNA, 60 bp, Artificial
  Synthetic oligonucleotide
catgtcggcatgggactggacacacgcacccaaacctggatgtcggctgaaggagcttgg

SEQ ID NO: 352435 - DNA, 56 bp, Artificial
  Synthetic oligonucleotide
catgtcgtcttaaaccatcaagaagccgggaagtacgataaacatacggacaacgc

SEQ ID NO: 352436 - DNA, 55 bp, Artificial
  Synthetic oligonucleotide
catgtcgtggagaccgccggcatacaaccttgcccagagagaagagcactggtac

SEQ ID NO: 352437 - DNA, 59 bp, Artificial
  Synthetic oligonucleotide
catgtcgtttttcatacgatactaagaaagatccgagacaaacgcggtacatgtgctaa

SEQ ID NO: 352438 - DNA, 53 bp, Artificial
  Synthetic oligonucleotide
catgtctaccggaagcccgtaaaagacgttttagcagggataagcgttgcgtt

SEQ ID NO: 352439 - DNA, 58 bp, Artificial
  Synthetic oligonucleotide
catgtctactggacttggcccgcgacccgtgcttccgagcgggctcgacgagcttaaa

SEQ ID NO: 352440 - DNA, 52 bp, Artificial
  Synthetic oligonucleotide
catgtctatgacgcgttgtcctattgtatctccaagaaacagaacgggttgt

SEQ ID NO: 352441 - DNA, 60 bp, Artificial
  Synthetic oligonucleotide
catgtctattcaactttggctcacgatgatactcattggattgtatacgacgatgcacga

SEQ ID NO: 352442 - DNA, 53 bp, Artificial
  Synthetic oligonucleotide
catgtctcaaagtaattcacactagccctgttgtaacaaatcagaccatcctc

SEQ ID NO: 352443 - DNA, 50 bp, Artificial
  Synthetic oligonucleotide
catgtctcgccccacgacaaacccagaggtgggtccgcgatatggcaata

SEQ ID NO: 352444 - DNA, 52 bp, Artificial
  Synthetic oligonucleotide
catgtctctggcagcgaaacacatgtcaaacacctttcttgcaggtctcgcg

SEQ ID NO: 352445 - DNA, 60 bp, Artificial
  Synthetic oligonucleotide
catgtctcttgatgctccaggtatgtccatgactgttgatgaacggactaacagtgtttt

SEQ ID NO: 352446 - DNA, 55 bp, Artificial
  Synthetic oligonucleotide
catgtctgccctagatgtttcacagtacacatcctgatattgcccactatccctt

SEQ ID NO: 352447 - DNA, 60 bp, Artificial
  Synthetic oligonucleotide
catgtctgctggtctgcgtttgaacgtgtcccgggctgttgctggtcgtaaagatcagac

SEQ ID NO: 352448 - DNA, 55 bp, Artificial
  Synthetic oligonucleotide
catgtctgggagtcggctaaaccgttttgcggggagagcacactttacacccgta

SEQ ID NO: 352449 - DNA, 55 bp, Artificial
  Synthetic oligonucleotide
catgtctggtatgtattcctcccatatgaataaacgtgtgtcatgtgtcgtgtgc

SEQ ID NO: 352450 - DNA, 59 bp, Artificial
  Synthetic oligonucleotide
catgtcttatgagcttcttcttatgtgttacgtgtttcagcgaaatgtttaaaggtata

SEQ ID NO: 352451 - DNA, 60 bp, Artificial
  Synthetic oligonucleotide
catgtcttcgtatctgaaatctgcttggggtgagtccctatacatgagtcgcaggaggtt

SEQ ID NO: 352452 - DNA, 60 bp, Artificial
  Synthetic oligonucleotide
catgtcttttggggcagtactggcatggggaaatcaagacgtgcttggtatgaggccact

SEQ ID NO: 352453 - DNA, 56 bp, Artificial
  Synthetic oligonucleotide
catgtgaaatttataagaaagagttaagtcaaagggtgcctgaaagtaatataaga

SEQ ID NO: 352454 - DNA, 55 bp, Artificial
  Synthetic oligonucleotide
catgtgaacttatcgtatgggctgctagtgcagagactccacttcttgagtcagg

SEQ ID NO: 352455 - DNA, 55 bp, Artificial
  Synthetic oligonucleotide
catgtgaatataccaagtgcgttgaaaatacattcagaacatacgccaaaggtac

SEQ ID NO: 352456 - DNA, 55 bp, Artificial
  Synthetic oligonucleotide
catgtgaatatcaaggtaatacagtgtctggattccaacgcatgatggcaactcg

SEQ ID NO: 352457 - DNA, 60 bp, Artificial
  Synthetic oligonucleotide
catgtgaattgacagattcgagttggattgaacttgatgaaataggagaggacgttgctc

SEQ ID NO: 352458 - DNA, 55 bp, Artificial
  Synthetic oligonucleotide
catgtgacaaagttgctttacccttaatatgggaaggatatatagacctacctgg

SEQ ID NO: 352459 - DNA, 60 bp, Artificial
  Synthetic oligonucleotide
catgtgacaacacatagaggataatctgaattacaggcacgataactattgtaaagcctt

SEQ ID NO: 352460 - DNA, 60 bp, Artificial
  Synthetic oligonucleotide
catgtgacagttcatagtgacgtgtcgtactggattgagagtcgctacaatgacacgtgg

SEQ ID NO: 352461 - DNA, 60 bp, Artificial
  Synthetic oligonucleotide
catgtgaccatccacacatagactgcgcgttttacgaggtccctcccaagatctggtctc

SEQ ID NO: 352462 - DNA, 55 bp, Artificial
  Synthetic oligonucleotide
catgtgaggcccacagtgagatgggtggcagcctgttgcaatcttcctgaggttg

SEQ ID NO: 352463 - DNA, 60 bp, Artificial
  Synthetic oligonucleotide
catgtgatccattagggtgtagaatgtacgcactgcaccaagggacaaccattagaaaca

SEQ ID NO: 352464 - DNA, 60 bp, Artificial
  Synthetic oligonucleotide
catgtgatgttagaataacgcgtaatgccgcattcttaacgcagatagataccaagttaa

SEQ ID NO: 352465 - DNA, 54 bp, Artificial
  Synthetic oligonucleotide
catgtgcaacgctgatgtaattatccggacaaggttctcgtggaaacaacgtcg

SEQ ID NO: 352466 - DNA, 55 bp, Artificial
  Synthetic oligonucleotide
catgtgcaactacatggacaaagaattaatactaccagatgaattattattcaat

SEQ ID NO: 352467 - DNA, 51 bp, Artificial
  Synthetic oligonucleotide
catgtgcacctgataggtgtccaccgacagcattatatgtggcaggagtgc

SEQ ID NO: 352468 - DNA, 55 bp, Artificial
  Synthetic oligonucleotide
catgtgcaggagtgtggtgaaaatgtcttagagcggctcgaaacttggcttgctg

SEQ ID NO: 352469 - DNA, 55 bp, Artificial
  Synthetic oligonucleotide
catgtgcagtgattggtattttagcaagagcagcagaatattggggtggtgaatc

SEQ ID NO: 352470 - DNA, 60 bp, Artificial
  Synthetic oligonucleotide
catgtgcataccaacatttggaaccatatgatacgtaatcacttatttcacgccgtacaa

SEQ ID NO: 352471 - DNA, 57 bp, Artificial
  Synthetic oligonucleotide
catgtgcccaggagcaacatagagcacataaggaactttttccttaataggtttaaa

SEQ ID NO: 352472 - DNA, 60 bp, Artificial
  Synthetic oligonucleotide
catgtgcgcgcagctctaggccatgttagaattctattgacaagacgtcacttagctccg

SEQ ID NO: 352473 - DNA, 55 bp, Artificial
  Synthetic oligonucleotide
catgtgcggacaaaacgatatgttttgggtcgtatagagttagggtgtgcacagt

SEQ ID NO: 352474 - DNA, 60 bp, Artificial
  Synthetic oligonucleotide
catgtgcggtgatcttgattgtaattcttcatagatgggtttctacgtatatccctatat

SEQ ID NO: 352475 - DNA, 50 bp, Artificial
  Synthetic oligonucleotide
catgtgctcccacaggtccacgctccgggggacgggagtaggttcgacac

SEQ ID NO: 352476 - DNA, 60 bp, Artificial
  Synthetic oligonucleotide
catgtgcttagacatgatgctatcagctgcggggattaatgtgggaccaatatcaccaga

SEQ ID NO: 352477 - DNA, 55 bp, Artificial
  Synthetic oligonucleotide
catgtggaaactgctgcacagacagctaaggatctagtgataccagtagacggca

SEQ ID NO: 352478 - DNA, 59 bp, Artificial
  Synthetic oligonucleotide
catgtggaacaataacatggtagaacaaatgcatgaggatataatcagtttatgggatc

SEQ ID NO: 352479 - DNA, 55 bp, Artificial
  Synthetic oligonucleotide
catgtggaactttgaggccaaactcttcaggaagaagtatggttacttctgcggt

SEQ ID NO: 352480 - DNA, 60 bp, Artificial
  Synthetic oligonucleotide
catgtggaagcaatacgtcagcggtgacgatagtgcggtgcagaaggactttactttgcg

SEQ ID NO: 352481 - DNA, 55 bp, Artificial
  Synthetic oligonucleotide
catgtggaattgggctggcagccacctacgtggaaggaaatgagagtgcagcact

SEQ ID NO: 352482 - DNA, 60 bp, Artificial
  Synthetic oligonucleotide
catgtggagatgggaaatgttcacgagtatgatactgtggtgttgtacggacaatttggc

SEQ ID NO: 352483 - DNA, 60 bp, Artificial
  Synthetic oligonucleotide
catgtggagcacagatcaccggacatgtcaaaaatggttccatgaggatcgttgggccca

SEQ ID NO: 352484 - DNA, 54 bp, Artificial
  Synthetic oligonucleotide
catgtggaggaaacctcggttttatcggctgtataggtcccctgatgtccctcg

SEQ ID NO: 352485 - DNA, 55 bp, Artificial
  Synthetic oligonucleotide
catgtggagttatcaaccccaaatgggactggcagcaggcgcctcccaggactac

SEQ ID NO: 352486 - DNA, 60 bp, Artificial
  Synthetic oligonucleotide
catgtggatctgttggttatgtattaacaggtgatagtgttaagtttgtatatatgcacc

SEQ ID NO: 352487 - DNA, 60 bp, Artificial
  Synthetic oligonucleotide
catgtggattcacgactactatcattaatccgtgtatacattggcgataaatgcgtctaa

SEQ ID NO: 352488 - DNA, 60 bp, Artificial
  Synthetic oligonucleotide
catgtggccgacattgataagttaattgactatgctgcctcaggggatccaacatcaccc

SEQ ID NO: 352489 - DNA, 60 bp, Artificial
  Synthetic oligonucleotide
catgtgggagagagatcttatggttgttgagtcacgtgcacaagggatagacaccattgc

SEQ ID NO: 352490 - DNA, 59 bp, Artificial
  Synthetic oligonucleotide
catgtgggatccattagtaaacgagttcccagatacggttcatggtctacggtgtatgc

SEQ ID NO: 352491 - DNA, 59 bp, Artificial
  Synthetic oligonucleotide
catgtggggcataaatcacccacccaccgatactacacagacaaatttgtacacaagga

SEQ ID NO: 352492 - DNA, 60 bp, Artificial
  Synthetic oligonucleotide
catgtgggtggcaatggtagagatggattttcagctatgttgcttagatcctactttaca

SEQ ID NO: 352493 - DNA, 58 bp, Artificial
  Synthetic oligonucleotide
catgtggtcccacagaatgtaggacttttttcctaacgcaaggtgccttactgaatga

SEQ ID NO: 352494 - DNA, 57 bp, Artificial
  Synthetic oligonucleotide
catgtggtcgcctttgtctcatgggcctctttgggagcaattcgtttgtcataccca

SEQ ID NO: 352495 - DNA, 55 bp, Artificial
  Synthetic oligonucleotide
catgtggtgcgctggttttcaacaaggcttaacttctcgcaaactcgtaggggac

SEQ ID NO: 352496 - DNA, 55 bp, Artificial
  Synthetic oligonucleotide
catgtggtgtgatcgatgtgcgtgcgtcagaattaattggatgttcgcccttcag

SEQ ID NO: 352497 - DNA, 55 bp, Artificial
  Synthetic oligonucleotide
catgtggtgtgggatgtagggttacaatcaacaatatctatggttgtaccatggg

SEQ ID NO: 352498 - DNA, 60 bp, Artificial
  Synthetic oligonucleotide
catgtggttggtgtacgatgctcagccgaccggcaattcaccggaggtgaaggacatctt

SEQ ID NO: 352499 - DNA, 58 bp, Artificial
  Synthetic oligonucleotide
catgtgtaaagttgaccccactctgtatcactttaaactgtacaagtatcaatggtac

SEQ ID NO: 352500 - DNA, 60 bp, Artificial
  Synthetic oligonucleotide
catgtgtaatgcttctagccattgctatgggtcttattttcatgtgtgtgaaaaacggga

SEQ ID NO: 352501 - DNA, 55 bp, Artificial
  Synthetic oligonucleotide
catgtgtaccctcatggccatggaccttggtgaattgtgtgaagatacaatcacg

SEQ ID NO: 352502 - DNA, 60 bp, Artificial
  Synthetic oligonucleotide
catgtgtagcaaaggatattgacgtagacctactgatggcaagacatgactacttcggga

SEQ ID NO: 352503 - DNA, 60 bp, Artificial
  Synthetic oligonucleotide
catgtgtatccatctaaagattttatgcagatctcagcagtaacatgactctcaacaacc

SEQ ID NO: 352504 - DNA, 60 bp, Artificial
  Synthetic oligonucleotide
catgtgtcaagtatatgatggtaatagttctagctttgagcaccaagaacccctagagga

SEQ ID NO: 352505 - DNA, 60 bp, Artificial
  Synthetic oligonucleotide
catgtgtcacccagacagtcgacttcagcttggaccctactttcaccattgagacaacga

SEQ ID NO: 352506 - DNA, 56 bp, Artificial
  Synthetic oligonucleotide
catgtgtgaaactactaggagagttggcagagtgaccggtagtaacgggaaattat

SEQ ID NO: 352507 - DNA, 59 bp, Artificial
  Synthetic oligonucleotide
catgtgtggtatttctcagatgaaaccttaatacatgggtttgtacgtatatacctgta

SEQ ID NO: 352508 - DNA, 53 bp, Artificial
  Synthetic oligonucleotide
catgtgtgtagatttaacaccacaggaatgtgtaaggactgtagaatagaaat

SEQ ID NO: 352509 - DNA, 60 bp, Artificial
  Synthetic oligonucleotide
catgtgtgtgcttggtcagcatatctgagacgatgttccgctgtcccagaccagtccagc

SEQ ID NO: 352510 - DNA, 55 bp, Artificial
  Synthetic oligonucleotide
catgtgttaccatataaggccgtgacagcccatggctactgtggctctgtcgtgg

SEQ ID NO: 352511 - DNA, 60 bp, Artificial
  Synthetic oligonucleotide
catgtgttatcatctgttgagttcaacttgaccaagatgttcgataatctccctcaatca

SEQ ID NO: 352512 - DNA, 55 bp, Artificial
  Synthetic oligonucleotide
catgttaaagggggagtggcaatactgggttgacctggattctgcagaccaccac

SEQ ID NO: 352513 - DNA, 56 bp, Artificial
  Synthetic oligonucleotide
catgttaacagacctgcatgtgtgcactacggaggcccggcatctcgcccctcgta

SEQ ID NO: 352514 - DNA, 52 bp, Artificial
  Synthetic oligonucleotide
catgttaacccttgggactttgtctccctttggtaggctgtttgtaccgacc

SEQ ID NO: 352515 - DNA, 55 bp, Artificial
  Synthetic oligonucleotide
catgttaactaaacgtctaaacctagctaaataggtcgacccagaagctgttatc

SEQ ID NO: 352516 - DNA, 60 bp, Artificial
  Synthetic oligonucleotide
catgttaaggtcctgcgtgttattcctcatgctggtcatagacctgtatgcggccaggat

SEQ ID NO: 352517 - DNA, 55 bp, Artificial
  Synthetic oligonucleotide
catgttaataaagatactgtctttacccctgttactagttctacgccgccagttg

SEQ ID NO: 352518 - DNA, 59 bp, Artificial
  Synthetic oligonucleotide
catgttacaacatgtaaggcatgtggatcagaagcagtacctaagcacagggttgactg

SEQ ID NO: 352519 - DNA, 59 bp, Artificial
  Synthetic oligonucleotide
catgttaccgactcatgcctattttgacgacacttactaccaggctttggaagagctag

SEQ ID NO: 352520 - DNA, 60 bp, Artificial
  Synthetic oligonucleotide
catgttactgaaatagcatgccaggctatggccaatagctctgagcgtcaaactgaaaag

SEQ ID NO: 352521 - DNA, 56 bp, Artificial
  Synthetic oligonucleotide
catgttagagagggaacttgtccgaaaaacgagatttctcccagttgctggtggaa

SEQ ID NO: 352522 - DNA, 60 bp, Artificial
  Synthetic oligonucleotide
catgttaggcgagagtgatagacatgttgacacaacacaatttctaccatataccggcta

SEQ ID NO: 352523 - DNA, 55 bp, Artificial
  Synthetic oligonucleotide
catgttagggtagcaatttcccactattcagcacagttgatgacattggatattg

SEQ ID NO: 352524 - DNA, 55 bp, Artificial
  Synthetic oligonucleotide
catgttatgaagcgtgtactatctgtagagcggaacacattgatgatcgacatcg

SEQ ID NO: 352525 - DNA, 60 bp, Artificial
  Synthetic oligonucleotide
catgttatgggagccttacctggaatggtgtggcaagacagagacgtatacctgcagggt

SEQ ID NO: 352526 - DNA, 55 bp, Artificial
  Synthetic oligonucleotide
catgttattcaagcccacgttgatggaacttatcacgcagcggaccttccttttc

SEQ ID NO: 352527 - DNA, 59 bp, Artificial
  Synthetic oligonucleotide
catgttattgactcgttcggttcacttagcacagggtgccacgtcctaaaagctggcac

SEQ ID NO: 352528 - DNA, 59 bp, Artificial
  Synthetic oligonucleotide
catgttcaatgggttacggtctatcagttctagcgaatttgttagatccgtcaatggtc

SEQ ID NO: 352529 - DNA, 60 bp, Artificial
  Synthetic oligonucleotide
catgttcacgtaagtgacgtgatgacgcgcgctacgcgcgctgccttcggcagtcacacg

SEQ ID NO: 352530 - DNA, 52 bp, Artificial
  Synthetic oligonucleotide
catgttcagatttgaactcatgcggcggctcccgccagattttggcaagatt

SEQ ID NO: 352531 - DNA, 60 bp, Artificial
  Synthetic oligonucleotide
catgttccgaaccagtttaccgcatatataatagattgcaaggttacatagaagctgtac

SEQ ID NO: 352532 - DNA, 54 bp, Artificial
  Synthetic oligonucleotide
catgttcctcctgttggtccccacgttactagattaaggcgagctgtgcattta

SEQ ID NO: 352533 - DNA, 55 bp, Artificial
  Synthetic oligonucleotide
catgttcgacaacgagcccagcactgccacggttaagaacgatctccgggatcgt

SEQ ID NO: 352534 - DNA, 60 bp, Artificial
  Synthetic oligonucleotide
catgttcgacaatgagcctagtaccgccactgtgaagaacgatctccgagatcgtttcca

SEQ ID NO: 352535 - DNA, 60 bp, Artificial
  Synthetic oligonucleotide
catgttcgactcgtctgtcctctgcgagtgctatgacgcgggctgtgcttggtatgaact

SEQ ID NO: 352536 - DNA, 60 bp, Artificial
  Synthetic oligonucleotide
catgttcgataacgagcctagtactgccacggtgaagaacgatctccgtgatcgttacca

SEQ ID NO: 352537 - DNA, 60 bp, Artificial
  Synthetic oligonucleotide
catgttcgccgttagaatgtagaacatttttcctcacacagggctcattacttaatgaca

SEQ ID NO: 352538 - DNA, 60 bp, Artificial
  Synthetic oligonucleotide
catgttcgcgtgcgcctattagtgcgtcagtatggagccgtactgtcgagcctagagatt

SEQ ID NO: 352539 - DNA, 57 bp, Artificial
  Synthetic oligonucleotide
catgttcggtgacgttggccttaattcttcatacatgggtttgtacgtatatcctta

SEQ ID NO: 352540 - DNA, 60 bp, Artificial
  Synthetic oligonucleotide
catgttctaccattatctgggtaggagtgggtatacagtgcatgtgcagtgtaatgctac

SEQ ID NO: 352541 - DNA, 55 bp, Artificial
  Synthetic oligonucleotide
catgttctagatggcgctataatagagaacggtaatatagcgacccgtgatgtcg

SEQ ID NO: 352542 - DNA, 60 bp, Artificial
  Synthetic oligonucleotide
catgttcttaaagctggtacagtgaatcaattgattcaattcgcctctaacgaccttcag

SEQ ID NO: 352543 - DNA, 60 bp, Artificial
  Synthetic oligonucleotide
catgttgaaggccagattcttctttttgatccttatgacgatgagccttcagcccatttc

SEQ ID NO: 352544 - DNA, 59 bp, Artificial
  Synthetic oligonucleotide
catgttgactatgtttgagacccgattgaccgctcttacaactctccccagtatatcgg

SEQ ID NO: 352545 - DNA, 56 bp, Artificial
  Synthetic oligonucleotide
catgttgagaactgaatcgggggctctcaaaactctacggaatggggtgctcgggg

SEQ ID NO: 352546 - DNA, 56 bp, Artificial
  Synthetic oligonucleotide
catgttgatgccatacttgcgtatcgtcgtcaaaagttgcctgagccgacagatga

SEQ ID NO: 352547 - DNA, 60 bp, Artificial
  Synthetic oligonucleotide
catgttgattaagtgaggaccagactaagcatctggtatccaatcttagttagcatgtag

SEQ ID NO: 352548 - DNA, 60 bp, Artificial
  Synthetic oligonucleotide
catgttgcccccatccaacagagctgcccctgcttttacagcagcaccaagactgaaatt

SEQ ID NO: 352549 - DNA, 60 bp, Artificial
  Synthetic oligonucleotide
catgttgcccccatcgagcatacaggccccagcctttactgcagctcccaagctaaaatt

SEQ ID NO: 352550 - DNA, 55 bp, Artificial
  Synthetic oligonucleotide
catgttggacggtagagccatgacagacagtgactacagagtgtttgagtttgag

SEQ ID NO: 352551 - DNA, 58 bp, Artificial
  Synthetic oligonucleotide
catgttggatcttaaaatttctcaatctaaaattgcacttcccaagaatacagttgga

SEQ ID NO: 352552 - DNA, 59 bp, Artificial
  Synthetic oligonucleotide
catgttggcgaatcctttcttaccattatatgccctattgtcaccaggtgtcatcctgg

SEQ ID NO: 352553 - DNA, 52 bp, Artificial
  Synthetic oligonucleotide
catgttggggtaactttttccggcgttagtaaacatgtgagcttatatgcgc

SEQ ID NO: 352554 - DNA, 55 bp, Artificial
  Synthetic oligonucleotide
catgttggtaaggtcatgtgcctttctgacataacacgtggcaatggtattaccc

SEQ ID NO: 352555 - DNA, 60 bp, Artificial
  Synthetic oligonucleotide
catgttgtaatgcgtcctgaacttgttgcagcgttagatagatacttctcagaaatcata

SEQ ID NO: 352556 - DNA, 55 bp, Artificial
  Synthetic oligonucleotide
catgttgtcagtgtggaatagggtctggatagaggaaaacccatggatggaggac

SEQ ID NO: 352557 - DNA, 60 bp, Artificial
  Synthetic oligonucleotide
catgttgtcatgcaatacatgttcgtaccacctggcgcacccctcccagaaaagagagat

SEQ ID NO: 352558 - DNA, 60 bp, Artificial
  Synthetic oligonucleotide
catgttgtctgggatattggtctgcaatccaccatagtaatgacaataccatggacatca

SEQ ID NO: 352559 - DNA, 53 bp, Artificial
  Synthetic oligonucleotide
catgttgtgaagggtaagtgtgttcttttcgaaacctacttaagcacccaccc

SEQ ID NO: 352560 - DNA, 55 bp, Artificial
  Synthetic oligonucleotide
catgttgtgtataaccatcaggaggaggctaaatatgccaaccatactgagaatg

SEQ ID NO: 352561 - DNA, 57 bp, Artificial
  Synthetic oligonucleotide
catgtttaaacctatttaaataagtcgtcccagaagctgtcagtgaagtcgtccaga

SEQ ID NO: 352562 - DNA, 54 bp, Artificial
  Synthetic oligonucleotide
catgtttacgtggaacgttgatcgctacagaatgcgtactcggagatgcatata

SEQ ID NO: 352563 - DNA, 60 bp, Artificial
  Synthetic oligonucleotide
catgtttattggcaggcattacagaaagaaaagggcgctgtcactgtatgctgtgcgaac

SEQ ID NO: 352564 - DNA, 60 bp, Artificial
  Synthetic oligonucleotide
catgtttcatacttctggccattgcaatgggccttgtcttcatatgtgtgaagaacggaa

SEQ ID NO: 352565 - DNA, 58 bp, Artificial
  Synthetic oligonucleotide
catgtttcatcagggtggcctcgtgtcctagaggatatcttaacggcaattaagtacc

SEQ ID NO: 352566 - DNA, 58 bp, Artificial
  Synthetic oligonucleotide
catgtttcggaagcccagaatgtaccggatgtacagaagccctgatatccctaagggc

SEQ ID NO: 352567 - DNA, 60 bp, Artificial
  Synthetic oligonucleotide
catgtttctatgctgacgaatagactaacgacagcaaatgcttcatcagttcgagccatt

SEQ ID NO: 352568 - DNA, 60 bp, Artificial
  Synthetic oligonucleotide
catgtttgacaatgaaccgagcacagcaacggtgaagaacatgcatcgtgaccgttatca

SEQ ID NO: 352569 - DNA, 55 bp, Artificial
  Synthetic oligonucleotide
catgtttgaggaggtgttcaacacggaattcggcttccacccgaacgctgagtgg

SEQ ID NO: 352570 - DNA, 53 bp, Artificial
  Synthetic oligonucleotide
catgtttgggtaagactttacccaaccgaaacaggtcatatattaagttgaaa

SEQ ID NO: 352571 - DNA, 55 bp, Artificial
  Synthetic oligonucleotide
catgttttagatgagagagcaagaaaggtgctagaggaagttaacgaatgcttac

SEQ ID NO: 352572 - DNA, 55 bp, Artificial
  Synthetic oligonucleotide
catgttttatgtctacttcgaggtggttgatggattctgtccttcaagtgactct

SEQ ID NO: 352573 - DNA, 60 bp, Artificial
  Synthetic oligonucleotide
cattaaaactctccaattaaatgttgagaatagtgtgaatcttctgaagagaagcatcaa

SEQ ID NO: 352574 - DNA, 56 bp, Artificial
  Synthetic oligonucleotide
cattaaaactgtaggtgctctacaattgtgaaggtgaagtgaaggcgtttcgggct

SEQ ID NO: 352575 - DNA, 59 bp, Artificial
  Synthetic oligonucleotide
cattaaaatgggtcatgtaaaatattgccatgaattcaattggagtaacagcgctagac

SEQ ID NO: 352576 - DNA, 57 bp, Artificial
  Synthetic oligonucleotide
cattaaaccaaccggtaccagtcgcaatgccatcactactcttggaaagttcggtca

SEQ ID NO: 352577 - DNA, 60 bp, Artificial
  Synthetic oligonucleotide
cattaaaccaccttcaggcaagaatgtcacatacgaatgtaagtgtggtgactacagcac

SEQ ID NO: 352578 - DNA, 57 bp, Artificial
  Synthetic oligonucleotide
cattaaactgtcagaacctgtttggttaacacagagagattaaccgcaagacgaata

SEQ ID NO: 352579 - DNA, 56 bp, Artificial
  Synthetic oligonucleotide
cattaaagaagagaatatcttattacaccatatgtgtcagtctagatgctgtggcc

SEQ ID NO: 352580 - DNA, 59 bp, Artificial
  Synthetic oligonucleotide
cattaaagaggagaggaacgtcttaactcagcaacaacagtcggtgtgtgccgcctctg

SEQ ID NO: 352581 - DNA, 52 bp, Artificial
  Synthetic oligonucleotide
cattaaagatccctctaaacaacccgacttccaaatacccggagcccgtgac

SEQ ID NO: 352582 - DNA, 52 bp, Artificial
  Synthetic oligonucleotide
cattaaagtcaagatgtccactaagataattatgtttacctaatgaacgggc

SEQ ID NO: 352583 - DNA, 50 bp, Artificial
  Synthetic oligonucleotide
cattaaagtgatctccctgtaatgtcctgctttaatacagcatgattcca

SEQ ID NO: 352584 - DNA, 56 bp, Artificial
  Synthetic oligonucleotide
cattaaatcccaccggatcttattattatactccatactcatatagcctttaatgg

SEQ ID NO: 352585 - DNA, 54 bp, Artificial
  Synthetic oligonucleotide
cattaaatcttaggagtgaaaatgaaagtgtggttagttactttaggcctctgt

SEQ ID NO: 352586 - DNA, 57 bp, Artificial
  Synthetic oligonucleotide
cattaaatgcactggtaagagagttaggtgtaagattaatacgataaattgtattac

SEQ ID NO: 352587 - DNA, 58 bp, Artificial
  Synthetic oligonucleotide
cattaaatggttacattatcataatactcaattacaattgactcgtcgctgacttttg

SEQ ID NO: 352588 - DNA, 50 bp, Artificial
  Synthetic oligonucleotide
cattaaatgttgcgtttaatacaactgaagacaaagaggtcagtatgtta

SEQ ID NO: 352589 - DNA, 56 bp, Artificial
  Synthetic oligonucleotide
cattaaattcggtcatagatacaatcgtcacagaagcattgaaattgttcttcccg

SEQ ID NO: 352590 - DNA, 60 bp, Artificial
  Synthetic oligonucleotide
cattaacaagctgtacattttctaaagagtatgcatggaaagacttcttgaatgggattc

SEQ ID NO: 352591 - DNA, 55 bp, Artificial
  Synthetic oligonucleotide
cattaaccatgaagaccatcattattctgagctacattttctgtctggcttttgg

SEQ ID NO: 352592 - DNA, 55 bp, Artificial
  Synthetic oligonucleotide
cattaaccgtgaaccatccacaagacgccttgtttgtggtttggaacccacagac

SEQ ID NO: 352593 - DNA, 53 bp, Artificial
  Synthetic oligonucleotide
cattaacgcctacaccacgggcccctgtaccccccttcctgcaccgaactaca

SEQ ID NO: 352594 - DNA, 55 bp, Artificial
  Synthetic oligonucleotide
cattaacggtcagattggggtgccaaacgccgtgctagacgccctccgtcgagcc

SEQ ID NO: 352595 - DNA, 55 bp, Artificial
  Synthetic oligonucleotide
cattaactcagccaattagtttgttgcttaagggaatgactacaatgtggctggc

SEQ ID NO: 352596 - DNA, 60 bp, Artificial
  Synthetic oligonucleotide
cattaactctctcggccacaatgtgcttagcaaatcagaaccctcataccttcgtactgc

SEQ ID NO: 352597 - DNA, 59 bp, Artificial
  Synthetic oligonucleotide
cattaactgattggtcaggatacagtggaagttttgtccaacatcctgaattaacagga

SEQ ID NO: 352598 - DNA, 56 bp, Artificial
  Synthetic oligonucleotide
cattaagaagggtgccctgtatattgtaattgcccctggcaatgggttagatttta

SEQ ID NO: 352599 - DNA, 55 bp, Artificial
  Synthetic oligonucleotide
cattaagacgaggaaccatacgaatacagttatgttcttcttggtccgtgatagg

SEQ ID NO: 352600 - DNA, 59 bp, Artificial
  Synthetic oligonucleotide
cattaagataactggcaactgtactatcgaacagcttatcatgtacattgagttagttg

SEQ ID NO: 352601 - DNA, 53 bp, Artificial
  Synthetic oligonucleotide
cattaagatgcccaacgggtctgccgagaaggtgcccgctggtgacccatacg

SEQ ID NO: 352602 - DNA, 52 bp, Artificial
  Synthetic oligonucleotide
cattaagcaactcaataagtttagtgacagggaactacgggacatcgggatc

SEQ ID NO: 352603 - DNA, 60 bp, Artificial
  Synthetic oligonucleotide
cattaagcaactccaggcaagagtcctggctatagaaagatacctacaggatcaacagct

SEQ ID NO: 352604 - DNA, 60 bp, Artificial
  Synthetic oligonucleotide
cattaagctgaagaatcacacaaacagtgtgctattctggttgactcgtgacaggcgacc

SEQ ID NO: 352605 - DNA, 57 bp, Artificial
  Synthetic oligonucleotide
cattaaggaacttaaggttgtatctgacgggttaaaccgaatgagtgcagctgttga

SEQ ID NO: 352606 - DNA, 55 bp, Artificial
  Synthetic oligonucleotide
cattaagggtatttctgtccaaataatttgagctatgtcccctgcgcatgttagc

SEQ ID NO: 352607 - DNA, 58 bp, Artificial
  Synthetic oligonucleotide
cattaagtcttcgaatggagaccaaatcatggaaccaggtgacaagttaagtggccta

SEQ ID NO: 352608 - DNA, 60 bp, Artificial
  Synthetic oligonucleotide
cattaataagctgggaaatggggcaagcaccgagtccatacaataccagagtagaatgtg

SEQ ID NO: 352609 - DNA, 60 bp, Artificial
  Synthetic oligonucleotide
cattaatcattatgtacggcagacgtagttacagaccacgtagatcatatgctagagcag

SEQ ID NO: 352610 - DNA, 60 bp, Artificial
  Synthetic oligonucleotide
cattaatgaccggcgtgttgacttaccatcttttctagctcaattgcgaatctttgcatt

SEQ ID NO: 352611 - DNA, 57 bp, Artificial
  Synthetic oligonucleotide
cattaatgagttacaaatgtacaataataaattggaacgtgatttacaatcgaagat

SEQ ID NO: 352612 - DNA, 60 bp, Artificial
  Synthetic oligonucleotide
cattaatgtgaagacaacgtctattgaccatacgatggatccaagtgataaactcagtgg

SEQ ID NO: 352613 - DNA, 51 bp, Artificial
  Synthetic oligonucleotide
cattaattcaagagtgattctataattgcctgcctcctgaccccgatccta

SEQ ID NO: 352614 - DNA, 60 bp, Artificial
  Synthetic oligonucleotide
cattaatttcaatggtgaattgattactcaagatctgacctgtggttccctgttcttgga

SEQ ID NO: 352615 - DNA, 51 bp, Artificial
  Synthetic oligonucleotide
cattacaaaatgtgggatcctttagtaaacgagtttcccgaaaccgttcac

SEQ ID NO: 352616 - DNA, 55 bp, Artificial
  Synthetic oligonucleotide
cattacaacttgctctcattacttgtaacaaagggagggaaagtatgggaggaca

SEQ ID NO: 352617 - DNA, 60 bp, Artificial
  Synthetic oligonucleotide
cattacaagaaatcagcctgaatggtttagaaacatcttgagcatcgcacctataatgtt

SEQ ID NO: 352618 - DNA, 54 bp, Artificial
  Synthetic oligonucleotide
cattacaatgccaggttagagatccacgttactggtatttagctgcggaactta

SEQ ID NO: 352619 - DNA, 55 bp, Artificial
  Synthetic oligonucleotide
cattacaatgcccactacgggtacacagaacacagacggttacgttaactgggac

SEQ ID NO: 352620 - DNA, 60 bp, Artificial
  Synthetic oligonucleotide
cattacacacgtcatgtggaggaatttgaattatcttttatcttgcaattgtgcaaggtt

SEQ ID NO: 352621 - DNA, 55 bp, Artificial
  Synthetic oligonucleotide
cattacacccgcattagtcgaccctaaaggcgcgttacacgagaaagtagccatc

SEQ ID NO: 352622 - DNA, 60 bp, Artificial
  Synthetic oligonucleotide
cattacactttacatacaagtattgcagcagtataggtgtctagaagttataaacagtgt

SEQ ID NO: 352623 - DNA, 56 bp, Artificial
  Synthetic oligonucleotide
cattacagaaaacactaccacgcaaccctagataacgaagttctaccagggcctca

SEQ ID NO: 352624 - DNA, 55 bp, Artificial
  Synthetic oligonucleotide
cattacagaagcagaactgaccggctatggcactgtcacgatggaatgctctccg

SEQ ID NO: 352625 - DNA, 55 bp, Artificial
  Synthetic oligonucleotide
cattacagaagtgaatctgatatgatcgatcatttttcagctaagatattagagg

SEQ ID NO: 352626 - DNA, 60 bp, Artificial
  Synthetic oligonucleotide
cattacagagcagacgggcagctgtgtctgcactggagaccaaacttggtgaactcaaga

SEQ ID NO: 352627 - DNA, 53 bp, Artificial
  Synthetic oligonucleotide
cattacagatggcagtgtggcaatcggctaccggtaaggtttatctgcctcct

SEQ ID NO: 352628 - DNA, 60 bp, Artificial
  Synthetic oligonucleotide
cattacatactaaacgataaatacaaggtcgtacaagagcgcgcagatatggggattgaa

SEQ ID NO: 352629 - DNA, 55 bp, Artificial
  Synthetic oligonucleotide
cattacatcaaagaaagttcatgaatgtgggtatccaactatacacacccctgca

SEQ ID NO: 352630 - DNA, 55 bp, Artificial
  Synthetic oligonucleotide
cattacatctggctcctccaacgtctccgtggcgcgggacgatacggggaagagg

SEQ ID NO: 352631 - DNA, 60 bp, Artificial
  Synthetic oligonucleotide
cattacatcttctgtaacatctatgtctagtccatttattcctatatctccactaactcc

SEQ ID NO: 352632 - DNA, 56 bp, Artificial
  Synthetic oligonucleotide
cattacatggaggttatcgctagaaatcatgatcttgactgggttcgagcagaggt

SEQ ID NO: 352633 - DNA, 58 bp, Artificial
  Synthetic oligonucleotide
cattacattctcggagtattttcggactcacggtaatacctgccgaactgttcacata

SEQ ID NO: 352634 - DNA, 55 bp, Artificial
  Synthetic oligonucleotide
cattaccaaaggtgcgacttacccggtgctgattgacagcattgcggtggaagtg

SEQ ID NO: 352635 - DNA, 55 bp, Artificial
  Synthetic oligonucleotide
cattaccaatcaacagaactatctcatttgaaccatgaacagtttgccaattggg

SEQ ID NO: 352636 - DNA, 55 bp, Artificial
  Synthetic oligonucleotide
cattaccacacaggtggcagatgagtccacgacgttcacgtgcccagcgtcgcag

SEQ ID NO: 352637 - DNA, 59 bp, Artificial
  Synthetic oligonucleotide
cattaccacacgcggtggtggttgatgattatgtaatcgcgattaagcgcaacccgaac

SEQ ID NO: 352638 - DNA, 51 bp, Artificial
  Synthetic oligonucleotide
cattaccacctaaccaaacattaaaacgtccataaccttttactttaggca

SEQ ID NO: 352639 - DNA, 60 bp, Artificial
  Synthetic oligonucleotide
cattaccagacgtgatgaagaggattgcaccaatgctgtacaaatcttctaagtcacggg

SEQ ID NO: 352640 - DNA, 58 bp, Artificial
  Synthetic oligonucleotide
cattaccatagtgagcttccaggttgggaaacctggactgggcctatactacctgata

SEQ ID NO: 352641 - DNA, 55 bp, Artificial
  Synthetic oligonucleotide
cattaccatcgggtacaaatatgattggtaacgtaggtgtcacgaaactaccacc

SEQ ID NO: 352642 - DNA, 56 bp, Artificial
  Synthetic oligonucleotide
cattaccatgttgcaatgacgctttatttaggaacgaatttcgtattcttgcgaag

SEQ ID NO: 352643 - DNA, 51 bp, Artificial
  Synthetic oligonucleotide
cattacccgcctcaacagtgcaaagttgtgccggcaagtgaggtatgtggc

SEQ ID NO: 352644 - DNA, 50 bp, Artificial
  Synthetic oligonucleotide
cattacctagatcaaccgttatgcttaatggatcctatcgtgatatcagg

SEQ ID NO: 352645 - DNA, 60 bp, Artificial
  Synthetic oligonucleotide
cattacctgtggtaccagtaccacaacctgctacacagcgcaatttgcgcttaccgaatg

SEQ ID NO: 352646 - DNA, 58 bp, Artificial
  Synthetic oligonucleotide
cattacgagactgatagcacatgtttgtctgatcacatacagtattggaaactgattc

SEQ ID NO: 352647 - DNA, 55 bp, Artificial
  Synthetic oligonucleotide
cattacgattgcgaatgtacttaaatcaatcatctgttagtcggtcggaagttgc

SEQ ID NO: 352648 - DNA, 60 bp, Artificial
  Synthetic oligonucleotide
cattacgcaggacgatctagcaggaatcacagtaatagacattactgtctgtagagaagt

SEQ ID NO: 352649 - DNA, 60 bp, Artificial
  Synthetic oligonucleotide
cattacgccggccaactcatgtctctagacatcaacacagaacaaatgtgcttggaggat

SEQ ID NO: 352650 - DNA, 55 bp, Artificial
  Synthetic oligonucleotide
cattacggccgcctagttgtatgctactcaccgccaagcggcgctcctcccgcta

SEQ ID NO: 352651 - DNA, 50 bp, Artificial
  Synthetic oligonucleotide
cattacgggtggggggataagcatggtcggacgatccagacagagttatc

SEQ ID NO: 352652 - DNA, 60 bp, Artificial
  Synthetic oligonucleotide
cattacgtattgaatctgcggtttgtgaatctgtgcttgcggacgcttctgaaactttgt

SEQ ID NO: 352653 - DNA, 60 bp, Artificial
  Synthetic oligonucleotide
cattacgtgcaaatggctgtcatcaagctaggggcgcttactggcacctatatctatgac

SEQ ID NO: 352654 - DNA, 60 bp, Artificial
  Synthetic oligonucleotide
cattactaagaggtaagaccgccgctacgagtttctgtcagcagacgaatcagagaacag

SEQ ID NO: 352655 - DNA, 60 bp, Artificial
  Synthetic oligonucleotide
cattactatacactgtttgcagatgatgcacctagatttagctccactggacaatgggaa

SEQ ID NO: 352656 - DNA, 55 bp, Artificial
  Synthetic oligonucleotide
cattactcaatatgctaccctatgacagacacagaagaccaacacctaaactcac

SEQ ID NO: 352657 - DNA, 55 bp, Artificial
  Synthetic oligonucleotide
cattactcgaccaactgaacagagttttgaatgcacgtaacatgaacgacggagc

SEQ ID NO: 352658 - DNA, 55 bp, Artificial
  Synthetic oligonucleotide
cattactggatcgactctctcattagacttctttacactacaaacatggatacac

SEQ ID NO: 352659 - DNA, 60 bp, Artificial
  Synthetic oligonucleotide
cattactgtacacctttggactcaaatcaagatgaccacacagataattgtgtggaccca

SEQ ID NO: 352660 - DNA, 58 bp, Artificial
  Synthetic oligonucleotide
cattactgtagacctttgggctaaggtcgagatgtccacacaaatagttgtgtggacc

SEQ ID NO: 352661 - DNA, 50 bp, Artificial
  Synthetic oligonucleotide
cattactgtattgcagactcacactgtcttgaggagtatgaaattgtgaa

SEQ ID NO: 352662 - DNA, 55 bp, Artificial
  Synthetic oligonucleotide
cattactgtctgtcctttgcccagagatgtacagccgtttagagcgaagatagtt

SEQ ID NO: 352663 - DNA, 56 bp, Artificial
  Synthetic oligonucleotide
cattacttactggttgatccgagatagaaggcccaataaggaccccctgacatttg

SEQ ID NO: 352664 - DNA, 58 bp, Artificial
  Synthetic oligonucleotide
cattacttaggcgaacgacaaagtgaggtcacctcggtctaattctcctatgtagtgc

SEQ ID NO: 352665 - DNA, 60 bp, Artificial
  Synthetic oligonucleotide
cattacttgtccaaatgactagtgtactgcaaggtattgtcaatacagcaaggagggaca

SEQ ID NO: 352666 - DNA, 55 bp, Artificial
  Synthetic oligonucleotide
cattactttggatcggcatacgtcaagcgaggtgcagttaagggccagaagagag

SEQ ID NO: 352667 - DNA, 55 bp, Artificial
  Synthetic oligonucleotide
cattactttgtaaggggtggtatgccctcagggtgttctggtaccagtatcttta

SEQ ID NO: 352668 - DNA, 55 bp, Artificial
  Synthetic oligonucleotide
cattagaaacactgtaagtaatgacttcgagttattcatcccggcctaccatgac

SEQ ID NO: 352669 - DNA, 55 bp, Artificial
  Synthetic oligonucleotide
cattagaaagcgcgacttttgaagacgtactggagtgtaatgttgaagctcaacg

SEQ ID NO: 352670 - DNA, 60 bp, Artificial
  Synthetic oligonucleotide
cattagaagcagcgaattcacaaacttcaacctcgtatgaaagcgagatatttggacagg

SEQ ID NO: 352671 - DNA, 54 bp, Artificial
  Synthetic oligonucleotide
cattagaagggatcagattgctactctagcaatgaggagttgcaagatcaccaa

SEQ ID NO: 352672 - DNA, 60 bp, Artificial
  Synthetic oligonucleotide
cattagacaaagaaattgaaccagagaaactgcagagtaccatggcagaatcatttggag

SEQ ID NO: 352673 - DNA, 60 bp, Artificial
  Synthetic oligonucleotide
cattagaccccatattcccacccaaatcactgagacaaacgatggagtgttgatcgtgaa

SEQ ID NO: 352674 - DNA, 50 bp, Artificial
  Synthetic oligonucleotide
cattagacttgggagcatcatctagccgtttcacaaactggggttcggtt

SEQ ID NO: 352675 - DNA, 55 bp, Artificial
  Synthetic oligonucleotide
cattagataatgccttgctagtatttactgatggctcctctactggaatagccgc

SEQ ID NO: 352676 - DNA, 55 bp, Artificial
  Synthetic oligonucleotide
cattagatcccgatatggctccctttatggaagatcatcaccgttcctcaactct

SEQ ID NO: 352677 - DNA, 59 bp, Artificial
  Synthetic oligonucleotide
cattagatggaaccgcgactattactttcttttcgtcacgatttatgatccatgaatta

SEQ ID NO: 352678 - DNA, 55 bp, Artificial
  Synthetic oligonucleotide
cattagcaaaccgacaagtgtcacctggaagcctggtcatagacgagagtattcc

SEQ ID NO: 352679 - DNA, 55 bp, Artificial
  Synthetic oligonucleotide
cattagcaacaggccacgaaacgaaccctattaatcacgcatttggtacacaatc

SEQ ID NO: 352680 - DNA, 60 bp, Artificial
  Synthetic oligonucleotide
cattagcagaacgcaccgttaatcgaaattgactatcacccataatatttacttgctgga

SEQ ID NO: 352681 - DNA, 60 bp, Artificial
  Synthetic oligonucleotide
cattagccaatctaagcatgacacaacagatcacctccacaggatatagatcaaaagtgt

SEQ ID NO: 352682 - DNA, 59 bp, Artificial
  Synthetic oligonucleotide
cattagccgtctgttggcctcctctagcagatcttccgtcgatttgaaatgtaccccag

SEQ ID NO: 352683 - DNA, 55 bp, Artificial
  Synthetic oligonucleotide
cattagcgagaccaatttcttgtaatcgtagctctgtgattctttgctagcaacg

SEQ ID NO: 352684 - DNA, 60 bp, Artificial
  Synthetic oligonucleotide
cattagcgagattaacgttcatgatcaaacgccaaaagttatcgatgcttgctggtatgc

SEQ ID NO: 352685 - DNA, 60 bp, Artificial
  Synthetic oligonucleotide
cattagcgcattcacaaggacattttaagagtttccaatatgatagagatatgtttgcag

SEQ ID NO: 352686 - DNA, 51 bp, Artificial
  Synthetic oligonucleotide
cattagctagacgctttgcccagtcgatctattcacaacaacctgtggcca

SEQ ID NO: 352687 - DNA, 57 bp, Artificial
  Synthetic oligonucleotide
cattagcttccaagttttaggaagtgcttacaacaatctaattagcaacactctaaa

SEQ ID NO: 352688 - DNA, 59 bp, Artificial
  Synthetic oligonucleotide
cattagcttccccagtctcacgaggactgaacccaataggtctaggtcatacatcaagt

SEQ ID NO: 352689 - DNA, 57 bp, Artificial
  Synthetic oligonucleotide
cattagctttgtcccgtctctgaacagattgcactatgccacgaacaagtgacccgc

SEQ ID NO: 352690 - DNA, 55 bp, Artificial
  Synthetic oligonucleotide
cattaggacaactcatccaacgagcctattatagcgccgggcaaataatcgacgg

SEQ ID NO: 352691 - DNA, 55 bp, Artificial
  Synthetic oligonucleotide
cattaggagatttagtgagggaagctgaaaagatctttaataagcgagaaacccc

SEQ ID NO: 352692 - DNA, 55 bp, Artificial
  Synthetic oligonucleotide
cattaggaggatcagccaatttagaattcatctatttaattaggccccgcagggg

SEQ ID NO: 352693 - DNA, 55 bp, Artificial
  Synthetic oligonucleotide
cattaggaggtctaggaaatttaagcgaccagatgacaagtactaatgcgagact

SEQ ID NO: 352694 - DNA, 55 bp, Artificial
  Synthetic oligonucleotide
cattaggagtgtctgatctgagaaataatacaggaggatcatcagtggtggtcaa

SEQ ID NO: 352695 - DNA, 59 bp, Artificial
  Synthetic oligonucleotide
cattaggagttccaccagttgacgcaggcacgtacgttgggtcaagaatatattcgcaa

SEQ ID NO: 352696 - DNA, 60 bp, Artificial
  Synthetic oligonucleotide
cattaggatcctctcctaatgcttatcaagcccaattcgagtctgtaggatggtctgcaa

SEQ ID NO: 352697 - DNA, 50 bp, Artificial
  Synthetic oligonucleotide
cattaggcattcatgatagagtttgtgtggtacccacgcactcccaacct

SEQ ID NO: 352698 - DNA, 59 bp, Artificial
  Synthetic oligonucleotide
cattaggccgctggcataaggcccactcggattgactaccgaaacgctctgaagttgtg

SEQ ID NO: 352699 - DNA, 54 bp, Artificial
  Synthetic oligonucleotide
cattagggagtgatccctctttgttgttaaggtggctttgtgtccacctgcccc

SEQ ID NO: 352700 - DNA, 55 bp, Artificial
  Synthetic oligonucleotide
cattaggggcgaggcatgtcccttgccccacaggttaaacagcctgggtggttgc

SEQ ID NO: 352701 - DNA, 52 bp, Artificial
  Synthetic oligonucleotide
cattaggggttttcagatataaaagcaggtgttacgtaggattagtttgggg

SEQ ID NO: 352702 - DNA, 53 bp, Artificial
  Synthetic oligonucleotide
cattagggtggtggtggaaattacctgacgctcttaagaatatgggcatattt

SEQ ID NO: 352703 - DNA, 55 bp, Artificial
  Synthetic oligonucleotide
cattaggtggggctgaattaattcccctcgatgttattgatgcaacagccccatc

SEQ ID NO: 352704 - DNA, 58 bp, Artificial
  Synthetic oligonucleotide
cattaggtttacttgacattgccctccaggttgagtatcgcaatttgacccctggcaa

SEQ ID NO: 352705 - DNA, 55 bp, Artificial
  Synthetic oligonucleotide
cattagtaacacctagcagaatctcatcatcactagaggtgaatgccatactaag

SEQ ID NO: 352706 - DNA, 57 bp, Artificial
  Synthetic oligonucleotide
cattagtaactatattaaaccgcgtactccgaccagttgctgagggatcaccctgaa

SEQ ID NO: 352707 - DNA, 57 bp, Artificial
  Synthetic oligonucleotide
cattagtaccatatcaacgtggcgactatacttttccaatcttacaggccccaccga

SEQ ID NO: 352708 - DNA, 55 bp, Artificial
  Synthetic oligonucleotide
cattagtagtaatggtccacttaaggttggagcaggtgttatgttggagtgtgaa

SEQ ID NO: 352709 - DNA, 54 bp, Artificial
  Synthetic oligonucleotide
cattagtatgttttatcaaactagggttgttgtcccgttgtccacacccagaaa

SEQ ID NO: 352710 - DNA, 52 bp, Artificial
  Synthetic oligonucleotide
cattagtcctgagactaagtgtctatgctagtactttcaacagggggcgact

SEQ ID NO: 352711 - DNA, 58 bp, Artificial
  Synthetic oligonucleotide
cattagtgacgagggcatcgattccgacctatcggtttcctttggattacgatgcttc

SEQ ID NO: 352712 - DNA, 60 bp, Artificial
  Synthetic oligonucleotide
cattagtgatctcaatgttctgcagtcgagcgcccatggatctggtttctacactatggt

SEQ ID NO: 352713 - DNA, 57 bp, Artificial
  Synthetic oligonucleotide
cattagtgatgttgtgttaggcttgttgaagaatggtaagttgctagtgcgtaataa

SEQ ID NO: 352714 - DNA, 55 bp, Artificial
  Synthetic oligonucleotide
cattagtgggatacaatatttggcaggcctgtcaacgttgcctggtaatcccgct

SEQ ID NO: 352715 - DNA, 56 bp, Artificial
  Synthetic oligonucleotide
cattagtggtgaaacaaagattgtaagtcacgttgttgacagtcttggtacgcatt

SEQ ID NO: 352716 - DNA, 60 bp, Artificial
  Synthetic oligonucleotide
cattagttataggtcagtgtatttatacattcacaagcttgttctcactagtaccaaatg

SEQ ID NO: 352717 - DNA, 57 bp, Artificial
  Synthetic oligonucleotide
cattagttccccaacatgtcttgtcaacaaagtccaaagatttagaggatccgaaca

SEQ ID NO: 352718 - DNA, 55 bp, Artificial
  Synthetic oligonucleotide
cattagttgaaggtacccctgatattagttttatatctccagacgctggtccagg

SEQ ID NO: 352719 - DNA, 60 bp, Artificial
  Synthetic oligonucleotide
cattagttgcatgtgaactagctataataaatactatcgtttatccagcattcggaatgc

SEQ ID NO: 352720 - DNA, 60 bp, Artificial
  Synthetic oligonucleotide
cattataaatcttgccgccaccagatgggtgcttgaacaggtatccggacgtatcgtcag

SEQ ID NO: 352721 - DNA, 55 bp, Artificial
  Synthetic oligonucleotide
cattataatggatacgatctgtttagagagataggatctctggtttgtctcaggc

SEQ ID NO: 352722 - DNA, 55 bp, Artificial
  Synthetic oligonucleotide
cattatacaaaccggccctgtcatctcacgatcgaaatgagctcagggaactagc

SEQ ID NO: 352723 - DNA, 55 bp, Artificial
  Synthetic oligonucleotide
cattatacaaggcagtgtgcattcagcgttgacgggcgagtcgtatggggagagc

SEQ ID NO: 352724 - DNA, 60 bp, Artificial
  Synthetic oligonucleotide
cattatacacaccgtgctcttagtgatgcgaacttaccaaggcgcttcactcggagacaa

SEQ ID NO: 352725 - DNA, 58 bp, Artificial
  Synthetic oligonucleotide
cattatacagtcccagtttccctttcctgagtctaatgcaatgtatcttccaccccag

SEQ ID NO: 352726 - DNA, 60 bp, Artificial
  Synthetic oligonucleotide
cattatagaacagtggagactggtggcatactcgattactactccacagggatagtgacc

SEQ ID NO: 352727 - DNA, 60 bp, Artificial
  Synthetic oligonucleotide
cattatagaagaggtgggacactgtagaacatatccagcgcaactcctggctaacagcta

SEQ ID NO: 352728 - DNA, 60 bp, Artificial
  Synthetic oligonucleotide
cattatagacaatgataattggtctggatacagtgggagtttcagtattagaggagaaac

SEQ ID NO: 352729 - DNA, 60 bp, Artificial
  Synthetic oligonucleotide
cattatagacgtgcagaacaggcacgtatgagtatgtcacaatggattgcacataggggg

SEQ ID NO: 352730 - DNA, 60 bp, Artificial
  Synthetic oligonucleotide
cattatagagattgatatgagcacactagagcacacaagtagatgcgtgtgcactggagt

SEQ ID NO: 352731 - DNA, 55 bp, Artificial
  Synthetic oligonucleotide
cattatagtgtgatcaggattgcataccttgttggggataaggacgttatcttag

SEQ ID NO: 352732 - DNA, 56 bp, Artificial
  Synthetic oligonucleotide
cattatatactacattcagaacggtaagtacattgttactgatggggaatcagctg

SEQ ID NO: 352733 - DNA, 57 bp, Artificial
  Synthetic oligonucleotide
cattatatagtcacataggatattagtgttaagtttggtatatggggtttattagtg

SEQ ID NO: 352734 - DNA, 51 bp, Artificial
  Synthetic oligonucleotide
cattatatcaagcactactttctggaaggaagtggagcgatatagctgatg

SEQ ID NO: 352735 - DNA, 57 bp, Artificial
  Synthetic oligonucleotide
cattatatgatagtattgagtctgcatatcaacatcattataacggattctcggaat

SEQ ID NO: 352736 - DNA, 55 bp, Artificial
  Synthetic oligonucleotide
cattatattagagcagatagtaatgtagccgtgctactagttgtcttgaagtctc

SEQ ID NO: 352737 - DNA, 60 bp, Artificial
  Synthetic oligonucleotide
cattatcagacggagccactccgtatgatttaaacacgatgctgaacatagtggggggac

SEQ ID NO: 352738 - DNA, 58 bp, Artificial
  Synthetic oligonucleotide
cattatcaggagacgaatgggattcgattactcggaaggaagatgagttgggggtgta

SEQ ID NO: 352739 - DNA, 60 bp, Artificial
  Synthetic oligonucleotide
cattatcattcttcctagcgagcgaaagccgcttttccttccacctgaatcagatcccga

SEQ ID NO: 352740 - DNA, 59 bp, Artificial
  Synthetic oligonucleotide
cattatccttaggattggtagtccttaatattctcctacatatagttagcattacaata

SEQ ID NO: 352741 - DNA, 55 bp, Artificial
  Synthetic oligonucleotide
cattatcggaccaagtaatgtatggatgcttggggttttgaacttcgcctctagg

SEQ ID NO: 352742 - DNA, 56 bp, Artificial
  Synthetic oligonucleotide
cattatctaagtctaaagggcttatggcgatacattcctctcacaaatttagacag

SEQ ID NO: 352743 - DNA, 55 bp, Artificial
  Synthetic oligonucleotide
cattatctcccatcgcctttgctcctattgtgttgcagaggttaacattagcgcg

SEQ ID NO: 352744 - DNA, 59 bp, Artificial
  Synthetic oligonucleotide
cattatcttatatttgcactacttagggttgggataatgggtaggatcatagttcataa

SEQ ID NO: 352745 - DNA, 55 bp, Artificial
  Synthetic oligonucleotide
cattatgaaactgatgtaccaaagagagcaggagaaatacacatacctctaacag

SEQ ID NO: 352746 - DNA, 51 bp, Artificial
  Synthetic oligonucleotide
cattatgatagtggacgagggccccaaacccgccgaaccgatgattgtaga

SEQ ID NO: 352747 - DNA, 53 bp, Artificial
  Synthetic oligonucleotide
cattatgcacactcgctgccactgtggggccgagatcaccggacatgtcaaaa

SEQ ID NO: 352748 - DNA, 60 bp, Artificial
  Synthetic oligonucleotide
cattatggagtaaagtgaatgatgccggatcagaccgagtgatgatatcacccctggctg

SEQ ID NO: 352749 - DNA, 60 bp, Artificial
  Synthetic oligonucleotide
cattatggcagcattcacaggaaacactgaaggcagaacttcagacatgagaacagaaat

SEQ ID NO: 352750 - DNA, 54 bp, Artificial
  Synthetic oligonucleotide
cattatgtaaacctccatatcaactgctgcaggaaaataagcctcttatgagtt

SEQ ID NO: 352751 - DNA, 60 bp, Artificial
  Synthetic oligonucleotide
cattatgtcaagcttcagccaatagaccttgggagtatgatggtacgtatgcgaggatga

SEQ ID NO: 352752 - DNA, 58 bp, Artificial
  Synthetic oligonucleotide
cattatgtcatacaaggtactactatcaaaaatggatggtttaaaactagagtatcta

SEQ ID NO: 352753 - DNA, 55 bp, Artificial
  Synthetic oligonucleotide
cattatgttcggcaataggttgtggccatgaagggtggagttgttgcttaggcgc

SEQ ID NO: 352754 - DNA, 58 bp, Artificial
  Synthetic oligonucleotide
cattatgttggccgtacagaggccggtgaaattatatattctcgtgaattaattacat

SEQ ID NO: 352755 - DNA, 54 bp, Artificial
  Synthetic oligonucleotide
cattatgtttgaccgttcagattttgtcactggacgtaaaaatccttttggtta

SEQ ID NO: 352756 - DNA, 60 bp, Artificial
  Synthetic oligonucleotide
cattattactatacatggcatgcacgcatgcttccaaccctgtctatgctagtttgaaaa

SEQ ID NO: 352757 - DNA, 57 bp, Artificial
  Synthetic oligonucleotide
cattattcaacgagcaggtaaacgaggaatgtaacagggctattgctgagttaaaac

SEQ ID NO: 352758 - DNA, 58 bp, Artificial
  Synthetic oligonucleotide
cattattcaggtacaagtgtgaattgccttctccgatgaagatactatgtgctcaatt

SEQ ID NO: 352759 - DNA, 58 bp, Artificial
  Synthetic oligonucleotide
cattattcctaaacagttcaagaaacatcccatagttgtgaaatcagggtacgatata

SEQ ID NO: 352760 - DNA, 56 bp, Artificial
  Synthetic oligonucleotide
cattattcgttctttcgcagtacggtgcaattatgagtggtaatatcaatgattcg

SEQ ID NO: 352761 - DNA, 57 bp, Artificial
  Synthetic oligonucleotide
cattattgaaacaccgattcgaaataattgaaggaagagaccgaacgatggcctgga

SEQ ID NO: 352762 - DNA, 60 bp, Artificial
  Synthetic oligonucleotide
cattattgcatgcggtgaacatgagcatccatcagtgtatatggttccaaacactactat

SEQ ID NO: 352763 - DNA, 55 bp, Artificial
  Synthetic oligonucleotide
cattattggccatctcctcgtaacgcacttttggaggaagtaccacatttattcc

SEQ ID NO: 352764 - DNA, 55 bp, Artificial
  Synthetic oligonucleotide
cattatttaccctatgcctgacctcccggtggtcattatacacacatatgacacc

SEQ ID NO: 352765 - DNA, 60 bp, Artificial
  Synthetic oligonucleotide
cattatttcatgttatggaagatacgcgcattgcgatagcgcagcctaaagcagaggtta

SEQ ID NO: 352766 - DNA, 59 bp, Artificial
  Synthetic oligonucleotide
cattatttctaactcttatccatataaagtagacatgctcgaaaatgacaccaaagtta

SEQ ID NO: 352767 - DNA, 51 bp, Artificial
  Synthetic oligonucleotide
cattattttcgtgactctcgtggtaaatgtctgagttggcagtgtggccag

SEQ ID NO: 352768 - DNA, 60 bp, Artificial
  Synthetic oligonucleotide
cattcaaagaatctgtacatagctcttgctacaccgcctaccaggaatgtttcttcggta

SEQ ID NO: 352769 - DNA, 55 bp, Artificial
  Synthetic oligonucleotide
cattcaaagcagacacaaacatgtggtgtgatcgatgtgcgtgcatcggaattgg

SEQ ID NO: 352770 - DNA, 56 bp, Artificial
  Synthetic oligonucleotide
cattcaaaggactgtcaactgatagaaaaatggacgaagtttcgcacgtcggaatt

SEQ ID NO: 352771 - DNA, 60 bp, Artificial
  Synthetic oligonucleotide
cattcaaatgatcaaggggttggtatggctgcagatagagactcaactcaaagggcaatt

SEQ ID NO: 352772 - DNA, 59 bp, Artificial
  Synthetic oligonucleotide
cattcaaatggcgttgctgatgcaaacaaaatttataaacgtagactggatctatttac

SEQ ID NO: 352773 - DNA, 55 bp, Artificial
  Synthetic oligonucleotide
cattcaacactaaggcacgttacaacaacaaaggataagaacttacacctggcgg

SEQ ID NO: 352774 - DNA, 60 bp, Artificial
  Synthetic oligonucleotide
cattcaagaactatgtgtctagactatcagatcagttgctggtatctaagaataatatag

SEQ ID NO: 352775 - DNA, 55 bp, Artificial
  Synthetic oligonucleotide
cattcaagcacgtggaaactcacggaccccattattcaaacgacattccactggt

SEQ ID NO: 352776 - DNA, 55 bp, Artificial
  Synthetic oligonucleotide
cattcaagcatggaaatcaggcgctagcgttggaacaggaacacctccattaccc

SEQ ID NO: 352777 - DNA, 55 bp, Artificial
  Synthetic oligonucleotide
cattcaagctctaaatgcacccacaacgcgtctccgaatcacgcaccgctgtccc

SEQ ID NO: 352778 - DNA, 50 bp, Artificial
  Synthetic oligonucleotide
cattcaaggggcgtgcacggggataaatacctatatggcaggtctagata

SEQ ID NO: 352779 - DNA, 50 bp, Artificial
  Synthetic oligonucleotide
cattcaagtagttcgaatccctttaatgctgacggattgctctttagtga

SEQ ID NO: 352780 - DNA, 60 bp, Artificial
  Synthetic oligonucleotide
cattcaagtgttgtcaagggacagattgctctcagcaggggctacaagcaagcgcaccac

SEQ ID NO: 352781 - DNA, 55 bp, Artificial
  Synthetic oligonucleotide
cattcaagttggcggaccaaatgtattagacattaccgctgatccaacaactgct

SEQ ID NO: 352782 - DNA, 57 bp, Artificial
  Synthetic oligonucleotide
cattcaatattacagaaccccatattacaacaaattcactagaatgggttgacccag

SEQ ID NO: 352783 - DNA, 60 bp, Artificial
  Synthetic oligonucleotide
cattcaattgtgtcaccgtccttatcgacataggacttgacatcggagctggatttagct

SEQ ID NO: 352784 - DNA, 58 bp, Artificial
  Synthetic oligonucleotide
cattcacaagccagtatgttttagcaagtaccaacctagattcactatccccacctac

SEQ ID NO: 352785 - DNA, 58 bp, Artificial
  Synthetic oligonucleotide
cattcacaagcctcttctcattattaccaggggtagcccattctttagcagtagaact

SEQ ID NO: 352786 - DNA, 55 bp, Artificial
  Synthetic oligonucleotide
cattcacaatacagagaagaggcccttctgaacagactgaatatcaacccagtga

SEQ ID NO: 352787 - DNA, 60 bp, Artificial
  Synthetic oligonucleotide
cattcacaatacagagaggaagctcttttgaatagactgaacatcaattcagtaaaactt

SEQ ID NO: 352788 - DNA, 55 bp, Artificial
  Synthetic oligonucleotide
cattcacacctattgccacacggtggtttgtataaagacggaactaaaactatcg

SEQ ID NO: 352789 - DNA, 55 bp, Artificial
  Synthetic oligonucleotide
cattcacagccgaggtacacgatgcttctgcttggttcggtgattgagagcgttc

SEQ ID NO: 352790 - DNA, 60 bp, Artificial
  Synthetic oligonucleotide
cattcacatattctcattcactggagaggaaatggccaccagagcggactatacccttga

SEQ ID NO: 352791 - DNA, 59 bp, Artificial
  Synthetic oligonucleotide
cattcacatgggcttccaatatgatatggctgacacccttcccgtatccgttaaccagt

SEQ ID NO: 352792 - DNA, 57 bp, Artificial
  Synthetic oligonucleotide
cattcacatttgttgccgcacggtggtgtgtacaaagacgggacaaagactatcgtt

SEQ ID NO: 352793 - DNA, 56 bp, Artificial
  Synthetic oligonucleotide
cattcacattttataaggatggatttctatcccctgaaaatttgggctgtttggaa

SEQ ID NO: 352794 - DNA, 55 bp, Artificial
  Synthetic oligonucleotide
cattcacccagcaatacctggaagaggtctgtcgggaggcagcctatcaacgctc

SEQ ID NO: 352795 - DNA, 60 bp, Artificial
  Synthetic oligonucleotide
cattcacccatgcaaccacatccgcaatattaacgccggcttcgctgaactctattgcta

SEQ ID NO: 352796 - DNA, 60 bp, Artificial
  Synthetic oligonucleotide
cattcactgaaccatctataatacagcccccggcacctgcagaagcatctggtcatgtat

SEQ ID NO: 352797 - DNA, 55 bp, Artificial
  Synthetic oligonucleotide
cattcactgatgcagtagtcgcagagttcggagaattatatttataccttcagtt

SEQ ID NO: 352798 - DNA, 60 bp, Artificial
  Synthetic oligonucleotide
cattcactttgaatagatcacagccggcacatgataatttaatggggactatgtggatta

SEQ ID NO: 352799 - DNA, 60 bp, Artificial
  Synthetic oligonucleotide
cattcagaactcttatgagtgtcgaagtgggtcaatcacccaatgtataccaagccaggt

SEQ ID NO: 352800 - DNA, 58 bp, Artificial
  Synthetic oligonucleotide
cattcagaataattgtagtgagtgggtttatggccgtgcacggtttgttgtgttttca

SEQ ID NO: 352801 - DNA, 58 bp, Artificial
  Synthetic oligonucleotide
cattcagagtaggactacacacttacccggtggggtcgcaattaccttgcgagcctga

SEQ ID NO: 352802 - DNA, 52 bp, Artificial
  Synthetic oligonucleotide
cattcagataggttgtcaaatcgtccgtcgctttcttacttttattgaggtt

SEQ ID NO: 352803 - DNA, 55 bp, Artificial
  Synthetic oligonucleotide
cattcagccttttcatggtgcagttctctagaactatcaacccgagaaatcgtgg

SEQ ID NO: 352804 - DNA, 60 bp, Artificial
  Synthetic oligonucleotide
cattcaggaattcttcggatccactcaatctaaccattgcgatcgattacagtgaatttg

SEQ ID NO: 352805 - DNA, 54 bp, Artificial
  Synthetic oligonucleotide
cattcaggattaaaaagatcaaagtattggtccttacactcatacaataacggc

SEQ ID NO: 352806 - DNA, 58 bp, Artificial
  Synthetic oligonucleotide
cattcagtgatgcggtagacatcctgccactcgtcacgcgtttcctgtagcttggccg

SEQ ID NO: 352807 - DNA, 60 bp, Artificial
  Synthetic oligonucleotide
cattcagttacgaatgtgaataaactcagactcgcatacgcaaaaaatcacgttgacgtg

SEQ ID NO: 352808 - DNA, 59 bp, Artificial
  Synthetic oligonucleotide
cattcataaaacttagaagcaatcctgtgtgaaaagcatttctcaaacgtatgaactaa

SEQ ID NO: 352809 - DNA, 56 bp, Artificial
  Synthetic oligonucleotide
cattcataaagccggaggttaagccaggtaccccagcacaagaggttgagatgttg

SEQ ID NO: 352810 - DNA, 60 bp, Artificial
  Synthetic oligonucleotide
cattcatagcagctatagttgtgtggtccatagtatttatagaatataggaaaataagga

SEQ ID NO: 352811 - DNA, 60 bp, Artificial
  Synthetic oligonucleotide
cattcatatccttcaccgtaggggcggactagaatccaatacacataggaatcctatatg

SEQ ID NO: 352812 - DNA, 55 bp, Artificial
  Synthetic oligonucleotide
cattcatattgagaccattgagtgtgttgtagagttctattctctcccgagctcg

SEQ ID NO: 352813 - DNA, 54 bp, Artificial
  Synthetic oligonucleotide
cattcatcgacacgcgattggaggagctccatgaagacgcacatgaccgctgac

SEQ ID NO: 352814 - DNA, 53 bp, Artificial
  Synthetic oligonucleotide
cattcatctcccgctatcagtcaccagcgtctccgcagttgcaagtggccact

SEQ ID NO: 352815 - DNA, 59 bp, Artificial
  Synthetic oligonucleotide
cattcatgcaatataagaggataactaaagggacattattctacgtacgattctattcg

SEQ ID NO: 352816 - DNA, 60 bp, Artificial
  Synthetic oligonucleotide
cattcatggatcctcagagtgcgatctatactctcccacgggtacccacagcagctccga

SEQ ID NO: 352817 - DNA, 60 bp, Artificial
  Synthetic oligonucleotide
cattcatgggcttcgggattcggtggtggatagaatggtccatgcatatcacaacgaggt

SEQ ID NO: 352818 - DNA, 54 bp, Artificial
  Synthetic oligonucleotide
cattcatggtcagtagtgtgcacggacttgatggaattacgaatttcaatgtca

SEQ ID NO: 352819 - DNA, 55 bp, Artificial
  Synthetic oligonucleotide
cattcatgttacctagcgaagggtcctccgggatgtgctcagcactcagccttag

SEQ ID NO: 352820 - DNA, 55 bp, Artificial
  Synthetic oligonucleotide
cattcattagccaatagtgccgcgatatctaagctaacaggtaaattcgcttact

SEQ ID NO: 352821 - DNA, 60 bp, Artificial
  Synthetic oligonucleotide
cattcattgcctgaactgcagttatgtgttcccctgtgcgtaaatccatggttcctgcag

SEQ ID NO: 352822 - DNA, 59 bp, Artificial
  Synthetic oligonucleotide
cattcatttccttggcaaccgtgggggtcctggtgcaccattgtgtagacgctttgcta

SEQ ID NO: 352823 - DNA, 55 bp, Artificial
  Synthetic oligonucleotide
cattccaaagcttgaacctgaaaggatagtttccatcttagagtgggataggagc

SEQ ID NO: 352824 - DNA, 55 bp, Artificial
  Synthetic oligonucleotide
cattccaagatttgaccggacagtattcattatactcttactacttccactggcc

SEQ ID NO: 352825 - DNA, 60 bp, Artificial
  Synthetic oligonucleotide
cattccaatctgaatgatgccacatatcaaaggacaagggcacttgtgcgtactgggatg

SEQ ID NO: 352826 - DNA, 56 bp, Artificial
  Synthetic oligonucleotide
cattccaatcttcgattcagtctaacgcatagtatacgtcaggttgaaataatatt

SEQ ID NO: 352827 - DNA, 55 bp, Artificial
  Synthetic oligonucleotide
cattccaccgacagcaggagtcttggctagatggggtacctttaagaagtcgggg

SEQ ID NO: 352828 - DNA, 60 bp, Artificial
  Synthetic oligonucleotide
cattccacggagctaaggaggtggcactcagctactcaactggtgcacttgccagctgca

SEQ ID NO: 352829 - DNA, 55 bp, Artificial
  Synthetic oligonucleotide
cattccactagatatacaactggatggaccacttagaaacactttagtagggaac

SEQ ID NO: 352830 - DNA, 60 bp, Artificial
  Synthetic oligonucleotide
cattccagagagctgttctgtaagcccaggtggcgccattgtactaagctctgcactcag

SEQ ID NO: 352831 - DNA, 54 bp, Artificial
  Synthetic oligonucleotide
cattccagatggctaagcgcgcacgatggtatgccgactgtgctcgacccgaaa

SEQ ID NO: 352832 - DNA, 55 bp, Artificial
  Synthetic oligonucleotide
cattccagctaatgagaccaccaaatatgacaccaacagtagctgcactatttcc

SEQ ID NO: 352833 - DNA, 60 bp, Artificial
  Synthetic oligonucleotide
cattccagctcacgacatcggttatgagtcagaaccaaggcccaccgcttcatcgataaa

SEQ ID NO: 352834 - DNA, 56 bp, Artificial
  Synthetic oligonucleotide
cattccagtcaattacggccaaatgattcagccaattagaataatgaggtttagac

SEQ ID NO: 352835 - DNA, 54 bp, Artificial
  Synthetic oligonucleotide
cattccagttcccccgcgcctttctcgtggcaggtccggtcacgtggattctga

SEQ ID NO: 352836 - DNA, 60 bp, Artificial
  Synthetic oligonucleotide
cattccatagagcgaaagaacttgcactcagctactcaaccggtgcacttgccagttgta

SEQ ID NO: 352837 - DNA, 59 bp, Artificial
  Synthetic oligonucleotide
cattccatcacgcaccgtatggttcaatacagcgacgtcgcacgaaacttctggaacgg

SEQ ID NO: 352838 - DNA, 60 bp, Artificial
  Synthetic oligonucleotide
cattccatggattagccaaacgcactacagatacgtggttgtggacgagtacactgctgg

SEQ ID NO: 352839 - DNA, 60 bp, Artificial
  Synthetic oligonucleotide
cattccatggggctaaggaggtcgcaatcagctactcaaccggtgcactcgccagttgta

SEQ ID NO: 352840 - DNA, 60 bp, Artificial
  Synthetic oligonucleotide
cattccatgttacggtacattaatggtcagtttacagcattcgagctgattaggaacaga

SEQ ID NO: 352841 - DNA, 55 bp, Artificial
  Synthetic oligonucleotide
cattcccaggaatcttgtccctattggtaagggtaataaagatgagcagattggt

SEQ ID NO: 352842 - DNA, 55 bp, Artificial
  Synthetic oligonucleotide
cattcccagggatgaagatatcgtggctagagcgctattgagcacccgttttgcc

SEQ ID NO: 352843 - DNA, 55 bp, Artificial
  Synthetic oligonucleotide
cattccccaccagcgatggtggtctagcctgcgtggctgcctgcacaccctattg

SEQ ID NO: 352844 - DNA, 55 bp, Artificial
  Synthetic oligonucleotide
cattccccttttgtgcgcttgttacagaattgtgcatggatgagaggtactctaa

SEQ ID NO: 352845 - DNA, 58 bp, Artificial
  Synthetic oligonucleotide
cattcccggaatgacgaatggtctgttacacctctggtctccatactcttacactccg

SEQ ID NO: 352846 - DNA, 55 bp, Artificial
  Synthetic oligonucleotide
cattccctacacggtatagattcgggagtttgacggcatatagacgacatgatag

SEQ ID NO: 352847 - DNA, 55 bp, Artificial
  Synthetic oligonucleotide
cattccctcatttgtgtcaggctttcaaggcccaacccctgattctccattgtgg

SEQ ID NO: 352848 - DNA, 60 bp, Artificial
  Synthetic oligonucleotide
cattccctggcccaggtcgactctagtttgatgtctcatttgtcaccactgagagattgt

SEQ ID NO: 352849 - DNA, 60 bp, Artificial
  Synthetic oligonucleotide
cattccgaacactccgtctgatgactgaatataggtcgaataaatctaagacagacgaag

SEQ ID NO: 352850 - DNA, 55 bp, Artificial
  Synthetic oligonucleotide
cattccgactcgggagggtccctggcacgtaggctggagaggacgcacaagtcag

SEQ ID NO: 352851 - DNA, 60 bp, Artificial
  Synthetic oligonucleotide
cattccgcaccaatgttcagggtgatgcgatggtattcccaaatcaggccaaggctgcaa

SEQ ID NO: 352852 - DNA, 55 bp, Artificial
  Synthetic oligonucleotide
cattccgcacgaaatgcggatttacccgcaatgggtcgtttggcgatacgaagac

SEQ ID NO: 352853 - DNA, 59 bp, Artificial
  Synthetic oligonucleotide
cattccggtgagcccggtacattgctctggaataccgtctggaatatggcggttatagc

SEQ ID NO: 352854 - DNA, 57 bp, Artificial
  Synthetic oligonucleotide
cattccgtacttgctttaatgatgactttgctttataaggaccaatcaggtttccac

SEQ ID NO: 352855 - DNA, 60 bp, Artificial
  Synthetic oligonucleotide
cattccgtatgtaggcgttcgcagtggtccgtagatacttgcggcgactacagctatgac

SEQ ID NO: 352856 - DNA, 51 bp, Artificial
  Synthetic oligonucleotide
cattccgttctcgggtactacacctctatacttagctagagctaacaagaa

SEQ ID NO: 352857 - DNA, 58 bp, Artificial
  Synthetic oligonucleotide
cattcctaaaggtcaacgcgttaggctgccgggtgggagagcgatatgggatatagcg

SEQ ID NO: 352858 - DNA, 55 bp, Artificial
  Synthetic oligonucleotide
cattcctaaccgagataactcagagaggtcgtttagaaacaggaaggtgcgtgct

SEQ ID NO: 352859 - DNA, 59 bp, Artificial
  Synthetic oligonucleotide
cattcctaccgacagattttgaaacgaatggatcaataattacttcatatgacggatgt

SEQ ID NO: 352860 - DNA, 60 bp, Artificial
  Synthetic oligonucleotide
cattcctcagcatgatctttagaagccttgctctggttacaaacacatttttctgtgcaa

SEQ ID NO: 352861 - DNA, 52 bp, Artificial
  Synthetic oligonucleotide
cattcctcattacagaagctgtggaaagttcatggaattcacaagggaaacg

SEQ ID NO: 352862 - DNA, 55 bp, Artificial
  Synthetic oligonucleotide
cattcctcgctatgtcgcgaattggctcaccggaacagattgttgatgttttcgt

SEQ ID NO: 352863 - DNA, 54 bp, Artificial
  Synthetic oligonucleotide
cattcctcttgcttaagggcaccgggattggtcaagtacaagcctatgacagac

SEQ ID NO: 352864 - DNA, 52 bp, Artificial
  Synthetic oligonucleotide
cattcctgaaacctacaacaaaattcctcatttacattcgtatcaaccaccc

SEQ ID NO: 352865 - DNA, 55 bp, Artificial
  Synthetic oligonucleotide
cattcctgatccttttgtaaacattgagactatgctacaaatattcggagtaccc

SEQ ID NO: 352866 - DNA, 59 bp, Artificial
  Synthetic oligonucleotide
cattcctgcataaagtggcagggtttgctacttatgcttttggaactaatatgcttttg

SEQ ID NO: 352867 - DNA, 55 bp, Artificial
  Synthetic oligonucleotide
cattcctggaccgcagtccgaactaactcgtttaattgggcctctgacatggtta

SEQ ID NO: 352868 - DNA, 60 bp, Artificial
  Synthetic oligonucleotide
cattcctttggatgggatatgaactccatcctgacagatggacagtccagcctatagaac

SEQ ID NO: 352869 - DNA, 58 bp, Artificial
  Synthetic oligonucleotide
cattcgaaagaactactcttaaaatctgtgttgatagctattggtcagtcgaaagaaa

SEQ ID NO: 352870 - DNA, 60 bp, Artificial
  Synthetic oligonucleotide
cattcgactctatcaaatcttagatgatcgaataccaacaccaagttacgtatcgtatca

SEQ ID NO: 352871 - DNA, 54 bp, Artificial
  Synthetic oligonucleotide
cattcgagacctacgggagaacaggggcattctcacttgcgcggaaaatttcat

SEQ ID NO: 352872 - DNA, 55 bp, Artificial
  Synthetic oligonucleotide
cattcgagctgtgtatgatactttgtcaaataagcttgggaggaatcccgctgac

SEQ ID NO: 352873 - DNA, 55 bp, Artificial
  Synthetic oligonucleotide
cattcgaggcgtctctcacaccagcattctctcgtcgccatcactcgatccaaat

SEQ ID NO: 352874 - DNA, 60 bp, Artificial
  Synthetic oligonucleotide
cattcgagggtatctccatctttgtcgatatatgatttgacgtcggagctagatttagct

SEQ ID NO: 352875 - DNA, 55 bp, Artificial
  Synthetic oligonucleotide
cattcgagttggcgatagttgacccgccgtatgggataggggcgggagacgttaa

SEQ ID NO: 352876 - DNA, 60 bp, Artificial
  Synthetic oligonucleotide
cattcgatcacccaagttgttatgtacattggggatatcactatatgtagaaaggcttct

SEQ ID NO: 352877 - DNA, 55 bp, Artificial
  Synthetic oligonucleotide
cattcgcagtggacaggtcagtactgactaactggggcctaggcctcagtagtct

SEQ ID NO: 352878 - DNA, 60 bp, Artificial
  Synthetic oligonucleotide
cattcgccaccataagactccctgcactagagtagcgcctaggcagcataaaatgtgaac

SEQ ID NO: 352879 - DNA, 55 bp, Artificial
  Synthetic oligonucleotide
cattcgcccatgccagattgtcatctgtacgcggccccagcatcaggttaacaat

SEQ ID NO: 352880 - DNA, 54 bp, Artificial
  Synthetic oligonucleotide
cattcgcgcgctatcggttctgtcatgagaacttcaaatggtgcagctgtggtt

SEQ ID NO: 352881 - DNA, 60 bp, Artificial
  Synthetic oligonucleotide
cattcgcgtgtgcgttggttttgatccttattatactcaaatgactcaagatggagttaa

SEQ ID NO: 352882 - DNA, 57 bp, Artificial
  Synthetic oligonucleotide
cattcgcttatgttaatcactctcaccctggttgcaaaactctggagaaccaccttt

SEQ ID NO: 352883 - DNA, 52 bp, Artificial
  Synthetic oligonucleotide
cattcgcttccaaagttagctgatccgtttgctctagttaaactaacaggta

SEQ ID NO: 352884 - DNA, 54 bp, Artificial
  Synthetic oligonucleotide
cattcgctttggacgttatttaccccttgagatccctaaatgtcgtgttccacg

SEQ ID NO: 352885 - DNA, 55 bp, Artificial
  Synthetic oligonucleotide
cattcggactgggactcaccccaccgcacggaggccttttggggtggagccctca

SEQ ID NO: 352886 - DNA, 56 bp, Artificial
  Synthetic oligonucleotide
cattcggagaatcacagggtttgacattcaattgtggagtgattgtactttctgag

SEQ ID NO: 352887 - DNA, 55 bp, Artificial
  Synthetic oligonucleotide
cattcggagaccgccttaaccttcattatggtaacaaagtcaatctctggaacgc

SEQ ID NO: 352888 - DNA, 51 bp, Artificial
  Synthetic oligonucleotide
cattcggagctatgagtgttttctccaataatgcatataaccttattagaa

SEQ ID NO: 352889 - DNA, 56 bp, Artificial
  Synthetic oligonucleotide
cattcgggaagtgaattttgtcgggaaaagtacccgccacgcatgttgagtacata

SEQ ID NO: 352890 - DNA, 55 bp, Artificial
  Synthetic oligonucleotide
cattcgggcaagccagaatacgaccgactctttgccccatttcgtgaagtagggg

SEQ ID NO: 352891 - DNA, 60 bp, Artificial
  Synthetic oligonucleotide
cattcgggctggctcagggcatactacaaaccttgccagcaaatccgcctcctgcctcta

SEQ ID NO: 352892 - DNA, 51 bp, Artificial
  Synthetic oligonucleotide
cattcgggggacactcaaaactccagggaaacggtggaacgggggacaata

SEQ ID NO: 352893 - DNA, 51 bp, Artificial
  Synthetic oligonucleotide
cattcggggtggagcccactgggccaaggggctgttcaaacaggcatggga

SEQ ID NO: 352894 - DNA, 52 bp, Artificial
  Synthetic oligonucleotide
cattcggggtggggttcaccccactgcacggaggccttttggggtggagccc

SEQ ID NO: 352895 - DNA, 60 bp, Artificial
  Synthetic oligonucleotide
cattcggtgaactatgtccgctggtaaagctagagcgaactaatggcgaactatatgcga

SEQ ID NO: 352896 - DNA, 55 bp, Artificial
  Synthetic oligonucleotide
cattcggttcgtatattgtcttcggaatcttgttgtccgttattcgggtattcaa

SEQ ID NO: 352897 - DNA, 50 bp, Artificial
  Synthetic oligonucleotide
cattcgtaaccgtgttattcacaatcaacttagttatgctacttccatcc

SEQ ID NO: 352898 - DNA, 60 bp, Artificial
  Synthetic oligonucleotide
cattcgtacatggttaagccagtcaattcaactgaatatgcttcatggcaattatacgtc

SEQ ID NO: 352899 - DNA, 58 bp, Artificial
  Synthetic oligonucleotide
cattcgtgcaacctactgacgggtattttacccaatctcgtacactggatgattttca

SEQ ID NO: 352900 - DNA, 60 bp, Artificial
  Synthetic oligonucleotide
cattcgtgcaggactgcaattgctccatatacccaggccacattacgggacatcgcatgg

SEQ ID NO: 352901 - DNA, 60 bp, Artificial
  Synthetic oligonucleotide
cattcgtgcatgcatgctagtgcggaaagtcgctgggggccattatatccaaatggccct

SEQ ID NO: 352902 - DNA, 60 bp, Artificial
  Synthetic oligonucleotide
cattcgtgcatgcatgttggtgcggaaagcagccggaggccattacgtccaaatggctct

SEQ ID NO: 352903 - DNA, 56 bp, Artificial
  Synthetic oligonucleotide
cattcgtgggcggttgcaagagccgacgtaacgtatctagccagaaatccttcggg

SEQ ID NO: 352904 - DNA, 60 bp, Artificial
  Synthetic oligonucleotide
cattcgtgttgaggagtcaatctaccaatgttgtgacttggcccctgaagccagacaggc

SEQ ID NO: 352905 - DNA, 55 bp, Artificial
  Synthetic oligonucleotide
cattcgttaatggaaacggatgacacaaaggtatactttctattagggataattg

SEQ ID NO: 352906 - DNA, 60 bp, Artificial
  Synthetic oligonucleotide
cattcgttgcttgaacagcagtgatgggttcccctgtgcgtgaatccatgattggcgcaa

SEQ ID NO: 352907 - DNA, 55 bp, Artificial
  Synthetic oligonucleotide
cattcgttggaccaaagatgcacgaaatactcaagatcacgtgcgctccctctgc

SEQ ID NO: 352908 - DNA, 57 bp, Artificial
  Synthetic oligonucleotide
cattctacatgctcaaccatgacacatcctgcggcccgtacatcggtggtcgtaaga

SEQ ID NO: 352909 - DNA, 55 bp, Artificial
  Synthetic oligonucleotide
cattctaccgtggtagtatgcgttacaaaatagcgcccctttcaaatgcatcacc

SEQ ID NO: 352910 - DNA, 54 bp, Artificial
  Synthetic oligonucleotide
cattctacggaccctaccaccgtcctaggtataggtacggtcttggaccaggca

SEQ ID NO: 352911 - DNA, 56 bp, Artificial
  Synthetic oligonucleotide
cattctacggtactggaacgcgtgctgaggttgaccgtattaactttaacaacata

SEQ ID NO: 352912 - DNA, 60 bp, Artificial
  Synthetic oligonucleotide
cattctactgactctacaacgattcttggcataggcacggtcttagaccaagcggagacc

SEQ ID NO: 352913 - DNA, 55 bp, Artificial
  Synthetic oligonucleotide
cattctactggcggtcatcattaagaagagtattagagcttccagattactaccg

SEQ ID NO: 352914 - DNA, 55 bp, Artificial
  Synthetic oligonucleotide
cattctactttaaacagtaattatggtgcgttgacgccgcctcctagagaagagg

SEQ ID NO: 352915 - DNA, 55 bp, Artificial
  Synthetic oligonucleotide
cattctagcgaggtagacagggaaagcacattatttaaatcggcgatcgcgtgcc

SEQ ID NO: 352916 - DNA, 60 bp, Artificial
  Synthetic oligonucleotide
cattctagtacactctacaagctttaatctcttagctgcaaggacctggtcaactgcttg

SEQ ID NO: 352917 - DNA, 55 bp, Artificial
  Synthetic oligonucleotide
cattctagtcaagaacatgaacatacatgggaaatcggaggaaagaaagataagg

SEQ ID NO: 352918 - DNA, 59 bp, Artificial
  Synthetic oligonucleotide
cattctatcaacatgtcacattgcgcatgcgaggattaagcaggttcggttcaagtaac

SEQ ID NO: 352919 - DNA, 55 bp, Artificial
  Synthetic oligonucleotide
cattctatctctgtggagggatatctcctccatagacatcaagaatgacttagtg

SEQ ID NO: 352920 - DNA, 52 bp, Artificial
  Synthetic oligonucleotide
cattctatgggggtatcccagggggaatatcaacccctatcacccaacaaac

SEQ ID NO: 352921 - DNA, 55 bp, Artificial
  Synthetic oligonucleotide
cattctattcatgtggggcatacatcatccacctactgacactgaacagacgaat

SEQ ID NO: 352922 - DNA, 59 bp, Artificial
  Synthetic oligonucleotide
cattctcacgaggatatgtagtcctacccaacggctcacaaggcccgatccctcgctac

SEQ ID NO: 352923 - DNA, 60 bp, Artificial
  Synthetic oligonucleotide
cattctccacaggcagcgttctcagtggctagggtgaccatccagcccatagccgcttgg

SEQ ID NO: 352924 - DNA, 55 bp, Artificial
  Synthetic oligonucleotide
cattctccagaactgatgccagaaaactgtctcttttctaatgaggagtttaacg

SEQ ID NO: 352925 - DNA, 51 bp, Artificial
  Synthetic oligonucleotide
cattctcctgtgtggattgggtgcatagattaacactagaagtgcagggtc

SEQ ID NO: 352926 - DNA, 56 bp, Artificial
  Synthetic oligonucleotide
cattctctctcctcttttgatccctaatacaatttcccggtgatcggagtcgaatt

SEQ ID NO: 352927 - DNA, 60 bp, Artificial
  Synthetic oligonucleotide
cattctctgccataaccatatcaattgcctccactatgtcttcgtgctttaattctctat

SEQ ID NO: 352928 - DNA, 55 bp, Artificial
  Synthetic oligonucleotide
cattctcttgtcatgaatctccactattacagaaccggtggcgttgatcggtacc

SEQ ID NO: 352929 - DNA, 56 bp, Artificial
  Synthetic oligonucleotide
cattctgagcaactgagaggataacactttgagatgaccttgatgtttaacaccgt

SEQ ID NO: 352930 - DNA, 60 bp, Artificial
  Synthetic oligonucleotide
cattctgagccgctggtagtggttgtgatgttgccttctttgtctatgtatgtgctccct

SEQ ID NO: 352931 - DNA, 59 bp, Artificial
  Synthetic oligonucleotide
cattctgagctaaggtctgaagctaacaatggagttgtgcgtctgaaaatgataactca

SEQ ID NO: 352932 - DNA, 55 bp, Artificial
  Synthetic oligonucleotide
cattctgagtccttaaaatcgattattcagcatctgatcaatgaccccactcttc

SEQ ID NO: 352933 - DNA, 50 bp, Artificial
  Synthetic oligonucleotide
cattctgcacttatgggttctgtgttaacgagaaagtttataagaagcga

SEQ ID NO: 352934 - DNA, 60 bp, Artificial
  Synthetic oligonucleotide
cattctgcagcatttgaagatctgagagtgtcaagctttatcagaggaacaagagtagtc

SEQ ID NO: 352935 - DNA, 58 bp, Artificial
  Synthetic oligonucleotide
cattctgccttacacggctaaccgcaacgctgatggacttatcccttccaccaaccta

SEQ ID NO: 352936 - DNA, 55 bp, Artificial
  Synthetic oligonucleotide
cattctggactgtggaattagaagaaaggatgtcatcggaacttgatcaataccc

SEQ ID NO: 352937 - DNA, 55 bp, Artificial
  Synthetic oligonucleotide
cattctggcagcctcccctagcacttcttccgtcgacctggaattggccccattc

SEQ ID NO: 352938 - DNA, 60 bp, Artificial
  Synthetic oligonucleotide
cattctgggagtaccgcaagcgtgtgttctagctggcagccgaagttctcatcaaagaat

SEQ ID NO: 352939 - DNA, 53 bp, Artificial
  Synthetic oligonucleotide
cattctgggatatcttcgacgttaaccggaactgttacctgaacgccgttagg

SEQ ID NO: 352940 - DNA, 60 bp, Artificial
  Synthetic oligonucleotide
cattctgtacgatgcatatttcaacttctcgtatgacatcatgactactgatggtgtaac

SEQ ID NO: 352941 - DNA, 60 bp, Artificial
  Synthetic oligonucleotide
cattctgtgatacgcaatgatgggaaacgtccattaggtatttcaacaaacccagatgac

SEQ ID NO: 352942 - DNA, 60 bp, Artificial
  Synthetic oligonucleotide
cattctgtgcagctttatataggtttaaccgctgtgcccagcggcattctcttatcgggg

SEQ ID NO: 352943 - DNA, 60 bp, Artificial
  Synthetic oligonucleotide
cattctgtggtttcgcatcgagagcgccctccggcatacgattcgcttgattttgaacca

SEQ ID NO: 352944 - DNA, 51 bp, Artificial
  Synthetic oligonucleotide
cattctgttcaatcgtccaaatggaatggtggctacgaacctgattctctc

SEQ ID NO: 352945 - DNA, 55 bp, Artificial
  Synthetic oligonucleotide
cattctgttgcagagggaactatatgcaaattttcagctcccgccaccgtccgcg

SEQ ID NO: 352946 - DNA, 55 bp, Artificial
  Synthetic oligonucleotide
cattcttaccgtagacactgtcgatcctctaaccgctgccgagccaaaccatagc

SEQ ID NO: 352947 - DNA, 59 bp, Artificial
  Synthetic oligonucleotide
cattcttattgtgaattatcattcgttcctcattctttggcttatattactttatacag

SEQ ID NO: 352948 - DNA, 55 bp, Artificial
  Synthetic oligonucleotide
cattcttcaggaacatggtttggcttacaaaaaagggatcaaactacccagttgc

SEQ ID NO: 352949 - DNA, 55 bp, Artificial
  Synthetic oligonucleotide
cattcttcaggaacatggtttggcttacaaagaaagggtcaaactacccaattgc

SEQ ID NO: 352950 - DNA, 57 bp, Artificial
  Synthetic oligonucleotide
cattcttggaccgtagtcctaactagctcgtttaattggcccattgacattgttata

SEQ ID NO: 352951 - DNA, 55 bp, Artificial
  Synthetic oligonucleotide
cattcttggaccgtgttcctaacaagttcgtttaattggcccattgacatcgtga

SEQ ID NO: 352952 - DNA, 55 bp, Artificial
  Synthetic oligonucleotide
cattctttaaagcccagtctttgagtgcggaattcttttcttcgtccaagtactc

SEQ ID NO: 352953 - DNA, 54 bp, Artificial
  Synthetic oligonucleotide
cattctttcagaaggactgtaataagtttacaacaggtgagaccatcgctcacg

SEQ ID NO: 352954 - DNA, 60 bp, Artificial
  Synthetic oligonucleotide
cattcttttcgtgtggggcatacatcatccacccaccgatactgaacagacaaatttgta

SEQ ID NO: 352955 - DNA, 60 bp, Artificial
  Synthetic oligonucleotide
cattcttttgctgagatgatgcttaaatatgcaaaacgtgaacgagaatattcagaattc

SEQ ID NO: 352956 - DNA, 55 bp, Artificial
  Synthetic oligonucleotide
cattcttttgtcatgaatctccacgaccacggatcctgttgcgtttatcggaacc

SEQ ID NO: 352957 - DNA, 58 bp, Artificial
  Synthetic oligonucleotide
cattgaaaacccgtctgggtatggcacatcaccaggacaagataacagagaaaacgta

SEQ ID NO: 352958 - DNA, 55 bp, Artificial
  Synthetic oligonucleotide
cattgaaaacggaactcagtggagctgttttcactatgtccttagttctccccga

SEQ ID NO: 352959 - DNA, 50 bp, Artificial
  Synthetic oligonucleotide
cattgaaaatgcgctgtacgaagctcaccatcatggacgggaatattatg

SEQ ID NO: 352960 - DNA, 59 bp, Artificial
  Synthetic oligonucleotide
cattgaacaaaagatcagttccagaaatagccacaagacctaaagtgaatggacaagga

SEQ ID NO: 352961 - DNA, 59 bp, Artificial
  Synthetic oligonucleotide
cattgaaccaaactgattatttagtttagagggatcagatacatcccacaacctgacaa

SEQ ID NO: 352962 - DNA, 60 bp, Artificial
  Synthetic oligonucleotide
cattgaaccaaactgattgttcagtttagagggatcagacacatcccacagtctgacgac

SEQ ID NO: 352963 - DNA, 54 bp, Artificial
  Synthetic oligonucleotide
cattgaaccctaaatactcttaagaaacgccaagtctgaggacgtaaacgagtc

SEQ ID NO: 352964 - DNA, 58 bp, Artificial
  Synthetic oligonucleotide
cattgaacgcgggggcgcgaggagatgtacaacaaatgttccagggtcgtaatgatcc

SEQ ID NO: 352965 - DNA, 55 bp, Artificial
  Synthetic oligonucleotide
cattgaactcaatgtatggtataccccatctgttcgaatggatacatttaaggct

SEQ ID NO: 352966 - DNA, 60 bp, Artificial
  Synthetic oligonucleotide
cattgaagctgtcgtcgattttgggatgaaagtgagcccatctctagatgttgacggtcg

SEQ ID NO: 352967 - DNA, 55 bp, Artificial
  Synthetic oligonucleotide
cattgaagcttgaaagctagttgtcggtttacgcatgtggataggggctgtggcc

SEQ ID NO: 352968 - DNA, 55 bp, Artificial
  Synthetic oligonucleotide
cattgaagtggcctcccacaccgggaataatatccacttttaaggaagtgcgagg

SEQ ID NO: 352969 - DNA, 55 bp, Artificial
  Synthetic oligonucleotide
cattgaatgcaaacttccatactcacccgccccttttgggctagttgcggggaaa

SEQ ID NO: 352970 - DNA, 60 bp, Artificial
  Synthetic oligonucleotide
cattgaatgctggtgctagaggtgacgtgcaacaaatctttcagggtcgtaatgatccca

SEQ ID NO: 352971 - DNA, 54 bp, Artificial
  Synthetic oligonucleotide
cattgaatttatctcgttgagacgaatcgaatgaaccctaacacgacccatgag

SEQ ID NO: 352972 - DNA, 60 bp, Artificial
  Synthetic oligonucleotide
cattgacaacgtaatgggaatgatcggaatattgcccgacatgaccccaaatactgagat

SEQ ID NO: 352973 - DNA, 55 bp, Artificial
  Synthetic oligonucleotide
cattgacaactactgggctacaaatagctccggaaaaggtacaactacaagatcc

SEQ ID NO: 352974 - DNA, 55 bp, Artificial
  Synthetic oligonucleotide
cattgacaaggactcgtgctcggtgcagctcgctatagccctgagggaccacatg

SEQ ID NO: 352975 - DNA, 53 bp, Artificial
  Synthetic oligonucleotide
cattgacaagttcgctcaggggtggggtcccatcacttacattaagccgcccg

SEQ ID NO: 352976 - DNA, 55 bp, Artificial
  Synthetic oligonucleotide
cattgacacacgaagaccacgcaattcagccacaaaactttatgcctgggccact

SEQ ID NO: 352977 - DNA, 52 bp, Artificial
  Synthetic oligonucleotide
cattgacagtctacccgacgtagaattagccccatacatggtcacagagatc

SEQ ID NO: 352978 - DNA, 58 bp, Artificial
  Synthetic oligonucleotide
cattgacataacgtttgtctgtagcaaacgaaacagccctaattacattgttaactga

SEQ ID NO: 352979 - DNA, 57 bp, Artificial
  Synthetic oligonucleotide
cattgacatggatcacgttcggttacgtcaatccgatttagtagcaaaaattccgga

SEQ ID NO: 352980 - DNA, 60 bp, Artificial
  Synthetic oligonucleotide
cattgaccgaagatcctgatgaagggacagctggagtagagtctgctgtcctaagaggat

SEQ ID NO: 352981 - DNA, 55 bp, Artificial
  Synthetic oligonucleotide
cattgaccgctacaaatttgtctggactgccgggtatattgcagggcgcgtaggt

SEQ ID NO: 352982 - DNA, 50 bp, Artificial
  Synthetic oligonucleotide
cattgaccgttttttaagagtccgagaccaacgagggaacgtactattgt

SEQ ID NO: 352983 - DNA, 55 bp, Artificial
  Synthetic oligonucleotide
cattgacctggctcgcgcctacgctgacgtcggggcgtccaagagtgctaccctg

SEQ ID NO: 352984 - DNA, 60 bp, Artificial
  Synthetic oligonucleotide
cattgacctgtttggacctgctcactacaaggaattgtcagacttaaacaccatcagtca

SEQ ID NO: 352985 - DNA, 60 bp, Artificial
  Synthetic oligonucleotide
cattgacgggcagtttcaagtgcctgccttgagcgagttcgctaacctgctcagttcaag

SEQ ID NO: 352986 - DNA, 60 bp, Artificial
  Synthetic oligonucleotide
cattgacgggtatatagacacctgtatttctgcatcttttagacgaggagcttgccatgc

SEQ ID NO: 352987 - DNA, 55 bp, Artificial
  Synthetic oligonucleotide
cattgacgtagacgtaggtaataaccggacaaatattacctttagtgcagaggtg

SEQ ID NO: 352988 - DNA, 60 bp, Artificial
  Synthetic oligonucleotide
cattgactaagtataatttcatccttgcgcacggaatgatatgacacaaatgcacagagt

SEQ ID NO: 352989 - DNA, 54 bp, Artificial
  Synthetic oligonucleotide
cattgactgtaaagactaaaggtggaactgtaccttttttggcccgcagtattc

SEQ ID NO: 352990 - DNA, 53 bp, Artificial
  Synthetic oligonucleotide
cattgactgtaacgttgccgttacccaaacggttgacttcagtttggacccca

SEQ ID NO: 352991 - DNA, 55 bp, Artificial
  Synthetic oligonucleotide
cattgacttgctagaaaacggatatccactaaaagcagaagtagaggttccggac

SEQ ID NO: 352992 - DNA, 60 bp, Artificial
  Synthetic oligonucleotide
cattgactttaatgagtggcattatatcagctattggtgtggcgttctcttttcttgcaa

SEQ ID NO: 352993 - DNA, 53 bp, Artificial
  Synthetic oligonucleotide
cattgagaaactcggacggaaaacggcggcggaatgttaccgctactacccag

SEQ ID NO: 352994 - DNA, 60 bp, Artificial
  Synthetic oligonucleotide
cattgagaacgtctgccttgacactagtcgtccaggcagagagccctctcctaagagatt

SEQ ID NO: 352995 - DNA, 55 bp, Artificial
  Synthetic oligonucleotide
cattgagaagcagacagaggccctgctagaagacgtatccaaactggtggtctca

SEQ ID NO: 352996 - DNA, 55 bp, Artificial
  Synthetic oligonucleotide
cattgagaagtcgctgcagagggagttgggtttcacacgtgagatgatggcggaa

SEQ ID NO: 352997 - DNA, 60 bp, Artificial
  Synthetic oligonucleotide
cattgagacccggatgggtgttcaaaactccatcgcatagtgaagtaggccacagttatg

SEQ ID NO: 352998 - DNA, 59 bp, Artificial
  Synthetic oligonucleotide
cattgagacgagtaccattaattcgatgattgtgccctcacgtttaaagttattcatgg

SEQ ID NO: 352999 - DNA, 58 bp, Artificial
  Synthetic oligonucleotide
cattgagagaagtctttcatattcagtactagcctcaattttccgtttgtgaccttta

SEQ ID NO: 353000 - DNA, 60 bp, Artificial
  Synthetic oligonucleotide
cattgagaggactatctatcggatggtcgacttgcccgtgttacagccgcggctgtgcac

SEQ ID NO: 353001 - DNA, 55 bp, Artificial
  Synthetic oligonucleotide
cattgagatgagaaattctgaagggttctacatgcccaggtatggactactgagg

SEQ ID NO: 353002 - DNA, 60 bp, Artificial
  Synthetic oligonucleotide
cattgagatggcaattcggactaagcgcacaatgttacagcttgccccctgcgaagtgga

SEQ ID NO: 353003 - DNA, 56 bp, Artificial
  Synthetic oligonucleotide
cattgagctttctacaagggactttccactggggactttccagagaaggcgtgacc

SEQ ID NO: 353004 - DNA, 50 bp, Artificial
  Synthetic oligonucleotide
cattgaggcttgtggatatagtgacagggtaatgcaactaacactcggga

SEQ ID NO: 353005 - DNA, 51 bp, Artificial
  Synthetic oligonucleotide
cattgagtcaaatctatgtgacaatcctaaatcacattctagttctttttc

SEQ ID NO: 353006 - DNA, 59 bp, Artificial
  Synthetic oligonucleotide
cattgagtcattcggtggtatcaccccaaaggctaaagggattccgtttgatgctgcga

SEQ ID NO: 353007 - DNA, 55 bp, Artificial
  Synthetic oligonucleotide
cattgagtccccaatccacggttagagatttcgacaactattgtaaggtagtagt

SEQ ID NO: 353008 - DNA, 55 bp, Artificial
  Synthetic oligonucleotide
cattgagtctcttggagccgcgttcgggagtgggttcacacaacaaataggggac

SEQ ID NO: 353009 - DNA, 54 bp, Artificial
  Synthetic oligonucleotide
cattgagtggcaggtggcgaatgtatatgagggctaaaacatatcctagtcaac

SEQ ID NO: 353010 - DNA, 52 bp, Artificial
  Synthetic oligonucleotide
cattgataacatccagtcttcgtcaggattgcaaagaattatagaagggatc

SEQ ID NO: 353011 - DNA, 58 bp, Artificial
  Synthetic oligonucleotide
cattgatacactgtaacacctcaaccattacccaggcctgtccaaaggtatcctttga

SEQ ID NO: 353012 - DNA, 60 bp, Artificial
  Synthetic oligonucleotide
cattgatacaggtgcaaggtcagacaatttaaatgaaggcgtcatagagtactctgagag

SEQ ID NO: 353013 - DNA, 60 bp, Artificial
  Synthetic oligonucleotide
cattgatacgatgacgttgaccctcgcaaaccaactgtgctacctatataagtcctcgga

SEQ ID NO: 353014 - DNA, 60 bp, Artificial
  Synthetic oligonucleotide
cattgatattagctagaaattaatcccatcagaggactaatgactcttgaatgtcatgtc

SEQ ID NO: 353015 - DNA, 60 bp, Artificial
  Synthetic oligonucleotide
cattgatattggacgcagtacaatacagaatacaatgtctgcagatgtgcagacgacaac

SEQ ID NO: 353016 - DNA, 55 bp, Artificial
  Synthetic oligonucleotide
cattgatcatgaattcagtgagatcgaagccagactcaatatgatcaacaacaag

SEQ ID NO: 353017 - DNA, 57 bp, Artificial
  Synthetic oligonucleotide
cattgatccttctagaggtttacccttcacatcctcaaataataccatgtattgatc

SEQ ID NO: 353018 - DNA, 60 bp, Artificial
  Synthetic oligonucleotide
cattgatgaatgatgacaacggaaatggaggaacccatggttccggctctttgacgaaga

SEQ ID NO: 353019 - DNA, 53 bp, Artificial
  Synthetic oligonucleotide
cattgatgacatttgaattgtctaccctgtacatgaccctccatggattagga

SEQ ID NO: 353020 - DNA, 55 bp, Artificial
  Synthetic oligonucleotide
cattgatgacttctatgggtggctgcccttctgtgagctgctgcgagtgaccgac

SEQ ID NO: 353021 - DNA, 60 bp, Artificial
  Synthetic oligonucleotide
cattgatgagttgccctgtgggtgaggctccttccccatataactcaaggtttgagtctg

SEQ ID NO: 353022 - DNA, 60 bp, Artificial
  Synthetic oligonucleotide
cattgatgctttacatggcttgtactcatgctagcaacccagtttatgctacgcttaaga

SEQ ID NO: 353023 - DNA, 55 bp, Artificial
  Synthetic oligonucleotide
cattgatgtaagataagtttacgcgacagcgcgtcccgtgggtatcccaattcac

SEQ ID NO: 353024 - DNA, 58 bp, Artificial
  Synthetic oligonucleotide
cattgatgtgtgcagttctttgcctgcagctgtatggtctggggggaacccatgggtc

SEQ ID NO: 353025 - DNA, 59 bp, Artificial
  Synthetic oligonucleotide
cattgatgttcacttacaaaagcatgatgagagagctctctattaggaacattcctgca

SEQ ID NO: 353026 - DNA, 58 bp, Artificial
  Synthetic oligonucleotide
cattgcaaaactgctccaaacaagttctcacttggaggtaaaaagtgtgctacttcaa

SEQ ID NO: 353027 - DNA, 60 bp, Artificial
  Synthetic oligonucleotide
cattgcaacgagagcagtggaacttctgggacgcagcagtctcaggggactacagaaggg

SEQ ID NO: 353028 - DNA, 55 bp, Artificial
  Synthetic oligonucleotide
cattgcaagcatgaggaggaactattttactgctgaggtgtcccattgtagggca

SEQ ID NO: 353029 - DNA, 51 bp, Artificial
  Synthetic oligonucleotide
cattgcaagccacaatggcatgtttaatgtgtagccaaatggggatgaagc

SEQ ID NO: 353030 - DNA, 60 bp, Artificial
  Synthetic oligonucleotide
cattgcaaggtggcgcttattgatgacgccacacctcagtgctgggactacttagacacg

SEQ ID NO: 353031 - DNA, 54 bp, Artificial
  Synthetic oligonucleotide
cattgcacgtaatgacttctccgagattgaacttgctgctattccgtacaacat

SEQ ID NO: 353032 - DNA, 55 bp, Artificial
  Synthetic oligonucleotide
cattgcactcacaacagggaaggggacctcaacaagtttatgcatgtgccaagtt

SEQ ID NO: 353033 - DNA, 60 bp, Artificial
  Synthetic oligonucleotide
cattgcacttcaagcaaaatgaatgcagcatcccctcgaataatcaagtagaaaaggaaa

SEQ ID NO: 353034 - DNA, 55 bp, Artificial
  Synthetic oligonucleotide
cattgcagactacatactgccccatttccctgagatcacaatgaaggacagcctg

SEQ ID NO: 353035 - DNA, 55 bp, Artificial
  Synthetic oligonucleotide
cattgcaggaagacaaaagcggtgccactctggatatagtgtctaccatgtgcaa

SEQ ID NO: 353036 - DNA, 60 bp, Artificial
  Synthetic oligonucleotide
cattgcagggccactgaatacataatgaagggagtgtacataaatacggctttgctcaat

SEQ ID NO: 353037 - DNA, 60 bp, Artificial
  Synthetic oligonucleotide
cattgcaggtactactagtaccttgcaagagcaagtaggatggatgacatccaatccacc

SEQ ID NO: 353038 - DNA, 57 bp, Artificial
  Synthetic oligonucleotide
cattgcaggttacatctccttcattgccggtttctgttccgttaaattcgcaggacg

SEQ ID NO: 353039 - DNA, 60 bp, Artificial
  Synthetic oligonucleotide
cattgcagtgcttacttaagactgtgaatgacaggggattgaatgtcttcgtatacactg

SEQ ID NO: 353040 - DNA, 55 bp, Artificial
  Synthetic oligonucleotide
cattgcagtggaggtcaagctctgtggcaggatgaggattggtgtaggactctgc

SEQ ID NO: 353041 - DNA, 60 bp, Artificial
  Synthetic oligonucleotide
cattgcatcgtcctatgttatcatccaaacagggtagtgtacgtgttagtagaattggac

SEQ ID NO: 353042 - DNA, 60 bp, Artificial
  Synthetic oligonucleotide
cattgcattatgtacaccataagcctagggatggaaaggagatgaccattaccagcccat

SEQ ID NO: 353043 - DNA, 60 bp, Artificial
  Synthetic oligonucleotide
cattgcatttcgggcaaaatgaatgcagcatctccgcgaacagtcaggtagtgccatgtg

SEQ ID NO: 353044 - DNA, 59 bp, Artificial
  Synthetic oligonucleotide
cattgccaagagctagggtttcattgcaagtgggcgatgacttgaggtccatgcaagac

SEQ ID NO: 353045 - DNA, 60 bp, Artificial
  Synthetic oligonucleotide
cattgccaaggcacaggagctctacaagaattcgtctgcactccgtgcacaaggtgccca

SEQ ID NO: 353046 - DNA, 57 bp, Artificial
  Synthetic oligonucleotide
cattgccaatggtgttctgcagacctttatgaggatggcttggggtggcagttacat

SEQ ID NO: 353047 - DNA, 55 bp, Artificial
  Synthetic oligonucleotide
cattgccaccagttaatgtggatataggttcaacgggccaaccgtttgccttgtc

SEQ ID NO: 353048 - DNA, 60 bp, Artificial
  Synthetic oligonucleotide
cattgccacgacaaacgccaggctagaggacctggatgacgcattcaaaagaagattccc

SEQ ID NO: 353049 - DNA, 59 bp, Artificial
  Synthetic oligonucleotide
cattgccagataagttgatgcttgaaacctatctacgtaagttgagccgccactttgag

SEQ ID NO: 353050 - DNA, 55 bp, Artificial
  Synthetic oligonucleotide
cattgccagtagattacagtgattacgatgttgtggaatgcgggattatagacat

SEQ ID NO: 353051 - DNA, 60 bp, Artificial
  Synthetic oligonucleotide
cattgcccaaggcacaagcagacgtcgatcatggacgtacaggcccatgtatcgaaagcc

SEQ ID NO: 353052 - DNA, 60 bp, Artificial
  Synthetic oligonucleotide
cattgcccctggcaatggacttacatttactgctcatgggcagacccgtctgtactttaa

SEQ ID NO: 353053 - DNA, 60 bp, Artificial
  Synthetic oligonucleotide
cattgccctcgccacaaacagaaggagatcatgggcccaaaggcccatctatcggaagcc

SEQ ID NO: 353054 - DNA, 55 bp, Artificial
  Synthetic oligonucleotide
cattgccgaagaatttcaatggactacagtgaagcaaaatgggaaatctggagct

SEQ ID NO: 353055 - DNA, 56 bp, Artificial
  Synthetic oligonucleotide
cattgccgctttaatgaggaaggtgacttcaagtacatgacacacgagaatgctat

SEQ ID NO: 353056 - DNA, 60 bp, Artificial
  Synthetic oligonucleotide
cattgccggatggctcctaggaaacccagaatgcgaattactatttgcagtaaactcatg

SEQ ID NO: 353057 - DNA, 56 bp, Artificial
  Synthetic oligonucleotide
cattgcctacaatagggactgggaaactagggctctccttgaggggaggccattgt

SEQ ID NO: 353058 - DNA, 60 bp, Artificial
  Synthetic oligonucleotide
cattgcctcatctgtatacttcctaagtgcggctatattccaggattctggcaggcaaga

SEQ ID NO: 353059 - DNA, 60 bp, Artificial
  Synthetic oligonucleotide
cattgcctcttgcaccaacacaatatacaccacacatggtttatgactttcgtggtcaaa

SEQ ID NO: 353060 - DNA, 55 bp, Artificial
  Synthetic oligonucleotide
cattgccttaccgaaaggggtagaagtatcgaaattctccgacaaactcatgaag

SEQ ID NO: 353061 - DNA, 60 bp, Artificial
  Synthetic oligonucleotide
cattgccttgtgcatgggttcagtggtcctcaaccgaaccgcggcctcaatgaccgaggc

SEQ ID NO: 353062 - DNA, 58 bp, Artificial
  Synthetic oligonucleotide
cattgccttttcacaacatccacccactggcaataggtgagtgccccaaatacgtaaa

SEQ ID NO: 353063 - DNA, 60 bp, Artificial
  Synthetic oligonucleotide
cattgcgaaagcgcaagagctctataggaattcttctgcacttcgtgcacagggtgcaca

SEQ ID NO: 353064 - DNA, 60 bp, Artificial
  Synthetic oligonucleotide
cattgcgacgcactgcttcgactgccccctggaatggcctcttttgcgataaggaatgcg

SEQ ID NO: 353065 - DNA, 60 bp, Artificial
  Synthetic oligonucleotide
cattgcgcaaccatggagtcacaccttacagtgtgcaacaactgtgccgcactcttggaa

SEQ ID NO: 353066 - DNA, 54 bp, Artificial
  Synthetic oligonucleotide
cattgcgccggttaaagtcgtccagccgatcagatgacgggccagacatggcga

SEQ ID NO: 353067 - DNA, 54 bp, Artificial
  Synthetic oligonucleotide
cattgcgcctggaaacgggcttgagtttacggttcacggccagtgccgtctgta

SEQ ID NO: 353068 - DNA, 60 bp, Artificial
  Synthetic oligonucleotide
cattgcgcttcttgtagatatagctgagccttacgtacagagcgaagcgtcttggcacgt

SEQ ID NO: 353069 - DNA, 58 bp, Artificial
  Synthetic oligonucleotide
cattgcgcttggctttgaatctcctaaatcgcaaggtggaaatagaatggtttggtta

SEQ ID NO: 353070 - DNA, 60 bp, Artificial
  Synthetic oligonucleotide
cattgcggcatctgtggcgaacccatcgactacgagctcccgcatctcgacccgtgggag

SEQ ID NO: 353071 - DNA, 60 bp, Artificial
  Synthetic oligonucleotide
cattgcgtagccacagggtcccagagccacgtgtacgtcgcactagcctcagtgattcta

SEQ ID NO: 353072 - DNA, 60 bp, Artificial
  Synthetic oligonucleotide
cattgcgtcattttgaccgcaatgattgttcaactcttaaggaaattctccttacatatg

SEQ ID NO: 353073 - DNA, 60 bp, Artificial
  Synthetic oligonucleotide
cattgctaaccaagcagctgtcctaatggggcttggaaaaggatggccgctccacagaat

SEQ ID NO: 353074 - DNA, 60 bp, Artificial
  Synthetic oligonucleotide
cattgctataccacacgatatagacttaggggattcccgtgtggtcatacaagactacga

SEQ ID NO: 353075 - DNA, 56 bp, Artificial
  Synthetic oligonucleotide
cattgctccctctcgtatcgaatccggtgtatatagctttactttgttacaacccg

SEQ ID NO: 353076 - DNA, 51 bp, Artificial
  Synthetic oligonucleotide
cattgctcgctgtaattcaatgtactgaatacacaacacatgtttgatagt

SEQ ID NO: 353077 - DNA, 60 bp, Artificial
  Synthetic oligonucleotide
cattgctcggtgacagtgaccagatgagctttgcacccgccgagtacgcacaactttact

SEQ ID NO: 353078 - DNA, 59 bp, Artificial
  Synthetic oligonucleotide
cattgctgacttcggagaagtccagcccatttaaaaggctagttgcgtccttaatgaca

SEQ ID NO: 353079 - DNA, 60 bp, Artificial
  Synthetic oligonucleotide
cattgctggacaaaatacagatggtagagaatgtatgtcagtggattataaacaaacaca

SEQ ID NO: 353080 - DNA, 60 bp, Artificial
  Synthetic oligonucleotide
cattgctggctgcgacgggaggactgcgaggaataaatcgatccttgagacttatcatag

SEQ ID NO: 353081 - DNA, 60 bp, Artificial
  Synthetic oligonucleotide
cattgctgtcatctactcccagtactccatgcaaaaccttccccttcttgtctccggtga

SEQ ID NO: 353082 - DNA, 50 bp, Artificial
  Synthetic oligonucleotide
cattgcttatggatccaaatttagcacctacgcgggtacacgcacaggag

SEQ ID NO: 353083 - DNA, 56 bp, Artificial
  Synthetic oligonucleotide
cattgcttgaatggtagaagatgtcactacagtcataattattttgaatggcctcc

SEQ ID NO: 353084 - DNA, 56 bp, Artificial
  Synthetic oligonucleotide
cattgcttttcctggcaattcggttattgagacgtatttcgacgggtacgatgttg

SEQ ID NO: 353085 - DNA, 60 bp, Artificial
  Synthetic oligonucleotide
cattggaaacatgtagagccaaggcccacatggcaattgaaatacacttggcattagaga

SEQ ID NO: 353086 - DNA, 55 bp, Artificial
  Synthetic oligonucleotide
cattggaacatgttctgtacaatgattaccggctactaacaccttctgaccgggc

SEQ ID NO: 353087 - DNA, 55 bp, Artificial
  Synthetic oligonucleotide
cattggaatagatgagcaaagctcaatctacaaggatatgccatctgccaatcac

SEQ ID NO: 353088 - DNA, 55 bp, Artificial
  Synthetic oligonucleotide
cattggaatagctggaggaaacatttactgcctagatatgactggaggccctaca

SEQ ID NO: 353089 - DNA, 55 bp, Artificial
  Synthetic oligonucleotide
cattggacaaagtgttagagtctaaaacaagagccattgatgcttgtcctttaga

SEQ ID NO: 353090 - DNA, 51 bp, Artificial
  Synthetic oligonucleotide
cattggacacctgaggtgaagttgggaagcgaggcccctcgcacaactttg

SEQ ID NO: 353091 - DNA, 51 bp, Artificial
  Synthetic oligonucleotide
cattggacagttgggaaaatctatggaattggttcagcatatcaaggtggt

SEQ ID NO: 353092 - DNA, 51 bp, Artificial
  Synthetic oligonucleotide
cattggactcttttgagccaatagtggctgaaccagatgacagggaggtct

SEQ ID NO: 353093 - DNA, 57 bp, Artificial
  Synthetic oligonucleotide
cattggacttagagatcactcaggaaaataacaagttaatctatgatcctgatcctc

SEQ ID NO: 353094 - DNA, 60 bp, Artificial
  Synthetic oligonucleotide
cattggagaatgggagcactcggctggttttgcgagctgggaggaagttccattctgctc

SEQ ID NO: 353095 - DNA, 55 bp, Artificial
  Synthetic oligonucleotide
cattggagagtcatcgtcaagtgccgaggtagaagaacaccgcaccgtccgtgtc

SEQ ID NO: 353096 - DNA, 60 bp, Artificial
  Synthetic oligonucleotide
cattggagatcagaaatagcgtcgtcgagggaataacagtttggttgaagaagcatgtaa

SEQ ID NO: 353097 - DNA, 60 bp, Artificial
  Synthetic oligonucleotide
cattggagatttgattgcagagctgtccttttgagaggaccaacgtgtgcgacgtacaaa

SEQ ID NO: 353098 - DNA, 55 bp, Artificial
  Synthetic oligonucleotide
cattggagcatatccggctacgcatcttttggatatgaatttgcgtggctggaat

SEQ ID NO: 353099 - DNA, 56 bp, Artificial
  Synthetic oligonucleotide
cattggagggtccctgtcggcatccctcaggtagaatgcactccatctgggtgctg

SEQ ID NO: 353100 - DNA, 55 bp, Artificial
  Synthetic oligonucleotide
cattggaggtcgcaggttcatatataagatttgtgacagtctttcgaatgggccc

SEQ ID NO: 353101 - DNA, 55 bp, Artificial
  Synthetic oligonucleotide
cattggataccaaacaaacaattcgactgaaacggtaaacacactaattgaacaa

SEQ ID NO: 353102 - DNA, 55 bp, Artificial
  Synthetic oligonucleotide
cattggataccctgatcgagtgagtttatttactgcagaacgtcctcgtgaaggt

SEQ ID NO: 353103 - DNA, 60 bp, Artificial
  Synthetic oligonucleotide
cattggatatcaaacaaacaactcgactgagacagtaaacacactaattgagcaaaacat

SEQ ID NO: 353104 - DNA, 60 bp, Artificial
  Synthetic oligonucleotide
cattggatatgattcaataacatctcagagaactaagttgtatgatccaattattcagga

SEQ ID NO: 353105 - DNA, 59 bp, Artificial
  Synthetic oligonucleotide
cattggatcgcgtctgcttggtgtggtaattaaagtctggcacgttgtccacgcgccgc

SEQ ID NO: 353106 - DNA, 57 bp, Artificial
  Synthetic oligonucleotide
cattggatgaccgcgcccgtaaaagaaagtggtccccacgcacgtgttgctgtcggc

SEQ ID NO: 353107 - DNA, 60 bp, Artificial
  Synthetic oligonucleotide
cattggatgagcatgacgctaatgtaaggaacctacacgatagaatcagaagggtcctaa

SEQ ID NO: 353108 - DNA, 59 bp, Artificial
  Synthetic oligonucleotide
cattggatttggaacattgctcattgaattcggcttgaaattaaggtcccgatggactc

SEQ ID NO: 353109 - DNA, 60 bp, Artificial
  Synthetic oligonucleotide
cattggcaaccaaattgtgatgctgaaggaagaaatgttgaggctgttcctccttgatta

SEQ ID NO: 353110 - DNA, 60 bp, Artificial
  Synthetic oligonucleotide
cattggcaactgcttgatcaataatcgtgtccacagtttcagccaattggtgtggttcct

SEQ ID NO: 353111 - DNA, 55 bp, Artificial
  Synthetic oligonucleotide
cattggcaagataggattaatggatcaaggggagtaaatgggacgctctggggag

SEQ ID NO: 353112 - DNA, 55 bp, Artificial
  Synthetic oligonucleotide
cattggcacacatggaatacccagtcaaggttagactacttgacgtcgacgaccg

SEQ ID NO: 353113 - DNA, 60 bp, Artificial
  Synthetic oligonucleotide
cattggcagccagcttcaacaatatctcagtgtaagtggtgtaacgtaaaatatgcattt

SEQ ID NO: 353114 - DNA, 59 bp, Artificial
  Synthetic oligonucleotide
cattggcaggtagactatacacattacaaagaacacataatattagtatgggtagagac

SEQ ID NO: 353115 - DNA, 55 bp, Artificial
  Synthetic oligonucleotide
cattggcccagcggatgtaatacctattgatacagtcactccaattgaccccgca

SEQ ID NO: 353116 - DNA, 59 bp, Artificial
  Synthetic oligonucleotide
cattggccgcacccatgacgtcagacccccactccccagtcaaagtgttcatgtcactg

SEQ ID NO: 353117 - DNA, 59 bp, Artificial
  Synthetic oligonucleotide
cattggccggatggaactccttgcgagcccattcttcctccgtttgtcattgagggcac

SEQ ID NO: 353118 - DNA, 54 bp, Artificial
  Synthetic oligonucleotide
cattggcgcgtaacgaatgaaaactctttcttcgaaaaacaccgatacaacgga

SEQ ID NO: 353119 - DNA, 58 bp, Artificial
  Synthetic oligonucleotide
cattggcgctacaggaacagcaaacgtacctacaaaagtgcaaccagtaattccaaca

SEQ ID NO: 353120 - DNA, 55 bp, Artificial
  Synthetic oligonucleotide
cattggctaatacagactagacttaacagggcgcaacagcagcaaaccccttccc

SEQ ID NO: 353121 - DNA, 50 bp, Artificial
  Synthetic oligonucleotide
cattggctacaacacaaatcgcagcagactacggtatttcagcgcaaaag

SEQ ID NO: 353122 - DNA, 60 bp, Artificial
  Synthetic oligonucleotide
cattggctcctcttgtctactattccactacggattgtagcagtgagcagccaatagttg

SEQ ID NO: 353123 - DNA, 59 bp, Artificial
  Synthetic oligonucleotide
cattggctcgttgctaccaccaattgcgttaggtgtttctctgatcgtaaggagcttac

SEQ ID NO: 353124 - DNA, 56 bp, Artificial
  Synthetic oligonucleotide
cattggctgaagtgccccagtgcccgcccctagggaggagaaaatgacgcctaacg

SEQ ID NO: 353125 - DNA, 55 bp, Artificial
  Synthetic oligonucleotide
cattggctgcagtatgccccgtgcccgcccctagggagggttcaatgacgccgtt

SEQ ID NO: 353126 - DNA, 55 bp, Artificial
  Synthetic oligonucleotide
cattggctgcgtgaacgttgcagcgacctcctcctttgttctacctcggaggttt

SEQ ID NO: 353127 - DNA, 60 bp, Artificial
  Synthetic oligonucleotide
cattggctgtgctgtatgctaagaacatcgtagtgaaacgttgggtggggcctgacttgg

SEQ ID NO: 353128 - DNA, 55 bp, Artificial
  Synthetic oligonucleotide
cattggcttataactatgagcctgaacagctgaataagactgatcctgagatgaa

SEQ ID NO: 353129 - DNA, 56 bp, Artificial
  Synthetic oligonucleotide
cattggctttaccagttgcggctactgaggttgagcgccctaaagaagtgcctgct

SEQ ID NO: 353130 - DNA, 55 bp, Artificial
  Synthetic oligonucleotide
cattggctttggtcgcatctcacagccgagcgcctgggtacctcaggtaggggta

SEQ ID NO: 353131 - DNA, 55 bp, Artificial
  Synthetic oligonucleotide
cattgggaactgcccctcccgttcactgctgaccaaccggtacgagccggtttgc

SEQ ID NO: 353132 - DNA, 59 bp, Artificial
  Synthetic oligonucleotide
cattgggacacaggagtggtatactactatccctaaatatgtagccactcaggggtatc

SEQ ID NO: 353133 - DNA, 60 bp, Artificial
  Synthetic oligonucleotide
cattgggagagttttcacccggacgaatttcgagaaccatgatgcatagcgcgctcttaa

SEQ ID NO: 353134 - DNA, 55 bp, Artificial
  Synthetic oligonucleotide
cattgggatgctataatgcggaccattctacctccaacacctgaaggtgcggttc

SEQ ID NO: 353135 - DNA, 50 bp, Artificial
  Synthetic oligonucleotide
cattgggattggagcctaacgtcgaaagcattcctgccggagaggttgaa

SEQ ID NO: 353136 - DNA, 55 bp, Artificial
  Synthetic oligonucleotide
cattgggcacttgcttgcgtattcttgcacacacgtcttcccatggtacgctgcc

SEQ ID NO: 353137 - DNA, 55 bp, Artificial
  Synthetic oligonucleotide
cattgggcccgcatgggcagacaatgtggaacggactgcaagggagaccatgagc

SEQ ID NO: 353138 - DNA, 55 bp, Artificial
  Synthetic oligonucleotide
cattgggccgccgggatagttacccaatggctcatacatagtcatcatggtcccc

SEQ ID NO: 353139 - DNA, 55 bp, Artificial
  Synthetic oligonucleotide
cattgggcgatgattaagagttcatgggatatacatcaaccagaggcagtgttag

SEQ ID NO: 353140 - DNA, 55 bp, Artificial
  Synthetic oligonucleotide
cattgggctggaataatgaaccataaaaccgtctcatttgataactgaacggtca

SEQ ID NO: 353141 - DNA, 60 bp, Artificial
  Synthetic oligonucleotide
cattgggtgacagaatcaatgctgtcgaaccacgagttgacagtctggatacggtcacgt

SEQ ID NO: 353142 - DNA, 57 bp, Artificial
  Synthetic oligonucleotide
cattgggttacaaagactgatattgaggaatacttgttaccaggatggaaattaaca

SEQ ID NO: 353143 - DNA, 60 bp, Artificial
  Synthetic oligonucleotide
cattggtaattcgacgggcttccttccaacatctggcatgtatgctatctccactcaaga

SEQ ID NO: 353144 - DNA, 54 bp, Artificial
  Synthetic oligonucleotide
cattggtatcggttcttccttcgatttgtggtaatgttggaaacgttaatcgat

SEQ ID NO: 353145 - DNA, 59 bp, Artificial
  Synthetic oligonucleotide
cattggtccccacttgctgtggtccaagctataagaaacttggcctaaagacacattca

SEQ ID NO: 353146 - DNA, 56 bp, Artificial
  Synthetic oligonucleotide
cattggtcctttcgaatgcttgtgagttgggtaactgggtcttttgtaagatagaa

SEQ ID NO: 353147 - DNA, 55 bp, Artificial
  Synthetic oligonucleotide
cattggtgaagttaacgtagcactccgcacctgtgaatattacgggttagtgtgc

SEQ ID NO: 353148 - DNA, 55 bp, Artificial
  Synthetic oligonucleotide
cattggtggctcgatttattaggttgctctcgtctgtctcgtattgatttggccg

SEQ ID NO: 353149 - DNA, 60 bp, Artificial
  Synthetic oligonucleotide
cattggtggttggaccacagctaattccaaatcacaggtgaatagacaagtcatagttga

SEQ ID NO: 353150 - DNA, 57 bp, Artificial
  Synthetic oligonucleotide
cattggtgtcttccatgttacaactgacaccctgtctatgaacgaaaaccttggttg

SEQ ID NO: 353151 - DNA, 58 bp, Artificial
  Synthetic oligonucleotide
cattggttaatgtttcacaaataacataatggatagcccgcccagattcgtaagtgtg

SEQ ID NO: 353152 - DNA, 57 bp, Artificial
  Synthetic oligonucleotide
cattggttgctcctgagcgaccacgttgaaatatgttaacgcctaacggcgaatccc

SEQ ID NO: 353153 - DNA, 60 bp, Artificial
  Synthetic oligonucleotide
cattggttggtcaagtactagttgccatgatggtagagccaggatgtcaatatgtatatc

SEQ ID NO: 353154 - DNA, 55 bp, Artificial
  Synthetic oligonucleotide
cattgtaaactctattactaagcaccctgatatgcttaaaatggctgctgagcct

SEQ ID NO: 353155 - DNA, 51 bp, Artificial
  Synthetic oligonucleotide
cattgtaatgttagtagaacagactggaattatgcattacagaatgtgact

SEQ ID NO: 353156 - DNA, 60 bp, Artificial
  Synthetic oligonucleotide
cattgtacaactccgaagagtgctaactacagctacaataactcttttaccagatgcaga

SEQ ID NO: 353157 - DNA, 60 bp, Artificial
  Synthetic oligonucleotide
cattgtacaatacatgagacattgctctaattacattattgatgctaataactcctaaat

SEQ ID NO: 353158 - DNA, 58 bp, Artificial
  Synthetic oligonucleotide
cattgtacagcttcgaagagttttaactacagctacaataacacttttaccggatgca

SEQ ID NO: 353159 - DNA, 55 bp, Artificial
  Synthetic oligonucleotide
cattgtacgctggcgcggtatatgttgttttgtttcgaacaagattttcagtgat

SEQ ID NO: 353160 - DNA, 59 bp, Artificial
  Synthetic oligonucleotide
cattgtactagtgccactcctaatgccactgccactcaaaacggaacaaccctgaagga

SEQ ID NO: 353161 - DNA, 51 bp, Artificial
  Synthetic oligonucleotide
cattgtactatatattgagatggaccaattaaatgccttgtttcgtgtcta

SEQ ID NO: 353162 - DNA, 53 bp, Artificial
  Synthetic oligonucleotide
cattgtagatctcatatttctgatgcctctgggttaagattttcggtcaatta

SEQ ID NO: 353163 - DNA, 60 bp, Artificial
  Synthetic oligonucleotide
cattgtaggtgctccttcccagaagtctgatgtatatgtaaatggttatttccgagtgta

SEQ ID NO: 353164 - DNA, 51 bp, Artificial
  Synthetic oligonucleotide
cattgtagtgttgctatataggttgctacactgatcccttccttttgtgta

SEQ ID NO: 353165 - DNA, 57 bp, Artificial
  Synthetic oligonucleotide
cattgtatatgaatttgcccatgttatttggtggtggtgatcccaacttgttatatc

SEQ ID NO: 353166 - DNA, 57 bp, Artificial
  Synthetic oligonucleotide
cattgtattagtggcggttatcggcgcattacttcaaactcctcctgaaaccattaa

SEQ ID NO: 353167 - DNA, 60 bp, Artificial
  Synthetic oligonucleotide
cattgtattgatctcgtcgagaccgatccaacgagccctggcccatttcaagactcctcc

SEQ ID NO: 353168 - DNA, 57 bp, Artificial
  Synthetic oligonucleotide
cattgtcaaaagattatggtatagttagtaattcattgaaaagacaattgttaattg

SEQ ID NO: 353169 - DNA, 60 bp, Artificial
  Synthetic oligonucleotide
cattgtcacctcagcagaaatccaagagaaggctctttgcagagcaagacagcggactcg

SEQ ID NO: 353170 - DNA, 60 bp, Artificial
  Synthetic oligonucleotide
cattgtcagcacttgtggagcgggggcatcttgctccttgggatattgatgatctgtagt

SEQ ID NO: 353171 - DNA, 60 bp, Artificial
  Synthetic oligonucleotide
cattgtcatggggtgaccttaagaagacattgactgtcactgagcttgaaggtaaaccga

SEQ ID NO: 353172 - DNA, 58 bp, Artificial
  Synthetic oligonucleotide
cattgtcgacgctttgcagtatgcgtataagcacgacctgcagttgactacagagggg

SEQ ID NO: 353173 - DNA, 51 bp, Artificial
  Synthetic oligonucleotide
cattgtctgaatctgctgctgtcagtctccgacagatgtcccctctgcaaa

SEQ ID NO: 353174 - DNA, 60 bp, Artificial
  Synthetic oligonucleotide
cattgtgaacgcagactgtgttatagcaaacagtcaacctttagctcaatctacccgagg

SEQ ID NO: 353175 - DNA, 60 bp, Artificial
  Synthetic oligonucleotide
cattgtgaagttgcgaatctagaccgtacgtacgtcattcgcagtctcacacggtacgga

SEQ ID NO: 353176 - DNA, 60 bp, Artificial
  Synthetic oligonucleotide
cattgtgagttgaccttgcatcctttaggatcttcattgagtccatacctgatcttttgt

SEQ ID NO: 353177 - DNA, 53 bp, Artificial
  Synthetic oligonucleotide
cattgtgatctacctgacatcattcgtggtcccaatactgttgaaggctcttt

SEQ ID NO: 353178 - DNA, 60 bp, Artificial
  Synthetic oligonucleotide
cattgtgcttctgcctggttgcggggtggattttactgagagccgccttagcaacttgct

SEQ ID NO: 353179 - DNA, 60 bp, Artificial
  Synthetic oligonucleotide
cattgtggacgtgcagtacttatatggggtggggtcgagcatcgtgtcctgggccattaa

SEQ ID NO: 353180 - DNA, 60 bp, Artificial
  Synthetic oligonucleotide
cattgtggacgtgcagtatctgtacggggtggggtcaagcattgtgtcttgggccattaa

SEQ ID NO: 353181 - DNA, 57 bp, Artificial
  Synthetic oligonucleotide
cattgtggacgtgcagtatttgtacggggtagggtcaagtatcgcgtcctgggccat

SEQ ID NO: 353182 - DNA, 59 bp, Artificial
  Synthetic oligonucleotide
cattgtggacgttcagtacttgtacggggtgggatcaagcattgcgtcctgggccatta

SEQ ID NO: 353183 - DNA, 60 bp, Artificial
  Synthetic oligonucleotide
cattgtggcatgcgccaaattcacttgtgccaaatccatgagcttgtttgaggttgatca

SEQ ID NO: 353184 - DNA, 58 bp, Artificial
  Synthetic oligonucleotide
cattgtgggtcgatagaatgattgggaaacaacccactataccagacgtagttctgga

SEQ ID NO: 353185 - DNA, 58 bp, Artificial
  Synthetic oligonucleotide
cattgtgtcttatccatttgaactacaaccagaattactagcactcgctggtaaaaaa

SEQ ID NO: 353186 - DNA, 58 bp, Artificial
  Synthetic oligonucleotide
cattgtgtgggttgactaacgtgcatgagtgagatagcagactccctgactattccta

SEQ ID NO: 353187 - DNA, 55 bp, Artificial
  Synthetic oligonucleotide
cattgtgttcgccgcggtgttaggaaattgatagcttcggtgatgatggatccgc

SEQ ID NO: 353188 - DNA, 58 bp, Artificial
  Synthetic oligonucleotide
cattgttactatggctgaattcgcatggtgttacgacaccgaccaattcgaaaagctt

SEQ ID NO: 353189 - DNA, 53 bp, Artificial
  Synthetic oligonucleotide
cattgttagtttacaacggctttgaatagtttaagaattgtggtcgtaacgac

SEQ ID NO: 353190 - DNA, 60 bp, Artificial
  Synthetic oligonucleotide
cattgttatgttggattgggctcgttgtagcccaacctgtgatgcggaatcacctgggtc

SEQ ID NO: 353191 - DNA, 57 bp, Artificial
  Synthetic oligonucleotide
cattgttcactcccatgggagcgtgtctacgtttaatttaacgagtcaacatgcttt

SEQ ID NO: 353192 - DNA, 55 bp, Artificial
  Synthetic oligonucleotide
cattgttccaacctgttagagccccctgcgtccagacggcttgggacacggggct

SEQ ID NO: 353193 - DNA, 60 bp, Artificial
  Synthetic oligonucleotide
cattgttgcccgtgcggctgctagctatgccgctgaaggacctgttggcattctctgtta

SEQ ID NO: 353194 - DNA, 53 bp, Artificial
  Synthetic oligonucleotide
cattgttggaacgtttataccctgtgggtaaacgcgagaatttacacggacca

SEQ ID NO: 353195 - DNA, 60 bp, Artificial
  Synthetic oligonucleotide
cattgttgtagaccctcggactgaggtctaagtgaccacatagataattatgtggcccca

SEQ ID NO: 353196 - DNA, 55 bp, Artificial
  Synthetic oligonucleotide
cattgttgtgccccgcgggacacgccgtgggcatattcagggccgcggtgtgtac

SEQ ID NO: 353197 - DNA, 56 bp, Artificial
  Synthetic oligonucleotide
cattgttgtgcggttctgcgaaatttgttcgtcgaacaaagttttgtggaacatta

SEQ ID NO: 353198 - DNA, 59 bp, Artificial
  Synthetic oligonucleotide
cattgtttagcttgctttcagacaaaaggcttaggcatttcctatggcaggaagaagcg

SEQ ID NO: 353199 - DNA, 50 bp, Artificial
  Synthetic oligonucleotide
cattgtttcaggtagcacgctaataccgacatctctgacgccactagctg

SEQ ID NO: 353200 - DNA, 60 bp, Artificial
  Synthetic oligonucleotide
cattgtttcatggttaaccttgcagaaaaagttatgtctgatataaatgaggcagcacac

SEQ ID NO: 353201 - DNA, 55 bp, Artificial
  Synthetic oligonucleotide
cattgtttcttcatccattttcgttgcgtgtcttaggtcgaacattacggcacac

SEQ ID NO: 353202 - DNA, 55 bp, Artificial
  Synthetic oligonucleotide
cattgttttccccgtcctactgtcaccctcaatcactatacttacgggcctcaaa

SEQ ID NO: 353203 - DNA, 55 bp, Artificial
  Synthetic oligonucleotide
catttaaaataatgcgtccgtggtgcatacgataatgcatagtgtttgtccctcc

SEQ ID NO: 353204 - DNA, 51 bp, Artificial
  Synthetic oligonucleotide
catttaaacgagccctcggggcacggcctaaacagcctcccccgagggaaa

SEQ ID NO: 353205 - DNA, 55 bp, Artificial
  Synthetic oligonucleotide
catttaaagccatctggatgtctgcatacatttgatgaggtatttggtgcacgga

SEQ ID NO: 353206 - DNA, 58 bp, Artificial
  Synthetic oligonucleotide
catttaaagcgcgtcattgacgagcctttgtctccaagtatggatttgtgggatcctt

SEQ ID NO: 353207 - DNA, 59 bp, Artificial
  Synthetic oligonucleotide
catttaaagggatgtgataatatctttactactcatgaagctcagggtaagactttcga

SEQ ID NO: 353208 - DNA, 53 bp, Artificial
  Synthetic oligonucleotide
catttaacattatgttcggcaataggttgtggccatgaagggtggagttgttg

SEQ ID NO: 353209 - DNA, 51 bp, Artificial
  Synthetic oligonucleotide
catttaacccagaatctaacgccgtaggttcaatactcctaactaatggtc

SEQ ID NO: 353210 - DNA, 57 bp, Artificial
  Synthetic oligonucleotide
catttaagaagtataccacgaacttcaacgcctataaggagctttatttctctgatc

SEQ ID NO: 353211 - DNA, 55 bp, Artificial
  Synthetic oligonucleotide
catttaagtccgggaccacattcacattttctaggtgtagtgggaccacacggag

SEQ ID NO: 353212 - DNA, 60 bp, Artificial
  Synthetic oligonucleotide
catttaatccgtcatgatggtagtatgcatccactaatacacgaagaattgaagcagttc

SEQ ID NO: 353213 - DNA, 60 bp, Artificial
  Synthetic oligonucleotide
catttaatgcctctgattcagttggacagcagatcaaggttatcccagttgatccatatt

SEQ ID NO: 353214 - DNA, 54 bp, Artificial
  Synthetic oligonucleotide
catttaatgtttacagcgggacccaggtttacgaacataacccaaaatatggca

SEQ ID NO: 353215 - DNA, 58 bp, Artificial
  Synthetic oligonucleotide
catttaattttggtctcgattgtgctagacttgagatattttgggataagaaggctta

SEQ ID NO: 353216 - DNA, 50 bp, Artificial
  Synthetic oligonucleotide
catttacaacccagataatcgacagaattaaaccgatcgttaccgtctga

SEQ ID NO: 353217 - DNA, 60 bp, Artificial
  Synthetic oligonucleotide
catttacaattcatcgtgcgctccaataccggtcgcccgggagtcagacaggtcatctac

SEQ ID NO: 353218 - DNA, 56 bp, Artificial
  Synthetic oligonucleotide
catttacaccaagacattatcaaaagatgtgaacagtttgtaggcccgctcacaat

SEQ ID NO: 353219 - DNA, 55 bp, Artificial
  Synthetic oligonucleotide
catttacagctacatatgcagacacaatatgtataggctaccatgccaacaactc

SEQ ID NO: 353220 - DNA, 60 bp, Artificial
  Synthetic oligonucleotide
catttacaggaaacactgaaggcagaacatctgacatgaggactgaaataataagaatga

SEQ ID NO: 353221 - DNA, 55 bp, Artificial
  Synthetic oligonucleotide
catttacatgaggacattattaataggtgtcagcaatttgtgggccctctcactg

SEQ ID NO: 353222 - DNA, 55 bp, Artificial
  Synthetic oligonucleotide
catttaccaattaatagacccatctttgatgataagaaacccagggatgatctcc

SEQ ID NO: 353223 - DNA, 55 bp, Artificial
  Synthetic oligonucleotide
catttaccacgttagtgtcgtccactcggtacagcactctccatggatttgggtc

SEQ ID NO: 353224 - DNA, 60 bp, Artificial
  Synthetic oligonucleotide
catttaccattaggggatttctcaccaggcagattgtcaagaacaatgatgcacagcgcg

SEQ ID NO: 353225 - DNA, 58 bp, Artificial
  Synthetic oligonucleotide
catttacccttagtgaggtccatttcgagcacatattgccgaacccaggagaggatta

SEQ ID NO: 353226 - DNA, 60 bp, Artificial
  Synthetic oligonucleotide
catttaccgtaaggaatccgacatctttgaggatgcaccgatcgttgagatcgactcaga

SEQ ID NO: 353227 - DNA, 57 bp, Artificial
  Synthetic oligonucleotide
catttacgacggaaagcttgtagatagtattagttcatggtctcaaaacatactccg

SEQ ID NO: 353228 - DNA, 58 bp, Artificial
  Synthetic oligonucleotide
catttacggaggttgaataacatgaatttattacaagcgtatgaagtggttgacagtc

SEQ ID NO: 353229 - DNA, 59 bp, Artificial
  Synthetic oligonucleotide
catttacttgcaattgctagatatttcgtttcacagtgaattacgttgtttcggcttca

SEQ ID NO: 353230 - DNA, 60 bp, Artificial
  Synthetic oligonucleotide
catttagaaggaaaaattatcctggtagcagtccatgtagccagtggatacatagaagca

SEQ ID NO: 353231 - DNA, 55 bp, Artificial
  Synthetic oligonucleotide
catttagcctctttatggtccagttctccaggaccataaaccccaggaatagagg

SEQ ID NO: 353232 - DNA, 60 bp, Artificial
  Synthetic oligonucleotide
catttaggaaccaaacaagtatgcatagcatggtccagctcaagttgccacgatggaaga

SEQ ID NO: 353233 - DNA, 57 bp, Artificial
  Synthetic oligonucleotide
catttaggagcttcagtgaaatgttcctcatgtggcaaaaacccacgaagtacgttc

SEQ ID NO: 353234 - DNA, 55 bp, Artificial
  Synthetic oligonucleotide
catttagggaggtcttagccgctgcagactcctttgcatcgcagtataggccgac

SEQ ID NO: 353235 - DNA, 55 bp, Artificial
  Synthetic oligonucleotide
catttagggcctctgcggcagcgtcgttagctgtttgctgacctcctctagcaga

SEQ ID NO: 353236 - DNA, 53 bp, Artificial
  Synthetic oligonucleotide
catttaggtgtagaaggttctttgacaggtaacggtagccataggttagaagg

SEQ ID NO: 353237 - DNA, 57 bp, Artificial
  Synthetic oligonucleotide
catttagtagtattcatctccaagtcttaagtgcaaaagttgtctagaacaaacact

SEQ ID NO: 353238 - DNA, 55 bp, Artificial
  Synthetic oligonucleotide
catttagtatagctggcgtaaggttctgattgggaatagtggctcccgcaataac

SEQ ID NO: 353239 - DNA, 57 bp, Artificial
  Synthetic oligonucleotide
catttagtgggttggtggatgggaatacttcaagaagtgaaggagaatattccagag

SEQ ID NO: 353240 - DNA, 55 bp, Artificial
  Synthetic oligonucleotide
catttataatgggaagcttgttgatagcattggttcatggtctcagaacatcctc

SEQ ID NO: 353241 - DNA, 60 bp, Artificial
  Synthetic oligonucleotide
catttatacattgtgtcctcacatctacatgtagatgaaatagtaagagatcgtgaacat

SEQ ID NO: 353242 - DNA, 60 bp, Artificial
  Synthetic oligonucleotide
catttatagaggcattgtgtgatgatgagatagttagagaagcatctagaaatggaatgc

SEQ ID NO: 353243 - DNA, 59 bp, Artificial
  Synthetic oligonucleotide
catttatatgttacgttgatgtctggtgcttatgtcacagatttgttttggtggtttaa

SEQ ID NO: 353244 - DNA, 51 bp, Artificial
  Synthetic oligonucleotide
catttatattgcaattgtgtaaggttcctttgactgctgaagtgctgacac

SEQ ID NO: 353245 - DNA, 57 bp, Artificial
  Synthetic oligonucleotide
catttatctaatttacattccacgcattttacatgatacttcatgcaccgatcggtg

SEQ ID NO: 353246 - DNA, 55 bp, Artificial
  Synthetic oligonucleotide
catttatgaaatggtcaaactggtcggagaaacaggcatggcaatactgcaacag

SEQ ID NO: 353247 - DNA, 55 bp, Artificial
  Synthetic oligonucleotide
catttattagatgagtggaattttggcgtgttaccgcctccctccaccagccttg

SEQ ID NO: 353248 - DNA, 55 bp, Artificial
  Synthetic oligonucleotide
catttattgcaagactctgaattagctggactgctgtcaatgtcatcagcgtcaa

SEQ ID NO: 353249 - DNA, 60 bp, Artificial
  Synthetic oligonucleotide
catttcaagtgatgtgacggtagaaagaaatctgaaccgggctatgaccatactacaagc

SEQ ID NO: 353250 - DNA, 57 bp, Artificial
  Synthetic oligonucleotide
catttcaatccatcacgaaacagctaaatacacacaatcgttacctttacaacaacc

SEQ ID NO: 353251 - DNA, 55 bp, Artificial
  Synthetic oligonucleotide
catttcaattccggccgccattggacttgtccataagatgtctcattgcttttcc

SEQ ID NO: 353252 - DNA, 50 bp, Artificial
  Synthetic oligonucleotide
catttcaccacgaccctcctgtgataggccgggaaaaattccattcccga

SEQ ID NO: 353253 - DNA, 53 bp, Artificial
  Synthetic oligonucleotide
catttcaccatgttaggagttagggatcgcttagcagtcctcccacgccactc

SEQ ID NO: 353254 - DNA, 60 bp, Artificial
  Synthetic oligonucleotide
catttcacctggtatcaacttgcaagctacgcctcatacatccgagttcctgttaattct

SEQ ID NO: 353255 - DNA, 59 bp, Artificial
  Synthetic oligonucleotide
catttcacctggtatcaacttgctagctatgcctcgtacatccgtgttcctttaaactc

SEQ ID NO: 353256 - DNA, 54 bp, Artificial
  Synthetic oligonucleotide
catttcacggatccagcgagcattgcagccagaggatatatagcaaccaaggtt

SEQ ID NO: 353257 - DNA, 58 bp, Artificial
  Synthetic oligonucleotide
catttcagcttagtaggggaaaacgctgtcgtgcaggttgagcctagcttcttactaa

SEQ ID NO: 353258 - DNA, 50 bp, Artificial
  Synthetic oligonucleotide
catttcagttaagtagaatggttcagtgggcctatgatcataattatgtt

SEQ ID NO: 353259 - DNA, 51 bp, Artificial
  Synthetic oligonucleotide
catttcatatgggcaacttgccaaacaggagaaagtacttcccatgttaaa

SEQ ID NO: 353260 - DNA, 51 bp, Artificial
  Synthetic oligonucleotide
catttcatccggcaccgcttgctgcggtaactgtggtacagtcagtgactc

SEQ ID NO: 353261 - DNA, 60 bp, Artificial
  Synthetic oligonucleotide
catttcatgccgtccctgtgcacatatgggataggcttatgctttttggtgcgacccttg

SEQ ID NO: 353262 - DNA, 56 bp, Artificial
  Synthetic oligonucleotide
catttcatgttcacagggcccactgacgccaaagcgcgttacatgattgcttatgc

SEQ ID NO: 353263 - DNA, 55 bp, Artificial
  Synthetic oligonucleotide
catttcattccaaatggagagggagagtcagttcgaggctcgtaaccaaccccaa

SEQ ID NO: 353264 - DNA, 55 bp, Artificial
  Synthetic oligonucleotide
catttccaacggcgcgcaatactaggcgcgctaaagtttggagtaaaggttcttg

SEQ ID NO: 353265 - DNA, 55 bp, Artificial
  Synthetic oligonucleotide
catttcccaatctgtatagtgataaaggctgattctccgaggttcgttcgtcacc

SEQ ID NO: 353266 - DNA, 57 bp, Artificial
  Synthetic oligonucleotide
catttccccaaagaagcactaattgagtatgactgcatagtagaattgaatgcgccg

SEQ ID NO: 353267 - DNA, 56 bp, Artificial
  Synthetic oligonucleotide
catttcctatttccgtgaagaatggttgaggaaattgtctcacaagggtcaaattc

SEQ ID NO: 353268 - DNA, 55 bp, Artificial
  Synthetic oligonucleotide
catttcctcagacaatgctaagaccataatagtgcagctaaacgcatctgtagaa

SEQ ID NO: 353269 - DNA, 53 bp, Artificial
  Synthetic oligonucleotide
catttcctggtaccatgatgatataatcaatttgtattctgattctataaaat

SEQ ID NO: 353270 - DNA, 54 bp, Artificial
  Synthetic oligonucleotide
catttcctgtcttacctttgggagagaaactgttcttgagtatttggtgtcttt

SEQ ID NO: 353271 - DNA, 60 bp, Artificial
  Synthetic oligonucleotide
catttcgaaatagcccaggctaatggcagtgtaactaatgttactagtctatgtgttcag

SEQ ID NO: 353272 - DNA, 55 bp, Artificial
  Synthetic oligonucleotide
catttcgaagaacgcgacgttaataagttacgcttgggtgtccgagcgtgacagc

SEQ ID NO: 353273 - DNA, 57 bp, Artificial
  Synthetic oligonucleotide
catttcgaagcctacaaggctacgagaccgtatatagggtggtgcgcagattgtgga

SEQ ID NO: 353274 - DNA, 55 bp, Artificial
  Synthetic oligonucleotide
catttcgatcatcataacaacgtgggaatgttctgtgcacttgacatatgtttgg

SEQ ID NO: 353275 - DNA, 60 bp, Artificial
  Synthetic oligonucleotide
catttcgatggcatcagctgaagatgtcaaaactttcatgagtgcaaccgcccagtgcgg

SEQ ID NO: 353276 - DNA, 55 bp, Artificial
  Synthetic oligonucleotide
catttcgcttctgtaaaaccgcttatgcgccccaccctaaccgctttcatttcgc

SEQ ID NO: 353277 - DNA, 54 bp, Artificial
  Synthetic oligonucleotide
catttcgcttctgtaaaaccgcttatgcgccccaccctagccggaaagtcccca

SEQ ID NO: 353278 - DNA, 58 bp, Artificial
  Synthetic oligonucleotide
catttcgttaacgactgaattttcgcgactactcaatcaacataatgtccaagccttc

SEQ ID NO: 353279 - DNA, 55 bp, Artificial
  Synthetic oligonucleotide
catttctaaacaagtacagttccaaatgactcttattagaccattttgtagggta

SEQ ID NO: 353280 - DNA, 60 bp, Artificial
  Synthetic oligonucleotide
catttctaggcccaattctgagtataacaggaagattaggactgcttatgctgctggaaa

SEQ ID NO: 353281 - DNA, 54 bp, Artificial
  Synthetic oligonucleotide
catttctaggtcgatcctacaaaggaggtctcaacgtacgagatcttaaacgat

SEQ ID NO: 353282 - DNA, 60 bp, Artificial
  Synthetic oligonucleotide
catttctatcgctatgagacattgtctacgatttcacgtcaactgccgtcctttgggtat

SEQ ID NO: 353283 - DNA, 54 bp, Artificial
  Synthetic oligonucleotide
catttctatgcacgctctgaaagtacgccggcgtctgaacttaggcagcccata

SEQ ID NO: 353284 - DNA, 60 bp, Artificial
  Synthetic oligonucleotide
catttctcccccggcgacataacataaatcatgcagtttgcttcgaaatactccagttgc

SEQ ID NO: 353285 - DNA, 52 bp, Artificial
  Synthetic oligonucleotide
catttctcccgggtctgccttccacgatcttgtacttcgctacgagactctt

SEQ ID NO: 353286 - DNA, 55 bp, Artificial
  Synthetic oligonucleotide
catttctccctaaagctcaaggcagtgcagacaagttactgtctaccatcagggc

SEQ ID NO: 353287 - DNA, 55 bp, Artificial
  Synthetic oligonucleotide
catttctgaagatgacaccacgccctctcaaattaccagatgggcctccttgcac

SEQ ID NO: 353288 - DNA, 58 bp, Artificial
  Synthetic oligonucleotide
catttctgatgatgatttgactgcaaattacctgttcaagaatgcagcaactaagagt

SEQ ID NO: 353289 - DNA, 57 bp, Artificial
  Synthetic oligonucleotide
catttctttaggcatatcaacaaccattttgagcttaccaactaagaaatccttctc

SEQ ID NO: 353290 - DNA, 60 bp, Artificial
  Synthetic oligonucleotide
catttcttttgatatgggaccactttaacaaagctgaccaatcatattgcgtctgacgag

SEQ ID NO: 353291 - DNA, 54 bp, Artificial
  Synthetic oligonucleotide
catttgaaggttaagtccttcactcggtggtcaccgtttctcaaactccctaga

SEQ ID NO: 353292 - DNA, 59 bp, Artificial
  Synthetic oligonucleotide
catttgaagtttccgctgaagattggaataaaatactcagcgaggtggatgatttctat

SEQ ID NO: 353293 - DNA, 60 bp, Artificial
  Synthetic oligonucleotide
catttgaatggatgtcaatccgactttgcttttcctgaaagtgccagcacaaaatgctat

SEQ ID NO: 353294 - DNA, 60 bp, Artificial
  Synthetic oligonucleotide
catttgaatggtgcagaatgggatgtattcatagagcgacccactgctgtggacacttgt

SEQ ID NO: 353295 - DNA, 60 bp, Artificial
  Synthetic oligonucleotide
catttgaatgttttaaattgataacacactttgcagactcattcatagactcatcttcca

SEQ ID NO: 353296 - DNA, 55 bp, Artificial
  Synthetic oligonucleotide
catttgacaccaaccgtaaacgcggaggtgttaaatttgaatacagcaccaagtg

SEQ ID NO: 353297 - DNA, 55 bp, Artificial
  Synthetic oligonucleotide
catttgacagactgcaagttctggatagtcattaccaggacgtactcaaggaggt

SEQ ID NO: 353298 - DNA, 57 bp, Artificial
  Synthetic oligonucleotide
catttgactacgtgaccaatggagccgctatacaaccagttgaggggttaattcgtg

SEQ ID NO: 353299 - DNA, 60 bp, Artificial
  Synthetic oligonucleotide
catttgagcacaaggcccgagagatgcatccggagttctacaaaaactgatgacaccgag

SEQ ID NO: 353300 - DNA, 60 bp, Artificial
  Synthetic oligonucleotide
catttgaggagtgtcaagctcgatggtgggcgagtgtgactggcgcccttagggctgctg

SEQ ID NO: 353301 - DNA, 60 bp, Artificial
  Synthetic oligonucleotide
catttgagggtctgaagtgggcctcccactcggtgtatgccctcatgaactccagtcatc

SEQ ID NO: 353302 - DNA, 55 bp, Artificial
  Synthetic oligonucleotide
catttgagtccttgacgaatgcgtcccgtctgtcccgacggtgaggcgtatggcg

SEQ ID NO: 353303 - DNA, 55 bp, Artificial
  Synthetic oligonucleotide
catttgagtgcgatgggtaaagttctgctaatcgaaccaacaaggccacttgcgg

SEQ ID NO: 353304 - DNA, 55 bp, Artificial
  Synthetic oligonucleotide
catttgagtgtattaattaaaaacacccttgtttctaggatgattcggtaccaga

SEQ ID NO: 353305 - DNA, 57 bp, Artificial
  Synthetic oligonucleotide
catttgatcgagtattgtttaaaatacgaattaccaagtgatgcacgcatgttaaag

SEQ ID NO: 353306 - DNA, 58 bp, Artificial
  Synthetic oligonucleotide
catttgatggcaaaacaccgttgcgttcacctatcactatcatcctgtcaagctgagc

SEQ ID NO: 353307 - DNA, 56 bp, Artificial
  Synthetic oligonucleotide
catttgcactaagatttaaaaactaggcctacaatgttcacttagtagaggatgtt

SEQ ID NO: 353308 - DNA, 60 bp, Artificial
  Synthetic oligonucleotide
catttgcatctatgaatagacctccccccctccactacaagatcatcatcgtcgacagaa

SEQ ID NO: 353309 - DNA, 55 bp, Artificial
  Synthetic oligonucleotide
catttgcctcgttaacgacaaagatgtcttcaccggtaaccccacagatctccag

SEQ ID NO: 353310 - DNA, 54 bp, Artificial
  Synthetic oligonucleotide
catttgcgtggttctataagaccgaagaaccgcctataccaatgatatacacaa

SEQ ID NO: 353311 - DNA, 60 bp, Artificial
  Synthetic oligonucleotide
catttgctgcattcactaagggttccttgcctcaggtcagaaatgggatgaccttcacta

SEQ ID NO: 353312 - DNA, 55 bp, Artificial
  Synthetic oligonucleotide
catttgctgcggacgcagcagaggcctcatgtcattatcggagcaggcgagcccc

SEQ ID NO: 353313 - DNA, 55 bp, Artificial
  Synthetic oligonucleotide
catttggaacaggaatatgatcgcggtactgtcggggctgaatatatacgtgatc

SEQ ID NO: 353314 - DNA, 58 bp, Artificial
  Synthetic oligonucleotide
catttggaatgcagcggatgcattatagaaatggagacccacagacaccgttccaaat

SEQ ID NO: 353315 - DNA, 58 bp, Artificial
  Synthetic oligonucleotide
catttggaggggaggaccaaagaagtgtgatggctagcaagtccaataagcaggtaac

SEQ ID NO: 353316 - DNA, 55 bp, Artificial
  Synthetic oligonucleotide
catttggaggtaaaacctcttatgacgctgacaaccgtcctatacttgtcatgcg

SEQ ID NO: 353317 - DNA, 60 bp, Artificial
  Synthetic oligonucleotide
catttggatgatgagacttatgccctttatgaatctcagactggccttttggaagatcat

SEQ ID NO: 353318 - DNA, 55 bp, Artificial
  Synthetic oligonucleotide
catttggcaattcgtcattgagggcaaatctatcccaatggagagaatagtcaac

SEQ ID NO: 353319 - DNA, 53 bp, Artificial
  Synthetic oligonucleotide
catttggcaggaaagagctcaagcttcgtgtccttcaaacatggatgattttg

SEQ ID NO: 353320 - DNA, 60 bp, Artificial
  Synthetic oligonucleotide
catttgggatttgttccaattgcaattagatctctattaccttctggaaatgaacagatc

SEQ ID NO: 353321 - DNA, 53 bp, Artificial
  Synthetic oligonucleotide
catttgggcacggccggactacaaccccccgttgctggagacgtggagaaaac

SEQ ID NO: 353322 - DNA, 59 bp, Artificial
  Synthetic oligonucleotide
catttgggcccttcgaagcgacggcgtgcaatggcttggatcccctcactagagacgtg

SEQ ID NO: 353323 - DNA, 51 bp, Artificial
  Synthetic oligonucleotide
catttggtcggtttcaccagtatcgactttcctgatcatcattatcgagga

SEQ ID NO: 353324 - DNA, 59 bp, Artificial
  Synthetic oligonucleotide
catttggtgtggctcctgccgcgcattttggtactttgtcaattcgcgtgaacgcccgc

SEQ ID NO: 353325 - DNA, 55 bp, Artificial
  Synthetic oligonucleotide
catttggttggtcgctccgctgtaacccacagtagacctggcagatgaggctaga

SEQ ID NO: 353326 - DNA, 52 bp, Artificial
  Synthetic oligonucleotide
catttgtaattgtagtattatcagcattgtcgaatgcacagaattatggaat

SEQ ID NO: 353327 - DNA, 60 bp, Artificial
  Synthetic oligonucleotide
catttgtacaggtgttcaccatgtatgataatgagcccaccactgctaagatccgaatgg

SEQ ID NO: 353328 - DNA, 56 bp, Artificial
  Synthetic oligonucleotide
catttgtagaaaaagctaatccaatatttgcaacaacagaccctaaatacttcaaa

SEQ ID NO: 353329 - DNA, 55 bp, Artificial
  Synthetic oligonucleotide
catttgtcagcccttgccaaaacggtgacgcagcggtgtgttacctgcccaaagc

SEQ ID NO: 353330 - DNA, 53 bp, Artificial
  Synthetic oligonucleotide
catttgtccccggtcggcagctgcagttctatagacagtgtcgggattgggtg

SEQ ID NO: 353331 - DNA, 55 bp, Artificial
  Synthetic oligonucleotide
catttgtgaatccccagcgccttcctgaggttgtgattgaatcgaacctggaccg

SEQ ID NO: 353332 - DNA, 57 bp, Artificial
  Synthetic oligonucleotide
catttgtgcataacatgcgtaaatgaactttcaggtttggactaagtcttacgttaa

SEQ ID NO: 353333 - DNA, 60 bp, Artificial
  Synthetic oligonucleotide
catttgtggaatccgctcagtaacaagactggagaatctgatgtggaaacaaataacacc

SEQ ID NO: 353334 - DNA, 60 bp, Artificial
  Synthetic oligonucleotide
catttgtggctaaatttgcagaggagaattacttcaactcactccctagtaatgtcactg

SEQ ID NO: 353335 - DNA, 55 bp, Artificial
  Synthetic oligonucleotide
catttgtggtaaatttctcaggcatcaattccaagcaacaagtcaagcagaagct

SEQ ID NO: 353336 - DNA, 60 bp, Artificial
  Synthetic oligonucleotide
catttgttacaggattccgaattggctggtttactatcaatgtcatcagcgtcgaatggt

SEQ ID NO: 353337 - DNA, 55 bp, Artificial
  Synthetic oligonucleotide
catttgttggggagatccttaaaggcacaacattcgggacggagtacgtgcgatt

SEQ ID NO: 353338 - DNA, 60 bp, Artificial
  Synthetic oligonucleotide
catttgttgtttatgcgtatggagcttccagaactggtaagacattggtggtcgacaagc

SEQ ID NO: 353339 - DNA, 60 bp, Artificial
  Synthetic oligonucleotide
cattttaaaagcattgggaccaggggctacactagaagaaatgatgacagcatgtcaggg

SEQ ID NO: 353340 - DNA, 60 bp, Artificial
  Synthetic oligonucleotide
cattttaagcatactgcagagctacatatgggccgacagaggagtgatccagaagataga

SEQ ID NO: 353341 - DNA, 55 bp, Artificial
  Synthetic oligonucleotide
cattttacacggtgtcctggttgtatgatagactgtagttgtaacttgtatctgg

SEQ ID NO: 353342 - DNA, 60 bp, Artificial
  Synthetic oligonucleotide
cattttacatccctagtgggataatgcagaagtatgggtggtgtgggtgtagtcaacata

SEQ ID NO: 353343 - DNA, 56 bp, Artificial
  Synthetic oligonucleotide
cattttaccgagacaattaagcctgtccttgaccttactagctccattatataccg

SEQ ID NO: 353344 - DNA, 55 bp, Artificial
  Synthetic oligonucleotide
cattttacgatgtgaacatggagtggtgggaatcctaacagcaggtgggaacggg

SEQ ID NO: 353345 - DNA, 56 bp, Artificial
  Synthetic oligonucleotide
cattttacgcgatattaaaccatactttgtaacaagtgaggctaatctgcccatgc

SEQ ID NO: 353346 - DNA, 56 bp, Artificial
  Synthetic oligonucleotide
cattttagaaataccacaccagatacatattccttagctgggtatgtgacctgctg

SEQ ID NO: 353347 - DNA, 55 bp, Artificial
  Synthetic oligonucleotide
cattttagacgctttatccttatgacataagtttcaattttatttgaactgttta

SEQ ID NO: 353348 - DNA, 50 bp, Artificial
  Synthetic oligonucleotide
cattttaggagttcggcccaggcctctcaccaccattgatgctgtcaagc

SEQ ID NO: 353349 - DNA, 50 bp, Artificial
  Synthetic oligonucleotide
cattttagtgatcaaccatacccagatcacttctatggtacaaggtccaa

SEQ ID NO: 353350 - DNA, 56 bp, Artificial
  Synthetic oligonucleotide
cattttagttttagacggtttttcgactgttgacagatcacacataccgaaagcaa

SEQ ID NO: 353351 - DNA, 51 bp, Artificial
  Synthetic oligonucleotide
cattttatacggtcgacgtgttatactgtacgaaatgtacaagagtctcgt

SEQ ID NO: 353352 - DNA, 60 bp, Artificial
  Synthetic oligonucleotide
cattttatagatcagctgtgttgcagccaccacctgtatatggataaacactactatgtt

SEQ ID NO: 353353 - DNA, 60 bp, Artificial
  Synthetic oligonucleotide
cattttatgggttatgtcattggctgttggggatcattgccgcaagatcatatcctacac

SEQ ID NO: 353354 - DNA, 55 bp, Artificial
  Synthetic oligonucleotide
cattttcacagacagaaatgttagtaaacggattgaagccctatacggaacccac

SEQ ID NO: 353355 - DNA, 60 bp, Artificial
  Synthetic oligonucleotide
cattttcagctgagttaatctcctttgagtgcagaatgggaaaattcgaatgattggtgt

SEQ ID NO: 353356 - DNA, 60 bp, Artificial
  Synthetic oligonucleotide
cattttcagctttgtcgaggaaatctttatagctggccccctctccaggattgcacagca

SEQ ID NO: 353357 - DNA, 59 bp, Artificial
  Synthetic oligonucleotide
cattttcatcgcaattagtgaacttggtcgatagttctgaacctatggtactcgcaaat

SEQ ID NO: 353358 - DNA, 57 bp, Artificial
  Synthetic oligonucleotide
cattttccccactgtcatagagagaaatttctctaaccctagagctgaaattgtaaa

SEQ ID NO: 353359 - DNA, 54 bp, Artificial
  Synthetic oligonucleotide
cattttccggataagtcgtaattaagtgttccacaagaccgctatagtcctccc

SEQ ID NO: 353360 - DNA, 56 bp, Artificial
  Synthetic oligonucleotide
cattttcgaccatcctcgggaggagacccagagattacagaacatacctttaattg

SEQ ID NO: 353361 - DNA, 55 bp, Artificial
  Synthetic oligonucleotide
cattttcgctatcgtttcgtccaggtttgaggcggtcgctatgatgaaaccgatg

SEQ ID NO: 353362 - DNA, 55 bp, Artificial
  Synthetic oligonucleotide
cattttcgctcttctatactgttgtaaggctaaggtcaaggcggacgctgcacgt

SEQ ID NO: 353363 - DNA, 55 bp, Artificial
  Synthetic oligonucleotide
cattttcggcctgatcattttaactgtgcccagttcaggggaaggaaggcggctt

SEQ ID NO: 353364 - DNA, 55 bp, Artificial
  Synthetic oligonucleotide
cattttgaaactccacactatgtcacagttaaaacagcgaaaagtgagatacggt

SEQ ID NO: 353365 - DNA, 55 bp, Artificial
  Synthetic oligonucleotide
cattttgaaagcagacatccaaaagtcagctcagcagtatacataccattagggg

SEQ ID NO: 353366 - DNA, 55 bp, Artificial
  Synthetic oligonucleotide
cattttgaaatggagaactatcgcctataacaccatcaattgacccagatgcacc

SEQ ID NO: 353367 - DNA, 55 bp, Artificial
  Synthetic oligonucleotide
cattttgaatactcggcgtttggcggcggcgcgaaaatttgaatgctgcgtaaga

SEQ ID NO: 353368 - DNA, 59 bp, Artificial
  Synthetic oligonucleotide
cattttgattcacatgtatcgtatgaaacatttcgaaaagggaatcgaattgtggataa

SEQ ID NO: 353369 - DNA, 60 bp, Artificial
  Synthetic oligonucleotide
cattttgattcccctagtgtctccgagatcatccactactcatgtggagggactgagaaa

SEQ ID NO: 353370 - DNA, 55 bp, Artificial
  Synthetic oligonucleotide
cattttggagcaagttgccaattttgctccctggttcactctttgccttcgacta

SEQ ID NO: 353371 - DNA, 59 bp, Artificial
  Synthetic oligonucleotide
cattttggcccaacggcggtgaagacgagctcatacggcaacacttatggaagttatca

SEQ ID NO: 353372 - DNA, 52 bp, Artificial
  Synthetic oligonucleotide
cattttggtaatttaagtagttagtggaaaatgacgtcatttacttaaagac

SEQ ID NO: 353373 - DNA, 53 bp, Artificial
  Synthetic oligonucleotide
cattttggtacatgcagttatccatttaatatcgggcgctcccggtgagtgca

SEQ ID NO: 353374 - DNA, 60 bp, Artificial
  Synthetic oligonucleotide
cattttgtccaagcatgtgggcgactcactgcagcttccatggggcattcgatgggcctc

SEQ ID NO: 353375 - DNA, 55 bp, Artificial
  Synthetic oligonucleotide
cattttgtgcgtccagaaatgaaaggcgtgaacgtaacggatttggttcagcagc

SEQ ID NO: 353376 - DNA, 55 bp, Artificial
  Synthetic oligonucleotide
cattttgttatcttcgcccaccactactccctcaggtgccggttccataccgccc

SEQ ID NO: 353377 - DNA, 59 bp, Artificial
  Synthetic oligonucleotide
cattttgttcataaggagccttatatttatcgaagaggccatctccgagggcggtgcta

SEQ ID NO: 353378 - DNA, 57 bp, Artificial
  Synthetic oligonucleotide
cattttgttgtttttccgccattttgtacatgcaaccgaattcggttgcatggccta

SEQ ID NO: 353379 - DNA, 57 bp, Artificial
  Synthetic oligonucleotide
catttttccgcttgtttcactgccctttatattgtttcagatctttatgccacagtt

SEQ ID NO: 353380 - DNA, 60 bp, Artificial
  Synthetic oligonucleotide
catttttgatgtagctagagttccagacgatcaaatgtatagattgagagatagattacg

SEQ ID NO: 353381 - DNA, 60 bp, Artificial
  Synthetic oligonucleotide
catttttgtagatgcatgagtgatgagacaaagtgtaagaatggtgattgggactttgct

SEQ ID NO: 353382 - DNA, 59 bp, Artificial
  Synthetic oligonucleotide
catttttgttacacacagcaatggcggtgtgtctgtaggaccttcagaggagattcccc

SEQ ID NO: 353383 - DNA, 57 bp, Artificial
  Synthetic oligonucleotide
cattttttagtgcccaatattgtaatgcattatttttgtcctcggcaagatattctt

SEQ ID NO: 353384 - DNA, 55 bp, Artificial
  Synthetic oligonucleotide
cattttttctcgcgtggtggggacataggggacgtggtccccgactcgctgtatc

SEQ ID NO: 353385 - DNA, 57 bp, Artificial
  Synthetic oligonucleotide
ccaaaaaaactgcgcagccctctaatgtgggtctggctattagtgtcatatataatg

SEQ ID NO: 353386 - DNA, 54 bp, Artificial
  Synthetic oligonucleotide
ccaaaaaaagtaaagcgacggctgtttgacagaccagaattaacggacagtgga

SEQ ID NO: 353387 - DNA, 50 bp, Artificial
  Synthetic oligonucleotide
ccaaaaaactacaaagggccccagaagaccaaggggcccaaaactatcat

SEQ ID NO: 353388 - DNA, 51 bp, Artificial
  Synthetic oligonucleotide
ccaaaaaatatttcgtatagtgccccgtgtcatcgattctcgtagtcgaca

SEQ ID NO: 353389 - DNA, 53 bp, Artificial
  Synthetic oligonucleotide
ccaaaaaatctcacccctagcgggggagaactccagaactgcccctgtaacac

SEQ ID NO: 353390 - DNA, 52 bp, Artificial
  Synthetic oligonucleotide
ccaaaaaattaggagtgaacgtgaacaggtgccgcgttttcaagtacaaaac

SEQ ID NO: 353391 - DNA, 57 bp, Artificial
  Synthetic oligonucleotide
ccaaaaacaatttcagagagaatcgatgttgatcaaacagagaacttaccgtagact

SEQ ID NO: 353392 - DNA, 52 bp, Artificial
  Synthetic oligonucleotide
ccaaaaaccagtactccacgtgacacaatagcccgcgcaatagggagggcgc

SEQ ID NO: 353393 - DNA, 57 bp, Artificial
  Synthetic oligonucleotide
ccaaaaactacgttgatactgcaggaattactgctactcacttacgaattaaatcga

SEQ ID NO: 353394 - DNA, 59 bp, Artificial
  Synthetic oligonucleotide
ccaaaaagagatctaagacaagatggatcaaactaagagataatcttcttaaagatgga

SEQ ID NO: 353395 - DNA, 53 bp, Artificial
  Synthetic oligonucleotide
ccaaaaagcagttgcctgacaaccctcgtttggctttgcttagtgacactgta

SEQ ID NO: 353396 - DNA, 54 bp, Artificial
  Synthetic oligonucleotide
ccaaaaagctagatacaacccactactagatcagggcataggaaacgtagtatg

SEQ ID NO: 353397 - DNA, 60 bp, Artificial
  Synthetic oligonucleotide
ccaaaaagctgcagactcattgagcgaaatagccatagaccggtctgactcacgtctaaa

SEQ ID NO: 353398 - DNA, 55 bp, Artificial
  Synthetic oligonucleotide
ccaaaaatgcaaagagtgcgcgcaactaagtgggtgtttacgataaacaacttta

SEQ ID NO: 353399 - DNA, 55 bp, Artificial
  Synthetic oligonucleotide
ccaaaacaaggtggtgcgtgtacaaagaccaacaccaagaggcacagtaatggac

SEQ ID NO: 353400 - DNA, 54 bp, Artificial
  Synthetic oligonucleotide
ccaaaacacagacccgaagaccgcagaccccatctacggttatgtctacaaccc

SEQ ID NO: 353401 - DNA, 55 bp, Artificial
  Synthetic oligonucleotide
ccaaaacacgaaattcaccccagttggcgtcatccaggacggtgatcaccatcag

SEQ ID NO: 353402 - DNA, 55 bp, Artificial
  Synthetic oligonucleotide
ccaaaacactgtgtacagcttttgcggagtgggggcacgatggtcgtttgacccc

SEQ ID NO: 353403 - DNA, 55 bp, Artificial
  Synthetic oligonucleotide
ccaaaacagaacactctcagctggatatacaacaacaagctgcattacacactat

SEQ ID NO: 353404 - DNA, 59 bp, Artificial
  Synthetic oligonucleotide
ccaaaacatccagctgattaacaccaacggcagttggcacattaataggactgccctta

SEQ ID NO: 353405 - DNA, 55 bp, Artificial
  Synthetic oligonucleotide
ccaaaaccataatagtacagcttgctaagcctgtaaacattacttgtattaggcc

SEQ ID NO: 353406 - DNA, 55 bp, Artificial
  Synthetic oligonucleotide
ccaaaaccatgtggtattgtgtccgcgaggagcgtgtgtggcccggtatactgct

SEQ ID NO: 353407 - DNA, 51 bp, Artificial
  Synthetic oligonucleotide
ccaaaacccgttgtggaaggctttgtgtcagatttttcgcctcgtttcgca

SEQ ID NO: 353408 - DNA, 55 bp, Artificial
  Synthetic oligonucleotide
ccaaaaccctgcggtatcgtgcccgcaacgagcgtgtgcggcccggtattttgct

SEQ ID NO: 353409 - DNA, 52 bp, Artificial
  Synthetic oligonucleotide
ccaaaaccgttcaaactttgaagagtctaagacgtaagagaggagttactag

SEQ ID NO: 353410 - DNA, 53 bp, Artificial
  Synthetic oligonucleotide
ccaaaacctgaaggaccgaaaggtccgttttccagtccagaggacctcactgc

SEQ ID NO: 353411 - DNA, 55 bp, Artificial
  Synthetic oligonucleotide
ccaaaacgcctttcaatgagattcaaacttttgaaacgtatgcggagctctggtc

SEQ ID NO: 353412 - DNA, 53 bp, Artificial
  Synthetic oligonucleotide
ccaaaacggatacgtttgaaggtgactctgtgtattttaccatttaccgtcca

SEQ ID NO: 353413 - DNA, 54 bp, Artificial
  Synthetic oligonucleotide
ccaaaacggcccagaagtcacccttacattccaactctcctaatagcaggtggg

SEQ ID NO: 353414 - DNA, 55 bp, Artificial
  Synthetic oligonucleotide
ccaaaactcgaacacttacgtgtcagtgggaacatcaacactaaatcaaaggtca

SEQ ID NO: 353415 - DNA, 57 bp, Artificial
  Synthetic oligonucleotide
ccaaaactgacacggggattaagagtatgcacggaattggcttcggctcatacttaa

SEQ ID NO: 353416 - DNA, 51 bp, Artificial
  Synthetic oligonucleotide
ccaaaactgatagtcaaggaaacccactaccaccccatcagggaaacggac

SEQ ID NO: 353417 - DNA, 56 bp, Artificial
  Synthetic oligonucleotide
ccaaaactggggagttgaacccattgacagtgtaatgggaatgatcggaatattac

SEQ ID NO: 353418 - DNA, 57 bp, Artificial
  Synthetic oligonucleotide
ccaaaagacaaatgtggaccaacaggcccatgtaccgaaagcccaggctctatcgga

SEQ ID NO: 353419 - DNA, 55 bp, Artificial
  Synthetic oligonucleotide
ccaaaagacaactggcttgcctcatttagacgaaaccttctctctgaggaccaga

SEQ ID NO: 353420 - DNA, 50 bp, Artificial
  Synthetic oligonucleotide
ccaaaagacttgtacggtccctaaaggtccagttcgtaccaatcgtcctt

SEQ ID NO: 353421 - DNA, 54 bp, Artificial
  Synthetic oligonucleotide
ccaaaagatccttagaactgaagtccgacatatctggtgaaggttatattatag

SEQ ID NO: 353422 - DNA, 58 bp, Artificial
  Synthetic oligonucleotide
ccaaaagatcgagatcgttagattcatcctctttctattatagagtatgaagacatcc

SEQ ID NO: 353423 - DNA, 57 bp, Artificial
  Synthetic oligonucleotide
ccaaaagatgtagaaaacgatctaaagcatattggcttcgattctgtaattatttcg

SEQ ID NO: 353424 - DNA, 60 bp, Artificial
  Synthetic oligonucleotide
ccaaaagcatggagtatgatgctgttgcaacaacgcactcttggatccccaaaagaaatc

SEQ ID NO: 353425 - DNA, 56 bp, Artificial
  Synthetic oligonucleotide
ccaaaagcgtgtattgtataccatagcaaagaactaagaaatttataaggagacca

SEQ ID NO: 353426 - DNA, 55 bp, Artificial
  Synthetic oligonucleotide
ccaaaaggatgaagttttaggtatttatgagcaggacagactcagtaacataggg

SEQ ID NO: 353427 - DNA, 58 bp, Artificial
  Synthetic oligonucleotide
ccaaaaggcaatgtatacctaagccgggatgctgccctaatgttgcctcagttccaaa

SEQ ID NO: 353428 - DNA, 59 bp, Artificial
  Synthetic oligonucleotide
ccaaaagggagaaaatttgcacaattaatactcatgcctctgatacatgaaaacttaga

SEQ ID NO: 353429 - DNA, 57 bp, Artificial
  Synthetic oligonucleotide
ccaaaagtctacacagtctgcagtgtagtccttagacaatatgtttattgtcggggg

SEQ ID NO: 353430 - DNA, 55 bp, Artificial
  Synthetic oligonucleotide
ccaaaagtgaggtaaaagccttagtcacagaaattgccaaacagccaaagcttgt

SEQ ID NO: 353431 - DNA, 55 bp, Artificial
  Synthetic oligonucleotide
ccaaaagttcctggtccgatcatgaagcctcatcaggagtgagctcagcatgtcc

SEQ ID NO: 353432 - DNA, 55 bp, Artificial
  Synthetic oligonucleotide
ccaaaagttggagacaaaggcgcaaatcatctcttcatcatccaaagggctgacc

SEQ ID NO: 353433 - DNA, 59 bp, Artificial
  Synthetic oligonucleotide
ccaaaataatcatcagcccactcttgcaaatcagacgggacattgttaaatgacgacaa

SEQ ID NO: 353434 - DNA, 55 bp, Artificial
  Synthetic oligonucleotide
ccaaaatacgacgcatcttccatatctgtggaatgggcaatggtttagactttgg

SEQ ID NO: 353435 - DNA, 60 bp, Artificial
  Synthetic oligonucleotide
ccaaaatactttgatggatatgatcaacagagtgtggttatcatggatgacatcatgcaa

SEQ ID NO: 353436 - DNA, 55 bp, Artificial
  Synthetic oligonucleotide
ccaaaatagcttgattgctaaaacaagtcggttggtccagcaattggagccacac

SEQ ID NO: 353437 - DNA, 60 bp, Artificial
  Synthetic oligonucleotide
ccaaaatagtagctcactgccccccccaggacccgtgcttagtgcatggctgcatagtgt

SEQ ID NO: 353438 - DNA, 55 bp, Artificial
  Synthetic oligonucleotide
ccaaaatagtataacgatagagagaatggtcctctctgcatttgacgagaggaga

SEQ ID NO: 353439 - DNA, 54 bp, Artificial
  Synthetic oligonucleotide
ccaaaatagtatgagcatccacagggaagatcaactcgacgcctccgaattggc

SEQ ID NO: 353440 - DNA, 55 bp, Artificial
  Synthetic oligonucleotide
ccaaaatattccgaccttctgacgtatgttgattgttacgttggtgtgtcggccc

SEQ ID NO: 353441 - DNA, 60 bp, Artificial
  Synthetic oligonucleotide
ccaaaatattcggatcttctgacctatgttgactgctacgtcggtgtgtctgctcgtcag

SEQ ID NO: 353442 - DNA, 55 bp, Artificial
  Synthetic oligonucleotide
ccaaaatcaatgaagtttccgtctttctccacgtaggtcttgacatctgttgagc

SEQ ID NO: 353443 - DNA, 55 bp, Artificial
  Synthetic oligonucleotide
ccaaaatcagtgcaatcagataatgggacagccttcacagctgaggctacgcagc

SEQ ID NO: 353444 - DNA, 55 bp, Artificial
  Synthetic oligonucleotide
ccaaaatcattaatattgcaaggttcatacggaactggtaaaagccacctagcat

SEQ ID NO: 353445 - DNA, 57 bp, Artificial
  Synthetic oligonucleotide
ccaaaatgagaaatgggacctttttgttgaacgcagcaaagctttcagcaactgtta

SEQ ID NO: 353446 - DNA, 54 bp, Artificial
  Synthetic oligonucleotide
ccaaaatgcgaatccaggttgtaaaactatcttaaaagcattaggaacaggggc

SEQ ID NO: 353447 - DNA, 58 bp, Artificial
  Synthetic oligonucleotide
ccaaaatgcgttgagtcatttggcagcaatagatcgtcaaatcatacaggatactctc

SEQ ID NO: 353448 - DNA, 55 bp, Artificial
  Synthetic oligonucleotide
ccaaaatggtcaacaacagcagaccaaaacggcaacgatcccaacgtgttgtcgt

SEQ ID NO: 353449 - DNA, 60 bp, Artificial
  Synthetic oligonucleotide
ccaaaatgtctataccatgtggggaagcaccatcgtgtgcttatacctctaccaactcac

SEQ ID NO: 353450 - DNA, 55 bp, Artificial
  Synthetic oligonucleotide
ccaaaattaattctgatgttacccctttcaagagagcctccgacctgatgatcca

SEQ ID NO: 353451 - DNA, 57 bp, Artificial
  Synthetic oligonucleotide
ccaaaattaccctatagtgcaaaacctccaggggcaaatggtacatcagcccatatc

SEQ ID NO: 353452 - DNA, 60 bp, Artificial
  Synthetic oligonucleotide
ccaaaattcatggggttcacaaatggatctgactgacccattatgtctagaggaatccgc

SEQ ID NO: 353453 - DNA, 60 bp, Artificial
  Synthetic oligonucleotide
ccaaaattcatggggttcacaaatggatttaactgatccattatgcctagaagagtctgc

SEQ ID NO: 353454 - DNA, 55 bp, Artificial
  Synthetic oligonucleotide
ccaaaatttaaagggaatgaagtggtgctcaactacacagggccaacgagagttg

SEQ ID NO: 353455 - DNA, 55 bp, Artificial
  Synthetic oligonucleotide
ccaaaatttacagaatgacaagaagccctgatgtgcctaggggctgtgaaggccc

SEQ ID NO: 353456 - DNA, 55 bp, Artificial
  Synthetic oligonucleotide
ccaaaatttctcgcctgatttgggctcctaatgaaccaggctatacgtagacaca

SEQ ID NO: 353457 - DNA, 59 bp, Artificial
  Synthetic oligonucleotide
ccaaacaaacagtgaatcttaaaattctaatccattccttgtgcaagaatctacttgca

SEQ ID NO: 353458 - DNA, 54 bp, Artificial
  Synthetic oligonucleotide
ccaaacaaatagcgttggcgggcacgtctttaaacggcgtaagcttgcgttgca

SEQ ID NO: 353459 - DNA, 58 bp, Artificial
  Synthetic oligonucleotide
ccaaacaacatggatagggcagtcaaactgtacaggaagttgaaaagagagataacat

SEQ ID NO: 353460 - DNA, 57 bp, Artificial
  Synthetic oligonucleotide
ccaaacaacccagtgatgacagttggcttaattttgatggtacattattaggtaaca

SEQ ID NO: 353461 - DNA, 55 bp, Artificial
  Synthetic oligonucleotide
ccaaacaaggatcctcttaagcttgggtacacttttgagagcatcgcccagctac

SEQ ID NO: 353462 - DNA, 56 bp, Artificial
  Synthetic oligonucleotide
ccaaacaatatacgcgtaaggaaatctgtgaaacacaggagggttcggagtatcta

SEQ ID NO: 353463 - DNA, 52 bp, Artificial
  Synthetic oligonucleotide
ccaaacaatgaagacgactatccagattgtaacttggccctattggcaaacc

SEQ ID NO: 353464 - DNA, 59 bp, Artificial
  Synthetic oligonucleotide
ccaaacaatggagctcgtggaaacagagaaacatcccgcttattgcaatactgatttag

SEQ ID NO: 353465 - DNA, 55 bp, Artificial
  Synthetic oligonucleotide
ccaaacaattgctgctgcaacattgtgcttatatatggctacaacatatgtcacc

SEQ ID NO: 353466 - DNA, 56 bp, Artificial
  Synthetic oligonucleotide
ccaaacaatttggttgtggaggacgaaggatgcaccaacctgtcagggttctccta

SEQ ID NO: 353467 - DNA, 59 bp, Artificial
  Synthetic oligonucleotide
ccaaacacacaccccggcatgcttatgctcagacacaaaaaaatactagtgcctagcct

SEQ ID NO: 353468 - DNA, 54 bp, Artificial
  Synthetic oligonucleotide
ccaaacaccgatcgatcaccaacttaatgcgtcgaacataagttttcctccccg

SEQ ID NO: 353469 - DNA, 56 bp, Artificial
  Synthetic oligonucleotide
ccaaacacgcctttatggttacccgtagattctttgacagagaggccttcattaga

SEQ ID NO: 353470 - DNA, 58 bp, Artificial
  Synthetic oligonucleotide
ccaaacacgctatttacaacaggtagctacgactcaaacattaaaatagcaggagaca

SEQ ID NO: 353471 - DNA, 57 bp, Artificial
  Synthetic oligonucleotide
ccaaacactgaatcacacgatttgatcaggacaattgttccaccaaaattcggttac

SEQ ID NO: 353472 - DNA, 60 bp, Artificial
  Synthetic oligonucleotide
ccaaacagtgcttgaaagctataggtgaatgtggtagtagtctcacgagcggcatcccga

SEQ ID NO: 353473 - DNA, 50 bp, Artificial
  Synthetic oligonucleotide
ccaaacattactgagtcagctttgcccactaccggcgagatacccttcta

SEQ ID NO: 353474 - DNA, 55 bp, Artificial
  Synthetic oligonucleotide
ccaaaccaaaagaagcttgctcgtgaggcgttaggcatgaacctaactgccaccg

SEQ ID NO: 353475 - DNA, 55 bp, Artificial
  Synthetic oligonucleotide
ccaaaccaaagaataataaccattgggacagtctgtctgatagttggaatagtca

SEQ ID NO: 353476 - DNA, 54 bp, Artificial
  Synthetic oligonucleotide
ccaaaccaaattagaacgataacaaaaccaaacacagtacctcaactcggcaca

SEQ ID NO: 353477 - DNA, 60 bp, Artificial
  Synthetic oligonucleotide
ccaaaccaatcacacgggtcaagctggcctaccagctcaaccagcagaccgcaattgaaa

SEQ ID NO: 353478 - DNA, 55 bp, Artificial
  Synthetic oligonucleotide
ccaaaccagagggtctcttcttaaaaatttcctgtatacatgcttgtttctcagt

SEQ ID NO: 353479 - DNA, 55 bp, Artificial
  Synthetic oligonucleotide
ccaaaccagtgacggagattgctggaatggtggcaggacctacacttaaggcacc

SEQ ID NO: 353480 - DNA, 57 bp, Artificial
  Synthetic oligonucleotide
ccaaaccattttccggctggtatacaaaacctgctgtacctattgcatcttaccgca

SEQ ID NO: 353481 - DNA, 59 bp, Artificial
  Synthetic oligonucleotide
ccaaacccacacttattgggccgggaatcagcggtgatgtggactatgaaagtgccaga

SEQ ID NO: 353482 - DNA, 55 bp, Artificial
  Synthetic oligonucleotide
ccaaacccagcaatttcgacaactcctatgtcagcttacattgtcatagatcatc

SEQ ID NO: 353483 - DNA, 53 bp, Artificial
  Synthetic oligonucleotide
ccaaaccccatgacaaaagggttcatggacctcgaggaaaagacggggatcaa

SEQ ID NO: 353484 - DNA, 54 bp, Artificial
  Synthetic oligonucleotide
ccaaacccgaccccgctccacgggtgatacaacctagagatcctaggtataatg

SEQ ID NO: 353485 - DNA, 60 bp, Artificial
  Synthetic oligonucleotide
ccaaaccctggcacaccaatagttggcttgatgaagacagagggtagcagttacatctgg

SEQ ID NO: 353486 - DNA, 50 bp, Artificial
  Synthetic oligonucleotide
ccaaaccctttattaccaacccaaaccggcgtcgaaagacgcatcgaccg

SEQ ID NO: 353487 - DNA, 57 bp, Artificial
  Synthetic oligonucleotide
ccaaaccgtgggaggagtgatgggttaatagcttattccaatagtgattcagattac

SEQ ID NO: 353488 - DNA, 55 bp, Artificial
  Synthetic oligonucleotide
ccaaacctattaactaaggcgacattgtctatgtctagcacttatcacttaccga

SEQ ID NO: 353489 - DNA, 55 bp, Artificial
  Synthetic oligonucleotide
ccaaacctgatatcttgtttgttgctgccagtggtgatgatagcttaatcggatc

SEQ ID NO: 353490 - DNA, 56 bp, Artificial
  Synthetic oligonucleotide
ccaaaccttacgtatatcgcgaaaataaatttcatgcatactagacagaccgttac

SEQ ID NO: 353491 - DNA, 59 bp, Artificial
  Synthetic oligonucleotide
ccaaacgaaaggttcaagagatgtcccgatcaaatctacgagaatagtgtactctatca

SEQ ID NO: 353492 - DNA, 59 bp, Artificial
  Synthetic oligonucleotide
ccaaacgaccgagatagtatattgacccttttgttgctgtcgactttagctgatgtata

SEQ ID NO: 353493 - DNA, 52 bp, Artificial
  Synthetic oligonucleotide
ccaaacgagcgggctgcgcgttccattggtgcgctgcgcaggcgcatgcacc

SEQ ID NO: 353494 - DNA, 59 bp, Artificial
  Synthetic oligonucleotide
ccaaacgatatgttcataagagaatccttagttgcatgtcaattagcgatagtaaacac

SEQ ID NO: 353495 - DNA, 55 bp, Artificial
  Synthetic oligonucleotide
ccaaacgcaaagatgttatgaatactacaaattttcacagtggcagcattcggag

SEQ ID NO: 353496 - DNA, 53 bp, Artificial
  Synthetic oligonucleotide
ccaaacggcacagacgcgggcggagggggaccgttacacgcggtcaagagaaa

SEQ ID NO: 353497 - DNA, 55 bp, Artificial
  Synthetic oligonucleotide
ccaaacgttggtggaaacgcaggatatatcccttgaagtttcgaagtgttggata

SEQ ID NO: 353498 - DNA, 59 bp, Artificial
  Synthetic oligonucleotide
ccaaactagactccgtgtgatagctggttggatcgttaatcggacggctggcacacgga

SEQ ID NO: 353499 - DNA, 60 bp, Artificial
  Synthetic oligonucleotide
ccaaactaggaagttttgccattatgcgcttcacgcatgattcaaataccttcttgttca

SEQ ID NO: 353500 - DNA, 55 bp, Artificial
  Synthetic oligonucleotide
ccaaactaggatcgggcttacaatttgaccctaatggcaacatcgctgttatccc

SEQ ID NO: 353501 - DNA, 55 bp, Artificial
  Synthetic oligonucleotide
ccaaactataatagctacactcacactaattggatgctcagggtctccttggagg

SEQ ID NO: 353502 - DNA, 59 bp, Artificial
  Synthetic oligonucleotide
ccaaactatataacctcgaatcataaaacattagctactgaggtacataattgcaagtg

SEQ ID NO: 353503 - DNA, 60 bp, Artificial
  Synthetic oligonucleotide
ccaaactccaatgggtgcaataaactccagcatgccatttcacaacatacaccctctcac

SEQ ID NO: 353504 - DNA, 57 bp, Artificial
  Synthetic oligonucleotide
ccaaactcctgccgcgactgccgggagtccctttcctctcatgccaacgtgggtaca

SEQ ID NO: 353505 - DNA, 59 bp, Artificial
  Synthetic oligonucleotide
ccaaactctatggaagtggaaacaagttgataactgtaggaagctcgaaatatcagcaa

SEQ ID NO: 353506 - DNA, 60 bp, Artificial
  Synthetic oligonucleotide
ccaaactctgagaatggagcatgttatccaggagatttcatcaactatgaggaactgagg

SEQ ID NO: 353507 - DNA, 59 bp, Artificial
  Synthetic oligonucleotide
ccaaactgacgacacgcctgtcccaccatccaatgctgactacttcgcacgtatgaaca

SEQ ID NO: 353508 - DNA, 52 bp, Artificial
  Synthetic oligonucleotide
ccaaactgagattcttattaatttgatgcaaccccggcagttggtcttccgt

SEQ ID NO: 353509 - DNA, 55 bp, Artificial
  Synthetic oligonucleotide
ccaaactgcacaaaatttgggcatcctttcggacagtgcttccgctcttgagcgt

SEQ ID NO: 353510 - DNA, 60 bp, Artificial
  Synthetic oligonucleotide
ccaaactgtcattgaggttcaggtcagctaaccagagcatcatctctcttgacatgttta

SEQ ID NO: 353511 - DNA, 52 bp, Artificial
  Synthetic oligonucleotide
ccaaactgtgtgacacgggaactttgggagctgctgttaaaggtagcgtttc

SEQ ID NO: 353512 - DNA, 54 bp, Artificial
  Synthetic oligonucleotide
ccaaactgttttgccggtacgactatcgccctcaataactatactaatcggtct

SEQ ID NO: 353513 - DNA, 52 bp, Artificial
  Synthetic oligonucleotide
ccaaacttaaaagtcgtgggtagtcacctacggggttgggaaatcagacatc

SEQ ID NO: 353514 - DNA, 55 bp, Artificial
  Synthetic oligonucleotide
ccaaacttactgagcccgttcctgaacgagcgaatgagccttccgagcctcctaa

SEQ ID NO: 353515 - DNA, 55 bp, Artificial
  Synthetic oligonucleotide
ccaaacttcaccattacagatcatggtgaccactggcacatcacatactccggac

SEQ ID NO: 353516 - DNA, 60 bp, Artificial
  Synthetic oligonucleotide
ccaaacttcatgatgagagatccctcgcatgcattcaacggtgtaaagttggaaggtgat

SEQ ID NO: 353517 - DNA, 50 bp, Artificial
  Synthetic oligonucleotide
ccaaacttcgctttgacaccgtccaaggtccttgtagtagtcatgcatca

SEQ ID NO: 353518 - DNA, 55 bp, Artificial
  Synthetic oligonucleotide
ccaaacttggctcctcctgggatccctcccttcagtccactgcaaacgttgacac

SEQ ID NO: 353519 - DNA, 55 bp, Artificial
  Synthetic oligonucleotide
ccaaactttcaccccaccccgtgcatccacatacctggcgaagttagaaacctgc

SEQ ID NO: 353520 - DNA, 57 bp, Artificial
  Synthetic oligonucleotide
ccaaagaaaggccatggcgcactgacccaattgtttgcatactattcaggcgaatta

SEQ ID NO: 353521 - DNA, 60 bp, Artificial
  Synthetic oligonucleotide
ccaaagacaaatcctaatggctagccgcaaacagcaaaacaggcgtgccacgcgcaacac

SEQ ID NO: 353522 - DNA, 55 bp, Artificial
  Synthetic oligonucleotide
ccaaagacagtttatgttaaggaagcaattgaccgcagactccatttcaaggttg

SEQ ID NO: 353523 - DNA, 60 bp, Artificial
  Synthetic oligonucleotide
ccaaagacatgcaacgcaagtaaaatacccttagtgctcaaagctgctgaggaagtgtct

SEQ ID NO: 353524 - DNA, 60 bp, Artificial
  Synthetic oligonucleotide
ccaaagactcgaagaggggcagatgaaagggcaccgtaatgcagacgcctgatcacggga

SEQ ID NO: 353525 - DNA, 53 bp, Artificial
  Synthetic oligonucleotide
ccaaagactgctgacccagtgtacggaaaagtgttcaacccccccaggacgaa

SEQ ID NO: 353526 - DNA, 60 bp, Artificial
  Synthetic oligonucleotide
ccaaagagaacacaatctggactagtgggagcagcatatccttttgtggtgtggatagcg

SEQ ID NO: 353527 - DNA, 59 bp, Artificial
  Synthetic oligonucleotide
ccaaagagaactcaagaaagaggagatctccccacgacgctggtgaagctctaggaagc

SEQ ID NO: 353528 - DNA, 55 bp, Artificial
  Synthetic oligonucleotide
ccaaagagaatacacattggaccaggttacagctatttcccttgactgtggatca

SEQ ID NO: 353529 - DNA, 55 bp, Artificial
  Synthetic oligonucleotide
ccaaagagaatcaggagaaaactggctctcccttagccatccgagtggacgtccg

SEQ ID NO: 353530 - DNA, 55 bp, Artificial
  Synthetic oligonucleotide
ccaaagagcaatacacgggtagaacggtcagaggagccacccttcaatcgaaaat

SEQ ID NO: 353531 - DNA, 55 bp, Artificial
  Synthetic oligonucleotide
ccaaagagtacggttggagtgactatattttcagcgagggaagagcgattatagg

SEQ ID NO: 353532 - DNA, 55 bp, Artificial
  Synthetic oligonucleotide
ccaaagagtccccggtgttcagaaatctgggagttacaacacaagtagctctaac

SEQ ID NO: 353533 - DNA, 58 bp, Artificial
  Synthetic oligonucleotide
ccaaagagtcgacataccttcgagttggtgaaccagtctccaagggtcgatcctctga

SEQ ID NO: 353534 - DNA, 60 bp, Artificial
  Synthetic oligonucleotide
ccaaagagttgctccacacggagcacaatgggatgctgtgtgcaacaaatctgggacatc

SEQ ID NO: 353535 - DNA, 60 bp, Artificial
  Synthetic oligonucleotide
ccaaagatgctgcatcaggaacaaacagagcttatttcgtgaatcgtcagatgcaagtgg

SEQ ID NO: 353536 - DNA, 57 bp, Artificial
  Synthetic oligonucleotide
ccaaagatgggaggccctattcttacaacggtggagcgcacaaatcgctcggttggc

SEQ ID NO: 353537 - DNA, 55 bp, Artificial
  Synthetic oligonucleotide
ccaaagatggtaacaagcctgggttggaacttgatcaaattcagatcaggaatgg

SEQ ID NO: 353538 - DNA, 55 bp, Artificial
  Synthetic oligonucleotide
ccaaagatgtgatcctggctcacggaatcgttgcttccaacgcccctgagcgaag

SEQ ID NO: 353539 - DNA, 57 bp, Artificial
  Synthetic oligonucleotide
ccaaagcaaaggtcgagcaggggaagtctagattaattgaagcttctagcctgaatg

SEQ ID NO: 353540 - DNA, 55 bp, Artificial
  Synthetic oligonucleotide
ccaaagcacatacagtacaatttactaattggtgagggaccatgtgaacctgggg

SEQ ID NO: 353541 - DNA, 55 bp, Artificial
  Synthetic oligonucleotide
ccaaagcacattcaatacaacctgcttattggtgagggaccatgtaaacctgggg

SEQ ID NO: 353542 - DNA, 58 bp, Artificial
  Synthetic oligonucleotide
ccaaagcacctggcaaggagttgacaccaacagtggaacaacaagatcctgcccttat

SEQ ID NO: 353543 - DNA, 60 bp, Artificial
  Synthetic oligonucleotide
ccaaagcactaacagatatagtaacactgactgaggaagcagaattagaattggcagaga

SEQ ID NO: 353544 - DNA, 55 bp, Artificial
  Synthetic oligonucleotide
ccaaagcacttgtatgtgtccatgcctactgcccagtcaactatgaaggctgaag

SEQ ID NO: 353545 - DNA, 55 bp, Artificial
  Synthetic oligonucleotide
ccaaagcatctttatatctctatgccaacagcacaatccaccatgaaagctgaag

SEQ ID NO: 353546 - DNA, 55 bp, Artificial
  Synthetic oligonucleotide
ccaaagccagggcttctttgcatcgcttatggcgatgacgtcaatgtacagtggg

SEQ ID NO: 353547 - DNA, 57 bp, Artificial
  Synthetic oligonucleotide
ccaaagcccattgtagagggttttgtgtcagatttctcacctcgtttcacatttgaa

SEQ ID NO: 353548 - DNA, 53 bp, Artificial
  Synthetic oligonucleotide
ccaaagcctgcaaacttggctgcagagtatctcctgtcgctttgacaattgct

SEQ ID NO: 353549 - DNA, 59 bp, Artificial
  Synthetic oligonucleotide
ccaaagcgcgtccgagttgtctcgaagcgcagcggacgcattttcaccgtaggtcgcca

SEQ ID NO: 353550 - DNA, 55 bp, Artificial
  Synthetic oligonucleotide
ccaaagcgcttccggccagccaaggatccccttgacagtccacaagctgcagcac

SEQ ID NO: 353551 - DNA, 52 bp, Artificial
  Synthetic oligonucleotide
ccaaagcgggactttccagggaggtgtggtctgggcgggaccggggagtggc

SEQ ID NO: 353552 - DNA, 60 bp, Artificial
  Synthetic oligonucleotide
ccaaagcggtagcagtagtgcattatgggggaatccccactgatgtgatcaattcttggg

SEQ ID NO: 353553 - DNA, 57 bp, Artificial
  Synthetic oligonucleotide
ccaaagctcagtaaatcctatattaacaataagaagaaggaagtccttgtgatatgg

SEQ ID NO: 353554 - DNA, 60 bp, Artificial
  Synthetic oligonucleotide
ccaaagctgccacactcttctctcaagcacattcccgtagcattgactgttgcagcgttg

SEQ ID NO: 353555 - DNA, 56 bp, Artificial
  Synthetic oligonucleotide
ccaaagcttaccaaggtttgtgtggatttgaccaattctcaggaaattatcaagta

SEQ ID NO: 353556 - DNA, 57 bp, Artificial
  Synthetic oligonucleotide
ccaaagcttctactagtatcgttactccagcagaccgtatacttgttaagcaaccgc

SEQ ID NO: 353557 - DNA, 55 bp, Artificial
  Synthetic oligonucleotide
ccaaagcttgtacaggaccactcgttattccagcagcgaccaacagcgactgtgg

SEQ ID NO: 353558 - DNA, 50 bp, Artificial
  Synthetic oligonucleotide
ccaaaggaccgaagggggagctaggagcgcgggggggacccgccggagcc

SEQ ID NO: 353559 - DNA, 59 bp, Artificial
  Synthetic oligonucleotide
ccaaaggaggacaaagtgtggtggaccagtaatagcatagtatcgatgtgttccagcac

SEQ ID NO: 353560 - DNA, 60 bp, Artificial
  Synthetic oligonucleotide
ccaaaggatacattgtaacgaattatgcatcagtagaggtaaagccatacagtgacttct

SEQ ID NO: 353561 - DNA, 55 bp, Artificial
  Synthetic oligonucleotide
ccaaaggatattgagtcagtatatgatgcgtgtgtcgtcctaattgatacgctgg

SEQ ID NO: 353562 - DNA, 57 bp, Artificial
  Synthetic oligonucleotide
ccaaaggcatgccgacaccctacagggttgtcgaggtacccttgaaatcatctccta

SEQ ID NO: 353563 - DNA, 53 bp, Artificial
  Synthetic oligonucleotide
ccaaaggggacgtttttgtaataagggagccatttatttcgtgttctcatctg

SEQ ID NO: 353564 - DNA, 55 bp, Artificial
  Synthetic oligonucleotide
ccaaaggggtagaggaaggctctatcgggaaagtttgcaggacactactggcgaa

SEQ ID NO: 353565 - DNA, 58 bp, Artificial
  Synthetic oligonucleotide
ccaaagggtaagggtcctatgggcttgatcatgcctgagttgaatgggagagtattaa

SEQ ID NO: 353566 - DNA, 55 bp, Artificial
  Synthetic oligonucleotide
ccaaagggttgtgaaggcccatgtaaggtgcagtcctatgaggcccgtcatgatg

SEQ ID NO: 353567 - DNA, 54 bp, Artificial
  Synthetic oligonucleotide
ccaaagggtttgcctcagcacttgtcccgaaggtagtgacacaagtcggttccg

SEQ ID NO: 353568 - DNA, 58 bp, Artificial
  Synthetic oligonucleotide
ccaaaggtaaatgagaccccgatgcaattggtgtacctattagtgtctcaatattgaa

SEQ ID NO: 353569 - DNA, 51 bp, Artificial
  Synthetic oligonucleotide
ccaaaggtaccctttggcctccggaggaactaacagaatttgtcgccagac

SEQ ID NO: 353570 - DNA, 49 bp, Artificial
  Synthetic oligonucleotide
ccaaaggtcaaaaggaagttattaggcgagaaaagcccgccaaattttt

SEQ ID NO: 353571 - DNA, 58 bp, Artificial
  Synthetic oligonucleotide
ccaaaggtctcttttgaaccaattcctatacacttttgtgctccagctggttatgcga

SEQ ID NO: 353572 - DNA, 53 bp, Artificial
  Synthetic oligonucleotide
ccaaaggttatctttaggcgttttgcccgttcaatagacgattggagaacaaa

SEQ ID NO: 353573 - DNA, 51 bp, Artificial
  Synthetic oligonucleotide
ccaaaggttgaaaggaacacccttgtacctgaagacaagatcaagagtctc

SEQ ID NO: 353574 - DNA, 55 bp, Artificial
  Synthetic oligonucleotide
ccaaagtaactgttggatgtgtggaaacaaacgctcacgcagagccacttaaaca

SEQ ID NO: 353575 - DNA, 56 bp, Artificial
  Synthetic oligonucleotide
ccaaagtaagagatcaagaagggagaattaactactactggactctgctagaaccc

SEQ ID NO: 353576 - DNA, 58 bp, Artificial
  Synthetic oligonucleotide
ccaaagtacgtcgtcgtctgaatttcgacagcccctattctcgacgtgctgctgtccc

SEQ ID NO: 353577 - DNA, 55 bp, Artificial
  Synthetic oligonucleotide
ccaaagtagagggcaccaccttggcagatcgcattttgcagtggggtagccttgg

SEQ ID NO: 353578 - DNA, 54 bp, Artificial
  Synthetic oligonucleotide
ccaaagtagatcctcctcgcctagggaatagggaccccgcacgacataaattgg

SEQ ID NO: 353579 - DNA, 57 bp, Artificial
  Synthetic oligonucleotide
ccaaagtagttggtcccgtcccgcatgcaacttagaagctttgcacaaagaccaata

SEQ ID NO: 353580 - DNA, 52 bp, Artificial
  Synthetic oligonucleotide
ccaaagtatccagaggttaagaacccacagaccgcctccaaccccgttgtgg

SEQ ID NO: 353581 - DNA, 55 bp, Artificial
  Synthetic oligonucleotide
ccaaagtcgcattcgagctggtaaatgcaatactaagtgtcaaacgtctgttggt

SEQ ID NO: 353582 - DNA, 60 bp, Artificial
  Synthetic oligonucleotide
ccaaagtgaacacactcacagagagaggtgtagaagttgtcaatgcaactgaaacagtag

SEQ ID NO: 353583 - DNA, 55 bp, Artificial
  Synthetic oligonucleotide
ccaaagtgagatgtccaaccgcgtccgccctgtggtaatcatgctgagtggcccc

SEQ ID NO: 353584 - DNA, 56 bp, Artificial
  Synthetic oligonucleotide
ccaaagtgatcgttaggtagtctaactaactttccgattttgacacctgtcagcta

SEQ ID NO: 353585 - DNA, 57 bp, Artificial
  Synthetic oligonucleotide
ccaaagtgattacgattcggagaaagacagggtcctattcggcgccatgaaagccga

SEQ ID NO: 353586 - DNA, 53 bp, Artificial
  Synthetic oligonucleotide
ccaaagtgtggctagttttagtaaaatgcaacggcatggttaacgggaccata

SEQ ID NO: 353587 - DNA, 55 bp, Artificial
  Synthetic oligonucleotide
ccaaagttgggtgagtggcccaccatgatggatgttgcaacagcttgttggcaac

SEQ ID NO: 353588 - DNA, 55 bp, Artificial
  Synthetic oligonucleotide
ccaaataagtagtcaggtaccttaactatctgcccgtttatatttaactctgcac

SEQ ID NO: 353589 - DNA, 59 bp, Artificial
  Synthetic oligonucleotide
ccaaataatggactttgcacccggaggctacccattgatattcagttatgctatgggag

SEQ ID NO: 353590 - DNA, 52 bp, Artificial
  Synthetic oligonucleotide
ccaaatacaaatacaaataactaagtatttcgggagagataaagtgcccttt

SEQ ID NO: 353591 - DNA, 56 bp, Artificial
  Synthetic oligonucleotide
ccaaataccaggatgagagtaaactaaacaggcaggaaatagaatcggtaaagcta

SEQ ID NO: 353592 - DNA, 54 bp, Artificial
  Synthetic oligonucleotide
ccaaatacgtcaagaccacaaaactaagaatggcaacaggactaagaaacgtcc

SEQ ID NO: 353593 - DNA, 55 bp, Artificial
  Synthetic oligonucleotide
ccaaatacgtttaatagtcctagtagtcaaaatccagattctgtagttaagaatg

SEQ ID NO: 353594 - DNA, 55 bp, Artificial
  Synthetic oligonucleotide
ccaaatactggaaaatcctactttgtgtattcactaatacgttttctggaaggca

SEQ ID NO: 353595 - DNA, 59 bp, Artificial
  Synthetic oligonucleotide
ccaaatagaatgacagttaggaatctcgagaaccaattcgtttgaaagcaagcgccgca

SEQ ID NO: 353596 - DNA, 54 bp, Artificial
  Synthetic oligonucleotide
ccaaataggggggcctattaaccacacatgggttcaccactcctacatggaggg

SEQ ID NO: 353597 - DNA, 54 bp, Artificial
  Synthetic oligonucleotide
ccaaataggggtgccttgaaaggaggccaggattctccacgtccgtttcgcgtg

SEQ ID NO: 353598 - DNA, 53 bp, Artificial
  Synthetic oligonucleotide
ccaaatagtctacctgtacgttagtcgtacggtagtcgtctacctgtacgtta

SEQ ID NO: 353599 - DNA, 57 bp, Artificial
  Synthetic oligonucleotide
ccaaatatagaagcctgtggttacagtgatagagtagaacaaataacactaggaaac

SEQ ID NO: 353600 - DNA, 55 bp, Artificial
  Synthetic oligonucleotide
ccaaatatgggaactacggctttagatcctctattcgggtggttcagattacctc

SEQ ID NO: 353601 - DNA, 60 bp, Artificial
  Synthetic oligonucleotide
ccaaatatgttgccaccaatatttcctccaaacgatcgagatagcatattgactcttttg

SEQ ID NO: 353602 - DNA, 60 bp, Artificial
  Synthetic oligonucleotide
ccaaatcaaataaaaacccatagcagatgtttgctgatggaagggcaaataacatgctct

SEQ ID NO: 353603 - DNA, 51 bp, Artificial
  Synthetic oligonucleotide
ccaaatcaagtctcgtcgtgaggatctgtgtcatctcacccacgagaatcc

SEQ ID NO: 353604 - DNA, 54 bp, Artificial
  Synthetic oligonucleotide
ccaaatcactaacggtcaagcacttctgtttccccggtttaaactgatacgctc

SEQ ID NO: 353605 - DNA, 55 bp, Artificial
  Synthetic oligonucleotide
ccaaatcagaaaataacaaccattgggttagtatccttaggattggtagtcctca

SEQ ID NO: 353606 - DNA, 58 bp, Artificial
  Synthetic oligonucleotide
ccaaatcagaagataataacaattggtgtagtgaacactactctatcaacaatagccc

SEQ ID NO: 353607 - DNA, 60 bp, Artificial
  Synthetic oligonucleotide
ccaaatcagaagataataaccattggatcaatctgtatggtaattggaatagtcagcttg

SEQ ID NO: 353608 - DNA, 57 bp, Artificial
  Synthetic oligonucleotide
ccaaatcaggaagcacatatccagtgttgaatgtgactatgccaaacaatgacaact

SEQ ID NO: 353609 - DNA, 55 bp, Artificial
  Synthetic oligonucleotide
ccaaatcaggtgattatgtcagtgccataacgcaagccgagagaattggtgagcc

SEQ ID NO: 353610 - DNA, 55 bp, Artificial
  Synthetic oligonucleotide
ccaaatcatccctcccaaaggcagagaataccacgtactaccagttagatcagga

SEQ ID NO: 353611 - DNA, 55 bp, Artificial
  Synthetic oligonucleotide
ccaaatccatggcaacactagagaatcacagtggacggtctgatcctgactggga

SEQ ID NO: 353612 - DNA, 55 bp, Artificial
  Synthetic oligonucleotide
ccaaatccctcagacctggtctcatgaagatacaaggaggtacctatagaatccc

SEQ ID NO: 353613 - DNA, 51 bp, Artificial
  Synthetic oligonucleotide
ccaaatccggtacgaactttccttcgacattgttcagacctatgtatcgac

SEQ ID NO: 353614 - DNA, 55 bp, Artificial
  Synthetic oligonucleotide
ccaaatcctttatcggttcgagcactgaccccagaggcaaagcaatctctagccc

SEQ ID NO: 353615 - DNA, 53 bp, Artificial
  Synthetic oligonucleotide
ccaaatcgtccacatccggccaaaacgcgaaccaggaaagagaccccgccgcg

SEQ ID NO: 353616 - DNA, 56 bp, Artificial
  Synthetic oligonucleotide
ccaaatcgtcgtgtcaaagtattatcttactttgcttcgcaatctccgttttcact

SEQ ID NO: 353617 - DNA, 58 bp, Artificial
  Synthetic oligonucleotide
ccaaatctgatggaaatgcatacccactccaaaacttgacaaaagtcaacaatgggga

SEQ ID NO: 353618 - DNA, 53 bp, Artificial
  Synthetic oligonucleotide
ccaaatctgcattggttatcatgcaaacaattcgacggagcaggttgatacaa

SEQ ID NO: 353619 - DNA, 59 bp, Artificial
  Synthetic oligonucleotide
ccaaatgaatgtgtttggtttattcaacatgaatggggaaaagatcaaggctggcattg

SEQ ID NO: 353620 - DNA, 52 bp, Artificial
  Synthetic oligonucleotide
ccaaatgagagaaccaagaggtagtgacgtagcaggaactactagtacacta

SEQ ID NO: 353621 - DNA, 60 bp, Artificial
  Synthetic oligonucleotide
ccaaatgagcgctctcaactctctctattgtattggtgactggtgtacaatatatactag

SEQ ID NO: 353622 - DNA, 55 bp, Artificial
  Synthetic oligonucleotide
ccaaatgagtctcggtccaacgagcgtgccacgattgacggccgcattgcaggtc

SEQ ID NO: 353623 - DNA, 55 bp, Artificial
  Synthetic oligonucleotide
ccaaatgatctcattgaggattacaaatttatcaaaactcacctgggctccaagt

SEQ ID NO: 353624 - DNA, 57 bp, Artificial
  Synthetic oligonucleotide
ccaaatgcattaacagatgataggtcaaagcccactcaaggtcagacaatcgtacta

SEQ ID NO: 353625 - DNA, 55 bp, Artificial
  Synthetic oligonucleotide
ccaaatgccgtattgaaccagtatgcctgctcttgcacggaagccctggtgcggg

SEQ ID NO: 353626 - DNA, 55 bp, Artificial
  Synthetic oligonucleotide
ccaaatgccgtattgaacctgtatgtctactcctccacggtaatccaggggctgg

SEQ ID NO: 353627 - DNA, 60 bp, Artificial
  Synthetic oligonucleotide
ccaaatgcgagctccatgatagcgagcgtgattacctcgagtgcaatgggtgggccccat

SEQ ID NO: 353628 - DNA, 55 bp, Artificial
  Synthetic oligonucleotide
ccaaatgcgccatgggtgtttgcctgtgctccagatcgatgtccacctacatgca

SEQ ID NO: 353629 - DNA, 60 bp, Artificial
  Synthetic oligonucleotide
ccaaatgctgacgtcaccgctggcactattacgtgaccacggttctcaatgcgcgtctat

SEQ ID NO: 353630 - DNA, 55 bp, Artificial
  Synthetic oligonucleotide
ccaaatgctgagaatggaatatgttacccagggtacttctccgactatgaggagc

SEQ ID NO: 353631 - DNA, 60 bp, Artificial
  Synthetic oligonucleotide
ccaaatggaacgaaaatcagaaccctaggatgtttttggccatgatcacatatatgacca

SEQ ID NO: 353632 - DNA, 60 bp, Artificial
  Synthetic oligonucleotide
ccaaatggaatgaaaatcagaatcctcggatgtttttggctatgatcacgtacataacca

SEQ ID NO: 353633 - DNA, 57 bp, Artificial
  Synthetic oligonucleotide
ccaaatggagacgaactcaaacttggttgtagagtacaagctgacttcttcctcaac

SEQ ID NO: 353634 - DNA, 60 bp, Artificial
  Synthetic oligonucleotide
ccaaatggagcggccactcccgctgaaacgcagatggacaagatacgtaatgttgccaca

SEQ ID NO: 353635 - DNA, 53 bp, Artificial
  Synthetic oligonucleotide
ccaaatggatactttaggtttgaatcttgggtgaaccccttttatacacttgc

SEQ ID NO: 353636 - DNA, 58 bp, Artificial
  Synthetic oligonucleotide
ccaaatggctttaggaaactagctattgactctcttatagttcccatggatttagctc

SEQ ID NO: 353637 - DNA, 56 bp, Artificial
  Synthetic oligonucleotide
ccaaatggctttcatgaaactggccgcgcttacaggtacgtacgtttatgaccacc

SEQ ID NO: 353638 - DNA, 58 bp, Artificial
  Synthetic oligonucleotide
ccaaatggttacctggatctcctcgtgtatgaattggctgatgtcaacaggcattgtc

SEQ ID NO: 353639 - DNA, 59 bp, Artificial
  Synthetic oligonucleotide
ccaaatgtacgtatgcaaagtacaactcaactggggacctaatggaattgcatggcacc

SEQ ID NO: 353640 - DNA, 59 bp, Artificial
  Synthetic oligonucleotide
ccaaatgtcaacagaccagtcaacaccggagggctaaaggcagtcagcaacgccctcaa

SEQ ID NO: 353641 - DNA, 51 bp, Artificial
  Synthetic oligonucleotide
ccaaatgtgatctttatttgaatggcagggaatggtcatacatagtagaga

SEQ ID NO: 353642 - DNA, 56 bp, Artificial
  Synthetic oligonucleotide
ccaaatgttggaaactcaaactagactttagggatgtcaagctaatggtctggaaa

SEQ ID NO: 353643 - DNA, 56 bp, Artificial
  Synthetic oligonucleotide
ccaaatgttgtgctagtcgcatttaaacatgctatcttcagttaagtaacataggc

SEQ ID NO: 353644 - DNA, 55 bp, Artificial
  Synthetic oligonucleotide
ccaaattacacagagaaccaaccacagtctcacttgacaatcatcgagctcgtgc

SEQ ID NO: 353645 - DNA, 55 bp, Artificial
  Synthetic oligonucleotide
ccaaattagacggatggtgactgaattttgtgataggttacggcgtgatggtgtc

SEQ ID NO: 353646 - DNA, 53 bp, Artificial
  Synthetic oligonucleotide
ccaaattatgccggtaactccattaagccgaccggtactagtcgtaccgctat

SEQ ID NO: 353647 - DNA, 57 bp, Artificial
  Synthetic oligonucleotide
ccaaattcaaatataggtacaaggcgagaatacagagcgggcagcgtgggaggttta

SEQ ID NO: 353648 - DNA, 55 bp, Artificial
  Synthetic oligonucleotide
ccaaattccaaatatgttaccagtgacactaatgtgttgtcagcatgtagaggag

SEQ ID NO: 353649 - DNA, 56 bp, Artificial
  Synthetic oligonucleotide
ccaaattcctgaaacaccatgtcaactcgtagcaagtacgttcgttcacccgctcc

SEQ ID NO: 353650 - DNA, 59 bp, Artificial
  Synthetic oligonucleotide
ccaaattcctgctgatggacgctttgaaattaagcattgaggacccaagtcacgaagga

SEQ ID NO: 353651 - DNA, 55 bp, Artificial
  Synthetic oligonucleotide
ccaaattcgtttctttcgtcttggcatcctcttgtaacggtattgacctgtatag

SEQ ID NO: 353652 - DNA, 54 bp, Artificial
  Synthetic oligonucleotide
ccaaattcttaagtctgtcctcattaacattggaaataagcttaagaaatcctt

SEQ ID NO: 353653 - DNA, 55 bp, Artificial
  Synthetic oligonucleotide
ccaaattgatatctcttacgcaagggcaactcagagtcaatttaatacctggttc

SEQ ID NO: 353654 - DNA, 57 bp, Artificial
  Synthetic oligonucleotide
ccaaattgcgcacttgccagagtggcaaaaagcttacttgtatgtacttgggaaaca

SEQ ID NO: 353655 - DNA, 58 bp, Artificial
  Synthetic oligonucleotide
ccaaattggcgaatatcactagtggcattggcactaatgctgtcaccactggctccac

SEQ ID NO: 353656 - DNA, 60 bp, Artificial
  Synthetic oligonucleotide
ccaaattgtacaagtaatgtctaaaaggtccagatcactagactctgcagcattctacta

SEQ ID NO: 353657 - DNA, 59 bp, Artificial
  Synthetic oligonucleotide
ccaaattgtcgctaagaaatccacgattgaatgtaatcttcctagtatacacactccaa

SEQ ID NO: 353658 - DNA, 60 bp, Artificial
  Synthetic oligonucleotide
ccaaattgtgatctagattgctacccttattattcggacaacctagctgactgctcttgg

SEQ ID NO: 353659 - DNA, 50 bp, Artificial
  Synthetic oligonucleotide
ccaaatttatccaggaattaaagtaaaacagttgtgtaaactccttaggg

SEQ ID NO: 353660 - DNA, 50 bp, Artificial
  Synthetic oligonucleotide
ccaaatttgaccttaactttcccacaaccacacatggtgcattgtgtcgc

SEQ ID NO: 353661 - DNA, 58 bp, Artificial
  Synthetic oligonucleotide
ccaaatttgctaaccatagattttgagaaggatgcgtacttgaatattagatcggagt

SEQ ID NO: 353662 - DNA, 60 bp, Artificial
  Synthetic oligonucleotide
ccaaattttgttggctgtgccgattggcactggtgggtcatggagcgctcatacaagcct

SEQ ID NO: 353663 - DNA, 55 bp, Artificial
  Synthetic oligonucleotide
ccaacaaaagtttatagacgacattgtaagcagcgggcccttcgcataccacggc

SEQ ID NO: 353664 - DNA, 55 bp, Artificial
  Synthetic oligonucleotide
ccaacaaactgacgaagcgaataaatggatatcaatgggctcgtcttgcacagta

SEQ ID NO: 353665 - DNA, 55 bp, Artificial
  Synthetic oligonucleotide
ccaacaaagaggatttaccagaacaaactctatctcagtacgagttttcgcatgg

SEQ ID NO: 353666 - DNA, 55 bp, Artificial
  Synthetic oligonucleotide
ccaacaaagtgatggaactaatgcatggcaagacgcttgggatgctgtcactacg

SEQ ID NO: 353667 - DNA, 56 bp, Artificial
  Synthetic oligonucleotide
ccaacaaagttagtgacccagaatcagccttcgctaagttgaaggctaagttctcc

SEQ ID NO: 353668 - DNA, 55 bp, Artificial
  Synthetic oligonucleotide
ccaacaaatcggacttccaagccgctattaagatgtcgatccactttcagatgag

SEQ ID NO: 353669 - DNA, 55 bp, Artificial
  Synthetic oligonucleotide
ccaacaaatgatgactatcacacgccaatcgctaattcagttactgtgagacaag

SEQ ID NO: 353670 - DNA, 60 bp, Artificial
  Synthetic oligonucleotide
ccaacaaccacgacaactgctggctgaacgcaattctccaactgttcaggtacgtcgatg

SEQ ID NO: 353671 - DNA, 56 bp, Artificial
  Synthetic oligonucleotide
ccaacaaccatcagaacctagtgatggccaacgaggagggggcggaggtgcgaccg

SEQ ID NO: 353672 - DNA, 55 bp, Artificial
  Synthetic oligonucleotide
ccaacaacccacgagagagaggttcattgtgagcaacaacagcgtacccaaccgg

SEQ ID NO: 353673 - DNA, 60 bp, Artificial
  Synthetic oligonucleotide
ccaacaactagtaaagccatcactgccaaaagagccaataccagtcaagatctatggatt

SEQ ID NO: 353674 - DNA, 55 bp, Artificial
  Synthetic oligonucleotide
ccaacaacttaaagctgctagactaactagatccttgaaggttgagcatcctcat

SEQ ID NO: 353675 - DNA, 57 bp, Artificial
  Synthetic oligonucleotide
ccaacaacttcgtaactgttttcacacacggtgacgatagcctggtcggagtatcaa

SEQ ID NO: 353676 - DNA, 54 bp, Artificial
  Synthetic oligonucleotide
ccaacaagaactcgtagtccatttgaagctaagaggttgagagctccacaagtt

SEQ ID NO: 353677 - DNA, 54 bp, Artificial
  Synthetic oligonucleotide
ccaacaagactgaggatcaagtcgattaccagggcattttcgaagggccccttt

SEQ ID NO: 353678 - DNA, 60 bp, Artificial
  Synthetic oligonucleotide
ccaacaagaggactttcctacgctgacgagctatgccaaaggtgatgtggtgtgtcctca

SEQ ID NO: 353679 - DNA, 55 bp, Artificial
  Synthetic oligonucleotide
ccaacaagatcacagagtggatcccaggggaagagaatcacatcctggaacatcc

SEQ ID NO: 353680 - DNA, 57 bp, Artificial
  Synthetic oligonucleotide
ccaacaaggacccgtggccagaggcttggcaggtgggagcgggatcattcgggccag

SEQ ID NO: 353681 - DNA, 60 bp, Artificial
  Synthetic oligonucleotide
ccaacaaggatgaagaatttctcgtgagtaatgatgcatatctcctaggaagagagaagg

SEQ ID NO: 353682 - DNA, 54 bp, Artificial
  Synthetic oligonucleotide
ccaacaagggaaggccggggaattttcctcagaacagactagagccaacagccc

SEQ ID NO: 353683 - DNA, 56 bp, Artificial
  Synthetic oligonucleotide
ccaacaaggggtccatgtaaacccatgcctacagtaggtcccaggcagtggctgtt

SEQ ID NO: 353684 - DNA, 53 bp, Artificial
  Synthetic oligonucleotide
ccaacaaggtaggagtgggagcattcgggccggggttcactcccccacacgga

SEQ ID NO: 353685 - DNA, 55 bp, Artificial
  Synthetic oligonucleotide
ccaacaagtcgaacaacctggtacatacacgctaagcatgaatggatgacgacgg

SEQ ID NO: 353686 - DNA, 55 bp, Artificial
  Synthetic oligonucleotide
ccaacaatcctaccagatccaactaaccaaactacgtggttgttcaatccagtac

SEQ ID NO: 353687 - DNA, 50 bp, Artificial
  Synthetic oligonucleotide
ccaacaatctcaggcttaacagagatactggggacataccaagctgcatt

SEQ ID NO: 353688 - DNA, 55 bp, Artificial
  Synthetic oligonucleotide
ccaacaatgtctgaagatatacaaccaatggaaaccgtcggggccactgataccg

SEQ ID NO: 353689 - DNA, 58 bp, Artificial
  Synthetic oligonucleotide
ccaacaattcaacaacacaagtggatacgatacttgaaaagaatgtaaccgtcacaca

SEQ ID NO: 353690 - DNA, 55 bp, Artificial
  Synthetic oligonucleotide
ccaacaatttggttaccgggagtggtatatatagttgtaaattggctgtgcagac

SEQ ID NO: 353691 - DNA, 59 bp, Artificial
  Synthetic oligonucleotide
ccaacaattttacgaaactgtgttaccggcttggatcgtcaactgcattgtgaatggca

SEQ ID NO: 353692 - DNA, 50 bp, Artificial
  Synthetic oligonucleotide
ccaacacaaaacttaacatggatgcacatgatatatttaggaaacactca

SEQ ID NO: 353693 - DNA, 59 bp, Artificial
  Synthetic oligonucleotide
ccaacacaatagaggtcttcaggttgaacagtctaacagccaatgaatcgggaagatta

SEQ ID NO: 353694 - DNA, 55 bp, Artificial
  Synthetic oligonucleotide
ccaacacacacactcaactaactacataccactcaatggtgaggccacaactcag

SEQ ID NO: 353695 - DNA, 60 bp, Artificial
  Synthetic oligonucleotide
ccaacacacagtttgaactcatagacaatgagttcactgaagtggagcagcagataggca

SEQ ID NO: 353696 - DNA, 55 bp, Artificial
  Synthetic oligonucleotide
ccaacacacgttacccttacaccacagcaccacacaacctcatgtccaaacttcg

SEQ ID NO: 353697 - DNA, 58 bp, Artificial
  Synthetic oligonucleotide
ccaacacacttagtcgcttgtcgtgaataccttttatccagaccagagttcaagctct

SEQ ID NO: 353698 - DNA, 55 bp, Artificial
  Synthetic oligonucleotide
ccaacacatagacacataaaaggcaagccttgcccgaaaccacacagactcaatc

SEQ ID NO: 353699 - DNA, 60 bp, Artificial
  Synthetic oligonucleotide
ccaacacatagacacatactgggtgacccgtgccctttgcctcacaggctcgatagagat

SEQ ID NO: 353700 - DNA, 55 bp, Artificial
  Synthetic oligonucleotide
ccaacacatatctaaagatgctcttgagtttgagcacaagatgtggcttagcatg

SEQ ID NO: 353701 - DNA, 55 bp, Artificial
  Synthetic oligonucleotide
ccaacacatgctgatccaggtagagaggttcaagtcaacggcattcacactaagg

SEQ ID NO: 353702 - DNA, 54 bp, Artificial
  Synthetic oligonucleotide
ccaacacatgttgacattctaaacgaatttggaaaacacttcgcagcgttaggg

SEQ ID NO: 353703 - DNA, 60 bp, Artificial
  Synthetic oligonucleotide
ccaacaccaccagactctataaagtcaccacaagcaccatgggtgtttgcttgtcgacca

SEQ ID NO: 353704 - DNA, 57 bp, Artificial
  Synthetic oligonucleotide
ccaacaccatagaggtcttcaggtcgaacggtctaacagctaatgaatcgggaaggc

SEQ ID NO: 353705 - DNA, 56 bp, Artificial
  Synthetic oligonucleotide
ccaacaccgtcactttccccgctaacatctctagcatgcccgaattccggaattgg

SEQ ID NO: 353706 - DNA, 57 bp, Artificial
  Synthetic oligonucleotide
ccaacacgaaggattatgtgattgtaaacttgaggaatttagatattcattacgaaa

SEQ ID NO: 353707 - DNA, 57 bp, Artificial
  Synthetic oligonucleotide
ccaacacgcattgtattagatgacaacttctcagcttttccatacctatacattcca

SEQ ID NO: 353708 - DNA, 55 bp, Artificial
  Synthetic oligonucleotide
ccaacacgccctatactggggcattagggctccttgactttgcacttgagcttga

SEQ ID NO: 353709 - DNA, 55 bp, Artificial
  Synthetic oligonucleotide
ccaacacgctcggcaatgtgttgatggctgctcagggcggcgtgtttgacaccgt

SEQ ID NO: 353710 - DNA, 51 bp, Artificial
  Synthetic oligonucleotide
ccaacacggtgtcgtagggatagtctctaccgggggaaacggcttggtggg

SEQ ID NO: 353711 - DNA, 56 bp, Artificial
  Synthetic oligonucleotide
ccaacactgcagcgcaaggctacccggtgcctctgctttatggtaagcgtcgaatc

SEQ ID NO: 353712 - DNA, 58 bp, Artificial
  Synthetic oligonucleotide
ccaacactgcattgaaatcctcctggtcaaggcttgggtcaatgagaccggcaaaact

SEQ ID NO: 353713 - DNA, 60 bp, Artificial
  Synthetic oligonucleotide
ccaacacttgtgcccgaaacatatgaaatgatgaatagatgctactcatatatatcacca

SEQ ID NO: 353714 - DNA, 52 bp, Artificial
  Synthetic oligonucleotide
ccaacagaagtaaggagatatacgggcccagaaagacaaaaaagggtgccct

SEQ ID NO: 353715 - DNA, 60 bp, Artificial
  Synthetic oligonucleotide
ccaacagaatggtttccaacaagcagaacaacatggtcaatccacgcccaccatcaatgg

SEQ ID NO: 353716 - DNA, 60 bp, Artificial
  Synthetic oligonucleotide
ccaacagagagcatctgcaggacaaatcagtgtacagcctaccttctcagtacagagaaa

SEQ ID NO: 353717 - DNA, 55 bp, Artificial
  Synthetic oligonucleotide
ccaacagagcgtgactgggttagagtgaatctcggtaaaccaatgcctattacaa

SEQ ID NO: 353718 - DNA, 55 bp, Artificial
  Synthetic oligonucleotide
ccaacagagctgcccctgcttttacagcagcaccaagactgaaattatagccaga

SEQ ID NO: 353719 - DNA, 55 bp, Artificial
  Synthetic oligonucleotide
ccaacagagtactcgttcatccaattcgttgatccactcactggggcacaaatag

SEQ ID NO: 353720 - DNA, 60 bp, Artificial
  Synthetic oligonucleotide
ccaacagataaataaaacagagcgtgagatatcgcggcaaataggtaatgtactgaaaga

SEQ ID NO: 353721 - DNA, 55 bp, Artificial
  Synthetic oligonucleotide
ccaacagatggcactaactgttgtgacagggtgtacgagatgcctcacccaccgg

SEQ ID NO: 353722 - DNA, 57 bp, Artificial
  Synthetic oligonucleotide
ccaacagccccaacaacgtgttgaacatcgaagggtgcccgtcactctacaaattca

SEQ ID NO: 353723 - DNA, 55 bp, Artificial
  Synthetic oligonucleotide
ccaacagcgggagaatacactgattcgctaatggatccagcgattctaacatccc

SEQ ID NO: 353724 - DNA, 59 bp, Artificial
  Synthetic oligonucleotide
ccaacagctccggtgcatcccggaccattcgttcctggtcagggataagcagtaagcca

SEQ ID NO: 353725 - DNA, 55 bp, Artificial
  Synthetic oligonucleotide
ccaacaggaccgagctcgtgaactcacataggaggcacattgaagcccaacgacc

SEQ ID NO: 353726 - DNA, 51 bp, Artificial
  Synthetic oligonucleotide
ccaacaggagtcttttttcattcaaaccgtataatcctccagcatattcat

SEQ ID NO: 353727 - DNA, 60 bp, Artificial
  Synthetic oligonucleotide
ccaacaggcccatgaaccgaaagcccaggatgtacaggatgtataggagcccagatgttc

SEQ ID NO: 353728 - DNA, 58 bp, Artificial
  Synthetic oligonucleotide
ccaacaggcccatgtacagaaagcccaggatatatcggaccgtaaggtctgccgatgt

SEQ ID NO: 353729 - DNA, 54 bp, Artificial
  Synthetic oligonucleotide
ccaacaggcccatgtaccgaaagcccaggctctatcggatgtacaaaagcaatg

SEQ ID NO: 353730 - DNA, 55 bp, Artificial
  Synthetic oligonucleotide
ccaacagggcgcacacattgtaggtgttgctaagtgggtcgagtgtggccgcact

SEQ ID NO: 353731 - DNA, 52 bp, Artificial
  Synthetic oligonucleotide
ccaacaggtccgcggttttacctccctctttacatccgggccgactcagaaa

SEQ ID NO: 353732 - DNA, 55 bp, Artificial
  Synthetic oligonucleotide
ccaacagtacagaggaagaaagacaccttgcttgaatgcaagaagttgaccctgt

SEQ ID NO: 353733 - DNA, 54 bp, Artificial
  Synthetic oligonucleotide
ccaacagtacctaagggttacgcgggtaccgtggaagtatcactgctcgattcg

SEQ ID NO: 353734 - DNA, 60 bp, Artificial
  Synthetic oligonucleotide
ccaacagtacctcaactggcaatggtactcaagtgtacttagctcccacgctgctatgtg

SEQ ID NO: 353735 - DNA, 59 bp, Artificial
  Synthetic oligonucleotide
ccaacagtagacctggcagatgaggctagaaactccccactggtaacagtgttctagcc

SEQ ID NO: 353736 - DNA, 60 bp, Artificial
  Synthetic oligonucleotide
ccaacagtagacctggcagatgaggctagacattccccaccagcgatggtggtctagcct

SEQ ID NO: 353737 - DNA, 52 bp, Artificial
  Synthetic oligonucleotide
ccaacagttgaagcatgaattaccagatggtttctattctgctagctcgctt

SEQ ID NO: 353738 - DNA, 58 bp, Artificial
  Synthetic oligonucleotide
ccaacagtttgtttcgaaccttggatctggttgcaatagcgatatcttaaagcatggg

SEQ ID NO: 353739 - DNA, 60 bp, Artificial
  Synthetic oligonucleotide
ccaacatacagacgccgccgatggagacgcagacaatatagacgaaggagacctcgaccg

SEQ ID NO: 353740 - DNA, 56 bp, Artificial
  Synthetic oligonucleotide
ccaacatagcagaataggcattacaccacggagaagggtaagggatggacccggta

SEQ ID NO: 353741 - DNA, 60 bp, Artificial
  Synthetic oligonucleotide
ccaacatagcagaataggcattactcgtcagagaagagtaagggatggatccggtagatc

SEQ ID NO: 353742 - DNA, 58 bp, Artificial
  Synthetic oligonucleotide
ccaacatagcagaataggcattaggctacggagaacaagaagggatggacccggtaga

SEQ ID NO: 353743 - DNA, 57 bp, Artificial
  Synthetic oligonucleotide
ccaacatagtaaagtcttcagttagtgaatctccattaagtctccatttaaagtctc

SEQ ID NO: 353744 - DNA, 55 bp, Artificial
  Synthetic oligonucleotide
ccaacatatttccaccatcaagaatggatgctccagcctttactgcagctgagag

SEQ ID NO: 353745 - DNA, 57 bp, Artificial
  Synthetic oligonucleotide
ccaacatcacaccaggtgattgtcaacaaccaaaactggtcgggatactcaggggcg

SEQ ID NO: 353746 - DNA, 55 bp, Artificial
  Synthetic oligonucleotide
ccaacatcacaggactactattgacacgtgatggaggatcagataaccataccaa

SEQ ID NO: 353747 - DNA, 54 bp, Artificial
  Synthetic oligonucleotide
ccaacatcatggggggcggagtacatcggaaaaacgaggacagattttacgtac

SEQ ID NO: 353748 - DNA, 55 bp, Artificial
  Synthetic oligonucleotide
ccaacatccaaaggtaagttcagaagtacatatcccaataggagaggctaggttg

SEQ ID NO: 353749 - DNA, 60 bp, Artificial
  Synthetic oligonucleotide
ccaacatccccacgcatctagacgtagcatctgtgctcgaaaccagcccccgatcttttc

SEQ ID NO: 353750 - DNA, 55 bp, Artificial
  Synthetic oligonucleotide
ccaacatcctgaattaacaggaatgaactgcataaggccttgtttctgggtagag

SEQ ID NO: 353751 - DNA, 58 bp, Artificial
  Synthetic oligonucleotide
ccaacatcgaggaggtcgcattgcccttgacaggagaagtgcccttctacgggagggc

SEQ ID NO: 353752 - DNA, 59 bp, Artificial
  Synthetic oligonucleotide
ccaacatcggatgtatcctagtgactgcaagtaccaatcgaacctgaccaaacaccgaa

SEQ ID NO: 353753 - DNA, 60 bp, Artificial
  Synthetic oligonucleotide
ccaacatctatggagatgggaactgggtaacctcctccacaggagcaaatggctggtcac

SEQ ID NO: 353754 - DNA, 55 bp, Artificial
  Synthetic oligonucleotide
ccaacatgattgtttcatcgtcttctgtctttaaaacatacacgaaccgagttga

SEQ ID NO: 353755 - DNA, 55 bp, Artificial
  Synthetic oligonucleotide
ccaacatgcaaactggactctcgttgtcgccgtgctcagtcccctccagtacgcc

SEQ ID NO: 353756 - DNA, 60 bp, Artificial
  Synthetic oligonucleotide
ccaacatggagcagacgatgaggacaaagaagtactggtctggaggtttgacagccgcct

SEQ ID NO: 353757 - DNA, 60 bp, Artificial
  Synthetic oligonucleotide
ccaacatgggcgaccttcgccatgaacgttgcaccgtcaatggttgtggactcatcatgc

SEQ ID NO: 353758 - DNA, 57 bp, Artificial
  Synthetic oligonucleotide
ccaacatgtacatcccagtaggacaagtcacagattacgggttcctaaatctgggcg

SEQ ID NO: 353759 - DNA, 55 bp, Artificial
  Synthetic oligonucleotide
ccaacatgtatgcagtcgtaatgggcaactatgggatggaaccaactactttggg

SEQ ID NO: 353760 - DNA, 55 bp, Artificial
  Synthetic oligonucleotide
ccaacatgtatgtgcccgtcggtgcagtgaccgagcaagggtacctgaacctggg

SEQ ID NO: 353761 - DNA, 55 bp, Artificial
  Synthetic oligonucleotide
ccaacattaaggtccctattgccttttcctctacagttgccctatccacttcagc

SEQ ID NO: 353762 - DNA, 55 bp, Artificial
  Synthetic oligonucleotide
ccaacattggcaggagtaatgtcttctgtgtcaacaaatgcactgacagtagctc

SEQ ID NO: 353763 - DNA, 55 bp, Artificial
  Synthetic oligonucleotide
ccaacatttgcaaggtcgtaatgagtaattctgggatgggaccgactactttggg

SEQ ID NO: 353764 - DNA, 60 bp, Artificial
  Synthetic oligonucleotide
ccaaccaaatgaagtgcgcccctgagcgttatggcgacagacctatcctatggctggtga

SEQ ID NO: 353765 - DNA, 55 bp, Artificial
  Synthetic oligonucleotide
ccaaccaaccgggagacatgtacttgtacggtggtggagtggatgactcagacac

SEQ ID NO: 353766 - DNA, 58 bp, Artificial
  Synthetic oligonucleotide
ccaaccaacgatgattatcaaacttcaattatgaattcagtaacagtaagacaagatt

SEQ ID NO: 353767 - DNA, 55 bp, Artificial
  Synthetic oligonucleotide
ccaaccaagatgcagacacagtgacaatagacaacactgtatatcagctaagcaa

SEQ ID NO: 353768 - DNA, 56 bp, Artificial
  Synthetic oligonucleotide
ccaaccaatacgtgtgacaacttgatagtaggacctttactactggctgaaccgga

SEQ ID NO: 353769 - DNA, 51 bp, Artificial
  Synthetic oligonucleotide
ccaaccaatcgccgaacattcttccagccccgaagtttcccgaggggtcgg

SEQ ID NO: 353770 - DNA, 58 bp, Artificial
  Synthetic oligonucleotide
ccaaccactcaaaggctcctgggacgtcgtgcttgccgacccactccaacactcagga

SEQ ID NO: 353771 - DNA, 51 bp, Artificial
  Synthetic oligonucleotide
ccaaccactgatattgccgtttgtagggtttcaattggttttcccaaattt

SEQ ID NO: 353772 - DNA, 55 bp, Artificial
  Synthetic oligonucleotide
ccaaccactgtacgccgctgaggcaaagagggtctttgcactggagaaacgtatc

SEQ ID NO: 353773 - DNA, 59 bp, Artificial
  Synthetic oligonucleotide
ccaaccagcaaacttcaaaaggtgctgccctctggtgtgtgggaaggcgattcaactga

SEQ ID NO: 353774 - DNA, 55 bp, Artificial
  Synthetic oligonucleotide
ccaaccagctgacagccagagaacaaagcacaaggggaagtggaaagcagccagg

SEQ ID NO: 353775 - DNA, 55 bp, Artificial
  Synthetic oligonucleotide
ccaaccagtcgggctctcacggcctactcaagtatctcggcttggaggtatcccc

SEQ ID NO: 353776 - DNA, 55 bp, Artificial
  Synthetic oligonucleotide
ccaaccagttgcagccgaaaatataactcaatggaacctgagtgacaacggcact

SEQ ID NO: 353777 - DNA, 51 bp, Artificial
  Synthetic oligonucleotide
ccaaccatacttcccgacaactccggcatgtcctttacggtaaccttaaac

SEQ ID NO: 353778 - DNA, 55 bp, Artificial
  Synthetic oligonucleotide
ccaaccatatgggttctttcttgaaacagaggaaacgtatcagcctggtcgttgg

SEQ ID NO: 353779 - DNA, 60 bp, Artificial
  Synthetic oligonucleotide
ccaaccattcaagtgagcttccatctctctgtatgctaaacaatagtttttattacatga

SEQ ID NO: 353780 - DNA, 55 bp, Artificial
  Synthetic oligonucleotide
ccaacccactgataacagctgtgaattcaagagtgtaacacaatacaataagacc

SEQ ID NO: 353781 - DNA, 55 bp, Artificial
  Synthetic oligonucleotide
ccaaccccactcactgtgacatcatttgggtcccctccaattccactgcttcccc

SEQ ID NO: 353782 - DNA, 60 bp, Artificial
  Synthetic oligonucleotide
ccaaccccattaaatgggatgactatacatggcagagtgcaacaaatcccagtgtattct

SEQ ID NO: 353783 - DNA, 59 bp, Artificial
  Synthetic oligonucleotide
ccaaccccattttcatccagaagcacagtagtcaaggtattagtaaactgcatcactgg

SEQ ID NO: 353784 - DNA, 51 bp, Artificial
  Synthetic oligonucleotide
ccaacccccaaatcggtctgccgcgttatgggctttagaggccacttgcgc

SEQ ID NO: 353785 - DNA, 55 bp, Artificial
  Synthetic oligonucleotide
ccaaccccgctctaatgtcacccagtgttgaggcttgtggattctctgataggct

SEQ ID NO: 353786 - DNA, 53 bp, Artificial
  Synthetic oligonucleotide
ccaaccccggttagaagggtcgagtgattctacgttagtgaatcagaacctcg

SEQ ID NO: 353787 - DNA, 54 bp, Artificial
  Synthetic oligonucleotide
ccaacccctcctactagggcggagtaaatggcgacgttatacggcgccgtgatc

SEQ ID NO: 353788 - DNA, 57 bp, Artificial
  Synthetic oligonucleotide
ccaacccgatccgacatcttggttttattgtgttgatgacgaatgtcaattaccagt

SEQ ID NO: 353789 - DNA, 57 bp, Artificial
  Synthetic oligonucleotide
ccaaccctccgacgaaggagatacaggatccgacgttgggtcatactcctccatgcc

SEQ ID NO: 353790 - DNA, 56 bp, Artificial
  Synthetic oligonucleotide
ccaaccctgataaaactcaagagtgctggttatgcctagtgtctggacccccctat

SEQ ID NO: 353791 - DNA, 51 bp, Artificial
  Synthetic oligonucleotide
ccaaccctgcctattactaaaccaaaaggaacattcccagtatcccaacgg

SEQ ID NO: 353792 - DNA, 58 bp, Artificial
  Synthetic oligonucleotide
ccaaccctggtgcaattacagttcacgaagcccagggcgctacatttactgagaccac

SEQ ID NO: 353793 - DNA, 55 bp, Artificial
  Synthetic oligonucleotide
ccaacccttctaggccaatgctccaatatgcacttgatctaggctttgagatccc

SEQ ID NO: 353794 - DNA, 55 bp, Artificial
  Synthetic oligonucleotide
ccaaccgaaaaatttcaatttgacatagttaaaacagtagtgcaagttaggcatc

SEQ ID NO: 353795 - DNA, 59 bp, Artificial
  Synthetic oligonucleotide
ccaaccgaagcagactattggccttgaattcccaaccgtcactgtgctctcatccctcc

SEQ ID NO: 353796 - DNA, 58 bp, Artificial
  Synthetic oligonucleotide
ccaaccgaagcatcaaatgagatcgctgatacggaatggaaaaacaccttgtcccaac

SEQ ID NO: 353797 - DNA, 60 bp, Artificial
  Synthetic oligonucleotide
ccaaccgaggagcaagcagtggatatatgcaaagcagcaatggggttgagaatcagttca

SEQ ID NO: 353798 - DNA, 59 bp, Artificial
  Synthetic oligonucleotide
ccaaccgattttgatacaactgatgctataataacttcatatgatggatgtttaggtat

SEQ ID NO: 353799 - DNA, 51 bp, Artificial
  Synthetic oligonucleotide
ccaaccgccccatgtggaggaaacctcggttttaccgactgtataggtccc

SEQ ID NO: 353800 - DNA, 51 bp, Artificial
  Synthetic oligonucleotide
ccaaccgctggtccctgcactccgggaattcatgtgggacgtaagtcgctc

SEQ ID NO: 353801 - DNA, 55 bp, Artificial
  Synthetic oligonucleotide
ccaaccggatcgcgtttggcggtacatcgcattttatgcgcaggggtctcaacag

SEQ ID NO: 353802 - DNA, 51 bp, Artificial
  Synthetic oligonucleotide
ccaaccgggacaagttgccaagcgaccgcgtttgaaccatcacgttccgct

SEQ ID NO: 353803 - DNA, 47 bp, Artificial
  Synthetic oligonucleotide
ccaaccgtataatattaccggttggccccgcccccctttaaacgtgg

SEQ ID NO: 353804 - DNA, 55 bp, Artificial
  Synthetic oligonucleotide
ccaaccgttgaggcatgcggttattcggatagaatcatacaaattactagagggg

SEQ ID NO: 353805 - DNA, 57 bp, Artificial
  Synthetic oligonucleotide
ccaacctaattctagatacggaaatatagttactaatgatatgggcactttatgttc

SEQ ID NO: 353806 - DNA, 56 bp, Artificial
  Synthetic oligonucleotide
ccaacctacgactggggtgagaatgaatcggacgtcttcgtcctcaacaacaccag

SEQ ID NO: 353807 - DNA, 56 bp, Artificial
  Synthetic oligonucleotide
ccaacctagaaccggtataacagttatgtgtcaagggaatgggacgacttctatgc

SEQ ID NO: 353808 - DNA, 57 bp, Artificial
  Synthetic oligonucleotide
ccaacctagttgactgctcttggagtgaatcgactcattctaccctaagccaaaaag

SEQ ID NO: 353809 - DNA, 60 bp, Artificial
  Synthetic oligonucleotide
ccaacctcctagcttcttgtagtatctttttgtgtgcctgaactatgcactcatccaagc

SEQ ID NO: 353810 - DNA, 55 bp, Artificial
  Synthetic oligonucleotide
ccaacctctgaactattccatgtaccaaaatcaggctgatgagcaacttttacac

SEQ ID NO: 353811 - DNA, 58 bp, Artificial
  Synthetic oligonucleotide
ccaacctgggaagagttgagcgagtccgagaaacgtgacatcctggctaataatgaaa

SEQ ID NO: 353812 - DNA, 60 bp, Artificial
  Synthetic oligonucleotide
ccaacctgtccgagttctcctacatggaactcaaagtgggatacatctcagccatcaaag

SEQ ID NO: 353813 - DNA, 56 bp, Artificial
  Synthetic oligonucleotide
ccaacctgtcggggttctcctacatggaacttaaagtgggatatatctcggccata

SEQ ID NO: 353814 - DNA, 60 bp, Artificial
  Synthetic oligonucleotide
ccaaccttctgaatgtccaatcatcttgaccagcactcacagttgcactaggaacaataa

SEQ ID NO: 353815 - DNA, 55 bp, Artificial
  Synthetic oligonucleotide
ccaaccttgcgggcgagttcttgtgttcgacgtcgcctcccacacgccatcgttc

SEQ ID NO: 353816 - DNA, 55 bp, Artificial
  Synthetic oligonucleotide
ccaacctttcagttctctgtaccttttgtcttaatttctccaagtcactggagag

SEQ ID NO: 353817 - DNA, 60 bp, Artificial
  Synthetic oligonucleotide
ccaaccttttagcgctgaatgcaatatagtcccatccaatcgtcggttaccgcatgctct

SEQ ID NO: 353818 - DNA, 53 bp, Artificial
  Synthetic oligonucleotide
ccaaccttttagtacgtactttactagcttcgaaccactagacggacgatctg

SEQ ID NO: 353819 - DNA, 50 bp, Artificial
  Synthetic oligonucleotide
ccaacgaaaggtccgctatgtcaaacgtattcaccctcgacagcctccga

SEQ ID NO: 353820 - DNA, 54 bp, Artificial
  Synthetic oligonucleotide
ccaacgaaccgggagtgtgggctccgatccctttacaccgttcaacatccacta

SEQ ID NO: 353821 - DNA, 53 bp, Artificial
  Synthetic oligonucleotide
ccaacgacgaaaagggggtgaacgggtatgcagaagtgtcggcggtggtccac

SEQ ID NO: 353822 - DNA, 55 bp, Artificial
  Synthetic oligonucleotide
ccaacgacgaattagaacatgctagggaattgcaacatgcgatgacgctaatagg

SEQ ID NO: 353823 - DNA, 58 bp, Artificial
  Synthetic oligonucleotide
ccaacgactgccctaactcgagtattgtgtatgagacggccgataccattctgcactc

SEQ ID NO: 353824 - DNA, 58 bp, Artificial
  Synthetic oligonucleotide
ccaacgagactgaaatcttcagacctggaggaggaaatatgagggacaattggagaag

SEQ ID NO: 353825 - DNA, 55 bp, Artificial
  Synthetic oligonucleotide
ccaacgagcttcgatcagaatggaagcgcgatcttgatcttcccgagtctgaggc

SEQ ID NO: 353826 - DNA, 60 bp, Artificial
  Synthetic oligonucleotide
ccaacgagtcatttgagccagtgttctcaatacggtatctactactgtatattgacccat

SEQ ID NO: 353827 - DNA, 58 bp, Artificial
  Synthetic oligonucleotide
ccaacgataactttggctgtattggtagtccttaaattcattgcaaatattctccaca

SEQ ID NO: 353828 - DNA, 55 bp, Artificial
  Synthetic oligonucleotide
ccaacgcagatcgaatctgcactgggataacatcttcaaactcacctcatgtggt

SEQ ID NO: 353829 - DNA, 51 bp, Artificial
  Synthetic oligonucleotide
ccaacgcagctatgggcgccgtttttacagaggagaaccaatgggacagtg

SEQ ID NO: 353830 - DNA, 50 bp, Artificial
  Synthetic oligonucleotide
ccaacgcaggaccccattcacgtgctgtgccgtgtcgttggttcgcgtgt

SEQ ID NO: 353831 - DNA, 56 bp, Artificial
  Synthetic oligonucleotide
ccaacgccactttttgtacctttcgagatgatacccatcgcgaagcctctgtttaa

SEQ ID NO: 353832 - DNA, 55 bp, Artificial
  Synthetic oligonucleotide
ccaacgcccactaaccaagacactatggagtggtatcttccgaccacccctagtg

SEQ ID NO: 353833 - DNA, 60 bp, Artificial
  Synthetic oligonucleotide
ccaacgctaaactcaccaaacatagaggcttgcgggtatagcgatagagtactgcaatta

SEQ ID NO: 353834 - DNA, 53 bp, Artificial
  Synthetic oligonucleotide
ccaacgctataaggagccgttccatttcatttcgtagcttttagtaaccactt

SEQ ID NO: 353835 - DNA, 55 bp, Artificial
  Synthetic oligonucleotide
ccaacgctctcctgaggttgtggttgaatctgatttggaggtggtacaccctggt

SEQ ID NO: 353836 - DNA, 60 bp, Artificial
  Synthetic oligonucleotide
ccaacgctgagctaccacgcatgctagtggaccacaaaacgaagattatccacgtagtcg

SEQ ID NO: 353837 - DNA, 53 bp, Artificial
  Synthetic oligonucleotide
ccaacgctttgatcttcaagggcgaccacgtgagcttgcaagttaacagcagt

SEQ ID NO: 353838 - DNA, 55 bp, Artificial
  Synthetic oligonucleotide
ccaacggacgtgagtatatcatttctacaaactcgtgccaacgatccgtcccagt

SEQ ID NO: 353839 - DNA, 60 bp, Artificial
  Synthetic oligonucleotide
ccaacggagttatgcaagcattgatggcaactcctgccggacgtatggctgctgtaggca

SEQ ID NO: 353840 - DNA, 58 bp, Artificial
  Synthetic oligonucleotide
ccaacggatcacacttgcacgtctgatatggatgttacaatgtgtggggaggtagcag

SEQ ID NO: 353841 - DNA, 55 bp, Artificial
  Synthetic oligonucleotide
ccaacggatttcgaacttaaagattcggtaattacatcatatgatggttgtttag

SEQ ID NO: 353842 - DNA, 51 bp, Artificial
  Synthetic oligonucleotide
ccaacgggccgtagctggggtcaacccggctacccttggcccctgtacgga

SEQ ID NO: 353843 - DNA, 54 bp, Artificial
  Synthetic oligonucleotide
ccaacgggtgctacgcgccgaagattttgaacccgacgaacatagcggaataag

SEQ ID NO: 353844 - DNA, 57 bp, Artificial
  Synthetic oligonucleotide
ccaacggtaaaagccatctacagcctgcatagtacttacagcgttaaccacattacc

SEQ ID NO: 353845 - DNA, 55 bp, Artificial
  Synthetic oligonucleotide
ccaacggtaagcattcggcacaggttcttttacaaatgcgcctggatacgtctgc

SEQ ID NO: 353846 - DNA, 55 bp, Artificial
  Synthetic oligonucleotide
ccaacggtcataaatttgttcacaatgcgccgttcatagttccgcgtaaaatacg

SEQ ID NO: 353847 - DNA, 55 bp, Artificial
  Synthetic oligonucleotide
ccaacggtctctataagggccgtgtcaatgtccttgtttctggatttgccatccc

SEQ ID NO: 353848 - DNA, 60 bp, Artificial
  Synthetic oligonucleotide
ccaacggtgatcaatattcgcattattcacagatgtcaaagccaagtgggagtgaaatca

SEQ ID NO: 353849 - DNA, 58 bp, Artificial
  Synthetic oligonucleotide
ccaacggttgcatgaggatcaattcggcccagactatgtcttgggtcataatagtgca

SEQ ID NO: 353850 - DNA, 57 bp, Artificial
  Synthetic oligonucleotide
ccaacgtaaaaccagcgattaactacagtgtattcaggatgaaccaatctcgaagct

SEQ ID NO: 353851 - DNA, 55 bp, Artificial
  Synthetic oligonucleotide
ccaacgtccaatcttctgccctcccaagagcagttaaagtcagtgtccaccctca

SEQ ID NO: 353852 - DNA, 58 bp, Artificial
  Synthetic oligonucleotide
ccaacgtgactccatggcactgtctgaaaagttgacaacggagggccccgctctccga

SEQ ID NO: 353853 - DNA, 60 bp, Artificial
  Synthetic oligonucleotide
ccaacgtgtaccaggcaaggtttgaagcagtagcgtggtcagctactgcatgtcatgatg

SEQ ID NO: 353854 - DNA, 53 bp, Artificial
  Synthetic oligonucleotide
ccaacgtgtcggtcgcccatgacggagctggaaaacgggtctactaccttacc

SEQ ID NO: 353855 - DNA, 54 bp, Artificial
  Synthetic oligonucleotide
ccaacgttattttcgtttgtgtttgagttattgattcgtaatccacgcgctccg

SEQ ID NO: 353856 - DNA, 55 bp, Artificial
  Synthetic oligonucleotide
ccaacgttccagctcacttcaatcctcatactgctcagagaatcactcctcgcac

SEQ ID NO: 353857 - DNA, 57 bp, Artificial
  Synthetic oligonucleotide
ccaacgttgtgagcctgcaagttggacgtgccttgagtaccttccgtcttaacagga

SEQ ID NO: 353858 - DNA, 54 bp, Artificial
  Synthetic oligonucleotide
ccaacgtttgacgaagccttcactccggtgttttagcctgcctagggtggagac

SEQ ID NO: 353859 - DNA, 57 bp, Artificial
  Synthetic oligonucleotide
ccaactaaactctcagccaaataaaacctttgggcataacactctctgagtctaaca

SEQ ID NO: 353860 - DNA, 57 bp, Artificial
  Synthetic oligonucleotide
ccaactaaccatggctggaaatgcttactctgatgaagttttgggaacaaccaactg

SEQ ID NO: 353861 - DNA, 59 bp, Artificial
  Synthetic oligonucleotide
ccaactaacttggcggagcctctatctttggaggaagtggtctatggcattgagaatct

SEQ ID NO: 353862 - DNA, 58 bp, Artificial
  Synthetic oligonucleotide
ccaactaagacttgcagtcaccggacttaatcatgttgatccagcgaaacgacttttg

SEQ ID NO: 353863 - DNA, 60 bp, Artificial
  Synthetic oligonucleotide
ccaactaatgaacattcttggtagcgctgcagatgctttcaaaaacattgcgcctctcct

SEQ ID NO: 353864 - DNA, 54 bp, Artificial
  Synthetic oligonucleotide
ccaactacactttggattttaggctcaatggaattcccacgggacaaaatactc

SEQ ID NO: 353865 - DNA, 56 bp, Artificial
  Synthetic oligonucleotide
ccaactacctggctgtactacctgatacccccccccaggacattttcaatgatgcg

SEQ ID NO: 353866 - DNA, 60 bp, Artificial
  Synthetic oligonucleotide
ccaactacgatgttaccgcaccaatacacatccctggagaggtgcgaaacatgatggaac

SEQ ID NO: 353867 - DNA, 58 bp, Artificial
  Synthetic oligonucleotide
ccaactacggacagcaaaactctctgttgtgggctcccgatgcggctgggaaatacac

SEQ ID NO: 353868 - DNA, 58 bp, Artificial
  Synthetic oligonucleotide
ccaactacgtgttgcatccttccatcatcccgacgccaggctaccgcggcacccggta

SEQ ID NO: 353869 - DNA, 55 bp, Artificial
  Synthetic oligonucleotide
ccaactagaccactagcagaaaatgttagcaaacaactgtcgcaagagcctttct

SEQ ID NO: 353870 - DNA, 55 bp, Artificial
  Synthetic oligonucleotide
ccaactagactggtttcaacaggttgccgttgtcatgcagaagtacacacagtac

SEQ ID NO: 353871 - DNA, 55 bp, Artificial
  Synthetic oligonucleotide
ccaactagttttatcatgcgaagtgtacttaccacccatgatgtcttccaggcgt

SEQ ID NO: 353872 - DNA, 56 bp, Artificial
  Synthetic oligonucleotide
ccaactatatcgagacgtttggtagtcctcttcacgcctacccaggagccgtcact

SEQ ID NO: 353873 - DNA, 60 bp, Artificial
  Synthetic oligonucleotide
ccaactatcgcagcatgccgtgtctgatgttccatgtgccgttgcagttccgcggacact

SEQ ID NO: 353874 - DNA, 56 bp, Artificial
  Synthetic oligonucleotide
ccaactattactccgaattggtctaaaatactctatctatacaggttgtattggaa

SEQ ID NO: 353875 - DNA, 53 bp, Artificial
  Synthetic oligonucleotide
ccaactattgctaaatggcagtctagcagaaggaaaggtaatgattagatctg

SEQ ID NO: 353876 - DNA, 55 bp, Artificial
  Synthetic oligonucleotide
ccaactcaccgtcacctggttggtaagccgtgcccaaagcctcatcgtctcaacc

SEQ ID NO: 353877 - DNA, 55 bp, Artificial
  Synthetic oligonucleotide
ccaactcccgagttcctagtctgatccaaagcatggtcctctctaatgaccatgc

SEQ ID NO: 353878 - DNA, 60 bp, Artificial
  Synthetic oligonucleotide
ccaactccgaaaatactgaaaggcatactgcaagagatgtgaatcaaaacatgcattctc

SEQ ID NO: 353879 - DNA, 55 bp, Artificial
  Synthetic oligonucleotide
ccaactcgcatgtcacgaccttcggtggtaagctgttccagcagatgtcagtctt

SEQ ID NO: 353880 - DNA, 58 bp, Artificial
  Synthetic oligonucleotide
ccaactcggacgggcgttcagtacagactgagcgcgtagagggcgcagtaaccgtcac

SEQ ID NO: 353881 - DNA, 55 bp, Artificial
  Synthetic oligonucleotide
ccaactctgacatcagcaccctactctcacccttatttagcatacccacttacgg

SEQ ID NO: 353882 - DNA, 53 bp, Artificial
  Synthetic oligonucleotide
ccaactctgaggcaaattatgcaccacttctcagatgcagcagaagcttacat

SEQ ID NO: 353883 - DNA, 55 bp, Artificial
  Synthetic oligonucleotide
ccaactctgatgaggccgcacccagttttgtttctggtgctatggctaaagctgg

SEQ ID NO: 353884 - DNA, 60 bp, Artificial
  Synthetic oligonucleotide
ccaactcttaggcatacagataaatgtaccctcagtcgggagcctaaataatatgcgtgc

SEQ ID NO: 353885 - DNA, 57 bp, Artificial
  Synthetic oligonucleotide
ccaactcttccgatcaacattcactctactaactatgtgttcggtaagtactcagtt

SEQ ID NO: 353886 - DNA, 54 bp, Artificial
  Synthetic oligonucleotide
ccaactcttgcgattcctccggatttaaaccgtgctactgatcgtgttgatacc

SEQ ID NO: 353887 - DNA, 57 bp, Artificial
  Synthetic oligonucleotide
ccaactgaatacgtcctcgcttgtacgggataggctcattttgaagtagttcctcac

SEQ ID NO: 353888 - DNA, 55 bp, Artificial
  Synthetic oligonucleotide
ccaactgagaagagttttgacaacagctaccattacacttcttccggacgctgag

SEQ ID NO: 353889 - DNA, 55 bp, Artificial
  Synthetic oligonucleotide
ccaactgatcaacaccaacggtagttggcacatcaatagcacggccttgaactgc

SEQ ID NO: 353890 - DNA, 60 bp, Artificial
  Synthetic oligonucleotide
ccaactgattaaagcttgcgaaacatgccacaacaatgactctatattaaacttagcaag

SEQ ID NO: 353891 - DNA, 57 bp, Artificial
  Synthetic oligonucleotide
ccaactgattattaaattcatctcctgtactaagttttctgcttgtatatctattta

SEQ ID NO: 353892 - DNA, 60 bp, Artificial
  Synthetic oligonucleotide
ccaactgatttcgaaacgaatgagtcaataatcacgtcatatgatggttgtttaggtatg

SEQ ID NO: 353893 - DNA, 55 bp, Artificial
  Synthetic oligonucleotide
ccaactgcagcactaaaggtctccggctcgagtctgtacaatcttgcgctcaatg

SEQ ID NO: 353894 - DNA, 60 bp, Artificial
  Synthetic oligonucleotide
ccaactgccgcacactatcgatctctactgctcactgagacgttactatctggagacgcc

SEQ ID NO: 353895 - DNA, 55 bp, Artificial
  Synthetic oligonucleotide
ccaactgcctctttgaggggtgacgcaggcaaattacttggttatctccttgtcc

SEQ ID NO: 353896 - DNA, 58 bp, Artificial
  Synthetic oligonucleotide
ccaactgcgcaacaacttaatgacgttaggaagatctacttagcgctaatgtttcctg

SEQ ID NO: 353897 - DNA, 55 bp, Artificial
  Synthetic oligonucleotide
ccaactgcggagcacgcacccacaaaccagagggcagcgtgtcgtaatgggcaac

SEQ ID NO: 353898 - DNA, 58 bp, Artificial
  Synthetic oligonucleotide
ccaactgctactgaatttttttcagcaggccgcaagagacccagaagggacacagaag

SEQ ID NO: 353899 - DNA, 58 bp, Artificial
  Synthetic oligonucleotide
ccaactggaaacacaaacttcgtaccactgtaaatcctacaagctggaggcatgtaca

SEQ ID NO: 353900 - DNA, 58 bp, Artificial
  Synthetic oligonucleotide
ccaactgggaataacaccagtcagctgggttgtcactattcggaattggaggaatatc

SEQ ID NO: 353901 - DNA, 55 bp, Artificial
  Synthetic oligonucleotide
ccaactgggcgacgttcatcaaacgtttcccccacaatccacgcgactgggacag

SEQ ID NO: 353902 - DNA, 58 bp, Artificial
  Synthetic oligonucleotide
ccaactggtagcacttgccgccgtcccaatgttggacatgccgtcctcaattggtttg

SEQ ID NO: 353903 - DNA, 55 bp, Artificial
  Synthetic oligonucleotide
ccaactggtcgtgaggaaaacactagctgatctacttataccgataaataggcag

SEQ ID NO: 353904 - DNA, 50 bp, Artificial
  Synthetic oligonucleotide
ccaactggtgacttctgcaataacaacgcatggatgtcgcctggcttagc

SEQ ID NO: 353905 - DNA, 59 bp, Artificial
  Synthetic oligonucleotide
ccaactggttactttcttaggaaggagtcagatgcatcaattaaacattagagagagac

SEQ ID NO: 353906 - DNA, 52 bp, Artificial
  Synthetic oligonucleotide
ccaactggttcagtttaccttaaaagttaccgtgatatagccactttttcaa

SEQ ID NO: 353907 - DNA, 56 bp, Artificial
  Synthetic oligonucleotide
ccaactggttcagtttaccttaaaagttatgtagatatagcgacattctcaataaa

SEQ ID NO: 353908 - DNA, 51 bp, Artificial
  Synthetic oligonucleotide
ccaactgtaataaccttcttcgataataaggtggtgatcggagaattagca

SEQ ID NO: 353909 - DNA, 60 bp, Artificial
  Synthetic oligonucleotide
ccaactgtacgatccaaatccacacgtgtggaggcctacttgtgagatactctggtgacc

SEQ ID NO: 353910 - DNA, 55 bp, Artificial
  Synthetic oligonucleotide
ccaactgtccaagaaacccctgacagtcctacacatgctctcctgggatggaccg

SEQ ID NO: 353911 - DNA, 59 bp, Artificial
  Synthetic oligonucleotide
ccaactgtctgtgacccttcacaacgatttctagatgattctacggaattagtctttca

SEQ ID NO: 353912 - DNA, 55 bp, Artificial
  Synthetic oligonucleotide
ccaactgtgaatagcaccagttagccgggtcgtcacaatccggaattggaggaag

SEQ ID NO: 353913 - DNA, 55 bp, Artificial
  Synthetic oligonucleotide
ccaactgtggacggcactagtctccctaatgtgttcaaacacaattttcacgttg

SEQ ID NO: 353914 - DNA, 60 bp, Artificial
  Synthetic oligonucleotide
ccaacttaacccaattgatggaccactgcctgaggataatgagccaagtggatatgcaca

SEQ ID NO: 353915 - DNA, 55 bp, Artificial
  Synthetic oligonucleotide
ccaacttcaaaagcagttcctaaagctgctagccacggaaccccaggcagaggac

SEQ ID NO: 353916 - DNA, 55 bp, Artificial
  Synthetic oligonucleotide
ccaacttcacggccctacacagtaggaccctcattagagacaaccttagcctccc

SEQ ID NO: 353917 - DNA, 60 bp, Artificial
  Synthetic oligonucleotide
ccaacttcagtcgtagagcctgatagattgtcgccacctgagaatttaacagtgtcaagc

SEQ ID NO: 353918 - DNA, 55 bp, Artificial
  Synthetic oligonucleotide
ccaacttccactccatcttccacaagctggtctgggcttggagcgcgcaagcatc

SEQ ID NO: 353919 - DNA, 60 bp, Artificial
  Synthetic oligonucleotide
ccaacttctggaaaattcttatgctatcatttacttctcctggaagcatagaatatatgc

SEQ ID NO: 353920 - DNA, 59 bp, Artificial
  Synthetic oligonucleotide
ccaacttgtgactgtactgatgcaacttacttttgcaaacacaagaatagatattatcc

SEQ ID NO: 353921 - DNA, 49 bp, Artificial
  Synthetic oligonucleotide
ccaactttaccagtaactaaacccaagggtactttcccagttactcaac

SEQ ID NO: 353922 - DNA, 55 bp, Artificial
  Synthetic oligonucleotide
ccaactttgacaagtatgtagctacgttaagctgtttgaactctacaagtaaggg

SEQ ID NO: 353923 - DNA, 55 bp, Artificial
  Synthetic oligonucleotide
ccaactttgacgcggtgagtgactccgtggacggttatgactgatgtggagcctg

SEQ ID NO: 353924 - DNA, 55 bp, Artificial
  Synthetic oligonucleotide
ccaactttgttccagcaacaggacaagtagagatacagatacctacaagagcaga

SEQ ID NO: 353925 - DNA, 54 bp, Artificial
  Synthetic oligonucleotide
ccaacttttttttcaatatatccttgtaaatgcggtgtaccctgtgcaccaatt

SEQ ID NO: 353926 - DNA, 55 bp, Artificial
  Synthetic oligonucleotide
ccaagaaaactctaaagctgcgctcaggtgatgaattcttgtatagatgttgccc

SEQ ID NO: 353927 - DNA, 55 bp, Artificial
  Synthetic oligonucleotide
ccaagaaaactcttgtggtcggagatacagtaaagctggacaatttcgggctgtt

SEQ ID NO: 353928 - DNA, 55 bp, Artificial
  Synthetic oligonucleotide
ccaagaaaattgaagtgtcaggactgaagtttgcaagtctgacctgctccggttg

SEQ ID NO: 353929 - DNA, 53 bp, Artificial
  Synthetic oligonucleotide
ccaagaaatcacaacctttcatgatgtggaaactccaaataggatcgataccc

SEQ ID NO: 353930 - DNA, 57 bp, Artificial
  Synthetic oligonucleotide
ccaagaacgaagttttctgcgttcagcctgagaagggaggtcgtaagccagctcgcc

SEQ ID NO: 353931 - DNA, 51 bp, Artificial
  Synthetic oligonucleotide
ccaagaactagatgtgctttagaggcaatgtttgagtggacaaagtggctg

SEQ ID NO: 353932 - DNA, 55 bp, Artificial
  Synthetic oligonucleotide
ccaagaagacatctcggaaggctggttgttctgagtggatatgttcagcccagca

SEQ ID NO: 353933 - DNA, 55 bp, Artificial
  Synthetic oligonucleotide
ccaagaagactctggatgaagtaaccgccgccataacctccgggacctacaaaga

SEQ ID NO: 353934 - DNA, 55 bp, Artificial
  Synthetic oligonucleotide
ccaagaagagacaacaagcttcacaaggtcttccagggaagagcaagccaagact

SEQ ID NO: 353935 - DNA, 55 bp, Artificial
  Synthetic oligonucleotide
ccaagaagcttggaagccgattcaatttctgagttcaaatctgagcacgctttgc

SEQ ID NO: 353936 - DNA, 55 bp, Artificial
  Synthetic oligonucleotide
ccaagaagtaactcttggttgtactaatagatgcgcgggcctgagcgcatacaca

SEQ ID NO: 353937 - DNA, 60 bp, Artificial
  Synthetic oligonucleotide
ccaagaagtgtggaggtatgagccactggtgaactcatcaaaggcagcaattatggttaa

SEQ ID NO: 353938 - DNA, 60 bp, Artificial
  Synthetic oligonucleotide
ccaagaatcaacgatagaccagttctggctactatacaaggcaaatgggacaactactga

SEQ ID NO: 353939 - DNA, 55 bp, Artificial
  Synthetic oligonucleotide
ccaagaatggtacctgcatgtatcgatacaagactgatgtccagattgcgcgcat

SEQ ID NO: 353940 - DNA, 50 bp, Artificial
  Synthetic oligonucleotide
ccaagacaattaccaatctatcgagcaaatggtgagaaagaattaaggaa

SEQ ID NO: 353941 - DNA, 55 bp, Artificial
  Synthetic oligonucleotide
ccaagacacaaaagacggatggaaaggaaagagaggacacagaagagagcactcg

SEQ ID NO: 353942 - DNA, 56 bp, Artificial
  Synthetic oligonucleotide
ccaagacacaggtagaacttaaaacagactcccactaatcgaagcgagtccaacaa

SEQ ID NO: 353943 - DNA, 60 bp, Artificial
  Synthetic oligonucleotide
ccaagacacgattacgacttactgatgtgtgcactgatgcttcacgggagatccatcact

SEQ ID NO: 353944 - DNA, 55 bp, Artificial
  Synthetic oligonucleotide
ccaagaccctgtggtattgtgcccgcaaggaccgtgtgtggcccggtatactgtt

SEQ ID NO: 353945 - DNA, 55 bp, Artificial
  Synthetic oligonucleotide
ccaagaccggtcgttctgatgatctctggcaaaccagggataggaaagacccact

SEQ ID NO: 353946 - DNA, 57 bp, Artificial
  Synthetic oligonucleotide
ccaagaccgtctggccaacaagggagtacactgactttcgcgagtacttcatggagg

SEQ ID NO: 353947 - DNA, 60 bp, Artificial
  Synthetic oligonucleotide
ccaagaccttgtggtatcgtgccagcacagacagtatgtggcccagtgtattgcttcact

SEQ ID NO: 353948 - DNA, 55 bp, Artificial
  Synthetic oligonucleotide
ccaagacgaacagcaggcacaaaactcatacgtccaaattgcgtcatccttcgta

SEQ ID NO: 353949 - DNA, 55 bp, Artificial
  Synthetic oligonucleotide
ccaagacgagatcaaattaaagggacgccgacgtggcaaaggatctgacctcccg

SEQ ID NO: 353950 - DNA, 55 bp, Artificial
  Synthetic oligonucleotide
ccaagacggtcacggtcgatggttccagcggccaagtggtctcccaccgggcgta

SEQ ID NO: 353951 - DNA, 51 bp, Artificial
  Synthetic oligonucleotide
ccaagacgtgcgggggccccccgtgtaacatcgggggggtcggcaataaca

SEQ ID NO: 353952 - DNA, 55 bp, Artificial
  Synthetic oligonucleotide
ccaagactaggaatatttggagcgccagttatgtcacacacctaatcgggtcaac

SEQ ID NO: 353953 - DNA, 60 bp, Artificial
  Synthetic oligonucleotide
ccaagactgaaattatagccagagatgtttatactggattgctgttcggtgatgactccc

SEQ ID NO: 353954 - DNA, 60 bp, Artificial
  Synthetic oligonucleotide
ccaagactgaaattgtaaccagaaatgtttatgctagactgctgctcagtgatgacccct

SEQ ID NO: 353955 - DNA, 58 bp, Artificial
  Synthetic oligonucleotide
ccaagactgaaattgtagccagagatgttaatgctggactgttgttcagtaatgacac

SEQ ID NO: 353956 - DNA, 60 bp, Artificial
  Synthetic oligonucleotide
ccaagactgctgtcaacatgttgactcactcaataaatagtctaatatctgacaatttgt

SEQ ID NO: 353957 - DNA, 60 bp, Artificial
  Synthetic oligonucleotide
ccaagactggtgtcaatgaaaactatgctaagaagtttaagactggcatgcatcatttgt

SEQ ID NO: 353958 - DNA, 55 bp, Artificial
  Synthetic oligonucleotide
ccaagacttggagaagtacgtagaagacaccaaaatagacctatggtcctacaac

SEQ ID NO: 353959 - DNA, 60 bp, Artificial
  Synthetic oligonucleotide
ccaagagaaggatttcttggagagataaggtgcagttctgaatccgcagccatatcagct

SEQ ID NO: 353960 - DNA, 60 bp, Artificial
  Synthetic oligonucleotide
ccaagagactaccgtcctgctttcatcaaggatgctgacgctcattggatcacttcaatc

SEQ ID NO: 353961 - DNA, 60 bp, Artificial
  Synthetic oligonucleotide
ccaagagagatgtggctgcacttcttcaacctgcttgcataaagaatggccacactcgag

SEQ ID NO: 353962 - DNA, 55 bp, Artificial
  Synthetic oligonucleotide
ccaagagatgttgctagatacccaaaggaaaccatcatacacaaactagcggaga

SEQ ID NO: 353963 - DNA, 60 bp, Artificial
  Synthetic oligonucleotide
ccaagagattgagccgcgtgacgtagctaggtacgagcataagaccattgtacagaagtc

SEQ ID NO: 353964 - DNA, 53 bp, Artificial
  Synthetic oligonucleotide
ccaagagcaaaccgacctatacgttcaggcatcaggaagggtaacagtttcaa

SEQ ID NO: 353965 - DNA, 55 bp, Artificial
  Synthetic oligonucleotide
ccaagagcacatgggccggagtggacactagcagcggagttacgatggcttgccc

SEQ ID NO: 353966 - DNA, 58 bp, Artificial
  Synthetic oligonucleotide
ccaagagcacgtggaccggggtagatactaatagcggagttacgagcgcttgctccta

SEQ ID NO: 353967 - DNA, 55 bp, Artificial
  Synthetic oligonucleotide
ccaagagcacttgggctggagtggacactagcagtggagtcacgaaagcttgctc

SEQ ID NO: 353968 - DNA, 55 bp, Artificial
  Synthetic oligonucleotide
ccaagagccaccctcttctgctaaattatgtcagatacatgatccaggagatagg

SEQ ID NO: 353969 - DNA, 55 bp, Artificial
  Synthetic oligonucleotide
ccaagagccactaaagatatagtaacctgcttgcatagcttctacttttatagcc

SEQ ID NO: 353970 - DNA, 52 bp, Artificial
  Synthetic oligonucleotide
ccaagagccgtccaaacaaaacctggcctttttagaaccaatactggaacca

SEQ ID NO: 353971 - DNA, 60 bp, Artificial
  Synthetic oligonucleotide
ccaagagcgacgatggagacactgtccagaaagtgatagaggctctcgtcgcgaaaatga

SEQ ID NO: 353972 - DNA, 55 bp, Artificial
  Synthetic oligonucleotide
ccaagaggcacaggtgctgatattttaggtaagtttgatgtgccagtagcgaaat

SEQ ID NO: 353973 - DNA, 55 bp, Artificial
  Synthetic oligonucleotide
ccaagaggcacggcggactcatgtacgccgatgacacagcaggatgggacactcg

SEQ ID NO: 353974 - DNA, 60 bp, Artificial
  Synthetic oligonucleotide
ccaagagggcaactatccacaagaggtgttcaaattgcatccaatgagaacatggagact

SEQ ID NO: 353975 - DNA, 57 bp, Artificial
  Synthetic oligonucleotide
ccaagagtaggttgttcacagtgttaccaatgtcctataacatcgttattaggaaga

SEQ ID NO: 353976 - DNA, 55 bp, Artificial
  Synthetic oligonucleotide
ccaagagtctgagtgtgtgtgccacaatggagtatgtccagtagtgttcactgac

SEQ ID NO: 353977 - DNA, 55 bp, Artificial
  Synthetic oligonucleotide
ccaagagtgattacttcagctgacggagcgactacatggtacttcaatccagtga

SEQ ID NO: 353978 - DNA, 55 bp, Artificial
  Synthetic oligonucleotide
ccaagagtggactcgggaaagtggccaaaatatactgtgtttaggattggctccc

SEQ ID NO: 353979 - DNA, 55 bp, Artificial
  Synthetic oligonucleotide
ccaagagtggattgcgacgttggaccgctaagcagatcaacgggatggaatggca

SEQ ID NO: 353980 - DNA, 60 bp, Artificial
  Synthetic oligonucleotide
ccaagagtggtaggatggctgtgcctttccacattggtgttgcagacaaggttttggcat

SEQ ID NO: 353981 - DNA, 60 bp, Artificial
  Synthetic oligonucleotide
ccaagagtggtggtatggctgtgcctttccatattggtgtgtcagacaaagttatgaatc

SEQ ID NO: 353982 - DNA, 55 bp, Artificial
  Synthetic oligonucleotide
ccaagatacaatgagtcgaacagcaactcaagaagtctcgacctctcaacgacaa

SEQ ID NO: 353983 - DNA, 55 bp, Artificial
  Synthetic oligonucleotide
ccaagataccatacggtttcaaacatcccaccattagtaccatatcaacgtggcg

SEQ ID NO: 353984 - DNA, 55 bp, Artificial
  Synthetic oligonucleotide
ccaagatatatcgaatgtacaggaaccccgatgttccaaggggttgtgaagggcc

SEQ ID NO: 353985 - DNA, 60 bp, Artificial
  Synthetic oligonucleotide
ccaagatcaatgggagccatggcagatggatcctgctgggagtgctctatggactatggc

SEQ ID NO: 353986 - DNA, 60 bp, Artificial
  Synthetic oligonucleotide
ccaagatcataccctctgtgcaggagcagccaaggccctgcgaatgcctcacgatagcca

SEQ ID NO: 353987 - DNA, 55 bp, Artificial
  Synthetic oligonucleotide
ccaagatgaaacctgggacctttatgtggaacgcagtagcgccttcagcaactgc

SEQ ID NO: 353988 - DNA, 53 bp, Artificial
  Synthetic oligonucleotide
ccaagatgagacagtccaatgtgcagactacatgaattatggaaaggtcccaa

SEQ ID NO: 353989 - DNA, 55 bp, Artificial
  Synthetic oligonucleotide
ccaagatgccactctcagagcaaaatctagtcgaaaattgtcgaccatcagaggg

SEQ ID NO: 353990 - DNA, 55 bp, Artificial
  Synthetic oligonucleotide
ccaagatggctgaccatactgatgtcctattgccagaggtgcatctgagttcccc

SEQ ID NO: 353991 - DNA, 60 bp, Artificial
  Synthetic oligonucleotide
ccaagatgtacaggatgtacagaagtccagatgttcctagaggatgtgaaggcccatgta

SEQ ID NO: 353992 - DNA, 55 bp, Artificial
  Synthetic oligonucleotide
ccaagattagtcgtaacgctaattattctcctcgtgctcgtattgggccaagatc

SEQ ID NO: 353993 - DNA, 52 bp, Artificial
  Synthetic oligonucleotide
ccaagattatcttaaatacttcataacctgggtcttaaagacccttaagaaa

SEQ ID NO: 353994 - DNA, 60 bp, Artificial
  Synthetic oligonucleotide
ccaagattgtggacggcggctgctttgctccatgggacctcgaggccaccggagcctgca

SEQ ID NO: 353995 - DNA, 60 bp, Artificial
  Synthetic oligonucleotide
ccaagcaacacgccagtcacagccaagatgttgtgttttgtctcaggctgtaaggacttt

SEQ ID NO: 353996 - DNA, 55 bp, Artificial
  Synthetic oligonucleotide
ccaagcaacgcagcaatattctatgggaactaccagaagtcgccgagcggacacc

SEQ ID NO: 353997 - DNA, 58 bp, Artificial
  Synthetic oligonucleotide
ccaagcaagagtcctagctatagaaagatacctaaaggatcaacagctcctagggctt

SEQ ID NO: 353998 - DNA, 52 bp, Artificial
  Synthetic oligonucleotide
ccaagcaagcgaactgtcccgaagtttgttcagaacacctcacaatggctca

SEQ ID NO: 353999 - DNA, 50 bp, Artificial
  Synthetic oligonucleotide
ccaagcaagcgcgtgtactaatttgtgaacccactcgcgtattggtcaca

SEQ ID NO: 354000 - DNA, 60 bp, Artificial
  Synthetic oligonucleotide
ccaagcaatggtagggaatctgtcacattcaggcgtacagcacagcagagtgtgaccacg

SEQ ID NO: 354001 - DNA, 59 bp, Artificial
  Synthetic oligonucleotide
ccaagcaattggtgtttccaccaggcactacggttgctgaggtcaagtctgcctacaat

SEQ ID NO: 354002 - DNA, 52 bp, Artificial
  Synthetic oligonucleotide
ccaagcaatttcttggttgttgaagaatgactacactcggacgattgtccga

SEQ ID NO: 354003 - DNA, 55 bp, Artificial
  Synthetic oligonucleotide
ccaagcactacgaataattctaggaagcactctcccacttattgttgaatcacgg

SEQ ID NO: 354004 - DNA, 58 bp, Artificial
  Synthetic oligonucleotide
ccaagcactgttactgtacactttagggctaagatctaaatgcccacacaaataattg

SEQ ID NO: 354005 - DNA, 55 bp, Artificial
  Synthetic oligonucleotide
ccaagcactgttgctgtacacttttgggctcaagtccaaatgaccacacagataa

SEQ ID NO: 354006 - DNA, 55 bp, Artificial
  Synthetic oligonucleotide
ccaagcagactttataaatagtgctgatgaaccacttacaccaaatgcgatgact

SEQ ID NO: 354007 - DNA, 55 bp, Artificial
  Synthetic oligonucleotide
ccaagcagatagccctcttctaagggattgaacccaccgaaatgatggcactgac

SEQ ID NO: 354008 - DNA, 55 bp, Artificial
  Synthetic oligonucleotide
ccaagcagattgtggtaggctctgttgattgtgacacattcgaatcgtcattgaa

SEQ ID NO: 354009 - DNA, 60 bp, Artificial
  Synthetic oligonucleotide
ccaagcaggagagagaaatattaggtgtgatctcttctatccagatggactggggggtta

SEQ ID NO: 354010 - DNA, 60 bp, Artificial
  Synthetic oligonucleotide
ccaagcagtagcagtggtgcattatgggggaattcctactgacgtgatcaattcctgggc

SEQ ID NO: 354011 - DNA, 55 bp, Artificial
  Synthetic oligonucleotide
ccaagcagtatataagggtgctagttttgcaaaagctctggcgcaggctggtgat

SEQ ID NO: 354012 - DNA, 60 bp, Artificial
  Synthetic oligonucleotide
ccaagcagtccctacataaacccaagctctccatatggagctacagccccaagcagcccc

SEQ ID NO: 354013 - DNA, 55 bp, Artificial
  Synthetic oligonucleotide
ccaagcatatcaggacatgcattatcgaatgttttcgtggagttcaatgcaaggt

SEQ ID NO: 354014 - DNA, 60 bp, Artificial
  Synthetic oligonucleotide
ccaagcatcgtttgaatagatcttactgttaagatccaagtggccgcaaagataattgtg

SEQ ID NO: 354015 - DNA, 55 bp, Artificial
  Synthetic oligonucleotide
ccaagcatgatcgctactgaggcggctcttgcatgctttgcatataacttgccag

SEQ ID NO: 354016 - DNA, 55 bp, Artificial
  Synthetic oligonucleotide
ccaagcatgtcgttaaaggtccatgtccacatttccaactgtacctgtcaacaca

SEQ ID NO: 354017 - DNA, 58 bp, Artificial
  Synthetic oligonucleotide
ccaagcattagtcctgacgacaccttagcccagcttgtagcaaaaaaactcatcagcc

SEQ ID NO: 354018 - DNA, 55 bp, Artificial
  Synthetic oligonucleotide
ccaagcattttctgtgatataaagacctggaaaattggcttttcctccaggaccc

SEQ ID NO: 354019 - DNA, 60 bp, Artificial
  Synthetic oligonucleotide
ccaagccacacagactaaacagtagagcaatctgctcctgtggtgcctataaacagccgg

SEQ ID NO: 354020 - DNA, 51 bp, Artificial
  Synthetic oligonucleotide
ccaagccacagctcaatcagttacctccacatgatgatatatacaaccaca

SEQ ID NO: 354021 - DNA, 52 bp, Artificial
  Synthetic oligonucleotide
ccaagccagtgagggatgggttgacaacctccctcctgtgcccgggtgaact

SEQ ID NO: 354022 - DNA, 54 bp, Artificial
  Synthetic oligonucleotide
ccaagccatacaggccaatatccctcgaccccactttcgagtgggtcgttttcc

SEQ ID NO: 354023 - DNA, 55 bp, Artificial
  Synthetic oligonucleotide
ccaagcccaaagaggctggtggtgtattcctcactaaggtgttggagtatcggga

SEQ ID NO: 354024 - DNA, 58 bp, Artificial
  Synthetic oligonucleotide
ccaagcccgtggtcttacgctgatgcctgccaatctcttgacaaaactactagttcgg

SEQ ID NO: 354025 - DNA, 54 bp, Artificial
  Synthetic oligonucleotide
ccaagccctgtcgtggtggggacgaccgaccgctacggtgcccctacgtatagc

SEQ ID NO: 354026 - DNA, 55 bp, Artificial
  Synthetic oligonucleotide
ccaagccctttcagttctagaagggttggcaacacagctcacttcattttgtgac

SEQ ID NO: 354027 - DNA, 52 bp, Artificial
  Synthetic oligonucleotide
ccaagccggacaaattatacaaatggaaaatagggtaaatggtgacccgaac

SEQ ID NO: 354028 - DNA, 53 bp, Artificial
  Synthetic oligonucleotide
ccaagcctacaaggcagtggatcgagagtttccttatttccctgagccgctct

SEQ ID NO: 354029 - DNA, 54 bp, Artificial
  Synthetic oligonucleotide
ccaagcctacgctgcgtcaaataatgcaccacttttcagacgcagccgaggctt

SEQ ID NO: 354030 - DNA, 55 bp, Artificial
  Synthetic oligonucleotide
ccaagcctatgtttccgcggcaaacaaccggtgattacgcagaattctgtggctg

SEQ ID NO: 354031 - DNA, 56 bp, Artificial
  Synthetic oligonucleotide
ccaagccttttgctgctcccgtttaatgacctaccttcgcggcattagctacaagg

SEQ ID NO: 354032 - DNA, 53 bp, Artificial
  Synthetic oligonucleotide
ccaagcgaacttgacaggaggcccccccgacaaggagtgcgccgtgacctgta

SEQ ID NO: 354033 - DNA, 55 bp, Artificial
  Synthetic oligonucleotide
ccaagcgactcatctccactcaattacctgagtgaccaatgcaagatcagggaag

SEQ ID NO: 354034 - DNA, 55 bp, Artificial
  Synthetic oligonucleotide
ccaagcgatctcacaattaagagtccagaagttggacctttaggtttacaggtaa

SEQ ID NO: 354035 - DNA, 60 bp, Artificial
  Synthetic oligonucleotide
ccaagcgcgaggtgcaagacctgctactggaagccatgaaaaggagaagaacgtgaccac

SEQ ID NO: 354036 - DNA, 55 bp, Artificial
  Synthetic oligonucleotide
ccaagcgcgctatgaataatcaatcgaataaggataaacagcgattgggtgcaac

SEQ ID NO: 354037 - DNA, 51 bp, Artificial
  Synthetic oligonucleotide
ccaagcgcggaccccatttttaggccttccggactacaaaaatcgccattt

SEQ ID NO: 354038 - DNA, 58 bp, Artificial
  Synthetic oligonucleotide
ccaagcggaagctcgaagtctatttccgagtggatgcttcacggaccaaatgtgcccg

SEQ ID NO: 354039 - DNA, 60 bp, Artificial
  Synthetic oligonucleotide
ccaagcgtcaaggagccacaccgaaagacctattctcacttgcctggacttgctaccaca

SEQ ID NO: 354040 - DNA, 53 bp, Artificial
  Synthetic oligonucleotide
ccaagcgttaaaactttagatagtggtttattaccaaagcaaagctacggtga

SEQ ID NO: 354041 - DNA, 60 bp, Artificial
  Synthetic oligonucleotide
ccaagctacctgctgttgaacaagagcctatgcaacgttgaagggtgggtcgtgatagcg

SEQ ID NO: 354042 - DNA, 60 bp, Artificial
  Synthetic oligonucleotide
ccaagctagtataatcaaagtgccgtacttcgtacgcgctcaggggctcattcgtgcatg

SEQ ID NO: 354043 - DNA, 59 bp, Artificial
  Synthetic oligonucleotide
ccaagctcaaaatacaaacataatgatgcagagaggcaattttaggggacagaaaagga

SEQ ID NO: 354044 - DNA, 55 bp, Artificial
  Synthetic oligonucleotide
ccaagctcatggtccacatagtcagattgccttatgtgtgcagaagcacactcac

SEQ ID NO: 354045 - DNA, 60 bp, Artificial
  Synthetic oligonucleotide
ccaagctctccctttaacttgtgatctagagcctatgtaaggccaaccatcacctgacag

SEQ ID NO: 354046 - DNA, 55 bp, Artificial
  Synthetic oligonucleotide
ccaagctctgcaggatcccaaagtaagaggcctgtattttcctgctggtggctcc

SEQ ID NO: 354047 - DNA, 55 bp, Artificial
  Synthetic oligonucleotide
ccaagctctggccggagcgattcctgttgaattctcaagcaacactgtgaaattg

SEQ ID NO: 354048 - DNA, 58 bp, Artificial
  Synthetic oligonucleotide
ccaagctgataacacattcgtacatcattctacatacttgaataacccgtttatatca

SEQ ID NO: 354049 - DNA, 55 bp, Artificial
  Synthetic oligonucleotide
ccaagctgccacagcaagaggggccttacgccggtccgatggaaagacaacaacc

SEQ ID NO: 354050 - DNA, 55 bp, Artificial
  Synthetic oligonucleotide
ccaagctgtactaaatcccaaagtgaggggcctatactttcctgctggtggctcc

SEQ ID NO: 354051 - DNA, 51 bp, Artificial
  Synthetic oligonucleotide
ccaaggaaactgggcttacgcatcgtactggtaaaaggtttactgtgaagt

SEQ ID NO: 354052 - DNA, 55 bp, Artificial
  Synthetic oligonucleotide
ccaaggaaagttcatggcccaaccacaacgtaaccaaaggagtaacggcatcatg

SEQ ID NO: 354053 - DNA, 54 bp, Artificial
  Synthetic oligonucleotide
ccaaggaaccccccacctatgtggaccttgacgagtccaccctgtagatttcga

SEQ ID NO: 354054 - DNA, 51 bp, Artificial
  Synthetic oligonucleotide
ccaaggaatctaaagttcccgacaattctgtcgacttcctgacctcctaca

SEQ ID NO: 354055 - DNA, 55 bp, Artificial
  Synthetic oligonucleotide
ccaaggaccaatgaaattggttatggcgttcatagctttcctcagatttctagcc

SEQ ID NO: 354056 - DNA, 55 bp, Artificial
  Synthetic oligonucleotide
ccaaggacccttaaagctgtgaacagctattgggtgatcccacccacgtagcccc

SEQ ID NO: 354057 - DNA, 55 bp, Artificial
  Synthetic oligonucleotide
ccaaggacggggccgacactttcatcgttggcactcactccgcaggaggtaatgg

SEQ ID NO: 354058 - DNA, 55 bp, Artificial
  Synthetic oligonucleotide
ccaaggagaattagacagggcctagaaatagccttaaattaacatgggaaacatc

SEQ ID NO: 354059 - DNA, 55 bp, Artificial
  Synthetic oligonucleotide
ccaaggagactcacaacagattccttttataaatcgtgttgaatctatcactctg

SEQ ID NO: 354060 - DNA, 59 bp, Artificial
  Synthetic oligonucleotide
ccaaggaggcacaggatgtgattatggaagttgtcttcccaaacgaagtaggagctaga

SEQ ID NO: 354061 - DNA, 56 bp, Artificial
  Synthetic oligonucleotide
ccaaggaggcacaggatgtgtttatggaagttgttttcccaaatgaagtgggggca

SEQ ID NO: 354062 - DNA, 57 bp, Artificial
  Synthetic oligonucleotide
ccaaggaggcgttggagttcgaacacaagatatggttgtccatgtaccatggctctg

SEQ ID NO: 354063 - DNA, 56 bp, Artificial
  Synthetic oligonucleotide
ccaaggagggctctggttgccgtcgctggtgtttcaccctgaacaacccaaccaga

SEQ ID NO: 354064 - DNA, 55 bp, Artificial
  Synthetic oligonucleotide
ccaaggatatcgtaccaaaggctcaatgcatctttggttttccagatgagccatg

SEQ ID NO: 354065 - DNA, 59 bp, Artificial
  Synthetic oligonucleotide
ccaaggatattaaatttaaacgacgtacgactgatattgagttcgctgatatatgactg

SEQ ID NO: 354066 - DNA, 60 bp, Artificial
  Synthetic oligonucleotide
ccaaggatctgattcgagattgcgcttaattgcaatgctgtacacacctcttagggcaaa

SEQ ID NO: 354067 - DNA, 50 bp, Artificial
  Synthetic oligonucleotide
ccaaggatgtgatagcaagtggctattcaatgcggcacatacaaacatcc

SEQ ID NO: 354068 - DNA, 58 bp, Artificial
  Synthetic oligonucleotide
ccaaggatttcttcaatcacgctcactcaacgaatcacaacgaccggacccttcgcaa

SEQ ID NO: 354069 - DNA, 55 bp, Artificial
  Synthetic oligonucleotide
ccaaggcaaggctattaaagcgtgggctggttacagcgtatcgaagtggaccgcc

SEQ ID NO: 354070 - DNA, 53 bp, Artificial
  Synthetic oligonucleotide
ccaaggcacacttggcgtgtttgcagtaccggagtattgcttggccggagact

SEQ ID NO: 354071 - DNA, 60 bp, Artificial
  Synthetic oligonucleotide
ccaaggcacagaatggaacatcaagccatcaaatgtggttgtgccaatgcaaccagcaag

SEQ ID NO: 354072 - DNA, 55 bp, Artificial
  Synthetic oligonucleotide
ccaaggcacgccattttatccagcttaatgagtatgtctaccgcttgtttgatgg

SEQ ID NO: 354073 - DNA, 60 bp, Artificial
  Synthetic oligonucleotide
ccaaggcagtagcagtaattcactatggaggagtgcctactgatgtcgttaattcctggg

SEQ ID NO: 354074 - DNA, 58 bp, Artificial
  Synthetic oligonucleotide
ccaaggcataagaatagcgataccgtgacctttctcatggccgtgagaaaacgtttgc

SEQ ID NO: 354075 - DNA, 55 bp, Artificial
  Synthetic oligonucleotide
ccaaggcatagtcatagtagatgcattaaagaatacattccagcttgcggatcag

SEQ ID NO: 354076 - DNA, 59 bp, Artificial
  Synthetic oligonucleotide
ccaaggcatgacgtactccaccccaaccaccattcttcttgaccgccacagcactcttc

SEQ ID NO: 354077 - DNA, 60 bp, Artificial
  Synthetic oligonucleotide
ccaaggcattaacagaggtagtagaactgactgaggaagcagaattagaattggcagaga

SEQ ID NO: 354078 - DNA, 58 bp, Artificial
  Synthetic oligonucleotide
ccaaggcccaagcccatactatacacaagtgggccggtgctttaatgaaagtagcagc

SEQ ID NO: 354079 - DNA, 56 bp, Artificial
  Synthetic oligonucleotide
ccaaggccgccccgcgcggtggagtattatggtagtggagttgattacaaagccaa

SEQ ID NO: 354080 - DNA, 52 bp, Artificial
  Synthetic oligonucleotide
ccaaggccgttcaaccccaccccaccagttagtgatatttgggtgttaccac

SEQ ID NO: 354081 - DNA, 55 bp, Artificial
  Synthetic oligonucleotide
ccaaggcctcactgtgcgcgttaaagttgtttcggtgactgtgaacggggccgcg

SEQ ID NO: 354082 - DNA, 55 bp, Artificial
  Synthetic oligonucleotide
ccaaggcgactttcttctaaggaggcatcatgtccgccgcatcgaactacaccga

SEQ ID NO: 354083 - DNA, 55 bp, Artificial
  Synthetic oligonucleotide
ccaaggcgcgaatctataattcgcctatatgttgcctctaccaatgccactgtgg

SEQ ID NO: 354084 - DNA, 58 bp, Artificial
  Synthetic oligonucleotide
ccaaggcgcggttcataaagctaaattgtacgtggaagggtcgctgcctacactgctg

SEQ ID NO: 354085 - DNA, 60 bp, Artificial
  Synthetic oligonucleotide
ccaaggcgctatcagggagatgcttggagatggaacatctgagacaacaagtgtgaatgt

SEQ ID NO: 354086 - DNA, 58 bp, Artificial
  Synthetic oligonucleotide
ccaaggcggctacgtcaggcgctacgatcgtttctgtccaagtcggatcgaacccgca

SEQ ID NO: 354087 - DNA, 59 bp, Artificial
  Synthetic oligonucleotide
ccaaggctccgccaggtgtgcaggttattaagcctggtatatcacttactgactttgag

SEQ ID NO: 354088 - DNA, 60 bp, Artificial
  Synthetic oligonucleotide
ccaaggctcttgtatatgcggacaacatatacattgtccactcaaacacgtggtactcaa

SEQ ID NO: 354089 - DNA, 52 bp, Artificial
  Synthetic oligonucleotide
ccaaggctggcattgccatgtactaattggaggcaaagactttagtcaagct

SEQ ID NO: 354090 - DNA, 55 bp, Artificial
  Synthetic oligonucleotide
ccaaggcttttataggatatggcaacatgccatctttggaaatgaatctgacagc

SEQ ID NO: 354091 - DNA, 55 bp, Artificial
  Synthetic oligonucleotide
ccaagggaacctcaaagccgtagcaaagagtgagagccaacttgtgaccaaacac

SEQ ID NO: 354092 - DNA, 60 bp, Artificial
  Synthetic oligonucleotide
ccaagggacatgctgggagcagatgtacaccccaggaggggaagtaagaaatgatgatgt

SEQ ID NO: 354093 - DNA, 60 bp, Artificial
  Synthetic oligonucleotide
ccaagggaccagtcactcagatgtacaccagcgcagagggggacctcgtgggatggccta

SEQ ID NO: 354094 - DNA, 55 bp, Artificial
  Synthetic oligonucleotide
ccaagggagaacgcgcgatatttccggtatgaggcgggacggaacgggatcacac

SEQ ID NO: 354095 - DNA, 55 bp, Artificial
  Synthetic oligonucleotide
ccaagggagaatttacagcactaggagtccatgacagggtttgtgtagtacccac

SEQ ID NO: 354096 - DNA, 59 bp, Artificial
  Synthetic oligonucleotide
ccaagggagtgcttccagtatcgagtgttgacgttgcgaatcgaatcgcggttgacaaa

SEQ ID NO: 354097 - DNA, 55 bp, Artificial
  Synthetic oligonucleotide
ccaagggataggagccacttgttatgtcgaacaggatcttaacgcacaaccgccg

SEQ ID NO: 354098 - DNA, 56 bp, Artificial
  Synthetic oligonucleotide
ccaaggggccgtttaccacctcccttaactgatgcctctgtagaccaagccagcta

SEQ ID NO: 354099 - DNA, 54 bp, Artificial
  Synthetic oligonucleotide
ccaaggggttgtttcccaccaaggacgacccgtctgcgcacaaacggatgagcc

SEQ ID NO: 354100 - DNA, 54 bp, Artificial
  Synthetic oligonucleotide
ccaagggtaaatatctgagtccccaataggtaaatgagcccccaattgagtccc

SEQ ID NO: 354101 - DNA, 51 bp, Artificial
  Synthetic oligonucleotide
ccaagggtgggccgtcgtacatgaccggcaagcagggttatgccactggtg

SEQ ID NO: 354102 - DNA, 54 bp, Artificial
  Synthetic oligonucleotide
ccaagggttgcatccactgttcctgcagttccaccgagtgcatctacaccctac

SEQ ID NO: 354103 - DNA, 56 bp, Artificial
  Synthetic oligonucleotide
ccaaggtaaatatatgggccacaaattaactgtaacacgcagtcgataagtcaagg

SEQ ID NO: 354104 - DNA, 53 bp, Artificial
  Synthetic oligonucleotide
ccaaggtacaattgaaacctgggatgtcaggaccgaaattaaaacaatggccc

SEQ ID NO: 354105 - DNA, 60 bp, Artificial
  Synthetic oligonucleotide
ccaaggtacactattagttgcttgcctcccagagtatgttaatgctcgtgcaagtactaa

SEQ ID NO: 354106 - DNA, 55 bp, Artificial
  Synthetic oligonucleotide
ccaaggtagaagggaactttaaaattcttgggatgcatatagctggaaatggtga

SEQ ID NO: 354107 - DNA, 55 bp, Artificial
  Synthetic oligonucleotide
ccaaggtatattcggtgatgatagggttcgtatgcaaatccgatggttatgccgg

SEQ ID NO: 354108 - DNA, 55 bp, Artificial
  Synthetic oligonucleotide
ccaaggtattgggtcagaagttggcgtagagaaccttaacggtattatcttgaca

SEQ ID NO: 354109 - DNA, 55 bp, Artificial
  Synthetic oligonucleotide
ccaaggtcacgtaaccctggtatgtcctattcccaacggaggcatggtcgtgttc

SEQ ID NO: 354110 - DNA, 55 bp, Artificial
  Synthetic oligonucleotide
ccaaggtcaggtactgttatccaaggtcagcaagatcagttcccaagagttttct

SEQ ID NO: 354111 - DNA, 55 bp, Artificial
  Synthetic oligonucleotide
ccaaggtcaggtgctatatatgcttcaataattgcgtgtggcgaacctaatgggc

SEQ ID NO: 354112 - DNA, 56 bp, Artificial
  Synthetic oligonucleotide
ccaaggtccagaagaagaatttggccgctcactacttaaacacaactgttgtactg

SEQ ID NO: 354113 - DNA, 55 bp, Artificial
  Synthetic oligonucleotide
ccaaggtctcccagtgatgagcacacctggtagtaaccagtacctgacttctgac

SEQ ID NO: 354114 - DNA, 60 bp, Artificial
  Synthetic oligonucleotide
ccaaggtgattgctattgggtaatgactgatggtcccgccaataggcaggcacactatag

SEQ ID NO: 354115 - DNA, 57 bp, Artificial
  Synthetic oligonucleotide
ccaaggtgcggaggaggctgaacttcgacagcccatacacgaaccgtgtggttgccc

SEQ ID NO: 354116 - DNA, 55 bp, Artificial
  Synthetic oligonucleotide
ccaaggtgctggttaataaagaacaacagttacttgaacatctctgacttccgta

SEQ ID NO: 354117 - DNA, 55 bp, Artificial
  Synthetic oligonucleotide
ccaaggtgtcgtacataacatatcccagcatatctcgtagtgcattcagtagtcg

SEQ ID NO: 354118 - DNA, 55 bp, Artificial
  Synthetic oligonucleotide
ccaaggtgtgggccaccgaccaagtcgagatgctgttcctagacgagatgacccg

SEQ ID NO: 354119 - DNA, 60 bp, Artificial
  Synthetic oligonucleotide
ccaaggtgttggacatgctcatagatagctcgactcttgaaattaactctagcggacaat

SEQ ID NO: 354120 - DNA, 55 bp, Artificial
  Synthetic oligonucleotide
ccaaggttctattagaacacagacccatgttccacagccagacaacttgcttctg

SEQ ID NO: 354121 - DNA, 59 bp, Artificial
  Synthetic oligonucleotide
ccaaggttgcttggggagacatagaagtagagcgaccgacgggcaagggatcagatgag

SEQ ID NO: 354122 - DNA, 55 bp, Artificial
  Synthetic oligonucleotide
ccaaggtttacaatccccttcatgagcattgcatcagcatattacatgttctatg

SEQ ID NO: 354123 - DNA, 55 bp, Artificial
  Synthetic oligonucleotide
ccaaggtttcgggcgaaaaggagcctatctcagccatacgcataaagcactgcgg

SEQ ID NO: 354124 - DNA, 60 bp, Artificial
  Synthetic oligonucleotide
ccaaggtttctacttgctcatgcatatcacaacttaaaggatgtaaggtatcaagcttta

SEQ ID NO: 354125 - DNA, 58 bp, Artificial
  Synthetic oligonucleotide
ccaaggtttgacttatggcttcattctccaaactgttagtggtataggctctctaata

SEQ ID NO: 354126 - DNA, 55 bp, Artificial
  Synthetic oligonucleotide
ccaagtaagacgaatggtgaccgaattctgtgataggttaagacgtgatggtgtt

SEQ ID NO: 354127 - DNA, 53 bp, Artificial
  Synthetic oligonucleotide
ccaagtaagctgagatgccgatgagaaagtggaacacaataagttgatatggt

SEQ ID NO: 354128 - DNA, 55 bp, Artificial
  Synthetic oligonucleotide
ccaagtaataacaccaaagacgaatggcaatacgcctataccccactaatgaaaa

SEQ ID NO: 354129 - DNA, 60 bp, Artificial
  Synthetic oligonucleotide
ccaagtaatgtagaagttgaatttctactaaatggacagataattaatacatatcaagca

SEQ ID NO: 354130 - DNA, 55 bp, Artificial
  Synthetic oligonucleotide
ccaagtacaaccattttggtaccttaccctggcatgtcatcagcgatgggtggcg

SEQ ID NO: 354131 - DNA, 50 bp, Artificial
  Synthetic oligonucleotide
ccaagtacaagggaaatggcccatgtgagatgaatgatcatattaaggta

SEQ ID NO: 354132 - DNA, 59 bp, Artificial
  Synthetic oligonucleotide
ccaagtacacttccgaatggctgagtttatgccgccagacggagacgggatcacttcag

SEQ ID NO: 354133 - DNA, 57 bp, Artificial
  Synthetic oligonucleotide
ccaagtaccagttctactgatacccttaaagggactgcatttgctggtgtcccaatg

SEQ ID NO: 354134 - DNA, 60 bp, Artificial
  Synthetic oligonucleotide
ccaagtacccactggtgatcaggatttacatgaggatgaagcacgtcagggcgtggatac

SEQ ID NO: 354135 - DNA, 55 bp, Artificial
  Synthetic oligonucleotide
ccaagtacgcaactcttcgggcctttaccatgtcaccaatgattgccctaattcg

SEQ ID NO: 354136 - DNA, 55 bp, Artificial
  Synthetic oligonucleotide
ccaagtacgcggtttctgctccggacggttggggtatgtgtctcgaatctgtacc

SEQ ID NO: 354137 - DNA, 60 bp, Artificial
  Synthetic oligonucleotide
ccaagtacgcgtgttaaacaggcaaggcgtcgtgccattccagcatctgagagagatagg

SEQ ID NO: 354138 - DNA, 55 bp, Artificial
  Synthetic oligonucleotide
ccaagtactgagatatcgctgaggggaataagagttagcaaaatgggagtagacg

SEQ ID NO: 354139 - DNA, 60 bp, Artificial
  Synthetic oligonucleotide
ccaagtagaagtcgtcactgcccaagaattagtggaatcgcaacatctactggagttgtg

SEQ ID NO: 354140 - DNA, 60 bp, Artificial
  Synthetic oligonucleotide
ccaagtagcctgaaccacagctgctttgcccacaatgtaggcatattcagcagctcattc

SEQ ID NO: 354141 - DNA, 57 bp, Artificial
  Synthetic oligonucleotide
ccaagtagctttgtgtatacccaaatgggcacttttttgtgtagctttatgtgcagt

SEQ ID NO: 354142 - DNA, 55 bp, Artificial
  Synthetic oligonucleotide
ccaagtagggagcgctcgtaaaagtgattttagagtaactgaaccgaatggagac

SEQ ID NO: 354143 - DNA, 55 bp, Artificial
  Synthetic oligonucleotide
ccaagtagtgccatgtgaaccaatcataatagagaggaacatagactacagggat

SEQ ID NO: 354144 - DNA, 50 bp, Artificial
  Synthetic oligonucleotide
ccaagtatctgcgcagtttgatacgactaagggtgagtggacgttggata

SEQ ID NO: 354145 - DNA, 50 bp, Artificial
  Synthetic oligonucleotide
ccaagtatgaacagtccatggtagccgaagtcgacaagagccaatcggct

SEQ ID NO: 354146 - DNA, 60 bp, Artificial
  Synthetic oligonucleotide
ccaagtatgcccttgtggaatggcatttgtagtgtatccggaagactgtgacctcatgtt

SEQ ID NO: 354147 - DNA, 55 bp, Artificial
  Synthetic oligonucleotide
ccaagtattggacaaggtgtgaagagccccgtgtgctcatcttgaatcctccggc

SEQ ID NO: 354148 - DNA, 60 bp, Artificial
  Synthetic oligonucleotide
ccaagtattgtaacagctatgactatgcagtcaccattgcaattaagatttaggatgcaa

SEQ ID NO: 354149 - DNA, 55 bp, Artificial
  Synthetic oligonucleotide
ccaagtcaagtcatctttctcggtgatccactccagttaggtccagtcacacaca

SEQ ID NO: 354150 - DNA, 60 bp, Artificial
  Synthetic oligonucleotide
ccaagtcagacttgggtcgtgcactggcacctatcaatcaggctcgcctgtctggtaagc

SEQ ID NO: 354151 - DNA, 60 bp, Artificial
  Synthetic oligonucleotide
ccaagtcagatcaataattggagatgagaaatatgtggattacatgagttcattgaagag

SEQ ID NO: 354152 - DNA, 56 bp, Artificial
  Synthetic oligonucleotide
ccaagtcccagttctgcaaggacgggtggactggccgcgcttattggctaacgtcc

SEQ ID NO: 354153 - DNA, 60 bp, Artificial
  Synthetic oligonucleotide
ccaagtcccgattcaagaggttgtaaccatttgtgatcatggtgactcagatgatagggc

SEQ ID NO: 354154 - DNA, 57 bp, Artificial
  Synthetic oligonucleotide
ccaagtcgaagaatctgttatttttgcactgaaatttgccttcgaactggataagaa

SEQ ID NO: 354155 - DNA, 56 bp, Artificial
  Synthetic oligonucleotide
ccaagtcgaccaagacaaggcagaagacctcctaaaaggggtgagagaaagctaca

SEQ ID NO: 354156 - DNA, 55 bp, Artificial
  Synthetic oligonucleotide
ccaagtctactaacaagaccgctaactatcgtgaacttgataagttcacgttccc

SEQ ID NO: 354157 - DNA, 59 bp, Artificial
  Synthetic oligonucleotide
ccaagtctgttaatccttgaacgacatcatttagggtctcaccaccctgttctgccata

SEQ ID NO: 354158 - DNA, 57 bp, Artificial
  Synthetic oligonucleotide
ccaagtcttaacttggtgtgcgttcttttcattgaagtgtaggatagcgcctaccaa

SEQ ID NO: 354159 - DNA, 59 bp, Artificial
  Synthetic oligonucleotide
ccaagtctttggagccgtgcaagtgtggagccgtcgacctatatctggtcacgcggaac

SEQ ID NO: 354160 - DNA, 55 bp, Artificial
  Synthetic oligonucleotide
ccaagtgaaccatggacttcaggccatgagtggatcctagccgacaaacgaccaa

SEQ ID NO: 354161 - DNA, 53 bp, Artificial
  Synthetic oligonucleotide
ccaagtgaaggatatacgaaatacgtagtacgaaactttccaaatggtactcg

SEQ ID NO: 354162 - DNA, 57 bp, Artificial
  Synthetic oligonucleotide
ccaagtgagggtaagtggaatagcagtagtgcgagtgacctgtggttagagttccgt

SEQ ID NO: 354163 - DNA, 57 bp, Artificial
  Synthetic oligonucleotide
ccaagtgatggagacattacatacctagtgaataaattagagtatcacactatctgg

SEQ ID NO: 354164 - DNA, 60 bp, Artificial
  Synthetic oligonucleotide
ccaagtgcatgcgctactgatcacagtaactgtattaaagccaggcggcttactaatctt

SEQ ID NO: 354165 - DNA, 58 bp, Artificial
  Synthetic oligonucleotide
ccaagtgccgatttgtatcaccgggtagctcctgagggcaatcgacacgaagctaagg

SEQ ID NO: 354166 - DNA, 59 bp, Artificial
  Synthetic oligonucleotide
ccaagtgcgttgcgacgctgccggttcacgaccgcatcgagtcctgatttcgggagccc

SEQ ID NO: 354167 - DNA, 50 bp, Artificial
  Synthetic oligonucleotide
ccaagtgcttgcgctggcacctacccacggctaagccttaccaggggcag

SEQ ID NO: 354168 - DNA, 60 bp, Artificial
  Synthetic oligonucleotide
ccaagtggacaaacagcagactggttttctattggccaatacatcacaggattcgcactt

SEQ ID NO: 354169 - DNA, 60 bp, Artificial
  Synthetic oligonucleotide
ccaagtggacagccttgccaccaggattcttgcaacagttgtacacggatctcaggacaa

SEQ ID NO: 354170 - DNA, 60 bp, Artificial
  Synthetic oligonucleotide
ccaagtggatatgcacaaacagactgtgtcctggaagcgatggctttccttgaaaagtcc

SEQ ID NO: 354171 - DNA, 60 bp, Artificial
  Synthetic oligonucleotide
ccaagtggcggtctgcacgcactcatcggacttcggcgggatcgcaaatctgactttcaa

SEQ ID NO: 354172 - DNA, 55 bp, Artificial
  Synthetic oligonucleotide
ccaagtggctcttggcgttgcttgggcctggttatctcctaagaggtgctttgac

SEQ ID NO: 354173 - DNA, 54 bp, Artificial
  Synthetic oligonucleotide
ccaagtggtaatattaccaaaggtttacttaagacgtttcatgactcaatcaaa

SEQ ID NO: 354174 - DNA, 58 bp, Artificial
  Synthetic oligonucleotide
ccaagtggtgaagacatgacacttttctgtcaaatggtttcaagtgttactttcattc

SEQ ID NO: 354175 - DNA, 55 bp, Artificial
  Synthetic oligonucleotide
ccaagttccacagtggatgtctactagtagcggttgtccctgaacaccagctagc

SEQ ID NO: 354176 - DNA, 55 bp, Artificial
  Synthetic oligonucleotide
ccaagttccccttgaccccatccactggcaaagtgacgccgatgtctccggcctc

SEQ ID NO: 354177 - DNA, 55 bp, Artificial
  Synthetic oligonucleotide
ccaagttcgtaactccgttgaggttgtatcactggctcgtctatgacgccgagcc

SEQ ID NO: 354178 - DNA, 53 bp, Artificial
  Synthetic oligonucleotide
ccaagttgagcacaaagactaagttttggaggtcctccacggccccgcttccc

SEQ ID NO: 354179 - DNA, 51 bp, Artificial
  Synthetic oligonucleotide
ccaagttggaaatgagaccacagaacatggaacaactgcaaccataacacc

SEQ ID NO: 354180 - DNA, 60 bp, Artificial
  Synthetic oligonucleotide
ccaagttgtggttacatgattgaacttttattgctgcagggtttctggcattgactcatt

SEQ ID NO: 354181 - DNA, 53 bp, Artificial
  Synthetic oligonucleotide
ccaagtttaacgtctttatacgccatactccttcgttccaaacttcgggcaga

SEQ ID NO: 354182 - DNA, 58 bp, Artificial
  Synthetic oligonucleotide
ccaagtttcacctggctgtagcataatgggcctgtggccagtaatcggataaggaccc

SEQ ID NO: 354183 - DNA, 60 bp, Artificial
  Synthetic oligonucleotide
ccaagtttgacatacccgcaggtacagctcaagtgtacgctggcgatgactcggcgctag

SEQ ID NO: 354184 - DNA, 54 bp, Artificial
  Synthetic oligonucleotide
ccaataaaacaaggccgtgggagtttcacttgtcggtgtctgcttattaaggta

SEQ ID NO: 354185 - DNA, 60 bp, Artificial
  Synthetic oligonucleotide
ccaataaaattctggagaccgctctgatggtgagctttgttttaccattcgtattgctga

SEQ ID NO: 354186 - DNA, 60 bp, Artificial
  Synthetic oligonucleotide
ccaataaacattcattcgcgacgaagataataagagttgacggagatgacaattacgcag

SEQ ID NO: 354187 - DNA, 51 bp, Artificial
  Synthetic oligonucleotide
ccaataacataatgctagggcatgtatctgtgcaatctgaattgaagcagg

SEQ ID NO: 354188 - DNA, 60 bp, Artificial
  Synthetic oligonucleotide
ccaataagcgctcttgaacataacaattctatagccaatgagtctgagaggaaagcatgg

SEQ ID NO: 354189 - DNA, 54 bp, Artificial
  Synthetic oligonucleotide
ccaataaggacccagagtgacgaggtaccctcgaaagaatctattcagggggac

SEQ ID NO: 354190 - DNA, 58 bp, Artificial
  Synthetic oligonucleotide
ccaataaggtgaaaattcctgagacacatggcattagggctcggaagcaatgtaaggg

SEQ ID NO: 354191 - DNA, 55 bp, Artificial
  Synthetic oligonucleotide
ccaataagtttcgttctttaactggtggatctttgatgttgagtatgtttggccc

SEQ ID NO: 354192 - DNA, 60 bp, Artificial
  Synthetic oligonucleotide
ccaataatcccacatgtagcgatgttatacaagcccttcaagattgccaatagagaaagc

SEQ ID NO: 354193 - DNA, 58 bp, Artificial
  Synthetic oligonucleotide
ccaataatggagccatggccgacttctttcttcgtgaatacgtcccccaacatgcgaa

SEQ ID NO: 354194 - DNA, 52 bp, Artificial
  Synthetic oligonucleotide
ccaatacaaacaaagtgtccgccgttgttattaacgagcaattacgacccta

SEQ ID NO: 354195 - DNA, 60 bp, Artificial
  Synthetic oligonucleotide
ccaatacaataggcataacaccttcaggattgccatgtgtgccaacaataatgtctttgc

SEQ ID NO: 354196 - DNA, 55 bp, Artificial
  Synthetic oligonucleotide
ccaatacacaaagagaggaggcgtgttgtgggacactccctcaccaaaggagtac

SEQ ID NO: 354197 - DNA, 52 bp, Artificial
  Synthetic oligonucleotide
ccaatacatggatgatttatatgtagggtctgacttagaaatagggcaacat

SEQ ID NO: 354198 - DNA, 60 bp, Artificial
  Synthetic oligonucleotide
ccaatactcatatcatggccacagaggcctctaactatgcccagtatcgcgttgtccgtg

SEQ ID NO: 354199 - DNA, 54 bp, Artificial
  Synthetic oligonucleotide
ccaatactctgggccacgatttaattagggatcttatttctgttataagggccc

SEQ ID NO: 354200 - DNA, 60 bp, Artificial
  Synthetic oligonucleotide
ccaatactctgggtcacgatctaattagggatctcatttccgtcattcgtgctcgtgact

SEQ ID NO: 354201 - DNA, 57 bp, Artificial
  Synthetic oligonucleotide
ccaatacttcatcgcaaggatagaggccatgcttcacgtgtgggttcccaatctctc

SEQ ID NO: 354202 - DNA, 54 bp, Artificial
  Synthetic oligonucleotide
ccaatactttgggccacgatttaattagggatcttattagtgttattagggctc

SEQ ID NO: 354203 - DNA, 53 bp, Artificial
  Synthetic oligonucleotide
ccaatagacgccctaaacccaagcagtagttctgttgtccctatggttgaagt

SEQ ID NO: 354204 - DNA, 55 bp, Artificial
  Synthetic oligonucleotide
ccaatagatcctaacttagaaccctggaatcatccaggaagccagcctaaaaccc

SEQ ID NO: 354205 - DNA, 58 bp, Artificial
  Synthetic oligonucleotide
ccaatagatgaaaacccagtacaatgggattcagaagatgattggtttccaccaccca

SEQ ID NO: 354206 - DNA, 59 bp, Artificial
  Synthetic oligonucleotide
ccaatagccaactcagtgacagttagacaagatttagagcggcagttgggtgagcttag

SEQ ID NO: 354207 - DNA, 60 bp, Artificial
  Synthetic oligonucleotide
ccaatagcgatgacacatactagtcagtatatatgtagccctgttcttacagataacccc

SEQ ID NO: 354208 - DNA, 57 bp, Artificial
  Synthetic oligonucleotide
ccaatagcgccagaatctttagattcaaacgttatagttcataatgtcatggtagac

SEQ ID NO: 354209 - DNA, 59 bp, Artificial
  Synthetic oligonucleotide
ccaatagcggtttgcacattagatatttgatttagtgtagcttgtttagtaacagtaga

SEQ ID NO: 354210 - DNA, 58 bp, Artificial
  Synthetic oligonucleotide
ccaatagcgttatgttttggttagtcagagatcggcgaccgtatggcacccccatgga

SEQ ID NO: 354211 - DNA, 55 bp, Artificial
  Synthetic oligonucleotide
ccaatagctaattccgtgacagtgagacaggatttagaaaggcagcttggtgagt

SEQ ID NO: 354212 - DNA, 55 bp, Artificial
  Synthetic oligonucleotide
ccaataggagcgaatcttgaggatctagttgattactcaaaggaatggttatcca

SEQ ID NO: 354213 - DNA, 55 bp, Artificial
  Synthetic oligonucleotide
ccaataggcaagctaaacggctattgtcttcgttgttcttaccaggcaggggccg

SEQ ID NO: 354214 - DNA, 60 bp, Artificial
  Synthetic oligonucleotide
ccaataggcaggcacagtatagaatatacaaagcgaatcaaggcagaatagttggccaaa

SEQ ID NO: 354215 - DNA, 56 bp, Artificial
  Synthetic oligonucleotide
ccaatagggtggacgggtgttatagagtgcacagcagtgagcccaacaactctgag

SEQ ID NO: 354216 - DNA, 55 bp, Artificial
  Synthetic oligonucleotide
ccaataggtggtggctatccaagtcattaatggtcaagcacttctgtttccccgg

SEQ ID NO: 354217 - DNA, 59 bp, Artificial
  Synthetic oligonucleotide
ccaataggttgatgactagtccggtcttgcacccggatgagattaaatccatatggttc

SEQ ID NO: 354218 - DNA, 59 bp, Artificial
  Synthetic oligonucleotide
ccaatagtacttgtatctttcgcaaacattggcttcctccaaacagatcttctccagta

SEQ ID NO: 354219 - DNA, 60 bp, Artificial
  Synthetic oligonucleotide
ccaatagttggcttgatgaagacagaaggtagcagttatatctggtctggtgaatgtctt

SEQ ID NO: 354220 - DNA, 54 bp, Artificial
  Synthetic oligonucleotide
ccaatatagccatggtaggtgatgttgaacgattggctatccactccgccaatg

SEQ ID NO: 354221 - DNA, 55 bp, Artificial
  Synthetic oligonucleotide
ccaatataggtttctccagtcaaaagcaaccaagtgcccacccacaccggctacc

SEQ ID NO: 354222 - DNA, 56 bp, Artificial
  Synthetic oligonucleotide
ccaatatatactaaaagcctctggggaacaccaggggcaaaagcggccatccgcaa

SEQ ID NO: 354223 - DNA, 60 bp, Artificial
  Synthetic oligonucleotide
ccaatatatagctaagaatgatacatattggacacattcaagtacactgtcaaatactaa

SEQ ID NO: 354224 - DNA, 55 bp, Artificial
  Synthetic oligonucleotide
ccaatatatagtaagaagttctttaaggatctgtagacacgtggcggccatccgc

SEQ ID NO: 354225 - DNA, 53 bp, Artificial
  Synthetic oligonucleotide
ccaatatatcggggtaccaattggtgtacataaattgcctttcctaaaatacc

SEQ ID NO: 354226 - DNA, 58 bp, Artificial
  Synthetic oligonucleotide
ccaatatatgattcaagaggtcactaaaatcagaccctttggacaaactacaactgct

SEQ ID NO: 354227 - DNA, 50 bp, Artificial
  Synthetic oligonucleotide
ccaatatatgtttgtgccacctggagcccctaagccagattctagggaat

SEQ ID NO: 354228 - DNA, 58 bp, Artificial
  Synthetic oligonucleotide
ccaatatattagacaactggaacctgggcctcaacccacccccatctgcatcgttaga

SEQ ID NO: 354229 - DNA, 52 bp, Artificial
  Synthetic oligonucleotide
ccaatatattggggtacaattggggactcataaattacctttcctaaaatac

SEQ ID NO: 354230 - DNA, 58 bp, Artificial
  Synthetic oligonucleotide
ccaatatcatacggagagcggattcagcgtttaggacgagttggcagaacgaaacctg

SEQ ID NO: 354231 - DNA, 55 bp, Artificial
  Synthetic oligonucleotide
ccaatatgatggaagcgttttacatagaattactacaaacactcgcgccaaacgg

SEQ ID NO: 354232 - DNA, 59 bp, Artificial
  Synthetic oligonucleotide
ccaatatgatggttggttttgaaacgattcccatggataatcaaatttacactcaatca

SEQ ID NO: 354233 - DNA, 59 bp, Artificial
  Synthetic oligonucleotide
ccaatatggactccagatatgtgtatcatggggtatcggaaaaagaatactagagaata

SEQ ID NO: 354234 - DNA, 60 bp, Artificial
  Synthetic oligonucleotide
ccaatatgggtttctgtctgactctgagctaatcactgcagattacgttagagtctagtg

SEQ ID NO: 354235 - DNA, 55 bp, Artificial
  Synthetic oligonucleotide
ccaatatgtgtaacaacaggctctctggcgactacgtcgccctttaacgcagacg

SEQ ID NO: 354236 - DNA, 60 bp, Artificial
  Synthetic oligonucleotide
ccaatatgttgaggtagctgttgatcactatgctgcacaactaacagtcttagacataaa

SEQ ID NO: 354237 - DNA, 60 bp, Artificial
  Synthetic oligonucleotide
ccaatattatatgcacatactttgctaagcatgagaacctccccttaggggatgagtttc

SEQ ID NO: 354238 - DNA, 55 bp, Artificial
  Synthetic oligonucleotide
ccaatattcccacaatcagaacagcaaaagtccagggtccgggatttgattatgc

SEQ ID NO: 354239 - DNA, 60 bp, Artificial
  Synthetic oligonucleotide
ccaatattctgtctgtctttatcacccgctagtgatcagaggttgcaatacaccttgtta

SEQ ID NO: 354240 - DNA, 55 bp, Artificial
  Synthetic oligonucleotide
ccaatatttggtacataggtctgactcattacatgcgtttgacgagacatctttg

SEQ ID NO: 354241 - DNA, 55 bp, Artificial
  Synthetic oligonucleotide
ccaatcaaactggcaattctccaaatgtaacaccagttaatgccactaatgggtc

SEQ ID NO: 354242 - DNA, 59 bp, Artificial
  Synthetic oligonucleotide
ccaatcaaattcgttctaggcgcactagttattctttagcgctagtggcgcactacgag

SEQ ID NO: 354243 - DNA, 58 bp, Artificial
  Synthetic oligonucleotide
ccaatcaacattcaatcatctaatgggagaaacatctgacatattgttaaatcgagcc

SEQ ID NO: 354244 - DNA, 52 bp, Artificial
  Synthetic oligonucleotide
ccaatcaaggactaccagtgtatgttacacctggttctggtcaatttatgac

SEQ ID NO: 354245 - DNA, 57 bp, Artificial
  Synthetic oligonucleotide
ccaatcaccgtgtgcgttacctcaatttgatgtaacccctgaaatgagtattccagg

SEQ ID NO: 354246 - DNA, 56 bp, Artificial
  Synthetic oligonucleotide
ccaatcacctactacttcgtacacttcctggggcgtgtctacccagcaaatataaa

SEQ ID NO: 354247 - DNA, 60 bp, Artificial
  Synthetic oligonucleotide
ccaatcacggtggagtgtgtgagtaagtcacaaggtgacttcgttcacgcatgttgttgc

SEQ ID NO: 354248 - DNA, 55 bp, Artificial
  Synthetic oligonucleotide
ccaatcacgtaaattattggttcaattctttcctggatcctatcatcaggagcct

SEQ ID NO: 354249 - DNA, 55 bp, Artificial
  Synthetic oligonucleotide
ccaatcagacaggcaccactgtttcagattcagcaagtggtggcatcaccatttt

SEQ ID NO: 354250 - DNA, 60 bp, Artificial
  Synthetic oligonucleotide
ccaatcagatggaaacacagtcacctacttctatggtgattgtggtgagagttatagcca

SEQ ID NO: 354251 - DNA, 57 bp, Artificial
  Synthetic oligonucleotide
ccaatcagattgtgtcctgaagtcttatttattcgaaatactaaggcggctaagtta

SEQ ID NO: 354252 - DNA, 58 bp, Artificial
  Synthetic oligonucleotide
ccaatcagatttggtctggcgagtctaggtattcgtgttcaaacttagtgaccaagta

SEQ ID NO: 354253 - DNA, 59 bp, Artificial
  Synthetic oligonucleotide
ccaatcaggcagaatcccggtgagtcatggatgcgtttacagttccctaacaacgtgta

SEQ ID NO: 354254 - DNA, 55 bp, Artificial
  Synthetic oligonucleotide
ccaatcaggcgggccacttagggaggagcatgcagggtacctgcagtacaaagcc

SEQ ID NO: 354255 - DNA, 55 bp, Artificial
  Synthetic oligonucleotide
ccaatcagtgataacagttccagtagcgagagcaattccagtagagactacaggc

SEQ ID NO: 354256 - DNA, 55 bp, Artificial
  Synthetic oligonucleotide
ccaatcataagaaggaggtcgatgctttaaaggtcccattggtgagttttaggga

SEQ ID NO: 354257 - DNA, 55 bp, Artificial
  Synthetic oligonucleotide
ccaatcatacttttagtggcccaagattcaccaggattaattcctattgggcctc

SEQ ID NO: 354258 - DNA, 55 bp, Artificial
  Synthetic oligonucleotide
ccaatcatagatcttcttggtaagattaacccttattccagcaatgcaaattgcc

SEQ ID NO: 354259 - DNA, 52 bp, Artificial
  Synthetic oligonucleotide
ccaatcatatcaccagtttcgtgccacatgcttccctgccgagaatctagcc

SEQ ID NO: 354260 - DNA, 59 bp, Artificial
  Synthetic oligonucleotide
ccaatcatatttaaggcgcactcaatcaatggggattcaactcgaccaaaggataatct

SEQ ID NO: 354261 - DNA, 60 bp, Artificial
  Synthetic oligonucleotide
ccaatcattcaaagactccacggcctcagcgcattttcactccacagttactctccaggt

SEQ ID NO: 354262 - DNA, 60 bp, Artificial
  Synthetic oligonucleotide
ccaatcattcaaagactccatggtcttagcgcgttctctctccatagctactctccaggt

SEQ ID NO: 354263 - DNA, 55 bp, Artificial
  Synthetic oligonucleotide
ccaatcattcccaacgctgtcaaaagcctgtctagcgtcttgaaattgctctggg

SEQ ID NO: 354264 - DNA, 60 bp, Artificial
  Synthetic oligonucleotide
ccaatccagaatgtttattccgcacataacattaagcttcaataacatgagaacagtaag

SEQ ID NO: 354265 - DNA, 55 bp, Artificial
  Synthetic oligonucleotide
ccaatccagataccgtgtgaaaacgatgttttatacataacgcacacgagagccg

SEQ ID NO: 354266 - DNA, 55 bp, Artificial
  Synthetic oligonucleotide
ccaatccagccgtggttatccggcagatttaccggcgtataatcgccgaagttcc

SEQ ID NO: 354267 - DNA, 60 bp, Artificial
  Synthetic oligonucleotide
ccaatccatcagctaaggctaacttcatgatttggctaaatactacagcagtttgattaa

SEQ ID NO: 354268 - DNA, 59 bp, Artificial
  Synthetic oligonucleotide
ccaatcccatatgctaattggacacggttttgcctcaccaggcgattgtggtggtatcc

SEQ ID NO: 354269 - DNA, 54 bp, Artificial
  Synthetic oligonucleotide
ccaatcccatcagcaccgttaagaagggcggctcccgtttctacgtaaacgaga

SEQ ID NO: 354270 - DNA, 58 bp, Artificial
  Synthetic oligonucleotide
ccaatccctgatgactgttggcttatcgtcgcacacaacgcggcgtatgagataagct

SEQ ID NO: 354271 - DNA, 60 bp, Artificial
  Synthetic oligonucleotide
ccaatccctgcacacacgctggttggagcactgcttcggtctgcgacgtactacttctca

SEQ ID NO: 354272 - DNA, 55 bp, Artificial
  Synthetic oligonucleotide
ccaatccggtggcaatgtttcaatacgactgcgcccttctcaacggtatggccgt

SEQ ID NO: 354273 - DNA, 54 bp, Artificial
  Synthetic oligonucleotide
ccaatccgttatctgacaccagccgtgaagaatgaacaccagggcaatgagata

SEQ ID NO: 354274 - DNA, 55 bp, Artificial
  Synthetic oligonucleotide
ccaatcctccattgtgtgacgtcttgctcaacctcatttcatcaaaactcttctc

SEQ ID NO: 354275 - DNA, 55 bp, Artificial
  Synthetic oligonucleotide
ccaatcctgaggaacggccatacaagctaccagccttatgtgaagaggtcaacat

SEQ ID NO: 354276 - DNA, 59 bp, Artificial
  Synthetic oligonucleotide
ccaatccttggtgcccaaggctgccaggggccagtatagtggatttgtgagaacgctat

SEQ ID NO: 354277 - DNA, 55 bp, Artificial
  Synthetic oligonucleotide
ccaatcggaaatcatccagttcagttggatccaatcggtcatcctgcagaaatct

SEQ ID NO: 354278 - DNA, 52 bp, Artificial
  Synthetic oligonucleotide
ccaatcgggccatcctgggccgatgatgagcgggaggtggactacaacgagg

SEQ ID NO: 354279 - DNA, 53 bp, Artificial
  Synthetic oligonucleotide
ccaatcgtagtacggtggcccgaaaaccactcccgaatctccgttactaatca

SEQ ID NO: 354280 - DNA, 55 bp, Artificial
  Synthetic oligonucleotide
ccaatcgtccagaggcggattgatctccaaatctgggaacggttggcaataaacc

SEQ ID NO: 354281 - DNA, 57 bp, Artificial
  Synthetic oligonucleotide
ccaatcgttcatacaccgtgcgctgctgaccactgagaacacattcctggctgaaat

SEQ ID NO: 354282 - DNA, 55 bp, Artificial
  Synthetic oligonucleotide
ccaatcgtttaccgtaaggttgatcgggactacaagttaatccgtgatgctgcgc

SEQ ID NO: 354283 - DNA, 58 bp, Artificial
  Synthetic oligonucleotide
ccaatctaatgagcttgagtgtcttacttctcgcgctatgtgtgagaactggttacgt

SEQ ID NO: 354284 - DNA, 60 bp, Artificial
  Synthetic oligonucleotide
ccaatctagaggaggaaatcctctctcaactataccgccctctagagccatgctataaca

SEQ ID NO: 354285 - DNA, 57 bp, Artificial
  Synthetic oligonucleotide
ccaatctagatgtgttaacacatggttctagtgggttagtattctggaattacctgg

SEQ ID NO: 354286 - DNA, 60 bp, Artificial
  Synthetic oligonucleotide
ccaatctcgcctgactatacgcaacacatggctaccataggtgtgctggcgacgcctgag

SEQ ID NO: 354287 - DNA, 60 bp, Artificial
  Synthetic oligonucleotide
ccaatctcggcagagctgtttatgggcgccatgagggttggtccagaatgggggatcatt

SEQ ID NO: 354288 - DNA, 60 bp, Artificial
  Synthetic oligonucleotide
ccaatctgaatgatgccacctaccagagaacaagagctcttgttcgcactgggatggatc

SEQ ID NO: 354289 - DNA, 60 bp, Artificial
  Synthetic oligonucleotide
ccaatctgctaaaattcatgcgcaatttgacccgaacaatcggagcgtccagcctacaga

SEQ ID NO: 354290 - DNA, 53 bp, Artificial
  Synthetic oligonucleotide
ccaatctggtttaaagcactaggtaaagtcttagataatttaggattcccagg

SEQ ID NO: 354291 - DNA, 60 bp, Artificial
  Synthetic oligonucleotide
ccaatctgtctctgagggtactcgataccttcttgctggctacgagtcgacggtagccgc

SEQ ID NO: 354292 - DNA, 60 bp, Artificial
  Synthetic oligonucleotide
ccaatctgttactaatcacaagtgggttgctgtgggagctgcagttggcattcttggagt

SEQ ID NO: 354293 - DNA, 59 bp, Artificial
  Synthetic oligonucleotide
ccaatcttaattgatatgtagctacatcaagtcattcagactcttcaagtaaggacatg

SEQ ID NO: 354294 - DNA, 58 bp, Artificial
  Synthetic oligonucleotide
ccaatcttactcccaggatcgctctttgcgttcgactactcagggtatgatgctagtc

SEQ ID NO: 354295 - DNA, 60 bp, Artificial
  Synthetic oligonucleotide
ccaatcttcacatggaatgttccatgcataccctgtgttaatcgcaagtcaggaaaggga

SEQ ID NO: 354296 - DNA, 60 bp, Artificial
  Synthetic oligonucleotide
ccaatcttcagttcatacggcagaagttggtgcacatcagacagagcctcttaagacatc

SEQ ID NO: 354297 - DNA, 51 bp, Artificial
  Synthetic oligonucleotide
ccaatcttcatccgagttggcgaggattattgtaggcttagacttcttgtg

SEQ ID NO: 354298 - DNA, 60 bp, Artificial
  Synthetic oligonucleotide
ccaatcttgatgacactacatacgaaaatcaagcaataaacgccgtgtacaacaagcgaa

SEQ ID NO: 354299 - DNA, 56 bp, Artificial
  Synthetic oligonucleotide
ccaatcttgcatctcgacaggaacgttagtgaacgacgagaggggaaacggaggaa

SEQ ID NO: 354300 - DNA, 54 bp, Artificial
  Synthetic oligonucleotide
ccaatctttgattgattcgttgcatagcaagtctggttcggaggtaggatgagg

SEQ ID NO: 354301 - DNA, 60 bp, Artificial
  Synthetic oligonucleotide
ccaatgaaaacatggagactatggaatcaagtactcttgagctgaggagcaggtactggg

SEQ ID NO: 354302 - DNA, 58 bp, Artificial
  Synthetic oligonucleotide
ccaatgaaagagacttttgtttatgacattggtggcaactggttttctcatatgaagt

SEQ ID NO: 354303 - DNA, 55 bp, Artificial
  Synthetic oligonucleotide
ccaatgaaggagatccatgaatctatccggtggaccaaggacgcacgcaacacac

SEQ ID NO: 354304 - DNA, 60 bp, Artificial
  Synthetic oligonucleotide
ccaatgacacttgatctcaacaggcttcttgccctaaatatttgctttgagaaggcattc

SEQ ID NO: 354305 - DNA, 60 bp, Artificial
  Synthetic oligonucleotide
ccaatgacgcagtattagcagtgaacactagcaagttccccaacatgtacataccagtag

SEQ ID NO: 354306 - DNA, 57 bp, Artificial
  Synthetic oligonucleotide
ccaatgacggtgtgcggtataaccggcacgtgcatgtcaaggacggtcggtacatgg

SEQ ID NO: 354307 - DNA, 60 bp, Artificial
  Synthetic oligonucleotide
ccaatgactgcgtcctcccctacgatcacaacatgagtccctaccatcgtgttccaatac

SEQ ID NO: 354308 - DNA, 60 bp, Artificial
  Synthetic oligonucleotide
ccaatgagccccacagagtatttctaagcgcaggaaaggatgtggacaataatattacac

SEQ ID NO: 354309 - DNA, 55 bp, Artificial
  Synthetic oligonucleotide
ccaatgaggatatagtcatcatggatgacttctatgggtggctgcccttctgtga

SEQ ID NO: 354310 - DNA, 58 bp, Artificial
  Synthetic oligonucleotide
ccaatgaggatgcgtctggcgagcttagataaccgttccagacgtggggaccaagtag

SEQ ID NO: 354311 - DNA, 55 bp, Artificial
  Synthetic oligonucleotide
ccaatgagtctccattagaaggaatagtctattattgggaaaccgagaggaaacg

SEQ ID NO: 354312 - DNA, 55 bp, Artificial
  Synthetic oligonucleotide
ccaatgagttgcacttacttgctgaagaccaagcaaataattacgaggggtggta

SEQ ID NO: 354313 - DNA, 53 bp, Artificial
  Synthetic oligonucleotide
ccaatgataccgggaacggagtatggatccgccttcttaagtataacggaagg

SEQ ID NO: 354314 - DNA, 60 bp, Artificial
  Synthetic oligonucleotide
ccaatgatctagaggactcctttgttggcttacacaggataatagtgaccgaggctatcc

SEQ ID NO: 354315 - DNA, 58 bp, Artificial
  Synthetic oligonucleotide
ccaatgatctggcccacattgttttgccggttctagattcaccttcaattaccattcc

SEQ ID NO: 354316 - DNA, 60 bp, Artificial
  Synthetic oligonucleotide
ccaatgatgcgatgaacatgaagataggcagaccgttggaactcgtgaacattaagaacg

SEQ ID NO: 354317 - DNA, 60 bp, Artificial
  Synthetic oligonucleotide
ccaatgatgctgggtccagtctgttgagagccctatatggataatctgcaactgaaggcc

SEQ ID NO: 354318 - DNA, 60 bp, Artificial
  Synthetic oligonucleotide
ccaatgatgtcgattgcctctaggtcttgcttggacacgtacatcgtctggtaggccgaa

SEQ ID NO: 354319 - DNA, 55 bp, Artificial
  Synthetic oligonucleotide
ccaatgatttacaaagaactcataacgcgcattgcacatcgtatccggttcgatg

SEQ ID NO: 354320 - DNA, 55 bp, Artificial
  Synthetic oligonucleotide
ccaatgcacaaagcacatatgacttttgatgaacaatccgttcaactggcaagca

SEQ ID NO: 354321 - DNA, 55 bp, Artificial
  Synthetic oligonucleotide
ccaatgcagtcggtagtgaagctgttagatgatcagttgccagatgacagcctga

SEQ ID NO: 354322 - DNA, 55 bp, Artificial
  Synthetic oligonucleotide
ccaatgcattgtcaattaattatgtgcagcttacgtcgaccgcgtctccacgtcc

SEQ ID NO: 354323 - DNA, 60 bp, Artificial
  Synthetic oligonucleotide
ccaatgccagagactatggctgaggcaatgcaaggccactatgttatctatgatactggt

SEQ ID NO: 354324 - DNA, 54 bp, Artificial
  Synthetic oligonucleotide
ccaatgccagagagatactcgaaagtctttttaagtcgttctgaccctgggagt

SEQ ID NO: 354325 - DNA, 55 bp, Artificial
  Synthetic oligonucleotide
ccaatgccagcagcacgttttacgtataaacttcgaccactggacggaccattca

SEQ ID NO: 354326 - DNA, 50 bp, Artificial
  Synthetic oligonucleotide
ccaatgccattgttaaaaggcttccccgtctggtggagactatgctgtat

SEQ ID NO: 354327 - DNA, 54 bp, Artificial
  Synthetic oligonucleotide
ccaatgccgttcgagtatgaattttttacgagttctttttattacgctgttgaa

SEQ ID NO: 354328 - DNA, 55 bp, Artificial
  Synthetic oligonucleotide
ccaatgcgacgtaaatagaacacccgcaatttagatcaatcctcctcctgcgtgg

SEQ ID NO: 354329 - DNA, 57 bp, Artificial
  Synthetic oligonucleotide
ccaatgctaaggcccaagatctcgggaccatcccgggtgattgtggttgcccctatg

SEQ ID NO: 354330 - DNA, 55 bp, Artificial
  Synthetic oligonucleotide
ccaatgctagccattcgcttaacatggtgtttactgtagatccaatgcaagaaac

SEQ ID NO: 354331 - DNA, 54 bp, Artificial
  Synthetic oligonucleotide
ccaatgctcaggtgactcacaagccgagaccagatagcattgtcgagtactcgg

SEQ ID NO: 354332 - DNA, 60 bp, Artificial
  Synthetic oligonucleotide
ccaatgctgagcccaagatgaaagcccagtgcatacatgagaatcagtatggcccagact

SEQ ID NO: 354333 - DNA, 58 bp, Artificial
  Synthetic oligonucleotide
ccaatgctggccccaacgaaaactttggcaatcttgtctttggcatccccaatgccca

SEQ ID NO: 354334 - DNA, 60 bp, Artificial
  Synthetic oligonucleotide
ccaatgctgtggtagcctatggtgtttggccacattacctgacaccgcaggatgctactg

SEQ ID NO: 354335 - DNA, 60 bp, Artificial
  Synthetic oligonucleotide
ccaatgcttccaggcaaagtggtgacaaaagcgttcaattctagagagagaagctctcgt

SEQ ID NO: 354336 - DNA, 60 bp, Artificial
  Synthetic oligonucleotide
ccaatgctttccgaaggttgtagttgaattgtatccttattgttatgatgtctgtctcca

SEQ ID NO: 354337 - DNA, 55 bp, Artificial
  Synthetic oligonucleotide
ccaatgctttgaaggtgtccatgccacaagttcaagatacgcaatctagtggacc

SEQ ID NO: 354338 - DNA, 55 bp, Artificial
  Synthetic oligonucleotide
ccaatggacatagcattgtactactatcaacagacggatgaggcaaacaagtgga

SEQ ID NO: 354339 - DNA, 60 bp, Artificial
  Synthetic oligonucleotide
ccaatggataaatctacgcactaataatagtgcgaccatagtaatgccgtatataaattg

SEQ ID NO: 354340 - DNA, 55 bp, Artificial
  Synthetic oligonucleotide
ccaatggcaaaccatttcaaaatgtaaacaggatcacatatggggcctgtcccag

SEQ ID NO: 354341 - DNA, 60 bp, Artificial
  Synthetic oligonucleotide
ccaatggctaatttgataaatgccgctagtcgacaatctcctgacttcgagcctaacaag

SEQ ID NO: 354342 - DNA, 58 bp, Artificial
  Synthetic oligonucleotide
ccaatggcttttcaactagccctagacgccctatcctccaccactcaccgagattcaa

SEQ ID NO: 354343 - DNA, 60 bp, Artificial
  Synthetic oligonucleotide
ccaatgggaatctaattgccccatggtatggccacattctctcaggagaaagccatggaa

SEQ ID NO: 354344 - DNA, 55 bp, Artificial
  Synthetic oligonucleotide
ccaatggggtttcaacaagtttgctggccatgtgcacagtgaaacaggctcgtac

SEQ ID NO: 354345 - DNA, 57 bp, Artificial
  Synthetic oligonucleotide
ccaatgggtataacgttgtattattatcgacagacggacgaggcgaataaatggata

SEQ ID NO: 354346 - DNA, 59 bp, Artificial
  Synthetic oligonucleotide
ccaatgggtctttacagtgcagaatatgtatttaaaactaggatttcagagacatgaga

SEQ ID NO: 354347 - DNA, 55 bp, Artificial
  Synthetic oligonucleotide
ccaatggtcggtgcagggtatgtggtcgggccgtccacctttcttggtactcctg

SEQ ID NO: 354348 - DNA, 58 bp, Artificial
  Synthetic oligonucleotide
ccaatggtgaacctttttcgcttagtctgaatgatgggggtttagatcttgacctgca

SEQ ID NO: 354349 - DNA, 55 bp, Artificial
  Synthetic oligonucleotide
ccaatggtgaatccaaatgtttgctccaagagcattgaagtggcagtcaagctcg

SEQ ID NO: 354350 - DNA, 55 bp, Artificial
  Synthetic oligonucleotide
ccaatggtggtcaacctcccgcctctgccccaatggtttctgtggaggaacctac

SEQ ID NO: 354351 - DNA, 59 bp, Artificial
  Synthetic oligonucleotide
ccaatggtgtgacgtcgctgaattggatcttttaccgttatgcactgaacaaaccgaca

SEQ ID NO: 354352 - DNA, 60 bp, Artificial
  Synthetic oligonucleotide
ccaatggttcctatttgaatgagacccactttagtgatcagatcgagcaagaggcagaca

SEQ ID NO: 354353 - DNA, 60 bp, Artificial
  Synthetic oligonucleotide
ccaatgtagaggaccttttgatattatggggaatccaccaccctaatgatgcagcagaac

SEQ ID NO: 354354 - DNA, 56 bp, Artificial
  Synthetic oligonucleotide
ccaatgtagccctaatagaaacggtccttgatttcgcaaaaacagatataccagac

SEQ ID NO: 354355 - DNA, 60 bp, Artificial
  Synthetic oligonucleotide
ccaatgtatacagcagctgtctgggcctggtttgatgtgaagaccatccctgcacatgac

SEQ ID NO: 354356 - DNA, 55 bp, Artificial
  Synthetic oligonucleotide
ccaatgtcggaaggagtatatacatcatcaaacgcaaatagtaaagcgtcagaat

SEQ ID NO: 354357 - DNA, 50 bp, Artificial
  Synthetic oligonucleotide
ccaatgtctcagtagttcactgtacacatgggatttatcctatgatagcc

SEQ ID NO: 354358 - DNA, 55 bp, Artificial
  Synthetic oligonucleotide
ccaatgtgcctagtctcaaaacaaaatcgcttcagatcatcagagcaacaagtca

SEQ ID NO: 354359 - DNA, 60 bp, Artificial
  Synthetic oligonucleotide
ccaatgtgcttagcacaactggtgcgcaatcagtagccctggtgggtgagagagcttttt

SEQ ID NO: 354360 - DNA, 55 bp, Artificial
  Synthetic oligonucleotide
ccaatgtggacaaagacctcgtgggctggcccgctcctcagggtacccgctcatt

SEQ ID NO: 354361 - DNA, 55 bp, Artificial
  Synthetic oligonucleotide
ccaatgtgggactgaatgtctcactacacctaaagggcagcagtgaccaggataa

SEQ ID NO: 354362 - DNA, 55 bp, Artificial
  Synthetic oligonucleotide
ccaatgtgtctagtgtcaaagcagaatcgttttagactaacagaacaacaggtga

SEQ ID NO: 354363 - DNA, 54 bp, Artificial
  Synthetic oligonucleotide
ccaatgttgtagaggtcgtaacgagtaattctgggatgggaccgactactttgg

SEQ ID NO: 354364 - DNA, 53 bp, Artificial
  Synthetic oligonucleotide
ccaatgtttaacgcacgactacgattgacgaaggcgcgaattaatgcagagaa

SEQ ID NO: 354365 - DNA, 60 bp, Artificial
  Synthetic oligonucleotide
ccaattaagagtgtgaacgcaacgaagattagttacactcttagcactgatccaacggca

SEQ ID NO: 354366 - DNA, 55 bp, Artificial
  Synthetic oligonucleotide
ccaattaagcatgtcacacctggtgacgaagaagctatgacaagacaaatcaatt

SEQ ID NO: 354367 - DNA, 54 bp, Artificial
  Synthetic oligonucleotide
ccaattaatgggtggtgaatgtcactaatagaccactggttgttagttgtgaaa

SEQ ID NO: 354368 - DNA, 55 bp, Artificial
  Synthetic oligonucleotide
ccaattactacggaaggatccttattattggctccaacaaatcgtaatccagtgc

SEQ ID NO: 354369 - DNA, 55 bp, Artificial
  Synthetic oligonucleotide
ccaattactcaccatctagagaggataacctacaacgtgtgttcacagtggcttc

SEQ ID NO: 354370 - DNA, 55 bp, Artificial
  Synthetic oligonucleotide
ccaattactgacgatgtcaggcctggctgaacgttgaaaaggtctgcaaggtcca

SEQ ID NO: 354371 - DNA, 55 bp, Artificial
  Synthetic oligonucleotide
ccaattacttatccaccaagagtgataggcgacagcagattcttatctgcgagcc

SEQ ID NO: 354372 - DNA, 55 bp, Artificial
  Synthetic oligonucleotide
ccaattacttggtgccacgaatactgtcccccaacaaactcttaacctcgatatc

SEQ ID NO: 354373 - DNA, 60 bp, Artificial
  Synthetic oligonucleotide
ccaattagagcaaatcgaattgcagcaggagatagcggagatggtctaagttgggcattg

SEQ ID NO: 354374 - DNA, 59 bp, Artificial
  Synthetic oligonucleotide
ccaattataaggaatagaatcgaacagttaattctacaatgtaaattgtgagagctcta

SEQ ID NO: 354375 - DNA, 59 bp, Artificial
  Synthetic oligonucleotide
ccaattatattatgtgacttgtatacgagtgttgtaattataaactatacaacacgcta

SEQ ID NO: 354376 - DNA, 60 bp, Artificial
  Synthetic oligonucleotide
ccaattatcaccggaagatcagaatgcattgagacgcgattttctggaagagaaatacag

SEQ ID NO: 354377 - DNA, 60 bp, Artificial
  Synthetic oligonucleotide
ccaattatcatgccaagatgtaattcatgggaaagaatacctgtcacatgcttgagctac

SEQ ID NO: 354378 - DNA, 55 bp, Artificial
  Synthetic oligonucleotide
ccaattatggatgtttctcgcaatagtgtaccttgagaacacatccggtccacgc

SEQ ID NO: 354379 - DNA, 54 bp, Artificial
  Synthetic oligonucleotide
ccaattatggtcgttccattcggagggtatggatatcataacgactactattat

SEQ ID NO: 354380 - DNA, 55 bp, Artificial
  Synthetic oligonucleotide
ccaattattcatgcatctccgaattcgaccgaggtaatacctcccatccgccccg

SEQ ID NO: 354381 - DNA, 57 bp, Artificial
  Synthetic oligonucleotide
ccaattcaaaacaagtgcgatgcactcaagacaagagttctctgaagtgcagcgtga

SEQ ID NO: 354382 - DNA, 60 bp, Artificial
  Synthetic oligonucleotide
ccaattcaaagtaagtctgatgtgctcccagaagaaaagaacatcgcgttctcatgaatc

SEQ ID NO: 354383 - DNA, 60 bp, Artificial
  Synthetic oligonucleotide
ccaattcaaatccagaccaaaagtgtattactgctttagcttctgtctgtcagatgttct

SEQ ID NO: 354384 - DNA, 55 bp, Artificial
  Synthetic oligonucleotide
ccaattcaactaagccatgagatgcctgaactgtacttaggtaagtgccgttggt

SEQ ID NO: 354385 - DNA, 60 bp, Artificial
  Synthetic oligonucleotide
ccaattcaaggtcagctcgctatctcgcaacttgaaactgggtacggtgtgcgaatattc

SEQ ID NO: 354386 - DNA, 60 bp, Artificial
  Synthetic oligonucleotide
ccaattcacaagacacagagctctcctttacaattactggagacaacaccaagtggaatg

SEQ ID NO: 354387 - DNA, 58 bp, Artificial
  Synthetic oligonucleotide
ccaattccacagggtctgttggaggtccttcaatgtcaagccacagtgtattagtggg

SEQ ID NO: 354388 - DNA, 60 bp, Artificial
  Synthetic oligonucleotide
ccaattccacgttatagcacatacctaatgctactattgattgtctcatatgcatcagca

SEQ ID NO: 354389 - DNA, 58 bp, Artificial
  Synthetic oligonucleotide
ccaattccattaggacgtcgagatgttcctggacgaagaacaagaataatattcatac

SEQ ID NO: 354390 - DNA, 60 bp, Artificial
  Synthetic oligonucleotide
ccaattctcaggacactgaactctcctttaccatcactggagataacaccaaatggaatg

SEQ ID NO: 354391 - DNA, 60 bp, Artificial
  Synthetic oligonucleotide
ccaattctcatcacagtatcaaccaggtggagtgacgatcacactgttctcagccaacat

SEQ ID NO: 354392 - DNA, 60 bp, Artificial
  Synthetic oligonucleotide
ccaattctgactgcctgagcgttatccatgaaggacccgctaagctatacgctgaaaggt

SEQ ID NO: 354393 - DNA, 50 bp, Artificial
  Synthetic oligonucleotide
ccaattgaaaattgtgatgctgcctgccaaacggttgctggagcactaag

SEQ ID NO: 354394 - DNA, 59 bp, Artificial
  Synthetic oligonucleotide
ccaattgaacaaccatctgtgacgcaggttacattgggtggcaaacctatggacctagc

SEQ ID NO: 354395 - DNA, 60 bp, Artificial
  Synthetic oligonucleotide
ccaattgaagaccctggtctcactaatcagtgcgtaagcaaagagggaggtgccttcatc

SEQ ID NO: 354396 - DNA, 52 bp, Artificial
  Synthetic oligonucleotide
ccaattgaaggggtcacctttctgaagagaggttttaagaaacacccttcca

SEQ ID NO: 354397 - DNA, 58 bp, Artificial
  Synthetic oligonucleotide
ccaattgacactaccatcatggcgaaaaatgaggttttctgcgttcaaccagagaaag

SEQ ID NO: 354398 - DNA, 57 bp, Artificial
  Synthetic oligonucleotide
ccaattgaccaacttcgtattgattgtaacgaggattgtgggcaggggactgaacag

SEQ ID NO: 354399 - DNA, 60 bp, Artificial
  Synthetic oligonucleotide
ccaattgagagacttcatattgctgatagcaagggtggtggaacgtctgggatacagcag

SEQ ID NO: 354400 - DNA, 55 bp, Artificial
  Synthetic oligonucleotide
ccaattgagctcctctcaaacttggtgaatcaattggagtattggagtacaattt

SEQ ID NO: 354401 - DNA, 60 bp, Artificial
  Synthetic oligonucleotide
ccaattgaggctcctcaaactctcgctatgcaattggagactggagtacaatatatacta

SEQ ID NO: 354402 - DNA, 55 bp, Artificial
  Synthetic oligonucleotide
ccaattgatcgtcttctcgagtgtgaaaagatgctacgcattgctgcacgctccg

SEQ ID NO: 354403 - DNA, 60 bp, Artificial
  Synthetic oligonucleotide
ccaattgatgaggaggctgatgccgcctctgacgcggggtcctacagctctatgccacca

SEQ ID NO: 354404 - DNA, 55 bp, Artificial
  Synthetic oligonucleotide
ccaattgatggacaagtcatccagggtcagatacagcattgaccaaattaccacc

SEQ ID NO: 354405 - DNA, 55 bp, Artificial
  Synthetic oligonucleotide
ccaattgatggcccattacctgaggataacgaaccaagcggatatgcacaaacag

SEQ ID NO: 354406 - DNA, 51 bp, Artificial
  Synthetic oligonucleotide
ccaattgatggttgctgaccttgtagcgggcaagccactcggctccgccac

SEQ ID NO: 354407 - DNA, 59 bp, Artificial
  Synthetic oligonucleotide
ccaattgattaatgttacccgacattcaactaggatagctgacacgcctgggcccaaga

SEQ ID NO: 354408 - DNA, 60 bp, Artificial
  Synthetic oligonucleotide
ccaattgcaataaccccaggacaatctagccacagctaactgcccaaatccactacattc

SEQ ID NO: 354409 - DNA, 59 bp, Artificial
  Synthetic oligonucleotide
ccaattggggtgtgacatcgaggctccgtcaaggagttctagagctcaatcagtgaggc

SEQ ID NO: 354410 - DNA, 59 bp, Artificial
  Synthetic oligonucleotide
ccaattgggtcattgactttgtcaatgagttaactacgatgtcggccctaggacatcta

SEQ ID NO: 354411 - DNA, 59 bp, Artificial
  Synthetic oligonucleotide
ccaattggtagcagctctaaaactcttatgaattggtagttatggtagctcttatatag

SEQ ID NO: 354412 - DNA, 55 bp, Artificial
  Synthetic oligonucleotide
ccaattggtttggctaaggggcaggctcacatgaatcttgcggattacaagagag

SEQ ID NO: 354413 - DNA, 55 bp, Artificial
  Synthetic oligonucleotide
ccaattgtcacaaagttgtcgtacatttagggccttacaagctcgcccttaaggc

SEQ ID NO: 354414 - DNA, 60 bp, Artificial
  Synthetic oligonucleotide
ccaattgtgtcagtaccttaatacatgtactttagctgtaccagccaagatgcgtgttat

SEQ ID NO: 354415 - DNA, 55 bp, Artificial
  Synthetic oligonucleotide
ccaatttaaacaaggagatgtacaatagatgtatcacggcaggggttctcgcgac

SEQ ID NO: 354416 - DNA, 58 bp, Artificial
  Synthetic oligonucleotide
ccaatttaatgggccagctatcccttggagatgtcggatttctaaatgatttgagaac

SEQ ID NO: 354417 - DNA, 55 bp, Artificial
  Synthetic oligonucleotide
ccaatttactgccggggttcctggctctgggaaatctaggtctatacagcagggg

SEQ ID NO: 354418 - DNA, 52 bp, Artificial
  Synthetic oligonucleotide
ccaatttagctctaattaagactgtattatccagacttgcaaataagtatgc

SEQ ID NO: 354419 - DNA, 53 bp, Artificial
  Synthetic oligonucleotide
ccaatttcaaggacctttttattctccaatttcagtacagggaccactgggaa

SEQ ID NO: 354420 - DNA, 55 bp, Artificial
  Synthetic oligonucleotide
ccaatttcagatcctcaatggcaacttacatgtcaacaatctgtttcggttcgtt

SEQ ID NO: 354421 - DNA, 57 bp, Artificial
  Synthetic oligonucleotide
ccaatttgcaaatcatatgagtatctcacgacgatcacatcagataagattctcaga

SEQ ID NO: 354422 - DNA, 60 bp, Artificial
  Synthetic oligonucleotide
ccaatttgcacttgggcaggggaccacgctggacaacaaacattcaaatggcacaataca

SEQ ID NO: 354423 - DNA, 52 bp, Artificial
  Synthetic oligonucleotide
ccaatttggtttaaagctctcgggatggtacttgataatttatcctttaacc

SEQ ID NO: 354424 - DNA, 52 bp, Artificial
  Synthetic oligonucleotide
ccaatttgtgagttactagtagactctacagtcaatgctatagtccccatca

SEQ ID NO: 354425 - DNA, 53 bp, Artificial
  Synthetic oligonucleotide
ccaattttacgttggcagcgcacccggagaaggaaaacttcggtatacaaaca

SEQ ID NO: 354426 - DNA, 56 bp, Artificial
  Synthetic oligonucleotide
ccaattttagatggtccttatcaacctactacatttacaccacctactgactattg

SEQ ID NO: 354427 - DNA, 60 bp, Artificial
  Synthetic oligonucleotide
ccaattttggcggggcagccaacaagtgtcaccgatacaagtggacagctgttatcgata

SEQ ID NO: 354428 - DNA, 56 bp, Artificial
  Synthetic oligonucleotide
ccacaaaacccacccctccctttcaggcagcctattgagagctcctgaatttgttg

SEQ ID NO: 354429 - DNA, 60 bp, Artificial
  Synthetic oligonucleotide
ccacaaaaggcaagccagggcacaacactccttgcctttgtaacaggatctcaacagaga

SEQ ID NO: 354430 - DNA, 60 bp, Artificial
  Synthetic oligonucleotide
ccacaaaagtatataagcaagttccacagcaatttgatttcagaaattcgatgcatatgt

SEQ ID NO: 354431 - DNA, 51 bp, Artificial
  Synthetic oligonucleotide
ccacaaaattctgggaatgggcgggagactttcgcgggcctccgacatgca

SEQ ID NO: 354432 - DNA, 60 bp, Artificial
  Synthetic oligonucleotide
ccacaaacaccatcgcttgccgatacacgtgacccacatatgtgggtagttggtcaaggc

SEQ ID NO: 354433 - DNA, 55 bp, Artificial
  Synthetic oligonucleotide
ccacaaacatagagagaatttgcacaaaagggaagagatcaacagacctgggtca

SEQ ID NO: 354434 - DNA, 60 bp, Artificial
  Synthetic oligonucleotide
ccacaaacatgtgggatccattattgcacgaatttcctgaaagcgtgcatggtctaaggt

SEQ ID NO: 354435 - DNA, 60 bp, Artificial
  Synthetic oligonucleotide
ccacaaacgtttggagagatttctccagttgaaattgcagagttgctgcaatggtgcttt

SEQ ID NO: 354436 - DNA, 60 bp, Artificial
  Synthetic oligonucleotide
ccacaaactagacgcatgggagacgctgcgcctcccaccatcaaggcgcgtcgtcccaga

SEQ ID NO: 354437 - DNA, 51 bp, Artificial
  Synthetic oligonucleotide
ccacaaactattgtagttacatcaggatacatgtctttgtaacattggtta

SEQ ID NO: 354438 - DNA, 53 bp, Artificial
  Synthetic oligonucleotide
ccacaaactgccatatgctaattacttccccttttacatagtaaaaaggggaa

SEQ ID NO: 354439 - DNA, 54 bp, Artificial
  Synthetic oligonucleotide
ccacaaagataattgtgacgacccaaacttctggcccataatgttttccctgtc

SEQ ID NO: 354440 - DNA, 56 bp, Artificial
  Synthetic oligonucleotide
ccacaaatacaacaccagtatgaaatactaaactcatttgtggaagcaggaccttt

SEQ ID NO: 354441 - DNA, 58 bp, Artificial
  Synthetic oligonucleotide
ccacaaatagaactcgtgttacgcggcatggacctcccagcgtttatacatagagggc

SEQ ID NO: 354442 - DNA, 57 bp, Artificial
  Synthetic oligonucleotide
ccacaaatctctctagattccgatagggaatcgggagaaaagtggctctcccttagc

SEQ ID NO: 354443 - DNA, 54 bp, Artificial
  Synthetic oligonucleotide
ccacaaatgttgaagttaaccggcgggttatggcccaatcatcggccccaaaca

SEQ ID NO: 354444 - DNA, 56 bp, Artificial
  Synthetic oligonucleotide
ccacaaattaatcctacaccagtggaaatttcacagttaacttacaatgcggatac

SEQ ID NO: 354445 - DNA, 57 bp, Artificial
  Synthetic oligonucleotide
ccacaacaaaacaggaggcaccttttataagatggtaagagatgataaaaccatcta

SEQ ID NO: 354446 - DNA, 51 bp, Artificial
  Synthetic oligonucleotide
ccacaacacactaccaaacccagtgcattaagtgccatggagataggggcc

SEQ ID NO: 354447 - DNA, 57 bp, Artificial
  Synthetic oligonucleotide
ccacaacaccaatgtagaagaccttttaatattatggggaattcatcaccctaatga

SEQ ID NO: 354448 - DNA, 55 bp, Artificial
  Synthetic oligonucleotide
ccacaacagcaatgacagtcacataccttgcaagttgaaacaggtagtaaggtca

SEQ ID NO: 354449 - DNA, 57 bp, Artificial
  Synthetic oligonucleotide
ccacaacagcctcaacccccgcgcatgcaaaccgggcgtgggggctcagccccgcgc

SEQ ID NO: 354450 - DNA, 59 bp, Artificial
  Synthetic oligonucleotide
ccacaacatacaccctctcaccatcggggaatgccccaaatatgtgaaatcaaacagat

SEQ ID NO: 354451 - DNA, 51 bp, Artificial
  Synthetic oligonucleotide
ccacaaccaaaactggggcctattacatctggcaaaccttcatgtccagca

SEQ ID NO: 354452 - DNA, 55 bp, Artificial
  Synthetic oligonucleotide
ccacaaccaggaagcctaaaagcctcattggcctaaccaccacaattattccact

SEQ ID NO: 354453 - DNA, 55 bp, Artificial
  Synthetic oligonucleotide
ccacaaccatcaagcaagcctgcccaaaggtttcttttgagcccatcccaataca

SEQ ID NO: 354454 - DNA, 55 bp, Artificial
  Synthetic oligonucleotide
ccacaacccacacatcaggtccatcagtgatggccaccgaggaaccaacaacacc

SEQ ID NO: 354455 - DNA, 52 bp, Artificial
  Synthetic oligonucleotide
ccacaacccgaggattgtggaggacatcgactaacatgacagccgccaccga

SEQ ID NO: 354456 - DNA, 55 bp, Artificial
  Synthetic oligonucleotide
ccacaaccctccaacttcgactcacctgaatgggcctgtcccacaaatccctcta

SEQ ID NO: 354457 - DNA, 54 bp, Artificial
  Synthetic oligonucleotide
ccacaaccctcctacttaacatcttaggggggtgggtcgcttcgcagttggcta

SEQ ID NO: 354458 - DNA, 53 bp, Artificial
  Synthetic oligonucleotide
ccacaaccgacacgatcactgagagcagagggatgcaaacgactggtgcgttt

SEQ ID NO: 354459 - DNA, 51 bp, Artificial
  Synthetic oligonucleotide
ccacaaccgaccgattggttgactttacggatggttcaatcctccgtgcgt

SEQ ID NO: 354460 - DNA, 56 bp, Artificial
  Synthetic oligonucleotide
ccacaacggagaccttgagttggttcttaattattgccgtaaggtcgatgggcaga

SEQ ID NO: 354461 - DNA, 55 bp, Artificial
  Synthetic oligonucleotide
ccacaactccggctacttagctattgttgtgagatttcctaaaataaagtcgctg

SEQ ID NO: 354462 - DNA, 60 bp, Artificial
  Synthetic oligonucleotide
ccacaactcgagggattttcagctgaatcgaggaaattacttctcattgttcaggcactc

SEQ ID NO: 354463 - DNA, 55 bp, Artificial
  Synthetic oligonucleotide
ccacaactctataacgctatcaacaaactgttagaccgtcacaagttccaaatcg

SEQ ID NO: 354464 - DNA, 51 bp, Artificial
  Synthetic oligonucleotide
ccacaactgtagtcaggaatggatcatttcatagctgcacggaccattacc

SEQ ID NO: 354465 - DNA, 59 bp, Artificial
  Synthetic oligonucleotide
ccacaacttgaagggttttcagctgagtcaagaaagctactcctcattgttcaggcact

SEQ ID NO: 354466 - DNA, 58 bp, Artificial
  Synthetic oligonucleotide
ccacaactttccgccaaattctgcaagatcccagggtgagaggcctgtatttccctgc

SEQ ID NO: 354467 - DNA, 52 bp, Artificial
  Synthetic oligonucleotide
ccacaagacacaattggtccaaacgcggcacttctccttcccacgcagattg

SEQ ID NO: 354468 - DNA, 55 bp, Artificial
  Synthetic oligonucleotide
ccacaagacgcccttacgggggataaggacgccttcacgttagtcgctcgtctga

SEQ ID NO: 354469 - DNA, 55 bp, Artificial
  Synthetic oligonucleotide
ccacaagagactgtgcatgtcaaaattaggttcatggtgtcagatggtttctcta

SEQ ID NO: 354470 - DNA, 55 bp, Artificial
  Synthetic oligonucleotide
ccacaagagatcaccaaagggtacttaggtgggtacataataggctcaactgccc

SEQ ID NO: 354471 - DNA, 60 bp, Artificial
  Synthetic oligonucleotide
ccacaagagcttacagtgtccgatagtgtgctggtctttgaactcacggatatagtccac

SEQ ID NO: 354472 - DNA, 55 bp, Artificial
  Synthetic oligonucleotide
ccacaagatactgaaggttgtattctacctggtaaaaccagaggtgctggcattg

SEQ ID NO: 354473 - DNA, 55 bp, Artificial
  Synthetic oligonucleotide
ccacaagatattggagcacaattttagtcggagggtgcggagttttaacgttatc

SEQ ID NO: 354474 - DNA, 55 bp, Artificial
  Synthetic oligonucleotide
ccacaagatggtggatgatcttgagttacagaggggaaccttgtctaaagtggcc

SEQ ID NO: 354475 - DNA, 50 bp, Artificial
  Synthetic oligonucleotide
ccacaagatttaaactccatgctaaatgcggtggggggacatcaagcggc

SEQ ID NO: 354476 - DNA, 60 bp, Artificial
  Synthetic oligonucleotide
ccacaagcacaaccttttcaacatcacgcaacagttggacttacattacgcattgaatct

SEQ ID NO: 354477 - DNA, 60 bp, Artificial
  Synthetic oligonucleotide
ccacaagcagcccatagacgcgctccctggccccatagtacaatcgcgccatactcagtg

SEQ ID NO: 354478 - DNA, 55 bp, Artificial
  Synthetic oligonucleotide
ccacaagcagtgaagctgatatcggaaggagaacccaaaagaaacaaaccccgac

SEQ ID NO: 354479 - DNA, 60 bp, Artificial
  Synthetic oligonucleotide
ccacaagcataagagataaggtgcagaaagaatatgcacttttttatagtcttgatgtaa

SEQ ID NO: 354480 - DNA, 51 bp, Artificial
  Synthetic oligonucleotide
ccacaagctatggattcatgtatgatccagttgcttgtgcgtttgaatgtc

SEQ ID NO: 354481 - DNA, 55 bp, Artificial
  Synthetic oligonucleotide
ccacaagctttgtcgcctctcccggcgttacagggatgtaaccacaagatgaacc

SEQ ID NO: 354482 - DNA, 57 bp, Artificial
  Synthetic oligonucleotide
ccacaaggaagatcaaccctccgcctgcgaattggtctcttcttcgctattttgtgt

SEQ ID NO: 354483 - DNA, 55 bp, Artificial
  Synthetic oligonucleotide
ccacaaggatcaatggatggtctgtagaattagacaatttgtcaaccagtgggga

SEQ ID NO: 354484 - DNA, 58 bp, Artificial
  Synthetic oligonucleotide
ccacaaggatcactagcaccaacaaatctagaatacaaaatccaatggtaccaaacac

SEQ ID NO: 354485 - DNA, 58 bp, Artificial
  Synthetic oligonucleotide
ccacaaggctctatacttacaccatcgtaactctgacgttgcgacgttcttcctatcc

SEQ ID NO: 354486 - DNA, 52 bp, Artificial
  Synthetic oligonucleotide
ccacaagggagttgcagcccaaacctttagggggaaagacaacctacctcgc

SEQ ID NO: 354487 - DNA, 53 bp, Artificial
  Synthetic oligonucleotide
ccacaaggtactataacccctaaaaaccctacagctcagtcccaggtaatgaa

SEQ ID NO: 354488 - DNA, 53 bp, Artificial
  Synthetic oligonucleotide
ccacaaggttaatttggagaccccgataggtaaatgagacaccaataccccca

SEQ ID NO: 354489 - DNA, 58 bp, Artificial
  Synthetic oligonucleotide
ccacaagttgctgttaatctttcaaactgccatgttttaattgaatcacatgtctgtg

SEQ ID NO: 354490 - DNA, 55 bp, Artificial
  Synthetic oligonucleotide
ccacaagtttatcacttgtttacctctggaggagagaacatacgggcttgactcc

SEQ ID NO: 354491 - DNA, 55 bp, Artificial
  Synthetic oligonucleotide
ccacaataactactcaagatgcacttaatacagtcttagcatatggtgaatggcc

SEQ ID NO: 354492 - DNA, 60 bp, Artificial
  Synthetic oligonucleotide
ccacaatactatggcgcgctttgaggatccaacacggcgaccctacaagctacctgatct

SEQ ID NO: 354493 - DNA, 60 bp, Artificial
  Synthetic oligonucleotide
ccacaatatgaagtaattgagggaatgccaagaaacatagcatggatggtccaaagatcc

SEQ ID NO: 354494 - DNA, 55 bp, Artificial
  Synthetic oligonucleotide
ccacaatatttaggggtgaaccacaacatgtagtatggaatgtttaaaaggcggc

SEQ ID NO: 354495 - DNA, 55 bp, Artificial
  Synthetic oligonucleotide
ccacaatcacaacacaggaggcagccaatatcactgtaggttatggagaatggcc

SEQ ID NO: 354496 - DNA, 60 bp, Artificial
  Synthetic oligonucleotide
ccacaatcatgtagcaagaacaacacacatcattactacaaaggaccatctaacacaaca

SEQ ID NO: 354497 - DNA, 50 bp, Artificial
  Synthetic oligonucleotide
ccacaatggggcagctgatctcgtttttcggggaaattccatcaataata

SEQ ID NO: 354498 - DNA, 60 bp, Artificial
  Synthetic oligonucleotide
ccacaatgtcagcaaatatgcatttgggaactgccccaaatacgttggtgtgaagagtct

SEQ ID NO: 354499 - DNA, 55 bp, Artificial
  Synthetic oligonucleotide
ccacaatgtcatcgccgtggacacaacagtcatgttatcaacgttcaaacccgtg

SEQ ID NO: 354500 - DNA, 56 bp, Artificial
  Synthetic oligonucleotide
ccacaatgttcatccccttaccattggagagtgccccaagtatgttaagtcggaaa

SEQ ID NO: 354501 - DNA, 55 bp, Artificial
  Synthetic oligonucleotide
ccacaattagaagggttttcagcggagtcaagaaaactgctccttgttgttcagg

SEQ ID NO: 354502 - DNA, 55 bp, Artificial
  Synthetic oligonucleotide
ccacaattagcattcgcaataggtaatgcaatcaaatgcttgtctagagcaccgt

SEQ ID NO: 354503 - DNA, 56 bp, Artificial
  Synthetic oligonucleotide
ccacaattagtaatttgagcgaattcaaagcattactggatgataacacacgcaag

SEQ ID NO: 354504 - DNA, 57 bp, Artificial
  Synthetic oligonucleotide
ccacaatttcgttattccaacacgagatatcctctacagaaactaattacacattcc

SEQ ID NO: 354505 - DNA, 55 bp, Artificial
  Synthetic oligonucleotide
ccacacaaataattatgtggacccagtgacctagcccacatcgtcttccccgtac

SEQ ID NO: 354506 - DNA, 60 bp, Artificial
  Synthetic oligonucleotide
ccacacaaatgccaagtacttcatttacatcatatagtgccagtgtaagttatgacaatg

SEQ ID NO: 354507 - DNA, 60 bp, Artificial
  Synthetic oligonucleotide
ccacacaaatgggaaaagtactgtgttcttgaggtgggagatatgctcctgaggactgca

SEQ ID NO: 354508 - DNA, 57 bp, Artificial
  Synthetic oligonucleotide
ccacacaacgtctagtgtgggcctgtatagggatggaggtgggccgtgggcagccct

SEQ ID NO: 354509 - DNA, 55 bp, Artificial
  Synthetic oligonucleotide
ccacacaagaagagacgttccttacgtccactctatgcctgtactatcctactga

SEQ ID NO: 354510 - DNA, 55 bp, Artificial
  Synthetic oligonucleotide
ccacacaagagattgtgatttccatccaacatctcctcactaaacgttatactaa

SEQ ID NO: 354511 - DNA, 53 bp, Artificial
  Synthetic oligonucleotide
ccacacaagcccatgggcatggttgaaatcaaaagtgtgtagcttccttggcc

SEQ ID NO: 354512 - DNA, 60 bp, Artificial
  Synthetic oligonucleotide
ccacacaagtgggaaaagtactgtgtccttgaaataggagacatgctcctacggactgca

SEQ ID NO: 354513 - DNA, 55 bp, Artificial
  Synthetic oligonucleotide
ccacacaatccttcccagagcactccaaggaggttccagctcttacagcagtcga

SEQ ID NO: 354514 - DNA, 55 bp, Artificial
  Synthetic oligonucleotide
ccacacaatttgagatcattgaagcaagtgcacctcagattcttgcggagatgga

SEQ ID NO: 354515 - DNA, 57 bp, Artificial
  Synthetic oligonucleotide
ccacacacaaatacatccttaatttccactaccacatggtccacccctatataagga

SEQ ID NO: 354516 - DNA, 56 bp, Artificial
  Synthetic oligonucleotide
ccacacacaacactgctcagacagggtgctgtacacttgtctctccagagctgtgg

SEQ ID NO: 354517 - DNA, 54 bp, Artificial
  Synthetic oligonucleotide
ccacacacccagtaagactaagttacaacctagtgtattttatgatgttttccc

SEQ ID NO: 354518 - DNA, 56 bp, Artificial
  Synthetic oligonucleotide
ccacacacgcagattggactaattgtgtatgggaggattacagcagagatctcctt

SEQ ID NO: 354519 - DNA, 56 bp, Artificial
  Synthetic oligonucleotide
ccacacactattggtttgggtcaaggccttgtcattggttcagtggagttaccacc

SEQ ID NO: 354520 - DNA, 55 bp, Artificial
  Synthetic oligonucleotide
ccacacactgatgacaactcacaagatgtgtgccaattggagtaccattccaaac

SEQ ID NO: 354521 - DNA, 60 bp, Artificial
  Synthetic oligonucleotide
ccacacagaaaatgccttgttgttgtatatggcatgtactcatgctagtaatccagtgta

SEQ ID NO: 354522 - DNA, 55 bp, Artificial
  Synthetic oligonucleotide
ccacacagaaggctacttccctgactggcagaactacacaccagggccaggggtc

SEQ ID NO: 354523 - DNA, 55 bp, Artificial
  Synthetic oligonucleotide
ccacacagaatcattttgtaaattacatattagctaggcacggttgcgacgagga

SEQ ID NO: 354524 - DNA, 60 bp, Artificial
  Synthetic oligonucleotide
ccacacagagcacaatgggatgctgtgtgcaacaaatctgggacatcctctaattctaga

SEQ ID NO: 354525 - DNA, 55 bp, Artificial
  Synthetic oligonucleotide
ccacacagataattatgtggacccaaagacctagcccacatcgtctttcctgttc

SEQ ID NO: 354526 - DNA, 55 bp, Artificial
  Synthetic oligonucleotide
ccacacagataattatgtgggcctaatgatctagcccaaactgttttacctattc

SEQ ID NO: 354527 - DNA, 57 bp, Artificial
  Synthetic oligonucleotide
ccacacagatagttgtgtgggcctagtgacctagcccacattgtcttcccggttcga

SEQ ID NO: 354528 - DNA, 50 bp, Artificial
  Synthetic oligonucleotide
ccacacaggaactagatatgtctgaattggccgatcttatactgaacgaa

SEQ ID NO: 354529 - DNA, 58 bp, Artificial
  Synthetic oligonucleotide
ccacacatagactgcgcgttttacgaggtgcctcccaagatctggtctctcctggggg

SEQ ID NO: 354530 - DNA, 50 bp, Artificial
  Synthetic oligonucleotide
ccacacatgcatgttggcaattcattgacattcatatgagaaatggattt

SEQ ID NO: 354531 - DNA, 57 bp, Artificial
  Synthetic oligonucleotide
ccacacatttaagcaagttagacgaccttacgtggacccaacattggttgtggcagc

SEQ ID NO: 354532 - DNA, 55 bp, Artificial
  Synthetic oligonucleotide
ccacaccaacaggagtcagacacttagcaattgggaacctgatcataccagggga

SEQ ID NO: 354533 - DNA, 55 bp, Artificial
  Synthetic oligonucleotide
ccacaccaatgcctattaccggtgtggctgggagtttctattggaggtcaatggc

SEQ ID NO: 354534 - DNA, 59 bp, Artificial
  Synthetic oligonucleotide
ccacaccagctcatgaaccgatgaacacaacagatgattccacaggccactatatgacc

SEQ ID NO: 354535 - DNA, 60 bp, Artificial
  Synthetic oligonucleotide
ccacaccaggacagagaccctggtcattggggaatgatttagatcaatcagtgatccctg

SEQ ID NO: 354536 - DNA, 56 bp, Artificial
  Synthetic oligonucleotide
ccacaccatgtggcacgttacaaaaggagccgcactgaggagcggtgagggaagac

SEQ ID NO: 354537 - DNA, 54 bp, Artificial
  Synthetic oligonucleotide
ccacacccaatcacagtagagtgtgtgagcaagtcacaaggtgacttcgtccat

SEQ ID NO: 354538 - DNA, 58 bp, Artificial
  Synthetic oligonucleotide
ccacacccgagcaagcgagtccaaacgacagccccccagccacatccaccgaccagcc

SEQ ID NO: 354539 - DNA, 58 bp, Artificial
  Synthetic oligonucleotide
ccacacccgccacatcacgactgagacacttaccgaaggaatttcgacatgtttccag

SEQ ID NO: 354540 - DNA, 57 bp, Artificial
  Synthetic oligonucleotide
ccacacccgtctcgaaggtgcgtcgacggctgaacttcgacagcccctacaccagcc

SEQ ID NO: 354541 - DNA, 55 bp, Artificial
  Synthetic oligonucleotide
ccacaccctgctgagagcagatgaaaattctagtagacacagaatggcgctggat

SEQ ID NO: 354542 - DNA, 55 bp, Artificial
  Synthetic oligonucleotide
ccacaccgcgctctagccacagtctcgccgtccaaccctcaaattgcatcaacgc

SEQ ID NO: 354543 - DNA, 55 bp, Artificial
  Synthetic oligonucleotide
ccacaccggtacatgggtaatgcgacaagttgacaccagcaactatgctataatc

SEQ ID NO: 354544 - DNA, 55 bp, Artificial
  Synthetic oligonucleotide
ccacaccgtcaggtgcgttcgagggttcgagactcttcgtgtactgagctccgga

SEQ ID NO: 354545 - DNA, 59 bp, Artificial
  Synthetic oligonucleotide
ccacaccgtcgaatcgaaaacctctggatatggatgaccgacatggtcaaacactatcc

SEQ ID NO: 354546 - DNA, 60 bp, Artificial
  Synthetic oligonucleotide
ccacaccgttgaaaacgtgagcgtcctccaggcagcaaaggcacagatccttgagttcaa

SEQ ID NO: 354547 - DNA, 58 bp, Artificial
  Synthetic oligonucleotide
ccacaccgttgttttgaccttgtctggactgaaacccaagggatctcagtatagctga

SEQ ID NO: 354548 - DNA, 60 bp, Artificial
  Synthetic oligonucleotide
ccacacctcagtagttttctgctggcataaagctaaacacttatgctctccagtcgtatt

SEQ ID NO: 354549 - DNA, 55 bp, Artificial
  Synthetic oligonucleotide
ccacacctgagtcgtcccaactagtgcacgctatcactggtctcgaaagcgcact

SEQ ID NO: 354550 - DNA, 55 bp, Artificial
  Synthetic oligonucleotide
ccacaccttcagagttattataacgacccttcactgcataggagtgttcccctgc

SEQ ID NO: 354551 - DNA, 58 bp, Artificial
  Synthetic oligonucleotide
ccacaccttcgacgcaattcaagcgactcgtggtgcggtcgttgccaaatggtgggaa

SEQ ID NO: 354552 - DNA, 56 bp, Artificial
  Synthetic oligonucleotide
ccacacgaacacgaaatggctcacgagtctataagttttcgggtgacgagaccgac

SEQ ID NO: 354553 - DNA, 60 bp, Artificial
  Synthetic oligonucleotide
ccacacgaacagtgtcatgttctggttggttagagatcgtagaccatatggtactcctct

SEQ ID NO: 354554 - DNA, 55 bp, Artificial
  Synthetic oligonucleotide
ccacacgaccggttacgtcaccaacaataacacagacggctctcatatcttatac

SEQ ID NO: 354555 - DNA, 60 bp, Artificial
  Synthetic oligonucleotide
ccacacgagatgtcgacgtattcataggcgcctgttctgaaccgatctatcgcatatata

SEQ ID NO: 354556 - DNA, 55 bp, Artificial
  Synthetic oligonucleotide
ccacacgcaccatgtatatcgcaacaagacttattgtgtgcttggtgggatgccc

SEQ ID NO: 354557 - DNA, 55 bp, Artificial
  Synthetic oligonucleotide
ccacacgccacatccaatctccttccatcatcggagcagttgactaccattgcca

SEQ ID NO: 354558 - DNA, 58 bp, Artificial
  Synthetic oligonucleotide
ccacacgccagcctacaggaactcttcttgcccgaatgtccctggggccaggcttgaa

SEQ ID NO: 354559 - DNA, 60 bp, Artificial
  Synthetic oligonucleotide
ccacacgccgtcagcattataaccaagccgcaacacaggcgctacatcgcattgaagggt

SEQ ID NO: 354560 - DNA, 52 bp, Artificial
  Synthetic oligonucleotide
ccacacgcgtgccactgctgtcattggagggccgactatttaatagggcagc

SEQ ID NO: 354561 - DNA, 55 bp, Artificial
  Synthetic oligonucleotide
ccacacggagaagtgcgtcattttggatgctcccggtttgttgcgcgaggtcggc

SEQ ID NO: 354562 - DNA, 55 bp, Artificial
  Synthetic oligonucleotide
ccacacggaggagcttacagagacggcaccaaagcaatcttgtacaactccccaa

SEQ ID NO: 354563 - DNA, 57 bp, Artificial
  Synthetic oligonucleotide
ccacacggaggtgagcggagaaaccacctccagaggaccccttcagcgaacagaaga

SEQ ID NO: 354564 - DNA, 57 bp, Artificial
  Synthetic oligonucleotide
ccacacggcggtatttaggggtggagccctcgggctcagggcatatggaccacagtg

SEQ ID NO: 354565 - DNA, 55 bp, Artificial
  Synthetic oligonucleotide
ccacacggggagatactgaaatggcagtttgacagatcactgggcaacacccatg

SEQ ID NO: 354566 - DNA, 55 bp, Artificial
  Synthetic oligonucleotide
ccacacgttactaacaggacaatggttcttgttatgtttgcggtcgctagtttcc

SEQ ID NO: 354567 - DNA, 50 bp, Artificial
  Synthetic oligonucleotide
ccacactaagggcaacaaaaactatgcactacactctgacgactacaccc

SEQ ID NO: 354568 - DNA, 55 bp, Artificial
  Synthetic oligonucleotide
ccacactacttaaccccacaagatgcaaccgccatagacaaaccaacacaacccg

SEQ ID NO: 354569 - DNA, 55 bp, Artificial
  Synthetic oligonucleotide
ccacactatataataaactacacttccgaatggctgagtttatgccgccagacgg

SEQ ID NO: 354570 - DNA, 56 bp, Artificial
  Synthetic oligonucleotide
ccacactattgctaggtgtgacctaacataatgggacagttaatcagtttctttca

SEQ ID NO: 354571 - DNA, 59 bp, Artificial
  Synthetic oligonucleotide
ccacactcacgttcctgtgtgcgcgggacccgatggactctcgttcacccacttacagc

SEQ ID NO: 354572 - DNA, 55 bp, Artificial
  Synthetic oligonucleotide
ccacactcaggaggggatctagaagttacaacacatagctttaattgtcaaggag

SEQ ID NO: 354573 - DNA, 55 bp, Artificial
  Synthetic oligonucleotide
ccacactccatgggcccgcaattctcgttccacaactgggactacagacggggcc

SEQ ID NO: 354574 - DNA, 60 bp, Artificial
  Synthetic oligonucleotide
ccacactgtaggcaggcaaatgttccttagaaggttgattatttggttgcatatcataac

SEQ ID NO: 354575 - DNA, 60 bp, Artificial
  Synthetic oligonucleotide
ccacactgttcatcgtttctccaccctggacagtcatgcaagcaattgtgagagctggca

SEQ ID NO: 354576 - DNA, 57 bp, Artificial
  Synthetic oligonucleotide
ccacacttaaaactcgcagtggtaaacaaattggagctagaatacattattatcagg

SEQ ID NO: 354577 - DNA, 55 bp, Artificial
  Synthetic oligonucleotide
ccacacttatgaggcactgaagaaccaaagggtttaatgctgatctgaatggtgc

SEQ ID NO: 354578 - DNA, 51 bp, Artificial
  Synthetic oligonucleotide
ccacacttcggtggggctataaggttccgtgttgtatccctcttactttca

SEQ ID NO: 354579 - DNA, 57 bp, Artificial
  Synthetic oligonucleotide
ccacacttctccttacctgactctcaacttcaggtttaagagttgtcagcaagggag

SEQ ID NO: 354580 - DNA, 55 bp, Artificial
  Synthetic oligonucleotide
ccacacttcttaagcttgagatactcgttatcaagtgcccgtttagttttggcgt

SEQ ID NO: 354581 - DNA, 55 bp, Artificial
  Synthetic oligonucleotide
ccacacttggagaggtcacacgtggacacatgggtggagctaacaccatgtacgc

SEQ ID NO: 354582 - DNA, 54 bp, Artificial
  Synthetic oligonucleotide
ccacacttggtaccggataggccacgaacggtctcctgtcttcggacccttcgc

SEQ ID NO: 354583 - DNA, 55 bp, Artificial
  Synthetic oligonucleotide
ccacacttgtggaccttatgctcacacagccatcctctagtaagtttgcaagacg

SEQ ID NO: 354584 - DNA, 54 bp, Artificial
  Synthetic oligonucleotide
ccacacttgttgtcaaagtacaggttaattcccaacccttccagcaaggtagat

SEQ ID NO: 354585 - DNA, 60 bp, Artificial
  Synthetic oligonucleotide
ccacagaaaaggtcgacacaatcctggagcgaaacgtcactgtgactcatgccaaggaca

SEQ ID NO: 354586 - DNA, 56 bp, Artificial
  Synthetic oligonucleotide
ccacagaaacgacgacaaccagacgtcacagactccagaaacaccaagtaccccaa

SEQ ID NO: 354587 - DNA, 54 bp, Artificial
  Synthetic oligonucleotide
ccacagaaagcatagtaatttggggaaagactcctaagtttagactacccatac

SEQ ID NO: 354588 - DNA, 57 bp, Artificial
  Synthetic oligonucleotide
ccacagaaagtccctaagactttctgcgttagagctgcaatggggataagtaaggaa

SEQ ID NO: 354589 - DNA, 55 bp, Artificial
  Synthetic oligonucleotide
ccacagaacgcgcaagtcactccaatccaactaccccagaccgggcagaacccca

SEQ ID NO: 354590 - DNA, 55 bp, Artificial
  Synthetic oligonucleotide
ccacagaactcctttcttctacagccgcgggtacccactgcagctccgacatccg

SEQ ID NO: 354591 - DNA, 58 bp, Artificial
  Synthetic oligonucleotide
ccacagaacttgctataccagaagcagtaaaacccaccacagacttatttgagtacca

SEQ ID NO: 354592 - DNA, 60 bp, Artificial
  Synthetic oligonucleotide
ccacagacaccattccagatagcagaacaacaaatacagaactttcaggtagcgaattgg

SEQ ID NO: 354593 - DNA, 55 bp, Artificial
  Synthetic oligonucleotide
ccacagacaccatttcaaatagcagaacaacagatacaaaacttccaagtagcga

SEQ ID NO: 354594 - DNA, 51 bp, Artificial
  Synthetic oligonucleotide
ccacagaccctcctcaggtgttgtaatatgaaggatacgcttgtcatcgta

SEQ ID NO: 354595 - DNA, 58 bp, Artificial
  Synthetic oligonucleotide
ccacagagaatgtgtttatacaacctccttttaaattgaaagcatcacctactgatta

SEQ ID NO: 354596 - DNA, 55 bp, Artificial
  Synthetic oligonucleotide
ccacagagatacaagataagaagaagacagtatacgcgcttttctatagacttga

SEQ ID NO: 354597 - DNA, 55 bp, Artificial
  Synthetic oligonucleotide
ccacagaggaatcaatagaattgcagcccctaggacgttcccagtcctttcctac

SEQ ID NO: 354598 - DNA, 55 bp, Artificial
  Synthetic oligonucleotide
ccacagagtctagactcgtgggggacttctctaaattttctggtgggagcacccg

SEQ ID NO: 354599 - DNA, 57 bp, Artificial
  Synthetic oligonucleotide
ccacagagtctagactcgtggtggctttctctcaattttctagggggagcacccacg

SEQ ID NO: 354600 - DNA, 58 bp, Artificial
  Synthetic oligonucleotide
ccacagataaacacaatactggggttggattgttaccgtcggcgcttcatatgacaac

SEQ ID NO: 354601 - DNA, 55 bp, Artificial
  Synthetic oligonucleotide
ccacagataccctgaaggggacagcctttgcaggcgtcccaatgtacagctcctt

SEQ ID NO: 354602 - DNA, 54 bp, Artificial
  Synthetic oligonucleotide
ccacagatccatggcataggagggggaatccccatgcgaaaatctcgtgacatg

SEQ ID NO: 354603 - DNA, 55 bp, Artificial
  Synthetic oligonucleotide
ccacagattgctcgccattatcaccttctgctcttatacggaagcgtaacttcct

SEQ ID NO: 354604 - DNA, 59 bp, Artificial
  Synthetic oligonucleotide
ccacagcaatttgatttcaggaattcgatgcatatgttaacatcaaaccttactttcac

SEQ ID NO: 354605 - DNA, 60 bp, Artificial
  Synthetic oligonucleotide
ccacagcacacagattggaggaataaggatggtagacatccttaggcagaatccaacaga

SEQ ID NO: 354606 - DNA, 59 bp, Artificial
  Synthetic oligonucleotide
ccacagcacacagattggagggataaggatggtagacattcttcggcaaaacccaacag

SEQ ID NO: 354607 - DNA, 55 bp, Artificial
  Synthetic oligonucleotide
ccacagcaccacgaactgagaggatgatgcgtattaattggaagaagtggtggca

SEQ ID NO: 354608 - DNA, 59 bp, Artificial
  Synthetic oligonucleotide
ccacagcactttgtagtatctgttctacacaaaccagctgtgtttagtcctgttttctc

SEQ ID NO: 354609 - DNA, 55 bp, Artificial
  Synthetic oligonucleotide
ccacagcaggttcccttggaacagagaaagagagggtgccagtggtgcaataacc

SEQ ID NO: 354610 - DNA, 59 bp, Artificial
  Synthetic oligonucleotide
ccacagccacggtaaatgaactaatgctaaatagcaaatcaagaatagcgttgtacggc

SEQ ID NO: 354611 - DNA, 60 bp, Artificial
  Synthetic oligonucleotide
ccacagccatacggatcagagcaattgcaagggtcaggtgctagggtgaggttccctttg

SEQ ID NO: 354612 - DNA, 52 bp, Artificial
  Synthetic oligonucleotide
ccacagcccttcgccgctatggtcatctccctcctcacataccggtcgacta

SEQ ID NO: 354613 - DNA, 60 bp, Artificial
  Synthetic oligonucleotide
ccacagccgagaggtgctgcgaacggattagggcaagcaggtaagactcagacaatcacg

SEQ ID NO: 354614 - DNA, 60 bp, Artificial
  Synthetic oligonucleotide
ccacagcgcatatctgaagcttggaacaccgtcatcataaggcacatgctttctgatggc

SEQ ID NO: 354615 - DNA, 55 bp, Artificial
  Synthetic oligonucleotide
ccacagcgccactggtttgtgcaagaatgcaattgctccatctaccccggtcacg

SEQ ID NO: 354616 - DNA, 55 bp, Artificial
  Synthetic oligonucleotide
ccacagcggggagctcaccgaatgtgaaccctaaagggaccatctctatcggcgg

SEQ ID NO: 354617 - DNA, 59 bp, Artificial
  Synthetic oligonucleotide
ccacagctatcgacatcgtcacaacagtcttcggccccttacgccttcgcgtaggcacc

SEQ ID NO: 354618 - DNA, 55 bp, Artificial
  Synthetic oligonucleotide
ccacagctccaaccattcgccagtctgaagaagttatgagtccttttagaactgc

SEQ ID NO: 354619 - DNA, 58 bp, Artificial
  Synthetic oligonucleotide
ccacaggaacagcaggctatggctcattttgaaccagctagaaggcaatgcagagagt

SEQ ID NO: 354620 - DNA, 55 bp, Artificial
  Synthetic oligonucleotide
ccacaggagcacatggagcagaaactattcctcattgcagttgtacgtcaggtgt

SEQ ID NO: 354621 - DNA, 55 bp, Artificial
  Synthetic oligonucleotide
ccacaggaggagatctaaaccagtatctgaaaatcagtagaagactgctggaagg

SEQ ID NO: 354622 - DNA, 52 bp, Artificial
  Synthetic oligonucleotide
ccacaggagtcaattgagtggcagcctataggggagggcaccggtgacttag

SEQ ID NO: 354623 - DNA, 58 bp, Artificial
  Synthetic oligonucleotide
ccacaggagttcgtctcgtggttcgcgagcaacggattcacggtgcagtcggacgccc

SEQ ID NO: 354624 - DNA, 56 bp, Artificial
  Synthetic oligonucleotide
ccacaggagtttgtaaaactctcatgggtggacaaggttcttcctgacatgtttac

SEQ ID NO: 354625 - DNA, 55 bp, Artificial
  Synthetic oligonucleotide
ccacaggataagacttaatctttctaacgaagagataatctatggggccactctt

SEQ ID NO: 354626 - DNA, 51 bp, Artificial
  Synthetic oligonucleotide
ccacaggataatcttatgtacaagaacatgtgtcctgatccaaatactgag

SEQ ID NO: 354627 - DNA, 55 bp, Artificial
  Synthetic oligonucleotide
ccacaggatagaacatacaatcaagatcctaacaatgcgtgagaagagaataagg

SEQ ID NO: 354628 - DNA, 57 bp, Artificial
  Synthetic oligonucleotide
ccacaggcagattttaaccctctgattcacaccagacgatactttcctacacgaaac

SEQ ID NO: 354629 - DNA, 60 bp, Artificial
  Synthetic oligonucleotide
ccacaggcagttgtgggcacgggctggacctcgaagggaacgattacagtgctggacatg

SEQ ID NO: 354630 - DNA, 55 bp, Artificial
  Synthetic oligonucleotide
ccacaggcggttactggcacaggctggacagcaaagggtcagatcacggtgctgg

SEQ ID NO: 354631 - DNA, 55 bp, Artificial
  Synthetic oligonucleotide
ccacagggatgcaggatgtttgctctaagtcaaggcacaacactcagagggcggc

SEQ ID NO: 354632 - DNA, 55 bp, Artificial
  Synthetic oligonucleotide
ccacaggggagacaaaattgggaggtggcaatcatggatgaggcccactggacgg

SEQ ID NO: 354633 - DNA, 50 bp, Artificial
  Synthetic oligonucleotide
ccacagggggactgttagtggtgatatgcagagaaaataccacactagtg

SEQ ID NO: 354634 - DNA, 58 bp, Artificial
  Synthetic oligonucleotide
ccacagggtaaatcaactctccttcgtctgattgccctcttggctattcggtgttgta

SEQ ID NO: 354635 - DNA, 57 bp, Artificial
  Synthetic oligonucleotide
ccacagggtagctattctggagtccttagaccttcaagaaggacttgaagtggtatc

SEQ ID NO: 354636 - DNA, 55 bp, Artificial
  Synthetic oligonucleotide
ccacagtaaactggattatcaagtgtttgtcttagggtacgataagaccacggta

SEQ ID NO: 354637 - DNA, 60 bp, Artificial
  Synthetic oligonucleotide
ccacagtaataagagatagaaagcagacagggtatgcacttttttatagacttgatgtag

SEQ ID NO: 354638 - DNA, 55 bp, Artificial
  Synthetic oligonucleotide
ccacagtagaaccaattttagatggtccttatcaacctactacatttacaccacc

SEQ ID NO: 354639 - DNA, 55 bp, Artificial
  Synthetic oligonucleotide
ccacagtcaagcaggtttatgctggagatgacatggcattagatggagttgtcca

SEQ ID NO: 354640 - DNA, 57 bp, Artificial
  Synthetic oligonucleotide
ccacagtcacctactgcacagctaaaaacagtattacaggctaataaccaaaaagcc

SEQ ID NO: 354641 - DNA, 60 bp, Artificial
  Synthetic oligonucleotide
ccacagtcataggatggccgttgatgtagcagttaaagtgatgacgtcattagccatagt

SEQ ID NO: 354642 - DNA, 55 bp, Artificial
  Synthetic oligonucleotide
ccacagtccagactctagtggctcaagctcctgtggatgaggtcagcttccactc

SEQ ID NO: 354643 - DNA, 55 bp, Artificial
  Synthetic oligonucleotide
ccacagtcccattgtcaatccctagtgactggtttgtgcagtctgggcctgacat

SEQ ID NO: 354644 - DNA, 60 bp, Artificial
  Synthetic oligonucleotide
ccacagtcgatccagactcagttctggcggccattagtgttggaactttgcgccagcaca

SEQ ID NO: 354645 - DNA, 57 bp, Artificial
  Synthetic oligonucleotide
ccacagtcgccagttccctggtcttgttagtctccctgggggcaatcagtttctgga

SEQ ID NO: 354646 - DNA, 60 bp, Artificial
  Synthetic oligonucleotide
ccacagtctcgcaatatggctcttgacctatgtatgactagcacgataaacgagatgaca

SEQ ID NO: 354647 - DNA, 59 bp, Artificial
  Synthetic oligonucleotide
ccacagtctgctggtgggctcaaatagagcacaccacaggagtaccttacaacccacag

SEQ ID NO: 354648 - DNA, 55 bp, Artificial
  Synthetic oligonucleotide
ccacagtgcctgacaaaacaccagctattctcatagaaatctgggattcagggtc

SEQ ID NO: 354649 - DNA, 55 bp, Artificial
  Synthetic oligonucleotide
ccacagtggttgacaacacgctcatggtcattatggcagtttattatgcagcgga

SEQ ID NO: 354650 - DNA, 55 bp, Artificial
  Synthetic oligonucleotide
ccacagtggttgataacactctcatggtgatcatggctgtttattatgtagcaga

SEQ ID NO: 354651 - DNA, 55 bp, Artificial
  Synthetic oligonucleotide
ccacagttggagtaataaatcttatgcagatatttgggacaacatgacctggatg

SEQ ID NO: 354652 - DNA, 55 bp, Artificial
  Synthetic oligonucleotide
ccacagttgttacaacccaaccgcctacggttagcacacctgcaagaggcgccag

SEQ ID NO: 354653 - DNA, 59 bp, Artificial
  Synthetic oligonucleotide
ccacagttgtttgggtccataaacgcgagctatgcggatttgtctatacaagacccata

SEQ ID NO: 354654 - DNA, 60 bp, Artificial
  Synthetic oligonucleotide
ccacataaagagcgcgaattctggctttggctcaatacctgggccgcgttcgtgcaatcc

SEQ ID NO: 354655 - DNA, 55 bp, Artificial
  Synthetic oligonucleotide
ccacataaataattatgggggcccaatgaccgcgcccaaacagtcttccctgtcc

SEQ ID NO: 354656 - DNA, 58 bp, Artificial
  Synthetic oligonucleotide
ccacataacccactcaaggtttgtgatactaagttgacgattgcagggtttcctgata

SEQ ID NO: 354657 - DNA, 55 bp, Artificial
  Synthetic oligonucleotide
ccacataattagaattgccgaccacaaactgacaactgttgcgttaacttctcct

SEQ ID NO: 354658 - DNA, 55 bp, Artificial
  Synthetic oligonucleotide
ccacataccaggtcattgacggaagcgctcaagagatagtttcgaacgtgtaact

SEQ ID NO: 354659 - DNA, 55 bp, Artificial
  Synthetic oligonucleotide
ccacataccattaggggaggctagattagtagtaataacatattggggtttgcag

SEQ ID NO: 354660 - DNA, 60 bp, Artificial
  Synthetic oligonucleotide
ccacatacgtcctcaatctttcgagtatgtggcccataaaccaggatgtgcatattatga

SEQ ID NO: 354661 - DNA, 55 bp, Artificial
  Synthetic oligonucleotide
ccacatactccaaccccggattaacataacggttagcatgcacccgatactgagg

SEQ ID NO: 354662 - DNA, 55 bp, Artificial
  Synthetic oligonucleotide
ccacatactgcgtggtaaaccgtaaatagcacaggagagggtaaataggacaggc

SEQ ID NO: 354663 - DNA, 55 bp, Artificial
  Synthetic oligonucleotide
ccacatactgtcttattcagcatcagactcagaccttagtcctgcaagtctcaga

SEQ ID NO: 354664 - DNA, 60 bp, Artificial
  Synthetic oligonucleotide
ccacatacttgtcacaagagaaccatatctctcgtgtggaccacacgagtgcagaatgtt

SEQ ID NO: 354665 - DNA, 60 bp, Artificial
  Synthetic oligonucleotide
ccacatagaaagatgcatgaggccgagatggaattagtgccaaagtggtatctgagagat

SEQ ID NO: 354666 - DNA, 55 bp, Artificial
  Synthetic oligonucleotide
ccacatagataattatggggtcccagtgaacgagcccacatggttttaccggttc

SEQ ID NO: 354667 - DNA, 53 bp, Artificial
  Synthetic oligonucleotide
ccacatagcagagcccggacccccttccaaaaggaccgggggtggagcttaga

SEQ ID NO: 354668 - DNA, 55 bp, Artificial
  Synthetic oligonucleotide
ccacatatattgattggagtgctcgaaattcatttggatttacgatcgcggaaca

SEQ ID NO: 354669 - DNA, 56 bp, Artificial
  Synthetic oligonucleotide
ccacatcaaattatatcttggcaagatcggtagtgccagatttaaaggaattagtg

SEQ ID NO: 354670 - DNA, 55 bp, Artificial
  Synthetic oligonucleotide
ccacatcagataattaatctcagaacgaacaactgtgccacactggtgctgcctt

SEQ ID NO: 354671 - DNA, 55 bp, Artificial
  Synthetic oligonucleotide
ccacatcagatgacgcaagaaaatggaatcagggtcattttgtgactaagtttgc

SEQ ID NO: 354672 - DNA, 60 bp, Artificial
  Synthetic oligonucleotide
ccacatcatggcgtctcaaggcaccaaacgatcttacgagcagatggaaactggtggaga

SEQ ID NO: 354673 - DNA, 60 bp, Artificial
  Synthetic oligonucleotide
ccacatcatggcgtctcaaggcaccaaacgatcttatgaacagatggaaactggtgaacg

SEQ ID NO: 354674 - DNA, 55 bp, Artificial
  Synthetic oligonucleotide
ccacatccaaattcgcaacttctttgccaggatggagggtaggccaagggtcatc

SEQ ID NO: 354675 - DNA, 55 bp, Artificial
  Synthetic oligonucleotide
ccacatccaagtaaatcgattacaggaaaacgacaccgttaactcgataaccata

SEQ ID NO: 354676 - DNA, 53 bp, Artificial
  Synthetic oligonucleotide
ccacatccagaggaccccttcagcgaacagaagaccctggtaccgggggggaa

SEQ ID NO: 354677 - DNA, 50 bp, Artificial
  Synthetic oligonucleotide
ccacatcccagtcagaaggcctcgaaaagaagaatggccccggccccctg

SEQ ID NO: 354678 - DNA, 58 bp, Artificial
  Synthetic oligonucleotide
ccacatcccggaagtttgcctgaaatgggaactaatggatgaagactatcagggaaga

SEQ ID NO: 354679 - DNA, 55 bp, Artificial
  Synthetic oligonucleotide
ccacatccggtacccttggtgatttcctcacgaaaccttctggtgccttagctat

SEQ ID NO: 354680 - DNA, 55 bp, Artificial
  Synthetic oligonucleotide
ccacatcctcactttagtttcgggtggggacgatttcacgttgagaatgcccgtg

SEQ ID NO: 354681 - DNA, 55 bp, Artificial
  Synthetic oligonucleotide
ccacatccttgcttgagaattgtttggaaaggatcttcactgttggtgctctgaa

SEQ ID NO: 354682 - DNA, 52 bp, Artificial
  Synthetic oligonucleotide
ccacatcgcgcagcgatatggctccgtgcaaaccgagtacccgacccacccc

SEQ ID NO: 354683 - DNA, 55 bp, Artificial
  Synthetic oligonucleotide
ccacatctttatgcgagaattgtttggatagtattttgaccgtcggtgcccggaa

SEQ ID NO: 354684 - DNA, 54 bp, Artificial
  Synthetic oligonucleotide
ccacatgaaaagggcataaaccccaattacctcctagcttggaaacaggtattg

SEQ ID NO: 354685 - DNA, 59 bp, Artificial
  Synthetic oligonucleotide
ccacatgaaaaggggataaatccgaactatctattggcatggaaacaggtactagcaga

SEQ ID NO: 354686 - DNA, 55 bp, Artificial
  Synthetic oligonucleotide
ccacatgaatgcagaatgtttgctctcagtcaaggtaccacactaaggggtcgac

SEQ ID NO: 354687 - DNA, 54 bp, Artificial
  Synthetic oligonucleotide
ccacatgatacatgaacttgtgggactagtcggaaatggtatgcaagaagtcaa

SEQ ID NO: 354688 - DNA, 55 bp, Artificial
  Synthetic oligonucleotide
ccacatgatttgacttacatcaagtacatactgtcaaaccgagaacagttgggac

SEQ ID NO: 354689 - DNA, 60 bp, Artificial
  Synthetic oligonucleotide
ccacatgattttaaccagcttttcgttgctgtgtatggagatgacaaccttgttgctgtt

SEQ ID NO: 354690 - DNA, 60 bp, Artificial
  Synthetic oligonucleotide
ccacatgcaatgatactgaggataaagtccagggttactatatctgtattgcaggaggga

SEQ ID NO: 354691 - DNA, 55 bp, Artificial
  Synthetic oligonucleotide
ccacatgcccgactgcattaattggtacttgactgcgatattcaagtagaacgtg

SEQ ID NO: 354692 - DNA, 56 bp, Artificial
  Synthetic oligonucleotide
ccacatgctgcatgtgcactgtgcctagaactgcacgggcaaataaattatagaag

SEQ ID NO: 354693 - DNA, 55 bp, Artificial
  Synthetic oligonucleotide
ccacatggagagatccttgtctggagattcgatagagcattgggaacaactcatg

SEQ ID NO: 354694 - DNA, 59 bp, Artificial
  Synthetic oligonucleotide
ccacatggataaaccgtggcactcgttcgatgatcttactgcttccctcgtggctttag

SEQ ID NO: 354695 - DNA, 59 bp, Artificial
  Synthetic oligonucleotide
ccacatggcattggaccgcctctagcaattcccctaaaactgcaattgtaacattaaca

SEQ ID NO: 354696 - DNA, 60 bp, Artificial
  Synthetic oligonucleotide
ccacatggccgagttagatgactggcgcttgcctcaaaaacacaaccgcatggcgattag

SEQ ID NO: 354697 - DNA, 60 bp, Artificial
  Synthetic oligonucleotide
ccacatggctagcatctttactttagcatctctattattgtaagagtgtgtaatgaccag

SEQ ID NO: 354698 - DNA, 58 bp, Artificial
  Synthetic oligonucleotide
ccacatgtaaagccctcagaaccgtctcggaagaggaccccacatgtaagccctcaga

SEQ ID NO: 354699 - DNA, 55 bp, Artificial
  Synthetic oligonucleotide
ccacatgtacgcgctagacgtgtaatctactcgcagttcggggacgcaacgcagc

SEQ ID NO: 354700 - DNA, 55 bp, Artificial
  Synthetic oligonucleotide
ccacatgtagattgatgaagtatgattatccaacacgcccaggacagtgtggtgg

SEQ ID NO: 354701 - DNA, 55 bp, Artificial
  Synthetic oligonucleotide
ccacatgtagcgctacttggtcgtgtatgcctcagcacattaggtgcttctgacc

SEQ ID NO: 354702 - DNA, 55 bp, Artificial
  Synthetic oligonucleotide
ccacatgtgttaatgaacttggcagagacaacacaagctgacttatgtattccct

SEQ ID NO: 354703 - DNA, 56 bp, Artificial
  Synthetic oligonucleotide
ccacatgttcatagtggggagggaagggttaagataagtctttgttcaagtaatga

SEQ ID NO: 354704 - DNA, 60 bp, Artificial
  Synthetic oligonucleotide
ccacatgttctcccattcctgctgtgatgatgcataaaatcataaaagttgtgtcagggg

SEQ ID NO: 354705 - DNA, 58 bp, Artificial
  Synthetic oligonucleotide
ccacatgttggcccatctggttcgcttcccaagtttgaggagctttttggtgcaaata

SEQ ID NO: 354706 - DNA, 55 bp, Artificial
  Synthetic oligonucleotide
ccacattaatgtgctggatatgagttatctgacacctaaacatcctggaagagga

SEQ ID NO: 354707 - DNA, 58 bp, Artificial
  Synthetic oligonucleotide
ccacattatgtctcgtgttagaaatactttggaaaagatcagagacccacaagtacag

SEQ ID NO: 354708 - DNA, 60 bp, Artificial
  Synthetic oligonucleotide
ccacattcaatgttccccgcattctgttgtacagaatgcctaagcgggatgccccatggc

SEQ ID NO: 354709 - DNA, 58 bp, Artificial
  Synthetic oligonucleotide
ccacattccctctcagcctagtggtgtataataaatgtcatagtaatcataaataagc

SEQ ID NO: 354710 - DNA, 60 bp, Artificial
  Synthetic oligonucleotide
ccacattcgatgatcgaaatcgtttgctacagcttagttgtctccgattattcaagggtg

SEQ ID NO: 354711 - DNA, 55 bp, Artificial
  Synthetic oligonucleotide
ccacattcggccctcgccgttctagaggataccgttgattaccccgcccgtgctc

SEQ ID NO: 354712 - DNA, 55 bp, Artificial
  Synthetic oligonucleotide
ccacattctccgtacagagaaaccttcccttcgaaagggcaaccattatggcggc

SEQ ID NO: 354713 - DNA, 55 bp, Artificial
  Synthetic oligonucleotide
ccacattgaagtttgtctgcaggaggttctggtttatgtaggggtggctccattc

SEQ ID NO: 354714 - DNA, 55 bp, Artificial
  Synthetic oligonucleotide
ccacattgacacaggtccgaggctctgtcagatgggtgagtctcccaagaggaca

SEQ ID NO: 354715 - DNA, 55 bp, Artificial
  Synthetic oligonucleotide
ccacattgccgagagctgtacactacactaatgataagaacacagggataggagc

SEQ ID NO: 354716 - DNA, 56 bp, Artificial
  Synthetic oligonucleotide
ccacattggaagtgaagaaggggtaatgtagtgggctgacttgtagttcccaggcc

SEQ ID NO: 354717 - DNA, 60 bp, Artificial
  Synthetic oligonucleotide
ccacattgtaaggtccgaccggcaactgaccattgcatgcgacacccatacgagcaagat

SEQ ID NO: 354718 - DNA, 55 bp, Artificial
  Synthetic oligonucleotide
ccacattgtcttgcctgttctactatcgccctctatcactatactgatgggtctc

SEQ ID NO: 354719 - DNA, 54 bp, Artificial
  Synthetic oligonucleotide
ccacattgtctttcctgtacgactctctccctctatgacaatactattgggtct

SEQ ID NO: 354720 - DNA, 55 bp, Artificial
  Synthetic oligonucleotide
ccacatttacaaggtcaaatatgtcttaagactcgtatgaggatgaccgagctga

SEQ ID NO: 354721 - DNA, 53 bp, Artificial
  Synthetic oligonucleotide
ccacatttacaggggattggataagatttgggggggtccgtgtgttatgaaag

SEQ ID NO: 354722 - DNA, 57 bp, Artificial
  Synthetic oligonucleotide
ccacatttgcagaggtttgtagcctcagccaaatctgatttcttttgttgtttggct

SEQ ID NO: 354723 - DNA, 50 bp, Artificial
  Synthetic oligonucleotide
ccacatttgctgctccccttaaattagatggcgggattgtttcactcgat

SEQ ID NO: 354724 - DNA, 54 bp, Artificial
  Synthetic oligonucleotide
ccacatttggtcgcgttttgtgttctgcacggagcggcttgtagatgagcctca

SEQ ID NO: 354725 - DNA, 55 bp, Artificial
  Synthetic oligonucleotide
ccaccaaaaactaaacgacttcggtatatacaaaatgactgttcaggctgactta

SEQ ID NO: 354726 - DNA, 55 bp, Artificial
  Synthetic oligonucleotide
ccaccaaaattttacctaccaccagtacatgttatacagcctattgaacgagaac

SEQ ID NO: 354727 - DNA, 50 bp, Artificial
  Synthetic oligonucleotide
ccaccaaagttacgaagtgttatggctgtactttactggtataagggcag

SEQ ID NO: 354728 - DNA, 58 bp, Artificial
  Synthetic oligonucleotide
ccaccaaatgcccctatcttatcaacacttccggagactactgttattagatgcggag

SEQ ID NO: 354729 - DNA, 56 bp, Artificial
  Synthetic oligonucleotide
ccaccaacaaacaaagatgttataacacaagacctacccctcaacatattactatg

SEQ ID NO: 354730 - DNA, 56 bp, Artificial
  Synthetic oligonucleotide
ccaccaacaattagggccgtaatgacgcaagggcctaacacagagtttgcactttc

SEQ ID NO: 354731 - DNA, 55 bp, Artificial
  Synthetic oligonucleotide
ccaccaacacaactacgctgctcctccctccaccaaggtggaatacccagccgcc

SEQ ID NO: 354732 - DNA, 55 bp, Artificial
  Synthetic oligonucleotide
ccaccaacattggtaaatgtctgttaataccagaatatagtgtcctacgccgaag

SEQ ID NO: 354733 - DNA, 59 bp, Artificial
  Synthetic oligonucleotide
ccaccaacccactaatcaggcatgaaaacagaatggtgctggccagtactacggctaag

SEQ ID NO: 354734 - DNA, 58 bp, Artificial
  Synthetic oligonucleotide
ccaccaacgttctcgtctgggcaggtctgaccttcctgggcggcgagtggctgggtca

SEQ ID NO: 354735 - DNA, 55 bp, Artificial
  Synthetic oligonucleotide
ccaccaactatgaggaccttccggtctctgaagccacaggagagttcaagcgttc

SEQ ID NO: 354736 - DNA, 57 bp, Artificial
  Synthetic oligonucleotide
ccaccaagagttagtgctcttcgactttccacgaagcttcgaggagtatgttaatta

SEQ ID NO: 354737 - DNA, 60 bp, Artificial
  Synthetic oligonucleotide
ccaccaagattgacgtgctggcgtatgatggttgcacgcagaccacccacggggactgtg

SEQ ID NO: 354738 - DNA, 55 bp, Artificial
  Synthetic oligonucleotide
ccaccaagccgcatcatctatatatcatgaaactcagttgccctccaaacctcac

SEQ ID NO: 354739 - DNA, 55 bp, Artificial
  Synthetic oligonucleotide
ccaccaagctctgctagatcccagagtgatgggcgtatactttcctgctcgtggc

SEQ ID NO: 354740 - DNA, 55 bp, Artificial
  Synthetic oligonucleotide
ccaccaagctctgttggatcccagggtaggggaaccctgctccgactattgcctc

SEQ ID NO: 354741 - DNA, 60 bp, Artificial
  Synthetic oligonucleotide
ccaccaagctgacgcgatattccgtgacttgcgagtcaaacataccgtgtgtcctgcagc

SEQ ID NO: 354742 - DNA, 55 bp, Artificial
  Synthetic oligonucleotide
ccaccaagcttttgtacgactgaggcatatggaaggcatagtcaagcaacgcgat

SEQ ID NO: 354743 - DNA, 58 bp, Artificial
  Synthetic oligonucleotide
ccaccaaggagttgacgctggttaccccagctatgcttcacgcccaactccgcaagga

SEQ ID NO: 354744 - DNA, 55 bp, Artificial
  Synthetic oligonucleotide
ccaccaaggctgtctgctcgtggtatgtgtgccagaggctgaaatgggatgctcc

SEQ ID NO: 354745 - DNA, 56 bp, Artificial
  Synthetic oligonucleotide
ccaccaaggtgccactggtcaagatacaattaaaaaccggcttgaagatttagtga

SEQ ID NO: 354746 - DNA, 55 bp, Artificial
  Synthetic oligonucleotide
ccaccaagtagtctaatgaagagtcccactgcaagcctttgaaccaccacttctg

SEQ ID NO: 354747 - DNA, 60 bp, Artificial
  Synthetic oligonucleotide
ccaccaagtcgcagctgtacaacttccctgtacatatcgaggcagctgcgaccgagtcta

SEQ ID NO: 354748 - DNA, 60 bp, Artificial
  Synthetic oligonucleotide
ccaccaagtgcgcaactccacagggctttaccatgtcaccaatgattgccccaattcgag

SEQ ID NO: 354749 - DNA, 60 bp, Artificial
  Synthetic oligonucleotide
ccaccaagtggttttatggatacgccaatgtatcgtacagtcaatcatctgtccatactg

SEQ ID NO: 354750 - DNA, 54 bp, Artificial
  Synthetic oligonucleotide
ccaccaatagagagttttgggtttcaggatcagaaaatagattctctgaaacag

SEQ ID NO: 354751 - DNA, 57 bp, Artificial
  Synthetic oligonucleotide
ccaccaatcggaggtcaggaagaaagccaaccccagtctctccacctctaagagaca

SEQ ID NO: 354752 - DNA, 55 bp, Artificial
  Synthetic oligonucleotide
ccaccaatggccgatttgccagataagggtaaaccatttgattctcgttttgtct

SEQ ID NO: 354753 - DNA, 53 bp, Artificial
  Synthetic oligonucleotide
ccaccaattgccccacaccggtcttgcccgaccacccgagggccatggccttt

SEQ ID NO: 354754 - DNA, 56 bp, Artificial
  Synthetic oligonucleotide
ccaccacaccactcgttaagactggtcactctataggtttgtcgctaggacccgga

SEQ ID NO: 354755 - DNA, 60 bp, Artificial
  Synthetic oligonucleotide
ccaccacaccgaagtcgcagacgcaaacgggcatctgctacacagttatatcaaacatgt

SEQ ID NO: 354756 - DNA, 55 bp, Artificial
  Synthetic oligonucleotide
ccaccacaggcagggcctattccaccaggccaaataagagaaccaaggggaagtg

SEQ ID NO: 354757 - DNA, 50 bp, Artificial
  Synthetic oligonucleotide
ccaccacattgaagttgtacggtagtgagagtcaagtgggggctgtggat

SEQ ID NO: 354758 - DNA, 50 bp, Artificial
  Synthetic oligonucleotide
ccaccaccagactatgggcaactactaactcgataccagatgatcatgac

SEQ ID NO: 354759 - DNA, 55 bp, Artificial
  Synthetic oligonucleotide
ccaccaccgaggcatatatcagaatgttgattttgagtgtccaatagcactcaag

SEQ ID NO: 354760 - DNA, 54 bp, Artificial
  Synthetic oligonucleotide
ccaccacctcaacccgcacctgggtcctgccgacctacaacaaccacctgtacc

SEQ ID NO: 354761 - DNA, 58 bp, Artificial
  Synthetic oligonucleotide
ccaccacctgtacagagacaagcactacttcgtgcggggtggcatgccctcaggatgt

SEQ ID NO: 354762 - DNA, 60 bp, Artificial
  Synthetic oligonucleotide
ccaccaccttccttccgaagtcctgcgcttccgcagctatatcgactgttattgctggtg

SEQ ID NO: 354763 - DNA, 60 bp, Artificial
  Synthetic oligonucleotide
ccaccacgagcagatcgtccatcgatctgaaaaacaccccattctagaatgtctccgtct

SEQ ID NO: 354764 - DNA, 55 bp, Artificial
  Synthetic oligonucleotide
ccaccactagacatgattggataatggcaagaaccacttacttcacacatggcac

SEQ ID NO: 354765 - DNA, 53 bp, Artificial
  Synthetic oligonucleotide
ccaccactagcgaagacactgaacggcacactgcacgtgatgttaatagaaac

SEQ ID NO: 354766 - DNA, 56 bp, Artificial
  Synthetic oligonucleotide
ccaccactaggaaacaagctatgttaggaacacacgtagtgtgggatgtgggatta

SEQ ID NO: 354767 - DNA, 59 bp, Artificial
  Synthetic oligonucleotide
ccaccactgagcttcgccacgaatggaaacgtgcgctcaagctcgaaggcccctcctct

SEQ ID NO: 354768 - DNA, 60 bp, Artificial
  Synthetic oligonucleotide
ccaccactggagcctcattcatcataacaagatcgattatctctactaggtgctcttgct

SEQ ID NO: 354769 - DNA, 58 bp, Artificial
  Synthetic oligonucleotide
ccaccactttggaactaaagccctccgatcagccgcctccatactccccgcagtcatc

SEQ ID NO: 354770 - DNA, 60 bp, Artificial
  Synthetic oligonucleotide
ccaccagaaaacagcgacgaggagacaatcggagaggcattcgaatggctagaaagaaca

SEQ ID NO: 354771 - DNA, 57 bp, Artificial
  Synthetic oligonucleotide
ccaccagaaaacggacaccaccacggcgatacagaagaaaagcatctagccctacaa

SEQ ID NO: 354772 - DNA, 55 bp, Artificial
  Synthetic oligonucleotide
ccaccagacagtgggtatggcaatacgcagatggttgttggaacgccagaagagg

SEQ ID NO: 354773 - DNA, 55 bp, Artificial
  Synthetic oligonucleotide
ccaccagagccaatttcactcttgatttcaggcttaatggcattcccactgggca

SEQ ID NO: 354774 - DNA, 55 bp, Artificial
  Synthetic oligonucleotide
ccaccagaggggttaaagttgctttatttgagaacctggaagcaatgggctacaa

SEQ ID NO: 354775 - DNA, 60 bp, Artificial
  Synthetic oligonucleotide
ccaccagagtgtgtctctccaatgagtctccattagaaggaatagtctattattgggaaa

SEQ ID NO: 354776 - DNA, 55 bp, Artificial
  Synthetic oligonucleotide
ccaccagatccaaaatattttgatgggtacaaccaacaagaagtggtcataatgg

SEQ ID NO: 354777 - DNA, 55 bp, Artificial
  Synthetic oligonucleotide
ccaccagatcgagaagaggactcggccctccttttactgggatcacggttacacc

SEQ ID NO: 354778 - DNA, 55 bp, Artificial
  Synthetic oligonucleotide
ccaccagattgagaagaggtctagaccatccttttactgggatcacggatacacc

SEQ ID NO: 354779 - DNA, 60 bp, Artificial
  Synthetic oligonucleotide
ccaccagattgtcctggtgtcgggactgggtgcactgcttgtggtttataccttgatcag

SEQ ID NO: 354780 - DNA, 60 bp, Artificial
  Synthetic oligonucleotide
ccaccagcattcttgttgcgtatcccgaccagactgaccacattcacgctaagccgctgg

SEQ ID NO: 354781 - DNA, 55 bp, Artificial
  Synthetic oligonucleotide
ccaccagctggagtcagggaagtgctcaatgagaccaccaattggctgtgggccc

SEQ ID NO: 354782 - DNA, 55 bp, Artificial
  Synthetic oligonucleotide
ccaccaggagaagccaacagactataattccgaacattggatctagaccctgggt

SEQ ID NO: 354783 - DNA, 53 bp, Artificial
  Synthetic oligonucleotide
ccaccaggagaccctagaaccctgcatgtgtacaatagtaatacacccaaagc

SEQ ID NO: 354784 - DNA, 60 bp, Artificial
  Synthetic oligonucleotide
ccaccaggaggcagcgaagtatgagaaccatactgagaacgcattattactgtatatggc

SEQ ID NO: 354785 - DNA, 55 bp, Artificial
  Synthetic oligonucleotide
ccaccaggctctgttagatccgagggtgaggcctgctggtggctccagttcagag

SEQ ID NO: 354786 - DNA, 55 bp, Artificial
  Synthetic oligonucleotide
ccaccaggtctcaaggtgatgttcctactatacttgcaacccttgctctcatcgg

SEQ ID NO: 354787 - DNA, 54 bp, Artificial
  Synthetic oligonucleotide
ccaccaggtgttgattggtcattaggatctttagatgatttgtagcccatgtgc

SEQ ID NO: 354788 - DNA, 57 bp, Artificial
  Synthetic oligonucleotide
ccaccagtaggttattggatgttactttcacctactacagctggagtaatagtagag

SEQ ID NO: 354789 - DNA, 55 bp, Artificial
  Synthetic oligonucleotide
ccaccagtagtattaccacatccactattcgtccccctgtaactgtagaacccat

SEQ ID NO: 354790 - DNA, 55 bp, Artificial
  Synthetic oligonucleotide
ccaccagtgacatccccgggttcaggaaatgcggcagactccccgcgctatacca

SEQ ID NO: 354791 - DNA, 50 bp, Artificial
  Synthetic oligonucleotide
ccaccagtgggaacgggaaataggttactaaacttggtagacggagccta

SEQ ID NO: 354792 - DNA, 60 bp, Artificial
  Synthetic oligonucleotide
ccaccagtgtgacaacaattgcattgaaagcataaggaatggaacatatgaccatgatat

SEQ ID NO: 354793 - DNA, 55 bp, Artificial
  Synthetic oligonucleotide
ccaccagtgtgtaattctaagtgtgataatagcacatgtgtgcctggtttgagtt

SEQ ID NO: 354794 - DNA, 55 bp, Artificial
  Synthetic oligonucleotide
ccaccagttagcattgaccctgtaggtcccttggacccctctatagtaagtcttg

SEQ ID NO: 354795 - DNA, 60 bp, Artificial
  Synthetic oligonucleotide
ccaccagttggcctctccagtgtccacttgaccacgttaacacattgcatttcctcacaa

SEQ ID NO: 354796 - DNA, 56 bp, Artificial
  Synthetic oligonucleotide
ccaccataaccgccaggactggcggggtgagggggttctatatggccctagatgcc

SEQ ID NO: 354797 - DNA, 55 bp, Artificial
  Synthetic oligonucleotide
ccaccataagtggtatggcaccgacggtgcgtatagatgccggttctccaaaggg

SEQ ID NO: 354798 - DNA, 55 bp, Artificial
  Synthetic oligonucleotide
ccaccatacgacttactagctgatggactaacgacacagttcgccgttatagctc

SEQ ID NO: 354799 - DNA, 60 bp, Artificial
  Synthetic oligonucleotide
ccaccatagcaacgaacaggggagtggatacgctgcagacaaagagtccactcaaaaggc

SEQ ID NO: 354800 - DNA, 60 bp, Artificial
  Synthetic oligonucleotide
ccaccataggtgaaagttgcgatgcggctgtgcagaggattattaattatgcaagtgacc

SEQ ID NO: 354801 - DNA, 55 bp, Artificial
  Synthetic oligonucleotide
ccaccatcatgatgcagaaaggcaattttaggaaccagagaaagcctgttaagtg

SEQ ID NO: 354802 - DNA, 55 bp, Artificial
  Synthetic oligonucleotide
ccaccatccaccaaacatgcacctgccttcacagcggcagagagacttaggttga

SEQ ID NO: 354803 - DNA, 60 bp, Artificial
  Synthetic oligonucleotide
ccaccatcctcacaaacgcgatcaccaccatctcagagtctaccacacaaaccatttcac

SEQ ID NO: 354804 - DNA, 60 bp, Artificial
  Synthetic oligonucleotide
ccaccatctagcacagcctctagttcaggcacagtctcaaccgtgcccaaaaatgttttg

SEQ ID NO: 354805 - DNA, 55 bp, Artificial
  Synthetic oligonucleotide
ccaccatgaacgcttcgtacttctgaatcaaacatccatcgttgtcaatacccca

SEQ ID NO: 354806 - DNA, 56 bp, Artificial
  Synthetic oligonucleotide
ccaccatgtaagaaatataagttatcaggactatctcttcttgaacctttcaagcg

SEQ ID NO: 354807 - DNA, 55 bp, Artificial
  Synthetic oligonucleotide
ccaccattacagtggatgggatatttgttataccccaagaagtggaaattacaga

SEQ ID NO: 354808 - DNA, 55 bp, Artificial
  Synthetic oligonucleotide
ccaccattgactgccgctaacataggctgcttgaatgaagccacaacctctccct

SEQ ID NO: 354809 - DNA, 60 bp, Artificial
  Synthetic oligonucleotide
ccaccattgccatttggcttgcatcaaaagttatactttgaattattggatcttgaccag

SEQ ID NO: 354810 - DNA, 57 bp, Artificial
  Synthetic oligonucleotide
ccaccattggcgtcaactctccaacagtcggtgttggttaccaaggagtagctgagg

SEQ ID NO: 354811 - DNA, 60 bp, Artificial
  Synthetic oligonucleotide
ccacccaaaaaccatagcttgtggggcataatgactgcacgtagctgctcccaaaacgca

SEQ ID NO: 354812 - DNA, 59 bp, Artificial
  Synthetic oligonucleotide
ccacccaaaaggataaggtcctttagtgcgcttaactggcattggagcagtagcagcaa

SEQ ID NO: 354813 - DNA, 53 bp, Artificial
  Synthetic oligonucleotide
ccacccaaaagtcaactactggagtactggaaaagtaatccctccacgatacc

SEQ ID NO: 354814 - DNA, 55 bp, Artificial
  Synthetic oligonucleotide
ccacccaaaagtcaactgctagagtattggaaaagcaatccttcagcgataccgg

SEQ ID NO: 354815 - DNA, 59 bp, Artificial
  Synthetic oligonucleotide
ccacccaaaagtcagttgctagagtattggaaaagtaatccatcagtgataccagacaa

SEQ ID NO: 354816 - DNA, 52 bp, Artificial
  Synthetic oligonucleotide
ccacccaacacggatgatacactcaaagatagtaccactatcaccactatta

SEQ ID NO: 354817 - DNA, 56 bp, Artificial
  Synthetic oligonucleotide
ccacccaatgaacgggctcggtgctatgaaggtacgacagcttgacccaaatggta

SEQ ID NO: 354818 - DNA, 59 bp, Artificial
  Synthetic oligonucleotide
ccacccacctacggctggactcacggcaccgcgtggccattttagctggaatgtgcgga

SEQ ID NO: 354819 - DNA, 55 bp, Artificial
  Synthetic oligonucleotide
ccacccacgagcttgcactcctgaacttttcaaagggctgtatcctgactacgcg

SEQ ID NO: 354820 - DNA, 55 bp, Artificial
  Synthetic oligonucleotide
ccacccacgagtgcttgcattctagaagtggagccagtttgggttgaccttcttg

SEQ ID NO: 354821 - DNA, 56 bp, Artificial
  Synthetic oligonucleotide
ccacccacgatagaacagccttcagaggacttatctctaccccattaggcaacccc

SEQ ID NO: 354822 - DNA, 55 bp, Artificial
  Synthetic oligonucleotide
ccacccacttccttcgggtgagcccctaagccatggttgtactgcactatcatcc

SEQ ID NO: 354823 - DNA, 55 bp, Artificial
  Synthetic oligonucleotide
ccacccagacaagcagtcgagggtcctattatctagttgcccctacaggtaccat

SEQ ID NO: 354824 - DNA, 59 bp, Artificial
  Synthetic oligonucleotide
ccacccagactatgcccatacatcagaaaggccaacgttgactttgcggtgacgcccat

SEQ ID NO: 354825 - DNA, 55 bp, Artificial
  Synthetic oligonucleotide
ccacccagcaaatgctgcagcaatcctagatagtgtcaggtcatctctgcctggg

SEQ ID NO: 354826 - DNA, 55 bp, Artificial
  Synthetic oligonucleotide
ccacccagggaaggacacctgcagtgcaaaagtaacatcacaggattgttggtgg

SEQ ID NO: 354827 - DNA, 56 bp, Artificial
  Synthetic oligonucleotide
ccacccagttctagtttctggccccggagacccatctccttatgtgactcaaggag

SEQ ID NO: 354828 - DNA, 55 bp, Artificial
  Synthetic oligonucleotide
ccacccagttttaatttcaggtcccggagatccatctccttatgtgacgcaaggg

SEQ ID NO: 354829 - DNA, 55 bp, Artificial
  Synthetic oligonucleotide
ccacccataggaggggacccagaaattgtaatgcacagctttaattgtggagggg

SEQ ID NO: 354830 - DNA, 55 bp, Artificial
  Synthetic oligonucleotide
ccacccatggtcacttcacggttgagcgagtcactgagacgagaaacgctcgacg

SEQ ID NO: 354831 - DNA, 52 bp, Artificial
  Synthetic oligonucleotide
ccacccattatcgaacgttttcctcgtccgcagcagggttttagggaaaatc

SEQ ID NO: 354832 - DNA, 57 bp, Artificial
  Synthetic oligonucleotide
ccaccccacaagatttaaacaccatgttaaacacagtggggggacatcaagcagcca

SEQ ID NO: 354833 - DNA, 55 bp, Artificial
  Synthetic oligonucleotide
ccaccccatctgatttaaacatcatgctaaacacagtggggggacatcaggcagc

SEQ ID NO: 354834 - DNA, 57 bp, Artificial
  Synthetic oligonucleotide
ccaccccattgtgtttagataatcgtttcgtcatcaaagtatggcgagtgtaaactc

SEQ ID NO: 354835 - DNA, 55 bp, Artificial
  Synthetic oligonucleotide
ccaccccgtggttctgtgaccgtactttggggctatgctacacagggggctcctc

SEQ ID NO: 354836 - DNA, 55 bp, Artificial
  Synthetic oligonucleotide
ccacccctgagcccttctgtaccatacacatagacggggcgtctattactatcac

SEQ ID NO: 354837 - DNA, 50 bp, Artificial
  Synthetic oligonucleotide
ccacccgaacccccaccgcgccaacggtgggggttctttcatgtccaggg

SEQ ID NO: 354838 - DNA, 57 bp, Artificial
  Synthetic oligonucleotide
ccacccgaatcgtaacccattgggccactcacgcgagcaaacgcgcttggacctgaa

SEQ ID NO: 354839 - DNA, 55 bp, Artificial
  Synthetic oligonucleotide
ccacccgcagtggggttcagttaggttcgcaggcccacttctaccatgatgttag

SEQ ID NO: 354840 - DNA, 54 bp, Artificial
  Synthetic oligonucleotide
ccacccggtgcccaaccaccgcaggacaggaaacaagcgatgttaggaacccac

SEQ ID NO: 354841 - DNA, 55 bp, Artificial
  Synthetic oligonucleotide
ccaccctacaaattgaaaagcacgtgagcagagctttcatttgcctgcaagcgct

SEQ ID NO: 354842 - DNA, 60 bp, Artificial
  Synthetic oligonucleotide
ccaccctagacattagcaccgagccaatgaaactagaggatgcagtgtacggaactgaag

SEQ ID NO: 354843 - DNA, 55 bp, Artificial
  Synthetic oligonucleotide
ccaccctagatctccctcgcctaggaaatagattacctgctaggcatcacctggg

SEQ ID NO: 354844 - DNA, 60 bp, Artificial
  Synthetic oligonucleotide
ccaccctagcacccttcgctgtctcagatgcagaggcagttaccctggagaggctcggaa

SEQ ID NO: 354845 - DNA, 55 bp, Artificial
  Synthetic oligonucleotide
ccaccctcaggaggggacctggaaattacaatgcatagttttaattgtaaggaga

SEQ ID NO: 354846 - DNA, 55 bp, Artificial
  Synthetic oligonucleotide
ccaccctcatggttccccatgaagtgtggcagcgtagcatctttcgtagcactca

SEQ ID NO: 354847 - DNA, 60 bp, Artificial
  Synthetic oligonucleotide
ccaccctcattgagcttgcgtcctatgagtggaagaacctctctgagagtatctcctcac

SEQ ID NO: 354848 - DNA, 59 bp, Artificial
  Synthetic oligonucleotide
ccaccctgaaacgaggaatgcagagttacctcgtatattggtcgaccatgcaagtcaaa

SEQ ID NO: 354849 - DNA, 60 bp, Artificial
  Synthetic oligonucleotide
ccaccctgctctcagaggtccaaattcctgctgatggacgctttgaaattaagcattgag

SEQ ID NO: 354850 - DNA, 52 bp, Artificial
  Synthetic oligonucleotide
ccaccctggcaccacgacgggggactcaacccctgctaagcagttggtcgac

SEQ ID NO: 354851 - DNA, 55 bp, Artificial
  Synthetic oligonucleotide
ccaccctgtaagtgacaacattaattacggtatttgcccaaacaatatgttgggc

SEQ ID NO: 354852 - DNA, 60 bp, Artificial
  Synthetic oligonucleotide
ccacccttgcagatagccacgtttgtggcagccggtcagtctatggtgtctgtcccttcc

SEQ ID NO: 354853 - DNA, 55 bp, Artificial
  Synthetic oligonucleotide
ccaccctttagcagagaaatgtttgacaggtttagatcttctcctcccgactcag

SEQ ID NO: 354854 - DNA, 55 bp, Artificial
  Synthetic oligonucleotide
ccaccctttgttggagagcaaacaggggaatcagtagtggggtctgcacttggcg

SEQ ID NO: 354855 - DNA, 50 bp, Artificial
  Synthetic oligonucleotide
ccacccttttattatactactcggtgtgataataagacctgtgtatcagg

SEQ ID NO: 354856 - DNA, 53 bp, Artificial
  Synthetic oligonucleotide
ccaccgaaccagatgttagttcaaataggttctacacattagaatcagtgcag

SEQ ID NO: 354857 - DNA, 53 bp, Artificial
  Synthetic oligonucleotide
ccaccgaacgctggaaatctgctccattttggaagactccatcggttattgat

SEQ ID NO: 354858 - DNA, 53 bp, Artificial
  Synthetic oligonucleotide
ccaccgaacttgatttcatgggcgccggtccttggaccttatacccaagctcg

SEQ ID NO: 354859 - DNA, 55 bp, Artificial
  Synthetic oligonucleotide
ccaccgaactttgcaagatcccagagtgaggggcctgtattttcctgctggtggc

SEQ ID NO: 354860 - DNA, 60 bp, Artificial
  Synthetic oligonucleotide
ccaccgaaggccagtctgcgacgctattatggacgcgatgtgaaaaatgtacgcgcctgg

SEQ ID NO: 354861 - DNA, 55 bp, Artificial
  Synthetic oligonucleotide
ccaccgacacctgtgaccaaaacactgtgctctgaaacctatgtaagcaggagag

SEQ ID NO: 354862 - DNA, 58 bp, Artificial
  Synthetic oligonucleotide
ccaccgacactgtcgacacagtactggagaagaatgtgactgtgactcattcagttaa

SEQ ID NO: 354863 - DNA, 60 bp, Artificial
  Synthetic oligonucleotide
ccaccgacccagatgcgttaatcgggacttgttgtctgtattctatgacgcagtggtcta

SEQ ID NO: 354864 - DNA, 59 bp, Artificial
  Synthetic oligonucleotide
ccaccgatagcaaccactggtccatcagtatacccgccagctacgggaacacacggcac

SEQ ID NO: 354865 - DNA, 56 bp, Artificial
  Synthetic oligonucleotide
ccaccgatgactactacgaataccacctaggtttatttagtcccatattcatagga

SEQ ID NO: 354866 - DNA, 57 bp, Artificial
  Synthetic oligonucleotide
ccaccgatgcccccgagatgtgtgctatttgttggcggccgattaccccgggatgac

SEQ ID NO: 354867 - DNA, 60 bp, Artificial
  Synthetic oligonucleotide
ccaccgcaagaaggccggagcattgcgcacgcgtatgcttcggtcgcgcggttgggcgga

SEQ ID NO: 354868 - DNA, 55 bp, Artificial
  Synthetic oligonucleotide
ccaccgcacggaggccttttggggtggagccctcaggcacagggcacactacaaa

SEQ ID NO: 354869 - DNA, 55 bp, Artificial
  Synthetic oligonucleotide
ccaccgcagtttgcatcacacgtgtcggtccctgccgacgcagaggacgtgtgta

SEQ ID NO: 354870 - DNA, 58 bp, Artificial
  Synthetic oligonucleotide
ccaccgccacaggtctcagcgcatcaccctcacagtcagtgaccctgcccagtggtgt

SEQ ID NO: 354871 - DNA, 53 bp, Artificial
  Synthetic oligonucleotide
ccaccgctccgacagttttgaccacgatttcggccgaccctttagattgtagg

SEQ ID NO: 354872 - DNA, 55 bp, Artificial
  Synthetic oligonucleotide
ccaccgcttctattttacagtgagggtagccctccgtgcttttagtgttattcga

SEQ ID NO: 354873 - DNA, 55 bp, Artificial
  Synthetic oligonucleotide
ccaccgcttgaaagacttcgtctcgattgcagcgaggactgtggaacttctggga

SEQ ID NO: 354874 - DNA, 54 bp, Artificial
  Synthetic oligonucleotide
ccaccggaaataatcatttattcataataaatggaactgacaaatatgataaac

SEQ ID NO: 354875 - DNA, 55 bp, Artificial
  Synthetic oligonucleotide
ccaccggacctgcttacccaactcctgcacaagtggggagtagccatcgatcagc

SEQ ID NO: 354876 - DNA, 60 bp, Artificial
  Synthetic oligonucleotide
ccaccggactatactcaaacacgcttcgaaatgcaatactcatatattatgtgtggttaa

SEQ ID NO: 354877 - DNA, 55 bp, Artificial
  Synthetic oligonucleotide
ccaccggatggttttagagttgtccgtgcatatagcaacggataccctgcaccct

SEQ ID NO: 354878 - DNA, 57 bp, Artificial
  Synthetic oligonucleotide
ccaccggcacattacacggctactttctcgcatcggtttgggactaacactgctaaa

SEQ ID NO: 354879 - DNA, 55 bp, Artificial
  Synthetic oligonucleotide
ccaccggccatcagggctacgtcgcaccggaaaaggctgtcatgcagcaggtgaa

SEQ ID NO: 354880 - DNA, 53 bp, Artificial
  Synthetic oligonucleotide
ccaccggctagttcgtagtttaccacttgccacacgccgttaacaaacttcat

SEQ ID NO: 354881 - DNA, 55 bp, Artificial
  Synthetic oligonucleotide
ccaccgggaaacatcttcattaagtgtgcaaagattccgattccgacgagcaaca

SEQ ID NO: 354882 - DNA, 56 bp, Artificial
  Synthetic oligonucleotide
ccaccgggacgtgaggttgaatttacaacgcaatatccagtgcaaattaaagtgga

SEQ ID NO: 354883 - DNA, 60 bp, Artificial
  Synthetic oligonucleotide
ccaccgggctcaggaatgtccctgcgattgctgcaagaggcctgtttggtgcaatagctg

SEQ ID NO: 354884 - DNA, 58 bp, Artificial
  Synthetic oligonucleotide
ccaccgggctcttatgttgtcactcggagtgttgatgtgttccacgctggttggacta

SEQ ID NO: 354885 - DNA, 55 bp, Artificial
  Synthetic oligonucleotide
ccaccggggaaactagtggcagaagaaacgattaggaatctggccgctgagctga

SEQ ID NO: 354886 - DNA, 55 bp, Artificial
  Synthetic oligonucleotide
ccaccggggggagtatcgcccagaacgtgcaaggcttcaccagtcttttctctcc

SEQ ID NO: 354887 - DNA, 55 bp, Artificial
  Synthetic oligonucleotide
ccaccgggtatgaattggacagatcttatcactaactactcaccttctagagaag

SEQ ID NO: 354888 - DNA, 52 bp, Artificial
  Synthetic oligonucleotide
ccaccgggtcacagttcgggtccttgtcctataccaggacccggtcctaatc

SEQ ID NO: 354889 - DNA, 55 bp, Artificial
  Synthetic oligonucleotide
ccaccggtgcaaagttcgcgtcacgtacgcttgaaacatacacaagactcgcacg

SEQ ID NO: 354890 - DNA, 55 bp, Artificial
  Synthetic oligonucleotide
ccaccggtgggtcaacggtcaattatacgaccatcaactattacaaagactctgc

SEQ ID NO: 354891 - DNA, 54 bp, Artificial
  Synthetic oligonucleotide
ccaccgtaaggatgttccgtaatgccatttcctctggtaaagcaagacccaacc

SEQ ID NO: 354892 - DNA, 55 bp, Artificial
  Synthetic oligonucleotide
ccaccgtactcccatgcgactgcaaggcacacaaacagcgagttccatgagctcg

SEQ ID NO: 354893 - DNA, 53 bp, Artificial
  Synthetic oligonucleotide
ccaccgtagactttattccaccaatggcttctcttgaggaaaagggagtttcc

SEQ ID NO: 354894 - DNA, 55 bp, Artificial
  Synthetic oligonucleotide
ccaccgtcatgtcatctaacgtccgtgattgtccatctcttccacagaaaccaac

SEQ ID NO: 354895 - DNA, 55 bp, Artificial
  Synthetic oligonucleotide
ccaccgtgaataagaacaatgctcaggattcgtacgagcttaacgtcctgccctc

SEQ ID NO: 354896 - DNA, 60 bp, Artificial
  Synthetic oligonucleotide
ccaccgtgcatcactctccatacttggttagtaagtttgagtcatacgatcatcagttcc

SEQ ID NO: 354897 - DNA, 55 bp, Artificial
  Synthetic oligonucleotide
ccaccgtgccctcagccaggatgcgtaactaaacgcccaccagtaccacccagac

SEQ ID NO: 354898 - DNA, 59 bp, Artificial
  Synthetic oligonucleotide
ccaccgtggatcatatggccataatcaagaaatacacatcgggaaggcaagagaaaaac

SEQ ID NO: 354899 - DNA, 51 bp, Artificial
  Synthetic oligonucleotide
ccaccgtgtgccatagacgcggacgtattagctatgctgcttgggcagggg

SEQ ID NO: 354900 - DNA, 55 bp, Artificial
  Synthetic oligonucleotide
ccaccgttacaagatcacaagtatccgtgttgagtttaagtcacacgcgtccgcc

SEQ ID NO: 354901 - DNA, 55 bp, Artificial
  Synthetic oligonucleotide
ccaccgttaccgttactgtcaccaactaccaatgatttatactgattaagtgtcc

SEQ ID NO: 354902 - DNA, 55 bp, Artificial
  Synthetic oligonucleotide
ccaccgttcagattaaagacggtcagaccctgcttttaggcggcctgattagctc

SEQ ID NO: 354903 - DNA, 55 bp, Artificial
  Synthetic oligonucleotide
ccaccgttcccctcagatgtgtatgccttgccccagtacggctactgcacaatgc

SEQ ID NO: 354904 - DNA, 58 bp, Artificial
  Synthetic oligonucleotide
ccaccgttgtcccgctgtgtggtgcatccctcagttcaggggacctatgagcttttgc

SEQ ID NO: 354905 - DNA, 51 bp, Artificial
  Synthetic oligonucleotide
ccacctaatacaccaaacactgctgatatgttatgctttgtctctgcgtgt

SEQ ID NO: 354906 - DNA, 60 bp, Artificial
  Synthetic oligonucleotide
ccacctaatatgacaccagcagttgcagcactctttcaaaatgcgcagcctttcgaacat

SEQ ID NO: 354907 - DNA, 53 bp, Artificial
  Synthetic oligonucleotide
ccacctacaggcgcgtgcccgtggacccccagaagcctttggggcccggcttg

SEQ ID NO: 354908 - DNA, 55 bp, Artificial
  Synthetic oligonucleotide
ccacctacaggttattggatgcttttatcacctttggaggcaggcgtagtggtag

SEQ ID NO: 354909 - DNA, 59 bp, Artificial
  Synthetic oligonucleotide
ccacctacagttctacctgtagtgctagaaccactagctacaactaaacctccagcatc

SEQ ID NO: 354910 - DNA, 55 bp, Artificial
  Synthetic oligonucleotide
ccacctacatggcaaggtgtgccaaatggtactcccagcatcgtggagggatacg

SEQ ID NO: 354911 - DNA, 55 bp, Artificial
  Synthetic oligonucleotide
ccacctaccaataggatagtgagggcaatcagaatcggcttagcggccaatgacc

SEQ ID NO: 354912 - DNA, 55 bp, Artificial
  Synthetic oligonucleotide
ccacctaccacacgtcggcgacaacactcacaatctgccccacggaggccagtac

SEQ ID NO: 354913 - DNA, 55 bp, Artificial
  Synthetic oligonucleotide
ccacctacccaccctacatgtagagtaaccttcaaaataaagctagatgattaac

SEQ ID NO: 354914 - DNA, 54 bp, Artificial
  Synthetic oligonucleotide
ccacctaccttactcaagtcccaccagaaagggttagctcatccaaacaaccta

SEQ ID NO: 354915 - DNA, 55 bp, Artificial
  Synthetic oligonucleotide
ccacctacgactactcctgtacctcagggatatctcatccagcacgacgaggctg

SEQ ID NO: 354916 - DNA, 57 bp, Artificial
  Synthetic oligonucleotide
ccacctactcgagtatactccacagcaagttgatatctcaaatactcgggccactca

SEQ ID NO: 354917 - DNA, 60 bp, Artificial
  Synthetic oligonucleotide
ccacctactgttactcaaggccagacagcaaggcaccctccacggtgtctgacccagtca

SEQ ID NO: 354918 - DNA, 60 bp, Artificial
  Synthetic oligonucleotide
ccacctagaccagttgaaacagcaacatgcagataccgtagctcaagctaaacgtgatcg

SEQ ID NO: 354919 - DNA, 55 bp, Artificial
  Synthetic oligonucleotide
ccacctatgacgttgatgaggggcacctacacacgttgcacgacatgttaaccat

SEQ ID NO: 354920 - DNA, 55 bp, Artificial
  Synthetic oligonucleotide
ccacctatggctgatttaccagataagggaaaaccttttgattctagatttgtgt

SEQ ID NO: 354921 - DNA, 55 bp, Artificial
  Synthetic oligonucleotide
ccacctcaaatgagcgatgtcacaattacatccgtaacctcatggagatctatgg

SEQ ID NO: 354922 - DNA, 60 bp, Artificial
  Synthetic oligonucleotide
ccacctcaatgcgatatctggtaggacctagacagagctttaagcagatagagtctgagt

SEQ ID NO: 354923 - DNA, 55 bp, Artificial
  Synthetic oligonucleotide
ccacctcaattagtttgagaagtgcccacttagtgggtcaaactatattgtctgg

SEQ ID NO: 354924 - DNA, 54 bp, Artificial
  Synthetic oligonucleotide
ccacctcacttcagaagtttgtcgttacttcgatttgccatacacttatatagc

SEQ ID NO: 354925 - DNA, 60 bp, Artificial
  Synthetic oligonucleotide
ccacctcagtggaagctgcaaccaggagacgatccactcctggggacccactcactcttg

SEQ ID NO: 354926 - DNA, 55 bp, Artificial
  Synthetic oligonucleotide
ccacctccgaatagcggcctatttaagctgcggcggcgaacaatctcaggaggcc

SEQ ID NO: 354927 - DNA, 55 bp, Artificial
  Synthetic oligonucleotide
ccacctccgatgatccgaaatcccctgttaatgtccacctcaaagtataagctaa

SEQ ID NO: 354928 - DNA, 55 bp, Artificial
  Synthetic oligonucleotide
ccacctccgtagtccacctcagaatattggcttaatttccacctccgtagtccac

SEQ ID NO: 354929 - DNA, 52 bp, Artificial
  Synthetic oligonucleotide
ccacctctacaggtgagtcggctgaccccgtaactgccaccgttgagaacta

SEQ ID NO: 354930 - DNA, 55 bp, Artificial
  Synthetic oligonucleotide
ccacctctccatgtatctcgactactactgtatgtggtcccatagagtccctcag

SEQ ID NO: 354931 - DNA, 60 bp, Artificial
  Synthetic oligonucleotide
ccacctctgacataatcgagcgctacaaatcggtgactagaaggcgggacacctctgaca

SEQ ID NO: 354932 - DNA, 55 bp, Artificial
  Synthetic oligonucleotide
ccacctctgaggaaattcgcgctcacaatctgaatgcccacttactcatcaatgc

SEQ ID NO: 354933 - DNA, 55 bp, Artificial
  Synthetic oligonucleotide
ccacctctgagtcggcatcggagttgctgagcccaattgtactccgtgaagccca

SEQ ID NO: 354934 - DNA, 60 bp, Artificial
  Synthetic oligonucleotide
ccacctcttgagcaacttagcatcagggatccagaggctaatcagctacctgagacttgg

SEQ ID NO: 354935 - DNA, 55 bp, Artificial
  Synthetic oligonucleotide
ccacctgaaattgtctccggattccctctggccgaacaatatcggtagttaatta

SEQ ID NO: 354936 - DNA, 55 bp, Artificial
  Synthetic oligonucleotide
ccacctgaaggagttgataaggacctgttggcggtgtacaaagcaacagtgatgg

SEQ ID NO: 354937 - DNA, 60 bp, Artificial
  Synthetic oligonucleotide
ccacctgacgagacaaataaaaggcctctcagacaggatgaacacccaagtacgacatca

SEQ ID NO: 354938 - DNA, 50 bp, Artificial
  Synthetic oligonucleotide
ccacctgacgcacttatttcgacacaggcatgcacattggagcaatttgg

SEQ ID NO: 354939 - DNA, 59 bp, Artificial
  Synthetic oligonucleotide
ccacctgagaaatgtgacaccctcttgtgtgatattggtgagtcctctccgaacccaac

SEQ ID NO: 354940 - DNA, 55 bp, Artificial
  Synthetic oligonucleotide
ccacctgaggctcctcactcaaaatcctcactatgtattccagcttagcactctc

SEQ ID NO: 354941 - DNA, 60 bp, Artificial
  Synthetic oligonucleotide
ccacctgcccatgtggagcacagatcaccggacatgtcaaaaacggttccatgagaatcg

SEQ ID NO: 354942 - DNA, 55 bp, Artificial
  Synthetic oligonucleotide
ccacctgggcaaacgacgcccacgtacggtccacgtcgcccttcaatgtctctct

SEQ ID NO: 354943 - DNA, 54 bp, Artificial
  Synthetic oligonucleotide
ccacctggggattagctctcaagaggaaaacggacaattcacccgaggccggct

SEQ ID NO: 354944 - DNA, 53 bp, Artificial
  Synthetic oligonucleotide
ccacctggggcttctgtccccacgtcgcgtaaggatgcaatgttgggcaccca

SEQ ID NO: 354945 - DNA, 53 bp, Artificial
  Synthetic oligonucleotide
ccacctgggtgggaagtaatttggaacggcaggccttagagtctccggaacat

SEQ ID NO: 354946 - DNA, 55 bp, Artificial
  Synthetic oligonucleotide
ccacctggtcaattcacggaaagggagaatggatgacaacagaagacatgttgag

SEQ ID NO: 354947 - DNA, 55 bp, Artificial
  Synthetic oligonucleotide
ccacctggtggcagtcaaaatttcccagcacaacaacagggaaatgcatggatac

SEQ ID NO: 354948 - DNA, 51 bp, Artificial
  Synthetic oligonucleotide
ccacctgtatagagataaacactactttgtgcgtggtggtatgccatcagg

SEQ ID NO: 354949 - DNA, 60 bp, Artificial
  Synthetic oligonucleotide
ccacctgtcgagaagagattcgcaatggacgacgataaaggtactgacacaactgatgct

SEQ ID NO: 354950 - DNA, 54 bp, Artificial
  Synthetic oligonucleotide
ccaccttaatatacttgtcacaaaggatattgacttcgaaaaccttggggagaa

SEQ ID NO: 354951 - DNA, 55 bp, Artificial
  Synthetic oligonucleotide
ccaccttaatcgctttcagacatccctttgcagtgggtatccgagggcccgaccg

SEQ ID NO: 354952 - DNA, 53 bp, Artificial
  Synthetic oligonucleotide
ccaccttacctgattatcctacaacggaccgtgtgtccaaaatctttgagggt

SEQ ID NO: 354953 - DNA, 55 bp, Artificial
  Synthetic oligonucleotide
ccaccttacgtgcacgcgctactgggtcaccgcgccccccagggtggtatacgat

SEQ ID NO: 354954 - DNA, 57 bp, Artificial
  Synthetic oligonucleotide
ccaccttactgggtcagttgtgcgggtactacacccaatggtcaggatcattggagg

SEQ ID NO: 354955 - DNA, 60 bp, Artificial
  Synthetic oligonucleotide
ccaccttcaaaaggtacaccacaaacatctctgctgacatctgatggtgtcatcaagaga

SEQ ID NO: 354956 - DNA, 59 bp, Artificial
  Synthetic oligonucleotide
ccaccttcgctcaaaatgttactcgctttgtcattatacgccatcactcttccttcgtg

SEQ ID NO: 354957 - DNA, 60 bp, Artificial
  Synthetic oligonucleotide
ccaccttcggagagcacctccaggcaaatgacctagattatggtcaatgcccgaataata

SEQ ID NO: 354958 - DNA, 55 bp, Artificial
  Synthetic oligonucleotide
ccaccttcgttcgtgtggggactgagcaaaatgggtcggtggatcagtgttccga

SEQ ID NO: 354959 - DNA, 55 bp, Artificial
  Synthetic oligonucleotide
ccaccttctcagcaggtgtgatcagatcctccctcaacttatccattaatgatgt

SEQ ID NO: 354960 - DNA, 60 bp, Artificial
  Synthetic oligonucleotide
ccaccttgggaactcaccggctagtctcgtcaggcattcctggcggccctgataacagca

SEQ ID NO: 354961 - DNA, 55 bp, Artificial
  Synthetic oligonucleotide
ccaccttgtctgtagacgttgggacgtagttaatgaatcgtacctttgtgcccac

SEQ ID NO: 354962 - DNA, 50 bp, Artificial
  Synthetic oligonucleotide
ccaccttgtggttgagcgtccgcgtcgaaaagtacgtgtggccgtacgca

SEQ ID NO: 354963 - DNA, 55 bp, Artificial
  Synthetic oligonucleotide
ccaccttgttatcgggtaatacctgcatatataacggcgaaatcggctaatcggc

SEQ ID NO: 354964 - DNA, 55 bp, Artificial
  Synthetic oligonucleotide
ccacctttacttggggtacgatcactgactgacaaggattgttctcaatgattcc

SEQ ID NO: 354965 - DNA, 55 bp, Artificial
  Synthetic oligonucleotide
ccacctttacttttatggggaatggctatcaagtggaattggaggcttaaaatgc

SEQ ID NO: 354966 - DNA, 55 bp, Artificial
  Synthetic oligonucleotide
ccacctttcaaacgtagacttatgattgacttaacggttgtcttctcgctatggg

SEQ ID NO: 354967 - DNA, 56 bp, Artificial
  Synthetic oligonucleotide
ccacctttgaccgatctttgatgcgaactttaccgaatttcaccactttggtgcac

SEQ ID NO: 354968 - DNA, 54 bp, Artificial
  Synthetic oligonucleotide
ccacctttgtcattgcagacccttatcccaaacccgagggaacccgacaggctc

SEQ ID NO: 354969 - DNA, 55 bp, Artificial
  Synthetic oligonucleotide
ccacctttgtgttactattgtgatagtgtggttggtccaccaacatattgtgagt

SEQ ID NO: 354970 - DNA, 55 bp, Artificial
  Synthetic oligonucleotide
ccacgaaacgtattccagcggtcatgtctgatagggatccccgtttgcctcggga

SEQ ID NO: 354971 - DNA, 59 bp, Artificial
  Synthetic oligonucleotide
ccacgaaagattgtggttaaatcctgtctagcagacagcagcatcagattttcacagtc

SEQ ID NO: 354972 - DNA, 55 bp, Artificial
  Synthetic oligonucleotide
ccacgaaagctaagccagggcataggacccctttcttctgtagtatgagctccac

SEQ ID NO: 354973 - DNA, 55 bp, Artificial
  Synthetic oligonucleotide
ccacgaacaagcacttctgtttccccggtgacattgtatagactgtacccacggt

SEQ ID NO: 354974 - DNA, 54 bp, Artificial
  Synthetic oligonucleotide
ccacgaacacgtggcacgagcacaagggatgcacggattgagcaagcgagagcc

SEQ ID NO: 354975 - DNA, 60 bp, Artificial
  Synthetic oligonucleotide
ccacgaacagtcgaggccgttagcttcgatatgtcatacgcccagtgcgctgtcccacgt

SEQ ID NO: 354976 - DNA, 51 bp, Artificial
  Synthetic oligonucleotide
ccacgaacccctcagtttttgtcaagttgactgatcccccggcacaggtct

SEQ ID NO: 354977 - DNA, 57 bp, Artificial
  Synthetic oligonucleotide
ccacgaactgaatttactgctttctagtatagataataaatggcacctaaacgcaac

SEQ ID NO: 354978 - DNA, 59 bp, Artificial
  Synthetic oligonucleotide
ccacgaagaaaaccttcgcaaggtgtcatgcatactggggatttgacttgagtcctcga

SEQ ID NO: 354979 - DNA, 59 bp, Artificial
  Synthetic oligonucleotide
ccacgaagacatactgtatatggcaaacctacctcacctcctgctctaggaataccttc

SEQ ID NO: 354980 - DNA, 51 bp, Artificial
  Synthetic oligonucleotide
ccacgaaggctctaaaacccacaccctcccaccagccgagtatcccaggtg

SEQ ID NO: 354981 - DNA, 60 bp, Artificial
  Synthetic oligonucleotide
ccacgaatccatctacgtcaccgctggattcgagcggcgcaacaacgagaccaccagcat

SEQ ID NO: 354982 - DNA, 55 bp, Artificial
  Synthetic oligonucleotide
ccacgaatctatcaggtggacgaaagacccaaagaatactcaagaccatgtgcga

SEQ ID NO: 354983 - DNA, 55 bp, Artificial
  Synthetic oligonucleotide
ccacgaatctcaaggggtaagtgaggatcatgtcacattagtaaggctgaagacc

SEQ ID NO: 354984 - DNA, 57 bp, Artificial
  Synthetic oligonucleotide
ccacgaattccgacacactaccacgttctgtatttatcaacacttccgccattgtta

SEQ ID NO: 354985 - DNA, 55 bp, Artificial
  Synthetic oligonucleotide
ccacgaattggaagataatgaatctaggtcatttggtatactcagctgacaacct

SEQ ID NO: 354986 - DNA, 55 bp, Artificial
  Synthetic oligonucleotide
ccacgacacgcggttccagagacctacgcattcactcgatatcatctgccctgcc

SEQ ID NO: 354987 - DNA, 60 bp, Artificial
  Synthetic oligonucleotide
ccacgacatctcacatgtcggcaaggtaatgtgtatctccgatgtgacacgtggtaatgg

SEQ ID NO: 354988 - DNA, 57 bp, Artificial
  Synthetic oligonucleotide
ccacgaccgccgcctaagttaccttacagaattctccacaggccatcaactaggcga

SEQ ID NO: 354989 - DNA, 55 bp, Artificial
  Synthetic oligonucleotide
ccacgacctctacctgacggaactgactatctgctatgatacaaatctcagagtg

SEQ ID NO: 354990 - DNA, 60 bp, Artificial
  Synthetic oligonucleotide
ccacgacgcctgcaacgattcgttgtccgtcattctcttgtcgtgaatctccacgatgac

SEQ ID NO: 354991 - DNA, 55 bp, Artificial
  Synthetic oligonucleotide
ccacgacgcctgcagagattcgttgtccgtcatccttttgtcgtggatctccact

SEQ ID NO: 354992 - DNA, 60 bp, Artificial
  Synthetic oligonucleotide
ccacgacgcttgcaacgactcgttttccgtcattctcttgtcatggatctccacaatcac

SEQ ID NO: 354993 - DNA, 56 bp, Artificial
  Synthetic oligonucleotide
ccacgacgttggcagcgcgaggtctctaatggagaccaacccgttgcttcagcttg

SEQ ID NO: 354994 - DNA, 52 bp, Artificial
  Synthetic oligonucleotide
ccacgacgtttgttggcactcttcttggagtccccgcatagagggcaacgga

SEQ ID NO: 354995 - DNA, 55 bp, Artificial
  Synthetic oligonucleotide
ccacgactccctgatgtattttacgccgcaccaaatctcaggtttgttcgaaagt

SEQ ID NO: 354996 - DNA, 60 bp, Artificial
  Synthetic oligonucleotide
ccacgactcgacgacgccatctgcaaggctacctgcaattgaagggtcagaggaccctaa

SEQ ID NO: 354997 - DNA, 55 bp, Artificial
  Synthetic oligonucleotide
ccacgactcgacgtcgccacctgcaggggtatctccaattgaaaggcaggaggac

SEQ ID NO: 354998 - DNA, 60 bp, Artificial
  Synthetic oligonucleotide
ccacgactttgtcgatgaggatgggtgctacaatataatcgatgaatacacagaaggcga

SEQ ID NO: 354999 - DNA, 56 bp, Artificial
  Synthetic oligonucleotide
ccacgagaaccagtttggacctgactttgttatggcccataattcggccatttcca

SEQ ID NO: 355000 - DNA, 55 bp, Artificial
  Synthetic oligonucleotide
ccacgagaaggctcaaaggtcccatttattgtactcctcagcgttttcgctgggt

SEQ ID NO: 355001 - DNA, 60 bp, Artificial
  Synthetic oligonucleotide
ccacgagactcactgcaagtgcggtaactggagaaaccacctgtggacgctatgcgcttt

SEQ ID NO: 355002 - DNA, 55 bp, Artificial
  Synthetic oligonucleotide
ccacgagagaagaagcttgtggactacttgacgattgatgttgagccttctggac

SEQ ID NO: 355003 - DNA, 60 bp, Artificial
  Synthetic oligonucleotide
ccacgagagaatgttgctatcattcaagttggcggaccaaatgtattagacattaccgct

SEQ ID NO: 355004 - DNA, 55 bp, Artificial
  Synthetic oligonucleotide
ccacgagatggaattactgacgacattaatatagttgaggaccccaaacctcact

SEQ ID NO: 355005 - DNA, 55 bp, Artificial
  Synthetic oligonucleotide
ccacgagattacagtggcatttcaactttggtctgtaaaattgtgaacgcttctg

SEQ ID NO: 355006 - DNA, 60 bp, Artificial
  Synthetic oligonucleotide
ccacgagattgctcctgctcctaccgctatggcactggcattcactaccaaagttctttt

SEQ ID NO: 355007 - DNA, 57 bp, Artificial
  Synthetic oligonucleotide
ccacgagattggtcagcgggttcttagctcttgtctgggaagatcttcggaacctcc

SEQ ID NO: 355008 - DNA, 59 bp, Artificial
  Synthetic oligonucleotide
ccacgagcaacagagcacccttacggtgtggtcctagtgtcggatgctgttagcggaaa

SEQ ID NO: 355009 - DNA, 54 bp, Artificial
  Synthetic oligonucleotide
ccacgagcttaaaagttgatgtctgtacctaattccacatacccagggtacatc

SEQ ID NO: 355010 - DNA, 55 bp, Artificial
  Synthetic oligonucleotide
ccacgaggagttcgattgattaaagaatgtacacaactgaaattatccccggcca

SEQ ID NO: 355011 - DNA, 55 bp, Artificial
  Synthetic oligonucleotide
ccacgaggctgtgagggtccatgtaaggtccaatcctttgagtctagacacgatg

SEQ ID NO: 355012 - DNA, 55 bp, Artificial
  Synthetic oligonucleotide
ccacgagtgaggatgacaccaacctagcccactggacagaagccaagatcatgct

SEQ ID NO: 355013 - DNA, 55 bp, Artificial
  Synthetic oligonucleotide
ccacgagttactcgactcgttcgaggtaacccgcaaaggactcgtcgcaatcctc

SEQ ID NO: 355014 - DNA, 56 bp, Artificial
  Synthetic oligonucleotide
ccacgagttatacttatatgttatcagatgaaatctatgtggcaaacgtaagtggc

SEQ ID NO: 355015 - DNA, 55 bp, Artificial
  Synthetic oligonucleotide
ccacgagttcaaattccgactgatgtcttgttagtcgatgaagacttacttgaga

SEQ ID NO: 355016 - DNA, 60 bp, Artificial
  Synthetic oligonucleotide
ccacgagtttcaaaccattagcgcccttgtgcattacatgattgagaacgttcgtacatc

SEQ ID NO: 355017 - DNA, 55 bp, Artificial
  Synthetic oligonucleotide
ccacgataacggaacctgcggcgtttatgggtacctgttgccggtattctatgac

SEQ ID NO: 355018 - DNA, 60 bp, Artificial
  Synthetic oligonucleotide
ccacgatacgcgacgcgcacacgttccgacaggttgtgcgacccagacatttcctctgct

SEQ ID NO: 355019 - DNA, 51 bp, Artificial
  Synthetic oligonucleotide
ccacgatatcacgtgttacagcggccaacactgctgctagctcccattccc

SEQ ID NO: 355020 - DNA, 52 bp, Artificial
  Synthetic oligonucleotide
ccacgatcacaacagcctcaaattcatatctacagtgcaccatgggattcag

SEQ ID NO: 355021 - DNA, 55 bp, Artificial
  Synthetic oligonucleotide
ccacgatcctaagatgatgattggtgtaccgttaatgatagacactaatgatact

SEQ ID NO: 355022 - DNA, 57 bp, Artificial
  Synthetic oligonucleotide
ccacgatgcagactcaaagcttagataacgctccttcggataaaagtacttgcgcat

SEQ ID NO: 355023 - DNA, 59 bp, Artificial
  Synthetic oligonucleotide
ccacgatgcttgtaacgattcattttccgtcattcttcggttgtggatctctacgatta

SEQ ID NO: 355024 - DNA, 58 bp, Artificial
  Synthetic oligonucleotide
ccacgatggaaaaaagtggatgactgttggtgtgaccgggcctgattccaaggcagta

SEQ ID NO: 355025 - DNA, 60 bp, Artificial
  Synthetic oligonucleotide
ccacgatgtatgcaggagtccatgactctaagagactccatagcaccagacctacgactt

SEQ ID NO: 355026 - DNA, 55 bp, Artificial
  Synthetic oligonucleotide
ccacgatgtcctcagctctgaacgttgattatcgaacaaaaggtggttgcgaagc

SEQ ID NO: 355027 - DNA, 55 bp, Artificial
  Synthetic oligonucleotide
ccacgatgtgtattcggcgttgcaggattcgaacttcaacctagaagccaacgag

SEQ ID NO: 355028 - DNA, 55 bp, Artificial
  Synthetic oligonucleotide
ccacgcaaagcaatagtcagcaacaaacaacacaggcaaaccacccacacggcaa

SEQ ID NO: 355029 - DNA, 55 bp, Artificial
  Synthetic oligonucleotide
ccacgcaaccctagataacgaagttctaccagggcctcagacaatggcctttggg

SEQ ID NO: 355030 - DNA, 55 bp, Artificial
  Synthetic oligonucleotide
ccacgcaatgattactttggtgaggttctacctctttctgatattaatgctcact

SEQ ID NO: 355031 - DNA, 55 bp, Artificial
  Synthetic oligonucleotide
ccacgcacagaaaggcgtccattaggctggtgtacagttccccaacgcagatcag

SEQ ID NO: 355032 - DNA, 60 bp, Artificial
  Synthetic oligonucleotide
ccacgcacagtcatgtcgctcaaacaagtcgttatatgacctgtataatgacacttaccg

SEQ ID NO: 355033 - DNA, 55 bp, Artificial
  Synthetic oligonucleotide
ccacgcaccttcgatactttgcattccatgctactgctgtctgtagtgagcacca

SEQ ID NO: 355034 - DNA, 55 bp, Artificial
  Synthetic oligonucleotide
ccacgcagatcaaactaaatggcaaccaatagacaacccagatacacaaacacct

SEQ ID NO: 355035 - DNA, 60 bp, Artificial
  Synthetic oligonucleotide
ccacgcagcatcaccatattgcgaagtaaataagaagctcggctacatttggtacactaa

SEQ ID NO: 355036 - DNA, 55 bp, Artificial
  Synthetic oligonucleotide
ccacgcagccacactcattctctagcagcagggcgagtctctgtttacagtccca

SEQ ID NO: 355037 - DNA, 53 bp, Artificial
  Synthetic oligonucleotide
ccacgcataggcaacttgcgatcgatagaaactcgagaaatgatcgcttttcg

SEQ ID NO: 355038 - DNA, 55 bp, Artificial
  Synthetic oligonucleotide
ccacgcatccgggtgtaaatctatgttatccgtttagaacattccgaatcggacg

SEQ ID NO: 355039 - DNA, 60 bp, Artificial
  Synthetic oligonucleotide
ccacgcatcgtttgaatacactttagggcttagatctagatgcccacacaaatggttatg

SEQ ID NO: 355040 - DNA, 60 bp, Artificial
  Synthetic oligonucleotide
ccacgcatgttgggcacaatgttgatctatcaacgaatcataaggttgaaattcatacac

SEQ ID NO: 355041 - DNA, 55 bp, Artificial
  Synthetic oligonucleotide
ccacgccacagcgcacagcaaccagccaacagaaagcggccaagttaacgacctc

SEQ ID NO: 355042 - DNA, 57 bp, Artificial
  Synthetic oligonucleotide
ccacgccacctgggcgtgaaattgaattctcaacgcaatacccaataaaaattgtca

SEQ ID NO: 355043 - DNA, 53 bp, Artificial
  Synthetic oligonucleotide
ccacgccatgccctccgtgacccagagagaaagtttctctgcgaccgcaccct

SEQ ID NO: 355044 - DNA, 55 bp, Artificial
  Synthetic oligonucleotide
ccacgccatgctaagcctggtccaaccattctcatgaatgatcaggaggttagcg

SEQ ID NO: 355045 - DNA, 55 bp, Artificial
  Synthetic oligonucleotide
ccacgccccaatgaccccacagtaggcaaatgtaatgacccttacccagggaaca

SEQ ID NO: 355046 - DNA, 60 bp, Artificial
  Synthetic oligonucleotide
ccacgccgacatctggtacctaatggatatccggtctattgcaatttgcctgttaatcga

SEQ ID NO: 355047 - DNA, 55 bp, Artificial
  Synthetic oligonucleotide
ccacgcgaggggtgtacaagatgagaaactcagtggaagtaaagctacatcacgt

SEQ ID NO: 355048 - DNA, 53 bp, Artificial
  Synthetic oligonucleotide
ccacgcgccgatcccgcaaagcagagagggccaggcttggcctgatctcgggt

SEQ ID NO: 355049 - DNA, 55 bp, Artificial
  Synthetic oligonucleotide
ccacgcgccgtttgcgcagctggttatattgcatatcgaatagcgtcctctgcct

SEQ ID NO: 355050 - DNA, 54 bp, Artificial
  Synthetic oligonucleotide
ccacgcgctcgtggctacccagccggtagtagggcacttctaggttcatcgtta

SEQ ID NO: 355051 - DNA, 55 bp, Artificial
  Synthetic oligonucleotide
ccacgcgcttctacttctactgcctccatcccaagcctcatgtcactgcccattg

SEQ ID NO: 355052 - DNA, 55 bp, Artificial
  Synthetic oligonucleotide
ccacgcgtagattgaactcaattaaacgagccgctacccaatctagaactttgct

SEQ ID NO: 355053 - DNA, 54 bp, Artificial
  Synthetic oligonucleotide
ccacgcgttcaaaaccattgctaaatgctttggggagatcacggtctttaaagg

SEQ ID NO: 355054 - DNA, 55 bp, Artificial
  Synthetic oligonucleotide
ccacgctaacggattatacgaaaggaggaacagtgtgccctcactcaggcgggac

SEQ ID NO: 355055 - DNA, 54 bp, Artificial
  Synthetic oligonucleotide
ccacgctcaagcgcaaaactaaagaggaaccgaagaaaattcaccttgcggtgt

SEQ ID NO: 355056 - DNA, 60 bp, Artificial
  Synthetic oligonucleotide
ccacgctcacacatcggaattatgccatcaccgccagggatcacgtccgctaccctggaa

SEQ ID NO: 355057 - DNA, 60 bp, Artificial
  Synthetic oligonucleotide
ccacgctgagatcgatgacgaccagttctctcgggacctcctcgtttctgcactgctgcg

SEQ ID NO: 355058 - DNA, 59 bp, Artificial
  Synthetic oligonucleotide
ccacgctggacaataaacattcaaatggcacaatacatgatagaacccctcaccggacc

SEQ ID NO: 355059 - DNA, 55 bp, Artificial
  Synthetic oligonucleotide
ccacgctgtagggcctaatttctctgccacgactgaagcggaaggggaccgcgaa

SEQ ID NO: 355060 - DNA, 55 bp, Artificial
  Synthetic oligonucleotide
ccacgctgtcagccccgagcttcggagcagtcacggcccttcttcggagagccgt

SEQ ID NO: 355061 - DNA, 55 bp, Artificial
  Synthetic oligonucleotide
ccacgctgttgcaaccaacgaacgagagctgctcactcaacatggtgtgtcatgg

SEQ ID NO: 355062 - DNA, 57 bp, Artificial
  Synthetic oligonucleotide
ccacgcttgcagaggggacgtacgaaacacccaacatcacagtccaggggtatcacc

SEQ ID NO: 355063 - DNA, 56 bp, Artificial
  Synthetic oligonucleotide
ccacgctttcaaagctgagttcttttcctcgtccaagaactccttatagctagcgt

SEQ ID NO: 355064 - DNA, 54 bp, Artificial
  Synthetic oligonucleotide
ccacggaaaaagaggacggttgtcttgacagaatccacagtctcttctgccttg

SEQ ID NO: 355065 - DNA, 55 bp, Artificial
  Synthetic oligonucleotide
ccacggaaagcatttcaactggttgaattagctaaagaggcgatgtatgatcgag

SEQ ID NO: 355066 - DNA, 55 bp, Artificial
  Synthetic oligonucleotide
ccacggaacatagatattattgtccatagaggattcactcaaggaattcgcagtt

SEQ ID NO: 355067 - DNA, 55 bp, Artificial
  Synthetic oligonucleotide
ccacggaagtgttgtcgtttgcatttagggatttaaaggttgtgtggcgcgacag

SEQ ID NO: 355068 - DNA, 59 bp, Artificial
  Synthetic oligonucleotide
ccacggaccctgcgtggacatatatagacacgtttctgaggaatggtctagatggtaac

SEQ ID NO: 355069 - DNA, 55 bp, Artificial
  Synthetic oligonucleotide
ccacggacgaagactccagtgcatgtgttttgccagattttaaccctacacaggc

SEQ ID NO: 355070 - DNA, 57 bp, Artificial
  Synthetic oligonucleotide
ccacggacgatgtgtttaacgcctttgagtatgaatcgttagctgtctgtttacctc

SEQ ID NO: 355071 - DNA, 60 bp, Artificial
  Synthetic oligonucleotide
ccacggactagagccttacacgctctcagcagacacgattaggacagcctacggagcacc

SEQ ID NO: 355072 - DNA, 56 bp, Artificial
  Synthetic oligonucleotide
ccacggactcaggcacagcactctgtccgcacagatgccttcggagagcagttccg

SEQ ID NO: 355073 - DNA, 55 bp, Artificial
  Synthetic oligonucleotide
ccacggaggagctgatatttggaggacaagctgtggataggagcaaccctatccc

SEQ ID NO: 355074 - DNA, 58 bp, Artificial
  Synthetic oligonucleotide
ccacggaggtgggccgtgcgtgtgccggctgtcgtgtggagcccggcgtagttcacta

SEQ ID NO: 355075 - DNA, 50 bp, Artificial
  Synthetic oligonucleotide
ccacggatatttgtatcgtctgggttgaccttaataatatattccgtctc

SEQ ID NO: 355076 - DNA, 60 bp, Artificial
  Synthetic oligonucleotide
ccacggatgcaacaactatcttgggcatcggcactgtcctagaccaagcagagactgcgg

SEQ ID NO: 355077 - DNA, 57 bp, Artificial
  Synthetic oligonucleotide
ccacggattggctacgagatcgacttaccctgaaaaggatgttgagcgttcttgaac

SEQ ID NO: 355078 - DNA, 55 bp, Artificial
  Synthetic oligonucleotide
ccacggcaccatttcgtgtgtactctccataacagtttccgattccttgtccgct

SEQ ID NO: 355079 - DNA, 55 bp, Artificial
  Synthetic oligonucleotide
ccacggcaccgttcctgggcatcggatacgaacatctcgttattcatggcaacgg

SEQ ID NO: 355080 - DNA, 55 bp, Artificial
  Synthetic oligonucleotide
ccacggccgatgctagaggccttatccagtcctctcgtgcgcacgcaattgttgc

SEQ ID NO: 355081 - DNA, 60 bp, Artificial
  Synthetic oligonucleotide
ccacggcgagggcagattactcaagcctgtacggagttgaccagttatgagcgcattcgc

SEQ ID NO: 355082 - DNA, 55 bp, Artificial
  Synthetic oligonucleotide
ccacggctacgcgcgacgcagaggccagcacgctgtactttgtccttcacgagtt

SEQ ID NO: 355083 - DNA, 55 bp, Artificial
  Synthetic oligonucleotide
ccacggctacgctgtaatggaacaacctctccaccattgcgccgacaacatgccc

SEQ ID NO: 355084 - DNA, 55 bp, Artificial
  Synthetic oligonucleotide
ccacggctagatgctataaagctgggaagacagacatcaaaagccaagcgccggc

SEQ ID NO: 355085 - DNA, 55 bp, Artificial
  Synthetic oligonucleotide
ccacggctggccaaggcttgaggaaagatgggaatacgttgaacgtaattgtagg

SEQ ID NO: 355086 - DNA, 52 bp, Artificial
  Synthetic oligonucleotide
ccacgggaaattattaaaacgagaaccgagtattctgttcggagtttggtga

SEQ ID NO: 355087 - DNA, 59 bp, Artificial
  Synthetic oligonucleotide
ccacgggacgttctagaacagctcgccgcaggacgtgagtgggagtgtgtaccagacag

SEQ ID NO: 355088 - DNA, 55 bp, Artificial
  Synthetic oligonucleotide
ccacgggaggtagaagaggccactgaaggagagaccaactgcttgttacaccctg

SEQ ID NO: 355089 - DNA, 55 bp, Artificial
  Synthetic oligonucleotide
ccacgggcccggtgactcggaacctgaaagagagttccacggaatcaatgtcggc

SEQ ID NO: 355090 - DNA, 51 bp, Artificial
  Synthetic oligonucleotide
ccacgggcgcaaagggtcctgacggtccgtttaggtcgtttggagagcccg

SEQ ID NO: 355091 - DNA, 50 bp, Artificial
  Synthetic oligonucleotide
ccacgggctccgttatttcctgcgtgcacaccacgtaccccagtggcacg

SEQ ID NO: 355092 - DNA, 53 bp, Artificial
  Synthetic oligonucleotide
ccacggggaagtggaagtgccgtggatgacctctggaggcacatacctaaaaa

SEQ ID NO: 355093 - DNA, 56 bp, Artificial
  Synthetic oligonucleotide
ccacggggccaaaagccacgtcctaacggacccatcatgtgtgcaaccccagcacg

SEQ ID NO: 355094 - DNA, 56 bp, Artificial
  Synthetic oligonucleotide
ccacggggcgcacctctctttacgcggactccccgagtgtgccttttcatctgccg

SEQ ID NO: 355095 - DNA, 54 bp, Artificial
  Synthetic oligonucleotide
ccacgggggccggatgagtcgtatggcttcttgtactttagcgtggtacatgcg

SEQ ID NO: 355096 - DNA, 49 bp, Artificial
  Synthetic oligonucleotide
ccacgggtgcgcttttccctttggtcgattacgaccgtttttgtcccgg

SEQ ID NO: 355097 - DNA, 58 bp, Artificial
  Synthetic oligonucleotide
ccacgggttcaggacagtagtttcactggttcctgcactaatgctgttggagggagtg

SEQ ID NO: 355098 - DNA, 55 bp, Artificial
  Synthetic oligonucleotide
ccacggtctgatatttatgctacaggatacggataccctgagttagagatagcac

SEQ ID NO: 355099 - DNA, 55 bp, Artificial
  Synthetic oligonucleotide
ccacggtgacccagggactggaaaatcgatagctacttctatcttagccagaatg

SEQ ID NO: 355100 - DNA, 55 bp, Artificial
  Synthetic oligonucleotide
ccacggttaacctctgcggcggttctggtagcggcatccagtgagttgcttgctc

SEQ ID NO: 355101 - DNA, 55 bp, Artificial
  Synthetic oligonucleotide
ccacggttcagttacacaatacgtgattccagaatggcttggagagagcattact

SEQ ID NO: 355102 - DNA, 55 bp, Artificial
  Synthetic oligonucleotide
ccacggttgctatagctcactatggtaagaacagactcgctgagagcaacatccg

SEQ ID NO: 355103 - DNA, 56 bp, Artificial
  Synthetic oligonucleotide
ccacggttggttggacgtcggtggcttcttctgtgactagtgccgccttgtatccc

SEQ ID NO: 355104 - DNA, 59 bp, Artificial
  Synthetic oligonucleotide
ccacggtttggacgagtcgttagagacatcgctaaagcgaaaatcactcaggatgttgc

SEQ ID NO: 355105 - DNA, 53 bp, Artificial
  Synthetic oligonucleotide
ccacgtaatttctgacccgtcgtactgagaacttcgtcaccaaaactaccgtc

SEQ ID NO: 355106 - DNA, 60 bp, Artificial
  Synthetic oligonucleotide
ccacgtacattaatagttgaaggacattttaacgcacaagacgctacaatcgcacgcaca

SEQ ID NO: 355107 - DNA, 60 bp, Artificial
  Synthetic oligonucleotide
ccacgtactcagactgatagttgtagacgatatatcaataatggactaccaccaattcag

SEQ ID NO: 355108 - DNA, 59 bp, Artificial
  Synthetic oligonucleotide
ccacgtactgcacgctatcggggtgcccttcattcacatactcccggtaccacagctgg

SEQ ID NO: 355109 - DNA, 55 bp, Artificial
  Synthetic oligonucleotide
ccacgtagccggtattaattcgaactccgcaatgggcgccaatcgtctccttcga

SEQ ID NO: 355110 - DNA, 60 bp, Artificial
  Synthetic oligonucleotide
ccacgtatatcgacggcgggataggcggggtgtagcgctgcactttgtgcatccaccgat

SEQ ID NO: 355111 - DNA, 56 bp, Artificial
  Synthetic oligonucleotide
ccacgtatcaagacccatgttcctgtacgtaagaaccaatggaacttccaagatta

SEQ ID NO: 355112 - DNA, 52 bp, Artificial
  Synthetic oligonucleotide
ccacgtatctgtggtacctttaggtctgtaggcccttaccctttagggtcac

SEQ ID NO: 355113 - DNA, 55 bp, Artificial
  Synthetic oligonucleotide
ccacgtattacaacttagttggggatgtagactcatacataaggaacaccgggct

SEQ ID NO: 355114 - DNA, 53 bp, Artificial
  Synthetic oligonucleotide
ccacgtatttacttgactgacaagagataaggttaaatagttggatgtggttc

SEQ ID NO: 355115 - DNA, 56 bp, Artificial
  Synthetic oligonucleotide
ccacgtcaatttctgcggtcggtgtgttagccccacactcggcccttgctgtactt

SEQ ID NO: 355116 - DNA, 55 bp, Artificial
  Synthetic oligonucleotide
ccacgtcacgctaaaccaggaccaaccattttgatgaatgaccaagaagttggcg

SEQ ID NO: 355117 - DNA, 51 bp, Artificial
  Synthetic oligonucleotide
ccacgtcagggtgaacctgtccgagctaacggcgtccggagaccaactgct

SEQ ID NO: 355118 - DNA, 52 bp, Artificial
  Synthetic oligonucleotide
ccacgtcccggcccctgtcttcagcttcggagccccgatcctgttggcaggt

SEQ ID NO: 355119 - DNA, 60 bp, Artificial
  Synthetic oligonucleotide
ccacgtccctcagctatctatttgagagagagactgtcacgacggctaacacggagatta

SEQ ID NO: 355120 - DNA, 56 bp, Artificial
  Synthetic oligonucleotide
ccacgtcctcgcagaggcaggcatccgccaagaggaggacggggacggctgccact

SEQ ID NO: 355121 - DNA, 60 bp, Artificial
  Synthetic oligonucleotide
ccacgtcctctcagattacctgatggacctccctgttctcagcggtcaaaattcttgctg

SEQ ID NO: 355122 - DNA, 57 bp, Artificial
  Synthetic oligonucleotide
ccacgtccttctctgtgaattgtttggagtggatttttacagtcggtgctctgaacg

SEQ ID NO: 355123 - DNA, 56 bp, Artificial
  Synthetic oligonucleotide
ccacgtcgtccaaacttggaagttcaggtaggctttgtggagatgcaacgctttcc

SEQ ID NO: 355124 - DNA, 55 bp, Artificial
  Synthetic oligonucleotide
ccacgtctaggtctctatgaattttgtagtggttagcctaccaccccttggccac

SEQ ID NO: 355125 - DNA, 55 bp, Artificial
  Synthetic oligonucleotide
ccacgtctccacttacatctactattgctactgggactaaccttgtgctatatgc

SEQ ID NO: 355126 - DNA, 60 bp, Artificial
  Synthetic oligonucleotide
ccacgtctgctaatgttgcgcgtttgcttagtgttataacgcgtgatatagtatacgatg

SEQ ID NO: 355127 - DNA, 53 bp, Artificial
  Synthetic oligonucleotide
ccacgtgacccgcctccgccaattaacaggtacttcgtacacttcctgggcgg

SEQ ID NO: 355128 - DNA, 55 bp, Artificial
  Synthetic oligonucleotide
ccacgtgacccgtctcgcccaaccagagtctatgtcgttcatttcctgggcgtgg

SEQ ID NO: 355129 - DNA, 55 bp, Artificial
  Synthetic oligonucleotide
ccacgtgactcccgcaggccaatcagagtctatgtcgtgcacttcctgggtatgg

SEQ ID NO: 355130 - DNA, 55 bp, Artificial
  Synthetic oligonucleotide
ccacgtgcaagatcgatgagctcaacccgtagtagtgcagaaagtagtcccacca

SEQ ID NO: 355131 - DNA, 51 bp, Artificial
  Synthetic oligonucleotide
ccacgtgccgctaagtccccgaaccctaaacgcctgggtaaaattagtgga

SEQ ID NO: 355132 - DNA, 52 bp, Artificial
  Synthetic oligonucleotide
ccacgtgctctcagcgacagaggtaaattcagttattcacggaaggaaatat

SEQ ID NO: 355133 - DNA, 55 bp, Artificial
  Synthetic oligonucleotide
ccacgtggacgccaagcggtcgtatcacatctcagagactgcgtatgacatcgag

SEQ ID NO: 355134 - DNA, 60 bp, Artificial
  Synthetic oligonucleotide
ccacgtggctgaaatctacgtctctatctgtgaactgtttagataagatcttcaccgtcg

SEQ ID NO: 355135 - DNA, 56 bp, Artificial
  Synthetic oligonucleotide
ccacgtgggaccggcgcaaccccattacgtggtacgatctcgaatatattggcggc

SEQ ID NO: 355136 - DNA, 56 bp, Artificial
  Synthetic oligonucleotide
ccacgtggtgctagcactctggttctacggaacccttgtgcgcctgttttacgccc

SEQ ID NO: 355137 - DNA, 55 bp, Artificial
  Synthetic oligonucleotide
ccacgttagtgatgccagagggctaccaccctcatggttccccatgaagtgtggc

SEQ ID NO: 355138 - DNA, 55 bp, Artificial
  Synthetic oligonucleotide
ccacgttcatggacgacttcgggcgtccgaacaaccgcagtgtgcttggtaacgg

SEQ ID NO: 355139 - DNA, 52 bp, Artificial
  Synthetic oligonucleotide
ccacgttccatggagcctcatcccgaaccatagccacacccgtgggagccct

SEQ ID NO: 355140 - DNA, 54 bp, Artificial
  Synthetic oligonucleotide
ccacgttccgcctgacgagtctaataataatgccttggtgactaagtgtggtcc

SEQ ID NO: 355141 - DNA, 59 bp, Artificial
  Synthetic oligonucleotide
ccacgttccgtctgcctatatatcttagcacgatcactactaataacttgattaaaaga

SEQ ID NO: 355142 - DNA, 58 bp, Artificial
  Synthetic oligonucleotide
ccacgttctcctgctgctggttgatccgtacgggtctatggaccatcccgtcgtggag

SEQ ID NO: 355143 - DNA, 58 bp, Artificial
  Synthetic oligonucleotide
ccacgttgggatgtccccctctcacaacgcgcactaggaggttcaacatgttagtggc

SEQ ID NO: 355144 - DNA, 55 bp, Artificial
  Synthetic oligonucleotide
ccacgtttagtggatgaagcgaatttaccatacttcacaggtgagtgcgtgaggt

SEQ ID NO: 355145 - DNA, 55 bp, Artificial
  Synthetic oligonucleotide
ccacgttttgaaactactagatctggttcttattacgtgcaggacaccaagggct

SEQ ID NO: 355146 - DNA, 58 bp, Artificial
  Synthetic oligonucleotide
ccactaaaacgtggatatactctcccacagaagtggtaaccgatgtgccatacgcctc

SEQ ID NO: 355147 - DNA, 55 bp, Artificial
  Synthetic oligonucleotide
ccactaaaccttcagccttaaacgcaatggaagtgggagtcactccagatgtgcg

SEQ ID NO: 355148 - DNA, 56 bp, Artificial
  Synthetic oligonucleotide
ccactaaaggcagatgtattagcacatattaatgctatggatcccaggattcttga

SEQ ID NO: 355149 - DNA, 55 bp, Artificial
  Synthetic oligonucleotide
ccactaacagaagaagcagagttagaactagcagaaaatagggagattctacaag

SEQ ID NO: 355150 - DNA, 57 bp, Artificial
  Synthetic oligonucleotide
ccactaaccacgactcccctgacgccgagctcatagcagccaacctcatgtggaggc

SEQ ID NO: 355151 - DNA, 55 bp, Artificial
  Synthetic oligonucleotide
ccactaacgtataacggtcataaaccaactgagcgtgaacagaagtggagtatcc

SEQ ID NO: 355152 - DNA, 56 bp, Artificial
  Synthetic oligonucleotide
ccactaagaaatgtccgccactcagaactctccctcaaagcttatttagtacgttc

SEQ ID NO: 355153 - DNA, 55 bp, Artificial
  Synthetic oligonucleotide
ccactaagaacgtacttgaagcgtagtacctgccctaagtacttgaaggctgtcc

SEQ ID NO: 355154 - DNA, 56 bp, Artificial
  Synthetic oligonucleotide
ccactaagaggaggtctaaactgcaacttatcgattgacagtcctttgatgaaggg

SEQ ID NO: 355155 - DNA, 55 bp, Artificial
  Synthetic oligonucleotide
ccactaagaggctcacagtcctcggaaaggatgcaggtgcgcttactgaagaccc

SEQ ID NO: 355156 - DNA, 57 bp, Artificial
  Synthetic oligonucleotide
ccactaagataattatggactcctaatgaacgagcccacattgtcttccccgttcga

SEQ ID NO: 355157 - DNA, 55 bp, Artificial
  Synthetic oligonucleotide
ccactaagatgttgtagaatctacatcctatgcatagatagccgtggtcactaca

SEQ ID NO: 355158 - DNA, 59 bp, Artificial
  Synthetic oligonucleotide
ccactaaggacagcaggcgtaatacttggctatataatactggcaattgtattcttagt

SEQ ID NO: 355159 - DNA, 59 bp, Artificial
  Synthetic oligonucleotide
ccactaagtccgggtgaacgtggaatgcagacgaagatccgtgaattggaggatgaaca

SEQ ID NO: 355160 - DNA, 51 bp, Artificial
  Synthetic oligonucleotide
ccactaagtttaactttgctcgtaaagcggaaagtagtttacggtactctc

SEQ ID NO: 355161 - DNA, 60 bp, Artificial
  Synthetic oligonucleotide
ccactaatggagtcaggctggtcagatacggctcatggtgttggtgagattccaatgaag

SEQ ID NO: 355162 - DNA, 55 bp, Artificial
  Synthetic oligonucleotide
ccactaatgtagatgtgatgggtgatgacagatggatgtacttacatagtagaat

SEQ ID NO: 355163 - DNA, 55 bp, Artificial
  Synthetic oligonucleotide
ccactacaccttcagtgccagaaaattatgaagaaagagtgatcgacatgtacag

SEQ ID NO: 355164 - DNA, 58 bp, Artificial
  Synthetic oligonucleotide
ccactacagccagggtactcgagtgttttcagtcgtacactcctgggagagatcctta

SEQ ID NO: 355165 - DNA, 55 bp, Artificial
  Synthetic oligonucleotide
ccactacatcaagtgtcactccacacatctcgcccgtgtcacattgtggatgggc

SEQ ID NO: 355166 - DNA, 55 bp, Artificial
  Synthetic oligonucleotide
ccactacatcatcccttaccagaagagaagttgattatcgagaccgacgcatcag

SEQ ID NO: 355167 - DNA, 60 bp, Artificial
  Synthetic oligonucleotide
ccactacattagcatggggaaatctgggctagaactaaccttcaccaatgactccatcat

SEQ ID NO: 355168 - DNA, 60 bp, Artificial
  Synthetic oligonucleotide
ccactacattcaaaccacctaatgattattggctacttattagctcaaatacagatggag

SEQ ID NO: 355169 - DNA, 58 bp, Artificial
  Synthetic oligonucleotide
ccactacccaatctaaatgaggatctaacctgtggaaatatactaatgtgggaggctg

SEQ ID NO: 355170 - DNA, 55 bp, Artificial
  Synthetic oligonucleotide
ccactaccccatcagatagtgtagaaaccagaacaacactgatgcattatgttgg

SEQ ID NO: 355171 - DNA, 59 bp, Artificial
  Synthetic oligonucleotide
ccactacccgcgcccagagaagccacgtcccgaagcatattggaacgagtggatgaagc

SEQ ID NO: 355172 - DNA, 53 bp, Artificial
  Synthetic oligonucleotide
ccactaccgctggcaagatcacatgtgacatgaagtctgtcgtaactttcatt

SEQ ID NO: 355173 - DNA, 55 bp, Artificial
  Synthetic oligonucleotide
ccactaccgtcgagaactacggaggagagacgcaagtccaacgtcgccaccacac

SEQ ID NO: 355174 - DNA, 60 bp, Artificial
  Synthetic oligonucleotide
ccactacgctacgcagcagccttagctacgccggagctgagcttgcccacgttctaatat

SEQ ID NO: 355175 - DNA, 55 bp, Artificial
  Synthetic oligonucleotide
ccactactaccttttgaagacatgaccactagctagtttctgattaatactagac

SEQ ID NO: 355176 - DNA, 55 bp, Artificial
  Synthetic oligonucleotide
ccactactactaataacgctcagagtcccgtttctgaccctgtcaatgcaagtgc

SEQ ID NO: 355177 - DNA, 60 bp, Artificial
  Synthetic oligonucleotide
ccactactgaagactgacgagcaagatccagagatgattgagttagaggaggaatcacta

SEQ ID NO: 355178 - DNA, 60 bp, Artificial
  Synthetic oligonucleotide
ccactagaaaaggttgaggctaacaaaacacgcaccttcacagctgctcctatggacaca

SEQ ID NO: 355179 - DNA, 58 bp, Artificial
  Synthetic oligonucleotide
ccactagaacccgctgtggtcaacagatttctgtctgaactacttcgacgaacaacga

SEQ ID NO: 355180 - DNA, 57 bp, Artificial
  Synthetic oligonucleotide
ccactagagaggtacaggattgggcacggtagaaggagttccctgtctgaattctac

SEQ ID NO: 355181 - DNA, 55 bp, Artificial
  Synthetic oligonucleotide
ccactagagctagctgtagaaattgcaaacaagactgtgatagatactgaacctt

SEQ ID NO: 355182 - DNA, 53 bp, Artificial
  Synthetic oligonucleotide
ccactagaggatgacagatggaagtatctgcgcagcagagtacaactgtttac

SEQ ID NO: 355183 - DNA, 55 bp, Artificial
  Synthetic oligonucleotide
ccactagatcagatttcgtttatttcacgttatccccgaaaattgccctctggag

SEQ ID NO: 355184 - DNA, 60 bp, Artificial
  Synthetic oligonucleotide
ccactagatgaccctaacgttatcctcgatgttgatcagttacttaggcaggctacgtca

SEQ ID NO: 355185 - DNA, 55 bp, Artificial
  Synthetic oligonucleotide
ccactagatggcactaactagtgtgacagggttatgagatgccaagtgagctgga

SEQ ID NO: 355186 - DNA, 59 bp, Artificial
  Synthetic oligonucleotide
ccactagatttcagttcaaattagacgagaaattcattagaaccgatcaagagcacgta

SEQ ID NO: 355187 - DNA, 60 bp, Artificial
  Synthetic oligonucleotide
ccactagcatcgttattggagatgtgccacagcacacagattgggggaataaggatggta

SEQ ID NO: 355188 - DNA, 55 bp, Artificial
  Synthetic oligonucleotide
ccactaggaatatacgggtttgcgttggtattgacccactagtgaccagatggac

SEQ ID NO: 355189 - DNA, 55 bp, Artificial
  Synthetic oligonucleotide
ccactaggcacatcaccacacgttacgcgggaacaggtgaacaatatattggcac

SEQ ID NO: 355190 - DNA, 56 bp, Artificial
  Synthetic oligonucleotide
ccactaggcatgactttcaccgcaccaaataagcttaccttcggaggatacgttcc

SEQ ID NO: 355191 - DNA, 59 bp, Artificial
  Synthetic oligonucleotide
ccactagtgcgctttgctacgcaaggacgggtctatcctcatttctgaccgtcgacaaa

SEQ ID NO: 355192 - DNA, 55 bp, Artificial
  Synthetic oligonucleotide
ccactagtgtgtggtaaagcaattagtctagtggatagagcaacaaatatcagat

SEQ ID NO: 355193 - DNA, 55 bp, Artificial
  Synthetic oligonucleotide
ccactagttatcaacaaccgcgtgctagaattgaacattggtccggggttgcaag

SEQ ID NO: 355194 - DNA, 60 bp, Artificial
  Synthetic oligonucleotide
ccactatatgatgcaatcaaatgcatgaagacatttttcggctggaaagagcccaacatt

SEQ ID NO: 355195 - DNA, 55 bp, Artificial
  Synthetic oligonucleotide
ccactatcacgacacaagattctgtcaacaccatagtagcctatggtgagtggcc

SEQ ID NO: 355196 - DNA, 55 bp, Artificial
  Synthetic oligonucleotide
ccactatcgctggttttcctgaacgagaatctgaattacggcaaactggaactcc

SEQ ID NO: 355197 - DNA, 55 bp, Artificial
  Synthetic oligonucleotide
ccactatcggacgaaagatgctcaatacagaagaggagccaaagaacgaagcgga

SEQ ID NO: 355198 - DNA, 54 bp, Artificial
  Synthetic oligonucleotide
ccactatcgggttcttacctgctcaaagctgggaagatcattactccttcagga

SEQ ID NO: 355199 - DNA, 59 bp, Artificial
  Synthetic oligonucleotide
ccactatctaaccttcttacaagctgagaaggaaagtttgatgagtcatttgattccaa

SEQ ID NO: 355200 - DNA, 55 bp, Artificial
  Synthetic oligonucleotide
ccactatctccaagtgccgtcagtcctgttcctcctaacaatgaggacggggctg

SEQ ID NO: 355201 - DNA, 60 bp, Artificial
  Synthetic oligonucleotide
ccactatctctataccgagttgacaatcataacaaccattgacattcactgatatgacat

SEQ ID NO: 355202 - DNA, 55 bp, Artificial
  Synthetic oligonucleotide
ccactatctcttttacagagcatggctctttgctgctaaagttacctggaacggg

SEQ ID NO: 355203 - DNA, 57 bp, Artificial
  Synthetic oligonucleotide
ccactatcttctaacacctggccgctccactccgttgagttccttgcggacttcaaa

SEQ ID NO: 355204 - DNA, 55 bp, Artificial
  Synthetic oligonucleotide
ccactatgaacccgatagtagacctggcagatgaggctagaaattccccactggc

SEQ ID NO: 355205 - DNA, 55 bp, Artificial
  Synthetic oligonucleotide
ccactatgagaatgtcatccttcatgatgacttttaaaccaggcagtgattccag

SEQ ID NO: 355206 - DNA, 55 bp, Artificial
  Synthetic oligonucleotide
ccactatgaggagtgctcctgttatccagacgctagcgaggtaatgtgtgtgtgc

SEQ ID NO: 355207 - DNA, 55 bp, Artificial
  Synthetic oligonucleotide
ccactatggtgaaggagtatagggataagatcgatgctctacggagcgcaattga

SEQ ID NO: 355208 - DNA, 55 bp, Artificial
  Synthetic oligonucleotide
ccactatgttcgcttgataaatacatgcacatggtgaagactattgttaagccgg

SEQ ID NO: 355209 - DNA, 54 bp, Artificial
  Synthetic oligonucleotide
ccactattacctaccataagaagggtatagtgatgcagtcctcacccctttttt

SEQ ID NO: 355210 - DNA, 55 bp, Artificial
  Synthetic oligonucleotide
ccactattactacacaagaggctgccaattcggtggttgcctacggacgatggcc

SEQ ID NO: 355211 - DNA, 60 bp, Artificial
  Synthetic oligonucleotide
ccactattgaagtgtgggatagcgcccaccatttgaagtgtaggatagcgcctaccaatc

SEQ ID NO: 355212 - DNA, 60 bp, Artificial
  Synthetic oligonucleotide
ccactattggagtgtaggatagcgcctaccatttgaatgtcaggacagcgcctgatttta

SEQ ID NO: 355213 - DNA, 55 bp, Artificial
  Synthetic oligonucleotide
ccactattgtactaaacacatcgcacatgaaacagagtatagagctcagcgtgag

SEQ ID NO: 355214 - DNA, 55 bp, Artificial
  Synthetic oligonucleotide
ccactatttctggggttgctaactatgctgtatcacaagatggagaaaatggtgc

SEQ ID NO: 355215 - DNA, 55 bp, Artificial
  Synthetic oligonucleotide
ccactcaaaagccgtcggttaaaggtatactccacaaattcaagcaaataggaga

SEQ ID NO: 355216 - DNA, 57 bp, Artificial
  Synthetic oligonucleotide
ccactcaaatgtcttacaactggagaagcatcaatacggaaaaaagaccttactgct

SEQ ID NO: 355217 - DNA, 60 bp, Artificial
  Synthetic oligonucleotide
ccactcaaattacaatgaacgaattaacgatgctgtggctattattacggctgctaatag

SEQ ID NO: 355218 - DNA, 59 bp, Artificial
  Synthetic oligonucleotide
ccactcaagagacattaaacgtagtaaccaatcatgctatctctcagttcgagaaactt

SEQ ID NO: 355219 - DNA, 50 bp, Artificial
  Synthetic oligonucleotide
ccactcaataatatactgaggtgatctaagaatacaatacgacactccaa

SEQ ID NO: 355220 - DNA, 55 bp, Artificial
  Synthetic oligonucleotide
ccactcaattcaacttgggaatcataatcagattgaaacatgcaatcaaagcgtc

SEQ ID NO: 355221 - DNA, 56 bp, Artificial
  Synthetic oligonucleotide
ccactcacaggcagcttgcgctggacagatcgaacaggaatgagaaattcgggagc

SEQ ID NO: 355222 - DNA, 55 bp, Artificial
  Synthetic oligonucleotide
ccactcacgcattaagtgggctcgtcgccaggttggtaagactttgtttgatatt

SEQ ID NO: 355223 - DNA, 58 bp, Artificial
  Synthetic oligonucleotide
ccactcacggtcttgtgatataactcgttcaaatgcgttggttatatccttgtctaag

SEQ ID NO: 355224 - DNA, 55 bp, Artificial
  Synthetic oligonucleotide
ccactcactctacaactggaaccgcgaatgtcagacgccctctacccagcgaagg

SEQ ID NO: 355225 - DNA, 60 bp, Artificial
  Synthetic oligonucleotide
ccactcagaaagcgatcgacgggatcaccaataaagtcaactcaataattgataaaatga

SEQ ID NO: 355226 - DNA, 55 bp, Artificial
  Synthetic oligonucleotide
ccactcagctaaaaggtttgcaagcaatttcagtgctcgatatgcccatgatagc

SEQ ID NO: 355227 - DNA, 55 bp, Artificial
  Synthetic oligonucleotide
ccactcaggaaatactttctgctagccctcaccttggatccaccattccggttgc

SEQ ID NO: 355228 - DNA, 60 bp, Artificial
  Synthetic oligonucleotide
ccactcagggtcctcagggagcaccctcatcccaggactcgcgccaggcacaacggtcaa

SEQ ID NO: 355229 - DNA, 55 bp, Artificial
  Synthetic oligonucleotide
ccactcaggtaattatgtgggcctaaagcacgagcccacatcgtcttgcccgttc

SEQ ID NO: 355230 - DNA, 58 bp, Artificial
  Synthetic oligonucleotide
ccactcatactcccctcgtggagtcgagttgaaacacaattcagattttgctttcaaa

SEQ ID NO: 355231 - DNA, 55 bp, Artificial
  Synthetic oligonucleotide
ccactcatgaaatgtactgggtttcatgtggaacaggaaacattgtgtcagcagt

SEQ ID NO: 355232 - DNA, 55 bp, Artificial
  Synthetic oligonucleotide
ccactcatggtgctccaggctagcataattaaagtgccgtacttcgtacgcgccc

SEQ ID NO: 355233 - DNA, 55 bp, Artificial
  Synthetic oligonucleotide
ccactcattcatgaaccaaccgatccaatatggaacgacgttaagagagaaacac

SEQ ID NO: 355234 - DNA, 52 bp, Artificial
  Synthetic oligonucleotide
ccactccaaagtacgaaggcccaaccggacttatgatccccttaaacgaagc

SEQ ID NO: 355235 - DNA, 55 bp, Artificial
  Synthetic oligonucleotide
ccactccaccttcgcgaaccaacttctcacgtacgtcctgagtctaaagacggtg

SEQ ID NO: 355236 - DNA, 57 bp, Artificial
  Synthetic oligonucleotide
ccactccactcccattccacctcaacggaagactgtgcttctgaagtttatgctggg

SEQ ID NO: 355237 - DNA, 52 bp, Artificial
  Synthetic oligonucleotide
ccactccagtgggccaacctaaactttacacagtgcggttcggaagccttga

SEQ ID NO: 355238 - DNA, 59 bp, Artificial
  Synthetic oligonucleotide
ccactccattgtgatatttgcataggtgaccatatttctcccagacctgttgatcaaac

SEQ ID NO: 355239 - DNA, 57 bp, Artificial
  Synthetic oligonucleotide
ccactcccactaaacttattacatatgataatcctgcatatgaaggtatagatgtgg

SEQ ID NO: 355240 - DNA, 55 bp, Artificial
  Synthetic oligonucleotide
ccactcccctcattggaccaagtgggacatcaggaaggtccattcacagctcacg

SEQ ID NO: 355241 - DNA, 55 bp, Artificial
  Synthetic oligonucleotide
ccactcccgcatcgaaggtacgtcgccgtctcaatttcgacagcccttacacgag

SEQ ID NO: 355242 - DNA, 55 bp, Artificial
  Synthetic oligonucleotide
ccactcccgcctcgaaggtgcgtcggcggctgaacttcgacagcccttatacggg

SEQ ID NO: 355243 - DNA, 60 bp, Artificial
  Synthetic oligonucleotide
ccactcccgtgatcgtcacctccaacaccaacatgtgcgccgtgattgacgggaacagca

SEQ ID NO: 355244 - DNA, 60 bp, Artificial
  Synthetic oligonucleotide
ccactccgaaacgctgacaatagaattagtcacaactttcatgaaatactagttgatgaa

SEQ ID NO: 355245 - DNA, 55 bp, Artificial
  Synthetic oligonucleotide
ccactccgaagcaacatgagcgttttatagtgtatgtaggctcgcccactatgga

SEQ ID NO: 355246 - DNA, 55 bp, Artificial
  Synthetic oligonucleotide
ccactccgttggtcctctcatcatcatgagcaagatctttgtcaaccccagtgca

SEQ ID NO: 355247 - DNA, 55 bp, Artificial
  Synthetic oligonucleotide
ccactcctcggctggctaatcgtatttattgcaacgacgtggtaaacgtattaaa

SEQ ID NO: 355248 - DNA, 55 bp, Artificial
  Synthetic oligonucleotide
ccactcgaaattcggcgtttcttcacagagagcgccgatgtctcgtgagtactct

SEQ ID NO: 355249 - DNA, 50 bp, Artificial
  Synthetic oligonucleotide
ccactcgcacacgcaaagccgggactcgcactgtccccacgccgcgttca

SEQ ID NO: 355250 - DNA, 57 bp, Artificial
  Synthetic oligonucleotide
ccactcggagttcagcagaaaaaacacctccagaggaccccttcagcgaacagaaga

SEQ ID NO: 355251 - DNA, 55 bp, Artificial
  Synthetic oligonucleotide
ccactcgtaagaggacagcaggggagaatggattactattgggccgttcttaaac

SEQ ID NO: 355252 - DNA, 55 bp, Artificial
  Synthetic oligonucleotide
ccactcgtagtacaaacttaacgttatgtgcctctactgaccctactgtgcccag

SEQ ID NO: 355253 - DNA, 60 bp, Artificial
  Synthetic oligonucleotide
ccactctaaaaccatgtgtcagattaagcccattatgtattaccatgaattgttcagcaa

SEQ ID NO: 355254 - DNA, 59 bp, Artificial
  Synthetic oligonucleotide
ccactctaccacaaggacgcgatcgtcgggttgcacttgggtgcgagaccatctgcggg

SEQ ID NO: 355255 - DNA, 55 bp, Artificial
  Synthetic oligonucleotide
ccactctacgtgctgcaggcctccctactgcgcatcccctactttgtgagagcgc

SEQ ID NO: 355256 - DNA, 55 bp, Artificial
  Synthetic oligonucleotide
ccactctatagtcaaggccattccacgatgttagcatgatatgagactagcatgc

SEQ ID NO: 355257 - DNA, 55 bp, Artificial
  Synthetic oligonucleotide
ccactctcaaccaatcaatgaaagacccagacaggcttggtgttggtttggaggc

SEQ ID NO: 355258 - DNA, 55 bp, Artificial
  Synthetic oligonucleotide
ccactctcacggaactccacacatgagatgtactgggtatccaatgcctctggga

SEQ ID NO: 355259 - DNA, 60 bp, Artificial
  Synthetic oligonucleotide
ccactctcagcatgtgagaccaactgtaaggtgggttgcagcatgctgcaatcttcctga

SEQ ID NO: 355260 - DNA, 57 bp, Artificial
  Synthetic oligonucleotide
ccactctcccgcggtaagtgaccaacagatgggaggggcaatcgtcgatgtcatgtg

SEQ ID NO: 355261 - DNA, 55 bp, Artificial
  Synthetic oligonucleotide
ccactctccttgttctggagacctgtatacactccccagtatctcatctccccag

SEQ ID NO: 355262 - DNA, 60 bp, Artificial
  Synthetic oligonucleotide
ccactctctcaacagccaacgcatgctcttcggtgagctttgtgaccgtgcgaacgcccc

SEQ ID NO: 355263 - DNA, 52 bp, Artificial
  Synthetic oligonucleotide
ccactctctcagcaggcgtaatcaaatcctcctttagtttgtccatcaatga

SEQ ID NO: 355264 - DNA, 60 bp, Artificial
  Synthetic oligonucleotide
ccactctctgcctgagttgcagtgatgtactccccggtgcgaaaatccatggttggcaca

SEQ ID NO: 355265 - DNA, 55 bp, Artificial
  Synthetic oligonucleotide
ccactctctgggagggatctccaggaaaattctggaacaccacgatagcagtgtc

SEQ ID NO: 355266 - DNA, 55 bp, Artificial
  Synthetic oligonucleotide
ccactctctgtcgtggctgtactcgaacctgaccgcgaatagcagccgccacctc

SEQ ID NO: 355267 - DNA, 55 bp, Artificial
  Synthetic oligonucleotide
ccactctgtgtcactttagaatgtagaaatgttagcagtaatagtaatggtgccc

SEQ ID NO: 355268 - DNA, 57 bp, Artificial
  Synthetic oligonucleotide
ccactctgttagaggacaagtggtacacccagcaggacctgtgcgacgttaacctgt

SEQ ID NO: 355269 - DNA, 55 bp, Artificial
  Synthetic oligonucleotide
ccactcttcccagatggtaacaacgcacacctattgatgcacgctcctgtccacg

SEQ ID NO: 355270 - DNA, 53 bp, Artificial
  Synthetic oligonucleotide
ccactgaacctttggacttgtccttaaagcgaccccgcccgcagtagggcgcg

SEQ ID NO: 355271 - DNA, 55 bp, Artificial
  Synthetic oligonucleotide
ccactgaacgagcaagtcaaccactggacgttacaaggaccagcgactgtgacac

SEQ ID NO: 355272 - DNA, 60 bp, Artificial
  Synthetic oligonucleotide
ccactgaagaagagattaagagcctagatacgtggctggtgagtgacttccactatgcca

SEQ ID NO: 355273 - DNA, 59 bp, Artificial
  Synthetic oligonucleotide
ccactgacacccaaactatgaacaccatgttgggatctgttacccgtctgttcacacag

SEQ ID NO: 355274 - DNA, 49 bp, Artificial
  Synthetic oligonucleotide
ccactgacccgaaaacggctgaccccgcttacgggaaagtgtttaaccc

SEQ ID NO: 355275 - DNA, 60 bp, Artificial
  Synthetic oligonucleotide
ccactgaccggcagtggatcttctgaaccggtacatgttgaatcagcacacgctccacag

SEQ ID NO: 355276 - DNA, 60 bp, Artificial
  Synthetic oligonucleotide
ccactgaccgtgcaagactccaaactaagcattgctactaaagggcccattacagtgtca

SEQ ID NO: 355277 - DNA, 60 bp, Artificial
  Synthetic oligonucleotide
ccactgacctttggatggtgcttcaagctagtaccagttgagccagggcaggtagaagag

SEQ ID NO: 355278 - DNA, 55 bp, Artificial
  Synthetic oligonucleotide
ccactgacctttgggtggcccttcaagctagtgccagtcgacccaacggaagtag

SEQ ID NO: 355279 - DNA, 55 bp, Artificial
  Synthetic oligonucleotide
ccactgacggacgctggttcatggatgaggcgtggggtgagtgttccgagctgca

SEQ ID NO: 355280 - DNA, 58 bp, Artificial
  Synthetic oligonucleotide
ccactgagacaactacccacactacacagctagacacatcagtgcagagtagtactgt

SEQ ID NO: 355281 - DNA, 55 bp, Artificial
  Synthetic oligonucleotide
ccactgagatacccattacactgaccattgctcccatgtgctgcgaattcaacgg

SEQ ID NO: 355282 - DNA, 60 bp, Artificial
  Synthetic oligonucleotide
ccactgagatcagagcatccattgggagaatggttggtggaatcgggagattctacatac

SEQ ID NO: 355283 - DNA, 56 bp, Artificial
  Synthetic oligonucleotide
ccactgaggcacgggtcactatctactgccgcgataaaacgtgggagcaaaagatt

SEQ ID NO: 355284 - DNA, 57 bp, Artificial
  Synthetic oligonucleotide
ccactgagtcaagcgttaatattcccccatcaatggatcaaccttaggactaacaac

SEQ ID NO: 355285 - DNA, 55 bp, Artificial
  Synthetic oligonucleotide
ccactgatagccaactgcgaggattttgccggggcaacgctgtctgacgagtggg

SEQ ID NO: 355286 - DNA, 55 bp, Artificial
  Synthetic oligonucleotide
ccactgatattgcacttacatcttaataacgggtgctgtataatggagtccccac

SEQ ID NO: 355287 - DNA, 55 bp, Artificial
  Synthetic oligonucleotide
ccactgatggctaaaatatattcgtggtcatttcatgtcgggttcagaaagcaaa

SEQ ID NO: 355288 - DNA, 60 bp, Artificial
  Synthetic oligonucleotide
ccactgatgttaggattttagtccagcctggtatagcttctgagctggtcatcccaagtg

SEQ ID NO: 355289 - DNA, 55 bp, Artificial
  Synthetic oligonucleotide
ccactgcaccagatgatgctaatgagacgtgatttcccaacgcgtgatcgcagta

SEQ ID NO: 355290 - DNA, 60 bp, Artificial
  Synthetic oligonucleotide
ccactgcagtgacgcgatgaacatcatgtttgaggaggtgtttcgcacagagttcggctt

SEQ ID NO: 355291 - DNA, 55 bp, Artificial
  Synthetic oligonucleotide
ccactgcagttgttgaagcacttcccaacccatgcgattttaggatccccgatga

SEQ ID NO: 355292 - DNA, 55 bp, Artificial
  Synthetic oligonucleotide
ccactgcatcaagtacaatctaacaactcctgaacccactactagtggaccgatg

SEQ ID NO: 355293 - DNA, 55 bp, Artificial
  Synthetic oligonucleotide
ccactgcatgaattcatctaagctatttccaatcttgtagttgtcgagattaccg

SEQ ID NO: 355294 - DNA, 52 bp, Artificial
  Synthetic oligonucleotide
ccactgcattcatggccactagcaactgaaacccgatctccccgcatcccag

SEQ ID NO: 355295 - DNA, 57 bp, Artificial
  Synthetic oligonucleotide
ccactgccaacgaactcacggtttggcggttcctggtacggaagtgtgagcaagcaa

SEQ ID NO: 355296 - DNA, 54 bp, Artificial
  Synthetic oligonucleotide
ccactgccacagcattggctgctgccaatggactgtggggcgatgttgaaaacg

SEQ ID NO: 355297 - DNA, 60 bp, Artificial
  Synthetic oligonucleotide
ccactgccactgcttctggtgcgagttgaaccgaaagcactcgctagtgatatgagttgg

SEQ ID NO: 355298 - DNA, 56 bp, Artificial
  Synthetic oligonucleotide
ccactgccgaaagcctttaaccgtcatccgccaatcaactacgtaacagctagtaa

SEQ ID NO: 355299 - DNA, 60 bp, Artificial
  Synthetic oligonucleotide
ccactgcctaaaatactaaattataaatctgctacatatatgacattacatggtttagtc

SEQ ID NO: 355300 - DNA, 60 bp, Artificial
  Synthetic oligonucleotide
ccactgcctgaggataatgaaccaactggttatgcccaaacagactgtgtcctggaagcg

SEQ ID NO: 355301 - DNA, 60 bp, Artificial
  Synthetic oligonucleotide
ccactgcggagctgaaatcactggacatgtcaaaaacgggacgatgaggatcgttggtcc

SEQ ID NO: 355302 - DNA, 53 bp, Artificial
  Synthetic oligonucleotide
ccactgcgtgaacaagttctttcggaacaatactgtgaccaagctcttccaaa

SEQ ID NO: 355303 - DNA, 60 bp, Artificial
  Synthetic oligonucleotide
ccactgcgtgcgcgcagatgatgccgtgtgtgtcagacccctcgttcccgaatctacgtc

SEQ ID NO: 355304 - DNA, 60 bp, Artificial
  Synthetic oligonucleotide
ccactgctcgagagtgtcttctcttcctccgcgcctcttcctcgattcggagcggctcat

SEQ ID NO: 355305 - DNA, 60 bp, Artificial
  Synthetic oligonucleotide
ccactgctctcttgtcaagttttacatcactacaatggcagcacccaatttcgacattct

SEQ ID NO: 355306 - DNA, 56 bp, Artificial
  Synthetic oligonucleotide
ccactgctgagaaggtctctaataaggaccttgcatttaatttgcatataaatacc

SEQ ID NO: 355307 - DNA, 52 bp, Artificial
  Synthetic oligonucleotide
ccactgctggaggcacagatggccacacttgaacacgccgctccaaatcagg

SEQ ID NO: 355308 - DNA, 52 bp, Artificial
  Synthetic oligonucleotide
ccactgcttgtctatccacactactaataatggatgtcacatcttcatcagt

SEQ ID NO: 355309 - DNA, 60 bp, Artificial
  Synthetic oligonucleotide
ccactgcttgtcttgactggatttgacttctaatgtgccaatttattgggcttggaagtg

SEQ ID NO: 355310 - DNA, 52 bp, Artificial
  Synthetic oligonucleotide
ccactggaacaatgacttggaagaagagcccgtatgtccagcgaatcacttg

SEQ ID NO: 355311 - DNA, 60 bp, Artificial
  Synthetic oligonucleotide
ccactggaatgtttagcttcgacggtaagagcatgaagactgctactgaggtagtgtcag

SEQ ID NO: 355312 - DNA, 58 bp, Artificial
  Synthetic oligonucleotide
ccactggacaacgcaagactgcaactgttctatgtaccccggtcatataacgggccac

SEQ ID NO: 355313 - DNA, 54 bp, Artificial
  Synthetic oligonucleotide
ccactggagacagggaaggcttaaaaaactgctctttcaatatgaccacagaac

SEQ ID NO: 355314 - DNA, 60 bp, Artificial
  Synthetic oligonucleotide
ccactggatcaaattatacggaaatccattccgtcattgtccctctgatctcgcacaatc

SEQ ID NO: 355315 - DNA, 55 bp, Artificial
  Synthetic oligonucleotide
ccactggatcggctgtactacatgaaaagtgtggtcaacgcatgcgaccagctcc

SEQ ID NO: 355316 - DNA, 60 bp, Artificial
  Synthetic oligonucleotide
ccactggatgatggacagggcaagtataggagatgagtggtcttcaacaatagcagcaaa

SEQ ID NO: 355317 - DNA, 56 bp, Artificial
  Synthetic oligonucleotide
ccactggcagttacaagtaaacaaagcacaaggggaagtggaaagcagccagggga

SEQ ID NO: 355318 - DNA, 55 bp, Artificial
  Synthetic oligonucleotide
ccactggctctaccactggcaacggcccttttgtctccggtaatgcgctccccta

SEQ ID NO: 355319 - DNA, 58 bp, Artificial
  Synthetic oligonucleotide
ccactggctctaccctttatcccaatccagaccatagcaaaagttgctactctgaaaa

SEQ ID NO: 355320 - DNA, 56 bp, Artificial
  Synthetic oligonucleotide
ccactggcttaatttcctgcaggcggcttaccgcctgcaacctggaccctccgaat

SEQ ID NO: 355321 - DNA, 60 bp, Artificial
  Synthetic oligonucleotide
ccactgggatataccatctcaccaacgactgcccgaactccagcatcgtttatgaggcgg

SEQ ID NO: 355322 - DNA, 55 bp, Artificial
  Synthetic oligonucleotide
ccactggggaactcatgcccctagcagctaggatggggacccatgcaaccatgag

SEQ ID NO: 355323 - DNA, 54 bp, Artificial
  Synthetic oligonucleotide
ccactggggcgttccaggaggagtggtctgggcggaacaggggagtggccaacc

SEQ ID NO: 355324 - DNA, 58 bp, Artificial
  Synthetic oligonucleotide
ccactgggtggattaaggtcaaggtatgaagtcctattcgctcctgataggatcgact

SEQ ID NO: 355325 - DNA, 60 bp, Artificial
  Synthetic oligonucleotide
ccactggtcggaagagttctctaccgcggcccaagcatatgtctcacatgaggttgtttg

SEQ ID NO: 355326 - DNA, 52 bp, Artificial
  Synthetic oligonucleotide
ccactggtgcaggcttgtccaaacttctggatatgcctagaagtaagaaaca

SEQ ID NO: 355327 - DNA, 56 bp, Artificial
  Synthetic oligonucleotide
ccactggtggggaaggagaatccacctttgccagggacctgtacagaagtgggtca

SEQ ID NO: 355328 - DNA, 55 bp, Artificial
  Synthetic oligonucleotide
ccactggttaaactttctacaagctgcctatcggctgcaaccggggccctcagag

SEQ ID NO: 355329 - DNA, 55 bp, Artificial
  Synthetic oligonucleotide
ccactggttctcgcgtgaaaactcttacagtggagtagaaggagaaggactgcac

SEQ ID NO: 355330 - DNA, 59 bp, Artificial
  Synthetic oligonucleotide
ccactggtttgtggcaaggcaatcagtttagtagacagaaccaccaacattagatacag

SEQ ID NO: 355331 - DNA, 58 bp, Artificial
  Synthetic oligonucleotide
ccactgtaacttcggcctattagttgtgcccatcagcccgctagattacgaccaagga

SEQ ID NO: 355332 - DNA, 58 bp, Artificial
  Synthetic oligonucleotide
ccactgtacgccccggagtggccaacacgtaggcccattatcgacgcgatcgcaccat

SEQ ID NO: 355333 - DNA, 53 bp, Artificial
  Synthetic oligonucleotide
ccactgtatcaggcgggactagctgtgcgaccaggcaattccgctgcccagct

SEQ ID NO: 355334 - DNA, 60 bp, Artificial
  Synthetic oligonucleotide
ccactgtattagaagacacttatagatatcaggaatccaaggctataaaatgcatagatc

SEQ ID NO: 355335 - DNA, 51 bp, Artificial
  Synthetic oligonucleotide
ccactgtcaattggccctttaaaaagccagtatctctttttggggatgtta

SEQ ID NO: 355336 - DNA, 60 bp, Artificial
  Synthetic oligonucleotide
ccactgtctatccaagcactacgaataattctaggaagcactctcccacttattgttgaa

SEQ ID NO: 355337 - DNA, 60 bp, Artificial
  Synthetic oligonucleotide
ccactgtgaaggcacggctactcactactgaggaagcttgcagcctgacgccccctcact

SEQ ID NO: 355338 - DNA, 60 bp, Artificial
  Synthetic oligonucleotide
ccactgtggaccatatggccataatcaagaaatacacatcgggacgacaggagaagaacc

SEQ ID NO: 355339 - DNA, 60 bp, Artificial
  Synthetic oligonucleotide
ccactgtggatcatatggccataatcaagaagtacacatcaggaaggcaggagaagaatc

SEQ ID NO: 355340 - DNA, 60 bp, Artificial
  Synthetic oligonucleotide
ccactgtgtgtgggcgctgagatttagtggcacgtctttctatgtgttaaattataatgt

SEQ ID NO: 355341 - DNA, 59 bp, Artificial
  Synthetic oligonucleotide
ccactgttagcgagtctaacgccgaacgagtcctctcgtgtgttagcatggtatattcc

SEQ ID NO: 355342 - DNA, 51 bp, Artificial
  Synthetic oligonucleotide
ccactgttaggcgatccccaacgagacggtttagtgtatgtggtgttgttg

SEQ ID NO: 355343 - DNA, 55 bp, Artificial
  Synthetic oligonucleotide
ccactgttgaagtttctgatgcaaatggccgccttacctgcaaaaccatcatggg

SEQ ID NO: 355344 - DNA, 58 bp, Artificial
  Synthetic oligonucleotide
ccactgttgaccgtgccaatctctttctgagtctcactagagactcaaaagcgctcca

SEQ ID NO: 355345 - DNA, 60 bp, Artificial
  Synthetic oligonucleotide
ccactgtttaatagcacttggaacaagactgaagcgctagatgacactgaaggagaggtc

SEQ ID NO: 355346 - DNA, 60 bp, Artificial
  Synthetic oligonucleotide
ccactgtttcaaatggatgtatcgctcagtgcggcagagctacatggcacctacgtagct

SEQ ID NO: 355347 - DNA, 60 bp, Artificial
  Synthetic oligonucleotide
ccactgtttggctttcagttatatggatgatgtggtattgggggccaagtctgtacaaca

SEQ ID NO: 355348 - DNA, 58 bp, Artificial
  Synthetic oligonucleotide
ccacttaaatttaactcctttggctagagatgggtagcaattcattgagtatgataaa

SEQ ID NO: 355349 - DNA, 53 bp, Artificial
  Synthetic oligonucleotide
ccacttaaccctttatatgaacctgataacacaaagatgaaccggattaaccc

SEQ ID NO: 355350 - DNA, 56 bp, Artificial
  Synthetic oligonucleotide
ccacttaagcaagaagggccacgtcctgctaattgaacccaccaggccgctagctg

SEQ ID NO: 355351 - DNA, 56 bp, Artificial
  Synthetic oligonucleotide
ccacttaatggggggaatgaaagttctaatgagagtattagctatagcttaataaa

SEQ ID NO: 355352 - DNA, 55 bp, Artificial
  Synthetic oligonucleotide
ccacttacagatatattgattctcttgctacaatgtgtcccacagcagagcctcc

SEQ ID NO: 355353 - DNA, 51 bp, Artificial
  Synthetic oligonucleotide
ccacttacgagcacctttctcatggttcggttttggggtaaacccatacgt

SEQ ID NO: 355354 - DNA, 55 bp, Artificial
  Synthetic oligonucleotide
ccacttacggatgcaactactcgccactaatgtgtgtgacttgtggtgctagacc

SEQ ID NO: 355355 - DNA, 59 bp, Artificial
  Synthetic oligonucleotide
ccacttacgtggagggaaatgagagtgcggcacttggcactgatcttgggaggcttttg

SEQ ID NO: 355356 - DNA, 55 bp, Artificial
  Synthetic oligonucleotide
ccacttactatgaggctgagggtggtatgccatcaggatgtgctggaactagtat

SEQ ID NO: 355357 - DNA, 60 bp, Artificial
  Synthetic oligonucleotide
ccacttactccattgaaccacttgacctacctcagatcattcagcgactccacggtctta

SEQ ID NO: 355358 - DNA, 56 bp, Artificial
  Synthetic oligonucleotide
ccacttactctcaatcatcagaagattacacgattcatttccaacatgttcttacc

SEQ ID NO: 355359 - DNA, 55 bp, Artificial
  Synthetic oligonucleotide
ccacttactgtgatccatactataattcaggaacccttctcgcacattgatggtc

SEQ ID NO: 355360 - DNA, 60 bp, Artificial
  Synthetic oligonucleotide
ccacttagaactgcttatggacatgtacgaccaagactgtgtaccaaaagagtgcatgga

SEQ ID NO: 355361 - DNA, 55 bp, Artificial
  Synthetic oligonucleotide
ccacttagcgccaggtgtgggtaacattgatcctgagatctataacgaaggaagg

SEQ ID NO: 355362 - DNA, 55 bp, Artificial
  Synthetic oligonucleotide
ccacttagcggtgacaccctaccgcgaggtgagatcccaaatgagatcgttagcg

SEQ ID NO: 355363 - DNA, 52 bp, Artificial
  Synthetic oligonucleotide
ccacttagcttacgggactcgaggctgaagactttcgttaaggccgaaaaac

SEQ ID NO: 355364 - DNA, 55 bp, Artificial
  Synthetic oligonucleotide
ccacttatacacagggtaattactcttatactacaacggtagcaatatgggacgt

SEQ ID NO: 355365 - DNA, 58 bp, Artificial
  Synthetic oligonucleotide
ccacttatcaaagaacaagggctcttgttcggaccggaatggatcctaggatgtgctc

SEQ ID NO: 355366 - DNA, 60 bp, Artificial
  Synthetic oligonucleotide
ccacttcagggcaacaactctaatgagtatagattaataaattgtaatacctcagccata

SEQ ID NO: 355367 - DNA, 55 bp, Artificial
  Synthetic oligonucleotide
ccacttcagtatattaagtaaaggatcaaggttcagccttgttctactcttgggc

SEQ ID NO: 355368 - DNA, 57 bp, Artificial
  Synthetic oligonucleotide
ccacttcagtggcgcaacctaaactgtacacagtgcagtttggaagccttaacccag

SEQ ID NO: 355369 - DNA, 60 bp, Artificial
  Synthetic oligonucleotide
ccacttcatggagtcaggacaaatgggcatcaagttcgatgtggtgaaagttcctgccat

SEQ ID NO: 355370 - DNA, 55 bp, Artificial
  Synthetic oligonucleotide
ccacttccaaacgcagactatcgcgcatgatttggacaacagcctgttccatcgt

SEQ ID NO: 355371 - DNA, 57 bp, Artificial
  Synthetic oligonucleotide
ccacttccaatgcgtttccacttccaaaacgcgttcgccagagctccattgtacgcc

SEQ ID NO: 355372 - DNA, 60 bp, Artificial
  Synthetic oligonucleotide
ccacttccaggctgtcatgatatatacatcaatgatagccctgttcaagaaatatggggg

SEQ ID NO: 355373 - DNA, 55 bp, Artificial
  Synthetic oligonucleotide
ccacttccatcttggggatgatatggatcctgagcttagacagcttgctcagtct

SEQ ID NO: 355374 - DNA, 50 bp, Artificial
  Synthetic oligonucleotide
ccacttcccctctgccccgtggaatttcgtgacagtcgcggctttgagct

SEQ ID NO: 355375 - DNA, 57 bp, Artificial
  Synthetic oligonucleotide
ccacttcgagccactccagaccgcgaccgtgcgttggccgcaaagcgacgttgggag

SEQ ID NO: 355376 - DNA, 60 bp, Artificial
  Synthetic oligonucleotide
ccacttctaagtcttagagcagctgcagcatcatttcaatacccacatataggttgttgt

SEQ ID NO: 355377 - DNA, 55 bp, Artificial
  Synthetic oligonucleotide
ccacttctagcagcaatcagaaggataaggatcctgtatcaaagcagtaagttac

SEQ ID NO: 355378 - DNA, 60 bp, Artificial
  Synthetic oligonucleotide
ccacttctcatggaattggtttagagggaagcttgctgaccaatctggcgtatttagcat

SEQ ID NO: 355379 - DNA, 55 bp, Artificial
  Synthetic oligonucleotide
ccacttctgagaaaggtagcagggctcacagggaagcgctagaggagctaccaga

SEQ ID NO: 355380 - DNA, 55 bp, Artificial
  Synthetic oligonucleotide
ccacttctgatcttgagcatggtgattctaggtggaggggtgacactcgtccgga

SEQ ID NO: 355381 - DNA, 55 bp, Artificial
  Synthetic oligonucleotide
ccacttctgatgattgctctgaaggattgttacccaatttccactccactcctga

SEQ ID NO: 355382 - DNA, 60 bp, Artificial
  Synthetic oligonucleotide
ccacttctggttttgaggatcgcactgaatcgacatttctcgccgaaaagatcagagaac

SEQ ID NO: 355383 - DNA, 58 bp, Artificial
  Synthetic oligonucleotide
ccacttgaacaggttaggcgcatctgggttcgccggagcaaccagggacatcaggttg

SEQ ID NO: 355384 - DNA, 55 bp, Artificial
  Synthetic oligonucleotide
ccacttgaactatttctaccatgaggtggtgtgtcaggacatgcgtgtggttgta

SEQ ID NO: 355385 - DNA, 55 bp, Artificial
  Synthetic oligonucleotide
ccacttgaagccacctggcattacacttcttatactattgttggtgctttgtatg

SEQ ID NO: 355386 - DNA, 55 bp, Artificial
  Synthetic oligonucleotide
ccacttgacacacgtaaccatgcaccaacacgttttatttcttccggtgcgtctt

SEQ ID NO: 355387 - DNA, 52 bp, Artificial
  Synthetic oligonucleotide
ccacttgacgcccacgtgtaagccaccccagcttacggtgtcaagaaattcg

SEQ ID NO: 355388 - DNA, 52 bp, Artificial
  Synthetic oligonucleotide
ccacttgactattcttttaaacttaacttaattgaaacggggctatctccat

SEQ ID NO: 355389 - DNA, 55 bp, Artificial
  Synthetic oligonucleotide
ccacttgactggcacgaagttggtcgacattttcgtcgtgatacttctgctggtg

SEQ ID NO: 355390 - DNA, 55 bp, Artificial
  Synthetic oligonucleotide
ccacttgacttatcccagaagaaagagaaacaaccagaacacggacaacaggccg

SEQ ID NO: 355391 - DNA, 60 bp, Artificial
  Synthetic oligonucleotide
ccacttgagtttgcgccggcatgtcctgaatagtgggcagtttgtcagagaacataattg

SEQ ID NO: 355392 - DNA, 55 bp, Artificial
  Synthetic oligonucleotide
ccacttgcaaccgcctacctatgtggtatacatcgagagcttgtgcgcaggttga

SEQ ID NO: 355393 - DNA, 55 bp, Artificial
  Synthetic oligonucleotide
ccacttgcgactgtgccaatagtctgtagtaataagcttacacttgtagtacctg

SEQ ID NO: 355394 - DNA, 55 bp, Artificial
  Synthetic oligonucleotide
ccacttgcgcacaattgcgtattttctatcctgatgtccacgatgctgaattgcc

SEQ ID NO: 355395 - DNA, 60 bp, Artificial
  Synthetic oligonucleotide
ccacttgtcacatacatcaaggatgaactcagaggcaaggataaagttagattaggtaag

SEQ ID NO: 355396 - DNA, 60 bp, Artificial
  Synthetic oligonucleotide
ccacttgtgccactttcatagctaatttagattgtgatactaaggctcccgttgtacata

SEQ ID NO: 355397 - DNA, 56 bp, Artificial
  Synthetic oligonucleotide
ccacttgttagactaggatttagcttaatagactttaaagagccatggctagaggg

SEQ ID NO: 355398 - DNA, 55 bp, Artificial
  Synthetic oligonucleotide
ccacttgttcagtaaatggagtaaacaattttagctataatggaggttcactacc

SEQ ID NO: 355399 - DNA, 53 bp, Artificial
  Synthetic oligonucleotide
ccacttgttggttgaatagtgtttcggatggccggtgtcaataaaaacccctc

SEQ ID NO: 355400 - DNA, 55 bp, Artificial
  Synthetic oligonucleotide
ccacttgttgtgactccagcaaacaaaacagacaccttcccggaaaactccacca

SEQ ID NO: 355401 - DNA, 54 bp, Artificial
  Synthetic oligonucleotide
ccactttaaccggtgaaaggactgcaacaataggagttagtaatgttcctacag

SEQ ID NO: 355402 - DNA, 59 bp, Artificial
  Synthetic oligonucleotide
ccactttaaggtgacactgatactggtactcaaccactggtgacaggctaaggatgccc

SEQ ID NO: 355403 - DNA, 55 bp, Artificial
  Synthetic oligonucleotide
ccactttactcatcccctggatgctgactaatcagaggaacgtcagcattttccg

SEQ ID NO: 355404 - DNA, 55 bp, Artificial
  Synthetic oligonucleotide
ccactttcactctaaaagggtcactgcacacggagacacaccacaactagatctt

SEQ ID NO: 355405 - DNA, 55 bp, Artificial
  Synthetic oligonucleotide
ccactttcactgacttctttaaagctgttagggactatcatgcctcttattacaa

SEQ ID NO: 355406 - DNA, 55 bp, Artificial
  Synthetic oligonucleotide
ccactttcagaatcccatataaaagagctcattgctgagttgcggtggcaataca

SEQ ID NO: 355407 - DNA, 55 bp, Artificial
  Synthetic oligonucleotide
ccactttccattcctttcacgtgctgtgcgatgcctatcgcctcttgccgctcac

SEQ ID NO: 355408 - DNA, 55 bp, Artificial
  Synthetic oligonucleotide
ccactttctatctgactgattcatggcgtgtcaacccgactgtcgggcaggcttg

SEQ ID NO: 355409 - DNA, 55 bp, Artificial
  Synthetic oligonucleotide
ccactttctctgtgcaaagaaacctcccctttgagagagcgaccatcatggctgc

SEQ ID NO: 355410 - DNA, 55 bp, Artificial
  Synthetic oligonucleotide
ccactttctctgtgcagaggaatctcccattcgagagagcgaccatcatggcagc

SEQ ID NO: 355411 - DNA, 60 bp, Artificial
  Synthetic oligonucleotide
ccactttgagaaaattcaaatcatccccaggagttcttggtccaatcatgatgcctcatc

SEQ ID NO: 355412 - DNA, 56 bp, Artificial
  Synthetic oligonucleotide
ccactttgcaaaatccttttttcgagtaaatattcagagcagcttagtgattttct

SEQ ID NO: 355413 - DNA, 58 bp, Artificial
  Synthetic oligonucleotide
ccactttgcacgggtgtgggttacatatgcggtgtgtcggttgtgggaaatatgtgac

SEQ ID NO: 355414 - DNA, 55 bp, Artificial
  Synthetic oligonucleotide
ccactttggggaccttaccaggagtatctcgatggtgtatctgaagcaacccaag

SEQ ID NO: 355415 - DNA, 57 bp, Artificial
  Synthetic oligonucleotide
ccactttggtaaataattggacaccgataggtaaatgagacaccgatatatcggtgc

SEQ ID NO: 355416 - DNA, 55 bp, Artificial
  Synthetic oligonucleotide
ccactttgtacgcagtagttacccagaataattagaagccgtcgtcaggcgccac

SEQ ID NO: 355417 - DNA, 60 bp, Artificial
  Synthetic oligonucleotide
ccactttgtctggaggatgcagtctatggaactgatggtttagaggcactagatttaaca

SEQ ID NO: 355418 - DNA, 55 bp, Artificial
  Synthetic oligonucleotide
ccacttttatgatggattcagtatagttcccttcaacacaatcgatgcaggagcg

SEQ ID NO: 355419 - DNA, 52 bp, Artificial
  Synthetic oligonucleotide
ccacttttgagatggtcctcggccctaccaccaacgtggaccaagcccccta

SEQ ID NO: 355420 - DNA, 53 bp, Artificial
  Synthetic oligonucleotide
ccacttttggctcgcacccttagcggactgccgagttgctttaattgatgatg

SEQ ID NO: 355421 - DNA, 59 bp, Artificial
  Synthetic oligonucleotide
ccagaaaaggtggattttgaggattgcaaggacattagcgatttgagacagtacgacag

SEQ ID NO: 355422 - DNA, 51 bp, Artificial
  Synthetic oligonucleotide
ccagaaaaggttggctagagctgcgctcaacttacccttgaccccacaggt

SEQ ID NO: 355423 - DNA, 55 bp, Artificial
  Synthetic oligonucleotide
ccagaaaatgaacgacgcatcaattaacggtaatacaatgtatcgagtccatgga

SEQ ID NO: 355424 - DNA, 58 bp, Artificial
  Synthetic oligonucleotide
ccagaaaccttctggtcaaaaatccctgttatgttagatggtgagtgcataatggctt

SEQ ID NO: 355425 - DNA, 55 bp, Artificial
  Synthetic oligonucleotide
ccagaaacgaccaccattcctccgacatctccacctcagtggaagctgcaaccag

SEQ ID NO: 355426 - DNA, 55 bp, Artificial
  Synthetic oligonucleotide
ccagaaactagtagaagacagatgggacaagccccaggagaccaggggccacaga

SEQ ID NO: 355427 - DNA, 55 bp, Artificial
  Synthetic oligonucleotide
ccagaaactcacctacagaagtaactgacatagttgttggagctataagtactca

SEQ ID NO: 355428 - DNA, 60 bp, Artificial
  Synthetic oligonucleotide
ccagaaactctctctagattccgatagagaatcgagagagaacctggctctcccttagcc

SEQ ID NO: 355429 - DNA, 55 bp, Artificial
  Synthetic oligonucleotide
ccagaaagaagggtagtagcacaaggaccagaggaagagtttggtagatccctaa

SEQ ID NO: 355430 - DNA, 52 bp, Artificial
  Synthetic oligonucleotide
ccagaaagactccggaggacatcgaagaatttttctccgaccttccttcggt

SEQ ID NO: 355431 - DNA, 55 bp, Artificial
  Synthetic oligonucleotide
ccagaaagcccatgaagaggacatttgtggaatccgctcagtaacaagactggag

SEQ ID NO: 355432 - DNA, 58 bp, Artificial
  Synthetic oligonucleotide
ccagaaagcccgtgactaccttatctcccggagtcatctgtcttcatcctcccttctc

SEQ ID NO: 355433 - DNA, 59 bp, Artificial
  Synthetic oligonucleotide
ccagaaaggcaaatcagaggaatctttggagcaatagcgggattcatagaaaacggctg

SEQ ID NO: 355434 - DNA, 58 bp, Artificial
  Synthetic oligonucleotide
ccagaaaggcacagcttgtaaagtacattctcatagggattcctttgtcctggagtta

SEQ ID NO: 355435 - DNA, 55 bp, Artificial
  Synthetic oligonucleotide
ccagaaagttccattctaaggaccgtgatgttcccatacccgagtatgagcgagg

SEQ ID NO: 355436 - DNA, 55 bp, Artificial
  Synthetic oligonucleotide
ccagaaataagggagctattttcaaatcagaccttccaattgagaattgtgatgc

SEQ ID NO: 355437 - DNA, 60 bp, Artificial
  Synthetic oligonucleotide
ccagaaatacatggcgctcgtcaactggctcgtggagcacggcatcacttccgagaagca

SEQ ID NO: 355438 - DNA, 55 bp, Artificial
  Synthetic oligonucleotide
ccagaaatattgatctgtgactcctcctgagtgattatattcaaggatggatgtt

SEQ ID NO: 355439 - DNA, 60 bp, Artificial
  Synthetic oligonucleotide
ccagaaatattgttaggagagcaacagtgtcagcagatccattggcatcattattagaga

SEQ ID NO: 355440 - DNA, 54 bp, Artificial
  Synthetic oligonucleotide
ccagaaatcttgcacagcacgaggtgggattttttacccaagaggagctgacct

SEQ ID NO: 355441 - DNA, 55 bp, Artificial
  Synthetic oligonucleotide
ccagaaatgagcctgctttaatagtatggggaatccatcattctggatcagctac

SEQ ID NO: 355442 - DNA, 52 bp, Artificial
  Synthetic oligonucleotide
ccagaaatggttgcgggtgtacatcgagatgttgatcccataattttagacg

SEQ ID NO: 355443 - DNA, 55 bp, Artificial
  Synthetic oligonucleotide
ccagaaattgcaaatccagaaatgctacccacctatgatgtgcccgatacagtcc

SEQ ID NO: 355444 - DNA, 53 bp, Artificial
  Synthetic oligonucleotide
ccagaacaaacaaggccctcctcctgctaagtgtccgggagtccctggtcaag

SEQ ID NO: 355445 - DNA, 58 bp, Artificial
  Synthetic oligonucleotide
ccagaacacgtaatccgtgcctttgacatttacaacaaagatgtagcttgtatcggta

SEQ ID NO: 355446 - DNA, 58 bp, Artificial
  Synthetic oligonucleotide
ccagaacactagtaagcactatattgggaaatgccccaaatacataccatcagggagt

SEQ ID NO: 355447 - DNA, 55 bp, Artificial
  Synthetic oligonucleotide
ccagaacacttcgctgggaagactagagacgccctagacatcatgtatctagttg

SEQ ID NO: 355448 - DNA, 58 bp, Artificial
  Synthetic oligonucleotide
ccagaacataaaccctagaacagtggggaaatgccctcgatatgtcaaacagacaagc

SEQ ID NO: 355449 - DNA, 55 bp, Artificial
  Synthetic oligonucleotide
ccagaaccacatctttgcagcagatgtgaagcagccagagtggtccacaagacgc

SEQ ID NO: 355450 - DNA, 55 bp, Artificial
  Synthetic oligonucleotide
ccagaaccatacagcctattgtgacaaggtgcgcactccgcttgaattgcaggtt

SEQ ID NO: 355451 - DNA, 58 bp, Artificial
  Synthetic oligonucleotide
ccagaaccctccctccgatttctgtggcgggagctgagttggcagttctgctataaac

SEQ ID NO: 355452 - DNA, 56 bp, Artificial
  Synthetic oligonucleotide
ccagaaccgctgatactacagggactatgccaatgccaaggtttgtcccttgaggc

SEQ ID NO: 355453 - DNA, 52 bp, Artificial
  Synthetic oligonucleotide
ccagaaccttaacaaagacgtgaccacggccgttaacaaaaccaccaatgcc

SEQ ID NO: 355454 - DNA, 55 bp, Artificial
  Synthetic oligonucleotide
ccagaacgagcgacagaacatagcgcaggatatgacatttccgcaagtgaaacag

SEQ ID NO: 355455 - DNA, 60 bp, Artificial
  Synthetic oligonucleotide
ccagaactaacgcagtttgtattggccagcatgcagtatgttcatacaaactatatgaac

SEQ ID NO: 355456 - DNA, 55 bp, Artificial
  Synthetic oligonucleotide
ccagaactacgcactaactccgtcggatctcgaggacctggctctggagccttgg

SEQ ID NO: 355457 - DNA, 59 bp, Artificial
  Synthetic oligonucleotide
ccagaactctactgagatcagagcatccgtcggaagaatggtaggcggaattggaaggt

SEQ ID NO: 355458 - DNA, 57 bp, Artificial
  Synthetic oligonucleotide
ccagaactctcctttgcttccaaaagagaagcaggagaaaactggctctcccttagc

SEQ ID NO: 355459 - DNA, 59 bp, Artificial
  Synthetic oligonucleotide
ccagaactctgtccaaaacctcttaaactagttgacggtcaaatatgcgacatcatcaa

SEQ ID NO: 355460 - DNA, 55 bp, Artificial
  Synthetic oligonucleotide
ccagaactgaagcaattgcagaggcaggaacacccctgattgacgatcagatcag

SEQ ID NO: 355461 - DNA, 58 bp, Artificial
  Synthetic oligonucleotide
ccagaactggggaattgaacccatcgacaatgtgatgggaatgattggaatactaccc

SEQ ID NO: 355462 - DNA, 58 bp, Artificial
  Synthetic oligonucleotide
ccagaacttttccgaactcagctactccagtatgctgggttggatgtttttcaagatg

SEQ ID NO: 355463 - DNA, 55 bp, Artificial
  Synthetic oligonucleotide
ccagaagaaagccatcatttgtcctttgggaccagaaggggtcaagtacctgtgc

SEQ ID NO: 355464 - DNA, 55 bp, Artificial
  Synthetic oligonucleotide
ccagaagaacagggaacatccagattagggtgccctgggcctcctatccttatgc

SEQ ID NO: 355465 - DNA, 60 bp, Artificial
  Synthetic oligonucleotide
ccagaagacccataagcacgcagtgaagtcaaacagtgctaagagaatctcgataacctt

SEQ ID NO: 355466 - DNA, 57 bp, Artificial
  Synthetic oligonucleotide
ccagaagactgattgtaatgcaaatggttttcagggctattatatttgtcttgtagg

SEQ ID NO: 355467 - DNA, 55 bp, Artificial
  Synthetic oligonucleotide
ccagaagatagatgtgtcgaaaatcgagaaatcggttatcgacttgttggcctcg

SEQ ID NO: 355468 - DNA, 55 bp, Artificial
  Synthetic oligonucleotide
ccagaagatatgctacgaccaccattgaggtcgccacatcccctattgagcagcg

SEQ ID NO: 355469 - DNA, 55 bp, Artificial
  Synthetic oligonucleotide
ccagaagcgctcttctcctgagaccctcgtgctcagctctcggtcctgagctctc

SEQ ID NO: 355470 - DNA, 60 bp, Artificial
  Synthetic oligonucleotide
ccagaagcggatgggagtgcagatgcaacgattcaagtgatcctctcgttattgcagcaa

SEQ ID NO: 355471 - DNA, 56 bp, Artificial
  Synthetic oligonucleotide
ccagaagcggcgttggttagttcgatcaaatgggttcgatctcgaacgattttcgc

SEQ ID NO: 355472 - DNA, 55 bp, Artificial
  Synthetic oligonucleotide
ccagaagcgttaggcatcgtcgagggagtgaatgattcgagctttgcccctatgg

SEQ ID NO: 355473 - DNA, 60 bp, Artificial
  Synthetic oligonucleotide
ccagaagctcgaactgatgtcgtccagacttggaagttcaggtaggcttggtgtagattc

SEQ ID NO: 355474 - DNA, 55 bp, Artificial
  Synthetic oligonucleotide
ccagaagctgattatgaatcgtttaccaaagaagggagcggcttaatccaatacg

SEQ ID NO: 355475 - DNA, 57 bp, Artificial
  Synthetic oligonucleotide
ccagaaggagctttgaagcttaataacctaacaagcttgtgcaacctttgtcacaac

SEQ ID NO: 355476 - DNA, 55 bp, Artificial
  Synthetic oligonucleotide
ccagaaggatgcggaccttcagtctcagtatcagaccggggatatcagtgaggat

SEQ ID NO: 355477 - DNA, 60 bp, Artificial
  Synthetic oligonucleotide
ccagaaggtctggagccgcagttgctgcagtgaaaggagttggaacaatagcaatggagt

SEQ ID NO: 355478 - DNA, 51 bp, Artificial
  Synthetic oligonucleotide
ccagaaggttaatattctgggatgttccagcatctgaaataccaacagacg

SEQ ID NO: 355479 - DNA, 52 bp, Artificial
  Synthetic oligonucleotide
ccagaagtcctcaaatgggtatacaacagattagattgcccattatgggtca

SEQ ID NO: 355480 - DNA, 60 bp, Artificial
  Synthetic oligonucleotide
ccagaagtgagcgcacgccaatacaccttgcctatcgtgagtgactgtatgatgatgcca

SEQ ID NO: 355481 - DNA, 58 bp, Artificial
  Synthetic oligonucleotide
ccagaagtggaattcttacataacccagtactctacgggccagtgtacagtagagatg

SEQ ID NO: 355482 - DNA, 55 bp, Artificial
  Synthetic oligonucleotide
ccagaagtttcttggtcttcttcctgctcctatgtcactttcatagcttgacatg

SEQ ID NO: 355483 - DNA, 55 bp, Artificial
  Synthetic oligonucleotide
ccagaataaagtgtggtaactgcaagtgtgtctgccctcatcattgactccaggg

SEQ ID NO: 355484 - DNA, 57 bp, Artificial
  Synthetic oligonucleotide
ccagaataccgtcaagaattagtactcagaatgacttaattagagttgaaccaattg

SEQ ID NO: 355485 - DNA, 58 bp, Artificial
  Synthetic oligonucleotide
ccagaatactcttgggtgacgccaagcgcttgggacaatctacaaaccttcgcgctcc

SEQ ID NO: 355486 - DNA, 58 bp, Artificial
  Synthetic oligonucleotide
ccagaatactgttcataagagaggggaaaattgtgaatgttagcccattgtcaggaag

SEQ ID NO: 355487 - DNA, 55 bp, Artificial
  Synthetic oligonucleotide
ccagaataggagactaacaatcctggcaacacaagaactattaagtaggtcgcac

SEQ ID NO: 355488 - DNA, 55 bp, Artificial
  Synthetic oligonucleotide
ccagaatatacacccagtcacaataggagagtgcccaaaatatgtcaggagtacc

SEQ ID NO: 355489 - DNA, 56 bp, Artificial
  Synthetic oligonucleotide
ccagaatcaactacagctagatttgtctgggcaacggaagggtgtcgggttcgatg

SEQ ID NO: 355490 - DNA, 55 bp, Artificial
  Synthetic oligonucleotide
ccagaatcagtgttagtcaatacctaccaatggatcatcagaaactgggaaacag

SEQ ID NO: 355491 - DNA, 55 bp, Artificial
  Synthetic oligonucleotide
ccagaatcattacagtccgacaacggaccggcttttgtagctgagcccacacagc

SEQ ID NO: 355492 - DNA, 55 bp, Artificial
  Synthetic oligonucleotide
ccagaatccaaccatagtgcgtgtgataagaagaccatcccactcacctggactg

SEQ ID NO: 355493 - DNA, 58 bp, Artificial
  Synthetic oligonucleotide
ccagaatccctcctctgattccgatagagaatcaagagggaaaactggctctccctta

SEQ ID NO: 355494 - DNA, 55 bp, Artificial
  Synthetic oligonucleotide
ccagaatcggtacggagtgagcatccctgtatacagagcaggagcgaccggtacg

SEQ ID NO: 355495 - DNA, 55 bp, Artificial
  Synthetic oligonucleotide
ccagaatctagttcaaaagcagggtattgtacctgaggatgtgattccagactcg

SEQ ID NO: 355496 - DNA, 60 bp, Artificial
  Synthetic oligonucleotide
ccagaatgccacggaaatcagggcatctgtaggaagaatgattggtggaattggacgatt

SEQ ID NO: 355497 - DNA, 60 bp, Artificial
  Synthetic oligonucleotide
ccagaatgccactgaaatcagagcatctgtcggaagaatggttggtggaatcgggaggtt

SEQ ID NO: 355498 - DNA, 60 bp, Artificial
  Synthetic oligonucleotide
ccagaatgccactgaaatcagagcgtctgttgggaggatggttggtggaattgggagatt

SEQ ID NO: 355499 - DNA, 59 bp, Artificial
  Synthetic oligonucleotide
ccagaatgccgttccggagaactctgcgtggccttccgacaataccttgccatcaggcc

SEQ ID NO: 355500 - DNA, 55 bp, Artificial
  Synthetic oligonucleotide
ccagaatgctaatgcgtatgtctcagttgggtcatcaaaatacaaccggagattc

SEQ ID NO: 355501 - DNA, 60 bp, Artificial
  Synthetic oligonucleotide
ccagaatgctaccgagatcagagcatctgttgggaggatggttggcggaatcggaagatt

SEQ ID NO: 355502 - DNA, 60 bp, Artificial
  Synthetic oligonucleotide
ccagaatgctactgaaatcagagcatccgtcggaagaatggtgggaggaattggtcgctt

SEQ ID NO: 355503 - DNA, 55 bp, Artificial
  Synthetic oligonucleotide
ccagaatgggtagcactcaatgggcaccgagggccaagcccggcccagctaaagt

SEQ ID NO: 355504 - DNA, 55 bp, Artificial
  Synthetic oligonucleotide
ccagaatggttttactgctactaactctgctcttgctaaaattcaaagtgtcgtt

SEQ ID NO: 355505 - DNA, 55 bp, Artificial
  Synthetic oligonucleotide
ccagaatgtaccggatgtacagaacccctgacattccccgtggatgtgaaggccc

SEQ ID NO: 355506 - DNA, 60 bp, Artificial
  Synthetic oligonucleotide
ccagaatgtgacttactactcacagtaagctcatggtcttacattgtggaaacatctaac

SEQ ID NO: 355507 - DNA, 58 bp, Artificial
  Synthetic oligonucleotide
ccagaatgtgatcggctcctaagtgtacctgaatggtcctatatagtggaaaaggaaa

SEQ ID NO: 355508 - DNA, 50 bp, Artificial
  Synthetic oligonucleotide
ccagaatgttacggattatctagtcagtcatggaattcaagcattgccag

SEQ ID NO: 355509 - DNA, 60 bp, Artificial
  Synthetic oligonucleotide
ccagaattcgcacaactacttgaagctctgttgtggacaaatgttgacctgatccttcct

SEQ ID NO: 355510 - DNA, 55 bp, Artificial
  Synthetic oligonucleotide
ccagaattctaccgtccaacactttcccgatgcaacctagcaccctcccaacgga

SEQ ID NO: 355511 - DNA, 58 bp, Artificial
  Synthetic oligonucleotide
ccagaattgtaagattgcccctctaatggtggcatacatgttagaaagggaactggtc

SEQ ID NO: 355512 - DNA, 59 bp, Artificial
  Synthetic oligonucleotide
ccagaatttgacagtcggtcctgcaatcgctatcagacccgtggacatttctctcaacc

SEQ ID NO: 355513 - DNA, 55 bp, Artificial
  Synthetic oligonucleotide
ccagacaaaatagcagcatggtggcctgcagtgggcacttattacacaaccactt

SEQ ID NO: 355514 - DNA, 55 bp, Artificial
  Synthetic oligonucleotide
ccagacaaagatgaaaacacaagagttttaccaaaagtatacagactgcctagct

SEQ ID NO: 355515 - DNA, 55 bp, Artificial
  Synthetic oligonucleotide
ccagacaaatggacagtacagcccatccaattgcctaacaaggaagtgtggacag

SEQ ID NO: 355516 - DNA, 55 bp, Artificial
  Synthetic oligonucleotide
ccagacaaggatggcatggtgtggatagtagaaccaccaatacctgaccccgaaa

SEQ ID NO: 355517 - DNA, 55 bp, Artificial
  Synthetic oligonucleotide
ccagacaaggttcgtgccaaagctgatcagataatggtcgcagctattgagttgg

SEQ ID NO: 355518 - DNA, 57 bp, Artificial
  Synthetic oligonucleotide
ccagacacacaagcaccaggtaaaaacaagtttgcacccctcgattggttgctaggc

SEQ ID NO: 355519 - DNA, 59 bp, Artificial
  Synthetic oligonucleotide
ccagacacatatactagtgcaggttttgtttcatgttggtaccagacttcactagtatt

SEQ ID NO: 355520 - DNA, 55 bp, Artificial
  Synthetic oligonucleotide
ccagacacatcagctgtgagtctcctgggaggaccggcaacaaaccgggactaca

SEQ ID NO: 355521 - DNA, 55 bp, Artificial
  Synthetic oligonucleotide
ccagacacatccttacaaaggattggacccacatcacagctggccgcaattcggc

SEQ ID NO: 355522 - DNA, 55 bp, Artificial
  Synthetic oligonucleotide
ccagacaccttcgcgctgtctggttacaaggcatttcaaactctatcttatgcct

SEQ ID NO: 355523 - DNA, 55 bp, Artificial
  Synthetic oligonucleotide
ccagacacctttaagatggtcgaccaaccagtgacttcgcataatgcatactggc

SEQ ID NO: 355524 - DNA, 55 bp, Artificial
  Synthetic oligonucleotide
ccagacacgagcatgcgaatctgtctggtcggtgcgcaattccaaacaaatcatg

SEQ ID NO: 355525 - DNA, 55 bp, Artificial
  Synthetic oligonucleotide
ccagacactaaataccccttcctcattcatccaatctattcaatggatgatgtct

SEQ ID NO: 355526 - DNA, 55 bp, Artificial
  Synthetic oligonucleotide
ccagacagacaaccagctcgcggtgttccttatttgcgttctgacgctagtaggg

SEQ ID NO: 355527 - DNA, 55 bp, Artificial
  Synthetic oligonucleotide
ccagacagatgcaaaagacctgaatgtgatgtaccacaatgcgaaagtggcgaca

SEQ ID NO: 355528 - DNA, 55 bp, Artificial
  Synthetic oligonucleotide
ccagacagcagtgaggcggaaagtgcttgtcgataagaaagtgcttaccagagtt

SEQ ID NO: 355529 - DNA, 53 bp, Artificial
  Synthetic oligonucleotide
ccagacagcttgccactcgtaagagtaaggtgagtggagctggagagaatagg

SEQ ID NO: 355530 - DNA, 60 bp, Artificial
  Synthetic oligonucleotide
ccagacagctttcataacaatgagtgcttccaaggaagtgaaatcattcctgtggactca

SEQ ID NO: 355531 - DNA, 55 bp, Artificial
  Synthetic oligonucleotide
ccagacagtcgactttagtttggatcccaccttcaccattgaaacgacgaccgtg

SEQ ID NO: 355532 - DNA, 52 bp, Artificial
  Synthetic oligonucleotide
ccagacagtgtcacattcaagggagactatggtgtatcaacatgaactcaag

SEQ ID NO: 355533 - DNA, 55 bp, Artificial
  Synthetic oligonucleotide
ccagacagttcggaccaacagattaggaccttcagatgccccaaagatgtggtgg

SEQ ID NO: 355534 - DNA, 55 bp, Artificial
  Synthetic oligonucleotide
ccagacatgtctgtggacacaattaggaactatccatatactgcaatggtgaatt

SEQ ID NO: 355535 - DNA, 54 bp, Artificial
  Synthetic oligonucleotide
ccagaccaaagtgtagtcagcatcatcaagcatgggatcttcgatatagcaagt

SEQ ID NO: 355536 - DNA, 55 bp, Artificial
  Synthetic oligonucleotide
ccagaccaaatgaagatatattaatctctaagacgtcattgtggaaggaagtacg

SEQ ID NO: 355537 - DNA, 58 bp, Artificial
  Synthetic oligonucleotide
ccagaccaagaactggagaccagaactcagaacgaccgccgggagctacaatcaacac

SEQ ID NO: 355538 - DNA, 55 bp, Artificial
  Synthetic oligonucleotide
ccagaccaagacaattctgccgcgtctcttttgaaactttgcacagaagtgcgct

SEQ ID NO: 355539 - DNA, 60 bp, Artificial
  Synthetic oligonucleotide
ccagaccatagcaaaagttgctactctgaaaaatggataatgggtgagaggttgatgaaa

SEQ ID NO: 355540 - DNA, 55 bp, Artificial
  Synthetic oligonucleotide
ccagaccatcagctggatccgctattcagagcaaattccagcagtcccgactggg

SEQ ID NO: 355541 - DNA, 55 bp, Artificial
  Synthetic oligonucleotide
ccagacccaacacctctttcaactctcaaggataaggtaggatgagtgtgagacc

SEQ ID NO: 355542 - DNA, 60 bp, Artificial
  Synthetic oligonucleotide
ccagacccaaggagcggcagtgtcatcaatggctcaaaccctactgccgaacgaccttgc

SEQ ID NO: 355543 - DNA, 60 bp, Artificial
  Synthetic oligonucleotide
ccagacccagaatttccattccttgttcatccagtcatgccaatgactgacatctatgaa

SEQ ID NO: 355544 - DNA, 55 bp, Artificial
  Synthetic oligonucleotide
ccagacccagatcactttgatggttacaagcaacaagctgtagtgatcatggacg

SEQ ID NO: 355545 - DNA, 58 bp, Artificial
  Synthetic oligonucleotide
ccagaccccccactcaattcagagtctcctttaagctcaactttcaataaagcgatgc

SEQ ID NO: 355546 - DNA, 51 bp, Artificial
  Synthetic oligonucleotide
ccagaccccttgtaataagtgctattgcaaagcgtgctgctaccattgcta

SEQ ID NO: 355547 - DNA, 54 bp, Artificial
  Synthetic oligonucleotide
ccagacccgaaatagagaaattattggcaggggaaatcaggggaagattttgcg

SEQ ID NO: 355548 - DNA, 55 bp, Artificial
  Synthetic oligonucleotide
ccagaccctcgtgcaacagtatgtgttgagccagtattacattcgcgggcacccg

SEQ ID NO: 355549 - DNA, 55 bp, Artificial
  Synthetic oligonucleotide
ccagaccctgaccactttgatggttacaaacagcaagctgtcgtcatcatggacg

SEQ ID NO: 355550 - DNA, 55 bp, Artificial
  Synthetic oligonucleotide
ccagaccctgtcaacttacatttccacatcagatgtctaggatgtataagagaaa

SEQ ID NO: 355551 - DNA, 56 bp, Artificial
  Synthetic oligonucleotide
ccagaccgaaagagcacacagaatgccatagacgggatcactaacaaagtaaactc

SEQ ID NO: 355552 - DNA, 55 bp, Artificial
  Synthetic oligonucleotide
ccagaccgactgaaggatttatgtctctgtcgaccgccacttacacagtagcttc

SEQ ID NO: 355553 - DNA, 60 bp, Artificial
  Synthetic oligonucleotide
ccagacctaagacgtgttgataaatggttgatatcaagagatccaaataagttgaggaga

SEQ ID NO: 355554 - DNA, 55 bp, Artificial
  Synthetic oligonucleotide
ccagacctctaatttcagggttgttccctcaagagatgttgtgagattccctaat

SEQ ID NO: 355555 - DNA, 55 bp, Artificial
  Synthetic oligonucleotide
ccagacctctccctatcggttgtagaccgggtctgtgaccacttgctttccgatg

SEQ ID NO: 355556 - DNA, 60 bp, Artificial
  Synthetic oligonucleotide
ccagacctggagatctcccatctgcgcgtggatggtgatgacaacgtagtctcaatcaac

SEQ ID NO: 355557 - DNA, 55 bp, Artificial
  Synthetic oligonucleotide
ccagacctgtctcctacttgaaaggctcctcgggtggtccgctgctctgcccttc

SEQ ID NO: 355558 - DNA, 59 bp, Artificial
  Synthetic oligonucleotide
ccagacctgtttgttgcattaactaggcacaagaacaaacttgtgctagttagcaatta

SEQ ID NO: 355559 - DNA, 59 bp, Artificial
  Synthetic oligonucleotide
ccagaccttattcattgtggtgttcctcagagactatccgatacaataatactaaacga

SEQ ID NO: 355560 - DNA, 56 bp, Artificial
  Synthetic oligonucleotide
ccagacctttagtggatggattcttaacacttatctgggtggacctacggagcctg

SEQ ID NO: 355561 - DNA, 55 bp, Artificial
  Synthetic oligonucleotide
ccagacgaaactcctagaggtcgccaccttgataaggtgaacttgcttcggagga

SEQ ID NO: 355562 - DNA, 55 bp, Artificial
  Synthetic oligonucleotide
ccagacgaaggaagcatcactttagtgactgcagactgatcttgggcgggagccg

SEQ ID NO: 355563 - DNA, 55 bp, Artificial
  Synthetic oligonucleotide
ccagacgaatggagaaagtacgtcgtggcagttgaaagagttagtgccagttcct

SEQ ID NO: 355564 - DNA, 55 bp, Artificial
  Synthetic oligonucleotide
ccagacgagtacatcatccaagcagccaaacactactcaaatcagctgaagcaac

SEQ ID NO: 355565 - DNA, 56 bp, Artificial
  Synthetic oligonucleotide
ccagacgatacttcggggaatcgttgttcgtcggacgtgttgtgtcagggctggac

SEQ ID NO: 355566 - DNA, 55 bp, Artificial
  Synthetic oligonucleotide
ccagacgcattagacctgctacaggttagtaacctacgggttaagctactagcaa

SEQ ID NO: 355567 - DNA, 54 bp, Artificial
  Synthetic oligonucleotide
ccagacgcgactgacgcttgatgaaatcattcgaagaggatatatcccacgaaa

SEQ ID NO: 355568 - DNA, 60 bp, Artificial
  Synthetic oligonucleotide
ccagacgctattagcgacctcctcgctagcgtagatagtgaagaagtgcgccaatactgc

SEQ ID NO: 355569 - DNA, 55 bp, Artificial
  Synthetic oligonucleotide
ccagacgcttactcactacgtaaaggatgatgcaatatgtccgcatgctggaggg

SEQ ID NO: 355570 - DNA, 55 bp, Artificial
  Synthetic oligonucleotide
ccagacggccttctctacatataaaaccaccggcttgactaaaagagagacaagt

SEQ ID NO: 355571 - DNA, 53 bp, Artificial
  Synthetic oligonucleotide
ccagacggtacggggcgctataagtgccccttcgcctgttaccgcctcggtag

SEQ ID NO: 355572 - DNA, 55 bp, Artificial
  Synthetic oligonucleotide
ccagacggtagcatggcagacaagccagacttcacagtagagccagatggcttga

SEQ ID NO: 355573 - DNA, 58 bp, Artificial
  Synthetic oligonucleotide
ccagacggtgccaaggatgctatgaagttgaagtaccttcaagcggactctaaggacg

SEQ ID NO: 355574 - DNA, 52 bp, Artificial
  Synthetic oligonucleotide
ccagacggtggtgtccacatagatactattatgagtaacgtagttcaaggta

SEQ ID NO: 355575 - DNA, 55 bp, Artificial
  Synthetic oligonucleotide
ccagacggtgtctacgcgtgttttggggacccactgcaggtggctgttcagcgaa

SEQ ID NO: 355576 - DNA, 57 bp, Artificial
  Synthetic oligonucleotide
ccagacggttggccggacacaaccattccaggagagctcgtccccgctggtgagtac

SEQ ID NO: 355577 - DNA, 55 bp, Artificial
  Synthetic oligonucleotide
ccagacgtaagtccgacgaaaccttatgaagccgtcatatcaggtaatgattgga

SEQ ID NO: 355578 - DNA, 55 bp, Artificial
  Synthetic oligonucleotide
ccagacgtagacataacggacgcatggccagctcagttagacttcacgattgcag

SEQ ID NO: 355579 - DNA, 54 bp, Artificial
  Synthetic oligonucleotide
ccagacgtcacagactccagaaacaccaagtaccccaacaaccttttgcgggga

SEQ ID NO: 355580 - DNA, 55 bp, Artificial
  Synthetic oligonucleotide
ccagacgttccaaccaatgtagaacgacatgtgaacagagcagttgccatcctgc

SEQ ID NO: 355581 - DNA, 55 bp, Artificial
  Synthetic oligonucleotide
ccagactaatcagaaattaggaagacggtctagtgggctaatggggcaaatcaaa

SEQ ID NO: 355582 - DNA, 60 bp, Artificial
  Synthetic oligonucleotide
ccagactacgacaacatgcagtggataaagtacatgttagccaacaacgacatccgtgta

SEQ ID NO: 355583 - DNA, 55 bp, Artificial
  Synthetic oligonucleotide
ccagactataatagcaaccctcactcttcttggatgtagtggatcaccatggagg

SEQ ID NO: 355584 - DNA, 55 bp, Artificial
  Synthetic oligonucleotide
ccagactatgagtacgtgctagacggattccaagatcatttcggaaacctaggtc

SEQ ID NO: 355585 - DNA, 55 bp, Artificial
  Synthetic oligonucleotide
ccagactatgcatcactcaggtctctagttgcttcctcagggaccctagagttca

SEQ ID NO: 355586 - DNA, 58 bp, Artificial
  Synthetic oligonucleotide
ccagactattcaccatcaggcaggaaatggccattaggggcctatgggattcctttcg

SEQ ID NO: 355587 - DNA, 60 bp, Artificial
  Synthetic oligonucleotide
ccagactcaatatgatcaacaataagattgatgaccaaatacaggacatatgggcataca

SEQ ID NO: 355588 - DNA, 60 bp, Artificial
  Synthetic oligonucleotide
ccagactcagtctacgcagtgctgccaaacggtatagacgtacatcacgctccttacacc

SEQ ID NO: 355589 - DNA, 55 bp, Artificial
  Synthetic oligonucleotide
ccagactcatatgctccttgcctcaggtatctcagaaccaggtgactgcggtggg

SEQ ID NO: 355590 - DNA, 55 bp, Artificial
  Synthetic oligonucleotide
ccagactcgccggaagatgacttctactcgtatgccgttgacgtcccattgcccg

SEQ ID NO: 355591 - DNA, 55 bp, Artificial
  Synthetic oligonucleotide
ccagactcgtgatttacactcactatgtatgccgactcccgacgcgccaatgtct

SEQ ID NO: 355592 - DNA, 60 bp, Artificial
  Synthetic oligonucleotide
ccagactcttgctatacacaagctggaatgaaccaaaactcacccagtcagcttcttcct

SEQ ID NO: 355593 - DNA, 55 bp, Artificial
  Synthetic oligonucleotide
ccagactgagtctaataatactgagatcttcagacctggaggaggagatatgagg

SEQ ID NO: 355594 - DNA, 55 bp, Artificial
  Synthetic oligonucleotide
ccagactgataagatgggattcgtcgggatccatacgcctgaaggcaagctggtc

SEQ ID NO: 355595 - DNA, 55 bp, Artificial
  Synthetic oligonucleotide
ccagactgcccctatcctctgctaggaagagacttgctgactaaactaaaagccc

SEQ ID NO: 355596 - DNA, 55 bp, Artificial
  Synthetic oligonucleotide
ccagactgtcagggatcaagtgcaacaaggatcaaattttacagctgatttggcg

SEQ ID NO: 355597 - DNA, 54 bp, Artificial
  Synthetic oligonucleotide
ccagactgtcgctgacagcgtatttaaggcacagggtatcaacgtggacaatat

SEQ ID NO: 355598 - DNA, 55 bp, Artificial
  Synthetic oligonucleotide
ccagacttagcgcagtcacgggcaaatcagcttcaggacacgcgctcgctgccat

SEQ ID NO: 355599 - DNA, 56 bp, Artificial
  Synthetic oligonucleotide
ccagacttcgccataaggcctttatcttcttgccattggtcagtgagaggggtcgc

SEQ ID NO: 355600 - DNA, 58 bp, Artificial
  Synthetic oligonucleotide
ccagacttggaagttcaggtacgctttgtgaagatttagtgctctcctcaggttgtgg

SEQ ID NO: 355601 - DNA, 55 bp, Artificial
  Synthetic oligonucleotide
ccagagaaacacttcagacttccgttgccattatgccctttcagaggattcttcc

SEQ ID NO: 355602 - DNA, 55 bp, Artificial
  Synthetic oligonucleotide
ccagagaaactgcagagtaccatggcagaatcatttggagccgaagtgactgggt

SEQ ID NO: 355603 - DNA, 60 bp, Artificial
  Synthetic oligonucleotide
ccagagaaatttacatcagtagaagactgctaggaacatttacatggacattgtcagatt

SEQ ID NO: 355604 - DNA, 55 bp, Artificial
  Synthetic oligonucleotide
ccagagaagctaagaagagagctagaaagacttggtttatcaaggatggaagtgg

SEQ ID NO: 355605 - DNA, 58 bp, Artificial
  Synthetic oligonucleotide
ccagagacaatgtttcatgctccatctgtctgtgaggtaccagatcttaattaattaa

SEQ ID NO: 355606 - DNA, 60 bp, Artificial
  Synthetic oligonucleotide
ccagagacaatgtttcttgctccatctgtctatagggaggattgagccctgtattttcct

SEQ ID NO: 355607 - DNA, 55 bp, Artificial
  Synthetic oligonucleotide
ccagagacaccaaggagatgcagaaactcttagacacatacggaatcaacttgcc

SEQ ID NO: 355608 - DNA, 60 bp, Artificial
  Synthetic oligonucleotide
ccagagaccctaagacaagtcagagaagcaatcgcaaccctgcaatacgggtccggcagc

SEQ ID NO: 355609 - DNA, 59 bp, Artificial
  Synthetic oligonucleotide
ccagagacgccccccccaccggcgattgctgatctgttgaaatcggtagacagcgaggc

SEQ ID NO: 355610 - DNA, 55 bp, Artificial
  Synthetic oligonucleotide
ccagagacttgtttattgcaaatctgaatgcttaggtcaaactaagccaggcatt

SEQ ID NO: 355611 - DNA, 55 bp, Artificial
  Synthetic oligonucleotide
ccagagactttagaacagctaagatcaatcatttgtgacttacaagacagaagag

SEQ ID NO: 355612 - DNA, 55 bp, Artificial
  Synthetic oligonucleotide
ccagagagaatgcaaacccacatccttctcggtattggatttgccgaacccggtg

SEQ ID NO: 355613 - DNA, 57 bp, Artificial
  Synthetic oligonucleotide
ccagagagcaggactacatcaggcgtgtagctggtaaggttcctgcagacgttatgg

SEQ ID NO: 355614 - DNA, 60 bp, Artificial
  Synthetic oligonucleotide
ccagagagcgatcacttcatgaacaatacagaaccattgtgtgatgctaagggttttgca

SEQ ID NO: 355615 - DNA, 58 bp, Artificial
  Synthetic oligonucleotide
ccagagaggaatattgcgtttgatgttcccaggtgttcttcggagatgatgaactatc

SEQ ID NO: 355616 - DNA, 55 bp, Artificial
  Synthetic oligonucleotide
ccagagaggcgagaacgaaactgatcacgggatccaacggagcagacggagacta

SEQ ID NO: 355617 - DNA, 60 bp, Artificial
  Synthetic oligonucleotide
ccagagagtggtcatttcatgaacaatacagaggcattgtgtgatgctaagggtttcgca

SEQ ID NO: 355618 - DNA, 55 bp, Artificial
  Synthetic oligonucleotide
ccagagataccctttacaacggaagcggcgaacgaaattgctcgcgtgactgggg

SEQ ID NO: 355619 - DNA, 55 bp, Artificial
  Synthetic oligonucleotide
ccagagataggaaacgcgtacgttcacagaaccagggcggggtctcatcagatta

SEQ ID NO: 355620 - DNA, 55 bp, Artificial
  Synthetic oligonucleotide
ccagagatctcagcactgaaacaggttctgctaggacttcctgagtgcaaagatg

SEQ ID NO: 355621 - DNA, 59 bp, Artificial
  Synthetic oligonucleotide
ccagagatgtcggagattatttgatgttcaaaacgagaataaccgataatttcactgga

SEQ ID NO: 355622 - DNA, 55 bp, Artificial
  Synthetic oligonucleotide
ccagagattcctttcacaacagaagctgcgaacgagattgcgcgtgtaacagggg

SEQ ID NO: 355623 - DNA, 57 bp, Artificial
  Synthetic oligonucleotide
ccagagcaacccaatacctgcacaagttcagtactaattataacaagccaaaaacaa

SEQ ID NO: 355624 - DNA, 51 bp, Artificial
  Synthetic oligonucleotide
ccagagcaactgccacggaagttgcgggtaaaatagcacacgaaagtgaca

SEQ ID NO: 355625 - DNA, 55 bp, Artificial
  Synthetic oligonucleotide
ccagagcaactgtggtagtgcctggatatacccgaactggaggaaccttcggacg

SEQ ID NO: 355626 - DNA, 56 bp, Artificial
  Synthetic oligonucleotide
ccagagcaatccgaccttctcgccaggtatatcctaggtcgtgttgacctaccccc

SEQ ID NO: 355627 - DNA, 60 bp, Artificial
  Synthetic oligonucleotide
ccagagcaccgacaagtcatatctgccacaggtgactgtcaagtcctcagcccgcctacc

SEQ ID NO: 355628 - DNA, 55 bp, Artificial
  Synthetic oligonucleotide
ccagagcacttcagaagaccgttcaatataggtctttataagggaacgattgagc

SEQ ID NO: 355629 - DNA, 55 bp, Artificial
  Synthetic oligonucleotide
ccagagcaggccagaaccctcagctccaccagcagagagcttcaggttcgaggag

SEQ ID NO: 355630 - DNA, 55 bp, Artificial
  Synthetic oligonucleotide
ccagagcagtcaacttgattacagatttgtgcaacacctgggagagtgctaaaac

SEQ ID NO: 355631 - DNA, 60 bp, Artificial
  Synthetic oligonucleotide
ccagagcataagcgcttcgcgatcagatctatctgctcttcgcgatgagttagcatcttt

SEQ ID NO: 355632 - DNA, 60 bp, Artificial
  Synthetic oligonucleotide
ccagagcatgtagttaatcattacttccaggcgagacattatttacacactctttggaag

SEQ ID NO: 355633 - DNA, 55 bp, Artificial
  Synthetic oligonucleotide
ccagagccggaaaagcagcgctcacagactgacaaccagctcgctgtgttcttga

SEQ ID NO: 355634 - DNA, 55 bp, Artificial
  Synthetic oligonucleotide
ccagagccggacagacagcgcactccacaagacaaccagctagcatacgtggtga

SEQ ID NO: 355635 - DNA, 58 bp, Artificial
  Synthetic oligonucleotide
ccagagcctacccctccttctcgtgttagagtaaccagaacacaatatcataatccat

SEQ ID NO: 355636 - DNA, 60 bp, Artificial
  Synthetic oligonucleotide
ccagagcctagatcgctagcaagctggatccagagtgaattcaacaaggcatgtgaattg

SEQ ID NO: 355637 - DNA, 55 bp, Artificial
  Synthetic oligonucleotide
ccagagcctatctcacttgaggacagtgtctttggaacagaaggcttggaagctc

SEQ ID NO: 355638 - DNA, 55 bp, Artificial
  Synthetic oligonucleotide
ccagagcctcatctacgcagccttcgcgcatgccatgacgctagtagtaggagga

SEQ ID NO: 355639 - DNA, 58 bp, Artificial
  Synthetic oligonucleotide
ccagagcctgagcgtccccgccttcctcaaagccaccctgaagtgcgtagacgccgcc

SEQ ID NO: 355640 - DNA, 60 bp, Artificial
  Synthetic oligonucleotide
ccagagcgaatagtatcgattctagagtgggatcgatcaaaagagccatgccaccgactt

SEQ ID NO: 355641 - DNA, 55 bp, Artificial
  Synthetic oligonucleotide
ccagagcgtgtcaaaacgattcatatggtggtggatacggccctaaagcctatcc

SEQ ID NO: 355642 - DNA, 60 bp, Artificial
  Synthetic oligonucleotide
ccagagctccgtggcctggctcagatcctgattgaccagaaagtgaaggaaatctcaaac

SEQ ID NO: 355643 - DNA, 60 bp, Artificial
  Synthetic oligonucleotide
ccagagctcctcaacggggaaaatatgcaacaatcctcacagaattctcgatggaagaga

SEQ ID NO: 355644 - DNA, 55 bp, Artificial
  Synthetic oligonucleotide
ccagagctcctctgggaaagtaaagtttgtcaagtggatcgcagcatctcctacg

SEQ ID NO: 355645 - DNA, 60 bp, Artificial
  Synthetic oligonucleotide
ccagagctctctctagattccgaaagtgaatcgagagaaaactggctctcccttagccat

SEQ ID NO: 355646 - DNA, 55 bp, Artificial
  Synthetic oligonucleotide
ccagagctgacaccaatcgatgctttccggctcatcggtctcgcgtttggggacg

SEQ ID NO: 355647 - DNA, 55 bp, Artificial
  Synthetic oligonucleotide
ccagagctgtggcctcagacaatgggctgactaccggcatcgacaatcttatgcc

SEQ ID NO: 355648 - DNA, 57 bp, Artificial
  Synthetic oligonucleotide
ccagaggaaaactatgcccaaactgttttaactgcacagatctggacgtggccctag

SEQ ID NO: 355649 - DNA, 55 bp, Artificial
  Synthetic oligonucleotide
ccagaggaaagtcttcagagaactagtgaggaattgtgacctgcccgtttggctc

SEQ ID NO: 355650 - DNA, 50 bp, Artificial
  Synthetic oligonucleotide
ccagaggaagttggatggaacaatagttggaatagcaaaacttggaatga

SEQ ID NO: 355651 - DNA, 58 bp, Artificial
  Synthetic oligonucleotide
ccagaggaattgagtaaatatggggcaactgacgactattgtgttgccggtagattgg

SEQ ID NO: 355652 - DNA, 60 bp, Artificial
  Synthetic oligonucleotide
ccagaggacaagagcccttgtccgcaccggaatggatcccaggatgtgctctttgatgca

SEQ ID NO: 355653 - DNA, 60 bp, Artificial
  Synthetic oligonucleotide
ccagaggaccccttcagcgaacagagacgcatcgcgagagggagtagaccatagcgatag

SEQ ID NO: 355654 - DNA, 55 bp, Artificial
  Synthetic oligonucleotide
ccagaggagaggactagcatttggacttcaagtagctccaccgtgttttgtggtg

SEQ ID NO: 355655 - DNA, 60 bp, Artificial
  Synthetic oligonucleotide
ccagaggaggaaagggcgagaacatcaaatactcgtatgctgagcatctaggccactgca

SEQ ID NO: 355656 - DNA, 58 bp, Artificial
  Synthetic oligonucleotide
ccagaggagtagaggaaggctctattgggaaggtatgcagaaccctactggcaaaatc

SEQ ID NO: 355657 - DNA, 55 bp, Artificial
  Synthetic oligonucleotide
ccagaggagtggataggtaaggagatatgtggagtgtcgtatgactacgacgttc

SEQ ID NO: 355658 - DNA, 55 bp, Artificial
  Synthetic oligonucleotide
ccagaggagttcagattgcctcaaatgagaacatggagacaatggactccagcac

SEQ ID NO: 355659 - DNA, 55 bp, Artificial
  Synthetic oligonucleotide
ccagaggagttctcggaagcgatacactccggcaaagggtcgagcgatgtgtggg

SEQ ID NO: 355660 - DNA, 59 bp, Artificial
  Synthetic oligonucleotide
ccagaggataatgaaccaactggttatgcccaaacagactgtgtactggaagcaatggc

SEQ ID NO: 355661 - DNA, 59 bp, Artificial
  Synthetic oligonucleotide
ccagaggatttgatcagggagtacgaggagctcaaactaatgatgggatgctcattagg

SEQ ID NO: 355662 - DNA, 58 bp, Artificial
  Synthetic oligonucleotide
ccagaggcaaatcaggtaggagcgggagcattcgggccaggattcaccccaccacacg

SEQ ID NO: 355663 - DNA, 55 bp, Artificial
  Synthetic oligonucleotide
ccagaggcagtatacagccgaataatgatgaacggtggcaagttgaagaaagtcc

SEQ ID NO: 355664 - DNA, 60 bp, Artificial
  Synthetic oligonucleotide
ccagaggcattgtcccacttacatgcaatggattccacaatacttacaaagtggaatttg

SEQ ID NO: 355665 - DNA, 60 bp, Artificial
  Synthetic oligonucleotide
ccagaggccaatacagtgggtttgtgagaacactgttccaacagatgcgtgacgttcttg

SEQ ID NO: 355666 - DNA, 55 bp, Artificial
  Synthetic oligonucleotide
ccagaggccatccagttgctgacacaatcatttcttcatcagtcggtctaaggac

SEQ ID NO: 355667 - DNA, 59 bp, Artificial
  Synthetic oligonucleotide
ccagaggccttgcacagtacagaaagatttaacgctttgcttggagttcaccataataa

SEQ ID NO: 355668 - DNA, 55 bp, Artificial
  Synthetic oligonucleotide
ccagaggcgcgcaattatgggagctatcaaggtaggtgtaagcttacttggggag

SEQ ID NO: 355669 - DNA, 60 bp, Artificial
  Synthetic oligonucleotide
ccagagggcatacgcactggacacggaggtggccgcgtcatgtggcggtgttgtccttgt

SEQ ID NO: 355670 - DNA, 56 bp, Artificial
  Synthetic oligonucleotide
ccagaggggtagaggaaggctctatcgggaaagtatgtagaacattactggcaaaa

SEQ ID NO: 355671 - DNA, 60 bp, Artificial
  Synthetic oligonucleotide
ccagagggtcagatatattgaagatgagaatgcaaactgggcgtatatcaaagcgcaatg

SEQ ID NO: 355672 - DNA, 55 bp, Artificial
  Synthetic oligonucleotide
ccagagggtgcgttcgcagcatttgcggacccattgcagggtggttctggtcgag

SEQ ID NO: 355673 - DNA, 51 bp, Artificial
  Synthetic oligonucleotide
ccagagggttaaggaaatggttggggatccttaactacgccagaagctaca

SEQ ID NO: 355674 - DNA, 53 bp, Artificial
  Synthetic oligonucleotide
ccagaggtcatgtacgcaaccatggtgtatccacccgagttattagttggatc

SEQ ID NO: 355675 - DNA, 60 bp, Artificial
  Synthetic oligonucleotide
ccagaggtgcattacggtcatcgttatgcgtgcatgatggatcgtattaaggcagataat

SEQ ID NO: 355676 - DNA, 55 bp, Artificial
  Synthetic oligonucleotide
ccagaggttccttgaggatgtaatccctcaccctgttaactgacttggcactctg

SEQ ID NO: 355677 - DNA, 60 bp, Artificial
  Synthetic oligonucleotide
ccagaggttgtgaaagcccttgtaaagtccagtcttacgaacagcgccatgacatctcac

SEQ ID NO: 355678 - DNA, 60 bp, Artificial
  Synthetic oligonucleotide
ccagagtaaacgtggcattagatccaaagcaaactcagctatttttagtaggctgcaagc

SEQ ID NO: 355679 - DNA, 58 bp, Artificial
  Synthetic oligonucleotide
ccagagtaaggggtctgtattttcctgctggtggctccagttcaggaacagcataccc

SEQ ID NO: 355680 - DNA, 55 bp, Artificial
  Synthetic oligonucleotide
ccagagtactttatatggctcaatggggaagtatccaaaaggcaggttataggtt

SEQ ID NO: 355681 - DNA, 57 bp, Artificial
  Synthetic oligonucleotide
ccagagtagttcttgaacctatggccaggaagttctactctaaggaccgacatgttc

SEQ ID NO: 355682 - DNA, 55 bp, Artificial
  Synthetic oligonucleotide
ccagagtatgagtatatccttgacactatggcagacaactttcgagaacttggcc

SEQ ID NO: 355683 - DNA, 59 bp, Artificial
  Synthetic oligonucleotide
ccagagtatgtcttttcacccgggataataccagagtccaatcacagtacctgtgacaa

SEQ ID NO: 355684 - DNA, 51 bp, Artificial
  Synthetic oligonucleotide
ccagagtcaagcttgccctcgatacaggtcatcgcatcctactctcaatgt

SEQ ID NO: 355685 - DNA, 54 bp, Artificial
  Synthetic oligonucleotide
ccagagtccaactatcccgatcgttttggactctttggcgcaccccccttagag

SEQ ID NO: 355686 - DNA, 55 bp, Artificial
  Synthetic oligonucleotide
ccagagtcttgggatgccatgatattatctcatatgagtcagctgtgagtagtga

SEQ ID NO: 355687 - DNA, 60 bp, Artificial
  Synthetic oligonucleotide
ccagagtgaattcaacaaggcatgtgaattgaccgattcaagctggatagagctcgatga

SEQ ID NO: 355688 - DNA, 60 bp, Artificial
  Synthetic oligonucleotide
ccagagtgtagtaataatggatgacatcatgcaaaaccctggtggtgaggacatgacatt

SEQ ID NO: 355689 - DNA, 55 bp, Artificial
  Synthetic oligonucleotide
ccagagtgtagttaatcaacagggtgaagcgctgagtcaacttaccagtcagtta

SEQ ID NO: 355690 - DNA, 52 bp, Artificial
  Synthetic oligonucleotide
ccagagtgtccttcgtggggatggtcacgacccatgtgttggccgcgtactt

SEQ ID NO: 355691 - DNA, 55 bp, Artificial
  Synthetic oligonucleotide
ccagagttaaaagtaaatttgattatgtaatggatgactctggtgttaaaaacaa

SEQ ID NO: 355692 - DNA, 57 bp, Artificial
  Synthetic oligonucleotide
ccagagttagttcagagtatgtgaattatggtgtaatagaacaggttaagaataggg

SEQ ID NO: 355693 - DNA, 51 bp, Artificial
  Synthetic oligonucleotide
ccagagttccagtcgcgctccacggctagcctcccacccttcgagaagaat

SEQ ID NO: 355694 - DNA, 56 bp, Artificial
  Synthetic oligonucleotide
ccagagttctcgagaccccggttctatacagccttgtctttggctaaatccgtgtc

SEQ ID NO: 355695 - DNA, 59 bp, Artificial
  Synthetic oligonucleotide
ccagagttggatcacatctcgttgttctaacacgctaaggactcaaggaaatgtaagtc

SEQ ID NO: 355696 - DNA, 55 bp, Artificial
  Synthetic oligonucleotide
ccagagttggcagtcgaccctgagcagcatcacgggtctgggagttaggagcctg

SEQ ID NO: 355697 - DNA, 58 bp, Artificial
  Synthetic oligonucleotide
ccagagtttaaatgaggaaccctctcctggattgcagaggaagatagtgggaattcca

SEQ ID NO: 355698 - DNA, 55 bp, Artificial
  Synthetic oligonucleotide
ccagagtttaggtgaaccgcagcgattggatgtgttaagtgtcgcgtcccctaac

SEQ ID NO: 355699 - DNA, 60 bp, Artificial
  Synthetic oligonucleotide
ccagagtttgcgattcatggcgtaaatccgatgccggggccgctcacacgtgctattgca

SEQ ID NO: 355700 - DNA, 60 bp, Artificial
  Synthetic oligonucleotide
ccagataaacacgccattctctgtttgagctgcagtgatgggttcccctgtgcgtgaatc

SEQ ID NO: 355701 - DNA, 53 bp, Artificial
  Synthetic oligonucleotide
ccagataaagaacggttggtgtggagctgtaggggccttgaaataggtagagg

SEQ ID NO: 355702 - DNA, 55 bp, Artificial
  Synthetic oligonucleotide
ccagataaggtagaagaggccactgcaggagagaacaactgcctgttgcacccct

SEQ ID NO: 355703 - DNA, 56 bp, Artificial
  Synthetic oligonucleotide
ccagatacacaaacacctaatttaccaatatggttaacaacatggggcttaatgga

SEQ ID NO: 355704 - DNA, 59 bp, Artificial
  Synthetic oligonucleotide
ccagatacagtcggctacgatcttgtacgagatctgattcttgttctccgagcaaagaa

SEQ ID NO: 355705 - DNA, 60 bp, Artificial
  Synthetic oligonucleotide
ccagatacattctcatgaatcaataacaagaaggaacgaagaacacatggctatcaagac

SEQ ID NO: 355706 - DNA, 55 bp, Artificial
  Synthetic oligonucleotide
ccagatacctgtcaggtcaaatgagggaactgggactcaggtgtttggcttccca

SEQ ID NO: 355707 - DNA, 55 bp, Artificial
  Synthetic oligonucleotide
ccagatacgataggatacgatctcatacgtgatcttattgccgttatacgtgcca

SEQ ID NO: 355708 - DNA, 55 bp, Artificial
  Synthetic oligonucleotide
ccagatacgccctcctccccactgctgcaaacacgcttgaacggtacgcaatccc

SEQ ID NO: 355709 - DNA, 59 bp, Artificial
  Synthetic oligonucleotide
ccagatactccagaatgccccaatgaacaaagagcgtggaacatttgggaagttgagga

SEQ ID NO: 355710 - DNA, 60 bp, Artificial
  Synthetic oligonucleotide
ccagatagtctgaagactttgtccgctgctgcttccctacctatcgaatgtgggactatt

SEQ ID NO: 355711 - DNA, 55 bp, Artificial
  Synthetic oligonucleotide
ccagatagtgagttagctatggcgataaaatcaaaggttgaggtgatcgatgaaa

SEQ ID NO: 355712 - DNA, 55 bp, Artificial
  Synthetic oligonucleotide
ccagatagtgttccttagacgttgcagtgttgatgatagttctccatcgctcatc

SEQ ID NO: 355713 - DNA, 60 bp, Artificial
  Synthetic oligonucleotide
ccagatatagactccattctttgcttgagctgcagtgatgcgtgcccctgtgcgagaatc

SEQ ID NO: 355714 - DNA, 55 bp, Artificial
  Synthetic oligonucleotide
ccagatatggtaattgaagatcgcccactgaagcatgtgacaccccagatggaag

SEQ ID NO: 355715 - DNA, 60 bp, Artificial
  Synthetic oligonucleotide
ccagatatggttgtgcagaacataaagagcctgcgtgacgatcttacccttagtaattta

SEQ ID NO: 355716 - DNA, 55 bp, Artificial
  Synthetic oligonucleotide
ccagatatgtgaacaggtcaacctccttaaggagtcactagtaggtcaggactcc

SEQ ID NO: 355717 - DNA, 55 bp, Artificial
  Synthetic oligonucleotide
ccagatattgtcacagaagcatcggagaaattcataccaaatagagcataccgag

SEQ ID NO: 355718 - DNA, 60 bp, Artificial
  Synthetic oligonucleotide
ccagatcaaagactgaattctcgaatctgcctagttgttatacagctaaggagatattgt

SEQ ID NO: 355719 - DNA, 57 bp, Artificial
  Synthetic oligonucleotide
ccagatcacccaagtggtgtagtactctgtcattccggtgactttgtacgccagttt

SEQ ID NO: 355720 - DNA, 57 bp, Artificial
  Synthetic oligonucleotide
ccagatcacctacatggtgttgtacactattattacggtaatcttgtacgccagttt

SEQ ID NO: 355721 - DNA, 60 bp, Artificial
  Synthetic oligonucleotide
ccagatcagaagagtcaacagccatcttaacaccagaaatttgtcgcacaacttcatgtg

SEQ ID NO: 355722 - DNA, 55 bp, Artificial
  Synthetic oligonucleotide
ccagatcagtccctcgaacatcctggatctcgatccggagaacccctgggaccgc

SEQ ID NO: 355723 - DNA, 60 bp, Artificial
  Synthetic oligonucleotide
ccagatcatgccgcgcgcgcatgtagttgactcggatgaggtgggcgagcaaatggagcc

SEQ ID NO: 355724 - DNA, 57 bp, Artificial
  Synthetic oligonucleotide
ccagatccccatggggtacttccaacaggaccagaacccgcacgataaatagcagga

SEQ ID NO: 355725 - DNA, 54 bp, Artificial
  Synthetic oligonucleotide
ccagatccgcgattgttagttgaggtcgtggccttatgaggcgtttaaacccct

SEQ ID NO: 355726 - DNA, 56 bp, Artificial
  Synthetic oligonucleotide
ccagatccggcaggtcagaaaacactggtgaatccccaacgctttcctcaggttgt

SEQ ID NO: 355727 - DNA, 59 bp, Artificial
  Synthetic oligonucleotide
ccagatcctgactttttggatatagttgctttacataggccagcattaacctctaggcg

SEQ ID NO: 355728 - DNA, 57 bp, Artificial
  Synthetic oligonucleotide
ccagatcctggtataacaggatacccgggtactcagaacaagtgaaaggaccatgga

SEQ ID NO: 355729 - DNA, 57 bp, Artificial
  Synthetic oligonucleotide
ccagatcgaagaatcggttattcgtgcagacgaatttcccttcgaactgcacgagca

SEQ ID NO: 355730 - DNA, 60 bp, Artificial
  Synthetic oligonucleotide
ccagatcgatgtccacctacatgcatttatgttgcaggcatggcagagcttggtgccttc

SEQ ID NO: 355731 - DNA, 55 bp, Artificial
  Synthetic oligonucleotide
ccagatcgggcccctttgcacttaaacaacagatacccagcgccacacttactgc

SEQ ID NO: 355732 - DNA, 55 bp, Artificial
  Synthetic oligonucleotide
ccagatcgtctcggatcctcgcaacaggtcaatgctgaccagttcgaccacaccc

SEQ ID NO: 355733 - DNA, 55 bp, Artificial
  Synthetic oligonucleotide
ccagatcgtgcagtgaccctatacgatttgtgtgagcaacgtgaagaatctccgc

SEQ ID NO: 355734 - DNA, 55 bp, Artificial
  Synthetic oligonucleotide
ccagatctaaacttgggcagttcgctgtgatgagatttactggggaagcaggcac

SEQ ID NO: 355735 - DNA, 55 bp, Artificial
  Synthetic oligonucleotide
ccagatctacgtgccttaggtcatctaagccgctatggatcgcatctctgcccgc

SEQ ID NO: 355736 - DNA, 59 bp, Artificial
  Synthetic oligonucleotide
ccagatctgaccggtctctcatcctgacaacaatccccaaaaagaattggctcttccaa

SEQ ID NO: 355737 - DNA, 57 bp, Artificial
  Synthetic oligonucleotide
ccagatcttcccagacagaatttggaatgtgacttacactggaacaagcgcagcatg

SEQ ID NO: 355738 - DNA, 54 bp, Artificial
  Synthetic oligonucleotide
ccagatctttccagacacgatctggaatgtgacttacagtggaacaagcaatgc

SEQ ID NO: 355739 - DNA, 55 bp, Artificial
  Synthetic oligonucleotide
ccagatgaaagtccacttctcccacaattacactccatgcccacaaggaatccag

SEQ ID NO: 355740 - DNA, 55 bp, Artificial
  Synthetic oligonucleotide
ccagatgaattctatacggtcgctgtgagtaaatacccagcgctgaagcctggtg

SEQ ID NO: 355741 - DNA, 55 bp, Artificial
  Synthetic oligonucleotide
ccagatgagatatctggatcactgaagtgtatagatgatttagagacacatcatg

SEQ ID NO: 355742 - DNA, 55 bp, Artificial
  Synthetic oligonucleotide
ccagatgagattacgaaccctaaagagtacgatccctccgattatccgttagctg

SEQ ID NO: 355743 - DNA, 55 bp, Artificial
  Synthetic oligonucleotide
ccagatgaggaattactaaaggatatggtagaactagcgaaaacgcaaggagatt

SEQ ID NO: 355744 - DNA, 57 bp, Artificial
  Synthetic oligonucleotide
ccagatgagggaacctaggggaagtgacatagcaggaactactggtacccttcagga

SEQ ID NO: 355745 - DNA, 55 bp, Artificial
  Synthetic oligonucleotide
ccagatgaggtagaagaggctactgagggagagaacaacagcctgttacatccgc

SEQ ID NO: 355746 - DNA, 60 bp, Artificial
  Synthetic oligonucleotide
ccagatgagtgcaggttctatgctctcagccaagggacaacgattagagggaaacactca

SEQ ID NO: 355747 - DNA, 55 bp, Artificial
  Synthetic oligonucleotide
ccagatgagttgtcttttaagtggcactcttcagattccttttcgtccaaaccat

SEQ ID NO: 355748 - DNA, 55 bp, Artificial
  Synthetic oligonucleotide
ccagatgatcaaatgtatagattaagggatagactacgactattgccagtagaag

SEQ ID NO: 355749 - DNA, 51 bp, Artificial
  Synthetic oligonucleotide
ccagatgcagagctctacattgtgccaatatctgatcatgatggaaagcct

SEQ ID NO: 355750 - DNA, 59 bp, Artificial
  Synthetic oligonucleotide
ccagatgcgtatcgtctttagtgttttgacacgctcggattaggacgttcgccaatgga

SEQ ID NO: 355751 - DNA, 55 bp, Artificial
  Synthetic oligonucleotide
ccagatgctcagattgccttggagaaacacataagagacatgcccgtcgcagctg

SEQ ID NO: 355752 - DNA, 52 bp, Artificial
  Synthetic oligonucleotide
ccagatgctctccaacttcttcatggctgagactcccatctcggagtccaac

SEQ ID NO: 355753 - DNA, 58 bp, Artificial
  Synthetic oligonucleotide
ccagatggacgctgaaagcgtcgtgactggactgcaagagatgaacgaaaccctacag

SEQ ID NO: 355754 - DNA, 55 bp, Artificial
  Synthetic oligonucleotide
ccagatggctgcatgcaggaggcttacattcaacctctctctggatgttacctgc

SEQ ID NO: 355755 - DNA, 55 bp, Artificial
  Synthetic oligonucleotide
ccagatggttacgtccttgctctaggtaatcgttgagcactggggttagtagctc

SEQ ID NO: 355756 - DNA, 55 bp, Artificial
  Synthetic oligonucleotide
ccagatgtcactctcatccaatacatggatgacctcctgataggatccaacagag

SEQ ID NO: 355757 - DNA, 56 bp, Artificial
  Synthetic oligonucleotide
ccagatgtccaattttagccttgcccaagattgttggctctgtttaaaactaggta

SEQ ID NO: 355758 - DNA, 55 bp, Artificial
  Synthetic oligonucleotide
ccagatgtcccaactgtggaaggtatggacatgttctgagagactgtagactccc

SEQ ID NO: 355759 - DNA, 60 bp, Artificial
  Synthetic oligonucleotide
ccagatgtgatccctaaagtggagggcacaaccattgcagatcagctactaaagtatggc

SEQ ID NO: 355760 - DNA, 52 bp, Artificial
  Synthetic oligonucleotide
ccagatgtgattctctagaatctctaatgattgaggacctatacccatttgc

SEQ ID NO: 355761 - DNA, 56 bp, Artificial
  Synthetic oligonucleotide
ccagatgtggaagacgtctcggggaattgaggctcactgaacgacgggggtacttc

SEQ ID NO: 355762 - DNA, 51 bp, Artificial
  Synthetic oligonucleotide
ccagatgttcagaaagtactagatgacattaaagcgttggctgccgagcgc

SEQ ID NO: 355763 - DNA, 55 bp, Artificial
  Synthetic oligonucleotide
ccagatgttctgactcccgtctttgtcaaggactcacacaaccttgagtactctg

SEQ ID NO: 355764 - DNA, 55 bp, Artificial
  Synthetic oligonucleotide
ccagatgtttacaggagcatgtgctcagtttggctcacttatgctggcatagtgg

SEQ ID NO: 355765 - DNA, 60 bp, Artificial
  Synthetic oligonucleotide
ccagattatgcatcccttaggtccctagttgcctcatcaggtacattggagttcataact

SEQ ID NO: 355766 - DNA, 60 bp, Artificial
  Synthetic oligonucleotide
ccagattatgtctcccttagatcattagttgcttcgtcaggcactctggaatttatcgct

SEQ ID NO: 355767 - DNA, 55 bp, Artificial
  Synthetic oligonucleotide
ccagattcctaccagtagcgggcgggacaagcagcgtatatatcgaggtgctgca

SEQ ID NO: 355768 - DNA, 58 bp, Artificial
  Synthetic oligonucleotide
ccagattcctccctgggtcacaattgaaggccctgaagggaaagatctagtgccatta

SEQ ID NO: 355769 - DNA, 53 bp, Artificial
  Synthetic oligonucleotide
ccagattcggaaggttagaaaacatttgtgtatccccaacgctttcctcaggt

SEQ ID NO: 355770 - DNA, 60 bp, Artificial
  Synthetic oligonucleotide
ccagattctttatcaactgacttacagcttatgagagagggcgtctatagagaactagga

SEQ ID NO: 355771 - DNA, 55 bp, Artificial
  Synthetic oligonucleotide
ccagattgaccaaataatccatcccgtaaactgcagacattacaatcagcccagg

SEQ ID NO: 355772 - DNA, 55 bp, Artificial
  Synthetic oligonucleotide
ccagattgctgctgaagctgaggagggtttcaagacggctggtataactattccc

SEQ ID NO: 355773 - DNA, 55 bp, Artificial
  Synthetic oligonucleotide
ccagattggcacacactatgttgggtgagatattgaattactacacacactgggc

SEQ ID NO: 355774 - DNA, 60 bp, Artificial
  Synthetic oligonucleotide
ccagattggccgaaagagccgcagccatgttggagtatgtggcttacgaacgccaactgc

SEQ ID NO: 355775 - DNA, 50 bp, Artificial
  Synthetic oligonucleotide
ccagattgggggacgatcgttccttcgggccccggggcaaagttcccctc

SEQ ID NO: 355776 - DNA, 55 bp, Artificial
  Synthetic oligonucleotide
ccagattgggtcaccaaaggcattgaaatgcaagggaaaaccgtccaggaaggcc

SEQ ID NO: 355777 - DNA, 58 bp, Artificial
  Synthetic oligonucleotide
ccagattgtaagaccattttaagggcattaggaccagcggcctcattagaagaaatga

SEQ ID NO: 355778 - DNA, 55 bp, Artificial
  Synthetic oligonucleotide
ccagattgtaagatcattttaaaaggattaggaccaggggctacattagaagaaa

SEQ ID NO: 355779 - DNA, 53 bp, Artificial
  Synthetic oligonucleotide
ccagattgtttgcgtcttggtttcccacatcgacccgctcggggcaatttgtc

SEQ ID NO: 355780 - DNA, 55 bp, Artificial
  Synthetic oligonucleotide
ccagatttaaaggaactagtatcaaccgaggcacaaatccagaaaatgtcgcaag

SEQ ID NO: 355781 - DNA, 60 bp, Artificial
  Synthetic oligonucleotide
ccagatttggatgatcatgattacctcgaggatgatgaaatttaggcgcacatgacacac

SEQ ID NO: 355782 - DNA, 55 bp, Artificial
  Synthetic oligonucleotide
ccagatttgggtcctaccaacccataaggctgtacaaattgcagcctcggaagga

SEQ ID NO: 355783 - DNA, 59 bp, Artificial
  Synthetic oligonucleotide
ccagcaaaaaacattgctgccacgatgttccatgactgggactacagacggggttgcat

SEQ ID NO: 355784 - DNA, 57 bp, Artificial
  Synthetic oligonucleotide
ccagcaaaaatagggatggttgattcttcttctcgtatctgacgggttccaggagtc

SEQ ID NO: 355785 - DNA, 51 bp, Artificial
  Synthetic oligonucleotide
ccagcaaacagacaagcacaatacaaagcattcaaggccaaacaggggaaa

SEQ ID NO: 355786 - DNA, 55 bp, Artificial
  Synthetic oligonucleotide
ccagcaaagaaatacagatgtaccgcatcagatcgatggaggggactcaagccgt

SEQ ID NO: 355787 - DNA, 55 bp, Artificial
  Synthetic oligonucleotide
ccagcaaatttcgaccccaaagtatttgaaagatgggagtcgatcacgctaaacc

SEQ ID NO: 355788 - DNA, 55 bp, Artificial
  Synthetic oligonucleotide
ccagcaacaaagaattatgcaaaacactgtagaagccacggtgcgccacttgtgg

SEQ ID NO: 355789 - DNA, 55 bp, Artificial
  Synthetic oligonucleotide
ccagcaacaggagagatctattgtggtcttgtagactacttattagattgggcgg

SEQ ID NO: 355790 - DNA, 55 bp, Artificial
  Synthetic oligonucleotide
ccagcaacatggggatcagagaatggtcatacttgattgaagatccctctgcacc

SEQ ID NO: 355791 - DNA, 55 bp, Artificial
  Synthetic oligonucleotide
ccagcaaccgctcaaatggcccttcagttattcatcaaagattacaggtacacgt

SEQ ID NO: 355792 - DNA, 57 bp, Artificial
  Synthetic oligonucleotide
ccagcaactagcctgtcgtaacgcgcaagtctgtggcggaaccgactactttgggtg

SEQ ID NO: 355793 - DNA, 60 bp, Artificial
  Synthetic oligonucleotide
ccagcaagaggctggcaagtatgagaatcatagtgagaatgcgttgatgttgtatatggc

SEQ ID NO: 355794 - DNA, 57 bp, Artificial
  Synthetic oligonucleotide
ccagcaatccactaggattttttcccgagcaccagttggaccctgccttcaaagcaa

SEQ ID NO: 355795 - DNA, 60 bp, Artificial
  Synthetic oligonucleotide
ccagcaatctgagttctgtacaatacagaatgatgaatgcaattgggccattgatatagc

SEQ ID NO: 355796 - DNA, 58 bp, Artificial
  Synthetic oligonucleotide
ccagcaattagactccatacaagcaaatgcccaagtggatcgtattataactggtagg

SEQ ID NO: 355797 - DNA, 56 bp, Artificial
  Synthetic oligonucleotide
ccagcaattgctgatctcctgaaatcagtggatagcgaggctgttagggagtactg

SEQ ID NO: 355798 - DNA, 53 bp, Artificial
  Synthetic oligonucleotide
ccagcacaaaacaattcgggtcagaactatatcaagtgaagttgtctgtaggg

SEQ ID NO: 355799 - DNA, 55 bp, Artificial
  Synthetic oligonucleotide
ccagcacaattcgtgtgtacttcaaacctaagcacataagggtttgggtaccacg

SEQ ID NO: 355800 - DNA, 55 bp, Artificial
  Synthetic oligonucleotide
ccagcacacaagagtcaactgatatggatggcatgccattctgcggcatttgaag

SEQ ID NO: 355801 - DNA, 60 bp, Artificial
  Synthetic oligonucleotide
ccagcacacaagagtcagttggtgtggatggcatgccattctgcagcattcgaagacctg

SEQ ID NO: 355802 - DNA, 55 bp, Artificial
  Synthetic oligonucleotide
ccagcacatctatcccgctaccaaaactcgcgtacacaatcgtagagtgtgattc

SEQ ID NO: 355803 - DNA, 60 bp, Artificial
  Synthetic oligonucleotide
ccagcacatggctagtcgtaatgagcaattgcgggatgggaccaactactttgggtgtcc

SEQ ID NO: 355804 - DNA, 55 bp, Artificial
  Synthetic oligonucleotide
ccagcacattggtaaagtcatgtgtgttagtgatgttactcgtggtattgggctt

SEQ ID NO: 355805 - DNA, 57 bp, Artificial
  Synthetic oligonucleotide
ccagcaccagagaggactcaacaggtggtctttccctaacgaccaactggacctagc

SEQ ID NO: 355806 - DNA, 60 bp, Artificial
  Synthetic oligonucleotide
ccagcaccatgcaactttttcccctctgcctaatcatctcatgttcatgtcctactgttc

SEQ ID NO: 355807 - DNA, 55 bp, Artificial
  Synthetic oligonucleotide
ccagcacccagacttgatcctgctacagtacgtggatgacttactgctggccgcc

SEQ ID NO: 355808 - DNA, 54 bp, Artificial
  Synthetic oligonucleotide
ccagcacccagcaagtcgagacccgaacccgtggtcgtttgcctccgtggtaaa

SEQ ID NO: 355809 - DNA, 60 bp, Artificial
  Synthetic oligonucleotide
ccagcaccccccttgatgggaggcgtctctggcataatgtggtcgtggtaggccggcgca

SEQ ID NO: 355810 - DNA, 55 bp, Artificial
  Synthetic oligonucleotide
ccagcacccctatacctggcacacgtgctcctgcacgactaggcctatatggacg

SEQ ID NO: 355811 - DNA, 60 bp, Artificial
  Synthetic oligonucleotide
ccagcacccctgagagaatctaccactgagtcatcttgtatcatttcatccacaatgaaa

SEQ ID NO: 355812 - DNA, 58 bp, Artificial
  Synthetic oligonucleotide
ccagcacccgctgagcaagttttcgcacattcggttcaaccccaactctggtccgcaa

SEQ ID NO: 355813 - DNA, 60 bp, Artificial
  Synthetic oligonucleotide
ccagcaccggaccatggaatacctgcacagctcctgctcaaggaacctctatgtttccct

SEQ ID NO: 355814 - DNA, 60 bp, Artificial
  Synthetic oligonucleotide
ccagcacgaggcattttgaatcggtggacactctaattctctgcatatcggtggaacggt

SEQ ID NO: 355815 - DNA, 55 bp, Artificial
  Synthetic oligonucleotide
ccagcacgtcttcgaggttcttaaaaccatgtctgtccagtttagcaagacaacc

SEQ ID NO: 355816 - DNA, 60 bp, Artificial
  Synthetic oligonucleotide
ccagcactacggctaaggctatggagcagatggctggatcgagtgaacaggcagcggaag

SEQ ID NO: 355817 - DNA, 60 bp, Artificial
  Synthetic oligonucleotide
ccagcactgagagagttggtgtgagtaatgaccggttctttagggttcgagatcagagag

SEQ ID NO: 355818 - DNA, 55 bp, Artificial
  Synthetic oligonucleotide
ccagcactgcagttaaggccgcctgttggtgggcaggcatcaagcaggagtttgg

SEQ ID NO: 355819 - DNA, 60 bp, Artificial
  Synthetic oligonucleotide
ccagcagaaatctggtaattgtgacacttatggttctaacacgtggtcggccgctctggc

SEQ ID NO: 355820 - DNA, 60 bp, Artificial
  Synthetic oligonucleotide
ccagcagaacaggatctacatgcaccctgctgtgctgacagctggtaggatcagcgaaat

SEQ ID NO: 355821 - DNA, 55 bp, Artificial
  Synthetic oligonucleotide
ccagcagaacgcaggatgagggctgagggtattcctatgctcggctctggtgtag

SEQ ID NO: 355822 - DNA, 55 bp, Artificial
  Synthetic oligonucleotide
ccagcagaagctgaaacagagattgctgatagctcgtggaaagatacattgtcac

SEQ ID NO: 355823 - DNA, 55 bp, Artificial
  Synthetic oligonucleotide
ccagcagacaaaggggagtgcttcaatgaagttacttggactaacgtcacattcc

SEQ ID NO: 355824 - DNA, 55 bp, Artificial
  Synthetic oligonucleotide
ccagcagacttccatccagtgaaagccccatctcaggtggaattgctcaaagagg

SEQ ID NO: 355825 - DNA, 55 bp, Artificial
  Synthetic oligonucleotide
ccagcagagggcgtccgcagggcaaatcagtgtacagcccacgttctctgtacag

SEQ ID NO: 355826 - DNA, 55 bp, Artificial
  Synthetic oligonucleotide
ccagcagaggtagaggaagctactaaaggagagaacaacagtctattacacccca

SEQ ID NO: 355827 - DNA, 55 bp, Artificial
  Synthetic oligonucleotide
ccagcagatcctggctaatgctttcaatcaagctattggtaatattacacaggca

SEQ ID NO: 355828 - DNA, 55 bp, Artificial
  Synthetic oligonucleotide
ccagcagatgtggctgccgtattgaacaagtactatactggagatgtcagaacac

SEQ ID NO: 355829 - DNA, 55 bp, Artificial
  Synthetic oligonucleotide
ccagcagattcaagccggaaaattgcattggtttaatgtaaatacagagatgtgg

SEQ ID NO: 355830 - DNA, 59 bp, Artificial
  Synthetic oligonucleotide
ccagcagcagagggagtaggagcagtatcgcaagatctagacaaccatggagcagtaac

SEQ ID NO: 355831 - DNA, 55 bp, Artificial
  Synthetic oligonucleotide
ccagcagcagtgaagaacattatggccaggactgaccatccggaacccatacagc

SEQ ID NO: 355832 - DNA, 50 bp, Artificial
  Synthetic oligonucleotide
ccagcagccggcgtcctctcactagggataaccggccttctctgggcagt

SEQ ID NO: 355833 - DNA, 55 bp, Artificial
  Synthetic oligonucleotide
ccagcaggacataaccaggtaggatctctacaatacttagcactgacagcattgg

SEQ ID NO: 355834 - DNA, 55 bp, Artificial
  Synthetic oligonucleotide
ccagcagtaaagaattggatgactcaaacactgctgattcaaaatgctaacccag

SEQ ID NO: 355835 - DNA, 55 bp, Artificial
  Synthetic oligonucleotide
ccagcagttggaagagctggagcagtttcacttccagtgattgcaagacacactc

SEQ ID NO: 355836 - DNA, 59 bp, Artificial
  Synthetic oligonucleotide
ccagcagttgtcatacaggacatctaccgccgagtgatcggcgaagtacctaagggttg

SEQ ID NO: 355837 - DNA, 60 bp, Artificial
  Synthetic oligonucleotide
ccagcatacacccgggcattatgatgctcagcaagagacacatactaataccctctctaa

SEQ ID NO: 355838 - DNA, 60 bp, Artificial
  Synthetic oligonucleotide
ccagcatacacctatatcatacgtctgcctttcagagactggcggggactagagaatggg

SEQ ID NO: 355839 - DNA, 58 bp, Artificial
  Synthetic oligonucleotide
ccagcatactggaggattggaatttcggggtgcagccccctccggctggtaccctgca

SEQ ID NO: 355840 - DNA, 55 bp, Artificial
  Synthetic oligonucleotide
ccagcatagagactatctctgagtgtgtcaacgacaaagtcagtgcccacttatt

SEQ ID NO: 355841 - DNA, 55 bp, Artificial
  Synthetic oligonucleotide
ccagcatcagaacgaacaggggactggcattgctgcggataaagtttccacacag

SEQ ID NO: 355842 - DNA, 60 bp, Artificial
  Synthetic oligonucleotide
ccagcatccggagataggctcatcatttccaatcccaccgatcaacccataggtcttttc

SEQ ID NO: 355843 - DNA, 60 bp, Artificial
  Synthetic oligonucleotide
ccagcatcgaagtcgttgtataaaacgacatcgcttgtgttgtcatacgtcagcaaatgt

SEQ ID NO: 355844 - DNA, 60 bp, Artificial
  Synthetic oligonucleotide
ccagcatgagaatgggaaacactgatgctcaaatcttgatggttccagggcgcagattca

SEQ ID NO: 355845 - DNA, 59 bp, Artificial
  Synthetic oligonucleotide
ccagcatgagtcttagaccatttactggcacttctagaactataacccaagattcaacc

SEQ ID NO: 355846 - DNA, 55 bp, Artificial
  Synthetic oligonucleotide
ccagcatgatcgattaggtgagtttagttttgtaggtaaagttcaatggaaagtg

SEQ ID NO: 355847 - DNA, 60 bp, Artificial
  Synthetic oligonucleotide
ccagcatgcggaagctctccaggaacaactggaatggcgaatcagaggagtacaacagac

SEQ ID NO: 355848 - DNA, 60 bp, Artificial
  Synthetic oligonucleotide
ccagcatggtggaggccatggtgtctagggcccgaattgacgcacgaattgacttcgagt

SEQ ID NO: 355849 - DNA, 55 bp, Artificial
  Synthetic oligonucleotide
ccagcatgtgcgtagtcgtaatgagcaattgtgggacggaaccgactactttggg

SEQ ID NO: 355850 - DNA, 59 bp, Artificial
  Synthetic oligonucleotide
ccagcatgttattcatacgtttttgaaacttatgctggtttgtgcacatcccccttgat

SEQ ID NO: 355851 - DNA, 60 bp, Artificial
  Synthetic oligonucleotide
ccagcattaagcatcaatgaactgagcaatcttacaaaaggggagaaggctaatgtgcta

SEQ ID NO: 355852 - DNA, 55 bp, Artificial
  Synthetic oligonucleotide
ccagcattatggcaagcctcacagactttgcatcatcaagaggtaacccataggc

SEQ ID NO: 355853 - DNA, 55 bp, Artificial
  Synthetic oligonucleotide
ccagcattcctagcgttcaagcctatagaatccccgcattggataggcgaagatg

SEQ ID NO: 355854 - DNA, 58 bp, Artificial
  Synthetic oligonucleotide
ccagcatttggaatgcaaaggatgcattatagaaatggtgacccacagactccattcc

SEQ ID NO: 355855 - DNA, 56 bp, Artificial
  Synthetic oligonucleotide
ccagccaaattttggcccaagagcatttcctactttccagtacatgcaggggttaa

SEQ ID NO: 355856 - DNA, 60 bp, Artificial
  Synthetic oligonucleotide
ccagccaagagcatggaatatgatgctgttgctactacgcactcctgggttcccaaaagg

SEQ ID NO: 355857 - DNA, 50 bp, Artificial
  Synthetic oligonucleotide
ccagccacacaagaatggctttcccgcatgtgggacagggtagacatgct

SEQ ID NO: 355858 - DNA, 55 bp, Artificial
  Synthetic oligonucleotide
ccagccactacatgcctgtgtgtctcagttctaggaggtgtcacttagtaggcga

SEQ ID NO: 355859 - DNA, 57 bp, Artificial
  Synthetic oligonucleotide
ccagccactggtatgtcgtaacgcgtaagtctgggatgggaccgactactttggaga

SEQ ID NO: 355860 - DNA, 51 bp, Artificial
  Synthetic oligonucleotide
ccagccagcgaggtaccgcggcagaaacaccaaaagcccccgcctgacccg

SEQ ID NO: 355861 - DNA, 55 bp, Artificial
  Synthetic oligonucleotide
ccagccatagtgacctcatgttgcgtaatgttgggtgtagatatcctaaccagtg

SEQ ID NO: 355862 - DNA, 55 bp, Artificial
  Synthetic oligonucleotide
ccagccatatttgtcccagactttgtcctcatattctcttgaagcttctttggtc

SEQ ID NO: 355863 - DNA, 55 bp, Artificial
  Synthetic oligonucleotide
ccagccatggacgcctgaatgaggagtggcgcgagatgttcacttgaatggctac

SEQ ID NO: 355864 - DNA, 58 bp, Artificial
  Synthetic oligonucleotide
ccagccattatgctggctcgtatacgataagtccccgactgggattacggacctgacc

SEQ ID NO: 355865 - DNA, 59 bp, Artificial
  Synthetic oligonucleotide
ccagcccaatcgaccgactcaaacttcatttcggtcaacactggcgagcatatcttttg

SEQ ID NO: 355866 - DNA, 55 bp, Artificial
  Synthetic oligonucleotide
ccagcccaccacggaaaagaggaaccacatgtccatcgttcgagccaaagaggcg

SEQ ID NO: 355867 - DNA, 55 bp, Artificial
  Synthetic oligonucleotide
ccagcccacccgtactcgacaactacactcagtgcacagaaggctctccagagtt

SEQ ID NO: 355868 - DNA, 55 bp, Artificial
  Synthetic oligonucleotide
ccagcccacttaagaatttttggtcgttatattatgttaatacacccagaccagc

SEQ ID NO: 355869 - DNA, 60 bp, Artificial
  Synthetic oligonucleotide
ccagcccatggtccagccaagagcatggaatatgacgctgttgcaactacacactcctgg

SEQ ID NO: 355870 - DNA, 55 bp, Artificial
  Synthetic oligonucleotide
ccagccccagtgatacaacctgcaattcaaaccacaacaccaatgttcaacccca

SEQ ID NO: 355871 - DNA, 50 bp, Artificial
  Synthetic oligonucleotide
ccagccccggtcgtctgatgatgaatgttcggacccctagggttgcgaga

SEQ ID NO: 355872 - DNA, 55 bp, Artificial
  Synthetic oligonucleotide
ccagcccctctgggaactccagatttcgtgggaaagatccaaggcatgctcaccc

SEQ ID NO: 355873 - DNA, 55 bp, Artificial
  Synthetic oligonucleotide
ccagcccgacacccgtaaagggtctgtgctgaggaggattagtataagaggaagg

SEQ ID NO: 355874 - DNA, 60 bp, Artificial
  Synthetic oligonucleotide
ccagcccgctccgttgttgctcaagtcgcttcgcccgtcagacctatggctactcaggtc

SEQ ID NO: 355875 - DNA, 55 bp, Artificial
  Synthetic oligonucleotide
ccagcccggcatagcttctgagcttgtgatcccaagcgagcgcctgcactaccgt

SEQ ID NO: 355876 - DNA, 55 bp, Artificial
  Synthetic oligonucleotide
ccagcccttgtcacctaggactttgaatgcatgggttaaggtagtagaggaaaag

SEQ ID NO: 355877 - DNA, 57 bp, Artificial
  Synthetic oligonucleotide
ccagccgagtccatatgatcacgttcagcgcgtaatccgttactgtgacattgattc

SEQ ID NO: 355878 - DNA, 59 bp, Artificial
  Synthetic oligonucleotide
ccagccgatattatcatttcaactcccgcatcgaaggtacgtcgacgtctgaacttcga

SEQ ID NO: 355879 - DNA, 55 bp, Artificial
  Synthetic oligonucleotide
ccagccgatgtaacatttactattgagaatgtcgatgacgtaggcattatgcaac

SEQ ID NO: 355880 - DNA, 55 bp, Artificial
  Synthetic oligonucleotide
ccagccgcatctccccagttttagcaaatacagttacacggggtgttgaatcggt

SEQ ID NO: 355881 - DNA, 60 bp, Artificial
  Synthetic oligonucleotide
ccagccgcctactcttctgctagccaagccctctggccacacaaagggaagatagccaac

SEQ ID NO: 355882 - DNA, 60 bp, Artificial
  Synthetic oligonucleotide
ccagccgctagctccaatgctcccctcatgggcactggtgcagtggccgcgccacataat

SEQ ID NO: 355883 - DNA, 51 bp, Artificial
  Synthetic oligonucleotide
ccagccggggtatctcgacgtcattgacgagtacttggccggacccatacc

SEQ ID NO: 355884 - DNA, 58 bp, Artificial
  Synthetic oligonucleotide
ccagccgtaatgtgctagctatggattactctggatttgatgcctctcacacatctgg

SEQ ID NO: 355885 - DNA, 55 bp, Artificial
  Synthetic oligonucleotide
ccagccgtgaaacatgttcttacctggaagacgactgacgcaattcagaaaccaa

SEQ ID NO: 355886 - DNA, 60 bp, Artificial
  Synthetic oligonucleotide
ccagccgttgccggatgcagacctgacctggtacacagatggtagcagcttcatccgtaa

SEQ ID NO: 355887 - DNA, 59 bp, Artificial
  Synthetic oligonucleotide
ccagccgttgtcttgtctttggcttgaggaccgcacgaaatttgtaatcactcagatac

SEQ ID NO: 355888 - DNA, 59 bp, Artificial
  Synthetic oligonucleotide
ccagcctcgcacagtagattctttcgaatgggtcgttcgtatccaaagcaccgtcgaga

SEQ ID NO: 355889 - DNA, 60 bp, Artificial
  Synthetic oligonucleotide
ccagcctgacttccagaacatgacatggcaacaatgggagacagacatagcagctctatt

SEQ ID NO: 355890 - DNA, 55 bp, Artificial
  Synthetic oligonucleotide
ccagcctgcctctctaggtagtggtgatcctcggtgtcccaaatcgctcactgca

SEQ ID NO: 355891 - DNA, 56 bp, Artificial
  Synthetic oligonucleotide
ccagcctgcggttgcgtgtacaagaacaagtgcatggaacaattgtgtaacgccgt

SEQ ID NO: 355892 - DNA, 54 bp, Artificial
  Synthetic oligonucleotide
ccagccttccaccgtggccattccttgccgcgaaccaactcaaccgaggagcta

SEQ ID NO: 355893 - DNA, 55 bp, Artificial
  Synthetic oligonucleotide
ccagccttgcagagactatccacaccaaaggcgcgttaacctactggaacgctgc

SEQ ID NO: 355894 - DNA, 55 bp, Artificial
  Synthetic oligonucleotide
ccagcgaaaatcttgcggacctttggcacattggtacagtggctactggagtacc

SEQ ID NO: 355895 - DNA, 55 bp, Artificial
  Synthetic oligonucleotide
ccagcgaaacccagttatttaataggccattttggatgcaacgagcccagggcct

SEQ ID NO: 355896 - DNA, 50 bp, Artificial
  Synthetic oligonucleotide
ccagcgaagacaccagggcgcgctacgggaccctgacggcgtacaacctc

SEQ ID NO: 355897 - DNA, 55 bp, Artificial
  Synthetic oligonucleotide
ccagcgaatacgaacagagccctagtgcgcgcaggcactgctcttgcctcaggag

SEQ ID NO: 355898 - DNA, 56 bp, Artificial
  Synthetic oligonucleotide
ccagcgaatatgcaaatgtggaaggatcaagttgcacaaaatttaattacccatcg

SEQ ID NO: 355899 - DNA, 60 bp, Artificial
  Synthetic oligonucleotide
ccagcgacatggtgtgaaaactctgtgcccgaaagccaccataggacagcaatacccagt

SEQ ID NO: 355900 - DNA, 59 bp, Artificial
  Synthetic oligonucleotide
ccagcgagaaacgatgggatcgttgtacctagattactcgatataacattacgcgctta

SEQ ID NO: 355901 - DNA, 60 bp, Artificial
  Synthetic oligonucleotide
ccagcgatatcaccagctacagtagagactttattaactcaggatacctttaatgatagt

SEQ ID NO: 355902 - DNA, 60 bp, Artificial
  Synthetic oligonucleotide
ccagcgatgaatagtgatctggtaactattcgcagatcgtttgagatctgggctgatgga

SEQ ID NO: 355903 - DNA, 60 bp, Artificial
  Synthetic oligonucleotide
ccagcgatgcgtaagcacgccttggtcatactttaacttcaatcaatacagcagtcactt

SEQ ID NO: 355904 - DNA, 53 bp, Artificial
  Synthetic oligonucleotide
ccagcgcagaaggggacctcgtgggatggcctagcccccccgggactaagtct

SEQ ID NO: 355905 - DNA, 56 bp, Artificial
  Synthetic oligonucleotide
ccagcgcatggtgattcagaaggccatccagatcgctagcgagcccggtcatgtcg

SEQ ID NO: 355906 - DNA, 56 bp, Artificial
  Synthetic oligonucleotide
ccagcgcctttccctactaaccttcccgatactaacaacctcggagctcagctaca

SEQ ID NO: 355907 - DNA, 57 bp, Artificial
  Synthetic oligonucleotide
ccagcgcggggaaagatcccaagaaaactggagggcccatatacaagagagtagatg

SEQ ID NO: 355908 - DNA, 57 bp, Artificial
  Synthetic oligonucleotide
ccagcgcgggtcttcttattactcccctgccatactttatcccttgaccattgcaaa

SEQ ID NO: 355909 - DNA, 55 bp, Artificial
  Synthetic oligonucleotide
ccagcgctcccacattggacagaaggacaagtcatggcagccgccgtcatagatt

SEQ ID NO: 355910 - DNA, 53 bp, Artificial
  Synthetic oligonucleotide
ccagcggaaagtgaagggtggcttaacagagacgtccttgggttcaaacctaa

SEQ ID NO: 355911 - DNA, 55 bp, Artificial
  Synthetic oligonucleotide
ccagcggaagctggggatttctttggagtgagccatagttcgcgttgtgtagaag

SEQ ID NO: 355912 - DNA, 50 bp, Artificial
  Synthetic oligonucleotide
ccagcggacacgtttagcaatgatgttactttcgaagattggtgggcaaa

SEQ ID NO: 355913 - DNA, 60 bp, Artificial
  Synthetic oligonucleotide
ccagcggggcagctcagagaaccaagaggatctgacatagcagggacaacaagcacagta

SEQ ID NO: 355914 - DNA, 55 bp, Artificial
  Synthetic oligonucleotide
ccagcgggttatacataatgaattggaacagtattgccgggcccgggctggtcgt

SEQ ID NO: 355915 - DNA, 60 bp, Artificial
  Synthetic oligonucleotide
ccagcggtgcaggtcgctttgaatgatccacagataatgaatctagttgaggagttgccc

SEQ ID NO: 355916 - DNA, 60 bp, Artificial
  Synthetic oligonucleotide
ccagcgtagctctggttgacatggatgagtccagattctacataactatgactcaagctg

SEQ ID NO: 355917 - DNA, 55 bp, Artificial
  Synthetic oligonucleotide
ccagcgtaggaggtcgcatcaatttgggttacatgaacgttggggatcgatcctc

SEQ ID NO: 355918 - DNA, 55 bp, Artificial
  Synthetic oligonucleotide
ccagcgtcgcgtaacgaccgtccccggttgaaacgccactactcagacctctggc

SEQ ID NO: 355919 - DNA, 60 bp, Artificial
  Synthetic oligonucleotide
ccagcgtgctaatgcacaatttggaaacgtaatgggattgagatattacacagccagtaa

SEQ ID NO: 355920 - DNA, 51 bp, Artificial
  Synthetic oligonucleotide
ccagcgtggtattctgcgacaggccacaggtacagacctgtataacatcca

SEQ ID NO: 355921 - DNA, 55 bp, Artificial
  Synthetic oligonucleotide
ccagcgtttatgtttcgtaaggaactgggaactctggctttcaagcaaggggagc

SEQ ID NO: 355922 - DNA, 50 bp, Artificial
  Synthetic oligonucleotide
ccagctaagcgaaagatcaaagtgggagcagatatacaaggactttaagc

SEQ ID NO: 355923 - DNA, 55 bp, Artificial
  Synthetic oligonucleotide
ccagctacagtagagactttattaactcaggatacctttaatgatagtgccctcc

SEQ ID NO: 355924 - DNA, 55 bp, Artificial
  Synthetic oligonucleotide
ccagctaccataatggtacagagaggcaattttaggaaccaaagaaaggctgtta

SEQ ID NO: 355925 - DNA, 55 bp, Artificial
  Synthetic oligonucleotide
ccagctaccgtaatgatgcagagaggcaattttaggaaccaaaagaagactgtta

SEQ ID NO: 355926 - DNA, 55 bp, Artificial
  Synthetic oligonucleotide
ccagctagatattcgatgggtgacagtggatcattacttaccaaatatgtaatga

SEQ ID NO: 355927 - DNA, 55 bp, Artificial
  Synthetic oligonucleotide
ccagctagctctgcaagattcagggtcagaggtaaacatagtaacagactcacag

SEQ ID NO: 355928 - DNA, 55 bp, Artificial
  Synthetic oligonucleotide
ccagctagctttgcaagattcaggatcaaaagtaaacatagcaactgactcacaa

SEQ ID NO: 355929 - DNA, 56 bp, Artificial
  Synthetic oligonucleotide
ccagctatagcttggtttgaagctaaccgacctaccctacctgctttgaccattac

SEQ ID NO: 355930 - DNA, 55 bp, Artificial
  Synthetic oligonucleotide
ccagctataggttgagaaagtgtaacacctcaatcattacacaagcttgtccaaa

SEQ ID NO: 355931 - DNA, 60 bp, Artificial
  Synthetic oligonucleotide
ccagctatatcgaatagaggattgttcggagcaattgcagggttcatagaaggaggctgg

SEQ ID NO: 355932 - DNA, 60 bp, Artificial
  Synthetic oligonucleotide
ccagctatcaaagcagaacacacaggacgtgaaattgtggacttaatgtgccatgccacg

SEQ ID NO: 355933 - DNA, 51 bp, Artificial
  Synthetic oligonucleotide
ccagctatgtatggtgggctgtgctccaccgttaggtgaacattggggtaa

SEQ ID NO: 355934 - DNA, 55 bp, Artificial
  Synthetic oligonucleotide
ccagctattgaaaagttttccaactatgcatcttacgtttcaaggacagatgcag

SEQ ID NO: 355935 - DNA, 58 bp, Artificial
  Synthetic oligonucleotide
ccagctcaacccgattgacgggccattacccgaagacaacgacccaagtggatatgca

SEQ ID NO: 355936 - DNA, 60 bp, Artificial
  Synthetic oligonucleotide
ccagctcaacgggatcaaatggggggccctcaatgtcaatccatgttgtgtcgtgaatgg

SEQ ID NO: 355937 - DNA, 55 bp, Artificial
  Synthetic oligonucleotide
ccagctcacaagagtcaactagtgtggatggcatgccactcagcggcatttgaag

SEQ ID NO: 355938 - DNA, 55 bp, Artificial
  Synthetic oligonucleotide
ccagctcacgatccaacaggcgaaccggtgcctgatcaggggcaacgaacggtgt

SEQ ID NO: 355939 - DNA, 56 bp, Artificial
  Synthetic oligonucleotide
ccagctcagtgatagcagaaatcagtttctattgccagttcagggggcaagtgtaa

SEQ ID NO: 355940 - DNA, 60 bp, Artificial
  Synthetic oligonucleotide
ccagctcatggcccggccaagagcatggaatatgatgctgttgcgactacacactcatgg

SEQ ID NO: 355941 - DNA, 55 bp, Artificial
  Synthetic oligonucleotide
ccagctccagggcccagaggatttagcagctgaggtcgtcccagtacttatgggg

SEQ ID NO: 355942 - DNA, 60 bp, Artificial
  Synthetic oligonucleotide
ccagctcctgtaagagcattaaccattcatccactgaggaggtatgaatcatcaatctat

SEQ ID NO: 355943 - DNA, 57 bp, Artificial
  Synthetic oligonucleotide
ccagctcgacaggaatggaaatttcatatggggtgagagggggtaccatgcaaaacg

SEQ ID NO: 355944 - DNA, 52 bp, Artificial
  Synthetic oligonucleotide
ccagctcgcaggagaggacgcaaacgtgggattcagcggagatcccgtctgg

SEQ ID NO: 355945 - DNA, 55 bp, Artificial
  Synthetic oligonucleotide
ccagctcggtgtaggtgcggtgctacgcgataggttgcgtttatggaagattgac

SEQ ID NO: 355946 - DNA, 55 bp, Artificial
  Synthetic oligonucleotide
ccagctcgtcagaaatagaacgcgtaaacctgcagctaaagccatccgttacaac

SEQ ID NO: 355947 - DNA, 55 bp, Artificial
  Synthetic oligonucleotide
ccagctctaaattctcccaacattgaagcgtgtggttacagtgacagagttgaac

SEQ ID NO: 355948 - DNA, 55 bp, Artificial
  Synthetic oligonucleotide
ccagctctaccgtaatgagtgcaaaattctcggattggtggtacaagcaactcga

SEQ ID NO: 355949 - DNA, 60 bp, Artificial
  Synthetic oligonucleotide
ccagctctagtagtcgactctacgtgcctgataatgaacctgcaaatcaagacctatggt

SEQ ID NO: 355950 - DNA, 55 bp, Artificial
  Synthetic oligonucleotide
ccagctctcagaacaggttctgatggcctgcagtctctttggaacaccctagtag

SEQ ID NO: 355951 - DNA, 60 bp, Artificial
  Synthetic oligonucleotide
ccagctctcttcaccaccgacctctcccaattcagactcttaggactgatacaacgatta

SEQ ID NO: 355952 - DNA, 55 bp, Artificial
  Synthetic oligonucleotide
ccagctcttaaaacaggatcagaaggattacggtccttatttaatactttggctg

SEQ ID NO: 355953 - DNA, 55 bp, Artificial
  Synthetic oligonucleotide
ccagctcttaaaagaatgtcagacaacctctcaattgatacaactttccaaccag

SEQ ID NO: 355954 - DNA, 55 bp, Artificial
  Synthetic oligonucleotide
ccagctcttatcatatggcgatgttacacgtttcctttctaacaacgctatggta

SEQ ID NO: 355955 - DNA, 58 bp, Artificial
  Synthetic oligonucleotide
ccagctcttcagacaggatcaaaagaacttatatcattacataatacagttgcaactc

SEQ ID NO: 355956 - DNA, 56 bp, Artificial
  Synthetic oligonucleotide
ccagctgaagctatctttcaggtccaggagactggcacctacttgggctgcaagga

SEQ ID NO: 355957 - DNA, 59 bp, Artificial
  Synthetic oligonucleotide
ccagctgagaataccattgaacgagacttaaatgtggcaaactcagtaataaccataat

SEQ ID NO: 355958 - DNA, 55 bp, Artificial
  Synthetic oligonucleotide
ccagctgaggcggaagggaagaatctgtctgattcggagactgtctatgtctacg

SEQ ID NO: 355959 - DNA, 55 bp, Artificial
  Synthetic oligonucleotide
ccagctgataagtcagcaacatttgagacagtcacatgggagaatgtaaccttct

SEQ ID NO: 355960 - DNA, 52 bp, Artificial
  Synthetic oligonucleotide
ccagctgatctggtccagacgcggcatgtgatacaaacacgtagccgaagtg

SEQ ID NO: 355961 - DNA, 60 bp, Artificial
  Synthetic oligonucleotide
ccagctgatgtgacccacctctttgaccgttgccacaatcttaaaacactgatggcaact

SEQ ID NO: 355962 - DNA, 55 bp, Artificial
  Synthetic oligonucleotide
ccagctgcaaggggcttgctatttgacacctccgctggggagtcctgtgcgaacg

SEQ ID NO: 355963 - DNA, 55 bp, Artificial
  Synthetic oligonucleotide
ccagctgccggcgcctcaccgattttgaccagggctggggccccatcagttatgc

SEQ ID NO: 355964 - DNA, 58 bp, Artificial
  Synthetic oligonucleotide
ccagctgctttgaaagctcgtcttagtgtgtacaaagctatggccaaacctgtttact

SEQ ID NO: 355965 - DNA, 55 bp, Artificial
  Synthetic oligonucleotide
ccagctggttatgcgattctaaagtgtaatactaagacattcgatggaacaggac

SEQ ID NO: 355966 - DNA, 55 bp, Artificial
  Synthetic oligonucleotide
ccagctggttgatcaactataccggagaccagagtaccgacaagtcatatctgcc

SEQ ID NO: 355967 - DNA, 60 bp, Artificial
  Synthetic oligonucleotide
ccagctgtgagtagcaccagttagctgggttgtcgatatcctgaattgcaggaagatctt

SEQ ID NO: 355968 - DNA, 55 bp, Artificial
  Synthetic oligonucleotide
ccagctgtgcctgaatcggttccggttaatgtaggagttttactcgcgatggtcg

SEQ ID NO: 355969 - DNA, 60 bp, Artificial
  Synthetic oligonucleotide
ccagctgttaagccatcattcgactatctgacaactaaatcatctacatctaaagatctc

SEQ ID NO: 355970 - DNA, 55 bp, Artificial
  Synthetic oligonucleotide
ccagctgtttggcacgtcagcaactgacaccgcagctaatgtcactgctttccgg

SEQ ID NO: 355971 - DNA, 59 bp, Artificial
  Synthetic oligonucleotide
ccagcttacggctaaaatggtcagtcatgcttcaaaggcatgccgacaccttacaaggt

SEQ ID NO: 355972 - DNA, 58 bp, Artificial
  Synthetic oligonucleotide
ccagcttatggtctgacgtatcgctttcgtttccccgtggcactacgcagacgtcgga

SEQ ID NO: 355973 - DNA, 54 bp, Artificial
  Synthetic oligonucleotide
ccagcttcaaaccctactcgggcacggcttacaacagtctggcccccaagggtg

SEQ ID NO: 355974 - DNA, 55 bp, Artificial
  Synthetic oligonucleotide
ccagcttcaaacctgttataccgcactaatgtgtctcatgattcacgaagattgg

SEQ ID NO: 355975 - DNA, 60 bp, Artificial
  Synthetic oligonucleotide
ccagcttcgactagccagatccagtttggggaccgctcaccagttacaatgactcaacac

SEQ ID NO: 355976 - DNA, 54 bp, Artificial
  Synthetic oligonucleotide
ccagcttcgcttaggaaggaaactttccagtcaatcatagaggggataaaccgg

SEQ ID NO: 355977 - DNA, 55 bp, Artificial
  Synthetic oligonucleotide
ccagcttgaatgattctgttgcaatgaggcaaactttcggcaacctatacaagac

SEQ ID NO: 355978 - DNA, 56 bp, Artificial
  Synthetic oligonucleotide
ccagcttgacaagaacggaaatttcatatggggtgagagaggttatcacgcaaagc

SEQ ID NO: 355979 - DNA, 55 bp, Artificial
  Synthetic oligonucleotide
ccagcttgacatcgcccctgaaggagccgtctattcattagatcggccgctgtcc

SEQ ID NO: 355980 - DNA, 60 bp, Artificial
  Synthetic oligonucleotide
ccagcttgagaaccagctcacagccatgttgcgggaccgcaacgccggagctgagttctt

SEQ ID NO: 355981 - DNA, 55 bp, Artificial
  Synthetic oligonucleotide
ccagcttgagcgccatgctgcgctggtccagcccgatgtacagccggaagttcct

SEQ ID NO: 355982 - DNA, 55 bp, Artificial
  Synthetic oligonucleotide
ccagcttgatgatccggttgtccttgattcacaaggtaactacgtgacacagcca

SEQ ID NO: 355983 - DNA, 55 bp, Artificial
  Synthetic oligonucleotide
ccagcttggttcagctcaggaagaaattggaactcttcacatatgtcagatttga

SEQ ID NO: 355984 - DNA, 55 bp, Artificial
  Synthetic oligonucleotide
ccagcttgtagtccgttacaagggcagatagttacaaaagggactggtagggaga

SEQ ID NO: 355985 - DNA, 55 bp, Artificial
  Synthetic oligonucleotide
ccagcttgtcaaacagtaatagacgtggttttcagattgaagctatgaagcatgt

SEQ ID NO: 355986 - DNA, 60 bp, Artificial
  Synthetic oligonucleotide
ccagctttagtcttgtctactgaattattgtgtcggttgcattattggatgcctgcgtgc

SEQ ID NO: 355987 - DNA, 60 bp, Artificial
  Synthetic oligonucleotide
ccagctttgaagttatcagtgtcctgaatgtctcctacatcatgcctactaatgcctccc

SEQ ID NO: 355988 - DNA, 58 bp, Artificial
  Synthetic oligonucleotide
ccagctttggagtgtctgggatcaatgaatcggcagacatgagcattggagtaacagt

SEQ ID NO: 355989 - DNA, 55 bp, Artificial
  Synthetic oligonucleotide
ccagcttttaatagtaggatgtgtccctcctactggtgcacactgggatgctgct

SEQ ID NO: 355990 - DNA, 55 bp, Artificial
  Synthetic oligonucleotide
ccagcttttcgattagatcgaatgcagttaagacaaatgcagacgctggcgtgtc

SEQ ID NO: 355991 - DNA, 57 bp, Artificial
  Synthetic oligonucleotide
ccaggaaaaccacaattggactgtttcaacactgactgtaggcttctccacaaaaga

SEQ ID NO: 355992 - DNA, 55 bp, Artificial
  Synthetic oligonucleotide
ccaggaaaatggtcacaagtttattttgaacgagaatggcagtagggctcgaagc

SEQ ID NO: 355993 - DNA, 60 bp, Artificial
  Synthetic oligonucleotide
ccaggaaacaaaactattaggaatttacagataggagcaggcatgacattctattcgcaa

SEQ ID NO: 355994 - DNA, 58 bp, Artificial
  Synthetic oligonucleotide
ccaggaaacaaatgagcgactgcctctccacccgaacttcaatgatcggtgggcggtc

SEQ ID NO: 355995 - DNA, 55 bp, Artificial
  Synthetic oligonucleotide
ccaggaaaccgcgtctcccctttatgtccgctcgccctcccagagcgaaagtgag

SEQ ID NO: 355996 - DNA, 54 bp, Artificial
  Synthetic oligonucleotide
ccaggaaagcttattgtacggtaaactaccaggaatggagtcatgccataggag

SEQ ID NO: 355997 - DNA, 57 bp, Artificial
  Synthetic oligonucleotide
ccaggaaataagacagttttaccagtcaccattatgtctggattggttttccactca

SEQ ID NO: 355998 - DNA, 51 bp, Artificial
  Synthetic oligonucleotide
ccaggaaatactccataaagcacttgacttcgacatgtacggagtcacata

SEQ ID NO: 355999 - DNA, 58 bp, Artificial
  Synthetic oligonucleotide
ccaggaaatggttagtggggctgcgtctatcaatcctgtgtccaagccgcttaaggga

SEQ ID NO: 356000 - DNA, 54 bp, Artificial
  Synthetic oligonucleotide
ccaggaaattccccccggcgctacccatatgggcacgcgcggactacaacccac

SEQ ID NO: 356001 - DNA, 55 bp, Artificial
  Synthetic oligonucleotide
ccaggaacagtacacaggacaagctagaagctctgtttcagggacctccacagtt

SEQ ID NO: 356002 - DNA, 60 bp, Artificial
  Synthetic oligonucleotide
ccaggaacatagtgagaagggccgctgtatcagcagatccactagcatctttattggaga

SEQ ID NO: 356003 - DNA, 55 bp, Artificial
  Synthetic oligonucleotide
ccaggaaccatcggttataaacttggatgttgaccatcatgatacgtacactggc

SEQ ID NO: 356004 - DNA, 56 bp, Artificial
  Synthetic oligonucleotide
ccaggaaccgaaacaggccggctttcaaatgctatgactactttgacacttcaggg

SEQ ID NO: 356005 - DNA, 55 bp, Artificial
  Synthetic oligonucleotide
ccaggaacggcagtatcctgaactgttcggtaatgaaactgtgcagccattgtag

SEQ ID NO: 356006 - DNA, 51 bp, Artificial
  Synthetic oligonucleotide
ccaggaacgtagtaccagtaagtatagcgtccagagagattaaacatacac

SEQ ID NO: 356007 - DNA, 52 bp, Artificial
  Synthetic oligonucleotide
ccaggaactccgatgccaaagtcccgaggtattcccattaaaaagggcacag

SEQ ID NO: 356008 - DNA, 50 bp, Artificial
  Synthetic oligonucleotide
ccaggaagaacgctattaggagacggcctgggcagggatccgacacggta

SEQ ID NO: 356009 - DNA, 55 bp, Artificial
  Synthetic oligonucleotide
ccaggaagaattatccgtcaagcaaccttctaactaacagcaccgctttcgtgcc

SEQ ID NO: 356010 - DNA, 60 bp, Artificial
  Synthetic oligonucleotide
ccaggaagaattattggcaattgtggggcatgatgctccttgggatgttaatgatctgta

SEQ ID NO: 356011 - DNA, 60 bp, Artificial
  Synthetic oligonucleotide
ccaggaagcacattttatgcaacaggagccataataggagatataagacaagcacattgt

SEQ ID NO: 356012 - DNA, 60 bp, Artificial
  Synthetic oligonucleotide
ccaggaagcacttgtgcatcagcagtgctttcttcaacccgtggttgaacattatgcgta

SEQ ID NO: 356013 - DNA, 55 bp, Artificial
  Synthetic oligonucleotide
ccaggaagcatttgtgaatctccaacttcctcttgacacagttgttgaacattat

SEQ ID NO: 356014 - DNA, 55 bp, Artificial
  Synthetic oligonucleotide
ccaggaagggcattttatgcaacaggagatataataggagacattagaaaggcac

SEQ ID NO: 356015 - DNA, 55 bp, Artificial
  Synthetic oligonucleotide
ccaggaataagagcttacttcatgcagaatggatcccagaatgctcttaaagtgg

SEQ ID NO: 356016 - DNA, 58 bp, Artificial
  Synthetic oligonucleotide
ccaggaatacagaacgaaatatacagagacatattgaaagacaatgtaaagaacctac

SEQ ID NO: 356017 - DNA, 55 bp, Artificial
  Synthetic oligonucleotide
ccaggaatgtagtaccagtgagcataacgtcaagggaaataaggcacacacgcgc

SEQ ID NO: 356018 - DNA, 55 bp, Artificial
  Synthetic oligonucleotide
ccaggacaaacattctatgcaacaggtgacataataggggatataagaagtgcac

SEQ ID NO: 356019 - DNA, 58 bp, Artificial
  Synthetic oligonucleotide
ccaggacaaattatacttgatcttaagattgaccctggtgaaaggatggatccggcag

SEQ ID NO: 356020 - DNA, 55 bp, Artificial
  Synthetic oligonucleotide
ccaggacaagcattctatgcaacaggaagcataatagggaatataagacaagcac

SEQ ID NO: 356021 - DNA, 55 bp, Artificial
  Synthetic oligonucleotide
ccaggacaagtattctatagaacaggagacataataggggatataagaaaagcat

SEQ ID NO: 356022 - DNA, 60 bp, Artificial
  Synthetic oligonucleotide
ccaggacactggcctcgatgtcacaccccgcaaggggtgtgacatcgaggctccaatttg

SEQ ID NO: 356023 - DNA, 55 bp, Artificial
  Synthetic oligonucleotide
ccaggacagactcgctgtagtgcttgacaacatctaccaagggtcaaccaggtac

SEQ ID NO: 356024 - DNA, 58 bp, Artificial
  Synthetic oligonucleotide
ccaggaccataaatcccaggaatagaggattgtctgtgtcagaagttgctagtacttt

SEQ ID NO: 356025 - DNA, 55 bp, Artificial
  Synthetic oligonucleotide
ccaggaccatttgcgcagacagtatatgcgccagtgaactggggacccggtgaag

SEQ ID NO: 356026 - DNA, 59 bp, Artificial
  Synthetic oligonucleotide
ccaggaccatttgctcaaactggatacgctccagtgaactggggtcctggtgagacaaa

SEQ ID NO: 356027 - DNA, 58 bp, Artificial
  Synthetic oligonucleotide
ccaggaccatttgctcaaactggatatgctccagtaaactggggctttggcgaaacga

SEQ ID NO: 356028 - DNA, 60 bp, Artificial
  Synthetic oligonucleotide
ccaggaccattttcacagacagggtatgctccagttgattggggacatggagaattgccg

SEQ ID NO: 356029 - DNA, 55 bp, Artificial
  Synthetic oligonucleotide
ccaggaccgctcatggtgtttcacaggacaaaccaacaacacaatcctggaagat

SEQ ID NO: 356030 - DNA, 56 bp, Artificial
  Synthetic oligonucleotide
ccaggacctagatacccaaagacatttggctggctatggaaattagtccctgtaaa

SEQ ID NO: 356031 - DNA, 55 bp, Artificial
  Synthetic oligonucleotide
ccaggacctgaaagagcgcgacagcgtgttagtcgagctcaagctggacaacccc

SEQ ID NO: 356032 - DNA, 60 bp, Artificial
  Synthetic oligonucleotide
ccaggacgaatgcacacggctgtgacagaattgctagatgcaattgcagcactggagtgt

SEQ ID NO: 356033 - DNA, 55 bp, Artificial
  Synthetic oligonucleotide
ccaggacgataggccaatgccccaaatatgtaaacaagaggagtttgctgcttgc

SEQ ID NO: 356034 - DNA, 60 bp, Artificial
  Synthetic oligonucleotide
ccaggactatcagcagggaacggagtctagcaagcgagttcgccaaccgatacctgccat

SEQ ID NO: 356035 - DNA, 55 bp, Artificial
  Synthetic oligonucleotide
ccaggagaatcctgccaaaacacgtgagtactgcctgcacgcaaagctgtcggat

SEQ ID NO: 356036 - DNA, 59 bp, Artificial
  Synthetic oligonucleotide
ccaggagacatcatgagcccaagagacaaaggctttttatgccctgagttcccaggtag

SEQ ID NO: 356037 - DNA, 54 bp, Artificial
  Synthetic oligonucleotide
ccaggagacttgcaggcacattcacttggactttgtcagactcctcaggggtgg

SEQ ID NO: 356038 - DNA, 60 bp, Artificial
  Synthetic oligonucleotide
ccaggagatataataatctcaacactcgtatccaaggtgcggaggaggctgaacttcgac

SEQ ID NO: 356039 - DNA, 58 bp, Artificial
  Synthetic oligonucleotide
ccaggagatattatgagtccaagagataagggatttttatgccctgagttcccaggta

SEQ ID NO: 356040 - DNA, 60 bp, Artificial
  Synthetic oligonucleotide
ccaggagattgagggagtgagattagattctagtgggaatgtgtataaaatactgtcaat

SEQ ID NO: 356041 - DNA, 55 bp, Artificial
  Synthetic oligonucleotide
ccaggagcaagtcacaaagaatgctaattgctcggcagccgaccctattactctt

SEQ ID NO: 356042 - DNA, 57 bp, Artificial
  Synthetic oligonucleotide
ccaggagcacactttcaccaatgaagggcagtggagagttaatttagagttcccaaa

SEQ ID NO: 356043 - DNA, 55 bp, Artificial
  Synthetic oligonucleotide
ccaggagcaggatggaacgtgagagacacggcctgcttagccaaggcatacgccc

SEQ ID NO: 356044 - DNA, 59 bp, Artificial
  Synthetic oligonucleotide
ccaggagccggagacaagacacctccagaggaccccttcagcgaacagaagagtctgtc

SEQ ID NO: 356045 - DNA, 60 bp, Artificial
  Synthetic oligonucleotide
ccaggagccgggccagagggcgtgactggggagtgctcaccctccaactgctgcatataa

SEQ ID NO: 356046 - DNA, 55 bp, Artificial
  Synthetic oligonucleotide
ccaggagcctgtactccatcctagacgaccccgcctacgaaacctgcgttcgctc

SEQ ID NO: 356047 - DNA, 58 bp, Artificial
  Synthetic oligonucleotide
ccaggagctcttgcttcggccataaaggagaccttcgaggagggaacttgtggcatag

SEQ ID NO: 356048 - DNA, 57 bp, Artificial
  Synthetic oligonucleotide
ccaggaggaccctacagacttggaacctcaggatcttgccctaacgctaccagtaga

SEQ ID NO: 356049 - DNA, 53 bp, Artificial
  Synthetic oligonucleotide
ccaggagggcccggtagaaaccgggctatcaatatgctgaaacgcggtttacc

SEQ ID NO: 356050 - DNA, 54 bp, Artificial
  Synthetic oligonucleotide
ccaggagggctccgatgcttagccccttcctccttaccgcggtctaccttctcc

SEQ ID NO: 356051 - DNA, 55 bp, Artificial
  Synthetic oligonucleotide
ccaggaggtattagatggagtggtaacacagaatatcgtacaggttatgtacacg

SEQ ID NO: 356052 - DNA, 55 bp, Artificial
  Synthetic oligonucleotide
ccaggaggttccaaggaggagaatggaacatccgaccatcagaagtggtggtccc

SEQ ID NO: 356053 - DNA, 60 bp, Artificial
  Synthetic oligonucleotide
ccaggagtcagaagcggacgcattggccgggaagataatgctgcaagatgtgaatactgt

SEQ ID NO: 356054 - DNA, 52 bp, Artificial
  Synthetic oligonucleotide
ccaggagtgaaggcagcaaccaacttgggggcatacaggctacctcagggaa

SEQ ID NO: 356055 - DNA, 54 bp, Artificial
  Synthetic oligonucleotide
ccaggagtgagtcttctaacacggatgttgggtgggtaacggtatttgggtcta

SEQ ID NO: 356056 - DNA, 60 bp, Artificial
  Synthetic oligonucleotide
ccaggagttccttacaatgccaatgatccgtgtgccaatcaaagttacactctgttagag

SEQ ID NO: 356057 - DNA, 56 bp, Artificial
  Synthetic oligonucleotide
ccaggagtttttgatccacagaattacagagtgagctatccctatctgaatgatat

SEQ ID NO: 356058 - DNA, 51 bp, Artificial
  Synthetic oligonucleotide
ccaggataatggtaactcatccctcattatgaatgtcgacagcctgtacct

SEQ ID NO: 356059 - DNA, 60 bp, Artificial
  Synthetic oligonucleotide
ccaggatatatcgggcttggagaacgcccgatgttccaagaggctgtgaaggtccatgta

SEQ ID NO: 356060 - DNA, 55 bp, Artificial
  Synthetic oligonucleotide
ccaggatcatgtaagatctttatgcatgttagcatggcattcaggtgagagtgag

SEQ ID NO: 356061 - DNA, 60 bp, Artificial
  Synthetic oligonucleotide
ccaggatctggccaattcatgaccactgatgactttcagtcacctagtgcgttaccatgg

SEQ ID NO: 356062 - DNA, 55 bp, Artificial
  Synthetic oligonucleotide
ccaggatggaaactgacgtatgttggatataacggaaatgacacaagagggcact

SEQ ID NO: 356063 - DNA, 60 bp, Artificial
  Synthetic oligonucleotide
ccaggatggacagatatggcacacggaactgggatagtcccaatgcggactgacttggaa

SEQ ID NO: 356064 - DNA, 55 bp, Artificial
  Synthetic oligonucleotide
ccaggatgtacgacatagctgaagatagatggagtttgaaggatcaccgctagca

SEQ ID NO: 356065 - DNA, 57 bp, Artificial
  Synthetic oligonucleotide
ccaggatgtatacgcggttgacggaccgacaagtctttatcatcaagccaataaggg

SEQ ID NO: 356066 - DNA, 55 bp, Artificial
  Synthetic oligonucleotide
ccaggatgtctgggaagtgcaaacagggatcccgcacccctcggggttgccacaa

SEQ ID NO: 356067 - DNA, 60 bp, Artificial
  Synthetic oligonucleotide
ccaggatgtgctgttaggcgagagggagtccgtgaaggtgaccgcagcgagttcaacgga

SEQ ID NO: 356068 - DNA, 60 bp, Artificial
  Synthetic oligonucleotide
ccaggattctggagcactgaaaaggaggttcccctacatcatgcacattcgagctgctaa

SEQ ID NO: 356069 - DNA, 57 bp, Artificial
  Synthetic oligonucleotide
ccaggattcttatgtttgctttatagggaagaattctgaaccactaattgtcccagc

SEQ ID NO: 356070 - DNA, 56 bp, Artificial
  Synthetic oligonucleotide
ccaggattgcagaggaagattgttggtatcccgcctttaatttgaactggcttccc

SEQ ID NO: 356071 - DNA, 55 bp, Artificial
  Synthetic oligonucleotide
ccaggattggccaaccaggaggaggaaatcctttggcaactataccgcccactag

SEQ ID NO: 356072 - DNA, 53 bp, Artificial
  Synthetic oligonucleotide
ccaggatttaacctggttcaggggtaacccgtatgtagccttgaatagacgag

SEQ ID NO: 356073 - DNA, 60 bp, Artificial
  Synthetic oligonucleotide
ccaggatttgagtgaaacaccatgtcaagtggacttaaccacatcttctatagatggggc

SEQ ID NO: 356074 - DNA, 56 bp, Artificial
  Synthetic oligonucleotide
ccaggattttcagccgcttttaatcgagttatcgatttgggcgacgctagagattt

SEQ ID NO: 356075 - DNA, 59 bp, Artificial
  Synthetic oligonucleotide
ccaggcaagaccagatcaaccaccagcgaggacgtgcttccaaacaattacgaggatcc

SEQ ID NO: 356076 - DNA, 55 bp, Artificial
  Synthetic oligonucleotide
ccaggcaaggtttgaagcagtagcatggtcagctacagcatgccacgacggaaag

SEQ ID NO: 356077 - DNA, 58 bp, Artificial
  Synthetic oligonucleotide
ccaggcaattcactattccagtgggagagacctatgcccggtgaaaggatgggcacct

SEQ ID NO: 356078 - DNA, 55 bp, Artificial
  Synthetic oligonucleotide
ccaggcacatgcacattgttgtgattgctccagactagttcctgagggacagatg

SEQ ID NO: 356079 - DNA, 53 bp, Artificial
  Synthetic oligonucleotide
ccaggcaccactttagttccataagcctgcagtacgcgcggtcatagtctata

SEQ ID NO: 356080 - DNA, 60 bp, Artificial
  Synthetic oligonucleotide
ccaggcacgagaagccgatgacgtctgtgtactgcgtgccttatctagctggtgtgcagt

SEQ ID NO: 356081 - DNA, 50 bp, Artificial
  Synthetic oligonucleotide
ccaggcactcggggtctgccgcgcaggactcctcctccgggtttttaggt

SEQ ID NO: 356082 - DNA, 53 bp, Artificial
  Synthetic oligonucleotide
ccaggcactggttatagaccgtgccacgttcctatcattcattcctaccatgg

SEQ ID NO: 356083 - DNA, 54 bp, Artificial
  Synthetic oligonucleotide
ccaggcagaagggatcctcttacgactcgcccacatctacggtgggatctggac

SEQ ID NO: 356084 - DNA, 55 bp, Artificial
  Synthetic oligonucleotide
ccaggcagctatattgatgggacttgacaagggatggccaatatcgaagatggac

SEQ ID NO: 356085 - DNA, 59 bp, Artificial
  Synthetic oligonucleotide
ccaggcagtaaccagtacctcacatctgacaacttccagtcaccttgtgccctaccgga

SEQ ID NO: 356086 - DNA, 60 bp, Artificial
  Synthetic oligonucleotide
ccaggcagtgccacccctcgccgtgtcacgggccaaggcccatcaagccatagaaatgca

SEQ ID NO: 356087 - DNA, 55 bp, Artificial
  Synthetic oligonucleotide
ccaggcataattccacctgtaaatgctgataaaccaataccgttaggaagaagag

SEQ ID NO: 356088 - DNA, 55 bp, Artificial
  Synthetic oligonucleotide
ccaggcatggatcccaagggcaccaagagcactaccatatgtgtcaattggacgt

SEQ ID NO: 356089 - DNA, 55 bp, Artificial
  Synthetic oligonucleotide
ccaggcattgttgggcaaatcttagcgggcgtagttgatggtttaatcttcgttg

SEQ ID NO: 356090 - DNA, 55 bp, Artificial
  Synthetic oligonucleotide
ccaggccaaagcacttacttactcaaatgtattatccttcgtcgaatcaattcgg

SEQ ID NO: 356091 - DNA, 60 bp, Artificial
  Synthetic oligonucleotide
ccaggccaagtttgagtctgttgcatggtcagccacagcatgccatgatggcaaaaaatg

SEQ ID NO: 356092 - DNA, 60 bp, Artificial
  Synthetic oligonucleotide
ccaggccacattgttccctgacagctgaagtgaaatatagtggtgacaactcttcagaac

SEQ ID NO: 356093 - DNA, 55 bp, Artificial
  Synthetic oligonucleotide
ccaggccacgcagatctcagtaccaaggaagcacaagacgtcatcatggaggttg

SEQ ID NO: 356094 - DNA, 57 bp, Artificial
  Synthetic oligonucleotide
ccaggccaggttaggaacttaattgagttgtgtcaagtggacactttgattccgata

SEQ ID NO: 356095 - DNA, 55 bp, Artificial
  Synthetic oligonucleotide
ccaggcccaagctcaattggacatttagacccaattctagacatcgatgcacatc

SEQ ID NO: 356096 - DNA, 60 bp, Artificial
  Synthetic oligonucleotide
ccaggccccttaccagcggggcagctcagagatccacgaggatctgacatagcagggaca

SEQ ID NO: 356097 - DNA, 52 bp, Artificial
  Synthetic oligonucleotide
ccaggccccttacgatcccgggtcctccgactacgcctggcggacctttgtg

SEQ ID NO: 356098 - DNA, 54 bp, Artificial
  Synthetic oligonucleotide
ccaggcccgtctcctacctgaagggctcctcgggtggtccactgctctgcccct

SEQ ID NO: 356099 - DNA, 53 bp, Artificial
  Synthetic oligonucleotide
ccaggccctacccgtctgggcacggccggactataaccccccgctagtggaga

SEQ ID NO: 356100 - DNA, 52 bp, Artificial
  Synthetic oligonucleotide
ccaggccgttagtgcatggattattagcactcatctgggacgatctacggag

SEQ ID NO: 356101 - DNA, 60 bp, Artificial
  Synthetic oligonucleotide
ccaggcctaatttcaattgggcctctgagcccaacacgagacatggacgcgcatctcaat

SEQ ID NO: 356102 - DNA, 56 bp, Artificial
  Synthetic oligonucleotide
ccaggcctctcgggtgtttacgccgctcggtgcctcgtcacttcggtactcttcga

SEQ ID NO: 356103 - DNA, 55 bp, Artificial
  Synthetic oligonucleotide
ccaggccttccatatactacgctaggaatgcgtagaacagatgttgtagattggg

SEQ ID NO: 356104 - DNA, 55 bp, Artificial
  Synthetic oligonucleotide
ccaggcgaattgtgtcgacctgggagatcacgcttatcgtgtggaaagacccaag

SEQ ID NO: 356105 - DNA, 55 bp, Artificial
  Synthetic oligonucleotide
ccaggcgaatttctggaaccagtttcggaggtcgaaagactggacgcggctcttg

SEQ ID NO: 356106 - DNA, 60 bp, Artificial
  Synthetic oligonucleotide
ccaggcgatatctaagggtatgcgtcggttggaggtcgagcatgcccagaagtttatcac

SEQ ID NO: 356107 - DNA, 55 bp, Artificial
  Synthetic oligonucleotide
ccaggcgcgctcagcacatcaccgagctttcgcatcaatccgccggtggcctgtg

SEQ ID NO: 356108 - DNA, 55 bp, Artificial
  Synthetic oligonucleotide
ccaggcgctttggaagtatatcgtcgcggtaacttgctatattacggcgataaag

SEQ ID NO: 356109 - DNA, 53 bp, Artificial
  Synthetic oligonucleotide
ccaggcggaacggttctttaaaacccacctgttcgactgggtcaccagtgatc

SEQ ID NO: 356110 - DNA, 50 bp, Artificial
  Synthetic oligonucleotide
ccaggcggaacgtcttatgctgctatgcggttggggcggaccgaactcaa

SEQ ID NO: 356111 - DNA, 59 bp, Artificial
  Synthetic oligonucleotide
ccaggcggatcgagtgtacgactgtgatgattacccgttcttagcacgcgaccctagat

SEQ ID NO: 356112 - DNA, 60 bp, Artificial
  Synthetic oligonucleotide
ccaggcggcattggacgacgcagggctgcaattgttctatgtatcccggccacataacgg

SEQ ID NO: 356113 - DNA, 60 bp, Artificial
  Synthetic oligonucleotide
ccaggcggttagacagtcacaagtcacgtttaacagtggcacaatgactggatcaggcac

SEQ ID NO: 356114 - DNA, 55 bp, Artificial
  Synthetic oligonucleotide
ccaggcgtcatgacaggtagtgcagtgggatgcaaccctgataccttctggagca

SEQ ID NO: 356115 - DNA, 55 bp, Artificial
  Synthetic oligonucleotide
ccaggcgtggtcattggctcaaatctagccatgtaccggcgaaacgcagtcacgg

SEQ ID NO: 356116 - DNA, 60 bp, Artificial
  Synthetic oligonucleotide
ccaggcgttgtcactggtagcgcagttggctgtgacccagatttattttggagcaagatc

SEQ ID NO: 356117 - DNA, 55 bp, Artificial
  Synthetic oligonucleotide
ccaggcgttttactgcctgggtgaccgaggatggactattcgactggcgccgagt

SEQ ID NO: 356118 - DNA, 60 bp, Artificial
  Synthetic oligonucleotide
ccaggctacaggtggtgacaccaatgacaccagttgctgttggcattaacatggactctg

SEQ ID NO: 356119 - DNA, 60 bp, Artificial
  Synthetic oligonucleotide
ccaggctactgatactcaacttaatttcttgcctggtgcatatgcgcaaatatcaaatgc

SEQ ID NO: 356120 - DNA, 60 bp, Artificial
  Synthetic oligonucleotide
ccaggctcattgaggcgtccagtttgaatgactccgtggcaatgagacagacattcggca

SEQ ID NO: 356121 - DNA, 60 bp, Artificial
  Synthetic oligonucleotide
ccaggctgcggctggagcgtccgcgaaactgcctgcctttcaaaggcttatgggcagatg

SEQ ID NO: 356122 - DNA, 60 bp, Artificial
  Synthetic oligonucleotide
ccaggctgggtacagctcagtaacgcatatacgattccctcaggagtcgcgtcgatgcgg

SEQ ID NO: 356123 - DNA, 55 bp, Artificial
  Synthetic oligonucleotide
ccaggctgtaccacgacgcattagttgatggcctatcacctaggagcgccagggc

SEQ ID NO: 356124 - DNA, 55 bp, Artificial
  Synthetic oligonucleotide
ccaggctgttatcgtaccttgaatctgtttagatataaaagccgatgttacatct

SEQ ID NO: 356125 - DNA, 56 bp, Artificial
  Synthetic oligonucleotide
ccaggctgttgcccgctctcttgactggtctaaggttactttagatggccgccccc

SEQ ID NO: 356126 - DNA, 60 bp, Artificial
  Synthetic oligonucleotide
ccaggctttgacttgcattgccgctttaatgaagaaggtgactccagatacatgacacat

SEQ ID NO: 356127 - DNA, 56 bp, Artificial
  Synthetic oligonucleotide
ccagggaaaggggttttctacgtatcaccacgaagggcgctcgctgatgagttcag

SEQ ID NO: 356128 - DNA, 55 bp, Artificial
  Synthetic oligonucleotide
ccagggaacattgttggtgtttgccctcggattctgtttgcttataagtaccttg

SEQ ID NO: 356129 - DNA, 51 bp, Artificial
  Synthetic oligonucleotide
ccagggacccagacgatcgcactatcatatgggtatatggacctactggcg

SEQ ID NO: 356130 - DNA, 56 bp, Artificial
  Synthetic oligonucleotide
ccagggaccgggagcggtctatagataaggtcgtgtcccaactcggaaagctgaca

SEQ ID NO: 356131 - DNA, 57 bp, Artificial
  Synthetic oligonucleotide
ccagggacctgcccaccaattcgaggtcttaggccggtagagaaatgtgcagttcta

SEQ ID NO: 356132 - DNA, 60 bp, Artificial
  Synthetic oligonucleotide
ccagggacctgtacagaagtgggtcatggttctatacacgtggaggatctgcagataatg

SEQ ID NO: 356133 - DNA, 55 bp, Artificial
  Synthetic oligonucleotide
ccagggaccttttaaaggcttcaatgaagtttcaactgcattcagacacattgat

SEQ ID NO: 356134 - DNA, 59 bp, Artificial
  Synthetic oligonucleotide
ccagggacgtaatgtgcgcgtcagggttgtttcggtcacggtgaatggatgcgctcctg

SEQ ID NO: 356135 - DNA, 55 bp, Artificial
  Synthetic oligonucleotide
ccagggagagtaccttacgcgtcgggacgatgttaagtacagcagcgatcaccag

SEQ ID NO: 356136 - DNA, 53 bp, Artificial
  Synthetic oligonucleotide
ccagggagcggaaacgctgaggtagttgcgaactacttggccgcttgtttctc

SEQ ID NO: 356137 - DNA, 55 bp, Artificial
  Synthetic oligonucleotide
ccagggagggctggcttgttaccctcacaagtcttgcagaactctacggaatggt

SEQ ID NO: 356138 - DNA, 60 bp, Artificial
  Synthetic oligonucleotide
ccagggatattctccagactcgtgatttacactcactatgtatgccgactcccgacgcgc

SEQ ID NO: 356139 - DNA, 58 bp, Artificial
  Synthetic oligonucleotide
ccagggatcagatacccattaacctttggatggtgctataagctggtaccagttgatc

SEQ ID NO: 356140 - DNA, 55 bp, Artificial
  Synthetic oligonucleotide
ccagggatggtttcattgagcccgtttgttccattgatattctacccaccacccc

SEQ ID NO: 356141 - DNA, 55 bp, Artificial
  Synthetic oligonucleotide
ccagggattagtaaacccaagaatcggaaggaagcaatgttaggcacacatgtcg

SEQ ID NO: 356142 - DNA, 55 bp, Artificial
  Synthetic oligonucleotide
ccagggcaagctgtagttactgcaatgcagcaccgactggaccaagaagtcagcg

SEQ ID NO: 356143 - DNA, 55 bp, Artificial
  Synthetic oligonucleotide
ccagggcacaatccaacgactttgctagcctagatgcagctgtcactcgaggtcg

SEQ ID NO: 356144 - DNA, 55 bp, Artificial
  Synthetic oligonucleotide
ccagggcaggtccgcaacatgctagaagtggttcaagtggaatcaatgatggaga

SEQ ID NO: 356145 - DNA, 55 bp, Artificial
  Synthetic oligonucleotide
ccagggccaagccaacttaaatgtcctctcactcacaactacccagtcaggcgag

SEQ ID NO: 356146 - DNA, 58 bp, Artificial
  Synthetic oligonucleotide
ccagggccaatggtcgggccaacatcccttatcccgacatggattgcctcttgctttc

SEQ ID NO: 356147 - DNA, 57 bp, Artificial
  Synthetic oligonucleotide
ccagggcttgcctacaatgaacaccccagggagtacacaattcttaacgtcagacga

SEQ ID NO: 356148 - DNA, 53 bp, Artificial
  Synthetic oligonucleotide
ccaggggaaaaccggccttgagatccgggcatgggccaaagagtgggttcagg

SEQ ID NO: 356149 - DNA, 53 bp, Artificial
  Synthetic oligonucleotide
ccaggggaaaccttgaatgtagaatctaatgggaatttagtagccccttggta

SEQ ID NO: 356150 - DNA, 53 bp, Artificial
  Synthetic oligonucleotide
ccaggggaagcccctcaacacctcattcgcgacccctccaaggtacacgaggg

SEQ ID NO: 356151 - DNA, 57 bp, Artificial
  Synthetic oligonucleotide
ccaggggaatagctttgactgaaaaagcgaaattgaattcgtacgcgccaatatcac

SEQ ID NO: 356152 - DNA, 55 bp, Artificial
  Synthetic oligonucleotide
ccaggggacaactcagccaaattcagaaggttcactcaggctttgtatgatgggc

SEQ ID NO: 356153 - DNA, 50 bp, Artificial
  Synthetic oligonucleotide
ccaggggaccaaaccatgaggaccccttcgaaacaatgataccacactcc

SEQ ID NO: 356154 - DNA, 55 bp, Artificial
  Synthetic oligonucleotide
ccaggggactccatcattttcaacagtattgggaatttgattgcaccaagaggcc

SEQ ID NO: 356155 - DNA, 56 bp, Artificial
  Synthetic oligonucleotide
ccaggggaggaaagggagagaacatcaagtactcatacgccgaacacttagggcac

SEQ ID NO: 356156 - DNA, 60 bp, Artificial
  Synthetic oligonucleotide
ccaggggcaagcgagcggaccatccatgaaatacaggttagtacagctacgcgaaatcat

SEQ ID NO: 356157 - DNA, 60 bp, Artificial
  Synthetic oligonucleotide
ccaggggcagcgatgtatgcaacaggagccataataggagatataagacaagcacattgt

SEQ ID NO: 356158 - DNA, 58 bp, Artificial
  Synthetic oligonucleotide
ccaggggcccggtctagttcatgtcaagaaaaatgagtactacccagagagatatcaa

SEQ ID NO: 356159 - DNA, 60 bp, Artificial
  Synthetic oligonucleotide
ccaggggcttcattagaagaaatgatgacagcatgtcaaggagtaggaggacctggccac

SEQ ID NO: 356160 - DNA, 50 bp, Artificial
  Synthetic oligonucleotide
ccagggggacggtagcgggtcgaaaaacagcacctctagcggcatagagc

SEQ ID NO: 356161 - DNA, 50 bp, Artificial
  Synthetic oligonucleotide
ccagggggagccatgactagagatgctgtgttcgcaatcatacgagatca

SEQ ID NO: 356162 - DNA, 56 bp, Artificial
  Synthetic oligonucleotide
ccagggggcttttcggcaccggatcatatcaagtatgggacctgaaatttcatact

SEQ ID NO: 356163 - DNA, 55 bp, Artificial
  Synthetic oligonucleotide
ccaggggtatcaatcggaactactatgcagacggctataaagaaaacgcctattc

SEQ ID NO: 356164 - DNA, 55 bp, Artificial
  Synthetic oligonucleotide
ccaggggtccatgagagctgaaggtgaggccgagtcaaatgagatgagcggaggc

SEQ ID NO: 356165 - DNA, 55 bp, Artificial
  Synthetic oligonucleotide
ccaggggtgacttatttgacagagttcaggaactgaacttcatgaaggttaagat

SEQ ID NO: 356166 - DNA, 53 bp, Artificial
  Synthetic oligonucleotide
ccaggggttgacccgtaaaggtgtgtacgcggtcagatataaggtcaacgaaa

SEQ ID NO: 356167 - DNA, 53 bp, Artificial
  Synthetic oligonucleotide
ccagggtaatgggcactaatcaaagtttattgcactagggtgggtttaagggc

SEQ ID NO: 356168 - DNA, 55 bp, Artificial
  Synthetic oligonucleotide
ccagggtacaaagcacggatgaatatgttcaaaggacaaatatctactatcatgc

SEQ ID NO: 356169 - DNA, 55 bp, Artificial
  Synthetic oligonucleotide
ccagggtacaggtatgcaattccaggacccatctgatcttatggatataggagcg

SEQ ID NO: 356170 - DNA, 55 bp, Artificial
  Synthetic oligonucleotide
ccagggtctcgccctacgacacgccttggtttatatagtcgtgccacacaacagg

SEQ ID NO: 356171 - DNA, 60 bp, Artificial
  Synthetic oligonucleotide
ccagggtctcggatacaccgacactatccacggccgagtgcacactcaatgaatgtgttt

SEQ ID NO: 356172 - DNA, 53 bp, Artificial
  Synthetic oligonucleotide
ccagggtgcatattctggtgctcctaagcaggcactcaagaagcctgtcctgc

SEQ ID NO: 356173 - DNA, 55 bp, Artificial
  Synthetic oligonucleotide
ccagggtgcgacatttactgagaccacaattatcgccacggcgggtgctcgcggg

SEQ ID NO: 356174 - DNA, 55 bp, Artificial
  Synthetic oligonucleotide
ccagggtggagactgggcggtactgggagtggcttgccccgtgctgctcaatata

SEQ ID NO: 356175 - DNA, 55 bp, Artificial
  Synthetic oligonucleotide
ccagggttagagactggcaggccaaggttgcagctagctgaaaatatgcgccctg

SEQ ID NO: 356176 - DNA, 53 bp, Artificial
  Synthetic oligonucleotide
ccagggttagggataggttaggccaccctgagaaacacgtggccgagggttgc

SEQ ID NO: 356177 - DNA, 55 bp, Artificial
  Synthetic oligonucleotide
ccagggttatattgaaatgaagaagcgtacatctcttgctggtatgaagaagtta

SEQ ID NO: 356178 - DNA, 55 bp, Artificial
  Synthetic oligonucleotide
ccagggttcagactatgcatcacttgcaaagactgatgacataatatattcgaag

SEQ ID NO: 356179 - DNA, 52 bp, Artificial
  Synthetic oligonucleotide
ccaggtacaccagtgtacgtggggtcccgatggtctttatgagaaagtaatt

SEQ ID NO: 356180 - DNA, 55 bp, Artificial
  Synthetic oligonucleotide
ccaggtacgctgtgctttgcatacttatgacaattctatggatgtctttgaatgc

SEQ ID NO: 356181 - DNA, 53 bp, Artificial
  Synthetic oligonucleotide
ccaggtagaactactagatgatcacatctcagtggattgcgacattgtacgcg

SEQ ID NO: 356182 - DNA, 56 bp, Artificial
  Synthetic oligonucleotide
ccaggtaggagtgggatcattcgggccagggttcactccaccacacggcaatcttt

SEQ ID NO: 356183 - DNA, 58 bp, Artificial
  Synthetic oligonucleotide
ccaggtataggtaaaataactcaatattcaggatgactactaaactctatgtgcaaac

SEQ ID NO: 356184 - DNA, 55 bp, Artificial
  Synthetic oligonucleotide
ccaggtatctctatattctacatggatatacgacttacatggatcgtaatcagga

SEQ ID NO: 356185 - DNA, 60 bp, Artificial
  Synthetic oligonucleotide
ccaggtatgaattggaccgatttgatcactaactattcaccatctagagaggataacttg

SEQ ID NO: 356186 - DNA, 56 bp, Artificial
  Synthetic oligonucleotide
ccaggtatgctttacaacgcaatttaagggacccgagtctagcaagatatggtttc

SEQ ID NO: 356187 - DNA, 57 bp, Artificial
  Synthetic oligonucleotide
ccaggtcaactggcaaaaaggtagataacaagagattggaagcggttaagattggca

SEQ ID NO: 356188 - DNA, 57 bp, Artificial
  Synthetic oligonucleotide
ccaggtcatttaattgggccattgacattgttatattggactgggccctttgagccc

SEQ ID NO: 356189 - DNA, 55 bp, Artificial
  Synthetic oligonucleotide
ccaggtccagtagctactacacatacagaagatcaggcttccagtgtaccggctc

SEQ ID NO: 356190 - DNA, 55 bp, Artificial
  Synthetic oligonucleotide
ccaggtccattcgcacaaacaaggtatgctccagttaattggggtcatggagagg

SEQ ID NO: 356191 - DNA, 60 bp, Artificial
  Synthetic oligonucleotide
ccaggtccatttgcacagactagatatgctccagtcaattggggacacggagagattaat

SEQ ID NO: 356192 - DNA, 56 bp, Artificial
  Synthetic oligonucleotide
ccaggtccgaaaagaactcgaaattgcaagacaagcctttcccacacaagagacaa

SEQ ID NO: 356193 - DNA, 55 bp, Artificial
  Synthetic oligonucleotide
ccaggtcctccatattgaattggcacagatccatggtcgccatattgaattggcc

SEQ ID NO: 356194 - DNA, 57 bp, Artificial
  Synthetic oligonucleotide
ccaggtcgctcctcgagctcccgtgatccacgacacatttgtcatcgcacacggcga

SEQ ID NO: 356195 - DNA, 53 bp, Artificial
  Synthetic oligonucleotide
ccaggtcgctttctccaaacacacaactaatttggaagagttaccatccgttt

SEQ ID NO: 356196 - DNA, 54 bp, Artificial
  Synthetic oligonucleotide
ccaggtcgttaaatacccagatttccttaagatgagcaacgacccttatggtaa

SEQ ID NO: 356197 - DNA, 55 bp, Artificial
  Synthetic oligonucleotide
ccaggtctagggttcttccttctagacaacccttactgtgctggacttggaggct

SEQ ID NO: 356198 - DNA, 52 bp, Artificial
  Synthetic oligonucleotide
ccaggtctggttgattgagtcagctgcaagagggttggaaggatgacatcgt

SEQ ID NO: 356199 - DNA, 55 bp, Artificial
  Synthetic oligonucleotide
ccaggtgaaaacctcaaggagatctctcttctcccaaaagacctctacagggcaa

SEQ ID NO: 356200 - DNA, 60 bp, Artificial
  Synthetic oligonucleotide
ccaggtgaaagccatattcggtgatctgaaaccccatcttgagaaacagcgagctcgtaa

SEQ ID NO: 356201 - DNA, 55 bp, Artificial
  Synthetic oligonucleotide
ccaggtgactgggtgctacaacccagcatggatgcgcccaactcgcatgacactc

SEQ ID NO: 356202 - DNA, 55 bp, Artificial
  Synthetic oligonucleotide
ccaggtgattgtcaacaaccaaaactggtcgggatactcaggggcgttcatagac

SEQ ID NO: 356203 - DNA, 60 bp, Artificial
  Synthetic oligonucleotide
ccaggtgattgtggtggaatacttagatgtcaacacggagtgatagggataatcaccgct

SEQ ID NO: 356204 - DNA, 55 bp, Artificial
  Synthetic oligonucleotide
ccaggtgcagctgtaacttcaaacgaacctgtcactcctgttagactgggagacc

SEQ ID NO: 356205 - DNA, 55 bp, Artificial
  Synthetic oligonucleotide
ccaggtgcctgcttcaagttagtagacgagtacacagaggctgttgaggctatag

SEQ ID NO: 356206 - DNA, 55 bp, Artificial
  Synthetic oligonucleotide
ccaggtgcgaactggagtatacttccgaatcttgtatgccaatggtagtatgcgc

SEQ ID NO: 356207 - DNA, 53 bp, Artificial
  Synthetic oligonucleotide
ccaggtgcgtctcccccgagtcagggtccggacagcccggaacactacaggca

SEQ ID NO: 356208 - DNA, 55 bp, Artificial
  Synthetic oligonucleotide
ccaggtgctccatatgtttgttcctgttcctccttgttggatcgttggtttcggg

SEQ ID NO: 356209 - DNA, 55 bp, Artificial
  Synthetic oligonucleotide
ccaggtgctggtagaaccaaggcttatggtcaaaatgaactagatcttgcgcaac

SEQ ID NO: 356210 - DNA, 54 bp, Artificial
  Synthetic oligonucleotide
ccaggtggaagatgtagagttcgagtttaaagagggggtggtggtaattcgtgc

SEQ ID NO: 356211 - DNA, 55 bp, Artificial
  Synthetic oligonucleotide
ccaggtggagaccattttagaagtcaacaatgtgcccacgaatgccactagcttg

SEQ ID NO: 356212 - DNA, 58 bp, Artificial
  Synthetic oligonucleotide
ccaggtggagaccattttagaggtcaataatgtacctacgaatgccaccagcttaatg

SEQ ID NO: 356213 - DNA, 54 bp, Artificial
  Synthetic oligonucleotide
ccaggtgggcacgccggggcctcgtatttccacaaatacgaccaactcgagtgg

SEQ ID NO: 356214 - DNA, 54 bp, Artificial
  Synthetic oligonucleotide
ccaggtgggtggagctaggtaggattcagctaggttcctactggggtacccctc

SEQ ID NO: 356215 - DNA, 60 bp, Artificial
  Synthetic oligonucleotide
ccaggtgtagattgggacagaattgatgcagcttcatgcgagtatgacagttgtcctaaa

SEQ ID NO: 356216 - DNA, 55 bp, Artificial
  Synthetic oligonucleotide
ccaggtgtatatagtacttatgttttacatggtgaatcctggttggaggttgacg

SEQ ID NO: 356217 - DNA, 55 bp, Artificial
  Synthetic oligonucleotide
ccaggtgtcaaggagcccgcacctttgcatacaaatgaccccaggcttgaaacag

SEQ ID NO: 356218 - DNA, 55 bp, Artificial
  Synthetic oligonucleotide
ccaggtgtccactaagataattgtgtggtcctaatgcacgagcccacatggtttt

SEQ ID NO: 356219 - DNA, 55 bp, Artificial
  Synthetic oligonucleotide
ccaggtgtgaatacactgcaggacatagcaaggtagggacactgcaactactagc

SEQ ID NO: 356220 - DNA, 60 bp, Artificial
  Synthetic oligonucleotide
ccaggtgtgactcgtttggcccatgacggatccaaaatccctctgagatgtgtgctggga

SEQ ID NO: 356221 - DNA, 55 bp, Artificial
  Synthetic oligonucleotide
ccaggtgtggcaaaggtcctggagatactggcatgatgacctagggatgtcacaa

SEQ ID NO: 356222 - DNA, 56 bp, Artificial
  Synthetic oligonucleotide
ccaggtgttcttacaggctctgcagtgggttgtaatcctgatgtgttctggtctca

SEQ ID NO: 356223 - DNA, 54 bp, Artificial
  Synthetic oligonucleotide
ccaggtgttttccgccctctttccataaagcagattggttgggaggtcactaac

SEQ ID NO: 356224 - DNA, 51 bp, Artificial
  Synthetic oligonucleotide
ccaggttcaaccgccactccacacatgccatcagctagcgaagtaacaacc

SEQ ID NO: 356225 - DNA, 55 bp, Artificial
  Synthetic oligonucleotide
ccaggttcctacctgtagcaggcgggacaagcagtgtatacattgaggtgttgca

SEQ ID NO: 356226 - DNA, 55 bp, Artificial
  Synthetic oligonucleotide
ccaggttctattcacaccacacggaggtgctgttcctaacacacataacacccaa

SEQ ID NO: 356227 - DNA, 59 bp, Artificial
  Synthetic oligonucleotide
ccaggttctggattattgtcctggcatcaaacccctgataagcaaaagcctgcaaccag

SEQ ID NO: 356228 - DNA, 55 bp, Artificial
  Synthetic oligonucleotide
ccaggttgaggcgacctggtttgccgtggagagatccgtgagtgtgatttgaggc

SEQ ID NO: 356229 - DNA, 53 bp, Artificial
  Synthetic oligonucleotide
ccaggttgatttctttgcgattatggaggggttggactctcctggtgtgagaa

SEQ ID NO: 356230 - DNA, 55 bp, Artificial
  Synthetic oligonucleotide
ccaggttgcaccggatggcttccccgacatgtcgttcgtgccctttaacagcccc

SEQ ID NO: 356231 - DNA, 55 bp, Artificial
  Synthetic oligonucleotide
ccaggttggacgtcataggatccaccccgttgtattggagcagcgtctccgcggc

SEQ ID NO: 356232 - DNA, 55 bp, Artificial
  Synthetic oligonucleotide
ccaggttgggtcaggtttattgtgttttgtacacctcctgtgtcttcttgggtca

SEQ ID NO: 356233 - DNA, 53 bp, Artificial
  Synthetic oligonucleotide
ccaggttgtctaggagttcttctcgagaggcgggcagtgggtgcccctgagtt

SEQ ID NO: 356234 - DNA, 60 bp, Artificial
  Synthetic oligonucleotide
ccaggttgtgcattgaagaggtcagcaaggtccattccatgtgagtatttggagtcctgc

SEQ ID NO: 356235 - DNA, 55 bp, Artificial
  Synthetic oligonucleotide
ccaggttgttcccacctggatcacccaatgggtgtagtatactgttattacggta

SEQ ID NO: 356236 - DNA, 55 bp, Artificial
  Synthetic oligonucleotide
ccaggttgttcccacctggatctcccaagcggagtggtacactattatcccggta

SEQ ID NO: 356237 - DNA, 53 bp, Artificial
  Synthetic oligonucleotide
ccaggttgttcccacctggatctcctaacgggagtagtacactattattacgg

SEQ ID NO: 356238 - DNA, 53 bp, Artificial
  Synthetic oligonucleotide
ccaggttgttcccacctggatttcccacagggagtggtactctgttattacgg

SEQ ID NO: 356239 - DNA, 55 bp, Artificial
  Synthetic oligonucleotide
ccaggttgttcccacctggatttcccatgtggagtagtacactgttattccggta

SEQ ID NO: 356240 - DNA, 56 bp, Artificial
  Synthetic oligonucleotide
ccaggttgttgaacatttccaaacgatgaataaatagatgggttatacgcagaaaa

SEQ ID NO: 356241 - DNA, 53 bp, Artificial
  Synthetic oligonucleotide
ccaggtttaaaatacgggttgctaggagattgtcttatggtaaggttgaacga

SEQ ID NO: 356242 - DNA, 56 bp, Artificial
  Synthetic oligonucleotide
ccaggtttaggaaccctacctgatgttgttaggtttgctgggcggctctcagagaa

SEQ ID NO: 356243 - DNA, 55 bp, Artificial
  Synthetic oligonucleotide
ccaggtttctcattcacgaacatcttttcctgacgcttgacaacaagtaaacttt

SEQ ID NO: 356244 - DNA, 60 bp, Artificial
  Synthetic oligonucleotide
ccaggtttgcatggatgggcaactgtcatgcttctatcaaccttttgttttggatggatc

SEQ ID NO: 356245 - DNA, 60 bp, Artificial
  Synthetic oligonucleotide
ccaggtttggactgcatcggtgcgagcttttgtgaggctcataatttcgacacttcatag

SEQ ID NO: 356246 - DNA, 55 bp, Artificial
  Synthetic oligonucleotide
ccaggttttaattcaattgggcctgtaatgccgaaccttgacattgatgctgacc

SEQ ID NO: 356247 - DNA, 55 bp, Artificial
  Synthetic oligonucleotide
ccaggttttgccagcagttcggagtttccctttctcatcatattccctacaaccc

SEQ ID NO: 356248 - DNA, 59 bp, Artificial
  Synthetic oligonucleotide
ccagtaaactggtaatagcaacaactaataaatctgatttctcaagtacagttctgcaa

SEQ ID NO: 356249 - DNA, 59 bp, Artificial
  Synthetic oligonucleotide
ccagtaacacacaacgaggtattgccatgactcgagaaacgcgcgttgttgaatgttta

SEQ ID NO: 356250 - DNA, 55 bp, Artificial
  Synthetic oligonucleotide
ccagtaacagtagaagtaccatacatttgtgcaaaaggggaagaccaaattactg

SEQ ID NO: 356251 - DNA, 55 bp, Artificial
  Synthetic oligonucleotide
ccagtaacgttccgaactggaaccgactgttggtatgccatggaaataaggccag

SEQ ID NO: 356252 - DNA, 60 bp, Artificial
  Synthetic oligonucleotide
ccagtaactctatggttttatatacagacgtttcacaatgggactcgtcgcagcataaca

SEQ ID NO: 356253 - DNA, 55 bp, Artificial
  Synthetic oligonucleotide
ccagtaaggcctcaggtgcctttaagaccaatgacttttaagggagcattcgacc

SEQ ID NO: 356254 - DNA, 58 bp, Artificial
  Synthetic oligonucleotide
ccagtaatacagtgtatggacgggatggagtggataaaatacaagccgatggacttaa

SEQ ID NO: 356255 - DNA, 59 bp, Artificial
  Synthetic oligonucleotide
ccagtaatcgatggtatgctccttctggaaagttgccgcaagccgaggaacagtatagt

SEQ ID NO: 356256 - DNA, 60 bp, Artificial
  Synthetic oligonucleotide
ccagtaatcttgcatgaggtcccattgagggatatcttactagttattatactagtgatc

SEQ ID NO: 356257 - DNA, 60 bp, Artificial
  Synthetic oligonucleotide
ccagtaatgaatctcattagaggacaggattcaattgcctcagaacaaagggattgtacg

SEQ ID NO: 356258 - DNA, 55 bp, Artificial
  Synthetic oligonucleotide
ccagtaatgattagccaagcaggcggtttaagttatcgcaacttaacaaaatgcc

SEQ ID NO: 356259 - DNA, 55 bp, Artificial
  Synthetic oligonucleotide
ccagtaattcaagccccctggcactcaggcctactcccatacctaaaggaaattg

SEQ ID NO: 356260 - DNA, 57 bp, Artificial
  Synthetic oligonucleotide
ccagtacaagagtaagattaaaagagggatgtaagggaccccacatagcgcaatggc

SEQ ID NO: 356261 - DNA, 52 bp, Artificial
  Synthetic oligonucleotide
ccagtacaaggtacacaaaccgtggacccttgtggtaatggtcgtggccccc

SEQ ID NO: 356262 - DNA, 52 bp, Artificial
  Synthetic oligonucleotide
ccagtacacatgatgacatcattggtctcataagggaagctatggcacggga

SEQ ID NO: 356263 - DNA, 56 bp, Artificial
  Synthetic oligonucleotide
ccagtacacgtgctgaaatacctaaggtatctgcctttcagtatagggtgtttagg

SEQ ID NO: 356264 - DNA, 57 bp, Artificial
  Synthetic oligonucleotide
ccagtacagtggaactttaccaattacaacgagagtgagacaataggaaaatgggca

SEQ ID NO: 356265 - DNA, 58 bp, Artificial
  Synthetic oligonucleotide
ccagtacagttataggggaagcaccagaatggataacacgccaaactgttattgaaca

SEQ ID NO: 356266 - DNA, 54 bp, Artificial
  Synthetic oligonucleotide
ccagtacataaaggtatacccagttccactggaagaggtaccgaaatctctacc

SEQ ID NO: 356267 - DNA, 55 bp, Artificial
  Synthetic oligonucleotide
ccagtaccagtcaaagggcacttccacgtcttacatgcctgtacttggtacaacc

SEQ ID NO: 356268 - DNA, 60 bp, Artificial
  Synthetic oligonucleotide
ccagtaccgcaatgcacgtctccgtgctcatgtgtccaatgaagattgtcgtccgacgtg

SEQ ID NO: 356269 - DNA, 55 bp, Artificial
  Synthetic oligonucleotide
ccagtaccgctggatgtattccggttcctacaccccaatgccaccgttctcccac

SEQ ID NO: 356270 - DNA, 53 bp, Artificial
  Synthetic oligonucleotide
ccagtaccgtgtaaactttaagcttggatttcaataaagctaggccgtgggac

SEQ ID NO: 356271 - DNA, 57 bp, Artificial
  Synthetic oligonucleotide
ccagtactcttgaaccaaggtgctccaaccgtccacagcgtgtcaaccctccacctc

SEQ ID NO: 356272 - DNA, 55 bp, Artificial
  Synthetic oligonucleotide
ccagtactgagaaaacccaattgactcttgacatcaggcagttccagccatcacc

SEQ ID NO: 356273 - DNA, 60 bp, Artificial
  Synthetic oligonucleotide
ccagtactgccactgtcaagaacgatcttcgtgatcgttatcaagtcatgcacaagttct

SEQ ID NO: 356274 - DNA, 55 bp, Artificial
  Synthetic oligonucleotide
ccagtagagccaacggccccaccagcagagagcttcaggttcgaggagacaaccc

SEQ ID NO: 356275 - DNA, 60 bp, Artificial
  Synthetic oligonucleotide
ccagtagatcctagcatagagccatggaatcacccgggaagtcagcctacaactgcgtgt

SEQ ID NO: 356276 - DNA, 60 bp, Artificial
  Synthetic oligonucleotide
ccagtagcactagttggagctcttccatttattacggattcgtcagtcatatcgttaata

SEQ ID NO: 356277 - DNA, 60 bp, Artificial
  Synthetic oligonucleotide
ccagtagcatctacaaccgacaaagggtatgatgcatctttgatgtattattctaatgtt

SEQ ID NO: 356278 - DNA, 55 bp, Artificial
  Synthetic oligonucleotide
ccagtagcattcttaaaggtaacaaaggcccatgtacctatcccattgggaggtg

SEQ ID NO: 356279 - DNA, 60 bp, Artificial
  Synthetic oligonucleotide
ccagtagcattggttggagcacttccatttattactgattcatcagttatatcgctaata

SEQ ID NO: 356280 - DNA, 60 bp, Artificial
  Synthetic oligonucleotide
ccagtagcgttagttggggctcttccattcattacagattcatcagttatatcgctaata

SEQ ID NO: 356281 - DNA, 51 bp, Artificial
  Synthetic oligonucleotide
ccagtagctctagtaggagcattaccattcgtaacagactcatcagttata

SEQ ID NO: 356282 - DNA, 60 bp, Artificial
  Synthetic oligonucleotide
ccagtagctttagtaggtgcattgccatttataacggattcatcagttatatcactaata

SEQ ID NO: 356283 - DNA, 55 bp, Artificial
  Synthetic oligonucleotide
ccagtaggggaggctacactagtaataataacatattggggtttgcaaacaggag

SEQ ID NO: 356284 - DNA, 55 bp, Artificial
  Synthetic oligonucleotide
ccagtaggttccctgcaggcgctggttacttcagagtttatcgctatgatcctat

SEQ ID NO: 356285 - DNA, 55 bp, Artificial
  Synthetic oligonucleotide
ccagtaggtttagacgtggtttatcgtatggtccacgtcgtactaatgcacgtaa

SEQ ID NO: 356286 - DNA, 59 bp, Artificial
  Synthetic oligonucleotide
ccagtagtcgtcaagggtggagcagggtcccttgctaaggcaacacgccagcagcctaa

SEQ ID NO: 356287 - DNA, 60 bp, Artificial
  Synthetic oligonucleotide
ccagtagtgaccccttggccgttcagccaggatcactatgcaccgaccctgtatgggatc

SEQ ID NO: 356288 - DNA, 55 bp, Artificial
  Synthetic oligonucleotide
ccagtagttatggtgcttggggtgcatggactagagcacttaacaataccgtatc

SEQ ID NO: 356289 - DNA, 60 bp, Artificial
  Synthetic oligonucleotide
ccagtatatgtttggtcaccagggattatcatggaagggaatcattctgtgtgtgaaaaa

SEQ ID NO: 356290 - DNA, 60 bp, Artificial
  Synthetic oligonucleotide
ccagtatcatagcatgcagcgaggtcttggcctacgacatagtggtgtatgataaacagc

SEQ ID NO: 356291 - DNA, 60 bp, Artificial
  Synthetic oligonucleotide
ccagtatcatgcatacctggcagacgagactcatggctcaggggacaagtccagcatgcg

SEQ ID NO: 356292 - DNA, 55 bp, Artificial
  Synthetic oligonucleotide
ccagtatccaagctccttttcaggtagggtacttgttcgttccaggggctctagc

SEQ ID NO: 356293 - DNA, 60 bp, Artificial
  Synthetic oligonucleotide
ccagtatctccggcttactatctggttcaatatctagtctgtcatccgtgactgcaccag

SEQ ID NO: 356294 - DNA, 60 bp, Artificial
  Synthetic oligonucleotide
ccagtatctgcgacatgtagaggagtatgacctgtcctttatattccaagtgtgcgtggt

SEQ ID NO: 356295 - DNA, 60 bp, Artificial
  Synthetic oligonucleotide
ccagtatgacatatcagaaccctacaaactagacaaatacagctgccccaactatcaccc

SEQ ID NO: 356296 - DNA, 60 bp, Artificial
  Synthetic oligonucleotide
ccagtatgatctcagaggggatgagcgcatatgcttcgcgggagatgatatgtgctcgaa

SEQ ID NO: 356297 - DNA, 55 bp, Artificial
  Synthetic oligonucleotide
ccagtatgatgtatccacaaaagctgaagattgtggttccctaataatagcaacc

SEQ ID NO: 356298 - DNA, 54 bp, Artificial
  Synthetic oligonucleotide
ccagtatggcccaattcaagttggcataaacatggacagtccgagtgttgaggt

SEQ ID NO: 356299 - DNA, 58 bp, Artificial
  Synthetic oligonucleotide
ccagtatggcccagagttttccatggcccataacacgtccgtttcgacattcattagc

SEQ ID NO: 356300 - DNA, 55 bp, Artificial
  Synthetic oligonucleotide
ccagtatttatcgccgcacgggaacgacgtcggtccaatctagcttatttgttca

SEQ ID NO: 356301 - DNA, 56 bp, Artificial
  Synthetic oligonucleotide
ccagtatttattggtcagtttataggtgcagaacgcttttaagtgagacctacgac

SEQ ID NO: 356302 - DNA, 60 bp, Artificial
  Synthetic oligonucleotide
ccagtatttccaccaggcatgaattggactgagctgattactaactattcaccatctagg

SEQ ID NO: 356303 - DNA, 55 bp, Artificial
  Synthetic oligonucleotide
ccagtattttgcccactattgcagaaagtatgcacccttgtacgctactgaagcg

SEQ ID NO: 356304 - DNA, 60 bp, Artificial
  Synthetic oligonucleotide
ccagtattttttagctcaacatgctatagttgagaaaatgttgcagtacgccaaacatac

SEQ ID NO: 356305 - DNA, 55 bp, Artificial
  Synthetic oligonucleotide
ccagtcaaattactagttgaggagagtctcagtttcaaacaatttgtggacgcgc

SEQ ID NO: 356306 - DNA, 58 bp, Artificial
  Synthetic oligonucleotide
ccagtcaacaccggtgggctaaaggcagtcagcaatgccctcaagaccggtcggtata

SEQ ID NO: 356307 - DNA, 54 bp, Artificial
  Synthetic oligonucleotide
ccagtcaacgtaaggcggtcctttcgacgctcgtcggtaggtatggccgccgaa

SEQ ID NO: 356308 - DNA, 59 bp, Artificial
  Synthetic oligonucleotide
ccagtcaacgtttagtgtgggcctgcataggtttagaagtgggcagaggtcagccatta

SEQ ID NO: 356309 - DNA, 51 bp, Artificial
  Synthetic oligonucleotide
ccagtcaactcattaagggtatttccgtcattgtttactctcacacgctta

SEQ ID NO: 356310 - DNA, 60 bp, Artificial
  Synthetic oligonucleotide
ccagtcaagcaaagccaggtgaatttgtccattagggagaaattttcatatggtgcagtc

SEQ ID NO: 356311 - DNA, 60 bp, Artificial
  Synthetic oligonucleotide
ccagtcaagccaagacaacatttctcggcacatcttgaggatgacctcagaactcataat

SEQ ID NO: 356312 - DNA, 56 bp, Artificial
  Synthetic oligonucleotide
ccagtcaagcgtcggggtgacgtacgggtatgcaacggccgaggaccttgtgagcg

SEQ ID NO: 356313 - DNA, 57 bp, Artificial
  Synthetic oligonucleotide
ccagtcaaggatgttttagagaagggaataccaactctacaatcaccaactgttgaa

SEQ ID NO: 356314 - DNA, 59 bp, Artificial
  Synthetic oligonucleotide
ccagtcaagggcgcttttgtggagtttaccagcaagaggataattatcacgagcaataa

SEQ ID NO: 356315 - DNA, 60 bp, Artificial
  Synthetic oligonucleotide
ccagtcaaggtattccttgtcaactaggtctatcgatataacatcgccagtgtcatcctc

SEQ ID NO: 356316 - DNA, 55 bp, Artificial
  Synthetic oligonucleotide
ccagtcaagtagcctgaccacactagacagcttgggtcgcagtaggacaagttcc

SEQ ID NO: 356317 - DNA, 55 bp, Artificial
  Synthetic oligonucleotide
ccagtcaattcaactgaatatgcttcatggcaattatacgtcatacatcccgttc

SEQ ID NO: 356318 - DNA, 59 bp, Artificial
  Synthetic oligonucleotide
ccagtcaattggggtcatggagagataaatgattcaaccacagtagaaccaattttaga

SEQ ID NO: 356319 - DNA, 55 bp, Artificial
  Synthetic oligonucleotide
ccagtcacaagttcagatatgagaggtgcactagttacattctcaaggtacatgt

SEQ ID NO: 356320 - DNA, 55 bp, Artificial
  Synthetic oligonucleotide
ccagtcacaggtcaccgcaatatactggggcttctcttcccacccgataagctca

SEQ ID NO: 356321 - DNA, 55 bp, Artificial
  Synthetic oligonucleotide
ccagtcactcaccaaccttttgtcctccaacttgtcctggttatcgctggatgtg

SEQ ID NO: 356322 - DNA, 57 bp, Artificial
  Synthetic oligonucleotide
ccagtcactctatgcccatttgcctaccttgttacataacaaggttatttacctcca

SEQ ID NO: 356323 - DNA, 59 bp, Artificial
  Synthetic oligonucleotide
ccagtcactgagtgtcagacagaaagacacctcagtagagctttgactattctccaagc

SEQ ID NO: 356324 - DNA, 55 bp, Artificial
  Synthetic oligonucleotide
ccagtcagaactctgtgacgtgcccctgctaaccgtctacgcgaccgcagcggat

SEQ ID NO: 356325 - DNA, 60 bp, Artificial
  Synthetic oligonucleotide
ccagtcagatgggccgctcagggaggagcgtgcagggtacttgcagtacaaagctagggg

SEQ ID NO: 356326 - DNA, 53 bp, Artificial
  Synthetic oligonucleotide
ccagtcagatttacccagggattaaagtaaaacacctttgtagactcctcagg

SEQ ID NO: 356327 - DNA, 51 bp, Artificial
  Synthetic oligonucleotide
ccagtcagatttacccgggggttaaagtaaggcaactgtgtaaactcctta

SEQ ID NO: 356328 - DNA, 60 bp, Artificial
  Synthetic oligonucleotide
ccagtcagcaaactccacggaaactgttgacacactaatagagagcaatgttcctgtaac

SEQ ID NO: 356329 - DNA, 60 bp, Artificial
  Synthetic oligonucleotide
ccagtcagctatcattgtcaactgtgtttcctgagatcattgggaattgactaccttgac

SEQ ID NO: 356330 - DNA, 55 bp, Artificial
  Synthetic oligonucleotide
ccagtcaggcgcggggaactgcgtctgcgggcgtgattacgtgcacaccatccat

SEQ ID NO: 356331 - DNA, 59 bp, Artificial
  Synthetic oligonucleotide
ccagtcatagtccgtagcttgctcctgagacgtagacggtcctgccgacgtagacggtc

SEQ ID NO: 356332 - DNA, 55 bp, Artificial
  Synthetic oligonucleotide
ccagtcattgaagaaacaaactccgaagctgcactagagattgacatgttacaag

SEQ ID NO: 356333 - DNA, 60 bp, Artificial
  Synthetic oligonucleotide
ccagtcatttaatgttacagaccctcatatttctacaagtgcacttgaatggatcgatcc

SEQ ID NO: 356334 - DNA, 53 bp, Artificial
  Synthetic oligonucleotide
ccagtccacatgttgaaagggaaaagtttgaaaaagttagacaccttggatcc

SEQ ID NO: 356335 - DNA, 55 bp, Artificial
  Synthetic oligonucleotide
ccagtccacccatactcggcaactacactcaatgtatagaaggctccccagagtt

SEQ ID NO: 356336 - DNA, 55 bp, Artificial
  Synthetic oligonucleotide
ccagtccacccgacccccaagcccggtctatcctgcgacctgccttagctattcc

SEQ ID NO: 356337 - DNA, 60 bp, Artificial
  Synthetic oligonucleotide
ccagtccactctctcctgatccaaagaggcaagccccctatccatcttgaggaggactcc

SEQ ID NO: 356338 - DNA, 60 bp, Artificial
  Synthetic oligonucleotide
ccagtccatacaatgctagggtcgaatgcatagggtggtcaagcacgtcatgccatgacg

SEQ ID NO: 356339 - DNA, 55 bp, Artificial
  Synthetic oligonucleotide
ccagtccatatctggattagtaatagcaatacaaggtcttccgcctggaatgact

SEQ ID NO: 356340 - DNA, 55 bp, Artificial
  Synthetic oligonucleotide
ccagtcccaatgaggtctactgtattgtgcaaggtaaaatggggcaagatgccag

SEQ ID NO: 356341 - DNA, 53 bp, Artificial
  Synthetic oligonucleotide
ccagtccctcccccatccgagagaagggggactccggaacaccttccatccga

SEQ ID NO: 356342 - DNA, 54 bp, Artificial
  Synthetic oligonucleotide
ccagtccctttgggcccccatgaactccttaaagtgcttgaggaagtgcgggtc

SEQ ID NO: 356343 - DNA, 56 bp, Artificial
  Synthetic oligonucleotide
ccagtccctttgggctcccatgaattccttaaagtgctttaggtagtgcggatcta

SEQ ID NO: 356344 - DNA, 60 bp, Artificial
  Synthetic oligonucleotide
ccagtccgcacagatcagaccgggtaatcgcagtttattcgttatgccaacaagcccaga

SEQ ID NO: 356345 - DNA, 55 bp, Artificial
  Synthetic oligonucleotide
ccagtcctcaggacagcaacagtgcagggaccgagcctagactttgccctttccc

SEQ ID NO: 356346 - DNA, 55 bp, Artificial
  Synthetic oligonucleotide
ccagtccttgcccactaaggctctactacccgcttctcattcccgtcagctaacc

SEQ ID NO: 356347 - DNA, 55 bp, Artificial
  Synthetic oligonucleotide
ccagtcgaaagcgcttacttacaccaatgtattatcgttcgttgagtcgataaga

SEQ ID NO: 356348 - DNA, 58 bp, Artificial
  Synthetic oligonucleotide
ccagtcgagggtgtctccgtccttgtcgatataggacttgacgtcggagctggattta

SEQ ID NO: 356349 - DNA, 55 bp, Artificial
  Synthetic oligonucleotide
ccagtcgatgttctgacctttgaaacaatacagcgtagggtactgatacccaggg

SEQ ID NO: 356350 - DNA, 51 bp, Artificial
  Synthetic oligonucleotide
ccagtcgcaataaaagtagggggacagctaagagaagctttattagataca

SEQ ID NO: 356351 - DNA, 60 bp, Artificial
  Synthetic oligonucleotide
ccagtcgcatacactaaactacacgaagatcgtcacctaatccgtgatcgtctcacacac

SEQ ID NO: 356352 - DNA, 55 bp, Artificial
  Synthetic oligonucleotide
ccagtcgccgttagtggtggaagaaggctcgcagaattcgaaaatatccacacag

SEQ ID NO: 356353 - DNA, 51 bp, Artificial
  Synthetic oligonucleotide
ccagtcgcgctccacggctagcctcccacccttcgagaagaatgatgccgt

SEQ ID NO: 356354 - DNA, 60 bp, Artificial
  Synthetic oligonucleotide
ccagtcgcttagtgcatggattcttagcactcgtctgggacgatctacgcagcctgtgcc

SEQ ID NO: 356355 - DNA, 60 bp, Artificial
  Synthetic oligonucleotide
ccagtcggaatatccagtatggtggaggctatggtttcaagagcccgaattgatgcacgg

SEQ ID NO: 356356 - DNA, 55 bp, Artificial
  Synthetic oligonucleotide
ccagtcggaggccgtaaggtcgtccagaccttgaagttgagaaaacacttgtgaa

SEQ ID NO: 356357 - DNA, 55 bp, Artificial
  Synthetic oligonucleotide
ccagtcggatcaacagaagattctagcgtccacttcagctactaaccactcagac

SEQ ID NO: 356358 - DNA, 58 bp, Artificial
  Synthetic oligonucleotide
ccagtcggcaattgatcagataaccggaaaattaaatagactcattgagaaatctaat

SEQ ID NO: 356359 - DNA, 55 bp, Artificial
  Synthetic oligonucleotide
ccagtcgttggagtacaggttctcgccaagacgaacggagaccccattgtggttg

SEQ ID NO: 356360 - DNA, 56 bp, Artificial
  Synthetic oligonucleotide
ccagtctagttcaacttaggaagaaactagaacttttcacatatatcaggtttgat

SEQ ID NO: 356361 - DNA, 55 bp, Artificial
  Synthetic oligonucleotide
ccagtctataatggggttgggtcgcgtaatttccgccacaatgctggtaacgtct

SEQ ID NO: 356362 - DNA, 58 bp, Artificial
  Synthetic oligonucleotide
ccagtctcatttgagggcccaggcctagttgaagtccaagagagtgagtactacccca

SEQ ID NO: 356363 - DNA, 60 bp, Artificial
  Synthetic oligonucleotide
ccagtctccaagggtcgatcctctgatctggccgaagcgacatccgctgtgatggctggc

SEQ ID NO: 356364 - DNA, 55 bp, Artificial
  Synthetic oligonucleotide
ccagtctccgcggactggtactgggcctaaatttgataaggcccatgcctgggta

SEQ ID NO: 356365 - DNA, 55 bp, Artificial
  Synthetic oligonucleotide
ccagtctcgatactctatctgtccttgcaaggttatcgggtgatagcgccctagt

SEQ ID NO: 356366 - DNA, 60 bp, Artificial
  Synthetic oligonucleotide
ccagtctcggctgcccgtgatcagaatccgtctcatcgaaagtccgtacgtagtcaagta

SEQ ID NO: 356367 - DNA, 55 bp, Artificial
  Synthetic oligonucleotide
ccagtctgaagtagtagcaggaaggtcaggggaattaactcccatccttggattc

SEQ ID NO: 356368 - DNA, 55 bp, Artificial
  Synthetic oligonucleotide
ccagtctgcttaaagtaccctactttgtgcgcgtccaaggccttctccggttctg

SEQ ID NO: 356369 - DNA, 55 bp, Artificial
  Synthetic oligonucleotide
ccagtctggggatttatgacagaatatgcgtggttcccactcactcgcagcctga

SEQ ID NO: 356370 - DNA, 55 bp, Artificial
  Synthetic oligonucleotide
ccagtcttcaatggtttgcgacatgaagctgtcgtaccgcagagtcctattccag

SEQ ID NO: 356371 - DNA, 55 bp, Artificial
  Synthetic oligonucleotide
ccagtcttgatgttcgggctagtttcacaccccttaatgttaaggttgctggacc

SEQ ID NO: 356372 - DNA, 55 bp, Artificial
  Synthetic oligonucleotide
ccagtcttggttctaaactgggaaattttgcaataatgaggttctctggtgaagc

SEQ ID NO: 356373 - DNA, 55 bp, Artificial
  Synthetic oligonucleotide
ccagtgaaactccagcagtatggtcaacatatgatgttaactttcattatagcgg

SEQ ID NO: 356374 - DNA, 58 bp, Artificial
  Synthetic oligonucleotide
ccagtgacacctacagtggcggtcaggtaccccggagcaaccactgcttcggtacgca

SEQ ID NO: 356375 - DNA, 60 bp, Artificial
  Synthetic oligonucleotide
ccagtgaccagattttgattgagaatgcagctggtcatcgtgtctgtatttctacttaca

SEQ ID NO: 356376 - DNA, 57 bp, Artificial
  Synthetic oligonucleotide
ccagtgacccacgaataacagcatttgcagactactattcgaaatggtttcttaagg

SEQ ID NO: 356377 - DNA, 55 bp, Artificial
  Synthetic oligonucleotide
ccagtgaggctcagttgtttaataggccatactggatacagagatctcagggtca

SEQ ID NO: 356378 - DNA, 55 bp, Artificial
  Synthetic oligonucleotide
ccagtgaggctttggtctcaactcaccactgaagggaaaccgcacggctggccgc

SEQ ID NO: 356379 - DNA, 56 bp, Artificial
  Synthetic oligonucleotide
ccagtgagggagggaattacagtgaatatagattaataaattgtaatacctcagcc

SEQ ID NO: 356380 - DNA, 52 bp, Artificial
  Synthetic oligonucleotide
ccagtgataccccaagaggggtagacgcccaatttactggttcatgcacaag

SEQ ID NO: 356381 - DNA, 60 bp, Artificial
  Synthetic oligonucleotide
ccagtgatactccaagaggggaagatgcccaatttattgggtcatgcactagccccatgg

SEQ ID NO: 356382 - DNA, 55 bp, Artificial
  Synthetic oligonucleotide
ccagtgatcatgcttggagattccataacattagaggcagaccccatcccgaact

SEQ ID NO: 356383 - DNA, 60 bp, Artificial
  Synthetic oligonucleotide
ccagtgatctggcccacattgttttaccagtacgactatcaccttctatcacaatgcttt

SEQ ID NO: 356384 - DNA, 59 bp, Artificial
  Synthetic oligonucleotide
ccagtgatggggctgtagcaatacaactttcaggcgctatcgcccgaaaaatggaggag

SEQ ID NO: 356385 - DNA, 60 bp, Artificial
  Synthetic oligonucleotide
ccagtgatgttggatggacatctcatagcatttgactactcaggttatgacgccagctta

SEQ ID NO: 356386 - DNA, 55 bp, Artificial
  Synthetic oligonucleotide
ccagtgattacacataatgtaacagtgagcattctggcaaattgcacggtgcagc

SEQ ID NO: 356387 - DNA, 56 bp, Artificial
  Synthetic oligonucleotide
ccagtgattagggcggtatcgggacatgtgagggacgtttctagagacgtcaaaaa

SEQ ID NO: 356388 - DNA, 55 bp, Artificial
  Synthetic oligonucleotide
ccagtgattcttagaccaaataacgttgaaatagagtttctactaaacgggcaga

SEQ ID NO: 356389 - DNA, 55 bp, Artificial
  Synthetic oligonucleotide
ccagtgattgcaagacacacccttcttgcacgggtatcacagccggactgcggtg

SEQ ID NO: 356390 - DNA, 60 bp, Artificial
  Synthetic oligonucleotide
ccagtgcaaaggttgcaactggaatcgcgtgtgaggagtcacgcgcgaatgtggggatac

SEQ ID NO: 356391 - DNA, 55 bp, Artificial
  Synthetic oligonucleotide
ccagtgcaataagtatggacaccgccgaaccatcagagagtaagtagcgccctct

SEQ ID NO: 356392 - DNA, 55 bp, Artificial
  Synthetic oligonucleotide
ccagtgcaattaagtacatagagagacctccaaatgaatactacatgaacaacac

SEQ ID NO: 356393 - DNA, 58 bp, Artificial
  Synthetic oligonucleotide
ccagtgcagataaactgcgttacggtagtgaatttacgtgtgttaggtctaagcagag

SEQ ID NO: 356394 - DNA, 55 bp, Artificial
  Synthetic oligonucleotide
ccagtgcagccgctttacagcctgtggctggactcattaggaatccaacggataa

SEQ ID NO: 356395 - DNA, 55 bp, Artificial
  Synthetic oligonucleotide
ccagtgcagggtaccactctccacatgttttcagtgggtggagagcctcttgaac

SEQ ID NO: 356396 - DNA, 60 bp, Artificial
  Synthetic oligonucleotide
ccagtgcatgcagggcctatcccaccaggccagatgagggaacctaggggaagtgacata

SEQ ID NO: 356397 - DNA, 60 bp, Artificial
  Synthetic oligonucleotide
ccagtgcatggtgtatactatcaacctgataaagacttatgggttaatattcagaagcaa

SEQ ID NO: 356398 - DNA, 55 bp, Artificial
  Synthetic oligonucleotide
ccagtgcatttggaagggacacaagcagtacagtatatggttgagttttgcccag

SEQ ID NO: 356399 - DNA, 55 bp, Artificial
  Synthetic oligonucleotide
ccagtgccaagtggacattcccacctggggaactaaacatcctttggggatgctt

SEQ ID NO: 356400 - DNA, 55 bp, Artificial
  Synthetic oligonucleotide
ccagtgccagcgtattaactttgtctgttggcggtactagcattgcaactctgcc

SEQ ID NO: 356401 - DNA, 55 bp, Artificial
  Synthetic oligonucleotide
ccagtgccgcggttaaggcagcctgttggtgggcaggtatcaaacaggaatttgg

SEQ ID NO: 356402 - DNA, 58 bp, Artificial
  Synthetic oligonucleotide
ccagtgcgacttttcgtcaaacaggaacctcattctcggcagaagattgaacaaggtc

SEQ ID NO: 356403 - DNA, 59 bp, Artificial
  Synthetic oligonucleotide
ccagtgcggcactactgtgtctcactaattggttaacgatttcgcggcgatttatcgtc

SEQ ID NO: 356404 - DNA, 59 bp, Artificial
  Synthetic oligonucleotide
ccagtgcgttgattaaacataggataccgaattcgagagacgagtatcactgcatttcg

SEQ ID NO: 356405 - DNA, 56 bp, Artificial
  Synthetic oligonucleotide
ccagtgcgttgtgggccgtaagactgtggttacttcgtcacgctacattacgtttc

SEQ ID NO: 356406 - DNA, 55 bp, Artificial
  Synthetic oligonucleotide
ccagtgctaaacaatgaggatattgacccaatagaatatcggacaccatcgtggc

SEQ ID NO: 356407 - DNA, 60 bp, Artificial
  Synthetic oligonucleotide
ccagtgctacagacgatgcacaaaaggactccatctatgcttctgctctagtggaggcaa

SEQ ID NO: 356408 - DNA, 58 bp, Artificial
  Synthetic oligonucleotide
ccagtgctaccgctattggagcccagttgaaggaacaactctagaaattggaagtcta

SEQ ID NO: 356409 - DNA, 53 bp, Artificial
  Synthetic oligonucleotide
ccagtgctcctatgagaccccaaagcccaccatgattctcatgtatgtgtttt

SEQ ID NO: 356410 - DNA, 55 bp, Artificial
  Synthetic oligonucleotide
ccagtgctgcagttaaagcagcctgttggtgggcaggtgtcaggcaagaatttgg

SEQ ID NO: 356411 - DNA, 59 bp, Artificial
  Synthetic oligonucleotide
ccagtgctggttataaccatgatgtgtctatccttcgggcctggattcgtactactaaa

SEQ ID NO: 356412 - DNA, 60 bp, Artificial
  Synthetic oligonucleotide
ccagtgctttaactttagatagtgcggtgcgacgtcatcaatgacgttatactccactcc

SEQ ID NO: 356413 - DNA, 53 bp, Artificial
  Synthetic oligonucleotide
ccagtggaacatacaggctactaaattgtaatacctcaaccattacacaggct

SEQ ID NO: 356414 - DNA, 60 bp, Artificial
  Synthetic oligonucleotide
ccagtggaacgattggaaggcaaaaacaccatcgaactgattcaggcagaagcgagagat

SEQ ID NO: 356415 - DNA, 60 bp, Artificial
  Synthetic oligonucleotide
ccagtggacactgacaattggtacgaaagcgggtcgattgtagatgtacaattatgctac

SEQ ID NO: 356416 - DNA, 50 bp, Artificial
  Synthetic oligonucleotide
ccagtggacatggttatatgaacagggcagagttcgaggctttggtgcca

SEQ ID NO: 356417 - DNA, 57 bp, Artificial
  Synthetic oligonucleotide
ccagtggagagcctgtttctttaaccccatagatccttatatccccagaggcgccaa

SEQ ID NO: 356418 - DNA, 56 bp, Artificial
  Synthetic oligonucleotide
ccagtggaggctataccggctccacagccacctagccccctcaataccagttaccc

SEQ ID NO: 356419 - DNA, 55 bp, Artificial
  Synthetic oligonucleotide
ccagtggagggagagacacacgcccctgctccatttggttcaggggatagccgat

SEQ ID NO: 356420 - DNA, 60 bp, Artificial
  Synthetic oligonucleotide
ccagtggataagctcggagtgtaccactccatgctccggttcctggctaagggacatctg

SEQ ID NO: 356421 - DNA, 55 bp, Artificial
  Synthetic oligonucleotide
ccagtggatccagagaaggtagaagaggccaacgaaggagagaacaacacattgc

SEQ ID NO: 356422 - DNA, 60 bp, Artificial
  Synthetic oligonucleotide
ccagtggatgaacaggctcatagcattcgcatcccggggcaaccacgtctcaccagcgca

SEQ ID NO: 356423 - DNA, 55 bp, Artificial
  Synthetic oligonucleotide
ccagtggcaacgtctacaaaatactatcaatttacagctgcattgcaagcagtct

SEQ ID NO: 356424 - DNA, 60 bp, Artificial
  Synthetic oligonucleotide
ccagtggcataccagccaaggacttctcgctgctacgggtagtgaactgaagcagattcg

SEQ ID NO: 356425 - DNA, 60 bp, Artificial
  Synthetic oligonucleotide
ccagtggcatgcctaactttggaaacaacagcccacgagatgaacatcagcgggagaggg

SEQ ID NO: 356426 - DNA, 60 bp, Artificial
  Synthetic oligonucleotide
ccagtggccctgttgataactcctgtgagaataccctccactgtcctggcagaatacctg

SEQ ID NO: 356427 - DNA, 60 bp, Artificial
  Synthetic oligonucleotide
ccagtggctggtggaacaagcagcgtgtatattgaggtgttgcacttgacccaagggaca

SEQ ID NO: 356428 - DNA, 58 bp, Artificial
  Synthetic oligonucleotide
ccagtggtaatctgacatttggtggggtttcaaatcgtgcccgtgagcctagagctct

SEQ ID NO: 356429 - DNA, 58 bp, Artificial
  Synthetic oligonucleotide
ccagtggtatcaactcaattactactaaatggtagtctagcagaaggagaaatagtaa

SEQ ID NO: 356430 - DNA, 55 bp, Artificial
  Synthetic oligonucleotide
ccagtggtcaccttctacggaccagaacaggacaagatgccagaggtggcaggcc

SEQ ID NO: 356431 - DNA, 55 bp, Artificial
  Synthetic oligonucleotide
ccagtggtgataatgatgtgtggccctcctggtataggcaagacgaaggctgccg

SEQ ID NO: 356432 - DNA, 53 bp, Artificial
  Synthetic oligonucleotide
ccagtggtgcacgggtgtccattaccacctactaaggcccccccaataccacc

SEQ ID NO: 356433 - DNA, 58 bp, Artificial
  Synthetic oligonucleotide
ccagtggtgtcaactcaactactgttaaacggtagcatagcagaagaagggataataa

SEQ ID NO: 356434 - DNA, 55 bp, Artificial
  Synthetic oligonucleotide
ccagtggtgttatgcacaaacacttctgtttccccggagcgaggtatagacggtc

SEQ ID NO: 356435 - DNA, 55 bp, Artificial
  Synthetic oligonucleotide
ccagtggttttgaatgaagttgtctttgaggcttttgaaagagcaattactggcg

SEQ ID NO: 356436 - DNA, 51 bp, Artificial
  Synthetic oligonucleotide
ccagtgtaacactccccaccaaatgtatttctgtgctgtctacgttcaacg

SEQ ID NO: 356437 - DNA, 54 bp, Artificial
  Synthetic oligonucleotide
ccagtgtaccatcacccacagggtaccaaagaccctctcccgacgacttggacc

SEQ ID NO: 356438 - DNA, 51 bp, Artificial
  Synthetic oligonucleotide
ccagtgtactgtttcacccctagcccggtggtagtgggcacgaccgataga

SEQ ID NO: 356439 - DNA, 55 bp, Artificial
  Synthetic oligonucleotide
ccagtgtattatcacgagtggtatctataagacacttggagaatttggtaatacg

SEQ ID NO: 356440 - DNA, 50 bp, Artificial
  Synthetic oligonucleotide
ccagtgtccgcactcgtccgtctaaccttggcattaggccagagaggggc

SEQ ID NO: 356441 - DNA, 56 bp, Artificial
  Synthetic oligonucleotide
ccagtgtcgataaagtccagggacattacatacactagagcacaagcaaacgaaga

SEQ ID NO: 356442 - DNA, 59 bp, Artificial
  Synthetic oligonucleotide
ccagtgtgctgcactaatgattgcagatatcagaggtgatctatctgtcctacaagtac

SEQ ID NO: 356443 - DNA, 58 bp, Artificial
  Synthetic oligonucleotide
ccagtgtgtactcacttccaccagacccggatcactttgatggatataagcagcaagt

SEQ ID NO: 356444 - DNA, 54 bp, Artificial
  Synthetic oligonucleotide
ccagtgtgtaggcagtcgtaacgggcaactgtgggacggaaccgactactttgg

SEQ ID NO: 356445 - DNA, 55 bp, Artificial
  Synthetic oligonucleotide
ccagtgtgtgtaagtatcccgactatttgaaaatggcctctgaaccctatgggga

SEQ ID NO: 356446 - DNA, 53 bp, Artificial
  Synthetic oligonucleotide
ccagtgttacctttatacctcccatggctgatttacccgataaaggcaaaccc

SEQ ID NO: 356447 - DNA, 60 bp, Artificial
  Synthetic oligonucleotide
ccagtgttgaaaacgtgcaaatctctatagacgcaacattgcctgagtctgtggaagcag

SEQ ID NO: 356448 - DNA, 59 bp, Artificial
  Synthetic oligonucleotide
ccagtgttgcgcgcagtggttacacaagggcccaacaccgaatttgcattatcattgct

SEQ ID NO: 356449 - DNA, 56 bp, Artificial
  Synthetic oligonucleotide
ccagtgttgtggtgacactacacctatagtgcatttaaaaggtgacaaaaatggtt

SEQ ID NO: 356450 - DNA, 55 bp, Artificial
  Synthetic oligonucleotide
ccagttaaagactgggttccaagtggtgcttccagcaccaaagatgagctgcagc

SEQ ID NO: 356451 - DNA, 59 bp, Artificial
  Synthetic oligonucleotide
ccagttaaagatttgatgttgaaaggtgctccggcattgaactcacctaatgtcgaggc

SEQ ID NO: 356452 - DNA, 55 bp, Artificial
  Synthetic oligonucleotide
ccagttaaatttcaaggcaagagtagacgccgacttcaattcagaaaagcaaggg

SEQ ID NO: 356453 - DNA, 56 bp, Artificial
  Synthetic oligonucleotide
ccagttaactgtggttggttaaagtcagtcagcaatgtcttcaagaccggccggta

SEQ ID NO: 356454 - DNA, 55 bp, Artificial
  Synthetic oligonucleotide
ccagttaattggggacacggtgaattatccgattcaacattagtccagccgacgt

SEQ ID NO: 356455 - DNA, 60 bp, Artificial
  Synthetic oligonucleotide
ccagttacaagttaagttagcagatccatcagatggatttggagattccctggtcgctgt

SEQ ID NO: 356456 - DNA, 55 bp, Artificial
  Synthetic oligonucleotide
ccagttacacaggctaatctacagactcttgtctcgaaacctcaaggtcactacg

SEQ ID NO: 356457 - DNA, 55 bp, Artificial
  Synthetic oligonucleotide
ccagttacagttctcatctagctagaatggcgggtgtatccttctcagccagtcg

SEQ ID NO: 356458 - DNA, 55 bp, Artificial
  Synthetic oligonucleotide
ccagttacttgactagaccagatacgtggaatccatcaaccctatgggagacagg

SEQ ID NO: 356459 - DNA, 53 bp, Artificial
  Synthetic oligonucleotide
ccagttagataacgacaggcccccaaagtgtttcgaaaatagaagtaaaatga

SEQ ID NO: 356460 - DNA, 55 bp, Artificial
  Synthetic oligonucleotide
ccagttagctttgaagggcctggcctcgtggaggtccaagaaagtgaatactacc

SEQ ID NO: 356461 - DNA, 55 bp, Artificial
  Synthetic oligonucleotide
ccagttaggttccacacgagcgccgcgctggaaacaaagaaaacaggagccctga

SEQ ID NO: 356462 - DNA, 55 bp, Artificial
  Synthetic oligonucleotide
ccagttatgactaacggtgtgtcaacgagcctactagcgatgtgcactgtcaagc

SEQ ID NO: 356463 - DNA, 52 bp, Artificial
  Synthetic oligonucleotide
ccagttatgggttgagaagttgtaacacctcagtcattacacagtcctgtcc

SEQ ID NO: 356464 - DNA, 55 bp, Artificial
  Synthetic oligonucleotide
ccagttatgtatgctcagggctcgttggtgacacacccagaaatgacgacagctc

SEQ ID NO: 356465 - DNA, 60 bp, Artificial
  Synthetic oligonucleotide
ccagttatgtcaggaggcgctgtatcgttgcatccttctggagtaacactatcaactcaa

SEQ ID NO: 356466 - DNA, 55 bp, Artificial
  Synthetic oligonucleotide
ccagttcaaacatgaagatttcggagtagttgaccatgacgtctttatgataact

SEQ ID NO: 356467 - DNA, 60 bp, Artificial
  Synthetic oligonucleotide
ccagttcaacagaggctaagcatgtatttagccctggattatttccacagcttaatcata

SEQ ID NO: 356468 - DNA, 58 bp, Artificial
  Synthetic oligonucleotide
ccagttcaagtctgtggaattcaacatgtcagtgctcaacttgacaatgcccaatgct

SEQ ID NO: 356469 - DNA, 52 bp, Artificial
  Synthetic oligonucleotide
ccagttcagacgcaaattagacgtctgctggctggtactccccgtacacccc

SEQ ID NO: 356470 - DNA, 54 bp, Artificial
  Synthetic oligonucleotide
ccagttcccccccacgccaataggagccgggttaagtgtcctgattgtgaaatg

SEQ ID NO: 356471 - DNA, 56 bp, Artificial
  Synthetic oligonucleotide
ccagttcctaaaccgagaactttcgtacataagagcttctcacctggtcgatttga

SEQ ID NO: 356472 - DNA, 50 bp, Artificial
  Synthetic oligonucleotide
ccagttcctgctgatcctccaactaccttcaatccaatgccacagactag

SEQ ID NO: 356473 - DNA, 60 bp, Artificial
  Synthetic oligonucleotide
ccagttcgggcagaacttgaatgggatgtcgtcgatgatgttgtatgctgcctgttcgtc

SEQ ID NO: 356474 - DNA, 58 bp, Artificial
  Synthetic oligonucleotide
ccagttcgggccagtagtggccctaaatccagctacgctgctccctctgcctaaggag

SEQ ID NO: 356475 - DNA, 52 bp, Artificial
  Synthetic oligonucleotide
ccagttcgggtcacaccgcaagaggttagatgcgaagccctcataccggcaa

SEQ ID NO: 356476 - DNA, 54 bp, Artificial
  Synthetic oligonucleotide
ccagttctagggagggggaccactgccccctggtataaagtggcccagcaacta

SEQ ID NO: 356477 - DNA, 54 bp, Artificial
  Synthetic oligonucleotide
ccagttcttaactagtattggtaacctgcagagtacaataacctcgtggacccc

SEQ ID NO: 356478 - DNA, 56 bp, Artificial
  Synthetic oligonucleotide
ccagttgaaattccattacaacctatacgaccatcagttgttacgtctgttgggcc

SEQ ID NO: 356479 - DNA, 57 bp, Artificial
  Synthetic oligonucleotide
ccagttgaagggaaaaagaagccttgcgcaggtgaaggcactcttcggagacctcaa

SEQ ID NO: 356480 - DNA, 50 bp, Artificial
  Synthetic oligonucleotide
ccagttgaccgcgacgagacgccagacatgggtgccgtggtatcgaaacg

SEQ ID NO: 356481 - DNA, 55 bp, Artificial
  Synthetic oligonucleotide
ccagttgagacctcaggttgtggttgaactgaatctgtaacgttattatgtcctg

SEQ ID NO: 356482 - DNA, 60 bp, Artificial
  Synthetic oligonucleotide
ccagttgagtatatagaagattgttgtaacacttacgacaaatcttctgcaacgctgaga

SEQ ID NO: 356483 - DNA, 58 bp, Artificial
  Synthetic oligonucleotide
ccagttgatatgctttggcaacagatagtcatacaatacacaacaatcattagatcac

SEQ ID NO: 356484 - DNA, 55 bp, Artificial
  Synthetic oligonucleotide
ccagttgatattatttacatggaacagtctgacggggatgaagtcagtggagagt

SEQ ID NO: 356485 - DNA, 60 bp, Artificial
  Synthetic oligonucleotide
ccagttgcatatgaaaaggatgctgactgtcccaactggaaagcattcatggagagtatt

SEQ ID NO: 356486 - DNA, 55 bp, Artificial
  Synthetic oligonucleotide
ccagttgcatctatcaagtgttacagtgccgtcgctcatgaaatgcacgagctca

SEQ ID NO: 356487 - DNA, 55 bp, Artificial
  Synthetic oligonucleotide
ccagttgcatgggccttatatacaacagaatgggaactgtgaccactgaaggggc

SEQ ID NO: 356488 - DNA, 58 bp, Artificial
  Synthetic oligonucleotide
ccagttgcatgggtctcatatacaaccgaatgggaacggtaaccacagaagtggctct

SEQ ID NO: 356489 - DNA, 55 bp, Artificial
  Synthetic oligonucleotide
ccagttgcatttaaacctccgaatgattattggatactagttaactcgaattcta

SEQ ID NO: 356490 - DNA, 56 bp, Artificial
  Synthetic oligonucleotide
ccagttgcccagggacgaccaagattttcgtcctttggtaaacatatgagagcgta

SEQ ID NO: 356491 - DNA, 60 bp, Artificial
  Synthetic oligonucleotide
ccagttggacaatggccagttctaactggaggagccgtttcattgcattcagcaggtgtt

SEQ ID NO: 356492 - DNA, 55 bp, Artificial
  Synthetic oligonucleotide
ccagttggagtcttaccaaagccctttgattgggtagttaagaacattagcttca

SEQ ID NO: 356493 - DNA, 55 bp, Artificial
  Synthetic oligonucleotide
ccagttggccgtgctctgctcttaccggagtattctactctacgcaggcgctggc

SEQ ID NO: 356494 - DNA, 55 bp, Artificial
  Synthetic oligonucleotide
ccagttgtatgggcctcatatacaacagaatggggactgtgacgaccgagagcgc

SEQ ID NO: 356495 - DNA, 59 bp, Artificial
  Synthetic oligonucleotide
ccagttgtcaaaacatgtggatgattctgttattaacatatggtcatacaacgcacagc

SEQ ID NO: 356496 - DNA, 59 bp, Artificial
  Synthetic oligonucleotide
ccagttgtcaatggtggctgggtccctcagaagtggcgtggtagtaggatgaggactgg

SEQ ID NO: 356497 - DNA, 59 bp, Artificial
  Synthetic oligonucleotide
ccagttgtcttctcccaaatggagaccaagctcatcacgtggggggcagacaccgccgc

SEQ ID NO: 356498 - DNA, 60 bp, Artificial
  Synthetic oligonucleotide
ccagtttaatggtattgcttggcgcgatgcactcctcagctccttcgtcaccgtcccacc

SEQ ID NO: 356499 - DNA, 55 bp, Artificial
  Synthetic oligonucleotide
ccagtttaccgcatatataacagattgcaaggttacatagaggctgtacagctac

SEQ ID NO: 356500 - DNA, 58 bp, Artificial
  Synthetic oligonucleotide
ccagtttactctaccaagctgtgcaggcactactggatgggaactgtgccggtcaaca

SEQ ID NO: 356501 - DNA, 55 bp, Artificial
  Synthetic oligonucleotide
ccagtttagagtggtgtgagggtggcgtattagatacacttgaatatagatttgg

SEQ ID NO: 356502 - DNA, 55 bp, Artificial
  Synthetic oligonucleotide
ccagtttatagaatcccctatagacgtatcattctgctttcttggtgggtagccg

SEQ ID NO: 356503 - DNA, 58 bp, Artificial
  Synthetic oligonucleotide
ccagtttcaaccggatcacactcaagcgagggtgccatatttgccttccaactcgacc

SEQ ID NO: 356504 - DNA, 60 bp, Artificial
  Synthetic oligonucleotide
ccagtttcaaggacgttgatcgtgattcatgcaagggtgtttatgataacataagcaaga

SEQ ID NO: 356505 - DNA, 51 bp, Artificial
  Synthetic oligonucleotide
ccagtttcagaaataaacctggtaagacaaagtgactgtgtttgtgtgccg

SEQ ID NO: 356506 - DNA, 55 bp, Artificial
  Synthetic oligonucleotide
ccagtttccctgcctccactcccttggaactgatgaccaatcttgacaccagctt

SEQ ID NO: 356507 - DNA, 55 bp, Artificial
  Synthetic oligonucleotide
ccagtttgagatggggaggtgggagtctctatccacatttgctgcctctctgctg

SEQ ID NO: 356508 - DNA, 55 bp, Artificial
  Synthetic oligonucleotide
ccagtttggagctacgttagacgttgattcttggaatgtaggaattgtttggtac

SEQ ID NO: 356509 - DNA, 55 bp, Artificial
  Synthetic oligonucleotide
ccagtttgtccactctacgtactaattatgatggtacttccacttctagtccctt

SEQ ID NO: 356510 - DNA, 55 bp, Artificial
  Synthetic oligonucleotide
ccagtttgtggctaagacccttataattacctctaatagggagccgcgtgattgg

SEQ ID NO: 356511 - DNA, 55 bp, Artificial
  Synthetic oligonucleotide
ccagttttatactccctttcccaaatgtaacttagaagcaaagcaaactgatcaa

SEQ ID NO: 356512 - DNA, 56 bp, Artificial
  Synthetic oligonucleotide
ccataaaaggtctttgcccaggttctacatagactgtgatttggacacctttgatt

SEQ ID NO: 356513 - DNA, 55 bp, Artificial
  Synthetic oligonucleotide
ccataaactttaacgcatcctcaggaggggacctagaaattgcaccacatagttt

SEQ ID NO: 356514 - DNA, 50 bp, Artificial
  Synthetic oligonucleotide
ccataaagacgctcttgatgtcgttaaccttccatcaggtgaagagactt

SEQ ID NO: 356515 - DNA, 60 bp, Artificial
  Synthetic oligonucleotide
ccataaagagattgaatccgtaaataatgccgtggtgatgcccgctcacggcccagccaa

SEQ ID NO: 356516 - DNA, 55 bp, Artificial
  Synthetic oligonucleotide
ccataaagaggagttacaacaacaccaaccaggaagatcttttgatactgtgggg

SEQ ID NO: 356517 - DNA, 60 bp, Artificial
  Synthetic oligonucleotide
ccataaagctaagcatgtgaaagcatggtgtcccagaccacccagagctgttccatacag

SEQ ID NO: 356518 - DNA, 55 bp, Artificial
  Synthetic oligonucleotide
ccataaatcagatcacgtctgatctcactgagtacctattctacgactccgccct

SEQ ID NO: 356519 - DNA, 55 bp, Artificial
  Synthetic oligonucleotide
ccataaatggaactgaggtcgccagtacctcacgacagcctggaacccctctggt

SEQ ID NO: 356520 - DNA, 58 bp, Artificial
  Synthetic oligonucleotide
ccataacacaagcctgtccaaaggtcacttttgacccaattcctatacattattgtgc

SEQ ID NO: 356521 - DNA, 52 bp, Artificial
  Synthetic oligonucleotide
ccataacagcaacgcactgctctctggaggtgtcggcccagactccagaggg

SEQ ID NO: 356522 - DNA, 55 bp, Artificial
  Synthetic oligonucleotide
ccataacagcggtcggtccatccacaacattcgtgccaacagctactacaccggt

SEQ ID NO: 356523 - DNA, 55 bp, Artificial
  Synthetic oligonucleotide
ccataacatgggatttagccttgcattgagtatcctgtgtcgggcgctgaccagg

SEQ ID NO: 356524 - DNA, 60 bp, Artificial
  Synthetic oligonucleotide
ccataaccactgagcgactgctttcagggctacgactgtataactctgccacagatcagc

SEQ ID NO: 356525 - DNA, 54 bp, Artificial
  Synthetic oligonucleotide
ccataacgctaaaatactccgaagaacgtttatactagagacgtctgatgagat

SEQ ID NO: 356526 - DNA, 55 bp, Artificial
  Synthetic oligonucleotide
ccataacgctatccggtagttgaattgtttcaacgtcatctgaagttagcggatc

SEQ ID NO: 356527 - DNA, 54 bp, Artificial
  Synthetic oligonucleotide
ccataacgctggagacatcctggaaggggaaagaggtaagacggaagagaaggg

SEQ ID NO: 356528 - DNA, 52 bp, Artificial
  Synthetic oligonucleotide
ccataacggaaagttatgcaaactaaacggaatccctccacttgaactaggg

SEQ ID NO: 356529 - DNA, 55 bp, Artificial
  Synthetic oligonucleotide
ccataactcggaaagcatcgagctctccacattgtgcgtatgtgagcaagacata

SEQ ID NO: 356530 - DNA, 57 bp, Artificial
  Synthetic oligonucleotide
ccataactgcatcctcggaggaaattggacttgtgtgcctggagacatgctattata

SEQ ID NO: 356531 - DNA, 60 bp, Artificial
  Synthetic oligonucleotide
ccataacttattcgtcatcaatgatgtgggagatcaacggtcctgagtcagtgctgatca

SEQ ID NO: 356532 - DNA, 55 bp, Artificial
  Synthetic oligonucleotide
ccataacttctcaggacatcgcaaatgcagtagttgcatatggagtttggccaca

SEQ ID NO: 356533 - DNA, 60 bp, Artificial
  Synthetic oligonucleotide
ccataagaaaagccatattaggacacatagttactcctaggtgtgattatcaagcaggac

SEQ ID NO: 356534 - DNA, 59 bp, Artificial
  Synthetic oligonucleotide
ccataagacaagaaatggccagtagaggtctctgggattcctttcgtcagtccgagaga

SEQ ID NO: 356535 - DNA, 60 bp, Artificial
  Synthetic oligonucleotide
ccataagacaagccattttagggcatatagttaatcctaggtgtgactatcaagcaggac

SEQ ID NO: 356536 - DNA, 59 bp, Artificial
  Synthetic oligonucleotide
ccataagatgcttgatttcgtagtggtgcgtgtgccaaaacacgtgtggtccaaactag

SEQ ID NO: 356537 - DNA, 55 bp, Artificial
  Synthetic oligonucleotide
ccataagatgggtggcagcatgttgcaacttgcccgaagtagagacattggtcgc

SEQ ID NO: 356538 - DNA, 55 bp, Artificial
  Synthetic oligonucleotide
ccataagcaccacattcccgtatactggagatcctccatacagccatgggacagg

SEQ ID NO: 356539 - DNA, 55 bp, Artificial
  Synthetic oligonucleotide
ccataagcagcctctgtcgcgccgttcgcatcatcagtgacacaactgatccaga

SEQ ID NO: 356540 - DNA, 55 bp, Artificial
  Synthetic oligonucleotide
ccataagcctagggatggaaaggagatgaccattaccagcccatcatccgagatg

SEQ ID NO: 356541 - DNA, 55 bp, Artificial
  Synthetic oligonucleotide
ccataagctgtcgccatgtaatcgttcgtctccgttaaaatcacatagttgtccg

SEQ ID NO: 356542 - DNA, 59 bp, Artificial
  Synthetic oligonucleotide
ccataaggaaagccatattaggacacatagttatccctaggtgtgactatccagcggga

SEQ ID NO: 356543 - DNA, 55 bp, Artificial
  Synthetic oligonucleotide
ccataagtttaacagctcggggtgtcctgagcggcttgcaagctgccgccggctc

SEQ ID NO: 356544 - DNA, 56 bp, Artificial
  Synthetic oligonucleotide
ccataatagtacagctaaatgaagctgtaaacattacttgcataagaccccacaac

SEQ ID NO: 356545 - DNA, 60 bp, Artificial
  Synthetic oligonucleotide
ccataatcttgcgagcattgcgatatgcagccatatatcgcttagcgttcatgtcgacta

SEQ ID NO: 356546 - DNA, 60 bp, Artificial
  Synthetic oligonucleotide
ccataatgatgttatcatgtctgcatggattcttcagaatgttgattcgtgtattaggtt

SEQ ID NO: 356547 - DNA, 60 bp, Artificial
  Synthetic oligonucleotide
ccataatgcctcatcaggagtgagcgcagcatgcccgtccaatggtagatcttccttttt

SEQ ID NO: 356548 - DNA, 55 bp, Artificial
  Synthetic oligonucleotide
ccataattccaggataaccggagtactacatcccaggtgcttagaggaactggtt

SEQ ID NO: 356549 - DNA, 60 bp, Artificial
  Synthetic oligonucleotide
ccataattggtgatatgctggagttttatgagggccacatttaccactacgccatatata

SEQ ID NO: 356550 - DNA, 52 bp, Artificial
  Synthetic oligonucleotide
ccatacaatattgaagtaatgtatgacagtgatccagagaatctaatgtcat

SEQ ID NO: 356551 - DNA, 60 bp, Artificial
  Synthetic oligonucleotide
ccatacaatcaagttcacatatcgagggcgagcgacccaaagatcgaggggtgtgtggag

SEQ ID NO: 356552 - DNA, 60 bp, Artificial
  Synthetic oligonucleotide
ccatacaatgaatggacactagagcttttagaggagcttaagagtgaagctgttagacac

SEQ ID NO: 356553 - DNA, 55 bp, Artificial
  Synthetic oligonucleotide
ccatacaccagcactatgatggaaaccatggagcgactgcaacgtaggcatgggg

SEQ ID NO: 356554 - DNA, 55 bp, Artificial
  Synthetic oligonucleotide
ccatacacgaattggcggggagcgatctccataagcgtatagcgctccttttgag

SEQ ID NO: 356555 - DNA, 50 bp, Artificial
  Synthetic oligonucleotide
ccatacacgatatcaggtagctgtccccaataatgtgttgattcacgccc

SEQ ID NO: 356556 - DNA, 57 bp, Artificial
  Synthetic oligonucleotide
ccatacactcaatttcctcagagaaattatttcctccttttagagagaccaatgtcc

SEQ ID NO: 356557 - DNA, 60 bp, Artificial
  Synthetic oligonucleotide
ccatacagaatgcaatcttgggcatacatgtggctggaggtaattcaattcttgttgcta

SEQ ID NO: 356558 - DNA, 55 bp, Artificial
  Synthetic oligonucleotide
ccatacagtgctgaggttttagctacagttacacgtcacagcgtcggaacaatcg

SEQ ID NO: 356559 - DNA, 60 bp, Artificial
  Synthetic oligonucleotide
ccatacatagctagacaagatggacctagatgcacatgggaattacactgtgactataaa

SEQ ID NO: 356560 - DNA, 55 bp, Artificial
  Synthetic oligonucleotide
ccatacatcgagaaatgtgtaatgacgtggagcgttctccaccattcctgaatcg

SEQ ID NO: 356561 - DNA, 60 bp, Artificial
  Synthetic oligonucleotide
ccatacatgctgcattattacgatccgcgtcaatatgccaatgcgtggaatctgacgtcc

SEQ ID NO: 356562 - DNA, 55 bp, Artificial
  Synthetic oligonucleotide
ccataccactctggtgtcacctctcaaacaggcctcgagggtgtttccgttatct

SEQ ID NO: 356563 - DNA, 55 bp, Artificial
  Synthetic oligonucleotide
ccataccatggacatcaggggtacaatttagatacactgacccagatacttacac

SEQ ID NO: 356564 - DNA, 55 bp, Artificial
  Synthetic oligonucleotide
ccatacccaatacagggcagagtcattacaaaataggatacagatagacccagtg

SEQ ID NO: 356565 - DNA, 55 bp, Artificial
  Synthetic oligonucleotide
ccatacccactccgttgaacgtatgatgtaagcacaccgcgcgtttataatagta

SEQ ID NO: 356566 - DNA, 55 bp, Artificial
  Synthetic oligonucleotide
ccataccctacctttctgctgctgactacgcttacactgcttctgatgtggcgga

SEQ ID NO: 356567 - DNA, 54 bp, Artificial
  Synthetic oligonucleotide
ccataccctatactttctcaacttggatgaggaaaactaacgggagacctattg

SEQ ID NO: 356568 - DNA, 55 bp, Artificial
  Synthetic oligonucleotide
ccatacccttggaaatgaacaacacactcttttccaccactctattaggtgaggt

SEQ ID NO: 356569 - DNA, 60 bp, Artificial
  Synthetic oligonucleotide
ccataccgagaacgcgttgttattgtatatggcatgtactcatgcctctaaccctgtgta

SEQ ID NO: 356570 - DNA, 60 bp, Artificial
  Synthetic oligonucleotide
ccataccgctacatgaagattttaggcagtatactgcatttaccctaccatcagtaaaca

SEQ ID NO: 356571 - DNA, 55 bp, Artificial
  Synthetic oligonucleotide
ccatacctacatcctttaggccctcctccggtcaggccccatttattccagcacg

SEQ ID NO: 356572 - DNA, 55 bp, Artificial
  Synthetic oligonucleotide
ccatacctgggcgtgaatccggttttaaattgtctacgcagcatgacgtgacact

SEQ ID NO: 356573 - DNA, 55 bp, Artificial
  Synthetic oligonucleotide
ccatacctttagtccaactgttacgtatattaaatccagatggagtgtattcagc

SEQ ID NO: 356574 - DNA, 58 bp, Artificial
  Synthetic oligonucleotide
ccatacgagcttaaaagtagtgccccaaagcctctcccctgaacaactctcagcacta

SEQ ID NO: 356575 - DNA, 55 bp, Artificial
  Synthetic oligonucleotide
ccatacgagtcttgccactgctaagctgtgaggcagtgcaggctgggacagccga

SEQ ID NO: 356576 - DNA, 55 bp, Artificial
  Synthetic oligonucleotide
ccatacgcacggagtgggagttggtaggtccttctgtgggtgcccgtttaattca

SEQ ID NO: 356577 - DNA, 60 bp, Artificial
  Synthetic oligonucleotide
ccatacgcctgttggtagcatcttcgacctaaaggttggtggcaccaagcatactcttca

SEQ ID NO: 356578 - DNA, 60 bp, Artificial
  Synthetic oligonucleotide
ccatacggagaacgcactattattgtacatggcatgtactcatgcctcaaaccctgtata

SEQ ID NO: 356579 - DNA, 59 bp, Artificial
  Synthetic oligonucleotide
ccatacgggacgtcgaggaaaccaatatgataactctcttggtgaaactggcactgata

SEQ ID NO: 356580 - DNA, 50 bp, Artificial
  Synthetic oligonucleotide
ccatacgggagcattctcattcatctacgatgccacaaatacctccgaag

SEQ ID NO: 356581 - DNA, 55 bp, Artificial
  Synthetic oligonucleotide
ccatacggtgcctgtgcccggtgtttacttctgcagggcattgcacggcgcctga

SEQ ID NO: 356582 - DNA, 55 bp, Artificial
  Synthetic oligonucleotide
ccatacgtcgaagtttgggcgaaatgttgcggcttgcttactgccattccttgcg

SEQ ID NO: 356583 - DNA, 54 bp, Artificial
  Synthetic oligonucleotide
ccatactaacagcgttatgttctggctggttagagatcgtagaccgtatggtac

SEQ ID NO: 356584 - DNA, 56 bp, Artificial
  Synthetic oligonucleotide
ccatactaatcaggtcatgttttttttggtccgtgatagaaggccctatggcccaa

SEQ ID NO: 356585 - DNA, 55 bp, Artificial
  Synthetic oligonucleotide
ccatactataattttggatgatgttgccaatgaggctcctgagatgaacgatccc

SEQ ID NO: 356586 - DNA, 60 bp, Artificial
  Synthetic oligonucleotide
ccatactatatagtatgggcctgagcaaggagaactctcgcaccactgaatttatgataa

SEQ ID NO: 356587 - DNA, 60 bp, Artificial
  Synthetic oligonucleotide
ccatactatttagtgacttgggctaattcgtccatagaaatgcttatgtcagtattttca

SEQ ID NO: 356588 - DNA, 55 bp, Artificial
  Synthetic oligonucleotide
ccatactcaatacagaacagagtcgttgcagaatagaatacagatagacccagtg

SEQ ID NO: 356589 - DNA, 55 bp, Artificial
  Synthetic oligonucleotide
ccatactccacataaatgcttatctctacgctgcattaaagggagtggaaggaac

SEQ ID NO: 356590 - DNA, 55 bp, Artificial
  Synthetic oligonucleotide
ccatactcgaatcctccactgaatggcatgaacccgccgtatccgggatagttgg

SEQ ID NO: 356591 - DNA, 55 bp, Artificial
  Synthetic oligonucleotide
ccatactcgaatgtgtgttgggtcaagatgttgaaagctcttggtcaaggacgtg

SEQ ID NO: 356592 - DNA, 60 bp, Artificial
  Synthetic oligonucleotide
ccatactcggtccgctcatggtgctccaagctggcataaccagagtgccgtacttcgtgc

SEQ ID NO: 356593 - DNA, 60 bp, Artificial
  Synthetic oligonucleotide
ccatactcggtgaggccagtagaagggtcacttgctctataggatctaatcactgttctt

SEQ ID NO: 356594 - DNA, 60 bp, Artificial
  Synthetic oligonucleotide
ccatactctattccaccagatccagatcactttgatgggtacacaggtcaagaggttgtg

SEQ ID NO: 356595 - DNA, 55 bp, Artificial
  Synthetic oligonucleotide
ccatactctggcaccattgctccaaactctgtgaaacatgatcaatgtaaccttg

SEQ ID NO: 356596 - DNA, 55 bp, Artificial
  Synthetic oligonucleotide
ccatactctgtcgtggtccatgatcttgaaactcaggggatttgctacctcccaa

SEQ ID NO: 356597 - DNA, 59 bp, Artificial
  Synthetic oligonucleotide
ccatactcttacaaaagcctatgaacccagaagctacagacgattgaaaggctgacttg

SEQ ID NO: 356598 - DNA, 55 bp, Artificial
  Synthetic oligonucleotide
ccatactcttacactccatatctgatggaattgggcctttcaaatcgctcacctt

SEQ ID NO: 356599 - DNA, 58 bp, Artificial
  Synthetic oligonucleotide
ccatactgcaattactcaaaattctggtacctggaacacgcaaagactggcgaaacta

SEQ ID NO: 356600 - DNA, 60 bp, Artificial
  Synthetic oligonucleotide
ccatactgcggaactcctagccgcctgttttgctcgcagcaggtctggagcaaaccttat

SEQ ID NO: 356601 - DNA, 60 bp, Artificial
  Synthetic oligonucleotide
ccatactggaggagtatcggaccgtgttccatcatcccaatgacaggaatcaaggacctc

SEQ ID NO: 356602 - DNA, 60 bp, Artificial
  Synthetic oligonucleotide
ccatactgtctgagctctagaaggtgccacctggttggtgattgcactggaaatagatgt

SEQ ID NO: 356603 - DNA, 55 bp, Artificial
  Synthetic oligonucleotide
ccatacttcgagcatggattcgcacaaccaagatagttggtgaccacccattggt

SEQ ID NO: 356604 - DNA, 55 bp, Artificial
  Synthetic oligonucleotide
ccatacttgagtatcgtgcaagggatgtaccggataaagcgttggctgtaagtgt

SEQ ID NO: 356605 - DNA, 58 bp, Artificial
  Synthetic oligonucleotide
ccatacttggatgtacgacttacctcatatgactttcttttcgaacaggattaagatg

SEQ ID NO: 356606 - DNA, 59 bp, Artificial
  Synthetic oligonucleotide
ccatactttgtgagggcccacgccctactacgagtgtgcaccctggtgagacacctcgc

SEQ ID NO: 356607 - DNA, 60 bp, Artificial
  Synthetic oligonucleotide
ccatagaaccactggatctacctccaatcattcaaagactccatggccttagcgcatttt

SEQ ID NO: 356608 - DNA, 55 bp, Artificial
  Synthetic oligonucleotide
ccatagaatggagatgtgggtcatacaaaacacaagtagatcctgaaacggcaga

SEQ ID NO: 356609 - DNA, 55 bp, Artificial
  Synthetic oligonucleotide
ccatagacaatgtgatgggaatgattgggatactgcccgacttgactccaagtac

SEQ ID NO: 356610 - DNA, 60 bp, Artificial
  Synthetic oligonucleotide
ccatagagaagaccatgctgaacaagacccgcacttttacagcagcaccattggaaacct

SEQ ID NO: 356611 - DNA, 59 bp, Artificial
  Synthetic oligonucleotide
ccatagagaatttcaacattgtacaaatatccttgaatcttgacaaactgttggtccaa

SEQ ID NO: 356612 - DNA, 55 bp, Artificial
  Synthetic oligonucleotide
ccatagagagggatgtatgggaacaatggtggacagactattggcaggtaacctg

SEQ ID NO: 356613 - DNA, 60 bp, Artificial
  Synthetic oligonucleotide
ccatagagtattcacagctcaacgccacgtcgcacctcgcgcagctagcgccaggcttag

SEQ ID NO: 356614 - DNA, 55 bp, Artificial
  Synthetic oligonucleotide
ccatagatagtctctagtaatgatgacttatcctctgggtgaacaaataccacgc

SEQ ID NO: 356615 - DNA, 60 bp, Artificial
  Synthetic oligonucleotide
ccatagatgctggttgtaacatcattgaccatattgactcaccatcatcaatttgggttt

SEQ ID NO: 356616 - DNA, 55 bp, Artificial
  Synthetic oligonucleotide
ccatagattttgagaaggatgcgtacttgaatattagatcggagtttgtgctccc

SEQ ID NO: 356617 - DNA, 54 bp, Artificial
  Synthetic oligonucleotide
ccatagcaatgaccaggggagtggataccctccaaaccaaaaatccacccaaaa

SEQ ID NO: 356618 - DNA, 55 bp, Artificial
  Synthetic oligonucleotide
ccatagcatggatggtccaaagatcattagctcaagagcatggaatagagactcc

SEQ ID NO: 356619 - DNA, 51 bp, Artificial
  Synthetic oligonucleotide
ccatagccacacagataatagacatagcagttgttttatttgctccaggat

SEQ ID NO: 356620 - DNA, 53 bp, Artificial
  Synthetic oligonucleotide
ccatagccacacgacgcctattaattgtgtcggctaacacgtccgcgatcaaa

SEQ ID NO: 356621 - DNA, 55 bp, Artificial
  Synthetic oligonucleotide
ccatagccatgtctgcgtaactagtgaggaaaagaacgtgtcgtcgaatcagcgg

SEQ ID NO: 356622 - DNA, 55 bp, Artificial
  Synthetic oligonucleotide
ccatagcccggcttaaagagacaggacaaactgcaaacattagtccaagttggag

SEQ ID NO: 356623 - DNA, 60 bp, Artificial
  Synthetic oligonucleotide
ccatagcgacgaatttgcgagatcagcgccaaggtaaggaggtactgaatataagaggga

SEQ ID NO: 356624 - DNA, 55 bp, Artificial
  Synthetic oligonucleotide
ccatagcgataggagaggatgctaggaggtaggggcgaccgaagcgaggagaaag

SEQ ID NO: 356625 - DNA, 59 bp, Artificial
  Synthetic oligonucleotide
ccatagcgatagggggagatgctaggagtctggggcggccagaacgagaggcaaagtaa

SEQ ID NO: 356626 - DNA, 54 bp, Artificial
  Synthetic oligonucleotide
ccatagctaaggtagagcctgtaaaagtcaccttaaagccaggaaaggttggac

SEQ ID NO: 356627 - DNA, 60 bp, Artificial
  Synthetic oligonucleotide
ccatagctcggtgcaactgtcagacaggtgtgtattactgtaactctcgtaggaaacact

SEQ ID NO: 356628 - DNA, 55 bp, Artificial
  Synthetic oligonucleotide
ccatagcttgtggggcataatgactgcacgtagctgctcccaaaacgcacggact

SEQ ID NO: 356629 - DNA, 55 bp, Artificial
  Synthetic oligonucleotide
ccataggacttttgactaaaggtttgacgacaaacacatacccggttagcatgaa

SEQ ID NO: 356630 - DNA, 55 bp, Artificial
  Synthetic oligonucleotide
ccataggagacttccctctatatacaattcccgaacggcttaatccctggactcc

SEQ ID NO: 356631 - DNA, 58 bp, Artificial
  Synthetic oligonucleotide
ccataggatcttgcgttagtaaatgtcacaccgataggggttcaatctctacaactaa

SEQ ID NO: 356632 - DNA, 52 bp, Artificial
  Synthetic oligonucleotide
ccataggcatagtgtcggggccacccttgaggcattattccagggtccaccg

SEQ ID NO: 356633 - DNA, 57 bp, Artificial
  Synthetic oligonucleotide
ccataggggctagttccttgatgaccctaagagcctctgacttacttccagtgttaa

SEQ ID NO: 356634 - DNA, 55 bp, Artificial
  Synthetic oligonucleotide
ccatagggttcggggcgtctgtggatagtttatctaactcatacggaccgcgagc

SEQ ID NO: 356635 - DNA, 54 bp, Artificial
  Synthetic oligonucleotide
ccatagggtttattggatacgagaggggagggtagtgaagtatgaaaatgtccc

SEQ ID NO: 356636 - DNA, 55 bp, Artificial
  Synthetic oligonucleotide
ccataggtacagactcgtccacggagaccctcattactctgttagagcctgaggg

SEQ ID NO: 356637 - DNA, 56 bp, Artificial
  Synthetic oligonucleotide
ccataggtggtacaccaccggccgtgcaaagctagtcaagatgggtaaaccggata

SEQ ID NO: 356638 - DNA, 55 bp, Artificial
  Synthetic oligonucleotide
ccatagtatgcggtctatttccaactcaaattcaagtacgcaacataatgagccc

SEQ ID NO: 356639 - DNA, 55 bp, Artificial
  Synthetic oligonucleotide
ccatagtcatcagagtaaggatggattccgtgctcgctccctctgacgcgtcgtc

SEQ ID NO: 356640 - DNA, 60 bp, Artificial
  Synthetic oligonucleotide
ccatagtcgaggctatatccagatcaattggtaggttctttccatcggacaccctgtgca

SEQ ID NO: 356641 - DNA, 60 bp, Artificial
  Synthetic oligonucleotide
ccatagtcgattatattaacacgatcatacaaacaatgacgcctagacatcgggccatat

SEQ ID NO: 356642 - DNA, 60 bp, Artificial
  Synthetic oligonucleotide
ccatagtctgatatcctcgatagtacatcgggatggaatctgtggtgatttgatactgag

SEQ ID NO: 356643 - DNA, 55 bp, Artificial
  Synthetic oligonucleotide
ccatagtgggggggcatcgctgaccgtagcacctaactgtgtggcacccattaag

SEQ ID NO: 356644 - DNA, 55 bp, Artificial
  Synthetic oligonucleotide
ccatagtgggtgtgcatgcaggaggagaaaatgagcagaacttcaatgtaatgtc

SEQ ID NO: 356645 - DNA, 60 bp, Artificial
  Synthetic oligonucleotide
ccatagtgtgtcagaggcgtttcaaaatttaatacagccagtaacaacatatagccacat

SEQ ID NO: 356646 - DNA, 58 bp, Artificial
  Synthetic oligonucleotide
ccatagtttgtataagcggttacatgcggcgtcaaacaaactatagagtaatgtgtaa

SEQ ID NO: 356647 - DNA, 58 bp, Artificial
  Synthetic oligonucleotide
ccatataacttaaccttttcttctgtatgatgtcttaacatcttgcggagtctactac

SEQ ID NO: 356648 - DNA, 55 bp, Artificial
  Synthetic oligonucleotide
ccatataacttagatttcacctctgtacgatgtcttaacatcttgcggagtctac

SEQ ID NO: 356649 - DNA, 55 bp, Artificial
  Synthetic oligonucleotide
ccatataagatcaatagagtgcaccaactgtaagaagagtttcccaggaatcgag

SEQ ID NO: 356650 - DNA, 55 bp, Artificial
  Synthetic oligonucleotide
ccatataaggctcaccgccatatacactgcaagaattactattcttgtgggcccc

SEQ ID NO: 356651 - DNA, 57 bp, Artificial
  Synthetic oligonucleotide
ccatataagggagaataaccgcaaaccgcactatactcccatatggccaaagttcga

SEQ ID NO: 356652 - DNA, 57 bp, Artificial
  Synthetic oligonucleotide
ccatataatacatcacgtattaatttggcatttcggttccaagatggtaacctacta

SEQ ID NO: 356653 - DNA, 60 bp, Artificial
  Synthetic oligonucleotide
ccatataattcgcagctatttctggacttacgctagaccaatccgccccaacattgccat

SEQ ID NO: 356654 - DNA, 55 bp, Artificial
  Synthetic oligonucleotide
ccatataccactcaaaggaggtacctctgatggtgccattgattgtctactcccc

SEQ ID NO: 356655 - DNA, 60 bp, Artificial
  Synthetic oligonucleotide
ccatatacgtcgatatcaaacgtgtgacacaataccatacacggcaataatattataagc

SEQ ID NO: 356656 - DNA, 55 bp, Artificial
  Synthetic oligonucleotide
ccatatacttgttcgaagttcttactctctgacgagttcggtaacacattttccg

SEQ ID NO: 356657 - DNA, 55 bp, Artificial
  Synthetic oligonucleotide
ccatatagctctctagcacaagaggggaaagctccttacatagcggaaacggcac

SEQ ID NO: 356658 - DNA, 55 bp, Artificial
  Synthetic oligonucleotide
ccatatcaaaccttttcgactccatgcttgggaaagtcaaatccgtgctgcaggg

SEQ ID NO: 356659 - DNA, 57 bp, Artificial
  Synthetic oligonucleotide
ccatatcaactattaaggcatgtttaatcgtaattttcgctcccctcgcactcccag

SEQ ID NO: 356660 - DNA, 55 bp, Artificial
  Synthetic oligonucleotide
ccatatcaattgcctccactatgtcttcgtgctttaattctctatagttgagctc

SEQ ID NO: 356661 - DNA, 50 bp, Artificial
  Synthetic oligonucleotide
ccatatcagcgagatcaggtctattaccgtttgttcccgttacaatgaag

SEQ ID NO: 356662 - DNA, 60 bp, Artificial
  Synthetic oligonucleotide
ccatatcatctgaggtcgggcaacgtgcgataactggtgcggtggaaggcatgatcacat

SEQ ID NO: 356663 - DNA, 55 bp, Artificial
  Synthetic oligonucleotide
ccatatcattgggagtctctgcagaagcagtgggcagtagacatcgatcgcttcc

SEQ ID NO: 356664 - DNA, 60 bp, Artificial
  Synthetic oligonucleotide
ccatatcattgggattggttgtattcaatgttctactgcatgtcgtgagcatcatagtaa

SEQ ID NO: 356665 - DNA, 59 bp, Artificial
  Synthetic oligonucleotide
ccatatccagggagtaattcaattgaagaagaaagctcgattctcgactgttaaggaga

SEQ ID NO: 356666 - DNA, 55 bp, Artificial
  Synthetic oligonucleotide
ccatatccctcaggattctggtcctttgctcaagttgtgttgtggttagattgcc

SEQ ID NO: 356667 - DNA, 55 bp, Artificial
  Synthetic oligonucleotide
ccatatcctggcctcttggggaaccctcactggctttctttgacctaagctctac

SEQ ID NO: 356668 - DNA, 55 bp, Artificial
  Synthetic oligonucleotide
ccatatcgccgatacttcggcagacggattggtcagcgtgtatatggcatgccat

SEQ ID NO: 356669 - DNA, 56 bp, Artificial
  Synthetic oligonucleotide
ccatatcgggggttttgtggactgtttaccacggagctggcaacaagactctagcc

SEQ ID NO: 356670 - DNA, 60 bp, Artificial
  Synthetic oligonucleotide
ccatatctatacattccagtcaattacggccaaatgattcagccaattagaataatgagg

SEQ ID NO: 356671 - DNA, 60 bp, Artificial
  Synthetic oligonucleotide
ccatatctgccgttatgggatcagctctcctgatagggggagtgtcgagtgcagtgaagt

SEQ ID NO: 356672 - DNA, 51 bp, Artificial
  Synthetic oligonucleotide
ccatatctgggggggtgatgtgtattgcggacgaaggaggggccaccatca

SEQ ID NO: 356673 - DNA, 48 bp, Artificial
  Synthetic oligonucleotide
ccatatctgtcagtgacgtcgtaaatgcgtcacaggaggagacgctga

SEQ ID NO: 356674 - DNA, 60 bp, Artificial
  Synthetic oligonucleotide
ccatatcttccgagcgaattcccgtggcctacacgagcacgttgcagcatgcgatagcag

SEQ ID NO: 356675 - DNA, 57 bp, Artificial
  Synthetic oligonucleotide
ccatatcttttcaacaatagttcgaagttggtacctatgtatggtattaccattaga

SEQ ID NO: 356676 - DNA, 52 bp, Artificial
  Synthetic oligonucleotide
ccatatgacaattagcaacaatcaagctataataagatactcatgtctacgt

SEQ ID NO: 356677 - DNA, 55 bp, Artificial
  Synthetic oligonucleotide
ccatatgagctctaccgtcatcccgttcggcgattccaaagccgtcaagcgctgg

SEQ ID NO: 356678 - DNA, 59 bp, Artificial
  Synthetic oligonucleotide
ccatatgagtattttatagcacaacacgccgtagttgagaaaatgttaatatacgcaaa

SEQ ID NO: 356679 - DNA, 56 bp, Artificial
  Synthetic oligonucleotide
ccatatgatggcgatgacgttgttctcgtatcaccatgggatggaagtgatctagc

SEQ ID NO: 356680 - DNA, 55 bp, Artificial
  Synthetic oligonucleotide
ccatatgcaacggaggaagagttcatggctcacgtggacgaacagaatccagacc

SEQ ID NO: 356681 - DNA, 60 bp, Artificial
  Synthetic oligonucleotide
ccatatgcatatctcaccgcagcttatgcctacgccttaaattcgtgattagcctttact

SEQ ID NO: 356682 - DNA, 52 bp, Artificial
  Synthetic oligonucleotide
ccatatgcatgaagtgcgtagcaccctgttatggatcgaccagtataattac

SEQ ID NO: 356683 - DNA, 55 bp, Artificial
  Synthetic oligonucleotide
ccatatgccatattcgaacgattaccatgtgagaaggattatcgtgttaacggcc

SEQ ID NO: 356684 - DNA, 55 bp, Artificial
  Synthetic oligonucleotide
ccatatggcgacaaatcaggcatcagtttaccctcagaccattggcaaacgacta

SEQ ID NO: 356685 - DNA, 60 bp, Artificial
  Synthetic oligonucleotide
ccatatggggccaatagcaccaggccaaatgagagaaccaaggggaagtgacatagcagg

SEQ ID NO: 356686 - DNA, 58 bp, Artificial
  Synthetic oligonucleotide
ccatatgtagactttgttgttacatatagtaaccagccaccatttagtattaatcaat

SEQ ID NO: 356687 - DNA, 55 bp, Artificial
  Synthetic oligonucleotide
ccatatgtatggggtcgagccagaaaattacagtatgatcagatttgttgtccct

SEQ ID NO: 356688 - DNA, 57 bp, Artificial
  Synthetic oligonucleotide
ccatatgtatgtttcaaagaaggctagaggatggttttatagacatcactatgacag

SEQ ID NO: 356689 - DNA, 55 bp, Artificial
  Synthetic oligonucleotide
ccatatgtgatagacatgataatgtagtcactctgcgcttccgagatagtggagg

SEQ ID NO: 356690 - DNA, 55 bp, Artificial
  Synthetic oligonucleotide
ccatatgtgccatgtcacaagtcgtgttactcacgactaccgaggtcgccaaacg

SEQ ID NO: 356691 - DNA, 55 bp, Artificial
  Synthetic oligonucleotide
ccatatgtgcccctgtcacctgctgacaccacccattatgtgtacatagatggcg

SEQ ID NO: 356692 - DNA, 58 bp, Artificial
  Synthetic oligonucleotide
ccatatgttcgacccgaaactcaaaaggcgttatgtaacaatttgcttgtgagaatca

SEQ ID NO: 356693 - DNA, 55 bp, Artificial
  Synthetic oligonucleotide
ccatatgttggatgagtgcgtccgtattcgagcatgctatttaagtttatccgtg

SEQ ID NO: 356694 - DNA, 59 bp, Artificial
  Synthetic oligonucleotide
ccatattaggacaaacagttaggcctagttgtgaatatccagcagggcataataaggta

SEQ ID NO: 356695 - DNA, 60 bp, Artificial
  Synthetic oligonucleotide
ccatattaggacatagagttagccctaggtgtgactatcaagcaagacataataaggtag

SEQ ID NO: 356696 - DNA, 55 bp, Artificial
  Synthetic oligonucleotide
ccatattaggatatccaagttcttcagctcgttttagtgctggctggatctctct

SEQ ID NO: 356697 - DNA, 55 bp, Artificial
  Synthetic oligonucleotide
ccatattagtttattattgttggatgtccgacaccaactccaaggcttccacttt

SEQ ID NO: 356698 - DNA, 51 bp, Artificial
  Synthetic oligonucleotide
ccatattataaacatggccttgtcctataaaaggggctatgttgatattat

SEQ ID NO: 356699 - DNA, 54 bp, Artificial
  Synthetic oligonucleotide
ccatattatccaagtatataagtacttggtatctaaagacccttaagaaaagac

SEQ ID NO: 356700 - DNA, 60 bp, Artificial
  Synthetic oligonucleotide
ccatattcagtaagactagcagaagggtcacttgctctataagatctaatcactgttctg

SEQ ID NO: 356701 - DNA, 55 bp, Artificial
  Synthetic oligonucleotide
ccatattccgtcgtctcctactgttatatttactaacgaatgtcgtgcgagggat

SEQ ID NO: 356702 - DNA, 59 bp, Artificial
  Synthetic oligonucleotide
ccatattgatccagcgaggcctaccaccaaagccctctctctctgcacgcccccccgtc

SEQ ID NO: 356703 - DNA, 60 bp, Artificial
  Synthetic oligonucleotide
ccatattgcactcattaacaaatccccatatagttcatgctactttcttactgtataacc

SEQ ID NO: 356704 - DNA, 55 bp, Artificial
  Synthetic oligonucleotide
ccatattggctgcaacgtgcccagggacataataatggcatctgttggaacaatc

SEQ ID NO: 356705 - DNA, 60 bp, Artificial
  Synthetic oligonucleotide
ccatattgttttccctgttctgctatcaccttctagaacagtactgatcgttctccatgg

SEQ ID NO: 356706 - DNA, 55 bp, Artificial
  Synthetic oligonucleotide
ccatatttgcttaatgctgtgttgtcaattcgattgtgggctatggaagattggg

SEQ ID NO: 356707 - DNA, 60 bp, Artificial
  Synthetic oligonucleotide
ccatatttgtcacgtccaaatttgtcgtgtcagttaaatgcaacaatgctcattggattt

SEQ ID NO: 356708 - DNA, 55 bp, Artificial
  Synthetic oligonucleotide
ccatcaaacacacctgtggtgaatttggagacaccgaatccctctttgatgtcct

SEQ ID NO: 356709 - DNA, 50 bp, Artificial
  Synthetic oligonucleotide
ccatcaaacccagcagttaaagaaggcagaacaagacctagacaccttgt

SEQ ID NO: 356710 - DNA, 55 bp, Artificial
  Synthetic oligonucleotide
ccatcaaagaggatacacgtctggttaaagtgtggtcggtgtagtcctgaggtgg

SEQ ID NO: 356711 - DNA, 50 bp, Artificial
  Synthetic oligonucleotide
ccatcaaagggttctttgcggtgcgaaaatgtgcctggttgtgcctatga

SEQ ID NO: 356712 - DNA, 55 bp, Artificial
  Synthetic oligonucleotide
ccatcaaagttaaggactttatgagtcaaatattcatgtccaccaagcacaagct

SEQ ID NO: 356713 - DNA, 55 bp, Artificial
  Synthetic oligonucleotide
ccatcaactgcataaacttgaaggcatcgatcttcaaagaacatagagaggttga

SEQ ID NO: 356714 - DNA, 55 bp, Artificial
  Synthetic oligonucleotide
ccatcaactggtgcttacggacttaaggcttcaattggatcacgtcgggttagtt

SEQ ID NO: 356715 - DNA, 56 bp, Artificial
  Synthetic oligonucleotide
ccatcaactgtaacatacgtaagaaagactgcaatcaaatatttaaggattcgcgg

SEQ ID NO: 356716 - DNA, 56 bp, Artificial
  Synthetic oligonucleotide
ccatcaagatggcaatacgtttaataaaactactttgaggaatctgttatgaaacg

SEQ ID NO: 356717 - DNA, 60 bp, Artificial
  Synthetic oligonucleotide
ccatcaagcaagcctgtccaaaggtatcttttgagccaattccaatacactattgtgctc

SEQ ID NO: 356718 - DNA, 60 bp, Artificial
  Synthetic oligonucleotide
ccatcaaggggagagggcctcctagtgttagcataactctagctgtagttgcatcaaatt

SEQ ID NO: 356719 - DNA, 55 bp, Artificial
  Synthetic oligonucleotide
ccatcaaggtaccctcttagttgcaatgataccagaacatcaactagcaagtgca

SEQ ID NO: 356720 - DNA, 55 bp, Artificial
  Synthetic oligonucleotide
ccatcaataaataacccagttttcgtactgctcatgctcttgtgggtacgtcata

SEQ ID NO: 356721 - DNA, 58 bp, Artificial
  Synthetic oligonucleotide
ccatcaatactgatcgaaccatcgtaagtaaatgggagacaaagtagtaaggtagcca

SEQ ID NO: 356722 - DNA, 58 bp, Artificial
  Synthetic oligonucleotide
ccatcaatcagtgtagaacttttaagggtagagtccttgatatgttcagaacagcctt

SEQ ID NO: 356723 - DNA, 55 bp, Artificial
  Synthetic oligonucleotide
ccatcaatgtagttcgcgtcaatataggccagcttactggtatcggcagatgtcg

SEQ ID NO: 356724 - DNA, 60 bp, Artificial
  Synthetic oligonucleotide
ccatcacactaagtacagagtgtctgacgataccagtcagctatacgctggggatgatat

SEQ ID NO: 356725 - DNA, 55 bp, Artificial
  Synthetic oligonucleotide
ccatcacactgggtcccaaccagcaggaccacttggtccatacatgccactcatg

SEQ ID NO: 356726 - DNA, 55 bp, Artificial
  Synthetic oligonucleotide
ccatcacagtgccaactgcatgaacggacacggttgtttaccacgtacccatcca

SEQ ID NO: 356727 - DNA, 55 bp, Artificial
  Synthetic oligonucleotide
ccatcacatctgcttgttcagaatggtatgccattaaaagatggagcgaatctgt

SEQ ID NO: 356728 - DNA, 55 bp, Artificial
  Synthetic oligonucleotide
ccatcacccacatctagtatactgttcaatgagtcaaccggggtcacccgcgcac

SEQ ID NO: 356729 - DNA, 53 bp, Artificial
  Synthetic oligonucleotide
ccatcaccgggtacctcccggtggtatggtgcggctacctccgggccgccaaa

SEQ ID NO: 356730 - DNA, 54 bp, Artificial
  Synthetic oligonucleotide
ccatcacctacgatgggccccgcgactcggatcagaggccttattgctggcact

SEQ ID NO: 356731 - DNA, 60 bp, Artificial
  Synthetic oligonucleotide
ccatcacgtacaaggtggcagttaacctggggtgtgctatctccgggacgatgcagcaat

SEQ ID NO: 356732 - DNA, 60 bp, Artificial
  Synthetic oligonucleotide
ccatcacgtacgccgcgaaaactttctgttcagagcaatgaaagtcgttcagatgatgtg

SEQ ID NO: 356733 - DNA, 51 bp, Artificial
  Synthetic oligonucleotide
ccatcactatccgcgtccgagaccggtaatcgaaggagcttcaatggctaa

SEQ ID NO: 356734 - DNA, 60 bp, Artificial
  Synthetic oligonucleotide
ccatcacttcagacaggatcagaagaacttagatcattattcaatgcaatagcagtcctc

SEQ ID NO: 356735 - DNA, 55 bp, Artificial
  Synthetic oligonucleotide
ccatcagaagggtacgacaagtatcttatcaggaggaatccaaacggatctagaa

SEQ ID NO: 356736 - DNA, 55 bp, Artificial
  Synthetic oligonucleotide
ccatcagacagtagaggagcataagtttgacctttcagatatggtccagtgggca

SEQ ID NO: 356737 - DNA, 56 bp, Artificial
  Synthetic oligonucleotide
ccatcagaggaggggacccagaaattgtaatgcatacttttaattgtggaggggaa

SEQ ID NO: 356738 - DNA, 57 bp, Artificial
  Synthetic oligonucleotide
ccatcagagtaccttatatcggatctaaaacagatgaacgaagggttgcatcaatgg

SEQ ID NO: 356739 - DNA, 56 bp, Artificial
  Synthetic oligonucleotide
ccatcagattaaacgagagtttggagtagatagttataaggctataaagcgttgtc

SEQ ID NO: 356740 - DNA, 60 bp, Artificial
  Synthetic oligonucleotide
ccatcagcgcatgcgtggaacctttatggctcctctgccgatccatactgcggaactcct

SEQ ID NO: 356741 - DNA, 55 bp, Artificial
  Synthetic oligonucleotide
ccatcagcgctggagaggatcttgaaacagaactgtgacaggcatcctaggtgtg

SEQ ID NO: 356742 - DNA, 55 bp, Artificial
  Synthetic oligonucleotide
ccatcagcggacaaattagctgttcatcaaatataacagggctgctattaacaag

SEQ ID NO: 356743 - DNA, 57 bp, Artificial
  Synthetic oligonucleotide
ccatcagtaccgaaccaaagtaagcattgaaataaacagaggaaagagtcgagccga

SEQ ID NO: 356744 - DNA, 60 bp, Artificial
  Synthetic oligonucleotide
ccatcagtactgtacgtcactatagatcatctgatacggtcaggtattgcttaattatat

SEQ ID NO: 356745 - DNA, 60 bp, Artificial
  Synthetic oligonucleotide
ccatcagttaaagtttgtatcataggaacagtatctaagatccaaccgtctgacacattg

SEQ ID NO: 356746 - DNA, 60 bp, Artificial
  Synthetic oligonucleotide
ccatcagttcatcaacccacgcaccaacatgacggctcacattaacgtgccttttgtggg

SEQ ID NO: 356747 - DNA, 55 bp, Artificial
  Synthetic oligonucleotide
ccatcagttcgtacacaccgtcaagattcacatagcactcgtcgtgcaacacgag

SEQ ID NO: 356748 - DNA, 55 bp, Artificial
  Synthetic oligonucleotide
ccatcagttctagcatcaatggggaagaaatatggattgactatcactcctccag

SEQ ID NO: 356749 - DNA, 52 bp, Artificial
  Synthetic oligonucleotide
ccatcataaacttggatatcaacaagatttcctcaataagtttactggatct

SEQ ID NO: 356750 - DNA, 60 bp, Artificial
  Synthetic oligonucleotide
ccatcataagcaaaagcaggggagtggatatgctgcagacaaagaatctacccagagagc

SEQ ID NO: 356751 - DNA, 60 bp, Artificial
  Synthetic oligonucleotide
ccatcatcaatatgggtgtttgctggggcccctgataggtgtccaccaacatgcttgttt

SEQ ID NO: 356752 - DNA, 60 bp, Artificial
  Synthetic oligonucleotide
ccatcatcaattcccaagattgattgctctattagattttccatctcgttaccatactct

SEQ ID NO: 356753 - DNA, 59 bp, Artificial
  Synthetic oligonucleotide
ccatcatctcgggctttcgcaagattcctatgggagtgggcctcagtccgtttctacta

SEQ ID NO: 356754 - DNA, 55 bp, Artificial
  Synthetic oligonucleotide
ccatcatggcaaagaacgaagtcttctgcgtggatacgtcgaagggagggcgtaa

SEQ ID NO: 356755 - DNA, 59 bp, Artificial
  Synthetic oligonucleotide
ccatcatggccaagaacgaggtattctgtgtggatccgtcgaggggggggcgcaagcca

SEQ ID NO: 356756 - DNA, 59 bp, Artificial
  Synthetic oligonucleotide
ccatcatggccaagaatgaggtgttttgcgtggatcccgcaaagggcgggaagaaggca

SEQ ID NO: 356757 - DNA, 55 bp, Artificial
  Synthetic oligonucleotide
ccatcatgggccggaaatattcttagaacccaagaatcagaatgtgtgtgccata

SEQ ID NO: 356758 - DNA, 60 bp, Artificial
  Synthetic oligonucleotide
ccatcatgtttgaacgtgaaagagtgtgttaatgagttgctcgttaatcacatggagatg

SEQ ID NO: 356759 - DNA, 55 bp, Artificial
  Synthetic oligonucleotide
ccatcattacccacacgcatatataattcagtgcatgactggttctatccaccgc

SEQ ID NO: 356760 - DNA, 58 bp, Artificial
  Synthetic oligonucleotide
ccatcattccggatcaactactgaacagaccagattatacgggagtgggaacaaacta

SEQ ID NO: 356761 - DNA, 60 bp, Artificial
  Synthetic oligonucleotide
ccatcattctgggctttcgcaagattcctatgggagtgggcctcagtccgtttctcatgg

SEQ ID NO: 356762 - DNA, 55 bp, Artificial
  Synthetic oligonucleotide
ccatcattgcgataaaggaaaggctatcgttcaagatgcctctgccgacagtggt

SEQ ID NO: 356763 - DNA, 60 bp, Artificial
  Synthetic oligonucleotide
ccatcattggagaaaaagcgctaacacgctttaggcatgaagctaacggaaccagcatct

SEQ ID NO: 356764 - DNA, 58 bp, Artificial
  Synthetic oligonucleotide
ccatcatttaaaaacccagatagatagaattagagaacaagcaaactcagtagagact

SEQ ID NO: 356765 - DNA, 55 bp, Artificial
  Synthetic oligonucleotide
ccatccaacacacaaatagggtaattcaatcccttaattcttctgttgtgacggg

SEQ ID NO: 356766 - DNA, 56 bp, Artificial
  Synthetic oligonucleotide
ccatccaacactttgaaggtttagtgcaatctgttaggtttagattatgtgatgtg

SEQ ID NO: 356767 - DNA, 58 bp, Artificial
  Synthetic oligonucleotide
ccatccaaccagattacagggacaaactcgtgtccatggtcaacacgacccgtgtgac

SEQ ID NO: 356768 - DNA, 54 bp, Artificial
  Synthetic oligonucleotide
ccatccaaccggattatagggacaaacttatgtccatggttaacacaacccgtg

SEQ ID NO: 356769 - DNA, 60 bp, Artificial
  Synthetic oligonucleotide
ccatccaagccaattgctactcacaaaacaacatgtggtagtagaagcttggaggcaaaa

SEQ ID NO: 356770 - DNA, 51 bp, Artificial
  Synthetic oligonucleotide
ccatccaaggtccacggctaggtctcgcgcggcggtcactagaggctcatc

SEQ ID NO: 356771 - DNA, 60 bp, Artificial
  Synthetic oligonucleotide
ccatccaattatcgtacatttcgatcatcataacaacgtgggaatgttctgtgcacttga

SEQ ID NO: 356772 - DNA, 56 bp, Artificial
  Synthetic oligonucleotide
ccatccacagtggttgacaatacactcatggtcgttatctcagtctattactcttg

SEQ ID NO: 356773 - DNA, 55 bp, Artificial
  Synthetic oligonucleotide
ccatccaccaagaaggcagagccgccgacttgggcacaactaaagaagctgacgc

SEQ ID NO: 356774 - DNA, 55 bp, Artificial
  Synthetic oligonucleotide
ccatccagatttactggcaagaatttgtcttattccgtctcaagttggtgggtta

SEQ ID NO: 356775 - DNA, 51 bp, Artificial
  Synthetic oligonucleotide
ccatccagcaggactaaagaagaggggcatggtaacagtactggatgtagg

SEQ ID NO: 356776 - DNA, 60 bp, Artificial
  Synthetic oligonucleotide
ccatccagcatactgcttcccgccacgtacaccgccacatggctcgaaccgccgcgtata

SEQ ID NO: 356777 - DNA, 52 bp, Artificial
  Synthetic oligonucleotide
ccatccagccagtccttcacatctgtgtttgtgttaagaagaaagggatcta

SEQ ID NO: 356778 - DNA, 55 bp, Artificial
  Synthetic oligonucleotide
ccatccaggacatcagcacttgagtcactaagaatagacactgtcgcacctccgt

SEQ ID NO: 356779 - DNA, 53 bp, Artificial
  Synthetic oligonucleotide
ccatccagttgcggccttcatgagccacagggttagtgctgccattgcgcagt

SEQ ID NO: 356780 - DNA, 55 bp, Artificial
  Synthetic oligonucleotide
ccatccatcttactcaccatacccgctctgaccgcagtcaatactgcctacggac

SEQ ID NO: 356781 - DNA, 52 bp, Artificial
  Synthetic oligonucleotide
ccatccatcttgattcacatgtatcgcatgagacactttgagaagggaatcg

SEQ ID NO: 356782 - DNA, 55 bp, Artificial
  Synthetic oligonucleotide
ccatccattccgccagaggactcgtcgattgaagtggcgacgccgtcgcacgaga

SEQ ID NO: 356783 - DNA, 54 bp, Artificial
  Synthetic oligonucleotide
ccatcccaaaagttgaaggagtcttctccctcgttgtggtcgtggatcgtaaac

SEQ ID NO: 356784 - DNA, 57 bp, Artificial
  Synthetic oligonucleotide
ccatcccagctggaacttcttgggcagacttctttggagaaggacctgaggaggaac

SEQ ID NO: 356785 - DNA, 56 bp, Artificial
  Synthetic oligonucleotide
ccatcccaggggtaatacagtgtagatcaaacattacaggactactattaacaagg

SEQ ID NO: 356786 - DNA, 53 bp, Artificial
  Synthetic oligonucleotide
ccatcccatacacctggggaaactggatgagaccaactaggggatctgtcatt

SEQ ID NO: 356787 - DNA, 60 bp, Artificial
  Synthetic oligonucleotide
ccatccccatcttgaagtgatgcgagctccgtctgcagaacaggcgaagaaatattgtga

SEQ ID NO: 356788 - DNA, 55 bp, Artificial
  Synthetic oligonucleotide
ccatccccctcccaccgaaagctctggagaatggccccaacgcttggggggatga

SEQ ID NO: 356789 - DNA, 56 bp, Artificial
  Synthetic oligonucleotide
ccatccccgacatccccaatcaatctccctgaaccctctcgagtggtacaatgggg

SEQ ID NO: 356790 - DNA, 55 bp, Artificial
  Synthetic oligonucleotide
ccatcccgtgcgataacgtttatcggtttgtgagggacgatggggtatccgatcc

SEQ ID NO: 356791 - DNA, 60 bp, Artificial
  Synthetic oligonucleotide
ccatccctacgtggacagtcgtggagagccgtgttcccaccttctgatgaatagtgagcg

SEQ ID NO: 356792 - DNA, 60 bp, Artificial
  Synthetic oligonucleotide
ccatccctactaaggctttatatagaattcacgaagggctgtcagctctagagtctctta

SEQ ID NO: 356793 - DNA, 60 bp, Artificial
  Synthetic oligonucleotide
ccatcccttcactgagtgcggcacccattgcgtatgtggtgctagatacgagacatcgga

SEQ ID NO: 356794 - DNA, 55 bp, Artificial
  Synthetic oligonucleotide
ccatcccttggaaaccttgtctacccagcggaacatcataccaacgattggcaac

SEQ ID NO: 356795 - DNA, 55 bp, Artificial
  Synthetic oligonucleotide
ccatccctttgtatataatggaggagaccgacagtcatatcgtatttaggctgac

SEQ ID NO: 356796 - DNA, 55 bp, Artificial
  Synthetic oligonucleotide
ccatcccttttcccatctgcctgctctaccaagtccacatttcatgccgtccccg

SEQ ID NO: 356797 - DNA, 55 bp, Artificial
  Synthetic oligonucleotide
ccatccgagtggacgtctgtcctccttcggatgcccaggtcggaccgcggggagg

SEQ ID NO: 356798 - DNA, 53 bp, Artificial
  Synthetic oligonucleotide
ccatccgcaataatattaccggatggccgcccgatttttggtgtcctcccctt

SEQ ID NO: 356799 - DNA, 55 bp, Artificial
  Synthetic oligonucleotide
ccatccgctgtgacagcagctagtgcagcccaaagacgtggacgcatcggtagga

SEQ ID NO: 356800 - DNA, 55 bp, Artificial
  Synthetic oligonucleotide
ccatccggagacatttacactgccctctttggagcgccatgtgactgtaaagggg

SEQ ID NO: 356801 - DNA, 55 bp, Artificial
  Synthetic oligonucleotide
ccatccggataaatggacagtgcagcctatacaactgccaaacaaggacagctgg

SEQ ID NO: 356802 - DNA, 57 bp, Artificial
  Synthetic oligonucleotide
ccatccggtgtcttacagagtcaggaggtgtttcaggtccgcataggacctcccgta

SEQ ID NO: 356803 - DNA, 55 bp, Artificial
  Synthetic oligonucleotide
ccatccggttctgacgctgttgagccacaatgccgcagactggttcgttgtgctc

SEQ ID NO: 356804 - DNA, 55 bp, Artificial
  Synthetic oligonucleotide
ccatccgtgaagcttcgcaaccggtgcaactgaggctccgcgttctccttttggt

SEQ ID NO: 356805 - DNA, 55 bp, Artificial
  Synthetic oligonucleotide
ccatccgttggttatcgagcgtgtgcgggctatcggatgtcattttgtgctgctg

SEQ ID NO: 356806 - DNA, 51 bp, Artificial
  Synthetic oligonucleotide
ccatcctaacagacaaatccttgactattcaggaggggctatcgctgaagt

SEQ ID NO: 356807 - DNA, 59 bp, Artificial
  Synthetic oligonucleotide
ccatcctaacatcgaggaggttgctctgtccactaccggagagatccctttctacggca

SEQ ID NO: 356808 - DNA, 55 bp, Artificial
  Synthetic oligonucleotide
ccatcctcaacctctaccagtctaacaccgcaacattggaggtcccctacgtcgg

SEQ ID NO: 356809 - DNA, 57 bp, Artificial
  Synthetic oligonucleotide
ccatcctccagttcagcgcctgcctccaaacgaaagaaaactaagcgataactatta

SEQ ID NO: 356810 - DNA, 59 bp, Artificial
  Synthetic oligonucleotide
ccatcctcctagcgcaggaacaacttgacaaagccctggattgtcagatctacggggcc

SEQ ID NO: 356811 - DNA, 55 bp, Artificial
  Synthetic oligonucleotide
ccatcctctgggcagcaagtgcaacagaaattccccttgtccctctctggacaga

SEQ ID NO: 356812 - DNA, 56 bp, Artificial
  Synthetic oligonucleotide
ccatcctgacttcctttctattaattctcttcatatacactgtcttttctgtgacg

SEQ ID NO: 356813 - DNA, 55 bp, Artificial
  Synthetic oligonucleotide
ccatcctgcgggccggctgctcttctttcccttctctcgtcttcctcggtcaacc

SEQ ID NO: 356814 - DNA, 55 bp, Artificial
  Synthetic oligonucleotide
ccatcctggcaactactgtgacattgcattttaagcaacatgagtgcaactcccc

SEQ ID NO: 356815 - DNA, 55 bp, Artificial
  Synthetic oligonucleotide
ccatccttagcgcagaggatgaacgccttaagggaacgatccatgaaggatacac

SEQ ID NO: 356816 - DNA, 55 bp, Artificial
  Synthetic oligonucleotide
ccatccttggattcaggtacagttctatttgggttatgctgtcttctccagtcac

SEQ ID NO: 356817 - DNA, 55 bp, Artificial
  Synthetic oligonucleotide
ccatccttggcattggaacagtcctggatcaggctgagaccgcaggtgtcaggct

SEQ ID NO: 356818 - DNA, 55 bp, Artificial
  Synthetic oligonucleotide
ccatcgaaagggtacatgatcatcccgcaagtcttatgcgccgtcacccgcactg

SEQ ID NO: 356819 - DNA, 55 bp, Artificial
  Synthetic oligonucleotide
ccatcgaatgacgcttatcagactccaattcagtcctcagttaccgtaagacaag

SEQ ID NO: 356820 - DNA, 58 bp, Artificial
  Synthetic oligonucleotide
ccatcgacctggaacactccaaaatcacgaatgtctccgtctttctccatataggtct

SEQ ID NO: 356821 - DNA, 55 bp, Artificial
  Synthetic oligonucleotide
ccatcgattgcacttcgtccttgaaattcgcgttcaagttttcacaatgtattcg

SEQ ID NO: 356822 - DNA, 55 bp, Artificial
  Synthetic oligonucleotide
ccatcgcacattgcacacgcagtgccgcttgctgtcgcggcctgcttcataccgt

SEQ ID NO: 356823 - DNA, 55 bp, Artificial
  Synthetic oligonucleotide
ccatcgcaccaatggagactgaatacaatggacttaggcgtgctattgctagcaa

SEQ ID NO: 356824 - DNA, 55 bp, Artificial
  Synthetic oligonucleotide
ccatcgcacgggtaaaaggttcgtggtgaagtctgtctatatactcggtaaggta

SEQ ID NO: 356825 - DNA, 55 bp, Artificial
  Synthetic oligonucleotide
ccatcgcactcagcccgatctaaatatgggtatggtgcacaggacgttagaagcc

SEQ ID NO: 356826 - DNA, 55 bp, Artificial
  Synthetic oligonucleotide
ccatcgccccatgtatatgttccgagtattacagcgtcgtattcatgcaagatag

SEQ ID NO: 356827 - DNA, 55 bp, Artificial
  Synthetic oligonucleotide
ccatcgcctcgtgaggccgaataccacggatcacgtcagttctacagcctcgctg

SEQ ID NO: 356828 - DNA, 55 bp, Artificial
  Synthetic oligonucleotide
ccatcgcgcttcttcctcgattcggatcggctcatctcgacaagaggcggcggtc

SEQ ID NO: 356829 - DNA, 60 bp, Artificial
  Synthetic oligonucleotide
ccatcgctctgatcgcttatatttggctagtcagtccaacggatgctcaagccactataa

SEQ ID NO: 356830 - DNA, 60 bp, Artificial
  Synthetic oligonucleotide
ccatcggaaaagtatgcaggaccctactagcaaaatctgtattcaacagcctgtatgcat

SEQ ID NO: 356831 - DNA, 51 bp, Artificial
  Synthetic oligonucleotide
ccatcggacctctagctgtcgtgtgggacccggtcttgtcacgatgggatt

SEQ ID NO: 356832 - DNA, 50 bp, Artificial
  Synthetic oligonucleotide
ccatcggaggcacaacccccgctactgtcgttacccccgccactggacgt

SEQ ID NO: 356833 - DNA, 53 bp, Artificial
  Synthetic oligonucleotide
ccatcggagtgttcctcacgtgcgactctgatataggtaggttggacgactgc

SEQ ID NO: 356834 - DNA, 51 bp, Artificial
  Synthetic oligonucleotide
ccatcggccgttaatggaatgtgttaccccgggaatgtagaaaacctaggg

SEQ ID NO: 356835 - DNA, 55 bp, Artificial
  Synthetic oligonucleotide
ccatcggctgacattcgtgaagggactggtaccagatgttactggcgggagcagc

SEQ ID NO: 356836 - DNA, 55 bp, Artificial
  Synthetic oligonucleotide
ccatcgggatggcccctacaagtataagaaggtacgagggaccggagtctgcaag

SEQ ID NO: 356837 - DNA, 59 bp, Artificial
  Synthetic oligonucleotide
ccatcgggctctatggcaacggagtcgtactggccggaggtacttatgttagtatgata

SEQ ID NO: 356838 - DNA, 53 bp, Artificial
  Synthetic oligonucleotide
ccatcggggcggcactcgcgatgacctctccccactcaaacgggctcgggatc

SEQ ID NO: 356839 - DNA, 55 bp, Artificial
  Synthetic oligonucleotide
ccatcggtaccttctacagttgattcaaaagtaaagccgtagctttatcgaacga

SEQ ID NO: 356840 - DNA, 55 bp, Artificial
  Synthetic oligonucleotide
ccatcggtattattcatcggggcagagaatgagcctgctatagacattatcagac

SEQ ID NO: 356841 - DNA, 58 bp, Artificial
  Synthetic oligonucleotide
ccatcggtgcacgaaatggattggggctccccaagggattgacgggatgacagcttta

SEQ ID NO: 356842 - DNA, 52 bp, Artificial
  Synthetic oligonucleotide
ccatcggtgtcttcatcagaacgtatcccagatttggctgtagaggatgtga

SEQ ID NO: 356843 - DNA, 57 bp, Artificial
  Synthetic oligonucleotide
ccatcgtaaagactctcacaaacgaaaaggaggaggtgatcaatgctactgaaacgg

SEQ ID NO: 356844 - DNA, 55 bp, Artificial
  Synthetic oligonucleotide
ccatcgtaagtaaatgggagacaaagtagtaaggtagccaatttgtatggtcagc

SEQ ID NO: 356845 - DNA, 59 bp, Artificial
  Synthetic oligonucleotide
ccatcgtacagctcatgttgtgggttcaatactgccccgcatttagtacactgttttaa

SEQ ID NO: 356846 - DNA, 55 bp, Artificial
  Synthetic oligonucleotide
ccatcgtactcgccgatggtgaatgataaggaccagggaaaatgcacctactctg

SEQ ID NO: 356847 - DNA, 56 bp, Artificial
  Synthetic oligonucleotide
ccatcgtagaagtgaacggtgtaaccatccaggttgggagcagggaataccctgac

SEQ ID NO: 356848 - DNA, 55 bp, Artificial
  Synthetic oligonucleotide
ccatcgtagtcaccgcagagcgcccgaccaagcgaatctgtgcacatagtacgtc

SEQ ID NO: 356849 - DNA, 55 bp, Artificial
  Synthetic oligonucleotide
ccatcgtataggtaagcgtttttgtgtcaagtcagtttatgtcttaggcaagata

SEQ ID NO: 356850 - DNA, 55 bp, Artificial
  Synthetic oligonucleotide
ccatcgtcagggtttcgacgataatagcgctctttctgggtttcaccctcacggg

SEQ ID NO: 356851 - DNA, 60 bp, Artificial
  Synthetic oligonucleotide
ccatcgtcatgtgcctctcgggcacatatgatgtacagaggattccaacgactaacgagc

SEQ ID NO: 356852 - DNA, 55 bp, Artificial
  Synthetic oligonucleotide
ccatcgtgaattgacacgtgaaggacggaagcctccgccataaatggcatgctgg

SEQ ID NO: 356853 - DNA, 55 bp, Artificial
  Synthetic oligonucleotide
ccatcgtgattactggcgagtcagtttccatagtagggtgcacatactctgatgc

SEQ ID NO: 356854 - DNA, 52 bp, Artificial
  Synthetic oligonucleotide
ccatcgtggactagtggcttgattggcgtaacaagtgatctcacgcctgttg

SEQ ID NO: 356855 - DNA, 60 bp, Artificial
  Synthetic oligonucleotide
ccatcgtggtagcagatagaaaggtcatggcccctgatgttggggatcttgtgaccattc

SEQ ID NO: 356856 - DNA, 55 bp, Artificial
  Synthetic oligonucleotide
ccatctaaaatactggaagttggtacagaagaatatctttttgggttcgtctgaa

SEQ ID NO: 356857 - DNA, 55 bp, Artificial
  Synthetic oligonucleotide
ccatctaatgacgattaccagacaccaataactaattcagttacagtcagacaag

SEQ ID NO: 356858 - DNA, 60 bp, Artificial
  Synthetic oligonucleotide
ccatctacactttttgtgttaggtgggttgatcgaagtgcaccaagtcatactagcagac

SEQ ID NO: 356859 - DNA, 55 bp, Artificial
  Synthetic oligonucleotide
ccatctacctcataggctttgatgggacaacggtaatcaccagggctgtggccgc

SEQ ID NO: 356860 - DNA, 57 bp, Artificial
  Synthetic oligonucleotide
ccatctacgagccgtcttgtttgtggtttggagcccacggaccagaaatctatgtcg

SEQ ID NO: 356861 - DNA, 55 bp, Artificial
  Synthetic oligonucleotide
ccatctactatgatagacatcccttatccaggaatgtctgctgccatgggtggag

SEQ ID NO: 356862 - DNA, 55 bp, Artificial
  Synthetic oligonucleotide
ccatctactattggaactaatgtgacacccgcaacagcaaggtcttccctgatgc

SEQ ID NO: 356863 - DNA, 59 bp, Artificial
  Synthetic oligonucleotide
ccatctagatgttccagccaaactccatcgacgcaactttgagggtattgctattaaag

SEQ ID NO: 356864 - DNA, 60 bp, Artificial
  Synthetic oligonucleotide
ccatctaggagtactccaggtgcgcatccaaatcatgcaccgttcctatgctggtacgat

SEQ ID NO: 356865 - DNA, 55 bp, Artificial
  Synthetic oligonucleotide
ccatctaggtaatctcttaaattgtcaaggttattaatcccttggcctgaaggta

SEQ ID NO: 356866 - DNA, 55 bp, Artificial
  Synthetic oligonucleotide
ccatctagtgtctcctttgatgttaagtttgaggattggtggaatagacagctgc

SEQ ID NO: 356867 - DNA, 60 bp, Artificial
  Synthetic oligonucleotide
ccatctatcagtagatgctgcacatagcttagctatggttatggctttgcaatcgctaag

SEQ ID NO: 356868 - DNA, 60 bp, Artificial
  Synthetic oligonucleotide
ccatctatgcacatagggagcgagatctatgcctatacatctaacctgatagcatcaggt

SEQ ID NO: 356869 - DNA, 55 bp, Artificial
  Synthetic oligonucleotide
ccatctatgtcacccctgttgacacaaccttccacggcctccgctatgtggcccc

SEQ ID NO: 356870 - DNA, 53 bp, Artificial
  Synthetic oligonucleotide
ccatctattgtgaacatacataagaaagtgataaatgttggaccgagaaatga

SEQ ID NO: 356871 - DNA, 60 bp, Artificial
  Synthetic oligonucleotide
ccatctcaacaagatcaatgaattaatcattaagggtggtatgatgagcgcacaagacta

SEQ ID NO: 356872 - DNA, 54 bp, Artificial
  Synthetic oligonucleotide
ccatctcaagacagctctatcgcatcgaagagcaagcagccagaaaagcactca

SEQ ID NO: 356873 - DNA, 56 bp, Artificial
  Synthetic oligonucleotide
ccatctcaccccgtatgtactgtacttccagccttacgacgtctctccttcctcac

SEQ ID NO: 356874 - DNA, 55 bp, Artificial
  Synthetic oligonucleotide
ccatctcagcagagagtacatgtcaacgagactatcctctactctaagtgaccga

SEQ ID NO: 356875 - DNA, 50 bp, Artificial
  Synthetic oligonucleotide
ccatctcataatagcaaacgtaagtaccgctcggctatagaagacttgct

SEQ ID NO: 356876 - DNA, 55 bp, Artificial
  Synthetic oligonucleotide
ccatctccagacgagatgatgggaaacgtcggtctggtaattcaattaagcccag

SEQ ID NO: 356877 - DNA, 55 bp, Artificial
  Synthetic oligonucleotide
ccatctcccctgttggaattggtgcttccgtgatctacggaactccgcttgaaga

SEQ ID NO: 356878 - DNA, 55 bp, Artificial
  Synthetic oligonucleotide
ccatctccgaggactctggttaagccctctagtagtatgtcacatgtttccggtg

SEQ ID NO: 356879 - DNA, 60 bp, Artificial
  Synthetic oligonucleotide
ccatctcgattccacagtcaagcaggtttatgctggagatgacatggcattagatggagt

SEQ ID NO: 356880 - DNA, 60 bp, Artificial
  Synthetic oligonucleotide
ccatctcggacactggtatgatgcaagattaaacttaaagacatcatttcactgttatgg

SEQ ID NO: 356881 - DNA, 50 bp, Artificial
  Synthetic oligonucleotide
ccatctcggagatgatatggatcctgagctaagaacactagcacagagcc

SEQ ID NO: 356882 - DNA, 55 bp, Artificial
  Synthetic oligonucleotide
ccatctcggatagtagagcacttaacaggaggttttatctagatgtagacattgc

SEQ ID NO: 356883 - DNA, 55 bp, Artificial
  Synthetic oligonucleotide
ccatctcgtacgattacccagttgtcaagacgaataagacgagacatgtgatcac

SEQ ID NO: 356884 - DNA, 59 bp, Artificial
  Synthetic oligonucleotide
ccatctctatgtctagtagttggagatgggtcgggtgggatatcaagggcagtactcaa

SEQ ID NO: 356885 - DNA, 56 bp, Artificial
  Synthetic oligonucleotide
ccatctctcttgttattttcgtgattggaacattattaagcatcaaggtttggagg

SEQ ID NO: 356886 - DNA, 55 bp, Artificial
  Synthetic oligonucleotide
ccatctcttgagacacctgaagagaccaccgctcccatcatgacacaaggttccc

SEQ ID NO: 356887 - DNA, 51 bp, Artificial
  Synthetic oligonucleotide
ccatctcttttccgacgagtgaaggcaaagattgcggaagaagatttccag

SEQ ID NO: 356888 - DNA, 60 bp, Artificial
  Synthetic oligonucleotide
ccatctgagaaatgacactgatgtggtgaattttgtgagcatggaattttctcttactga

SEQ ID NO: 356889 - DNA, 55 bp, Artificial
  Synthetic oligonucleotide
ccatctgatgtttatactgttagggttcgtgagcattggagacgtaagtcaacta

SEQ ID NO: 356890 - DNA, 55 bp, Artificial
  Synthetic oligonucleotide
ccatctgcattgctgtattgcccaggggaatgtccgatcttttgttctggggaga

SEQ ID NO: 356891 - DNA, 57 bp, Artificial
  Synthetic oligonucleotide
ccatctgcctaacctaaaatggcgtcagtattatatcgaccgtcattgagaacgcac

SEQ ID NO: 356892 - DNA, 60 bp, Artificial
  Synthetic oligonucleotide
ccatctgcggcccaaggaagataagcctgacgcgccctcccatgcggaggacgctatgga

SEQ ID NO: 356893 - DNA, 55 bp, Artificial
  Synthetic oligonucleotide
ccatctgcggggaatgtttcacaatggaacttgtgaactgcctaaagattcagct

SEQ ID NO: 356894 - DNA, 57 bp, Artificial
  Synthetic oligonucleotide
ccatctggaacccccggttattgtcaacagacaccgctctatgtagagtgtggttcc

SEQ ID NO: 356895 - DNA, 60 bp, Artificial
  Synthetic oligonucleotide
ccatctggacattaaaaacccagatatggtaattgaagatcgcccactgaagcatgtgac

SEQ ID NO: 356896 - DNA, 55 bp, Artificial
  Synthetic oligonucleotide
ccatctggatctgtaaagtaaagagatctttggtctctctcatctctttctcggc

SEQ ID NO: 356897 - DNA, 60 bp, Artificial
  Synthetic oligonucleotide
ccatctggcaatcctgcaaccactcccttaaattgcttgatcaattcgataggtttgcgg

SEQ ID NO: 356898 - DNA, 59 bp, Artificial
  Synthetic oligonucleotide
ccatctggcaccacaaaacacagagatggggttaagataccacattcatgaaggatttt

SEQ ID NO: 356899 - DNA, 55 bp, Artificial
  Synthetic oligonucleotide
ccatctggcaccacaaagcataaagaaggggttaagatcccatggtcatggagga

SEQ ID NO: 356900 - DNA, 60 bp, Artificial
  Synthetic oligonucleotide
ccatctggtatccaatcttaattagcatgtagctatgtcaagtcattcagactctacaag

SEQ ID NO: 356901 - DNA, 60 bp, Artificial
  Synthetic oligonucleotide
ccatctggttattctataatgaccagtgatcataatggtgcctttaaggttgttattata

SEQ ID NO: 356902 - DNA, 60 bp, Artificial
  Synthetic oligonucleotide
ccatctgtaatgaaacgagtagcacctatgttgtacaagactagtcgatctaggattgta

SEQ ID NO: 356903 - DNA, 55 bp, Artificial
  Synthetic oligonucleotide
ccatctgtacgacgcaaagtcgttcgctaaattgcgcgcggcccagtatgcagcg

SEQ ID NO: 356904 - DNA, 55 bp, Artificial
  Synthetic oligonucleotide
ccatctgtacgagccattaatgtctttcaatgtcccaggggcaaacgagacagtc

SEQ ID NO: 356905 - DNA, 55 bp, Artificial
  Synthetic oligonucleotide
ccatctgtaggggattacacactacctatcccaacaagagccaaccctagacaaa

SEQ ID NO: 356906 - DNA, 55 bp, Artificial
  Synthetic oligonucleotide
ccatctgtcccagcaagaacacgctcctcatggacttgccggtgccctccgcttg

SEQ ID NO: 356907 - DNA, 57 bp, Artificial
  Synthetic oligonucleotide
ccatctgttaaactttcgtcggaagcaggtaggaacctgcttacagcctgactgttc

SEQ ID NO: 356908 - DNA, 59 bp, Artificial
  Synthetic oligonucleotide
ccatctgttatggcgcacagagtgttacacttgttagagggcagaatacagtaaaggtt

SEQ ID NO: 356909 - DNA, 55 bp, Artificial
  Synthetic oligonucleotide
ccatctgttgaggcgtgtgggtattcagacaggttaatgcagatcacccgtgggg

SEQ ID NO: 356910 - DNA, 60 bp, Artificial
  Synthetic oligonucleotide
ccatcttactataccttgagttcactaacaattcagacaagcgtaatcgatgatttcgga

SEQ ID NO: 356911 - DNA, 55 bp, Artificial
  Synthetic oligonucleotide
ccatcttatggatggtatctatgtggacttagccgaggtaacggcataccgttcc

SEQ ID NO: 356912 - DNA, 60 bp, Artificial
  Synthetic oligonucleotide
ccatcttattcatcactgggatctattttctcaaaatttgatcaggttctcgatcgaatt

SEQ ID NO: 356913 - DNA, 59 bp, Artificial
  Synthetic oligonucleotide
ccatcttattcctcgctcagtatccttacaagctcaacagaggctaaacatgtttttag

SEQ ID NO: 356914 - DNA, 55 bp, Artificial
  Synthetic oligonucleotide
ccatcttcacatgaccctctatgagcacaatagttaaaagctaacactgtcaaaa

SEQ ID NO: 356915 - DNA, 55 bp, Artificial
  Synthetic oligonucleotide
ccatcttctaggataaaggctaggcctgggctactgggtgaaaatagagtcaggc

SEQ ID NO: 356916 - DNA, 50 bp, Artificial
  Synthetic oligonucleotide
ccatcttctgtacatatgtatccctagccttctatcttcttttagatcag

SEQ ID NO: 356917 - DNA, 55 bp, Artificial
  Synthetic oligonucleotide
ccatcttggtgcttttcctgttgtacgcgtacgtacacgacgtggctagcaagag

SEQ ID NO: 356918 - DNA, 59 bp, Artificial
  Synthetic oligonucleotide
ccatcttgtcgagaaatgtgttagcgaggtaaagagatttatcttgaactatatcttcc

SEQ ID NO: 356919 - DNA, 55 bp, Artificial
  Synthetic oligonucleotide
ccatcttgtttggaaatcacaacctttgtagcattctaaagttttatggtaggcc

SEQ ID NO: 356920 - DNA, 55 bp, Artificial
  Synthetic oligonucleotide
ccatctttactctcaatttcacatggtgcatacctagtgcttttccctggttgtc

SEQ ID NO: 356921 - DNA, 59 bp, Artificial
  Synthetic oligonucleotide
ccatctttcgactataatgatgtgttaaagctagataacgacgactatttaagctatta

SEQ ID NO: 356922 - DNA, 50 bp, Artificial
  Synthetic oligonucleotide
ccatctttttcaatattgagaacacgtacagtgaatttgtacgggttacc

SEQ ID NO: 356923 - DNA, 55 bp, Artificial
  Synthetic oligonucleotide
ccatctttttcaatattgagaacacgtacggtaaatttatatggattaccggctg

SEQ ID NO: 356924 - DNA, 55 bp, Artificial
  Synthetic oligonucleotide
ccatgaaaacacgctgtcggggtgggtagtcactctcacagcaatcatggagctt

SEQ ID NO: 356925 - DNA, 55 bp, Artificial
  Synthetic oligonucleotide
ccatgaaaacactaaagaaggttggctcatcacactaacgagccttgcggagctc

SEQ ID NO: 356926 - DNA, 60 bp, Artificial
  Synthetic oligonucleotide
ccatgaacataatgcgtgctcttcgttttcacatagattcgaagacacttcgagaaacat

SEQ ID NO: 356927 - DNA, 56 bp, Artificial
  Synthetic oligonucleotide
ccatgaacatggggcccgagtgacgccctgttggtccgtaaaaatacacggcagga

SEQ ID NO: 356928 - DNA, 55 bp, Artificial
  Synthetic oligonucleotide
ccatgaacgagggcatgtggcgcgtgatgactgaccagggaggggtgttcaccag

SEQ ID NO: 356929 - DNA, 51 bp, Artificial
  Synthetic oligonucleotide
ccatgaacggaaatgactttcaaactggaggaattggtaatctacctatca

SEQ ID NO: 356930 - DNA, 52 bp, Artificial
  Synthetic oligonucleotide
ccatgaacttgcgtctcttactgttgattttgctcttttgggcagggacaag

SEQ ID NO: 356931 - DNA, 59 bp, Artificial
  Synthetic oligonucleotide
ccatgaagactgtcattgccttgagctatattttctgtatggtccttggccgagacctc

SEQ ID NO: 356932 - DNA, 55 bp, Artificial
  Synthetic oligonucleotide
ccatgaagagtcagggcggcccaaacccaaaactgagaaagtcttatcctcagca

SEQ ID NO: 356933 - DNA, 60 bp, Artificial
  Synthetic oligonucleotide
ccatgaagcatttgaaatagcagaaggccatgaaagctcagcgttactatattgtctcat

SEQ ID NO: 356934 - DNA, 55 bp, Artificial
  Synthetic oligonucleotide
ccatgaatctgcaatcctagtgtatctagggctcatagtgtgaagtggtgtccac

SEQ ID NO: 356935 - DNA, 55 bp, Artificial
  Synthetic oligonucleotide
ccatgaatggaaatgattttcaaactggaggaattggcaacctacccgtcagaaa

SEQ ID NO: 356936 - DNA, 60 bp, Artificial
  Synthetic oligonucleotide
ccatgaatgtaagcatccaaaagcaagttcagaagtacacatgccactaggggatgctag

SEQ ID NO: 356937 - DNA, 60 bp, Artificial
  Synthetic oligonucleotide
ccatgaatttctaattgattcatgatgcctccttgtgagaaggatgttcgggtggctgct

SEQ ID NO: 356938 - DNA, 59 bp, Artificial
  Synthetic oligonucleotide
ccatgacaccactgctttcacgaggattactgactcccccctgacgtattctacctatg

SEQ ID NO: 356939 - DNA, 55 bp, Artificial
  Synthetic oligonucleotide
ccatgacactactagaggactctttcaaagaactcacttctgcacttgaaggtag

SEQ ID NO: 356940 - DNA, 60 bp, Artificial
  Synthetic oligonucleotide
ccatgacaggaccattagtagctggagggcttctcactgtgtgttacgtgctcactggaa

SEQ ID NO: 356941 - DNA, 60 bp, Artificial
  Synthetic oligonucleotide
ccatgacatggccacttataccccatgtcatattctgccaccccagacaattaggagcct

SEQ ID NO: 356942 - DNA, 59 bp, Artificial
  Synthetic oligonucleotide
ccatgacccttggagtgggggcggatgttggctgcgctgtggacacggaacgaatggag

SEQ ID NO: 356943 - DNA, 55 bp, Artificial
  Synthetic oligonucleotide
ccatgaccgctgttaatgagtctagatatggcttgcaaaacttactacagttacc

SEQ ID NO: 356944 - DNA, 57 bp, Artificial
  Synthetic oligonucleotide
ccatgaccggaggagtcagggttccagtggaccagtccaattttgatcgccagcctg

SEQ ID NO: 356945 - DNA, 55 bp, Artificial
  Synthetic oligonucleotide
ccatgacctatcaaaaccctgccggttgaaaggctaaccgtgaaagagcgcagcg

SEQ ID NO: 356946 - DNA, 52 bp, Artificial
  Synthetic oligonucleotide
ccatgacgatcttagcatatcatcaggattagttgagagtttactggactcg

SEQ ID NO: 356947 - DNA, 60 bp, Artificial
  Synthetic oligonucleotide
ccatgacgggcttatccggtataaggttgacggctgtagaatgagcggcgatatgaacac

SEQ ID NO: 356948 - DNA, 56 bp, Artificial
  Synthetic oligonucleotide
ccatgacgtacgccggctgccaaggactaaccgcaccgaaagttcaaatcttgttg

SEQ ID NO: 356949 - DNA, 55 bp, Artificial
  Synthetic oligonucleotide
ccatgactaccatacatggctcgcttacctacttgttcgcaactacccgacgccg

SEQ ID NO: 356950 - DNA, 55 bp, Artificial
  Synthetic oligonucleotide
ccatgactacgcaaaggtctggtaaactatgggattatccaactttataacatgg

SEQ ID NO: 356951 - DNA, 55 bp, Artificial
  Synthetic oligonucleotide
ccatgactcgccacctcttgatgaggtagcacttcaagaataccgtacggttgcc

SEQ ID NO: 356952 - DNA, 59 bp, Artificial
  Synthetic oligonucleotide
ccatgactgtccaggtagtatagcgggagttgtgtatctgcttgactgggaccgtaaat

SEQ ID NO: 356953 - DNA, 52 bp, Artificial
  Synthetic oligonucleotide
ccatgactgttcaaaccgaaagccatttgtcatacaccagactaaatgcgtt

SEQ ID NO: 356954 - DNA, 60 bp, Artificial
  Synthetic oligonucleotide
ccatgactttaaagaagcttgttatcggatgattcaatcggcctcaaacatgccaatcac

SEQ ID NO: 356955 - DNA, 57 bp, Artificial
  Synthetic oligonucleotide
ccatgagaatagtctcagttcaaaccaattttacagtggagttttgacgagtccaag

SEQ ID NO: 356956 - DNA, 55 bp, Artificial
  Synthetic oligonucleotide
ccatgagacaactaaaggtgttacagctgcctgctcttactctggggccagcagt

SEQ ID NO: 356957 - DNA, 55 bp, Artificial
  Synthetic oligonucleotide
ccatgagatcatttgtactaaggtcgtattatccattttcataccgacgtttcca

SEQ ID NO: 356958 - DNA, 55 bp, Artificial
  Synthetic oligonucleotide
ccatgagcaaaactagaccgtacagatctggaaaatatgtagtgcctagaataat

SEQ ID NO: 356959 - DNA, 55 bp, Artificial
  Synthetic oligonucleotide
ccatgagccccgtaatgggagtgatcggattctccttctttgcaaaggactggcc

SEQ ID NO: 356960 - DNA, 50 bp, Artificial
  Synthetic oligonucleotide
ccatgagctaccagaagttccatataatgcctttctcctcatgtctgatg

SEQ ID NO: 356961 - DNA, 55 bp, Artificial
  Synthetic oligonucleotide
ccatgaggccagatcttcatggcagcgtagttctgactcagtgaagggcgacaca

SEQ ID NO: 356962 - DNA, 57 bp, Artificial
  Synthetic oligonucleotide
ccatgagggaatacaagcaggagtagatagattctataggacctgcaagttagtcgg

SEQ ID NO: 356963 - DNA, 55 bp, Artificial
  Synthetic oligonucleotide
ccatgagtaccacaatgtatctactcttcaaacagctgaaatgctcaatgatcta

SEQ ID NO: 356964 - DNA, 53 bp, Artificial
  Synthetic oligonucleotide
ccatgagtagtggaactcacgtccatatcattgatggaagtgtggaaattact

SEQ ID NO: 356965 - DNA, 55 bp, Artificial
  Synthetic oligonucleotide
ccatgagtccattcgttggactaaggatgcacgcaacactcaggatcacgtgcgc

SEQ ID NO: 356966 - DNA, 55 bp, Artificial
  Synthetic oligonucleotide
ccatgagtctcgttgaagactagttacgcaataacgaccggcgcattcacaactg

SEQ ID NO: 356967 - DNA, 55 bp, Artificial
  Synthetic oligonucleotide
ccatgagtgtcgtgaactaaaacactccgtgacgcttggaagtctgacagaccta

SEQ ID NO: 356968 - DNA, 55 bp, Artificial
  Synthetic oligonucleotide
ccatgagtttctgctgttataaacctcatcaagggacaggattcaactgcttctc

SEQ ID NO: 356969 - DNA, 60 bp, Artificial
  Synthetic oligonucleotide
ccatgataactgtgcggtggtgccaacacacgctgagtgtggtgattccgtcacaattga

SEQ ID NO: 356970 - DNA, 55 bp, Artificial
  Synthetic oligonucleotide
ccatgataagctgcttgagaattataatctaacggttgaagtcacagcagggaag

SEQ ID NO: 356971 - DNA, 55 bp, Artificial
  Synthetic oligonucleotide
ccatgatagttcacaacgtaaaggtggtgtctgcacattgttcgacattctgtac

SEQ ID NO: 356972 - DNA, 55 bp, Artificial
  Synthetic oligonucleotide
ccatgatcagataatgagtgtgaaaacagtggatctcacactagtgatttatgga

SEQ ID NO: 356973 - DNA, 60 bp, Artificial
  Synthetic oligonucleotide
ccatgatctagctggagaagagattgcctcttactctattgttggacctgccaatgcaaa

SEQ ID NO: 356974 - DNA, 56 bp, Artificial
  Synthetic oligonucleotide
ccatgatctccctgaaaaacatggtagagagatcttttctgaaactcatggccact

SEQ ID NO: 356975 - DNA, 60 bp, Artificial
  Synthetic oligonucleotide
ccatgatgaacagaacactttcctcaggatctgccgtacgggaagtatctacgagctgat

SEQ ID NO: 356976 - DNA, 60 bp, Artificial
  Synthetic oligonucleotide
ccatgatgaaggcccaacggattcatgagaatcaatatggtccagattttgcaatggttc

SEQ ID NO: 356977 - DNA, 60 bp, Artificial
  Synthetic oligonucleotide
ccatgatgagcctaaaatgaaattgcaacgcatacatgaaaatcaatatgggcctgaatt

SEQ ID NO: 356978 - DNA, 55 bp, Artificial
  Synthetic oligonucleotide
ccatgatgatatatctagtatggagaagaattgagaacttcgcaatggcgcaggg

SEQ ID NO: 356979 - DNA, 55 bp, Artificial
  Synthetic oligonucleotide
ccatgatgattgtagagattcgttgtctgtcattcttttgtcgtggatctccact

SEQ ID NO: 356980 - DNA, 55 bp, Artificial
  Synthetic oligonucleotide
ccatgatgctacgtccgtggacaagccgactgagccgggagttagtgctgagcgt

SEQ ID NO: 356981 - DNA, 55 bp, Artificial
  Synthetic oligonucleotide
ccatgatggtatatagcacatccaccataatgagaatattttgtacactcaccca

SEQ ID NO: 356982 - DNA, 55 bp, Artificial
  Synthetic oligonucleotide
ccatgattacgccaatgtgctaggcagagttgatgcaggaactttaaagttaagc

SEQ ID NO: 356983 - DNA, 60 bp, Artificial
  Synthetic oligonucleotide
ccatgattatgaccagtgtttccagtccgttcagttgttgcagtggaatagtcaggttaa

SEQ ID NO: 356984 - DNA, 60 bp, Artificial
  Synthetic oligonucleotide
ccatgattccaacgtaaagaatctgtatgacaaggtcagaatgcaactgagagacaatgc

SEQ ID NO: 356985 - DNA, 51 bp, Artificial
  Synthetic oligonucleotide
ccatgattctaatgtgaagagtctgtacgacaaggtcaggatgcaattgag

SEQ ID NO: 356986 - DNA, 52 bp, Artificial
  Synthetic oligonucleotide
ccatgatttgtataatgcagaagcgtcttaaagcgtcttaaagcgtcgcaaa

SEQ ID NO: 356987 - DNA, 55 bp, Artificial
  Synthetic oligonucleotide
ccatgattttgacgacacagattggttcgctggtaatgactgggcggaagggtcg

SEQ ID NO: 356988 - DNA, 57 bp, Artificial
  Synthetic oligonucleotide
ccatgcaaacaactcgacagaacaggttgacacaataatggaaaagaacgttactgt

SEQ ID NO: 356989 - DNA, 57 bp, Artificial
  Synthetic oligonucleotide
ccatgcaacctgaacagaaccaggttaacccttgatgaggaggagtacaccctatgg

SEQ ID NO: 356990 - DNA, 58 bp, Artificial
  Synthetic oligonucleotide
ccatgcacgcaagtgggtaaatgccgtaggcttgtgtggcttatccctcactggtgga

SEQ ID NO: 356991 - DNA, 60 bp, Artificial
  Synthetic oligonucleotide
ccatgcacgttgcaggctaacgctatgaagtatgaacagccgcacggtagatcaactcgt

SEQ ID NO: 356992 - DNA, 58 bp, Artificial
  Synthetic oligonucleotide
ccatgcactccaacagagcttgtaatgtcgggttggtcttaggggctttccacgaatc

SEQ ID NO: 356993 - DNA, 55 bp, Artificial
  Synthetic oligonucleotide
ccatgcatgggagcgacgtgactgtaacaaaatttgacgtcaatggcttaaaagg

SEQ ID NO: 356994 - DNA, 55 bp, Artificial
  Synthetic oligonucleotide
ccatgccacaaggagtggatgatctaataactgaagtggcacaaagtgccctggc

SEQ ID NO: 356995 - DNA, 55 bp, Artificial
  Synthetic oligonucleotide
ccatgccaggtgatttacaatggagccacctataatgtcagctgcatcaaagggg

SEQ ID NO: 356996 - DNA, 60 bp, Artificial
  Synthetic oligonucleotide
ccatgccagtacagacccatccaccattcatgttagccgtctagatgagcaaatgcaagt

SEQ ID NO: 356997 - DNA, 55 bp, Artificial
  Synthetic oligonucleotide
ccatgcccgcatttcgcactgtatttatcaacacacgatgatgcaaggcaatatt

SEQ ID NO: 356998 - DNA, 55 bp, Artificial
  Synthetic oligonucleotide
ccatgccgtaaaataatgcttgtaggcgagaatggtagaggtaaaaccgttatcc

SEQ ID NO: 356999 - DNA, 60 bp, Artificial
  Synthetic oligonucleotide
ccatgccgtgtgagtacttagagtcttgcttaaattgcttttgatcagtaggttctctat

SEQ ID NO: 357000 - DNA, 58 bp, Artificial
  Synthetic oligonucleotide
ccatgcctacaataggacctaaagcctatctgttcccagaacgcttaccacccatgtg

SEQ ID NO: 357001 - DNA, 55 bp, Artificial
  Synthetic oligonucleotide
ccatgcctcagcttgctctccccccatccctcaaacggcctgccaccccctagcc

SEQ ID NO: 357002 - DNA, 55 bp, Artificial
  Synthetic oligonucleotide
ccatgcctggactcttcgcctaccgcgcagggaccaaggttggatactgcggagc

SEQ ID NO: 357003 - DNA, 55 bp, Artificial
  Synthetic oligonucleotide
ccatgcgaagctgggccgtatgggattctgccacgcggtctccctgtaccaactg

SEQ ID NO: 357004 - DNA, 60 bp, Artificial
  Synthetic oligonucleotide
ccatgcgaatccgccgagcagccatagagaagtctcaattaccctcttcccacgagaacc

SEQ ID NO: 357005 - DNA, 60 bp, Artificial
  Synthetic oligonucleotide
ccatgcgacttataaccatcaagaggctgcgaaatatgataaccacacagagaatgcttt

SEQ ID NO: 357006 - DNA, 54 bp, Artificial
  Synthetic oligonucleotide
ccatgcgagcccgaaccagatgtggtagtgatcacttccatgcttactgacccc

SEQ ID NO: 357007 - DNA, 58 bp, Artificial
  Synthetic oligonucleotide
ccatgcgataaacttcctagtgttttaacaaggggtgatcccagattggcaggcacag

SEQ ID NO: 357008 - DNA, 52 bp, Artificial
  Synthetic oligonucleotide
ccatgcgatgtatgcggtcttgcgcttgcagctcaatttgcgggttccaatg

SEQ ID NO: 357009 - DNA, 60 bp, Artificial
  Synthetic oligonucleotide
ccatgcgcaggcaaaattctacttcgaaaactatcatgacgagggatacaacccgctgaa

SEQ ID NO: 357010 - DNA, 55 bp, Artificial
  Synthetic oligonucleotide
ccatgcgcagtgtcagcgtgcagaccaacgtgcagggttttgtaccacacctggg

SEQ ID NO: 357011 - DNA, 56 bp, Artificial
  Synthetic oligonucleotide
ccatgcgtattgggggtttgacgtgggaactcgacaccgctattacaagtcagaac

SEQ ID NO: 357012 - DNA, 58 bp, Artificial
  Synthetic oligonucleotide
ccatgcgtcattactgtaaaccttgggactcaagtctaggtgaccacataaataatta

SEQ ID NO: 357013 - DNA, 58 bp, Artificial
  Synthetic oligonucleotide
ccatgcgtcattagaatatacctttggacttaagtctaaatgaccacataagtaatta

SEQ ID NO: 357014 - DNA, 55 bp, Artificial
  Synthetic oligonucleotide
ccatgcgtcgttactgtacacctttggactaagatctaagtgcccacacagatag

SEQ ID NO: 357015 - DNA, 55 bp, Artificial
  Synthetic oligonucleotide
ccatgcgtcgttgctgtacacctttgggcttaggtctagatgcccacacaagtaa

SEQ ID NO: 357016 - DNA, 55 bp, Artificial
  Synthetic oligonucleotide
ccatgcgtgataacatacgcgtattaccacgtaggagatatcgttagaggaactt

SEQ ID NO: 357017 - DNA, 51 bp, Artificial
  Synthetic oligonucleotide
ccatgcgtggcacttcaagacgacgataaagcatttctgaattaactgccg

SEQ ID NO: 357018 - DNA, 55 bp, Artificial
  Synthetic oligonucleotide
ccatgctactactcaggcctcgctgttggaattaacccatataaggattggcact

SEQ ID NO: 357019 - DNA, 60 bp, Artificial
  Synthetic oligonucleotide
ccatgctatgagaaggaaagatgttatcgtaaggaagtgtttcaatgacaactatcagtc

SEQ ID NO: 357020 - DNA, 59 bp, Artificial
  Synthetic oligonucleotide
ccatgctatggatcttatgccaggcctacaaatccttttggtggtcaatccgttctggt

SEQ ID NO: 357021 - DNA, 55 bp, Artificial
  Synthetic oligonucleotide
ccatgctccgcaatcaccccgaccttccagtcgaagttgtgctgcctaccaacga

SEQ ID NO: 357022 - DNA, 55 bp, Artificial
  Synthetic oligonucleotide
ccatgctccggccatttggtgtaatgaaacaatgtgacgaggcgacttgcgtgcg

SEQ ID NO: 357023 - DNA, 55 bp, Artificial
  Synthetic oligonucleotide
ccatgctgaggatctcgaaactgtccgcttcaaggcccgtaagttccccggcgcc

SEQ ID NO: 357024 - DNA, 54 bp, Artificial
  Synthetic oligonucleotide
ccatgctggcaaaggaaatgggcataactatcatcatctggactgtaacagcca

SEQ ID NO: 357025 - DNA, 55 bp, Artificial
  Synthetic oligonucleotide
ccatgctggcagtatatagacacatatttaaggaatgggctagatggaaatccgg

SEQ ID NO: 357026 - DNA, 55 bp, Artificial
  Synthetic oligonucleotide
ccatgctgggtatcagagatcgcttggctgtcctcccgcgacatgcacagcctgg

SEQ ID NO: 357027 - DNA, 55 bp, Artificial
  Synthetic oligonucleotide
ccatgctggtacaactggagtgatgtgtgctgaaacttacaactctaggaggcac

SEQ ID NO: 357028 - DNA, 58 bp, Artificial
  Synthetic oligonucleotide
ccatgcttaccaggccactgggaattgcggcgggtacctaaacgatactgacaatgta

SEQ ID NO: 357029 - DNA, 58 bp, Artificial
  Synthetic oligonucleotide
ccatgcttcacgacaagatactagacactatcacctctaataagccaggcgtggtact

SEQ ID NO: 357030 - DNA, 55 bp, Artificial
  Synthetic oligonucleotide
ccatgcttgtactgattccttaatttccgctaggaatattcgggtttgcgttggt

SEQ ID NO: 357031 - DNA, 55 bp, Artificial
  Synthetic oligonucleotide
ccatgcttttaaggaaaggctgtcccaatgaagtaataccttttgcttatggagc

SEQ ID NO: 357032 - DNA, 60 bp, Artificial
  Synthetic oligonucleotide
ccatggaaatggcccagcatgaagtccatctttgaaacgacgtcgcgtgtgtctcttatg

SEQ ID NO: 357033 - DNA, 55 bp, Artificial
  Synthetic oligonucleotide
ccatggaacaggaacaggctacacaatagacaccgtgatcagaacgcatgagtac

SEQ ID NO: 357034 - DNA, 55 bp, Artificial
  Synthetic oligonucleotide
ccatggaacagttccaacaggtatctaacgatctgcataagctgatgctatcagc

SEQ ID NO: 357035 - DNA, 55 bp, Artificial
  Synthetic oligonucleotide
ccatggaacgagctatacaaggaaacgacactagggaacaagctaacggtgaacg

SEQ ID NO: 357036 - DNA, 56 bp, Artificial
  Synthetic oligonucleotide
ccatggaactgtgttgaactatgtggggagaccaagtcgaagaatcttttattttg

SEQ ID NO: 357037 - DNA, 60 bp, Artificial
  Synthetic oligonucleotide
ccatggaagaaagatggctgacggtagcgtactgcgcccacggattactctgcgactgta

SEQ ID NO: 357038 - DNA, 58 bp, Artificial
  Synthetic oligonucleotide
ccatggaatacgacgctgttgccacaacgcactcctgggttcctaaaagaaatcgatc

SEQ ID NO: 357039 - DNA, 55 bp, Artificial
  Synthetic oligonucleotide
ccatggaattggatctttaagggagaagaatgacgaggaaaagtagtggagatct

SEQ ID NO: 357040 - DNA, 60 bp, Artificial
  Synthetic oligonucleotide
ccatggacagttatctgaccacccccatgccttatcatccagtaacagtagtacagaacc

SEQ ID NO: 357041 - DNA, 60 bp, Artificial
  Synthetic oligonucleotide
ccatggacattagctctatatcggttgctgagcacccatttgtggcacgggacttcctta

SEQ ID NO: 357042 - DNA, 60 bp, Artificial
  Synthetic oligonucleotide
ccatggacattgcatacgctaattcaacgcaagaagaaacattcctcacttctacacttt

SEQ ID NO: 357043 - DNA, 57 bp, Artificial
  Synthetic oligonucleotide
ccatggaccgggaggtggctgcatcgtgcgggggcgcggtttttataggtctggcac

SEQ ID NO: 357044 - DNA, 50 bp, Artificial
  Synthetic oligonucleotide
ccatggacggctccatgctatgagtgcggatgcccacagatgccccacaa

SEQ ID NO: 357045 - DNA, 60 bp, Artificial
  Synthetic oligonucleotide
ccatggacttagcgcgtttacactccattcatactctccaagtgagatcaatagggtgag

SEQ ID NO: 357046 - DNA, 60 bp, Artificial
  Synthetic oligonucleotide
ccatggagaagaccatgacatagaccctaatgccattagctcactgaggattgtaggaca

SEQ ID NO: 357047 - DNA, 55 bp, Artificial
  Synthetic oligonucleotide
ccatggagaagacgcaaacaacagagccactaaattcctagaatcaataaagggc

SEQ ID NO: 357048 - DNA, 54 bp, Artificial
  Synthetic oligonucleotide
ccatggagacactagaaactggtacggcggagaaataccaacaaccggacccac

SEQ ID NO: 357049 - DNA, 60 bp, Artificial
  Synthetic oligonucleotide
ccatggagagacttgctgccaagtaccccactcaagtggccttacctgctaccatggaga

SEQ ID NO: 357050 - DNA, 55 bp, Artificial
  Synthetic oligonucleotide
ccatggagcaagtggctggatcgagtgaacaggcagctgaagctatggaggtcgc

SEQ ID NO: 357051 - DNA, 60 bp, Artificial
  Synthetic oligonucleotide
ccatggagctaaggaagttgcactcagctattcaaccggtgcacttgccagttgcatggg

SEQ ID NO: 357052 - DNA, 54 bp, Artificial
  Synthetic oligonucleotide
ccatggaggatgtcctagggattgctaacggaatccgcttacggcagcagcctc

SEQ ID NO: 357053 - DNA, 60 bp, Artificial
  Synthetic oligonucleotide
ccatggaggttgccagccaggctaggcaaatggtacaggcaatgagaacaattgggactc

SEQ ID NO: 357054 - DNA, 55 bp, Artificial
  Synthetic oligonucleotide
ccatggagttgacagatatcactcgtgcgtttgagtcaggtgactttgcacgccc

SEQ ID NO: 357055 - DNA, 56 bp, Artificial
  Synthetic oligonucleotide
ccatggagttttccaccttgcaggaaaacaagtcagatgcaccactggacattaac

SEQ ID NO: 357056 - DNA, 58 bp, Artificial
  Synthetic oligonucleotide
ccatggataagaccctgaatcaatatccggcgctagcgtctgaaatttataacgttta

SEQ ID NO: 357057 - DNA, 60 bp, Artificial
  Synthetic oligonucleotide
ccatggataaggcatacggtatctctcattcagatcagttcactggtagttctgtgatcg

SEQ ID NO: 357058 - DNA, 55 bp, Artificial
  Synthetic oligonucleotide
ccatggatgaaccagtccaacacaacaagcctggacaagggatttcagcatggcc

SEQ ID NO: 357059 - DNA, 55 bp, Artificial
  Synthetic oligonucleotide
ccatggatggaggacaaaactcatgtgtccagttgggaagacgttccatacctag

SEQ ID NO: 357060 - DNA, 55 bp, Artificial
  Synthetic oligonucleotide
ccatggatgtagacggtagtgtaaaacaaatggttgaacgtgagaccgttgctcg

SEQ ID NO: 357061 - DNA, 60 bp, Artificial
  Synthetic oligonucleotide
ccatggatttcggacaggtgttcaacatgtacgacaacgagcccagtactgccactgtga

SEQ ID NO: 357062 - DNA, 58 bp, Artificial
  Synthetic oligonucleotide
ccatggcaagctactgtgctaaatggggcaaagttcctgattggacggaaaactgggc

SEQ ID NO: 357063 - DNA, 50 bp, Artificial
  Synthetic oligonucleotide
ccatggcaatccattccacttcggatttacccttaggtgaactctgtgag

SEQ ID NO: 357064 - DNA, 55 bp, Artificial
  Synthetic oligonucleotide
ccatggcagatgcgttcacggcatattccccttcgttaaatagtaaaacggtcat

SEQ ID NO: 357065 - DNA, 60 bp, Artificial
  Synthetic oligonucleotide
ccatggcatgacaggtgtttacaagaaccctactctccatagttcagagaaggggcagat

SEQ ID NO: 357066 - DNA, 54 bp, Artificial
  Synthetic oligonucleotide
ccatggcccatagatgcatcattactcgctgaggccggtaaggactacgggttg

SEQ ID NO: 357067 - DNA, 55 bp, Artificial
  Synthetic oligonucleotide
ccatggccccggttcccctgattaggctacgagtcgcggtgatcgcttcccaaaa

SEQ ID NO: 357068 - DNA, 55 bp, Artificial
  Synthetic oligonucleotide
ccatggccggtgctggacgcatttactattctcgctttggtgacgaggcagccag

SEQ ID NO: 357069 - DNA, 60 bp, Artificial
  Synthetic oligonucleotide
ccatggcctaagcgcgttctcactccacagttactctccagttgagctcaatagggtagc

SEQ ID NO: 357070 - DNA, 60 bp, Artificial
  Synthetic oligonucleotide
ccatggcctcagcattgactaagattcagagtgtagttaatcaacagggtgaagcgttga

SEQ ID NO: 357071 - DNA, 55 bp, Artificial
  Synthetic oligonucleotide
ccatggcggttgacatgtaggtgagtagtgtaagaagcatggcgaagtagacagg

SEQ ID NO: 357072 - DNA, 56 bp, Artificial
  Synthetic oligonucleotide
ccatggcgttctatggcggtaacctcaaaggttagccgcaacgctaattgttctcc

SEQ ID NO: 357073 - DNA, 60 bp, Artificial
  Synthetic oligonucleotide
ccatggctcaaaggtatgctagatctcatgcaagatgaagattaccttgagcctgaagct

SEQ ID NO: 357074 - DNA, 55 bp, Artificial
  Synthetic oligonucleotide
ccatggctcacaacaccgcttccacccttgaagccatgctgcggaatgacaccaa

SEQ ID NO: 357075 - DNA, 55 bp, Artificial
  Synthetic oligonucleotide
ccatggctccatagtatgggacaatatatctatgaaacctatggggacacttgga

SEQ ID NO: 357076 - DNA, 55 bp, Artificial
  Synthetic oligonucleotide
ccatggctctatcagaagatgcattgaaagagcttactgccaccttagagggtag

SEQ ID NO: 357077 - DNA, 60 bp, Artificial
  Synthetic oligonucleotide
ccatggctgggccacagctgctttgcttgttacatactgttttggatgggtccttatacc

SEQ ID NO: 357078 - DNA, 55 bp, Artificial
  Synthetic oligonucleotide
ccatggcttctccactttcactgacttctttaaagctgttagggactaccatgcc

SEQ ID NO: 357079 - DNA, 59 bp, Artificial
  Synthetic oligonucleotide
ccatggcttgagcgcatttacactccacggatactctccgcatgagctcaatcgggtgg

SEQ ID NO: 357080 - DNA, 55 bp, Artificial
  Synthetic oligonucleotide
ccatggctttctgccctaggacagtatatctatgacacctatggggatacttgga

SEQ ID NO: 357081 - DNA, 56 bp, Artificial
  Synthetic oligonucleotide
ccatgggaacctagccattacacccgctttaaaagatcgttattatgttcgacatg

SEQ ID NO: 357082 - DNA, 55 bp, Artificial
  Synthetic oligonucleotide
ccatgggaattcaactggaccaacgcattatcgtgcttttcatggtggactgggg

SEQ ID NO: 357083 - DNA, 60 bp, Artificial
  Synthetic oligonucleotide
ccatgggaccccttaaaagcgtgcccaactataaactatatgatcccacagtgcagcatg

SEQ ID NO: 357084 - DNA, 54 bp, Artificial
  Synthetic oligonucleotide
ccatgggaggggtctcaggggtttctcttaccagattcttaattcgaatgttcc

SEQ ID NO: 357085 - DNA, 58 bp, Artificial
  Synthetic oligonucleotide
ccatgggcaccttatgtgttcgtgtggttacagaacagcaaagcaacacagtcaacat

SEQ ID NO: 357086 - DNA, 60 bp, Artificial
  Synthetic oligonucleotide
ccatgggcgcacaagtatccaggcaaaatgttggaactcactccacacagaattctgtat

SEQ ID NO: 357087 - DNA, 60 bp, Artificial
  Synthetic oligonucleotide
ccatgggcgctcaggtatctagacagaatgttggtacacactcaacacagaactcagtat

SEQ ID NO: 357088 - DNA, 60 bp, Artificial
  Synthetic oligonucleotide
ccatgggctacatgaatgcacactctgtagccatggagttgcgggctaggtacggagtcc

SEQ ID NO: 357089 - DNA, 58 bp, Artificial
  Synthetic oligonucleotide
ccatgggctttaccctgtgatgacagccggtcgttagaagttctcacgaacgtgtcta

SEQ ID NO: 357090 - DNA, 60 bp, Artificial
  Synthetic oligonucleotide
ccatggggcaaaagaagtggcactcagttattcaactggtgcacttgccagctgcatggg

SEQ ID NO: 357091 - DNA, 60 bp, Artificial
  Synthetic oligonucleotide
ccatggggccaaagagatagcactcagttattctgctggtgcacttgccagttgtatggg

SEQ ID NO: 357092 - DNA, 59 bp, Artificial
  Synthetic oligonucleotide
ccatggggcgctctaatacggacatggtgcgaaaagtctactgagctagttagtagtcc

SEQ ID NO: 357093 - DNA, 58 bp, Artificial
  Synthetic oligonucleotide
ccatggggggaggtcttggcctggaagtttaatcctatgctggcagtagattacatag

SEQ ID NO: 357094 - DNA, 57 bp, Artificial
  Synthetic oligonucleotide
ccatggggtttaacataagaatggtgtatgaaaatagatgggaaacatttattatgc

SEQ ID NO: 357095 - DNA, 55 bp, Artificial
  Synthetic oligonucleotide
ccatgggtatagatggtaaggtatggatggatgacaatgtggccaagagagatca

SEQ ID NO: 357096 - DNA, 60 bp, Artificial
  Synthetic oligonucleotide
ccatgggtggcatttgattttgctactggtctaaaaatgaatcgtctaacacctgatgaa

SEQ ID NO: 357097 - DNA, 60 bp, Artificial
  Synthetic oligonucleotide
ccatgggtgtttgcttgtgcacctgatagatgccctccgacatgtatatatgtggccggg

SEQ ID NO: 357098 - DNA, 55 bp, Artificial
  Synthetic oligonucleotide
ccatgggttcttcgtgtacaattaaagtatgtccactaaacacacagactttagg

SEQ ID NO: 357099 - DNA, 55 bp, Artificial
  Synthetic oligonucleotide
ccatgggttgcactcacaactggtgtttgtttgtacttaatagagctatatgtcg

SEQ ID NO: 357100 - DNA, 55 bp, Artificial
  Synthetic oligonucleotide
ccatggtaagactcacgactagttactcaggcccacttaacgagtatacattagc

SEQ ID NO: 357101 - DNA, 55 bp, Artificial
  Synthetic oligonucleotide
ccatggtaatctcgcgatagtaccctctctgaaagaccgtttctacatacgacac

SEQ ID NO: 357102 - DNA, 56 bp, Artificial
  Synthetic oligonucleotide
ccatggtactaaattgtgatctgattgagaacaaagccaaaacattcacatccaag

SEQ ID NO: 357103 - DNA, 58 bp, Artificial
  Synthetic oligonucleotide
ccatggtagccgaagtcgacaagagccaatcggctcgtgtatccactggcaaccaagt

SEQ ID NO: 357104 - DNA, 60 bp, Artificial
  Synthetic oligonucleotide
ccatggtatggtcacattctctcaggagaaagccatggaagaatcttgaagactgatttg

SEQ ID NO: 357105 - DNA, 55 bp, Artificial
  Synthetic oligonucleotide
ccatggtattgctccgatatgagcgatgattttattgtgaagttggctgagtgtg

SEQ ID NO: 357106 - DNA, 60 bp, Artificial
  Synthetic oligonucleotide
ccatggtcaatggcgtggtgaaactgctcaccaaaccatgggatgtcatccccatggtca

SEQ ID NO: 357107 - DNA, 55 bp, Artificial
  Synthetic oligonucleotide
ccatggtcgcttccgaggcctatgccactatgattgcgatgatcgcccagtgcac

SEQ ID NO: 357108 - DNA, 60 bp, Artificial
  Synthetic oligonucleotide
ccatggtctcaagtatatcagctatgtctgtaacccggggtaccaacatattaagcatga

SEQ ID NO: 357109 - DNA, 52 bp, Artificial
  Synthetic oligonucleotide
ccatggtgacaagatgtgaaccagtggtttgttatttatatggcaagagggg

SEQ ID NO: 357110 - DNA, 55 bp, Artificial
  Synthetic oligonucleotide
ccatggtgccggcgcaaagaccctagccggctcaaagggcccaattgtccagatg

SEQ ID NO: 357111 - DNA, 58 bp, Artificial
  Synthetic oligonucleotide
ccatggtggatatggggcgtcttaggcttttggacactaatgatttgtagtgtaatgg

SEQ ID NO: 357112 - DNA, 55 bp, Artificial
  Synthetic oligonucleotide
ccatggtggctaatagtaaggttccaacacctcgtatagccaggtttgctgaaga

SEQ ID NO: 357113 - DNA, 55 bp, Artificial
  Synthetic oligonucleotide
ccatggtgggatgccatcaggttccccatgtactacagtgcttaactcattatgc

SEQ ID NO: 357114 - DNA, 59 bp, Artificial
  Synthetic oligonucleotide
ccatggtggtcccagtgacaggaagccactcactcaagacgaccaaagcctggcaagtc

SEQ ID NO: 357115 - DNA, 59 bp, Artificial
  Synthetic oligonucleotide
ccatggtggtcccctggatatccgctagccactatagatttactaccccagatacatac

SEQ ID NO: 357116 - DNA, 60 bp, Artificial
  Synthetic oligonucleotide
ccatggtgtaccatcaccacaacctcgacctaatcatattaactggggatcctatgcaga

SEQ ID NO: 357117 - DNA, 60 bp, Artificial
  Synthetic oligonucleotide
ccatggtgtattagtatataagtattgtgagtctgtacataatactatatctatagtgtc

SEQ ID NO: 357118 - DNA, 55 bp, Artificial
  Synthetic oligonucleotide
ccatggtgtgagaagcacaattgggccgatgtcttgagaagactgtcgaagatca

SEQ ID NO: 357119 - DNA, 55 bp, Artificial
  Synthetic oligonucleotide
ccatggtgtggagaggacaactctttaggcgtggattagacgacatgtcatctga

SEQ ID NO: 357120 - DNA, 55 bp, Artificial
  Synthetic oligonucleotide
ccatggttatcgcccaggattgtgattcatgtcactctccagccagccatccgta

SEQ ID NO: 357121 - DNA, 57 bp, Artificial
  Synthetic oligonucleotide
ccatggttcatatcctaaatggatagtagaacaaacattaataggacatcagtctgg

SEQ ID NO: 357122 - DNA, 55 bp, Artificial
  Synthetic oligonucleotide
ccatggttcctggcccggcgctcgcctgaacatccaatacatcaacacgataaga

SEQ ID NO: 357123 - DNA, 55 bp, Artificial
  Synthetic oligonucleotide
ccatggttgatggtgcctcggttgtctgagcctctaatcaagctacgtctagtgg

SEQ ID NO: 357124 - DNA, 55 bp, Artificial
  Synthetic oligonucleotide
ccatggttgtgttgaaatgcctgaggctgctaacttactcgtgctctcactattc

SEQ ID NO: 357125 - DNA, 55 bp, Artificial
  Synthetic oligonucleotide
ccatggtttaacacacaggaacagactcaataatccgcagcaacatacacaattg

SEQ ID NO: 357126 - DNA, 60 bp, Artificial
  Synthetic oligonucleotide
ccatgtaaagttcaatcatttgagcagaggcatgatattgcccacacaggcaaagtgatt

SEQ ID NO: 357127 - DNA, 52 bp, Artificial
  Synthetic oligonucleotide
ccatgtaacacatgggtagaagtcttcggaccttgggttaaaaaacgtctag

SEQ ID NO: 357128 - DNA, 53 bp, Artificial
  Synthetic oligonucleotide
ccatgtaactcttcgggcaagttaattttcgactatttcccctcggagttatc

SEQ ID NO: 357129 - DNA, 59 bp, Artificial
  Synthetic oligonucleotide
ccatgtaagccctcagaaccgtctcggaaggaggaccccacatgtgatccatgtaagcc

SEQ ID NO: 357130 - DNA, 55 bp, Artificial
  Synthetic oligonucleotide
ccatgtaaggtcagagatagcctcttcgagggtgtaacaggttggttgaagaagc

SEQ ID NO: 357131 - DNA, 60 bp, Artificial
  Synthetic oligonucleotide
ccatgtaataagcaacgtcgcaagcatacctatccaagtgatagcgataagtgtaaagcc

SEQ ID NO: 357132 - DNA, 60 bp, Artificial
  Synthetic oligonucleotide
ccatgtaatcccatgtattccttgtggtgtttgtcttaagcatcatgttggtgaaataaa

SEQ ID NO: 357133 - DNA, 59 bp, Artificial
  Synthetic oligonucleotide
ccatgtacaccgtctacagcaaagaaatttctgaatggcctttgggtctcaagatcgtc

SEQ ID NO: 357134 - DNA, 58 bp, Artificial
  Synthetic oligonucleotide
ccatgtacacgttgtatagcaaggaaataagcgagtggccaatgggacttaagatcgt

SEQ ID NO: 357135 - DNA, 57 bp, Artificial
  Synthetic oligonucleotide
ccatgtacaggaagcccaggatatatcggacgtttagaagcccagatgttcctagag

SEQ ID NO: 357136 - DNA, 54 bp, Artificial
  Synthetic oligonucleotide
ccatgtactacggcccttaggggtttcctcaacatcatggtacaaaggactcag

SEQ ID NO: 357137 - DNA, 55 bp, Artificial
  Synthetic oligonucleotide
ccatgtagtattgataggaaacacagaagcctgctgcaaattgtatgcccaccat

SEQ ID NO: 357138 - DNA, 55 bp, Artificial
  Synthetic oligonucleotide
ccatgtagtgtcatgaactgagagggactcaattgaccttttgatctgctcctct

SEQ ID NO: 357139 - DNA, 58 bp, Artificial
  Synthetic oligonucleotide
ccatgtatgacttaacatctgatgcgcttttagctgcctgaacgttcggatggtaatg

SEQ ID NO: 357140 - DNA, 60 bp, Artificial
  Synthetic oligonucleotide
ccatgtatggtatggatggactagaggctcttgacctaactaccagtgctggctacccat

SEQ ID NO: 357141 - DNA, 60 bp, Artificial
  Synthetic oligonucleotide
ccatgtcaaagcacatatgactcgcaaaaggatcgggcaattttgggcgctgagcagagt

SEQ ID NO: 357142 - DNA, 60 bp, Artificial
  Synthetic oligonucleotide
ccatgtcaacccacaataattggttttctgtagagctgatgcgagttgtatgttactgac

SEQ ID NO: 357143 - DNA, 55 bp, Artificial
  Synthetic oligonucleotide
ccatgtcaagtggacttaaccacatcttctatagatggggcatggggttcaggtg

SEQ ID NO: 357144 - DNA, 55 bp, Artificial
  Synthetic oligonucleotide
ccatgtcaccaacgactgcccgaactcgagcatagtctatgaagccgatcaccac

SEQ ID NO: 357145 - DNA, 55 bp, Artificial
  Synthetic oligonucleotide
ccatgtcaggttgtgatcccctctgattaggcgtgcgacgttgtggccattccac

SEQ ID NO: 357146 - DNA, 54 bp, Artificial
  Synthetic oligonucleotide
ccatgtcatggtttccaacaagcgacgtttcccgtggacctttcgtttaagcga

SEQ ID NO: 357147 - DNA, 53 bp, Artificial
  Synthetic oligonucleotide
ccatgtccacactagtgtaatcatcgtttggatcagtctgcctgacagatgtg

SEQ ID NO: 357148 - DNA, 50 bp, Artificial
  Synthetic oligonucleotide
ccatgtccagctccgtggtttggttcggaagtccatgaccggcgctcact

SEQ ID NO: 357149 - DNA, 52 bp, Artificial
  Synthetic oligonucleotide
ccatgtcccgtcccgagcacggggggtaataatagtcccccgtgcttacgtg

SEQ ID NO: 357150 - DNA, 55 bp, Artificial
  Synthetic oligonucleotide
ccatgtccggaacgttcggcattcgatgttctgatttgatgacggatgtcgatca

SEQ ID NO: 357151 - DNA, 55 bp, Artificial
  Synthetic oligonucleotide
ccatgtcgataaggagtaccacctcgcggctcagccaatgacgctcctcgctccc

SEQ ID NO: 357152 - DNA, 55 bp, Artificial
  Synthetic oligonucleotide
ccatgtcgatatcagtatcctcccaacgtgtcgcagtctccaacctgtacacgaa

SEQ ID NO: 357153 - DNA, 55 bp, Artificial
  Synthetic oligonucleotide
ccatgtcgtccgtgaatggacggttgtcgtggttgaggatcttgaaatagagggg

SEQ ID NO: 357154 - DNA, 58 bp, Artificial
  Synthetic oligonucleotide
ccatgtctcaatactacaagagagacccccccttgaaaatcgagtcctgactggctgg

SEQ ID NO: 357155 - DNA, 59 bp, Artificial
  Synthetic oligonucleotide
ccatgtctctccaccgctgtacttaatcttaccactgattattgtgttcttgttgaact

SEQ ID NO: 357156 - DNA, 60 bp, Artificial
  Synthetic oligonucleotide
ccatgtctcttatttctgatgcgattccagattggttggagcggttggttcgcaagggag

SEQ ID NO: 357157 - DNA, 59 bp, Artificial
  Synthetic oligonucleotide
ccatgtctgatgggacatttgggcttgtggatggggttaccggtgatactgttcctgaa

SEQ ID NO: 357158 - DNA, 53 bp, Artificial
  Synthetic oligonucleotide
ccatgtcttcttgcttgaattcccctatattagactccttgtacatgagggct

SEQ ID NO: 357159 - DNA, 55 bp, Artificial
  Synthetic oligonucleotide
ccatgtgaacacccttcatttccttgtgagaagtaagacacatctcaactttgag

SEQ ID NO: 357160 - DNA, 53 bp, Artificial
  Synthetic oligonucleotide
ccatgtgaacatggtgggattgtccgagtctgaggcccctcgttttacgttgc

SEQ ID NO: 357161 - DNA, 60 bp, Artificial
  Synthetic oligonucleotide
ccatgtgcaacgagtgtggggagaacatgtttgaatcagtggggcacgaatctccatctg

SEQ ID NO: 357162 - DNA, 55 bp, Artificial
  Synthetic oligonucleotide
ccatgtgcaatacctgagtttgatgtcactccacccatagacataccaggggagg

SEQ ID NO: 357163 - DNA, 58 bp, Artificial
  Synthetic oligonucleotide
ccatgtgcagctaagcgatccttatcggaaatcgtaatagtatttggttcaccggttc

SEQ ID NO: 357164 - DNA, 60 bp, Artificial
  Synthetic oligonucleotide
ccatgtgcctcacagtcgaccgggtggagtctaaagcggccaatcacctactactcatac

SEQ ID NO: 357165 - DNA, 55 bp, Artificial
  Synthetic oligonucleotide
ccatgtggcacaaggacgtgcttcccgacgactggactcgagtctgccccttgac

SEQ ID NO: 357166 - DNA, 55 bp, Artificial
  Synthetic oligonucleotide
ccatgtgggtggtaatggcagggatggattttctgcaatgttactcagatcttac

SEQ ID NO: 357167 - DNA, 60 bp, Artificial
  Synthetic oligonucleotide
ccatgtggtcttcaatgagagatggttaattcatggcggtatgccatcaggatctccatg

SEQ ID NO: 357168 - DNA, 55 bp, Artificial
  Synthetic oligonucleotide
ccatgtgtaaggttgaccccactctgtgtcactttaaactgtaaggatgctagcg

SEQ ID NO: 357169 - DNA, 55 bp, Artificial
  Synthetic oligonucleotide
ccatgtgtcgcacggcggtgatatcgtgcgatcaactacgacgtaaggcctcgaa

SEQ ID NO: 357170 - DNA, 57 bp, Artificial
  Synthetic oligonucleotide
ccatgtgtcggctagcgccaaggaacaccttagtagagcaggaatttacctaagccc

SEQ ID NO: 357171 - DNA, 60 bp, Artificial
  Synthetic oligonucleotide
ccatgtgtgcgaaaatctgacacaacagcaatttgtgagagaactcggcactggttcaaa

SEQ ID NO: 357172 - DNA, 60 bp, Artificial
  Synthetic oligonucleotide
ccatgtgtggtaatatgttgtgtgactaataagtctattgttcataggctaaacacaatg

SEQ ID NO: 357173 - DNA, 60 bp, Artificial
  Synthetic oligonucleotide
ccatgtgttcgtttggctaagtgtcgacctaggaggtggtgctgaaatattgcaagccac

SEQ ID NO: 357174 - DNA, 59 bp, Artificial
  Synthetic oligonucleotide
ccatgttacaatcttcagctgtaacaattggcgcttctaagaatgaaactaaaccagta

SEQ ID NO: 357175 - DNA, 55 bp, Artificial
  Synthetic oligonucleotide
ccatgttccaatgggctctcgcccatctttcgcgacagggttctgacggctggcc

SEQ ID NO: 357176 - DNA, 60 bp, Artificial
  Synthetic oligonucleotide
ccatgttcctgtatgtgagaaccaatgggacctccaagatcaagatgaagtggggtatgg

SEQ ID NO: 357177 - DNA, 60 bp, Artificial
  Synthetic oligonucleotide
ccatgttcttctgctgctcgtagagccgtacgggtctatcgaccatcccgtggttgctgt

SEQ ID NO: 357178 - DNA, 55 bp, Artificial
  Synthetic oligonucleotide
ccatgttctttggcaggctttcaattacagcgctcgtcagtcccggttgcacaga

SEQ ID NO: 357179 - DNA, 60 bp, Artificial
  Synthetic oligonucleotide
ccatgttgaactccccaaatattgaggcgtgtggttatagtgatagagtgatgcagttga

SEQ ID NO: 357180 - DNA, 51 bp, Artificial
  Synthetic oligonucleotide
ccatgttgaatgaggacctaacctgtaatactctaactatgtgggaagctg

SEQ ID NO: 357181 - DNA, 57 bp, Artificial
  Synthetic oligonucleotide
ccatgttgacgtgactgattaagtcggggaagattacgggaacttcacgagacattc

SEQ ID NO: 357182 - DNA, 60 bp, Artificial
  Synthetic oligonucleotide
ccatgttgacttcatctattggatgcaatgcgatagagtagactacatccatcaacttgt

SEQ ID NO: 357183 - DNA, 58 bp, Artificial
  Synthetic oligonucleotide
ccatgttgacttggtcaatcgggtcctctcaaactatcccatgcaatcggggaatggg

SEQ ID NO: 357184 - DNA, 60 bp, Artificial
  Synthetic oligonucleotide
ccatgttgatcatcttaactcttatcaaagcttctgttctcttaaaagtccaatcctctg

SEQ ID NO: 357185 - DNA, 55 bp, Artificial
  Synthetic oligonucleotide
ccatgttgcaaattcgaatttctggagacactggatcgatacaaaagatgggcag

SEQ ID NO: 357186 - DNA, 55 bp, Artificial
  Synthetic oligonucleotide
ccatgttggtaaagtattatgtgtcagtgatgtcactcgtggtagtgggcttacc

SEQ ID NO: 357187 - DNA, 55 bp, Artificial
  Synthetic oligonucleotide
ccatgtttcgttctaccagcccgagccgccatcatagtatactgtcctgagcaag

SEQ ID NO: 357188 - DNA, 60 bp, Artificial
  Synthetic oligonucleotide
ccatgtttgaagacataagagaaagaccacgaacgctgcacgaattatgtgaagcctgca

SEQ ID NO: 357189 - DNA, 60 bp, Artificial
  Synthetic oligonucleotide
ccatgtttgatgtttcaacactactgcgacgaaataacgatctattcaaccacacacaaa

SEQ ID NO: 357190 - DNA, 60 bp, Artificial
  Synthetic oligonucleotide
ccatgtttgcctggatgcgttttcatgatttgtcgctgtgggaaggtagtcgcgacatcc

SEQ ID NO: 357191 - DNA, 55 bp, Artificial
  Synthetic oligonucleotide
ccatgttttgtttctagctgagaagggattcctcagagtagcccacacttatgac

SEQ ID NO: 357192 - DNA, 52 bp, Artificial
  Synthetic oligonucleotide
ccattaaaagttgaaggtaaactttctctaagtgaagactacgatggcactc

SEQ ID NO: 357193 - DNA, 56 bp, Artificial
  Synthetic oligonucleotide
ccattaaactacactaactacaataccttactctacattatccacttaaacacgca

SEQ ID NO: 357194 - DNA, 54 bp, Artificial
  Synthetic oligonucleotide
ccattaaagcgggttctgttcagaaactcatgtggccttgaccaccttttcccg

SEQ ID NO: 357195 - DNA, 54 bp, Artificial
  Synthetic oligonucleotide
ccattaaatacacaaacactaggaattgggtgccaaaccactgacgttagtacg

SEQ ID NO: 357196 - DNA, 60 bp, Artificial
  Synthetic oligonucleotide
ccattaaatataatcatataatcacttttccacatcgtaccgatagaggtgattggagga

SEQ ID NO: 357197 - DNA, 58 bp, Artificial
  Synthetic oligonucleotide
ccattaacaaccctacctttgaagactatgttcatgttctagagttttgcacgctcga

SEQ ID NO: 357198 - DNA, 51 bp, Artificial
  Synthetic oligonucleotide
ccattaactactcccgcctagccagcctactcccaaaagggtaccccggcc

SEQ ID NO: 357199 - DNA, 56 bp, Artificial
  Synthetic oligonucleotide
ccattaagctgataagttttagttgatagcatagcaacacaaataacgaccacagc

SEQ ID NO: 357200 - DNA, 55 bp, Artificial
  Synthetic oligonucleotide
ccattaatggagtcaaagatgttgactatatggatagaattccacttgcgacgtc

SEQ ID NO: 357201 - DNA, 60 bp, Artificial
  Synthetic oligonucleotide
ccattacacaaagacaaaacccattatacgatacatggaacgtcaatggcagaggcgatg

SEQ ID NO: 357202 - DNA, 57 bp, Artificial
  Synthetic oligonucleotide
ccattacacccgctttgaaggaacgatattacattcgacatgttttgaggcgtgtgt

SEQ ID NO: 357203 - DNA, 60 bp, Artificial
  Synthetic oligonucleotide
ccattacagtgcacacaggagaccaacaccaggtgggaaatgacacgcagggagtcacgg

SEQ ID NO: 357204 - DNA, 60 bp, Artificial
  Synthetic oligonucleotide
ccattacagtgttgtcgaaacattttattccagcccagataatggcccactgctctagac

SEQ ID NO: 357205 - DNA, 60 bp, Artificial
  Synthetic oligonucleotide
ccattacatgaacaagtacgtccagagcaccactgtaaccatacaccaggacatcaacct

SEQ ID NO: 357206 - DNA, 53 bp, Artificial
  Synthetic oligonucleotide
ccattacccacctgggcaaacgacgcccacgtacggtccacgtcgcccttcaa

SEQ ID NO: 357207 - DNA, 55 bp, Artificial
  Synthetic oligonucleotide
ccattacccggctcaccccatcttctcacacagtcccacattgcttgaccctagc

SEQ ID NO: 357208 - DNA, 55 bp, Artificial
  Synthetic oligonucleotide
ccattaccgcgtgatgtgcagccatttcgggcgaagatcgtgttccgcgaaccga

SEQ ID NO: 357209 - DNA, 54 bp, Artificial
  Synthetic oligonucleotide
ccattaccgttaagcctgaaccactagactttaacccgacgatccgcgttgtca

SEQ ID NO: 357210 - DNA, 55 bp, Artificial
  Synthetic oligonucleotide
ccattacctcgcaagatgtggccaatgcagttgttggttatggcgtgtggcctca

SEQ ID NO: 357211 - DNA, 60 bp, Artificial
  Synthetic oligonucleotide
ccattacgacacaagaggcggccaatgcagttgtggcatacggcgagtggccttcattcc

SEQ ID NO: 357212 - DNA, 57 bp, Artificial
  Synthetic oligonucleotide
ccattacgatcacacgaaagtcagcgatgttacacgtttcttttgtttctaaccaca

SEQ ID NO: 357213 - DNA, 60 bp, Artificial
  Synthetic oligonucleotide
ccattacggccactcgcgctctaaccatgagcgcggtctctttgagagtgtcgctcttct

SEQ ID NO: 357214 - DNA, 54 bp, Artificial
  Synthetic oligonucleotide
ccattacgtcaactggtttattcggccatataatggggttaagtacgtatcacc

SEQ ID NO: 357215 - DNA, 58 bp, Artificial
  Synthetic oligonucleotide
ccattactatcagatacaaaactgtatggagtaatgaaatacaacgggaagttgtata

SEQ ID NO: 357216 - DNA, 55 bp, Artificial
  Synthetic oligonucleotide
ccattactctgaagacatgatgcaattctccaaaggtttaatggtggctgatagg

SEQ ID NO: 357217 - DNA, 60 bp, Artificial
  Synthetic oligonucleotide
ccattagaaacaagcactcaaatggaacaatacatgacaggactgccttcagaggattga

SEQ ID NO: 357218 - DNA, 57 bp, Artificial
  Synthetic oligonucleotide
ccattagaagcatgctaattaaatgaggaccaagctaactacttggtatccgaactt

SEQ ID NO: 357219 - DNA, 55 bp, Artificial
  Synthetic oligonucleotide
ccattagaatctatgccagcctcaactgtgcccattaccatctctataagcccca

SEQ ID NO: 357220 - DNA, 60 bp, Artificial
  Synthetic oligonucleotide
ccattagagcaactcgggtcactgagctgctctaccggatgaagagggctgagacgtact

SEQ ID NO: 357221 - DNA, 55 bp, Artificial
  Synthetic oligonucleotide
ccattagagttaataaacacagttattcaggatggtgatatggttgataccggct

SEQ ID NO: 357222 - DNA, 55 bp, Artificial
  Synthetic oligonucleotide
ccattagcacaatcgttcgtattccctgcggctcgtgttgtttcgtctgtaggtg

SEQ ID NO: 357223 - DNA, 60 bp, Artificial
  Synthetic oligonucleotide
ccattagccacacattgatcaagaattgtgtctatagtttccgctagttgatgaggtgat

SEQ ID NO: 357224 - DNA, 56 bp, Artificial
  Synthetic oligonucleotide
ccattagccgttactttctatgttatggccgcgtggcgttacaaaatgattgcccc

SEQ ID NO: 357225 - DNA, 59 bp, Artificial
  Synthetic oligonucleotide
ccattagctctaaacaacctcggatccttgttgatgtctaggatcaagacgtcaattaa

SEQ ID NO: 357226 - DNA, 51 bp, Artificial
  Synthetic oligonucleotide
ccattaggaggtttgtttccagcctcacgtttgacaatggtcataagcaca

SEQ ID NO: 357227 - DNA, 58 bp, Artificial
  Synthetic oligonucleotide
ccattaggtgacatatttaatatgtcgtgcaagttggtacaaccagcttgtccttatt

SEQ ID NO: 357228 - DNA, 55 bp, Artificial
  Synthetic oligonucleotide
ccattaggttaatgggtcttgttatccgcatagaagcggacttttgcactggggc

SEQ ID NO: 357229 - DNA, 54 bp, Artificial
  Synthetic oligonucleotide
ccattagtaggccccttgcctcggtgcgcggtgcctttggtccccgttccttgc

SEQ ID NO: 357230 - DNA, 51 bp, Artificial
  Synthetic oligonucleotide
ccattagtagggtacgagttataggttataggataattatcttgtgtcagg

SEQ ID NO: 357231 - DNA, 57 bp, Artificial
  Synthetic oligonucleotide
ccattataatgggctttaatcagtaaatcccaataagaaatgttgggccttgatatg

SEQ ID NO: 357232 - DNA, 55 bp, Artificial
  Synthetic oligonucleotide
ccattatagctacggctgatgccaggggccttatccagtcctcccgtgcacatgc

SEQ ID NO: 357233 - DNA, 60 bp, Artificial
  Synthetic oligonucleotide
ccattatataggcgtcatatatcgtgatatatgaacctaattcaattacgtggtctcgtt

SEQ ID NO: 357234 - DNA, 55 bp, Artificial
  Synthetic oligonucleotide
ccattatatatcctaccaggtagttttgagtggaatgacgccgttgaactatcac

SEQ ID NO: 357235 - DNA, 60 bp, Artificial
  Synthetic oligonucleotide
ccattatatgccaaagtcagcccaactggtgaacggagaatgaataggcaagattgggcc

SEQ ID NO: 357236 - DNA, 60 bp, Artificial
  Synthetic oligonucleotide
ccattatcccgcagatggttcaaccggcaaaaccgaactgaatatgaaagaggcatgtca

SEQ ID NO: 357237 - DNA, 55 bp, Artificial
  Synthetic oligonucleotide
ccattatgatcaggcgtttggacgctatctaggaaatacctactctgcttatttg

SEQ ID NO: 357238 - DNA, 55 bp, Artificial
  Synthetic oligonucleotide
ccattatggctgcgtttaaggggaataccgagggcagaacatctgacatgaggac

SEQ ID NO: 357239 - DNA, 55 bp, Artificial
  Synthetic oligonucleotide
ccattatgggacccctcattgtactcctaatgattttgctcttcggaccctgcat

SEQ ID NO: 357240 - DNA, 57 bp, Artificial
  Synthetic oligonucleotide
ccattatgggtccaagggtatgggagtttcgtgcagatagcttatctacttcatcac

SEQ ID NO: 357241 - DNA, 58 bp, Artificial
  Synthetic oligonucleotide
ccattattaacgtttggacagacgaagcttatgagaacatgggttattggctaatggc

SEQ ID NO: 357242 - DNA, 58 bp, Artificial
  Synthetic oligonucleotide
ccattattaactccgtattatcactacggtcgcgtctgactcttccaacatacaggta

SEQ ID NO: 357243 - DNA, 55 bp, Artificial
  Synthetic oligonucleotide
ccattattcagaacttgtgttgcgaattaatccctgcaaagtttgacaaaccagg

SEQ ID NO: 357244 - DNA, 57 bp, Artificial
  Synthetic oligonucleotide
ccattattccaatgccaaagagttacactgcactttatgcgattgcgaacagcagtc

SEQ ID NO: 357245 - DNA, 59 bp, Artificial
  Synthetic oligonucleotide
ccattattgaccacgcgatgttccgcctgagcaaaagagaagtcaaatcgtacgtactg

SEQ ID NO: 357246 - DNA, 54 bp, Artificial
  Synthetic oligonucleotide
ccattatttaacaccacaagatgccacagctattgataaacctacacaaccaga

SEQ ID NO: 357247 - DNA, 56 bp, Artificial
  Synthetic oligonucleotide
ccattatttgtagaacaagtgttttatcaacggatagggaaacgagacatgataac

SEQ ID NO: 357248 - DNA, 56 bp, Artificial
  Synthetic oligonucleotide
ccattcaaaccctacaatatctggattaagaattaatcaaattgcaacgggagctc

SEQ ID NO: 357249 - DNA, 52 bp, Artificial
  Synthetic oligonucleotide
ccattcaaagccccgagatcgattcctcagtccttgaaaattggaccccact

SEQ ID NO: 357250 - DNA, 60 bp, Artificial
  Synthetic oligonucleotide
ccattcaaatcctcaggctccctgcggccttggataggaacggtgcttgtgctagcgcca

SEQ ID NO: 357251 - DNA, 60 bp, Artificial
  Synthetic oligonucleotide
ccattcaaatttctctacatgtattcccctagatataggcataatacccctactagcatc

SEQ ID NO: 357252 - DNA, 55 bp, Artificial
  Synthetic oligonucleotide
ccattcaatgagttggcgaaacaaggaagggccccatacgtctcggaagttggat

SEQ ID NO: 357253 - DNA, 55 bp, Artificial
  Synthetic oligonucleotide
ccattcacagagtgtggcacgcattgtgtctgtggtgctcgctatgatacttccg

SEQ ID NO: 357254 - DNA, 55 bp, Artificial
  Synthetic oligonucleotide
ccattcaccttggacttaaagagagacaatcattcagccccgtccaagacacacc

SEQ ID NO: 357255 - DNA, 60 bp, Artificial
  Synthetic oligonucleotide
ccattcacgacaccgaaaagtacgcctctcagccagaactatgcactaactccacttgca

SEQ ID NO: 357256 - DNA, 55 bp, Artificial
  Synthetic oligonucleotide
ccattcacgcaattggactgggcggttccattgttggcattggggtgttggagca

SEQ ID NO: 357257 - DNA, 56 bp, Artificial
  Synthetic oligonucleotide
ccattcactccagcctaaccagttaacgccatgtcttcgaaccagggcaaacggtg

SEQ ID NO: 357258 - DNA, 60 bp, Artificial
  Synthetic oligonucleotide
ccattcactccagtggaattatccctatacaatatggcacttcagatgctggatctgcaa

SEQ ID NO: 357259 - DNA, 59 bp, Artificial
  Synthetic oligonucleotide
ccattcagcaggtacacttaagagggttgtaaggttatgcacatgggtatggagtgatt

SEQ ID NO: 357260 - DNA, 53 bp, Artificial
  Synthetic oligonucleotide
ccattcaggatgttgccttacgtggaaaagaatagaccatcttaccacacccc

SEQ ID NO: 357261 - DNA, 56 bp, Artificial
  Synthetic oligonucleotide
ccattcaggccacgtctcaaggttgtacccccgtgtcccaaagccaccaggtatgc

SEQ ID NO: 357262 - DNA, 56 bp, Artificial
  Synthetic oligonucleotide
ccattcaggcccaattctctcaaaatcaagggacttgatcccgtccagtatttttc

SEQ ID NO: 357263 - DNA, 58 bp, Artificial
  Synthetic oligonucleotide
ccattcaggccctattctctcaaaatctagagacctaacctcatccagtattttccta

SEQ ID NO: 357264 - DNA, 55 bp, Artificial
  Synthetic oligonucleotide
ccattcaggggttgatgtgttctacaaacccactgagcaggtggacaccctgctc

SEQ ID NO: 357265 - DNA, 55 bp, Artificial
  Synthetic oligonucleotide
ccattcagtagcgttgaacacctcagttttaggaagtggaacctgtggctgagta

SEQ ID NO: 357266 - DNA, 55 bp, Artificial
  Synthetic oligonucleotide
ccattcataaaaggaacagctaagttgaaaacagtacgtaagctagtggatgcgg

SEQ ID NO: 357267 - DNA, 56 bp, Artificial
  Synthetic oligonucleotide
ccattcatacgggttcaaagttgcgatgttgtacttggacccttcaataggaggag

SEQ ID NO: 357268 - DNA, 60 bp, Artificial
  Synthetic oligonucleotide
ccattcatatggggttccagtacgatatggctgacacccttcccgtgagtgtcaatcagc

SEQ ID NO: 357269 - DNA, 56 bp, Artificial
  Synthetic oligonucleotide
ccattcatctaggcacccctccattgatgagcatcagtttctgaggcttctccatg

SEQ ID NO: 357270 - DNA, 55 bp, Artificial
  Synthetic oligonucleotide
ccattcatgacgcccttaggctacaagaacttgctgacacttgccccctaacatt

SEQ ID NO: 357271 - DNA, 60 bp, Artificial
  Synthetic oligonucleotide
ccattcatgttgccctattctcgatgttcgtgatggtgctaggtataccgacagattcat

SEQ ID NO: 357272 - DNA, 55 bp, Artificial
  Synthetic oligonucleotide
ccattcattaaaggaacggctaagctgaagacagtgcgcaagctagtggaggcag

SEQ ID NO: 357273 - DNA, 55 bp, Artificial
  Synthetic oligonucleotide
ccattccacgttgctgttgccaatactgtttggagagcgccctcccagtcgaagc

SEQ ID NO: 357274 - DNA, 55 bp, Artificial
  Synthetic oligonucleotide
ccattccagccttaacaacgaaccatgacataacctacaactaccgcggcactag

SEQ ID NO: 357275 - DNA, 57 bp, Artificial
  Synthetic oligonucleotide
ccattccaggttctgattgggcttataccctttcattatctgatgttctttctgggt

SEQ ID NO: 357276 - DNA, 55 bp, Artificial
  Synthetic oligonucleotide
ccattccagtagttgtgtcgtccgagacttctagcccaggtggtcttaccggtac

SEQ ID NO: 357277 - DNA, 55 bp, Artificial
  Synthetic oligonucleotide
ccattccataatatcagtaaatatgcatttggaaactgccccaaatacgttggag

SEQ ID NO: 357278 - DNA, 53 bp, Artificial
  Synthetic oligonucleotide
ccattccatatccgacataccgattacgacagttgttaagcactgttttccaa

SEQ ID NO: 357279 - DNA, 55 bp, Artificial
  Synthetic oligonucleotide
ccattcccctggatccagacttcagaaagtatacagcttttactatacctagtct

SEQ ID NO: 357280 - DNA, 58 bp, Artificial
  Synthetic oligonucleotide
ccattccgctctggccgacgcctccagttaccgcacacttgaccgttatgaggccgaa

SEQ ID NO: 357281 - DNA, 57 bp, Artificial
  Synthetic oligonucleotide
ccattcctagctgagtataataagaaacctaatccgcttgtagcttttgaaatattg

SEQ ID NO: 357282 - DNA, 60 bp, Artificial
  Synthetic oligonucleotide
ccattcctcactagtgtttccacatcaattcattaacctgaggacaaacaactgtgccac

SEQ ID NO: 357283 - DNA, 54 bp, Artificial
  Synthetic oligonucleotide
ccattcctccgttacaccaaacatactcatcctaccctcaaaaggatacaaccc

SEQ ID NO: 357284 - DNA, 55 bp, Artificial
  Synthetic oligonucleotide
ccattccttgaccgcgaattctccctttcttgccagccctcctccctcattgctg

SEQ ID NO: 357285 - DNA, 55 bp, Artificial
  Synthetic oligonucleotide
ccattcgaaagctattgtagatgatctatgcaacacagtcttagcgacttttagg

SEQ ID NO: 357286 - DNA, 60 bp, Artificial
  Synthetic oligonucleotide
ccattcgacggtctttgacatatgctcatgctgactctgagtttctcaacgcgtgctgga

SEQ ID NO: 357287 - DNA, 55 bp, Artificial
  Synthetic oligonucleotide
ccattcgagtggggtgtcatcggcacacagccgacactaaacttagcggctgacg

SEQ ID NO: 357288 - DNA, 58 bp, Artificial
  Synthetic oligonucleotide
ccattcgatagtgtccccgtctttctcgacgtaggatttgacatcggagctcgattta

SEQ ID NO: 357289 - DNA, 55 bp, Artificial
  Synthetic oligonucleotide
ccattcgatctattctgtcaggatgggatacctttgtgatgatgttgcactctgg

SEQ ID NO: 357290 - DNA, 60 bp, Artificial
  Synthetic oligonucleotide
ccattcgatgttagttcggattactacgtcatgccaggttgtccctgctatagtgacgcc

SEQ ID NO: 357291 - DNA, 60 bp, Artificial
  Synthetic oligonucleotide
ccattcgatttataggaagagcaatggcagacagaggactattgagagacatcaaagcca

SEQ ID NO: 357292 - DNA, 56 bp, Artificial
  Synthetic oligonucleotide
ccattcgcaacccataaatgagagaccaaaacaggcctggtgccggtttggaggaa

SEQ ID NO: 357293 - DNA, 56 bp, Artificial
  Synthetic oligonucleotide
ccattcgcacagacaagttacgcaccagttgattgggggtccggcgaaataaacga

SEQ ID NO: 357294 - DNA, 50 bp, Artificial
  Synthetic oligonucleotide
ccattcgcagatacgcttacgcgagaatggagcaagccatcaagcagtta

SEQ ID NO: 357295 - DNA, 56 bp, Artificial
  Synthetic oligonucleotide
ccattcgctcttccgtggcaacatggcaacctcgcgtatctgcaggattagatgcg

SEQ ID NO: 357296 - DNA, 55 bp, Artificial
  Synthetic oligonucleotide
ccattcggacactcccagaccagccgatccttcaatagtgtcatgcgattcccca

SEQ ID NO: 357297 - DNA, 53 bp, Artificial
  Synthetic oligonucleotide
ccattcgggtggacgggttacggcggcacgattcactaggccgtggacccaag

SEQ ID NO: 357298 - DNA, 60 bp, Artificial
  Synthetic oligonucleotide
ccattcggtatcgccccttggtgccgaatgctgtcggtgggtatgctatatctatctctt

SEQ ID NO: 357299 - DNA, 54 bp, Artificial
  Synthetic oligonucleotide
ccattcgtccagtgttaccgattcacccggaacagtttgcgggttttcgatgta

SEQ ID NO: 357300 - DNA, 55 bp, Artificial
  Synthetic oligonucleotide
ccattcgtgttgtccgatattggatgtgagggacggggctcgtcacaccgatagg

SEQ ID NO: 357301 - DNA, 55 bp, Artificial
  Synthetic oligonucleotide
ccattcgttggacccgtttcggacaaccctctgaaacgtgccctacaatggatca

SEQ ID NO: 357302 - DNA, 60 bp, Artificial
  Synthetic oligonucleotide
ccattcgttggactaaggatgcacgtaatactcaggatcacgtgcgctccttgtgccttt

SEQ ID NO: 357303 - DNA, 60 bp, Artificial
  Synthetic oligonucleotide
ccattctaacaacgacagtgacattgcatttcaagcaaaatgagtgcagcatccctgcga

SEQ ID NO: 357304 - DNA, 55 bp, Artificial
  Synthetic oligonucleotide
ccattctcaacatacctagaagaattagacagggtttagaaagggctttgttata

SEQ ID NO: 357305 - DNA, 51 bp, Artificial
  Synthetic oligonucleotide
ccattctcgacggatttgtgaacactcattacgtaaagtttgtcccttgta

SEQ ID NO: 357306 - DNA, 58 bp, Artificial
  Synthetic oligonucleotide
ccattctcgtactgtctgagttattacacgttcacggggctcgactagttcaacagtc

SEQ ID NO: 357307 - DNA, 55 bp, Artificial
  Synthetic oligonucleotide
ccattctctgtttgagctgcagtgaatagttccccggtgcgtgaatccataatcg

SEQ ID NO: 357308 - DNA, 55 bp, Artificial
  Synthetic oligonucleotide
ccattctgatagatcttcgctatcatttaacacacccttttgaccatgtataccg

SEQ ID NO: 357309 - DNA, 55 bp, Artificial
  Synthetic oligonucleotide
ccattctgcaatgggatagagctgatctgccagagcacagattagaagcgatttg

SEQ ID NO: 357310 - DNA, 60 bp, Artificial
  Synthetic oligonucleotide
ccattctgctgcatttgaagatttgaggttgttaagcttcatcagagggaccaaagtatc

SEQ ID NO: 357311 - DNA, 55 bp, Artificial
  Synthetic oligonucleotide
ccattctgcttaaaatgcttcgcccattgaaaatgtgatctaatagatagccctg

SEQ ID NO: 357312 - DNA, 59 bp, Artificial
  Synthetic oligonucleotide
ccattctggttgaagacttcgaaagccctgaacatgcaaagcgtaaggcatttgacggc

SEQ ID NO: 357313 - DNA, 60 bp, Artificial
  Synthetic oligonucleotide
ccattcttagcacgtgatccaagatttaagcaccgagtgtaccagcaattgagtgccgta

SEQ ID NO: 357314 - DNA, 59 bp, Artificial
  Synthetic oligonucleotide
ccattcttgctgggatctgttctgttgggacccagacaaagaattgccttcagtatttg

SEQ ID NO: 357315 - DNA, 55 bp, Artificial
  Synthetic oligonucleotide
ccattcttggcctgagctgcagtgatgggtgcccctgtgcgtgaatccatagccg

SEQ ID NO: 357316 - DNA, 59 bp, Artificial
  Synthetic oligonucleotide
ccattcttggtgcctgtgaagtgccagtacgagaaatgtccaacacccaccgtcgcgat

SEQ ID NO: 357317 - DNA, 57 bp, Artificial
  Synthetic oligonucleotide
ccattgaaacctacttaagggatcagcaactcctaggactgtggggatgctcaggac

SEQ ID NO: 357318 - DNA, 58 bp, Artificial
  Synthetic oligonucleotide
ccattgaaacgacgaccgtgccccaagacgcggtatcgcgctcacagcggcgaggtag

SEQ ID NO: 357319 - DNA, 50 bp, Artificial
  Synthetic oligonucleotide
ccattgaaacttagtgggaaattaactttaagtgaggaattcgatggagc

SEQ ID NO: 357320 - DNA, 55 bp, Artificial
  Synthetic oligonucleotide
ccattgaaccgctttggtatggaattagtaaactctacagatagtggtgcaaatg

SEQ ID NO: 357321 - DNA, 57 bp, Artificial
  Synthetic oligonucleotide
ccattgaagacctaaggtcagttcatagctgacgctactctactgaccttagctact

SEQ ID NO: 357322 - DNA, 55 bp, Artificial
  Synthetic oligonucleotide
ccattgaagggttaatctatggcaacccttcttgtgatctactgctgggaggaag

SEQ ID NO: 357323 - DNA, 50 bp, Artificial
  Synthetic oligonucleotide
ccattgaatcaactgccagactgaacacacaaacgtccatcagcagaact

SEQ ID NO: 357324 - DNA, 57 bp, Artificial
  Synthetic oligonucleotide
ccattgaatgtgagagaacgcaaactagctttcggttgcctatgggctttcaagacc

SEQ ID NO: 357325 - DNA, 60 bp, Artificial
  Synthetic oligonucleotide
ccattgacacgatttacctgactacattcaagttggcaagactgccattatatccgggat

SEQ ID NO: 357326 - DNA, 55 bp, Artificial
  Synthetic oligonucleotide
ccattgaccccacgtcccgtggccaacagctttggaatgcatgcctgtatgctag

SEQ ID NO: 357327 - DNA, 60 bp, Artificial
  Synthetic oligonucleotide
ccattgactggtcaatcggtgtctctcaaacttggctatgcaatcggtgtctggggtctt

SEQ ID NO: 357328 - DNA, 59 bp, Artificial
  Synthetic oligonucleotide
ccattgacttggtcaatcggtactcagatgcttctctccaatatatcggtactcaatat

SEQ ID NO: 357329 - DNA, 60 bp, Artificial
  Synthetic oligonucleotide
ccattgagacctactgacacccagacaatgaacactatgctaggatccgtgacccgtatg

SEQ ID NO: 357330 - DNA, 60 bp, Artificial
  Synthetic oligonucleotide
ccattgagcgctggtgtttacatgggtaatctaagctcacaacaacttgatcaacgacga

SEQ ID NO: 357331 - DNA, 60 bp, Artificial
  Synthetic oligonucleotide
ccattgaggatttattcccgaaagagcagcatacagcgcaagcattatcatctcaatatc

SEQ ID NO: 357332 - DNA, 55 bp, Artificial
  Synthetic oligonucleotide
ccattgagggaagcagatgagactgggctgataccagatcacatggcaaggaaac

SEQ ID NO: 357333 - DNA, 55 bp, Artificial
  Synthetic oligonucleotide
ccattgagggactgatctatggcaacccttcttgtgatctgctgttaggaggagg

SEQ ID NO: 357334 - DNA, 55 bp, Artificial
  Synthetic oligonucleotide
ccattgagtgggtcctccaccatctcagaaaggatttaggtgtagaggagacccc

SEQ ID NO: 357335 - DNA, 60 bp, Artificial
  Synthetic oligonucleotide
ccattgatcattatatacatagacctaaacgagctgtacagttcatccctttactagctg

SEQ ID NO: 357336 - DNA, 56 bp, Artificial
  Synthetic oligonucleotide
ccattgatcggctgaaagggaaactccaatggcaaatgcactctacggcaaggctc

SEQ ID NO: 357337 - DNA, 58 bp, Artificial
  Synthetic oligonucleotide
ccattgatctcgtgggcgttggaatttctaccgcaggacgtggaacatggtcgttgga

SEQ ID NO: 357338 - DNA, 60 bp, Artificial
  Synthetic oligonucleotide
ccattgatgcagccaaatctatggctaccagtgtaatgaagaaatttaagaggtctaatc

SEQ ID NO: 357339 - DNA, 54 bp, Artificial
  Synthetic oligonucleotide
ccattgatgcccctttgttaaatgtaagggaagtttcacctgtcctgaatttgg

SEQ ID NO: 357340 - DNA, 55 bp, Artificial
  Synthetic oligonucleotide
ccattgattggaaagtatgtcaaagaatttcaggactcttgggctttgctgctcc

SEQ ID NO: 357341 - DNA, 55 bp, Artificial
  Synthetic oligonucleotide
ccattgattggaaagtgtgtcaacggattgtgggtcttctgggttttgctgcccc

SEQ ID NO: 357342 - DNA, 55 bp, Artificial
  Synthetic oligonucleotide
ccattgcaacaacatgcttcctcatgcagattgctatcctggcaaccactgtgac

SEQ ID NO: 357343 - DNA, 60 bp, Artificial
  Synthetic oligonucleotide
ccattgcaacagtatgtttccttatgcagattgccatcctagcaacaactgtaactatgc

SEQ ID NO: 357344 - DNA, 60 bp, Artificial
  Synthetic oligonucleotide
ccattgcagcgtctacctggctgttgtgtagatccagagcctcgtgcttaaccccttaca

SEQ ID NO: 357345 - DNA, 57 bp, Artificial
  Synthetic oligonucleotide
ccattgcagggatacggccccgcgacccgatctgtgctttggacggacatggtaaaa

SEQ ID NO: 357346 - DNA, 51 bp, Artificial
  Synthetic oligonucleotide
ccattgcagtggcaactgccaattggactgacagcattatcttaggtgcac

SEQ ID NO: 357347 - DNA, 60 bp, Artificial
  Synthetic oligonucleotide
ccattgcattatcaatggtgtcaccatgcaaactggtacaccgttggccattgaggacta

SEQ ID NO: 357348 - DNA, 54 bp, Artificial
  Synthetic oligonucleotide
ccattgccgggaccacctaatgaagacgccgaattgttccccggtctagctccg

SEQ ID NO: 357349 - DNA, 55 bp, Artificial
  Synthetic oligonucleotide
ccattgcctgaggataatgaaccgagcgggtatgcacaaacagactgtgtactgg

SEQ ID NO: 357350 - DNA, 51 bp, Artificial
  Synthetic oligonucleotide
ccattgcgaagcgccacttaattgaagctggtatatacctaagtccatact

SEQ ID NO: 357351 - DNA, 57 bp, Artificial
  Synthetic oligonucleotide
ccattgcggatggggccaacaccgcacaagccattgctgaaaaacaccccgttgagt

SEQ ID NO: 357352 - DNA, 55 bp, Artificial
  Synthetic oligonucleotide
ccattgcgtctcgatatggactaattagacgggtccaatggaagaaagatcatgc

SEQ ID NO: 357353 - DNA, 52 bp, Artificial
  Synthetic oligonucleotide
ccattgcgttcttctgtccatatatattctcatctcttttgaaggcttcgat

SEQ ID NO: 357354 - DNA, 55 bp, Artificial
  Synthetic oligonucleotide
ccattgctaaaggaattaaaatggtggagcagagaggtactaacataatggaccc

SEQ ID NO: 357355 - DNA, 60 bp, Artificial
  Synthetic oligonucleotide
ccattgctaatggcattatggatgtgtttagaagaatgtattggagcacttctctatcag

SEQ ID NO: 357356 - DNA, 59 bp, Artificial
  Synthetic oligonucleotide
ccattgctacatcctaccagaatatttgattattctagttttggatttgatgacgtaaa

SEQ ID NO: 357357 - DNA, 60 bp, Artificial
  Synthetic oligonucleotide
ccattgctgaagccatcattgtagcgatggtgttctcacaagaggattgcatgataaagg

SEQ ID NO: 357358 - DNA, 57 bp, Artificial
  Synthetic oligonucleotide
ccattgctttttttgcactaatggaataattaattaccagtgtcacaccattgctag

SEQ ID NO: 357359 - DNA, 57 bp, Artificial
  Synthetic oligonucleotide
ccattggagccatacgttacaaggtgcggtttgcggttggcacacaagtaatacgcc

SEQ ID NO: 357360 - DNA, 55 bp, Artificial
  Synthetic oligonucleotide
ccattggaggtcagaaattgcatcatcgagggtataacaggcaggttgaaggagc

SEQ ID NO: 357361 - DNA, 55 bp, Artificial
  Synthetic oligonucleotide
ccattggagtccttcaggttagcagtagatttcagacctcgattctctgacttct

SEQ ID NO: 357362 - DNA, 56 bp, Artificial
  Synthetic oligonucleotide
ccattggagtgcctggtatgcatcagaccaccccagcctcgcagttttcacatcct

SEQ ID NO: 357363 - DNA, 60 bp, Artificial
  Synthetic oligonucleotide
ccattggatctgtcactgatgtttgtggagaacacaagggatattgtgttcacatgggtc

SEQ ID NO: 357364 - DNA, 55 bp, Artificial
  Synthetic oligonucleotide
ccattggatttcgactaatgaaggggattgcggattacccatggtttcaaccacg

SEQ ID NO: 357365 - DNA, 60 bp, Artificial
  Synthetic oligonucleotide
ccattggcatcacttctgcgtcttgagccatctgacaccaagacacgcagaatcgagtgt

SEQ ID NO: 357366 - DNA, 57 bp, Artificial
  Synthetic oligonucleotide
ccattggccgaacaagtggttgtagtgacgcactctggccggaaagggcgatacgcc

SEQ ID NO: 357367 - DNA, 60 bp, Artificial
  Synthetic oligonucleotide
ccattggctaattattctggattagatttgagagctctcatcatcaatcttggcggttta

SEQ ID NO: 357368 - DNA, 55 bp, Artificial
  Synthetic oligonucleotide
ccattggctacctgattcttaatcaacggtgccatcattttgatcttgcggtgcc

SEQ ID NO: 357369 - DNA, 60 bp, Artificial
  Synthetic oligonucleotide
ccattgggaaggtatgcaggacgttattagctaagtcagtattcaatagtctgtatgcat

SEQ ID NO: 357370 - DNA, 59 bp, Artificial
  Synthetic oligonucleotide
ccattgggccacttgacctacctcaggtcattcaacgactccatggtcttagcgcattt

SEQ ID NO: 357371 - DNA, 55 bp, Artificial
  Synthetic oligonucleotide
ccattgggtgagggccccggcattcgtgttgggggcactccaaatgttattcggc

SEQ ID NO: 357372 - DNA, 55 bp, Artificial
  Synthetic oligonucleotide
ccattggtagcaacagagtagggatcataaagcagctgaacaaaggttgctccta

SEQ ID NO: 357373 - DNA, 55 bp, Artificial
  Synthetic oligonucleotide
ccattgtaattttgagctgagctttgttaaggacctttggagctcgagctttgct

SEQ ID NO: 357374 - DNA, 55 bp, Artificial
  Synthetic oligonucleotide
ccattgtaattttgagctgagctttgttaaggacctttggagctcgagctttgtt

SEQ ID NO: 357375 - DNA, 52 bp, Artificial
  Synthetic oligonucleotide
ccattgtagaggacactcgggaggggcaacaaccagactctactgtaatgac

SEQ ID NO: 357376 - DNA, 60 bp, Artificial
  Synthetic oligonucleotide
ccattgtagtttggtcgcccattcatgagggaactgatccctaatcattctcaaatactc

SEQ ID NO: 357377 - DNA, 51 bp, Artificial
  Synthetic oligonucleotide
ccattgtataatcaatggtgttaccatgatcgcaggtactcccctcaaatt

SEQ ID NO: 357378 - DNA, 55 bp, Artificial
  Synthetic oligonucleotide
ccattgtattaattgtctggtacggtaacggcccacattataccgtacacgcaaa

SEQ ID NO: 357379 - DNA, 57 bp, Artificial
  Synthetic oligonucleotide
ccattgtcgtatggctgctcccagtcaacgtaaggcggtcctttcgacgctcgtcgg

SEQ ID NO: 357380 - DNA, 60 bp, Artificial
  Synthetic oligonucleotide
ccattgtctagccatgaagcaagtatacttagtgagtttgacggacaagtcattgctaat

SEQ ID NO: 357381 - DNA, 60 bp, Artificial
  Synthetic oligonucleotide
ccattgtctctgcacgtgatggctacgtataccgtgcaaccacaagggatgtcaatcctg

SEQ ID NO: 357382 - DNA, 60 bp, Artificial
  Synthetic oligonucleotide
ccattgtctgaggtgacaccttgattgtctccaacatattgccaccatccagcatgcaag

SEQ ID NO: 357383 - DNA, 55 bp, Artificial
  Synthetic oligonucleotide
ccattgtgatgtcataccgacaaaacagattcaaagggccaaggttgcaaggaca

SEQ ID NO: 357384 - DNA, 55 bp, Artificial
  Synthetic oligonucleotide
ccattgtgctgaagaacagggcataaccgattatgttcatatgcttggtgaggct

SEQ ID NO: 357385 - DNA, 55 bp, Artificial
  Synthetic oligonucleotide
ccattgtggggaaggagatcggggagcaggggaccccgcatctgcaagggtttgt

SEQ ID NO: 357386 - DNA, 55 bp, Artificial
  Synthetic oligonucleotide
ccattgttaaaggatcgtttttacatccgtcatgtcgtcaaacgtgtgttgtccg

SEQ ID NO: 357387 - DNA, 60 bp, Artificial
  Synthetic oligonucleotide
ccattgttcatatgaatattgtcgttgaccttcattcattgattcccaattaggacgttc

SEQ ID NO: 357388 - DNA, 57 bp, Artificial
  Synthetic oligonucleotide
ccattgttcccttgctggggtctcctcatcccgaccatttgtaggatttgagatctt

SEQ ID NO: 357389 - DNA, 55 bp, Artificial
  Synthetic oligonucleotide
ccattgttgaatgaagacaccatcatactaaaagcctctaaattaacacctgggg

SEQ ID NO: 357390 - DNA, 55 bp, Artificial
  Synthetic oligonucleotide
ccattgttgcaatcacaaggtcgaaagttgggtttgactttatcctcaaggggaa

SEQ ID NO: 357391 - DNA, 60 bp, Artificial
  Synthetic oligonucleotide
ccattgttgggaagtgctcagcatgtggaagagtgttcctgttaccctcgataccctgat

SEQ ID NO: 357392 - DNA, 55 bp, Artificial
  Synthetic oligonucleotide
ccatttaactttgccgtcgcctttgcagatatggctctcacatgccgcattcgcg

SEQ ID NO: 357393 - DNA, 55 bp, Artificial
  Synthetic oligonucleotide
ccatttaatttgtcacagagagctgtgttagcaccactttctatgggattgcgca

SEQ ID NO: 357394 - DNA, 54 bp, Artificial
  Synthetic oligonucleotide
ccatttaccccccccgccctgagcacgacattttcactgaaacgatggactact

SEQ ID NO: 357395 - DNA, 55 bp, Artificial
  Synthetic oligonucleotide
ccatttactaaaccaaaagtccccacgatcagacaggcaaaagtgcaaggaccca

SEQ ID NO: 357396 - DNA, 58 bp, Artificial
  Synthetic oligonucleotide
ccatttactaaatgacacgtgtaatcgcactaagtctgtcggccaataatggagggaa

SEQ ID NO: 357397 - DNA, 54 bp, Artificial
  Synthetic oligonucleotide
ccatttagattccagtcaactactggtctttctggatcgcagtggactctaggc

SEQ ID NO: 357398 - DNA, 57 bp, Artificial
  Synthetic oligonucleotide
ccatttatacaactctctggggaggacaccaggggcaaaatcggccatccgcaataa

SEQ ID NO: 357399 - DNA, 56 bp, Artificial
  Synthetic oligonucleotide
ccatttatcggccattaccctgttgtttgttaggtaagatcagtacggcgctatta

SEQ ID NO: 357400 - DNA, 59 bp, Artificial
  Synthetic oligonucleotide
ccatttcaaaatgtaaacaggatcacatatggggcctgtcccagatatgttaagcaaaa

SEQ ID NO: 357401 - DNA, 55 bp, Artificial
  Synthetic oligonucleotide
ccatttcagtctttagtacctaaggccattagaggccaatacagtgggtttgtaa

SEQ ID NO: 357402 - DNA, 55 bp, Artificial
  Synthetic oligonucleotide
ccatttcataaatagggtttgaaatggcatttgttcccacgaagaccgcacttac

SEQ ID NO: 357403 - DNA, 59 bp, Artificial
  Synthetic oligonucleotide
ccatttcatagcttggatcatagggcacttgagtcaaataaaaagaggggtgaacctga

SEQ ID NO: 357404 - DNA, 55 bp, Artificial
  Synthetic oligonucleotide
ccatttccatcattccagtcgaactcacacacaacaccatatgcatttaagtcgc

SEQ ID NO: 357405 - DNA, 51 bp, Artificial
  Synthetic oligonucleotide
ccatttccatgagttaatcatgaaagacggtcgtgtacttgtagttccatg

SEQ ID NO: 357406 - DNA, 56 bp, Artificial
  Synthetic oligonucleotide
ccatttcccaggattcggacagagcctcctatatggataccccgtctacgtgtttg

SEQ ID NO: 357407 - DNA, 51 bp, Artificial
  Synthetic oligonucleotide
ccatttccgcgaattatccgttttacaggctgcataaacacgcctcgaaat

SEQ ID NO: 357408 - DNA, 55 bp, Artificial
  Synthetic oligonucleotide
ccatttcctacttgaaaggctcctcggggggtccgctgttgtgtcccatgggaca

SEQ ID NO: 357409 - DNA, 55 bp, Artificial
  Synthetic oligonucleotide
ccatttcggacaccatgcttggggccatgattggacaaaccaaggtggtgattcc

SEQ ID NO: 357410 - DNA, 51 bp, Artificial
  Synthetic oligonucleotide
ccatttcttacttgaagggctcctcggggggtccgctgttgtgccctgcgg

SEQ ID NO: 357411 - DNA, 55 bp, Artificial
  Synthetic oligonucleotide
ccatttgaattgacacctgatgaaagacagcaaatatatgaaggattgtttacta

SEQ ID NO: 357412 - DNA, 59 bp, Artificial
  Synthetic oligonucleotide
ccatttgacagcagccgtttcttgccatacttcggatttactgtaatgtccttctggct

SEQ ID NO: 357413 - DNA, 60 bp, Artificial
  Synthetic oligonucleotide
ccatttgacccaggatgtgactgggaaactgaacttgaatgtgccaaagcattttgtaga

SEQ ID NO: 357414 - DNA, 60 bp, Artificial
  Synthetic oligonucleotide
ccatttgacctgtcagcaatggtgcaatgggcctatgatcataatttcgtggatgaggca

SEQ ID NO: 357415 - DNA, 55 bp, Artificial
  Synthetic oligonucleotide
ccatttgacgcaaacggtgcgttcagaaatgcctggcggttagaacagagaaacg

SEQ ID NO: 357416 - DNA, 58 bp, Artificial
  Synthetic oligonucleotide
ccatttgacttagtcaatgggtacctattgagaggatttcattctactcagggtatcg

SEQ ID NO: 357417 - DNA, 55 bp, Artificial
  Synthetic oligonucleotide
ccatttgatgtgccagattaccagagcctacggagtatcttagcaaacaatggga

SEQ ID NO: 357418 - DNA, 60 bp, Artificial
  Synthetic oligonucleotide
ccatttgcacaaacgggatatgcgcctgttgactggggacatggtgaactgcctgactca

SEQ ID NO: 357419 - DNA, 60 bp, Artificial
  Synthetic oligonucleotide
ccatttgcaggagcggccacagcaagctagacaagctaaacaacatacgtgttacctaat

SEQ ID NO: 357420 - DNA, 55 bp, Artificial
  Synthetic oligonucleotide
ccatttgcgccgctataatagcattatcgtgtggcgcaactacgtggatgctctg

SEQ ID NO: 357421 - DNA, 60 bp, Artificial
  Synthetic oligonucleotide
ccatttgcgtgctcttaaatggtatggatgattcaaaatcggtcacgacacttgtcaact

SEQ ID NO: 357422 - DNA, 55 bp, Artificial
  Synthetic oligonucleotide
ccatttgctctcaatatcgtctcgacatgtgccgctccaggtcgtcaggttcctc

SEQ ID NO: 357423 - DNA, 50 bp, Artificial
  Synthetic oligonucleotide
ccatttggagaaacagcgtgctcgtaagaccgacgaagcacgcgattatt

SEQ ID NO: 357424 - DNA, 49 bp, Artificial
  Synthetic oligonucleotide
ccatttgggtttttacgaaagtttttgggaataccttgaagggttgatg

SEQ ID NO: 357425 - DNA, 55 bp, Artificial
  Synthetic oligonucleotide
ccatttgtcctcgcctctacaaacgcagggtcaatcaatgctcccactgtgtcgg

SEQ ID NO: 357426 - DNA, 57 bp, Artificial
  Synthetic oligonucleotide
ccatttgtgtaggaaggaacttaattgtcttgaccatcccgctaccatccgtgataa

SEQ ID NO: 357427 - DNA, 60 bp, Artificial
  Synthetic oligonucleotide
ccatttgtgtgcagggaaataatgataacgcaacagctacagtatactatgaccgaagac

SEQ ID NO: 357428 - DNA, 55 bp, Artificial
  Synthetic oligonucleotide
ccatttgttacagactcgtcagtcataacgttgatagcgaacgttgacgctacag

SEQ ID NO: 357429 - DNA, 51 bp, Artificial
  Synthetic oligonucleotide
ccatttgttagatcttggacattgccttctgtagttttgagtgctggaggt

SEQ ID NO: 357430 - DNA, 51 bp, Artificial
  Synthetic oligonucleotide
ccatttgttttaccttcaccctccactatatagtctgttgcctggctattg

SEQ ID NO: 357431 - DNA, 49 bp, Artificial
  Synthetic oligonucleotide
ccattttaccggagaaggggctaatgttgttgggcccaagggtttaccc

SEQ ID NO: 357432 - DNA, 56 bp, Artificial
  Synthetic oligonucleotide
ccattttataaaggtatgtctttggaatccatctgtgacgagtggtacaagaaact

SEQ ID NO: 357433 - DNA, 59 bp, Artificial
  Synthetic oligonucleotide
ccattttcaaacctgactatggcccagcaccactctctcaatttgacaagcgcctgtca

SEQ ID NO: 357434 - DNA, 51 bp, Artificial
  Synthetic oligonucleotide
ccattttcaagttcttatggagggaaatcctttggttaaaaggggagattg

SEQ ID NO: 357435 - DNA, 57 bp, Artificial
  Synthetic oligonucleotide
ccattttcccgctgaaataacacagaacgttagatcagtactaactaagctctctaa

SEQ ID NO: 357436 - DNA, 60 bp, Artificial
  Synthetic oligonucleotide
ccattttcctgatcatcttaggtctaattggcaccttgcatggacttcactactttagta

SEQ ID NO: 357437 - DNA, 56 bp, Artificial
  Synthetic oligonucleotide
ccattttctggcaccgtcgaaaggtgccactgggtcttgttgttggtccgcagtag

SEQ ID NO: 357438 - DNA, 60 bp, Artificial
  Synthetic oligonucleotide
ccattttgaagctattatgccgattgaaggatgcaccattaaagcacttgcagactgtgt

SEQ ID NO: 357439 - DNA, 53 bp, Artificial
  Synthetic oligonucleotide
ccattttgcccctacttttaagttatatcgcgcgtcgtagtgcgcttaaaaag

SEQ ID NO: 357440 - DNA, 58 bp, Artificial
  Synthetic oligonucleotide
ccattttgctctcataaactttgaaatggcttctgaattggcttccgtgtgcgttggt

SEQ ID NO: 357441 - DNA, 55 bp, Artificial
  Synthetic oligonucleotide
ccattttggttggacaccattgaaagacatgggtactgtagtgtgcctatgtggt

SEQ ID NO: 357442 - DNA, 53 bp, Artificial
  Synthetic oligonucleotide
ccattttgtatggccatgaagggcgatgatggttttaaaaggcaggctaattt

SEQ ID NO: 357443 - DNA, 50 bp, Artificial
  Synthetic oligonucleotide
ccatttttgaagacaacaccacgccccctgaggttaccggaaggaccccc

SEQ ID NO: 357444 - DNA, 59 bp, Artificial
  Synthetic oligonucleotide
ccatttttgaagacaacaccacgccctctcagattaccagaagggcttccttgctctca

SEQ ID NO: 357445 - DNA, 60 bp, Artificial
  Synthetic oligonucleotide
ccatttttggctggaaccgttaacagacactaagatagctatggtagatgatgcaacacc

SEQ ID NO: 357446 - DNA, 54 bp, Artificial
  Synthetic oligonucleotide
ccatttttggtgacccctgtccccgcacttacattgaaaggttgagaataccca

SEQ ID NO: 357447 - DNA, 60 bp, Artificial
  Synthetic oligonucleotide
ccattttttacaagcgcaacgcagcagagctatgatgctctgaacagaaacgttctactt

SEQ ID NO: 357448 - DNA, 51 bp, Artificial
  Synthetic oligonucleotide
cccaaaaaacttccctggttacctttcaacgtcagtatcactaatagctga

SEQ ID NO: 357449 - DNA, 56 bp, Artificial
  Synthetic oligonucleotide
cccaaaaaccccatgcagaagagtctgaattgtactgttgctcttcgtgagcatac

SEQ ID NO: 357450 - DNA, 57 bp, Artificial
  Synthetic oligonucleotide
cccaaaaactcccctacagtcaattctatatcccaaaaactgacctcatcagagctg

SEQ ID NO: 357451 - DNA, 60 bp, Artificial
  Synthetic oligonucleotide
cccaaaaatagagaccaacaagttcgcggcaatatgcactcacttagaagtctgcttcat

SEQ ID NO: 357452 - DNA, 55 bp, Artificial
  Synthetic oligonucleotide
cccaaaaatgctaatggtagaacgttgccacctgtacctgaggaagtaccgatag

SEQ ID NO: 357453 - DNA, 57 bp, Artificial
  Synthetic oligonucleotide
cccaaaaatgttttggactcctggacatctgcgtttaacacgcgcagacaaccgcta

SEQ ID NO: 357454 - DNA, 55 bp, Artificial
  Synthetic oligonucleotide
cccaaaaccaaaggacaagcgaccactgactatacaatgccccgctcaatacaag

SEQ ID NO: 357455 - DNA, 54 bp, Artificial
  Synthetic oligonucleotide
cccaaaacccatcaggccctgtgtaataccacccagaagacgagcgacgggtcc

SEQ ID NO: 357456 - DNA, 55 bp, Artificial
  Synthetic oligonucleotide
cccaaaaccttgcagtattgtgtctgcagcgagcgtgtgtggcccggtatattgc

SEQ ID NO: 357457 - DNA, 55 bp, Artificial
  Synthetic oligonucleotide
cccaaaaccttgcggtatcgtgtccgcaaagaccgtgtgtggcccggtatattgc

SEQ ID NO: 357458 - DNA, 55 bp, Artificial
  Synthetic oligonucleotide
cccaaaaccttgtggtattgtgcctgcaaagagcgtatgcggcccagtatactgc

SEQ ID NO: 357459 - DNA, 54 bp, Artificial
  Synthetic oligonucleotide
cccaaaactaatgctcaccaagtggtactttacaaaagacatttgctccatggg

SEQ ID NO: 357460 - DNA, 54 bp, Artificial
  Synthetic oligonucleotide
cccaaaagaacagcggaaagcattaaccattagtgaatactttgaagttttgaa

SEQ ID NO: 357461 - DNA, 53 bp, Artificial
  Synthetic oligonucleotide
cccaaaagacccctccaagggctgggtaccatacaatgacaccttcggtagag

SEQ ID NO: 357462 - DNA, 52 bp, Artificial
  Synthetic oligonucleotide
cccaaaagcaacacattgacgggttaagtttcccctgttcgaaatggaaaga

SEQ ID NO: 357463 - DNA, 60 bp, Artificial
  Synthetic oligonucleotide
cccaaaagcgggccatcgtagctgtgatacccagacctgttttcacgcagatgcaggtca

SEQ ID NO: 357464 - DNA, 49 bp, Artificial
  Synthetic oligonucleotide
cccaaaaggggggcccccgtgacccaccgccataaggcggtgggtcacg

SEQ ID NO: 357465 - DNA, 55 bp, Artificial
  Synthetic oligonucleotide
cccaaaaggtgttttggactcctggacacctgcgttcaacacccgcaggcagccg

SEQ ID NO: 357466 - DNA, 57 bp, Artificial
  Synthetic oligonucleotide
cccaaaatccacaacccctccctttgatggcagcagctcactcaagcttcctgtaca

SEQ ID NO: 357467 - DNA, 55 bp, Artificial
  Synthetic oligonucleotide
cccaaacacaacagctttacaaatgtacccatgcagtggtagagacgtcgtactc

SEQ ID NO: 357468 - DNA, 51 bp, Artificial
  Synthetic oligonucleotide
cccaaacacccctttgaggcctaagttctatgagacctggcagattagtcc

SEQ ID NO: 357469 - DNA, 56 bp, Artificial
  Synthetic oligonucleotide
cccaaacacgtacgcggatgggtcccacgtccacccagactatgcccatacatcag

SEQ ID NO: 357470 - DNA, 57 bp, Artificial
  Synthetic oligonucleotide
cccaaacagactgcgtcttagaagcaatggcgttcctcgagaaatcccatcccggta

SEQ ID NO: 357471 - DNA, 55 bp, Artificial
  Synthetic oligonucleotide
cccaaacagattgtgtattagaagcaatggctttccttgaggaatcccatcccgg

SEQ ID NO: 357472 - DNA, 57 bp, Artificial
  Synthetic oligonucleotide
cccaaacaggaggataacttaacatgcacgaccattaatcaaaacaacactactgta

SEQ ID NO: 357473 - DNA, 55 bp, Artificial
  Synthetic oligonucleotide
cccaaacatcgatacatccagaacccctcacatttgagacgcgtcaccgaccaat

SEQ ID NO: 357474 - DNA, 60 bp, Artificial
  Synthetic oligonucleotide
cccaaacattgaggcgtgtggttatagtgacagggtaatgcagctaactctgggcaattc

SEQ ID NO: 357475 - DNA, 54 bp, Artificial
  Synthetic oligonucleotide
cccaaaccccaacaatccatataccagaagtattcccccaaggactcctcgcag

SEQ ID NO: 357476 - DNA, 54 bp, Artificial
  Synthetic oligonucleotide
cccaaaccgggagctactcccctggacacaaagcccccgtcacatccagaagac

SEQ ID NO: 357477 - DNA, 55 bp, Artificial
  Synthetic oligonucleotide
cccaaacctcagggcccgaggatggtaggagatgttacggatgtgggaagacagg

SEQ ID NO: 357478 - DNA, 53 bp, Artificial
  Synthetic oligonucleotide
cccaaaccttcaccaccccagaggggttccctcttaattgagcaaagcccatg

SEQ ID NO: 357479 - DNA, 58 bp, Artificial
  Synthetic oligonucleotide
cccaaactacctcctggcttggaagcaggtgctagcagaactccaggacattgaaaac

SEQ ID NO: 357480 - DNA, 55 bp, Artificial
  Synthetic oligonucleotide
cccaaactactctggacgccaatatttgttcagaagaggaagtatcttccgagtc

SEQ ID NO: 357481 - DNA, 56 bp, Artificial
  Synthetic oligonucleotide
cccaaactcgaggaatctaaaatgcaaacgtatccataggtttaccgccagatcta

SEQ ID NO: 357482 - DNA, 55 bp, Artificial
  Synthetic oligonucleotide
cccaaactgttttaactgcacagatctggacgtggccctaggcagaccaaaatgc

SEQ ID NO: 357483 - DNA, 55 bp, Artificial
  Synthetic oligonucleotide
cccaaagaaaattggctattattgggaggttggtgcagatcaacgcggacctctc

SEQ ID NO: 357484 - DNA, 55 bp, Artificial
  Synthetic oligonucleotide
cccaaagaaaggctatgctcagtatgagacaagaatagtgccagacggttctagg

SEQ ID NO: 357485 - DNA, 59 bp, Artificial
  Synthetic oligonucleotide
cccaaagagaacacaatctggactagcgggagcagcatatctttttgcggtgtaaatag

SEQ ID NO: 357486 - DNA, 55 bp, Artificial
  Synthetic oligonucleotide
cccaaagagcgggcccacagtgtcttccccgtcctactatcgccctcgatgacga

SEQ ID NO: 357487 - DNA, 54 bp, Artificial
  Synthetic oligonucleotide
cccaaagaggctggtggtgtattcttcactaaggcgttggagtcttgggaaccc

SEQ ID NO: 357488 - DNA, 52 bp, Artificial
  Synthetic oligonucleotide
cccaaagatcgaaggggtcttttcattagtcgttgtggttgatcgtaaaccc

SEQ ID NO: 357489 - DNA, 60 bp, Artificial
  Synthetic oligonucleotide
cccaaagatggcgtcctaaccagacgccaatgtgctgaacgcttcgatgacacctgggga

SEQ ID NO: 357490 - DNA, 60 bp, Artificial
  Synthetic oligonucleotide
cccaaagcctcatcgtctcaaccatatgggtgtgtgtagctgtggtctgtacaagcaacc

SEQ ID NO: 357491 - DNA, 55 bp, Artificial
  Synthetic oligonucleotide
cccaaagccttgcggtatcgtgccagcacggaatgtatgtggcccagtatattgc

SEQ ID NO: 357492 - DNA, 55 bp, Artificial
  Synthetic oligonucleotide
cccaaagccttgtggtatcgtgccagcacaaaccgtatgcggcccagtatattgc

SEQ ID NO: 357493 - DNA, 57 bp, Artificial
  Synthetic oligonucleotide
cccaaagcgtacaaagccccgcttatcaaccgtgagtacatacatggcgtcttagac

SEQ ID NO: 357494 - DNA, 58 bp, Artificial
  Synthetic oligonucleotide
cccaaagctcagcaaatcctatgttaacaataaggagaaggaagtcctcgtgctatgg

SEQ ID NO: 357495 - DNA, 59 bp, Artificial
  Synthetic oligonucleotide
cccaaagcttaaccatacaaactgtgataagagtgcaataccacttacatggactggga

SEQ ID NO: 357496 - DNA, 55 bp, Artificial
  Synthetic oligonucleotide
cccaaaggatagggtatgtcacaatgcccattacatcgtaccagatacttaatgc

SEQ ID NO: 357497 - DNA, 50 bp, Artificial
  Synthetic oligonucleotide
cccaaagtacttctactagcccatgattcaccgggccttagatcgattgg

SEQ ID NO: 357498 - DNA, 56 bp, Artificial
  Synthetic oligonucleotide
cccaaagtatttcatatgaagctagcaccgtggcaggagattgtggttctttgata

SEQ ID NO: 357499 - DNA, 59 bp, Artificial
  Synthetic oligonucleotide
cccaaatacagggaaatccatgttcgcaatgagcttaattcagtgtctgaaaggacgtg

SEQ ID NO: 357500 - DNA, 52 bp, Artificial
  Synthetic oligonucleotide
cccaaatacataccatcggggagtttaaaactggcaattgggctaagaaacg

SEQ ID NO: 357501 - DNA, 55 bp, Artificial
  Synthetic oligonucleotide
cccaaatacgtgaataagaagagtttgatgcttgcaacagggatgaggaatgtac

SEQ ID NO: 357502 - DNA, 60 bp, Artificial
  Synthetic oligonucleotide
cccaaatactccaacagacatgtcaatgctggcgtttgtcagtgcgtgcaatgacttctc

SEQ ID NO: 357503 - DNA, 55 bp, Artificial
  Synthetic oligonucleotide
cccaaatacttcccatctacgctggatttggagatccacgcgaagctctcactca

SEQ ID NO: 357504 - DNA, 55 bp, Artificial
  Synthetic oligonucleotide
cccaaatatgtaaaatcggagaaattggtcttagcaacaggactaaggaatgttc

SEQ ID NO: 357505 - DNA, 54 bp, Artificial
  Synthetic oligonucleotide
cccaaatatgtgaagcagagcaccctgaagctagcaacgggaatgcggaatgta

SEQ ID NO: 357506 - DNA, 55 bp, Artificial
  Synthetic oligonucleotide
cccaaatcaacacttttgccgatgtgtcaagcatggagataagtgcagtagttct

SEQ ID NO: 357507 - DNA, 55 bp, Artificial
  Synthetic oligonucleotide
cccaaatgatatagtggaatcagtaactcacgcaatcgcctccatattctcaggc

SEQ ID NO: 357508 - DNA, 60 bp, Artificial
  Synthetic oligonucleotide
cccaaatgcggaaacagacaatcagtccggtccagttgcacatcaggtgatagtaaacaa

SEQ ID NO: 357509 - DNA, 60 bp, Artificial
  Synthetic oligonucleotide
cccaaatggatatatctggtgcctccaacgcttcggtgtctaagcgcatgtttctagaga

SEQ ID NO: 357510 - DNA, 55 bp, Artificial
  Synthetic oligonucleotide
cccaaatgtagaggagctagagcagttagacatgataatttatgataagggacct

SEQ ID NO: 357511 - DNA, 55 bp, Artificial
  Synthetic oligonucleotide
cccaaatgttgccgctggtaattcttgctctatcaagttaccgattggtcaaact

SEQ ID NO: 357512 - DNA, 55 bp, Artificial
  Synthetic oligonucleotide
cccaaattctaaatagaccttattggatgcaacgggcacagggcatgaataatgg

SEQ ID NO: 357513 - DNA, 55 bp, Artificial
  Synthetic oligonucleotide
cccaaattgacggtcatttcctatcccagaccaaacaatcaggtgagaacttccc

SEQ ID NO: 357514 - DNA, 60 bp, Artificial
  Synthetic oligonucleotide
cccaaattgccagcaggcttcatcgaagcttacatagccaacaaccctgggctggagtgg

SEQ ID NO: 357515 - DNA, 55 bp, Artificial
  Synthetic oligonucleotide
cccaaattgggatttaatgcctactatagaaatagagcaatggaaaactaaagag

SEQ ID NO: 357516 - DNA, 55 bp, Artificial
  Synthetic oligonucleotide
cccaaatttatcgcaatcaccgttccataattgtgtcttggtagtaaatttggct

SEQ ID NO: 357517 - DNA, 55 bp, Artificial
  Synthetic oligonucleotide
cccaaatttgaaatcattggtcgcgctggccaaggttattttctccttgcgacgt

SEQ ID NO: 357518 - DNA, 51 bp, Artificial
  Synthetic oligonucleotide
cccaaatttgggagatgtcccttggctgcaaaggaagaatctattccaaaa

SEQ ID NO: 357519 - DNA, 53 bp, Artificial
  Synthetic oligonucleotide
cccaacaaaacgaaaagatggggatattccctacatttcatgggttatgtaat

SEQ ID NO: 357520 - DNA, 55 bp, Artificial
  Synthetic oligonucleotide
cccaacaaaagacttaatagcagaactacagaagcaggggcaaggccaatggaca

SEQ ID NO: 357521 - DNA, 60 bp, Artificial
  Synthetic oligonucleotide
cccaacaaacgcggggcctacttggctgcatcatcactagcctcacaggccgggacaaga

SEQ ID NO: 357522 - DNA, 55 bp, Artificial
  Synthetic oligonucleotide
cccaacaaagattgtaacggaacaatccataagctttaagcagttggttgacaac

SEQ ID NO: 357523 - DNA, 55 bp, Artificial
  Synthetic oligonucleotide
cccaacaaccataagcgggaaatgttttaccaaggcaggagcgcaagactcgata

SEQ ID NO: 357524 - DNA, 55 bp, Artificial
  Synthetic oligonucleotide
cccaacaaggagacgtctttgtcaacaccctcttcgagcccaaggatgctgcccg

SEQ ID NO: 357525 - DNA, 57 bp, Artificial
  Synthetic oligonucleotide
cccaacaatacacagatcaaattgaacgccccttaatggtagggtctgtgtggaaca

SEQ ID NO: 357526 - DNA, 58 bp, Artificial
  Synthetic oligonucleotide
cccaacacaatacctcaacttggcatagactacctgtacactttcaattcacaaagga

SEQ ID NO: 357527 - DNA, 55 bp, Artificial
  Synthetic oligonucleotide
cccaacacaatatcaatcaatctgcaggtacacatcaaaacaggggttcagactg

SEQ ID NO: 357528 - DNA, 53 bp, Artificial
  Synthetic oligonucleotide
cccaacacaattcaggttacagtggctaaccaagaaaaggtttacctcacaaa

SEQ ID NO: 357529 - DNA, 53 bp, Artificial
  Synthetic oligonucleotide
cccaacacagtttctaaattcggtcgtttataggaatctacaggcggaagtac

SEQ ID NO: 357530 - DNA, 59 bp, Artificial
  Synthetic oligonucleotide
cccaacacctggtaggagcgatgaattggagttaatcccgttggtctcatgcaatcatt

SEQ ID NO: 357531 - DNA, 55 bp, Artificial
  Synthetic oligonucleotide
cccaacacgcgccgctagagtgaggcgcagtgtctacaatgacctgttggtttcc

SEQ ID NO: 357532 - DNA, 55 bp, Artificial
  Synthetic oligonucleotide
cccaacacggtaagtttattgtcaagaacaccacaacactccaaattgctccagt

SEQ ID NO: 357533 - DNA, 55 bp, Artificial
  Synthetic oligonucleotide
cccaacactcttttggaattatgtcgtcgtcactagttgccgctgacaaccaaac

SEQ ID NO: 357534 - DNA, 55 bp, Artificial
  Synthetic oligonucleotide
cccaacaggaatggtcattttatgtagcctaataatagttcgggcagggtttgac

SEQ ID NO: 357535 - DNA, 52 bp, Artificial
  Synthetic oligonucleotide
cccaacaggaccggagacgctcagacaagtccgagaagccatagccacactt

SEQ ID NO: 357536 - DNA, 55 bp, Artificial
  Synthetic oligonucleotide
cccaacagttctttgatgaacataggtgtggaagaagcgagaaattgagcaatgc

SEQ ID NO: 357537 - DNA, 55 bp, Artificial
  Synthetic oligonucleotide
cccaacatacgattgtcctatggaacaactaggcggaattagcaggtgttttgcg

SEQ ID NO: 357538 - DNA, 60 bp, Artificial
  Synthetic oligonucleotide
cccaacatgtatgtccctgttggtgctgtgaccgagcagggatatctgaatctcggtgga

SEQ ID NO: 357539 - DNA, 55 bp, Artificial
  Synthetic oligonucleotide
cccaacattttgtgttagtgactattttgaagttatcagacagccaggggatggc

SEQ ID NO: 357540 - DNA, 55 bp, Artificial
  Synthetic oligonucleotide
cccaaccacaatggtgaagtgttatgaatcttttaatccttccctgccggtcgtg

SEQ ID NO: 357541 - DNA, 59 bp, Artificial
  Synthetic oligonucleotide
cccaaccactaaacctgttcctgcaaggtgggaagatgcttcattcacagattctagtg

SEQ ID NO: 357542 - DNA, 55 bp, Artificial
  Synthetic oligonucleotide
cccaaccatctgaatccttttgagactcttccaggacatgcccagagaccctccc

SEQ ID NO: 357543 - DNA, 60 bp, Artificial
  Synthetic oligonucleotide
cccaaccatgatgaccccaatgagacaatgattccacactctcagaggcccgtacaacta

SEQ ID NO: 357544 - DNA, 56 bp, Artificial
  Synthetic oligonucleotide
cccaaccatgccgatgaaggaaatacacgagtccattcgttggactaaagacccac

SEQ ID NO: 357545 - DNA, 57 bp, Artificial
  Synthetic oligonucleotide
cccaacccacagacacattaaaggcggcacatgccctaaaccacacagactaactag

SEQ ID NO: 357546 - DNA, 55 bp, Artificial
  Synthetic oligonucleotide
cccaacccaggttccttggaacaggaacaccaatttattcatcccttggatgctg

SEQ ID NO: 357547 - DNA, 59 bp, Artificial
  Synthetic oligonucleotide
cccaacccagtcaaataatccataccataaacagctgacattacaataagtcctggaga

SEQ ID NO: 357548 - DNA, 60 bp, Artificial
  Synthetic oligonucleotide
cccaacccatttcaggcatgacgtgcatgtttgaccgtgacgtgtctcttggtcctgtcg

SEQ ID NO: 357549 - DNA, 55 bp, Artificial
  Synthetic oligonucleotide
cccaaccccttgagggagggacccttaataaagacgccactgatggtgtctcatc

SEQ ID NO: 357550 - DNA, 52 bp, Artificial
  Synthetic oligonucleotide
cccaaccctcgcgatcgcacctactgtccgtgcaacttgtgcagtccgcacc

SEQ ID NO: 357551 - DNA, 57 bp, Artificial
  Synthetic oligonucleotide
cccaaccgccaatcggattcgcgaatggacgacgaatataaactgccttacacaaca

SEQ ID NO: 357552 - DNA, 56 bp, Artificial
  Synthetic oligonucleotide
cccaaccggtaagctatggcagacaatgggaacgggggctccatccgccgactctc

SEQ ID NO: 357553 - DNA, 58 bp, Artificial
  Synthetic oligonucleotide
cccaaccgtaaacgcggatggcccgcaactgaagtgatgacagctgtcggcctaatgt

SEQ ID NO: 357554 - DNA, 55 bp, Artificial
  Synthetic oligonucleotide
cccaaccgtcagtggctcacttgtttcaagtgatgctcaattgtttaacaggcct

SEQ ID NO: 357555 - DNA, 57 bp, Artificial
  Synthetic oligonucleotide
cccaacctccaatcactcaccaacctcctgtcctccaacttgtcctggttatcgctg

SEQ ID NO: 357556 - DNA, 60 bp, Artificial
  Synthetic oligonucleotide
cccaacctccgagcgtgtgcgcacaatccagtgttgctacgtcgtaacgcgcaagttgga

SEQ ID NO: 357557 - DNA, 55 bp, Artificial
  Synthetic oligonucleotide
cccaacctggtccgagacaaacatattgagcttccttttggccccaaggactgct

SEQ ID NO: 357558 - DNA, 60 bp, Artificial
  Synthetic oligonucleotide
cccaacctggtctgacacaaacatattcagctttcgctttgcaccaagaactgctttcag

SEQ ID NO: 357559 - DNA, 54 bp, Artificial
  Synthetic oligonucleotide
cccaacctgtgttcgatggctcccaatacattatggttaggaaaccctccgttg

SEQ ID NO: 357560 - DNA, 53 bp, Artificial
  Synthetic oligonucleotide
cccaacgaagaagaaaccctatcagataacgaagttgtttgacaaagaagggc

SEQ ID NO: 357561 - DNA, 54 bp, Artificial
  Synthetic oligonucleotide
cccaacgagaggggacgagtgaggcttatcccgaggaactcggctaatcgtcct

SEQ ID NO: 357562 - DNA, 58 bp, Artificial
  Synthetic oligonucleotide
cccaacgagcgagcccacatcgtcttacccgttctactgtcgccctctatcactatac

SEQ ID NO: 357563 - DNA, 55 bp, Artificial
  Synthetic oligonucleotide
cccaacgcaaggatagaggttgaggtccgccctattgggcgggacactagggcta

SEQ ID NO: 357564 - DNA, 55 bp, Artificial
  Synthetic oligonucleotide
cccaacgcaccacgcgccatagtcctaaacccatgcccacacacctcggttttag

SEQ ID NO: 357565 - DNA, 55 bp, Artificial
  Synthetic oligonucleotide
cccaacgcatacatgagaatcagtatgggcctgaatttgtgttggcccataactc

SEQ ID NO: 357566 - DNA, 60 bp, Artificial
  Synthetic oligonucleotide
cccaacgccgtgggagagtcggcagacaagaaggacgaacagatgagtacatatactctg

SEQ ID NO: 357567 - DNA, 51 bp, Artificial
  Synthetic oligonucleotide
cccaacgcggttgctatgtacgacgtccagtctttaagcgttcacaatatc

SEQ ID NO: 357568 - DNA, 53 bp, Artificial
  Synthetic oligonucleotide
cccaacgctccttggtggtcgatcatgtgcggctgctccatttcatgacacct

SEQ ID NO: 357569 - DNA, 55 bp, Artificial
  Synthetic oligonucleotide
cccaacggaccttctttgtgtggacctggacgatgacgtcttctggccttcgaac

SEQ ID NO: 357570 - DNA, 55 bp, Artificial
  Synthetic oligonucleotide
cccaacggatgacgtgccggcaccattgggtatgccagacttttctgggcaaata

SEQ ID NO: 357571 - DNA, 58 bp, Artificial
  Synthetic oligonucleotide
cccaacggatgcacgagaaccagtttgggcctgaatttgttatgggccataattcagc

SEQ ID NO: 357572 - DNA, 56 bp, Artificial
  Synthetic oligonucleotide
cccaacgggccaagtgtgtatagaaaaccatcaggtggtgtatttcaatccagtac

SEQ ID NO: 357573 - DNA, 60 bp, Artificial
  Synthetic oligonucleotide
cccaacgtaacttcaaagatatcctccttgcaacaagaatatgtgcgctgtctgtgttta

SEQ ID NO: 357574 - DNA, 53 bp, Artificial
  Synthetic oligonucleotide
cccaacgtagacattactgtgtctgttcaacccgtaaagcctgtctttaacgg

SEQ ID NO: 357575 - DNA, 60 bp, Artificial
  Synthetic oligonucleotide
cccaacgtattcatgagaatcaatacggcccagatttctcaatagcccataacacagccg

SEQ ID NO: 357576 - DNA, 51 bp, Artificial
  Synthetic oligonucleotide
cccaacgtccatgctatgaggtatcctatcgactttttcatgtcgcggttg

SEQ ID NO: 357577 - DNA, 50 bp, Artificial
  Synthetic oligonucleotide
cccaacgtcgaggcatgtggatacagcgacagagtcaggcaaatcacact

SEQ ID NO: 357578 - DNA, 60 bp, Artificial
  Synthetic oligonucleotide
cccaactcaaccctattgatggaccactacctgaggacaatgagccaagtgggtatgcac

SEQ ID NO: 357579 - DNA, 55 bp, Artificial
  Synthetic oligonucleotide
cccaactcaatccaattgacggaccactacccgaggataacgaaccaagcggata

SEQ ID NO: 357580 - DNA, 55 bp, Artificial
  Synthetic oligonucleotide
cccaactcaccaacttgagctcacactcatccgggtcgtcccgatccagcgggtc

SEQ ID NO: 357581 - DNA, 60 bp, Artificial
  Synthetic oligonucleotide
cccaactccagagcgtgaaggtgactactccacatctgcaatcaatactactttccatac

SEQ ID NO: 357582 - DNA, 60 bp, Artificial
  Synthetic oligonucleotide
cccaactcctacaacccacttgacaaggtcgatgagctcgacactgagcagttgaaagcc

SEQ ID NO: 357583 - DNA, 55 bp, Artificial
  Synthetic oligonucleotide
cccaactgaactctgccactgagaacgtaacgactgttgttacacaacaacctag

SEQ ID NO: 357584 - DNA, 55 bp, Artificial
  Synthetic oligonucleotide
cccaactgacctattgactgtaaacttagacgatgaagtattttaccctgatgac

SEQ ID NO: 357585 - DNA, 55 bp, Artificial
  Synthetic oligonucleotide
cccaactgactgagattctttcggtttctgagttcgacggtacgtccgatctgat

SEQ ID NO: 357586 - DNA, 59 bp, Artificial
  Synthetic oligonucleotide
cccaactgagatcttggctggtgtaaggagtagtttgaacccatgggcttatgatttca

SEQ ID NO: 357587 - DNA, 55 bp, Artificial
  Synthetic oligonucleotide
cccaactgccagttgccagttccgttggacaggtacttggcctgcttctggtcca

SEQ ID NO: 357588 - DNA, 60 bp, Artificial
  Synthetic oligonucleotide
cccaactggaaccaatctatccgcgcttcgatgatgaatgcgatgaccaattttcggacc

SEQ ID NO: 357589 - DNA, 60 bp, Artificial
  Synthetic oligonucleotide
cccaactgggtgataacgtgctcatatactcacaattaaactacacagatctagataaat

SEQ ID NO: 357590 - DNA, 55 bp, Artificial
  Synthetic oligonucleotide
cccaacttccactactgctagcaagctttcttgcgacatgaaatctgttgtgcgc

SEQ ID NO: 357591 - DNA, 55 bp, Artificial
  Synthetic oligonucleotide
cccaacttccgcgcgaggaaacggcctcggcgggatcacatgaaaggagccgaat

SEQ ID NO: 357592 - DNA, 55 bp, Artificial
  Synthetic oligonucleotide
cccaacttgcatgtcttgcctcagcctcgacagcaattaatcgatcggctggctc

SEQ ID NO: 357593 - DNA, 60 bp, Artificial
  Synthetic oligonucleotide
cccaacttgttttgacaagttggatgccgctgcaactaattgcgcgagatgtatgcgcaa

SEQ ID NO: 357594 - DNA, 55 bp, Artificial
  Synthetic oligonucleotide
cccaagaaaagaaggttgtcataggttctaatgtggaatatgctccgtatagttt

SEQ ID NO: 357595 - DNA, 55 bp, Artificial
  Synthetic oligonucleotide
cccaagaagacaggaggcccgatctacagacggagagatgggaaatgggtgagag

SEQ ID NO: 357596 - DNA, 60 bp, Artificial
  Synthetic oligonucleotide
cccaagaattaatggcccagttcaactctatgcttcaggcaaacctcaggctcaaccatg

SEQ ID NO: 357597 - DNA, 60 bp, Artificial
  Synthetic oligonucleotide
cccaagacaagctcgtggcccaatcatgaaacaaccaaaggtgtaacggcagcatgctcc

SEQ ID NO: 357598 - DNA, 60 bp, Artificial
  Synthetic oligonucleotide
cccaagacaagttcatggcccaatcatgacacgaacagaggtgtgacggcggcatgtcct

SEQ ID NO: 357599 - DNA, 57 bp, Artificial
  Synthetic oligonucleotide
cccaagacagctaacgcttgtcttgtcgtagctaaacctttgtttgaaaggcgatca

SEQ ID NO: 357600 - DNA, 55 bp, Artificial
  Synthetic oligonucleotide
cccaagaccaggggcctctttggagcaattgctggattcatagagaatggatggg

SEQ ID NO: 357601 - DNA, 60 bp, Artificial
  Synthetic oligonucleotide
cccaagaccgaaatcgtggctgccacagttcataaaattcctgtcaatcatgccgaggcg

SEQ ID NO: 357602 - DNA, 55 bp, Artificial
  Synthetic oligonucleotide
cccaagaccgtgtggtattgtgcctgcaaagagcgtgtgtggcccggtgtattgc

SEQ ID NO: 357603 - DNA, 55 bp, Artificial
  Synthetic oligonucleotide
cccaagacctacctttcacttgagacctggagcctatataaggccaaccttcacc

SEQ ID NO: 357604 - DNA, 55 bp, Artificial
  Synthetic oligonucleotide
cccaagaccttgtggtatcgtggccgcaaggagcgtgtgtggcccagtatattgc

SEQ ID NO: 357605 - DNA, 52 bp, Artificial
  Synthetic oligonucleotide
cccaagagacgggaagcgggtcttactacttggcagccccaatagggaccct

SEQ ID NO: 357606 - DNA, 55 bp, Artificial
  Synthetic oligonucleotide
cccaagagattctggatgcggtttgcgacgccattgagaaccgccttgaaaacac

SEQ ID NO: 357607 - DNA, 57 bp, Artificial
  Synthetic oligonucleotide
cccaagagcgacccctgagggacccccgaatcgcaaaggacatcagtatcccatagc

SEQ ID NO: 357608 - DNA, 52 bp, Artificial
  Synthetic oligonucleotide
cccaagagcgctggtcgtcgcaccaaacgcaggacagctgcaaccggtgcct

SEQ ID NO: 357609 - DNA, 52 bp, Artificial
  Synthetic oligonucleotide
cccaagaggaatcggtccatactgaacacgagccaaagaggaatactcgaag

SEQ ID NO: 357610 - DNA, 59 bp, Artificial
  Synthetic oligonucleotide
cccaagagtcaacaaggcctcagaatgggtgaacaggcccatgtacaggaagcccagga

SEQ ID NO: 357611 - DNA, 55 bp, Artificial
  Synthetic oligonucleotide
cccaagagtcggagtgcgtatgccacaaaggaatctgtccagtagtcatgacaga

SEQ ID NO: 357612 - DNA, 60 bp, Artificial
  Synthetic oligonucleotide
cccaagagtcttcaacattgctcttctattggcagaagttaaaaatgtactgctgattgc

SEQ ID NO: 357613 - DNA, 55 bp, Artificial
  Synthetic oligonucleotide
cccaagatctggattcaatacaaccatttcacaaggaggcgtacctactccggtt

SEQ ID NO: 357614 - DNA, 59 bp, Artificial
  Synthetic oligonucleotide
cccaagatgtacaggatgtatagaagtcccgatgtgccaaggggatgtgaaggcccttg

SEQ ID NO: 357615 - DNA, 60 bp, Artificial
  Synthetic oligonucleotide
cccaagatgttagcccaacgcatacatgagaatcagtatgggcctgaatttgtattggcc

SEQ ID NO: 357616 - DNA, 60 bp, Artificial
  Synthetic oligonucleotide
cccaagattggctgaacagcaattatactgtcaagatgcagtggagcttgcagctattga

SEQ ID NO: 357617 - DNA, 55 bp, Artificial
  Synthetic oligonucleotide
cccaagatttctcgcagaatagggtcctctgagtggatatgctctgctcagcaaa

SEQ ID NO: 357618 - DNA, 60 bp, Artificial
  Synthetic oligonucleotide
cccaagcacgcacatctgcccgtgcctcagggtggacactccagtcgtgcccgttctgtc

SEQ ID NO: 357619 - DNA, 55 bp, Artificial
  Synthetic oligonucleotide
cccaagcactgagatgtcaatgaggggagtgagaatcagcaagatgggagtggat

SEQ ID NO: 357620 - DNA, 55 bp, Artificial
  Synthetic oligonucleotide
cccaagcagccggagggaacataactggattaatgcgagaactcggatactcatc

SEQ ID NO: 357621 - DNA, 56 bp, Artificial
  Synthetic oligonucleotide
cccaagcaggaaagggcgagttgtgtgcagtctttagagccgaccctgggcgaaat

SEQ ID NO: 357622 - DNA, 55 bp, Artificial
  Synthetic oligonucleotide
cccaagcaggtatagacgtggttggtcgtctaatcagcgacgaggttacacacgt

SEQ ID NO: 357623 - DNA, 57 bp, Artificial
  Synthetic oligonucleotide
cccaagcatagagaaaaccatttgcgatgttatagttacgaagaagggaagagtgaa

SEQ ID NO: 357624 - DNA, 60 bp, Artificial
  Synthetic oligonucleotide
cccaagcatagatccgatgttttcttaaaggactgtcttatgtcttatatagaattctgc

SEQ ID NO: 357625 - DNA, 55 bp, Artificial
  Synthetic oligonucleotide
cccaagccaatagtaacccatggtagtcatttagaatttggatcatacactaact

SEQ ID NO: 357626 - DNA, 51 bp, Artificial
  Synthetic oligonucleotide
cccaagccccccttcccctaatcagaaccctcccccaccctgattatcacc

SEQ ID NO: 357627 - DNA, 59 bp, Artificial
  Synthetic oligonucleotide
cccaagccgaattaacttccctgcgactgcaagctgacaggtggctccaacggatggag

SEQ ID NO: 357628 - DNA, 53 bp, Artificial
  Synthetic oligonucleotide
cccaagccggcctagactcggtaaaactcgtcgaagctaacttggcccaagcc

SEQ ID NO: 357629 - DNA, 55 bp, Artificial
  Synthetic oligonucleotide
cccaagcctatgccaactgggaaattgatacaatgggctttgtccagatgaggag

SEQ ID NO: 357630 - DNA, 57 bp, Artificial
  Synthetic oligonucleotide
cccaagcgctacttgacacaggagccgaccgtacggttataccccatacactcgtgc

SEQ ID NO: 357631 - DNA, 58 bp, Artificial
  Synthetic oligonucleotide
cccaagcggaattgaaatccttgcggctacaagccgccaggtggctggaacgcgccca

SEQ ID NO: 357632 - DNA, 46 bp, Artificial
  Synthetic oligonucleotide
cccaagcggaggcggctttagagaacctcatagtactcaatgcagc

SEQ ID NO: 357633 - DNA, 55 bp, Artificial
  Synthetic oligonucleotide
cccaagcggttatcccagctggcaccggcacggacggatacatcgtggttgacga

SEQ ID NO: 357634 - DNA, 52 bp, Artificial
  Synthetic oligonucleotide
cccaagcgttgagccggaagtaaaagtgcgccccattaaggaaataggtcca

SEQ ID NO: 357635 - DNA, 55 bp, Artificial
  Synthetic oligonucleotide
cccaagctcagaataatataggcaacgcaatgtatttcccaactgttagtgggtc

SEQ ID NO: 357636 - DNA, 54 bp, Artificial
  Synthetic oligonucleotide
cccaagctccaagtgctcttgtcaccaaacatgttgtgaaggggaaatgcagtt

SEQ ID NO: 357637 - DNA, 55 bp, Artificial
  Synthetic oligonucleotide
cccaagctctccccttgatctgtgatcttgatccaatatatggccatccatcacc

SEQ ID NO: 357638 - DNA, 55 bp, Artificial
  Synthetic oligonucleotide
cccaagctcttcctttgatctgtgatcgtgaagcaatatagggccagccttcacc

SEQ ID NO: 357639 - DNA, 52 bp, Artificial
  Synthetic oligonucleotide
cccaagctgtgttggctttgacaaacgtggagaaggacaaacatgacctttt

SEQ ID NO: 357640 - DNA, 53 bp, Artificial
  Synthetic oligonucleotide
cccaagcttgaatgtcgtccgggacgttagtaaaggaggagagttgaaacgga

SEQ ID NO: 357641 - DNA, 58 bp, Artificial
  Synthetic oligonucleotide
cccaagctttcatagacgaagtcgccaaagtctatgaaatcaaccatggacgtggccc

SEQ ID NO: 357642 - DNA, 53 bp, Artificial
  Synthetic oligonucleotide
cccaaggaaagagaattgaaacgaaccggacgatatttctctcttatgtcctt

SEQ ID NO: 357643 - DNA, 55 bp, Artificial
  Synthetic oligonucleotide
cccaaggaacctgctgggagcagatgtatactccaggtggggaagtaagaaatga

SEQ ID NO: 357644 - DNA, 55 bp, Artificial
  Synthetic oligonucleotide
cccaaggaagcagccacctctacgtatataattggatttgcggctgcgaagaacg

SEQ ID NO: 357645 - DNA, 60 bp, Artificial
  Synthetic oligonucleotide
cccaaggagcagcgaacatcacgcaagtctgtcacgcgtactactaaaccatctttctcg

SEQ ID NO: 357646 - DNA, 55 bp, Artificial
  Synthetic oligonucleotide
cccaaggaggacaaaacgaccagagaccccagcagcaaaacaccaaccgagcaag

SEQ ID NO: 357647 - DNA, 55 bp, Artificial
  Synthetic oligonucleotide
cccaaggccttgcggtttcgtgccagcacagaccgtatgtggcccggtgtattgc

SEQ ID NO: 357648 - DNA, 55 bp, Artificial
  Synthetic oligonucleotide
cccaaggctgcaggatgtttgctctaagccaaggcacaacactcagaggacgaca

SEQ ID NO: 357649 - DNA, 52 bp, Artificial
  Synthetic oligonucleotide
cccaaggctttgtcttacctggggttcttcgccttgtgcggaaatacctgtt

SEQ ID NO: 357650 - DNA, 52 bp, Artificial
  Synthetic oligonucleotide
cccaagggaacccagggagaggcccaatgttagaccccgccctgcgaggaat

SEQ ID NO: 357651 - DNA, 56 bp, Artificial
  Synthetic oligonucleotide
cccaagggaagtagaagaggccaatgaaggagagaataactgtttgctacacccta

SEQ ID NO: 357652 - DNA, 58 bp, Artificial
  Synthetic oligonucleotide
cccaagggaccagcacccacattgacaacccttgctatccgagacctaaatcaataca

SEQ ID NO: 357653 - DNA, 55 bp, Artificial
  Synthetic oligonucleotide
cccaaggggaaactgtgggctgacgatgacaggagtgtggactacaacgagaaac

SEQ ID NO: 357654 - DNA, 53 bp, Artificial
  Synthetic oligonucleotide
cccaaggggaactcgtaagctggcaatagggaacctcgttatgtccactaacc

SEQ ID NO: 357655 - DNA, 57 bp, Artificial
  Synthetic oligonucleotide
cccaaggggtcattcaagtcgacaatgattgatacgttaccatcactattccccgaa

SEQ ID NO: 357656 - DNA, 58 bp, Artificial
  Synthetic oligonucleotide
cccaagggttatacacaatgttcttaggattggattacatcagtaattctattaatga

SEQ ID NO: 357657 - DNA, 58 bp, Artificial
  Synthetic oligonucleotide
cccaagggttgaatgaaacacactcgtcgggtatcgtgatatatatgcctctgagatt

SEQ ID NO: 357658 - DNA, 52 bp, Artificial
  Synthetic oligonucleotide
cccaaggttactaaatatttgcccttggataaagggatcaaaccttattatc

SEQ ID NO: 357659 - DNA, 49 bp, Artificial
  Synthetic oligonucleotide
cccaaggttcctccatccttcttccacgccgttaaaaaacacaccccct

SEQ ID NO: 357660 - DNA, 52 bp, Artificial
  Synthetic oligonucleotide
cccaagtaaaggaagttcgggtttatgagggtgtggaaaggctgccagggga

SEQ ID NO: 357661 - DNA, 53 bp, Artificial
  Synthetic oligonucleotide
cccaagtactcacgtcaaacatgtgggatcctttactaaacgagtttcccgaa

SEQ ID NO: 357662 - DNA, 55 bp, Artificial
  Synthetic oligonucleotide
cccaagtatgataaaggagagttaccttccaggggattcatgaacgttccacgca

SEQ ID NO: 357663 - DNA, 55 bp, Artificial
  Synthetic oligonucleotide
cccaagtattcacgttaaacatgtgggatcctctactcaacgagttccctgaaac

SEQ ID NO: 357664 - DNA, 55 bp, Artificial
  Synthetic oligonucleotide
cccaagtattcagaagagtccaaattgaatcgagaagaaatagacggggtgaaac

SEQ ID NO: 357665 - DNA, 55 bp, Artificial
  Synthetic oligonucleotide
cccaagtccacctgcccttgaaaggttttcagcctggcatcatacatcgggacag

SEQ ID NO: 357666 - DNA, 55 bp, Artificial
  Synthetic oligonucleotide
cccaagtccacttgctgttgaaaggttttaagcctggcgtcatatatcgggactg

SEQ ID NO: 357667 - DNA, 55 bp, Artificial
  Synthetic oligonucleotide
cccaagtcctttaaacgtgcatgattgagatagtcagaaattggagctaatttga

SEQ ID NO: 357668 - DNA, 55 bp, Artificial
  Synthetic oligonucleotide
cccaagtcgggaaccactattgcagagctaaacgttctgcgtcctgttgaaaccg

SEQ ID NO: 357669 - DNA, 52 bp, Artificial
  Synthetic oligonucleotide
cccaagtcttgggcgcgtttaagaagtacaccgctaattttaacgcctataa

SEQ ID NO: 357670 - DNA, 58 bp, Artificial
  Synthetic oligonucleotide
cccaagtgaaaaatatctcattcatacaaggttatagaacaaccacgtatgtaacata

SEQ ID NO: 357671 - DNA, 55 bp, Artificial
  Synthetic oligonucleotide
cccaagtgacccagcaactttcaactgggtccaacccctctctacagggtatgat

SEQ ID NO: 357672 - DNA, 58 bp, Artificial
  Synthetic oligonucleotide
cccaagtgctgaagtctgatccttcccagaggaccaggaccgaaacgccagtcgagcc

SEQ ID NO: 357673 - DNA, 60 bp, Artificial
  Synthetic oligonucleotide
cccaagtggagaaatagccaaaatgccagtggttgtgcaaattgatgagatagcacttcc

SEQ ID NO: 357674 - DNA, 55 bp, Artificial
  Synthetic oligonucleotide
cccaagtgtctaaacatccttgacgaatacacacgcttcaacggtgaaacctgca

SEQ ID NO: 357675 - DNA, 60 bp, Artificial
  Synthetic oligonucleotide
cccaagtgtctgtcccatttatgtcaccagcaagtgcttatcagtggttctatgacgggt

SEQ ID NO: 357676 - DNA, 55 bp, Artificial
  Synthetic oligonucleotide
cccaagttatttcgatcaatggatctactcgccgatgtttaatgcgcgactgcga

SEQ ID NO: 357677 - DNA, 55 bp, Artificial
  Synthetic oligonucleotide
cccaagttcaagggagggcttgggacaacaccactgtggatttggactcaaagcc

SEQ ID NO: 357678 - DNA, 55 bp, Artificial
  Synthetic oligonucleotide
cccaagttgcatctcttacgtggttaatcacactgtatgttgacgaataggccgg

SEQ ID NO: 357679 - DNA, 55 bp, Artificial
  Synthetic oligonucleotide
cccaataaaaatgttgtacccttctgtggaacaatacccaggatatggctcgacc

SEQ ID NO: 357680 - DNA, 58 bp, Artificial
  Synthetic oligonucleotide
cccaataatagttagaaagcatgattggtatgagattcaagaatcagagtattacccg

SEQ ID NO: 357681 - DNA, 60 bp, Artificial
  Synthetic oligonucleotide
cccaataattcgaaatagaattgaacagttgataatgcaatgtagattgtaagcaatttc

SEQ ID NO: 357682 - DNA, 60 bp, Artificial
  Synthetic oligonucleotide
cccaatacagaacagagtcattgcagaatagaatacagatagacccagtgaaattgagta

SEQ ID NO: 357683 - DNA, 55 bp, Artificial
  Synthetic oligonucleotide
cccaatacagacacacactcgaccggatcttaccacgcatattcggaccgtcaac

SEQ ID NO: 357684 - DNA, 60 bp, Artificial
  Synthetic oligonucleotide
cccaataggatggaacggctatggagctcatcctgtagctataaatatcgtcatgacgga

SEQ ID NO: 357685 - DNA, 55 bp, Artificial
  Synthetic oligonucleotide
cccaatagtggaagctaaagatcttactcgctacgagaatgctgatcgtgcagag

SEQ ID NO: 357686 - DNA, 51 bp, Artificial
  Synthetic oligonucleotide
cccaatatctagacccccctgggttctgacctatgggtctgagcattaacc

SEQ ID NO: 357687 - DNA, 54 bp, Artificial
  Synthetic oligonucleotide
cccaatattgttaaaccacacgaaaagggaataaatccgaactatctcttggca

SEQ ID NO: 357688 - DNA, 55 bp, Artificial
  Synthetic oligonucleotide
cccaatatttgagagtgttgacaatgttgcagtgttaaaattgccacctgagctc

SEQ ID NO: 357689 - DNA, 58 bp, Artificial
  Synthetic oligonucleotide
cccaatcacatcccgcctgtcaagtctagatatttgttccttggtgaccaaggtgtgg

SEQ ID NO: 357690 - DNA, 59 bp, Artificial
  Synthetic oligonucleotide
cccaatcactacgattatgaaccaatggagacgggtgttcacaggcaagggatacagtg

SEQ ID NO: 357691 - DNA, 55 bp, Artificial
  Synthetic oligonucleotide
cccaatcagcacccatccgcagaacaatcccctctgctcacaatgggcaagaccc

SEQ ID NO: 357692 - DNA, 55 bp, Artificial
  Synthetic oligonucleotide
cccaatcatattgggcctgtcgagcttagatagttgtatcaacttaaggcccaag

SEQ ID NO: 357693 - DNA, 54 bp, Artificial
  Synthetic oligonucleotide
cccaatcatgaagcctcactaggggtgagctcagcatgtccatacctgggggag

SEQ ID NO: 357694 - DNA, 55 bp, Artificial
  Synthetic oligonucleotide
cccaatccaatctgtgcgcctggcacgcgcagctggtttcagggtcgacccttac

SEQ ID NO: 357695 - DNA, 53 bp, Artificial
  Synthetic oligonucleotide
cccaatccggacgatttcttatacgcacccatttagactaactaccaagggta

SEQ ID NO: 357696 - DNA, 55 bp, Artificial
  Synthetic oligonucleotide
cccaatcctgcagaacggccatacaaattgcctgacctgtgcacggcgctggaca

SEQ ID NO: 357697 - DNA, 55 bp, Artificial
  Synthetic oligonucleotide
cccaatcgctgcctggtggagggtatgctatgtccccacccaggaacaaaggctg

SEQ ID NO: 357698 - DNA, 51 bp, Artificial
  Synthetic oligonucleotide
cccaatcgggaagaaggagctcaaccgcaaaggtatttgcctcaacctcat

SEQ ID NO: 357699 - DNA, 58 bp, Artificial
  Synthetic oligonucleotide
cccaatcgggcccaatcgcacatcaggtgattgtcaataaccaaaactggtcgggata

SEQ ID NO: 357700 - DNA, 60 bp, Artificial
  Synthetic oligonucleotide
cccaatcgtaacttagaagttcatcacacgtggtcaataggtggctcagtatgccaactg

SEQ ID NO: 357701 - DNA, 55 bp, Artificial
  Synthetic oligonucleotide
cccaatctacccaaaatccaaacgaagactatattacccaccatctaacaggata

SEQ ID NO: 357702 - DNA, 55 bp, Artificial
  Synthetic oligonucleotide
cccaatctcctgtaagtgtaaagttcgtcactttagccataatcacctcataagc

SEQ ID NO: 357703 - DNA, 57 bp, Artificial
  Synthetic oligonucleotide
cccaatgaacgcgcccaaacagtcttccctgtcctagactcaccctctattactata

SEQ ID NO: 357704 - DNA, 55 bp, Artificial
  Synthetic oligonucleotide
cccaatgaagagaccaccaaattagtgtttgaaatggagggcaatggcctacccc

SEQ ID NO: 357705 - DNA, 55 bp, Artificial
  Synthetic oligonucleotide
cccaatgaagattttgctgacatagtgaaacttagcaggccacggttaactgagt

SEQ ID NO: 357706 - DNA, 55 bp, Artificial
  Synthetic oligonucleotide
cccaatgaagccaatgttgcgggtgaccttgcctcatggacgtatgaaaccatgc

SEQ ID NO: 357707 - DNA, 55 bp, Artificial
  Synthetic oligonucleotide
cccaatgaccatatgcttaaagctcacattgtagaaaacacatggccaacgttgc

SEQ ID NO: 357708 - DNA, 60 bp, Artificial
  Synthetic oligonucleotide
cccaatgattcacaatattccagtaatctgacagtacaagcaatgtatgtacctccagga

SEQ ID NO: 357709 - DNA, 55 bp, Artificial
  Synthetic oligonucleotide
cccaatgcaggtactgatcccaattctaggatagcagaacgacaggaaatcgtcg

SEQ ID NO: 357710 - DNA, 60 bp, Artificial
  Synthetic oligonucleotide
cccaatgcagtttggttaattgacaggctatctaagaaagatcactgccgcatgtcatgg

SEQ ID NO: 357711 - DNA, 60 bp, Artificial
  Synthetic oligonucleotide
cccaatgcatgctcagccaacaactctcaccactacatcagtatggggaaatctggactg

SEQ ID NO: 357712 - DNA, 55 bp, Artificial
  Synthetic oligonucleotide
cccaatgctgggacagacccaaattctagaatcactgagaggcaagaaatagttg

SEQ ID NO: 357713 - DNA, 50 bp, Artificial
  Synthetic oligonucleotide
cccaatggaagagatcatggactcaatccgctggacaaaaagtgctgcaa

SEQ ID NO: 357714 - DNA, 60 bp, Artificial
  Synthetic oligonucleotide
cccaatggacctcttgcaagcctgtggtgcatctgcccctaggccagttgcccgtgtttc

SEQ ID NO: 357715 - DNA, 60 bp, Artificial
  Synthetic oligonucleotide
cccaatggactctcactgaactacagactgtactaggagagattcaatgggtctcaaaag

SEQ ID NO: 357716 - DNA, 55 bp, Artificial
  Synthetic oligonucleotide
cccaatggagaccaagctcattacctggggagcagacaccgccgcgtgcggtgat

SEQ ID NO: 357717 - DNA, 55 bp, Artificial
  Synthetic oligonucleotide
cccaatggagaggatagtgaacatgaaccccggggctagcttttacgagagtcct

SEQ ID NO: 357718 - DNA, 59 bp, Artificial
  Synthetic oligonucleotide
cccaatggatactatgtacagacaccaaaatttcacactaatgataataccatttgttc

SEQ ID NO: 357719 - DNA, 59 bp, Artificial
  Synthetic oligonucleotide
cccaatggtgaaacgtacattatctcccatcgcctttgctcctattgtgttgcagaggt

SEQ ID NO: 357720 - DNA, 54 bp, Artificial
  Synthetic oligonucleotide
cccaatgtccaacttctggatggtcgttggtgtgctgtcatttaaggttgcagg

SEQ ID NO: 357721 - DNA, 55 bp, Artificial
  Synthetic oligonucleotide
cccaatgtgacatcttacttggggaccaaagttggtcctacatagtggagagacc

SEQ ID NO: 357722 - DNA, 55 bp, Artificial
  Synthetic oligonucleotide
cccaatgtgatctattactaggtgaccagagctggtcatacatagtggaaagacc

SEQ ID NO: 357723 - DNA, 53 bp, Artificial
  Synthetic oligonucleotide
cccaatgttttgcaccggtgttttcttagaccggttggcagggacgtccagcg

SEQ ID NO: 357724 - DNA, 54 bp, Artificial
  Synthetic oligonucleotide
cccaatgttttgcaccggtgttttcttagaccggttggcagggctctatacttc

SEQ ID NO: 357725 - DNA, 55 bp, Artificial
  Synthetic oligonucleotide
cccaattaaagcttactagttaggcagctgacttgccgatcacgaatggaacttt

SEQ ID NO: 357726 - DNA, 55 bp, Artificial
  Synthetic oligonucleotide
cccaattatcgaggtcattcactgactgaagtctggcggggtacggaagacgacc

SEQ ID NO: 357727 - DNA, 57 bp, Artificial
  Synthetic oligonucleotide
cccaattcatcttggtgactgtagcttcgagggatggattgtaggaaacccctcctg

SEQ ID NO: 357728 - DNA, 60 bp, Artificial
  Synthetic oligonucleotide
cccaattctcagacaactcaggatacagtcagacaacatggagagtgtacttaaggtctc

SEQ ID NO: 357729 - DNA, 55 bp, Artificial
  Synthetic oligonucleotide
cccaattctcggcaaatgttgcacagtccgttgagagtgggcgcactccaatttt

SEQ ID NO: 357730 - DNA, 58 bp, Artificial
  Synthetic oligonucleotide
cccaattcttgagtgctccttgctctggtttgtctagccagagtttaaatgaggaacc

SEQ ID NO: 357731 - DNA, 55 bp, Artificial
  Synthetic oligonucleotide
cccaattgaacataagtatcagagcagaccaggtatgatcgagggtggagtgacg

SEQ ID NO: 357732 - DNA, 58 bp, Artificial
  Synthetic oligonucleotide
cccaattgagcaaccatctgtcactcaggtaacgcttggtggtaaacctatggatttg

SEQ ID NO: 357733 - DNA, 50 bp, Artificial
  Synthetic oligonucleotide
cccaattgaggacctggtgtacccacgcctagtagtcccaaaggaaaagg

SEQ ID NO: 357734 - DNA, 60 bp, Artificial
  Synthetic oligonucleotide
cccaattgatgaagctctctataggggtgcatcttcgaatcccttgaaggactacttgta

SEQ ID NO: 357735 - DNA, 59 bp, Artificial
  Synthetic oligonucleotide
cccaattgcggaaattgcgttgtgtcttcctacataaagttagccaatcagcgcacgcg

SEQ ID NO: 357736 - DNA, 55 bp, Artificial
  Synthetic oligonucleotide
cccaattttaccagtgctgcagttagggcagcctgttggtgggcaggtatccaac

SEQ ID NO: 357737 - DNA, 57 bp, Artificial
  Synthetic oligonucleotide
cccaattttcaccgtatttcctgctatgcatttaagcaaattgtaatcaatgtcagc

SEQ ID NO: 357738 - DNA, 56 bp, Artificial
  Synthetic oligonucleotide
cccaattttgacaaacaaagatgtcaaaacgcccacttgccgcctgtcttagtgta

SEQ ID NO: 357739 - DNA, 55 bp, Artificial
  Synthetic oligonucleotide
cccacaaactgaaagaatgatgcgaataaactggaaaaaatggtggcaggtgttt

SEQ ID NO: 357740 - DNA, 55 bp, Artificial
  Synthetic oligonucleotide
cccacaaactgatatctcaatggtgcaagagcattttggtgatattcgaagtaag

SEQ ID NO: 357741 - DNA, 55 bp, Artificial
  Synthetic oligonucleotide
cccacaaacttcaagaaatgttgcccattaatttgtggaaaagctctcagtttag

SEQ ID NO: 357742 - DNA, 59 bp, Artificial
  Synthetic oligonucleotide
cccacaaagacgacctgacgcaaacttggatgatatatccgagtttagcgcataagtaa

SEQ ID NO: 357743 - DNA, 60 bp, Artificial
  Synthetic oligonucleotide
cccacaaattgctgtatggcgcagggtgaaggaatatgtcgatttggacagctacgagcc

SEQ ID NO: 357744 - DNA, 60 bp, Artificial
  Synthetic oligonucleotide
cccacaacacgatcccaatcaaggtccctctcaagatccagatcccgatccaaatcgaga

SEQ ID NO: 357745 - DNA, 51 bp, Artificial
  Synthetic oligonucleotide
cccacaacaggatactttcctaaacccaacacccgttactttattacacaa

SEQ ID NO: 357746 - DNA, 54 bp, Artificial
  Synthetic oligonucleotide
cccacaacatatctttgaggttcaattcctctcgttccctgttgggccccttta

SEQ ID NO: 357747 - DNA, 55 bp, Artificial
  Synthetic oligonucleotide
cccacaaccactttaagaatgtatggcagtgagagccaagtaggagcagtagaca

SEQ ID NO: 357748 - DNA, 60 bp, Artificial
  Synthetic oligonucleotide
cccacaacgcacgtgctgacaaggacaaatggaccaatgaaattggctcctcgtagctta

SEQ ID NO: 357749 - DNA, 55 bp, Artificial
  Synthetic oligonucleotide
cccacaacgttatcaacgcagaaacggcaccaggaggaccctacatagttggaac

SEQ ID NO: 357750 - DNA, 51 bp, Artificial
  Synthetic oligonucleotide
cccacaactaaattaacgcttaatacgttaaaatcaatagggtgggctttc

SEQ ID NO: 357751 - DNA, 55 bp, Artificial
  Synthetic oligonucleotide
cccacaactataaaccgcgtgtgaccatgttcagggctggacatgactgtgtaaa

SEQ ID NO: 357752 - DNA, 60 bp, Artificial
  Synthetic oligonucleotide
cccacaactccttgtaacaagtgttactgtaaaatatgcagctggcattgccaattgtgc

SEQ ID NO: 357753 - DNA, 53 bp, Artificial
  Synthetic oligonucleotide
cccacaactctgttgccgctccgtaagagtcagcgactttagtcaagtagtct

SEQ ID NO: 357754 - DNA, 55 bp, Artificial
  Synthetic oligonucleotide
cccacaactggcagggagaaggcggaatagttgaaacacatggcagcatgtccgg

SEQ ID NO: 357755 - DNA, 56 bp, Artificial
  Synthetic oligonucleotide
cccacaacttgcccttcgatattccttgggaccaggaactgtttgaccgctgtgtg

SEQ ID NO: 357756 - DNA, 55 bp, Artificial
  Synthetic oligonucleotide
cccacaagacatcaccaggtacctgcagcgcgactacccgggcatccacactgct

SEQ ID NO: 357757 - DNA, 55 bp, Artificial
  Synthetic oligonucleotide
cccacaaggaccttgcctggaacattcaagtctttggtttcaggtcagatctcgc

SEQ ID NO: 357758 - DNA, 60 bp, Artificial
  Synthetic oligonucleotide
cccacaaggcggaccatatccctaccaagctgcatatatgctgactttaagtatactcga

SEQ ID NO: 357759 - DNA, 55 bp, Artificial
  Synthetic oligonucleotide
cccacaatcgcagtgcctgaaggattggatgagatgtctattgaatacttagcac

SEQ ID NO: 357760 - DNA, 54 bp, Artificial
  Synthetic oligonucleotide
cccacaatctttacatccctcgcaaaaggcgtagtctttgttcgggttttcaga

SEQ ID NO: 357761 - DNA, 55 bp, Artificial
  Synthetic oligonucleotide
cccacaatgagaatgcgtggtaatagtgtgtttgggtcgtcgcctatttctgtaa

SEQ ID NO: 357762 - DNA, 52 bp, Artificial
  Synthetic oligonucleotide
cccacaatgcaacttatggtgcctaagcggcaaaagttagaggacgtactag

SEQ ID NO: 357763 - DNA, 55 bp, Artificial
  Synthetic oligonucleotide
cccacaattctttccggttacgatagttttagagtaggtaggatagtggctgcga

SEQ ID NO: 357764 - DNA, 58 bp, Artificial
  Synthetic oligonucleotide
cccacacaagcaagtatttgtgttcaaaggtcctaactgacacaagtcgccccaatga

SEQ ID NO: 357765 - DNA, 55 bp, Artificial
  Synthetic oligonucleotide
cccacacaatagggcgatgccctgacttagcgatcacttaaagggctcgtactgt

SEQ ID NO: 357766 - DNA, 60 bp, Artificial
  Synthetic oligonucleotide
cccacacacaaagatattaagcgggtccgtgctagcaggcgagtctcttatgccgtgagg

SEQ ID NO: 357767 - DNA, 58 bp, Artificial
  Synthetic oligonucleotide
cccacacaccacagcccccgaggaggacatcactcaccgagtcttggcgctaaaagtc

SEQ ID NO: 357768 - DNA, 55 bp, Artificial
  Synthetic oligonucleotide
cccacacaccagtgggcagtctgtcgtaacgggcaactctgcagcggaaccgact

SEQ ID NO: 357769 - DNA, 60 bp, Artificial
  Synthetic oligonucleotide
cccacacattactagtaaactgtagatacaatccctatgctgatacaggaggaaacactg

SEQ ID NO: 357770 - DNA, 58 bp, Artificial
  Synthetic oligonucleotide
cccacacatttcaccaatcatggacgaccttttgactcaaacacgttcacttagaaga

SEQ ID NO: 357771 - DNA, 59 bp, Artificial
  Synthetic oligonucleotide
cccacaccaaagtcctccgagtggcacaggcacttcaggaagactgcaccttctttagc

SEQ ID NO: 357772 - DNA, 55 bp, Artificial
  Synthetic oligonucleotide
cccacaccctcatcaagagaatgcaactgtattgcttctcagtcaaagccgtatc

SEQ ID NO: 357773 - DNA, 56 bp, Artificial
  Synthetic oligonucleotide
cccacacctgagtgggagagtgatcgcattaggcccttttggcctaaggatgaatg

SEQ ID NO: 357774 - DNA, 54 bp, Artificial
  Synthetic oligonucleotide
cccacacgaataagacagggtttagaaagagctttactataaaatgggtggcaa

SEQ ID NO: 357775 - DNA, 53 bp, Artificial
  Synthetic oligonucleotide
cccacacgaccaggggtccacttgttccctacttcggaacccagaccaagcca

SEQ ID NO: 357776 - DNA, 52 bp, Artificial
  Synthetic oligonucleotide
cccacacgcgttcgggtgggttttagacaattaagcgattgtcaccgtcccc

SEQ ID NO: 357777 - DNA, 55 bp, Artificial
  Synthetic oligonucleotide
cccacacggagtagaacagagaaatcacctccagaggaccccttaagcgaacaaa

SEQ ID NO: 357778 - DNA, 57 bp, Artificial
  Synthetic oligonucleotide
cccacacggggcacgcaatctcccagatagttgcactcgcaacgaacgggcatcaga

SEQ ID NO: 357779 - DNA, 58 bp, Artificial
  Synthetic oligonucleotide
cccacacgttagatcaactctccgtctccgaatgggcttcctcttggctattctgtgt

SEQ ID NO: 357780 - DNA, 58 bp, Artificial
  Synthetic oligonucleotide
cccacacgttgttacaattacaacatcccgtctacacatgcatgtgacagtccaacat

SEQ ID NO: 357781 - DNA, 55 bp, Artificial
  Synthetic oligonucleotide
cccacactcacgcagcttgtaaagcaatagagaatagaatgttagagatagtagg

SEQ ID NO: 357782 - DNA, 52 bp, Artificial
  Synthetic oligonucleotide
cccacactcggccaaatccaaatttggctacggggcaaaggacgtccggaac

SEQ ID NO: 357783 - DNA, 55 bp, Artificial
  Synthetic oligonucleotide
cccacagaaactatagtccctcccaaggataaactcagcaacaaatcccaggtgc

SEQ ID NO: 357784 - DNA, 60 bp, Artificial
  Synthetic oligonucleotide
cccacagaagctgcatttcaggcccattatagagtttgtcaagtcactcatcgatttaga

SEQ ID NO: 357785 - DNA, 58 bp, Artificial
  Synthetic oligonucleotide
cccacagaccagaaatcaatgtcgtttaatgtgaattccttgctatgtagttcaattt

SEQ ID NO: 357786 - DNA, 55 bp, Artificial
  Synthetic oligonucleotide
cccacagagtttcacttaaacatgcggaaactcttaaatgatttggccacaaagg

SEQ ID NO: 357787 - DNA, 60 bp, Artificial
  Synthetic oligonucleotide
cccacagcctcaacctccgcctccgacgatgcatctcacggtgagattaccggcagggta

SEQ ID NO: 357788 - DNA, 55 bp, Artificial
  Synthetic oligonucleotide
cccacagctaactggtaacttaaaagctgttggaaggtgtgaaagtcagctggta

SEQ ID NO: 357789 - DNA, 55 bp, Artificial
  Synthetic oligonucleotide
cccacagctgtttcgcagcttagcccacgactggagtctatctctttgtctccac

SEQ ID NO: 357790 - DNA, 60 bp, Artificial
  Synthetic oligonucleotide
cccacaggacagacagcagactggctaagcattgttgtctatctgacatcctttgttgtc

SEQ ID NO: 357791 - DNA, 55 bp, Artificial
  Synthetic oligonucleotide
cccacaggcaggagcgtgggatttaggacgattcattggaaaccaactccgaagc

SEQ ID NO: 357792 - DNA, 54 bp, Artificial
  Synthetic oligonucleotide
cccacaggctccggagaacggtcacaacaaaccagcaccaagggacggaggtac

SEQ ID NO: 357793 - DNA, 55 bp, Artificial
  Synthetic oligonucleotide
cccacagggcccattgggcgtagcactctggtactgaggtacctttgtgcgcctg

SEQ ID NO: 357794 - DNA, 50 bp, Artificial
  Synthetic oligonucleotide
cccacaggtccacgctccgggggacgggagtaggttcgacacacgcgtac

SEQ ID NO: 357795 - DNA, 55 bp, Artificial
  Synthetic oligonucleotide
cccacagtaacaccaatgtagaagaccttttgatattatggggaattcaccaccc

SEQ ID NO: 357796 - DNA, 55 bp, Artificial
  Synthetic oligonucleotide
cccacagtaggttgtcacatcctgtcaaccccagatcagaagagtccacagccct

SEQ ID NO: 357797 - DNA, 55 bp, Artificial
  Synthetic oligonucleotide
cccacagtcgcactgatggctgactggcgcagcaagattccagagatgagctgca

SEQ ID NO: 357798 - DNA, 55 bp, Artificial
  Synthetic oligonucleotide
cccacagtgttgccattacctccacgatacatttgagttactaagcaataggtaa

SEQ ID NO: 357799 - DNA, 53 bp, Artificial
  Synthetic oligonucleotide
cccacataacggcagaggcggccaagaggaggttggcgagagggtcccccccc

SEQ ID NO: 357800 - DNA, 54 bp, Artificial
  Synthetic oligonucleotide
cccacatacaatagtagccacattagctctgttaggttgctcaggttcaccatg

SEQ ID NO: 357801 - DNA, 55 bp, Artificial
  Synthetic oligonucleotide
cccacataccgacccaaatcactgagacaaatgatggtgtactgattgtgaacac

SEQ ID NO: 357802 - DNA, 53 bp, Artificial
  Synthetic oligonucleotide
cccacatataacacccttaaatataattacccaacgaaagttggacagtgtgg

SEQ ID NO: 357803 - DNA, 57 bp, Artificial
  Synthetic oligonucleotide
cccacatatcagcatccacccagatccattaagctacaatggaccggtcacactcta

SEQ ID NO: 357804 - DNA, 55 bp, Artificial
  Synthetic oligonucleotide
cccacatattgtggacagatgtgtgagcaataggggttgctcacttgatgacgca

SEQ ID NO: 357805 - DNA, 60 bp, Artificial
  Synthetic oligonucleotide
cccacatcagaatccgcatcgttgtgtcctatggtactacgagaggcccatgattcgcct

SEQ ID NO: 357806 - DNA, 54 bp, Artificial
  Synthetic oligonucleotide
cccacatcatatgatcttgggtatgtgaggcttggtgaccccattcctgctata

SEQ ID NO: 357807 - DNA, 60 bp, Artificial
  Synthetic oligonucleotide
cccacatccttgtcacaagagaaccatacctctcatgtggaccacatgaatgcagaatgt

SEQ ID NO: 357808 - DNA, 56 bp, Artificial
  Synthetic oligonucleotide
cccacatcgggtagttcgcgaaacagggtgagggaagcgagcaatataaggcgagg

SEQ ID NO: 357809 - DNA, 55 bp, Artificial
  Synthetic oligonucleotide
cccacatctacgccatcttctactagttggtcaggattaggtgcgcgtaaacatc

SEQ ID NO: 357810 - DNA, 57 bp, Artificial
  Synthetic oligonucleotide
cccacatctactaccactgcggtaaaactccctcccagctctcccaatggtgccaaa

SEQ ID NO: 357811 - DNA, 57 bp, Artificial
  Synthetic oligonucleotide
cccacatctatcacgtacaagcgtgagagtgtgaagcacgactgcggtgcactggtt

SEQ ID NO: 357812 - DNA, 55 bp, Artificial
  Synthetic oligonucleotide
cccacatctttgtccgtgaactgtttggataggatcttcactgttggtgcccgga

SEQ ID NO: 357813 - DNA, 55 bp, Artificial
  Synthetic oligonucleotide
cccacatgaccggagctcacccctggccttatttgaactgaccaattaccttgct

SEQ ID NO: 357814 - DNA, 57 bp, Artificial
  Synthetic oligonucleotide
cccacatgatcgacccttaccggttggggatagctgacacaggcccattgggtggta

SEQ ID NO: 357815 - DNA, 55 bp, Artificial
  Synthetic oligonucleotide
cccacatgttgatcgggtacggttttgtatccccaggggattgtggtggcatcct

SEQ ID NO: 357816 - DNA, 60 bp, Artificial
  Synthetic oligonucleotide
cccacatgtttgagttctcgcagatgccacctgatgagtgactgtactggcaatagatgc

SEQ ID NO: 357817 - DNA, 59 bp, Artificial
  Synthetic oligonucleotide
cccacattgtcttccccgttcgtgaatcaccttcgatgatgatactaataggtctctcc

SEQ ID NO: 357818 - DNA, 55 bp, Artificial
  Synthetic oligonucleotide
cccacatttcaagccaggcgccgactcaaatgcttcaggcctccaagggaaggcg

SEQ ID NO: 357819 - DNA, 55 bp, Artificial
  Synthetic oligonucleotide
cccaccaaagcagactacttctagaaggttggtggaagtatttctcaaggatacc

SEQ ID NO: 357820 - DNA, 53 bp, Artificial
  Synthetic oligonucleotide
cccaccaaatactttgaaatgctatcgctatagggaaaaggaaagattaaaag

SEQ ID NO: 357821 - DNA, 55 bp, Artificial
  Synthetic oligonucleotide
cccaccaaatcaatacccattacgtctgacaatcaacgtcctctgtataagaacg

SEQ ID NO: 357822 - DNA, 57 bp, Artificial
  Synthetic oligonucleotide
cccaccaaatttgtctcccctcccagacctgcgcctggtgtgtttgcccagagattg

SEQ ID NO: 357823 - DNA, 55 bp, Artificial
  Synthetic oligonucleotide
cccaccaacagagccagtacaagtttatcgtgcacgttgaggggcacgtttccgc

SEQ ID NO: 357824 - DNA, 60 bp, Artificial
  Synthetic oligonucleotide
cccaccaacagcaggacgtcagttccatctagccctggctgcctccgagttcaaagagac

SEQ ID NO: 357825 - DNA, 55 bp, Artificial
  Synthetic oligonucleotide
cccaccaatactataagggttgcatctactacgtcccacaatccagtatacagtg

SEQ ID NO: 357826 - DNA, 55 bp, Artificial
  Synthetic oligonucleotide
cccaccactcccctcgcacgagctgcgtgggagacagctagacacactccagtta

SEQ ID NO: 357827 - DNA, 55 bp, Artificial
  Synthetic oligonucleotide
cccaccagcctacagcccttgtcggtgtacttgtgcaagatcataaggcgaagac

SEQ ID NO: 357828 - DNA, 52 bp, Artificial
  Synthetic oligonucleotide
cccaccagtaaaacagttcggaacagaaatagagttagcaaagggttctaaa

SEQ ID NO: 357829 - DNA, 55 bp, Artificial
  Synthetic oligonucleotide
cccaccagtgttaactcgaccgctcaactagtgaaaccaccacttgcaaaagagc

SEQ ID NO: 357830 - DNA, 55 bp, Artificial
  Synthetic oligonucleotide
cccaccataaggtggggtgggcatggtggacttgcagcagggtaatattcccatt

SEQ ID NO: 357831 - DNA, 54 bp, Artificial
  Synthetic oligonucleotide
cccaccatcaaggatagagtgtgcatggtttccacaaactttcaacagaagagc

SEQ ID NO: 357832 - DNA, 56 bp, Artificial
  Synthetic oligonucleotide
cccaccatcacggatgcggggtcaaatgtgactgtgacaccggacgtccctgtctt

SEQ ID NO: 357833 - DNA, 55 bp, Artificial
  Synthetic oligonucleotide
cccaccatgtcaatgagtttcctactggcgggaggcctggtcctaaccatgacgc

SEQ ID NO: 357834 - DNA, 55 bp, Artificial
  Synthetic oligonucleotide
cccaccatttgaacactgcattctgggtagacaattgttgggaaggtttgcatcg

SEQ ID NO: 357835 - DNA, 55 bp, Artificial
  Synthetic oligonucleotide
cccaccatttgtacagagacaaacactacttcgtgcgtggcggcatgccatcagg

SEQ ID NO: 357836 - DNA, 52 bp, Artificial
  Synthetic oligonucleotide
cccacccacagggcccaagtggcgtagtacttggtattccggtacctttgta

SEQ ID NO: 357837 - DNA, 55 bp, Artificial
  Synthetic oligonucleotide
cccacccaccgatactgcgcagacaaatctgtacacaaggactgacacaacaacg

SEQ ID NO: 357838 - DNA, 56 bp, Artificial
  Synthetic oligonucleotide
cccacccagggatctttgaaaactcgtgtcttgaaacgatggaaattgttcagcaa

SEQ ID NO: 357839 - DNA, 55 bp, Artificial
  Synthetic oligonucleotide
cccacccagttaaggagtcgaatacactgtcccacgtgtcaactcaccagttgct

SEQ ID NO: 357840 - DNA, 59 bp, Artificial
  Synthetic oligonucleotide
cccacccatgagctacccgatcccgatagacaccctcgcatgttacaagtctctgaccc

SEQ ID NO: 357841 - DNA, 55 bp, Artificial
  Synthetic oligonucleotide
cccaccccatgtatccatatacctggtgaagttaggaatttactagagctatgcc

SEQ ID NO: 357842 - DNA, 53 bp, Artificial
  Synthetic oligonucleotide
cccaccccgacgtccgttgatatgaattcagtaacttcgacgggtgttcgtat

SEQ ID NO: 357843 - DNA, 52 bp, Artificial
  Synthetic oligonucleotide
cccaccccttgaattcggccttttgtgacaagccccttggtgaaaggacctc

SEQ ID NO: 357844 - DNA, 55 bp, Artificial
  Synthetic oligonucleotide
cccacccggggatctttgaaaactcgtgcctcgaagcgatggaagttgttcaaca

SEQ ID NO: 357845 - DNA, 55 bp, Artificial
  Synthetic oligonucleotide
cccaccctctcggtatagataccgaagcagtcgcctgggaaaagttcctagcggc

SEQ ID NO: 357846 - DNA, 55 bp, Artificial
  Synthetic oligonucleotide
cccaccctgaaacttcatcggacagattctatacactgaatagtgtcacttggca

SEQ ID NO: 357847 - DNA, 55 bp, Artificial
  Synthetic oligonucleotide
cccaccctgttgtagttaacgatctaatctcctgtactctactactaggcgaagg

SEQ ID NO: 357848 - DNA, 52 bp, Artificial
  Synthetic oligonucleotide
cccaccgaaactaacttttatttcgctgtcttgcctgcctttaaaccacaaa

SEQ ID NO: 357849 - DNA, 56 bp, Artificial
  Synthetic oligonucleotide
cccaccgcacacactggttggggcgttgctccggtccgcgacatactacttctcag

SEQ ID NO: 357850 - DNA, 60 bp, Artificial
  Synthetic oligonucleotide
cccaccgcgcatgtccattccattcattagcatcggtaacgcttacagttgcttttatga

SEQ ID NO: 357851 - DNA, 55 bp, Artificial
  Synthetic oligonucleotide
cccaccgcttttatctgatatggcctcgttcttttcacgccgttccactcctgag

SEQ ID NO: 357852 - DNA, 51 bp, Artificial
  Synthetic oligonucleotide
cccaccggctactgactcgtcagctgcttccgcactgggactcgccttgag

SEQ ID NO: 357853 - DNA, 55 bp, Artificial
  Synthetic oligonucleotide
cccaccgggtgttttcaagtagcctagctaggccatccaggaatgtatgtgtctg

SEQ ID NO: 357854 - DNA, 55 bp, Artificial
  Synthetic oligonucleotide
cccaccggttacaacccagagatcgaatgctgcctctccggcgactcatgtcccc

SEQ ID NO: 357855 - DNA, 54 bp, Artificial
  Synthetic oligonucleotide
cccaccgtggcacacggtgtgtttaaccctgagtttggccccgctgccttgtcc

SEQ ID NO: 357856 - DNA, 55 bp, Artificial
  Synthetic oligonucleotide
cccaccgtggctcacggtgtgtttcagcctgaatttggacctgccgccctgtcaa

SEQ ID NO: 357857 - DNA, 56 bp, Artificial
  Synthetic oligonucleotide
cccaccgttacgctcgaaacattagggccaattctatcagcgtacgcttggagagg

SEQ ID NO: 357858 - DNA, 54 bp, Artificial
  Synthetic oligonucleotide
cccaccgtttcatacatgatggagttccttgacctactgaaacagagtcgacaa

SEQ ID NO: 357859 - DNA, 51 bp, Artificial
  Synthetic oligonucleotide
cccacctaagcttaaaagtatggtgactgtcacttttaagtggatagatcc

SEQ ID NO: 357860 - DNA, 55 bp, Artificial
  Synthetic oligonucleotide
cccacctagcttggcatgggtgtctatagctataagccattggatgacagctttg

SEQ ID NO: 357861 - DNA, 59 bp, Artificial
  Synthetic oligonucleotide
cccacctagtgtgttactaccagccacctacaccgccatatggcttgaaccctcacgca

SEQ ID NO: 357862 - DNA, 53 bp, Artificial
  Synthetic oligonucleotide
cccacctatggtccccacgtcctgattcccgcgttagggtcacccgagggcta

SEQ ID NO: 357863 - DNA, 55 bp, Artificial
  Synthetic oligonucleotide
cccacctcactgatagtgggcattggcttagcagctttccatttggccatcgtgg

SEQ ID NO: 357864 - DNA, 55 bp, Artificial
  Synthetic oligonucleotide
cccacctcatgggtcccacaaggacgcacaacatggtcgattcatgggaaagggg

SEQ ID NO: 357865 - DNA, 55 bp, Artificial
  Synthetic oligonucleotide
cccacctctttacaacacctcattaacatcccaccatgcaaaccaccatccatac

SEQ ID NO: 357866 - DNA, 59 bp, Artificial
  Synthetic oligonucleotide
cccacctgccttgcctcagaactaccctacgatgccccctcagaaatagatcggatggc

SEQ ID NO: 357867 - DNA, 55 bp, Artificial
  Synthetic oligonucleotide
cccaccttacctttatactcatagacgatatacctcaactagctccattacctct

SEQ ID NO: 357868 - DNA, 55 bp, Artificial
  Synthetic oligonucleotide
cccaccttataacaacgcacgcccttgtctttgaaagcatttgccaggaggttac

SEQ ID NO: 357869 - DNA, 57 bp, Artificial
  Synthetic oligonucleotide
cccaccttcgaactgcccggagccagtacgcagcctccacgaatacaagtcacggac

SEQ ID NO: 357870 - DNA, 55 bp, Artificial
  Synthetic oligonucleotide
cccaccttcgcacctcagatcgcccaggtgcgtttcaaatcaccatccaacgact

SEQ ID NO: 357871 - DNA, 52 bp, Artificial
  Synthetic oligonucleotide
cccaccttctccatagagactacaaccgttcctcaggatgcggtgtcccgca

SEQ ID NO: 357872 - DNA, 52 bp, Artificial
  Synthetic oligonucleotide
cccaccttgcaaatcaggtatttggtattccgcagtatgcctcgcggcaaat

SEQ ID NO: 357873 - DNA, 57 bp, Artificial
  Synthetic oligonucleotide
cccaccttttgagagatgtattccgctcctcgtccagatattctttataggacgaag

SEQ ID NO: 357874 - DNA, 55 bp, Artificial
  Synthetic oligonucleotide
cccacgacatgacagcggaggaattccttgagttgcgcaaccgggcagctatggg

SEQ ID NO: 357875 - DNA, 54 bp, Artificial
  Synthetic oligonucleotide
cccacgagaggagcttggttaggaccacgaagtgtgccgaaaggggaacgaaga

SEQ ID NO: 357876 - DNA, 55 bp, Artificial
  Synthetic oligonucleotide
cccacgagctagactacgtaatggctttgatatcacaggccctcgatagattcac

SEQ ID NO: 357877 - DNA, 55 bp, Artificial
  Synthetic oligonucleotide
cccacgatacgggcaccctatccaatttatgtcccttaacctcccatggactgac

SEQ ID NO: 357878 - DNA, 55 bp, Artificial
  Synthetic oligonucleotide
cccacgatcccatgtccgtacaactgtgcgacgcagtcacatcgttgtttatgct

SEQ ID NO: 357879 - DNA, 55 bp, Artificial
  Synthetic oligonucleotide
cccacgatcgaaaatttttcggctgtgtcggactgggtaatgaataccgcgccag

SEQ ID NO: 357880 - DNA, 60 bp, Artificial
  Synthetic oligonucleotide
cccacgcaaacaacatgtatgagctaggtaagtccatgaagcccctatatacagcagccc

SEQ ID NO: 357881 - DNA, 60 bp, Artificial
  Synthetic oligonucleotide
cccacgcactaacaccacagcacacatccaggtaccctacctgggtgttgacagacacga

SEQ ID NO: 357882 - DNA, 60 bp, Artificial
  Synthetic oligonucleotide
cccacgcagcaatagttgttgcatctacagattcgcttgcaaattggatagctatctctt

SEQ ID NO: 357883 - DNA, 55 bp, Artificial
  Synthetic oligonucleotide
cccacgcatagaatacttatgtacaatttcccaactagggcaggacagtgtgggg

SEQ ID NO: 357884 - DNA, 55 bp, Artificial
  Synthetic oligonucleotide
cccacgccaaaggtgattgaggaatgtgagcacctggaggatggaatctatggca

SEQ ID NO: 357885 - DNA, 55 bp, Artificial
  Synthetic oligonucleotide
cccacgccatgtgtcgatacgagaacgcgcatcacccgttgccgggcggtcgtca

SEQ ID NO: 357886 - DNA, 55 bp, Artificial
  Synthetic oligonucleotide
cccacgccattggctaccgccacggacatattttcccagtagcggttatccagcc

SEQ ID NO: 357887 - DNA, 59 bp, Artificial
  Synthetic oligonucleotide
cccacgcccggctacacccgcccctgcaccacacgcatctaccaagtcctgccagacac

SEQ ID NO: 357888 - DNA, 56 bp, Artificial
  Synthetic oligonucleotide
cccacgccgatggtacatgggagattagggttcgacggccaataccacgagaggga

SEQ ID NO: 357889 - DNA, 55 bp, Artificial
  Synthetic oligonucleotide
cccacgccttgtgactactcacctgggtggtaacgttgtcaacactgcacaactg

SEQ ID NO: 357890 - DNA, 56 bp, Artificial
  Synthetic oligonucleotide
cccacgctggcatgatttacatttgtggtcgtatgttgaatgcgagagaggttata

SEQ ID NO: 357891 - DNA, 55 bp, Artificial
  Synthetic oligonucleotide
cccacgcttctatgttcctgagcatcgcgtaattatgactctggcggttactcgc

SEQ ID NO: 357892 - DNA, 60 bp, Artificial
  Synthetic oligonucleotide
cccacgctttgagtgctgaattcttgtcctcgtccaagtactctttatatgatgacgtag

SEQ ID NO: 357893 - DNA, 60 bp, Artificial
  Synthetic oligonucleotide
cccacggaagcagggtctagcttggcagattgtagggccaatgtgtgtacacagtgcgtt

SEQ ID NO: 357894 - DNA, 52 bp, Artificial
  Synthetic oligonucleotide
cccacggaagtaatacaggctggggaactgtacaacgcctttctctaacagc

SEQ ID NO: 357895 - DNA, 54 bp, Artificial
  Synthetic oligonucleotide
cccacggattattctgcggctgtaaaaacccgaaaaaacatcttgaacaatgcc

SEQ ID NO: 357896 - DNA, 56 bp, Artificial
  Synthetic oligonucleotide
cccacggcgtgtacagaaggttcgtcaagagctcggagtttgacaagttgctccgt

SEQ ID NO: 357897 - DNA, 60 bp, Artificial
  Synthetic oligonucleotide
cccacgggcgcgtcctgttagacgcatgcccctgtcacctaattcacatgtgagcgtggg

SEQ ID NO: 357898 - DNA, 55 bp, Artificial
  Synthetic oligonucleotide
cccacgggtcaactttattcaatcgaggatcaagagtgtcgttctgccgacgaag

SEQ ID NO: 357899 - DNA, 58 bp, Artificial
  Synthetic oligonucleotide
cccacggtggcgcctacgcacgacgtgaccacagaccggtcccagcgtttgacgctgc

SEQ ID NO: 357900 - DNA, 55 bp, Artificial
  Synthetic oligonucleotide
cccacggtttcaaatgtcgacgaacataaatgtgatagtcgtgaaggcggtgagc

SEQ ID NO: 357901 - DNA, 55 bp, Artificial
  Synthetic oligonucleotide
cccacgtaatcctttcattagcacctacaattggtgtggcaatcccaggacacgt

SEQ ID NO: 357902 - DNA, 55 bp, Artificial
  Synthetic oligonucleotide
cccacgtcaaactgcttactcgcgatatcgactctgacatgtagtcacgaacgtg

SEQ ID NO: 357903 - DNA, 58 bp, Artificial
  Synthetic oligonucleotide
cccacgtcaaggctagggcaatcagcttgggaataaccttcttaggattcctcagtgc

SEQ ID NO: 357904 - DNA, 53 bp, Artificial
  Synthetic oligonucleotide
cccacgtcaccgggggaactgccggccgtaccacggctggttttgctagtctc

SEQ ID NO: 357905 - DNA, 55 bp, Artificial
  Synthetic oligonucleotide
cccacgtcctcaagataaatttgtatggtatgaccttgcaaaagagtttccaggt

SEQ ID NO: 357906 - DNA, 55 bp, Artificial
  Synthetic oligonucleotide
cccacgtcgctagatctcttaactgcgtggccataatggacttcataaagctgct

SEQ ID NO: 357907 - DNA, 59 bp, Artificial
  Synthetic oligonucleotide
cccacgtgaccatcgtaccagatgcggcagtatatcagatgcctgcccctcataaacac

SEQ ID NO: 357908 - DNA, 60 bp, Artificial
  Synthetic oligonucleotide
cccacgtggagatgtcccccactcagaacgctcgctcaaagcttgtatatgtgtggtccc

SEQ ID NO: 357909 - DNA, 54 bp, Artificial
  Synthetic oligonucleotide
cccacgtggagccctggtgaccgttcgatcccccccctttggtgcgctggtgcc

SEQ ID NO: 357910 - DNA, 60 bp, Artificial
  Synthetic oligonucleotide
cccacgtggggaaggtcatgtgcatatccgatgtcacacgtggtaatggtatcacccacc

SEQ ID NO: 357911 - DNA, 55 bp, Artificial
  Synthetic oligonucleotide
cccacgtgggtaagtaacacaaagcccattgatgtagcaacacctaagactcgtg

SEQ ID NO: 357912 - DNA, 55 bp, Artificial
  Synthetic oligonucleotide
cccacgtgggtggtccctctaagacgtgcgcattctggaaacgcgctgggaggtt

SEQ ID NO: 357913 - DNA, 55 bp, Artificial
  Synthetic oligonucleotide
cccacgtgtcctctacaggccaatcgcagtctatgtcgtgcacttcctgggcatg

SEQ ID NO: 357914 - DNA, 55 bp, Artificial
  Synthetic oligonucleotide
cccacgttcgccgttagaagttcgggtggcgatatgaacttaggcggtagagaca

SEQ ID NO: 357915 - DNA, 59 bp, Artificial
  Synthetic oligonucleotide
cccacgttctactcgggcatggtacatcgataccaggggactgtggtggtatcctcaga

SEQ ID NO: 357916 - DNA, 50 bp, Artificial
  Synthetic oligonucleotide
cccacgtttccacatcagaaaatgtgggatccgctactaaacgaatttcc

SEQ ID NO: 357917 - DNA, 57 bp, Artificial
  Synthetic oligonucleotide
cccactaaactaatgagtgggatccagacggtgtctaagaaccagacggacctagca

SEQ ID NO: 357918 - DNA, 55 bp, Artificial
  Synthetic oligonucleotide
cccactaacatcaataaacagtgtactaattattctctcctcaagttggctggag

SEQ ID NO: 357919 - DNA, 55 bp, Artificial
  Synthetic oligonucleotide
cccactaataaggcatgaaaacagaatggtgctggccagccatacggctaaggct

SEQ ID NO: 357920 - DNA, 60 bp, Artificial
  Synthetic oligonucleotide
cccactacaggcaggtgaagacagatgtgtacactagcgcggggtacatatcagggtggt

SEQ ID NO: 357921 - DNA, 60 bp, Artificial
  Synthetic oligonucleotide
cccactaccctcacgctcaagccatcaactgggcaatgcacttgtccgccagaccacatt

SEQ ID NO: 357922 - DNA, 55 bp, Artificial
  Synthetic oligonucleotide
cccactacggaattcacaatggatcgaccctgcttcggcgagaggcacttccgtt

SEQ ID NO: 357923 - DNA, 57 bp, Artificial
  Synthetic oligonucleotide
cccactactgtgccttggaatgctagttggagtaataaatctttcgaacacatttgg

SEQ ID NO: 357924 - DNA, 55 bp, Artificial
  Synthetic oligonucleotide
cccactagctgaaacatgtaaagttcaatcgaatcgagtattttgtgacacaatg

SEQ ID NO: 357925 - DNA, 55 bp, Artificial
  Synthetic oligonucleotide
cccactatcccaatcgtctctcagaaagttgatctaccagaaccacaaggaacgg

SEQ ID NO: 357926 - DNA, 60 bp, Artificial
  Synthetic oligonucleotide
cccactatctgtaattcaaaatgcctaagcgcgatcttccatggcgctcgatcgcgggaa

SEQ ID NO: 357927 - DNA, 57 bp, Artificial
  Synthetic oligonucleotide
cccactatgcctactagacaaagcactagttgggtgttcacacttaactttgagggc

SEQ ID NO: 357928 - DNA, 55 bp, Artificial
  Synthetic oligonucleotide
cccactatgtccattgagtcaggtcctgacattccattaccttcgttacccacac

SEQ ID NO: 357929 - DNA, 55 bp, Artificial
  Synthetic oligonucleotide
cccactcaaatcactgagaccaatgatggagtgttgatcgtgaacactagcaagt

SEQ ID NO: 357930 - DNA, 57 bp, Artificial
  Synthetic oligonucleotide
cccactcaaggccaaacaatcgtattaaacactgactggagtggctacagtgggtcc

SEQ ID NO: 357931 - DNA, 53 bp, Artificial
  Synthetic oligonucleotide
cccactcaagtccccagtccacccgacccccaagcccggtctatcctgcgacc

SEQ ID NO: 357932 - DNA, 55 bp, Artificial
  Synthetic oligonucleotide
cccactcagacgacagctactaccctggaccctttggggggggaatgaccgcaga

SEQ ID NO: 357933 - DNA, 59 bp, Artificial
  Synthetic oligonucleotide
cccactcagccgtgttgacatcggagtcaacctctttcgtgatgtaatcacgaacttgg

SEQ ID NO: 357934 - DNA, 53 bp, Artificial
  Synthetic oligonucleotide
cccactccaaaacctgacaaaggtcaacaacggggattacgcaagactttaca

SEQ ID NO: 357935 - DNA, 55 bp, Artificial
  Synthetic oligonucleotide
cccactccatgtggaactgtggttggcgcgtgcaggtcaccgtcaacggctcaca

SEQ ID NO: 357936 - DNA, 60 bp, Artificial
  Synthetic oligonucleotide
cccactccattccaacaaggtggattaatatgtgctatggttcctggagatcagagctat

SEQ ID NO: 357937 - DNA, 55 bp, Artificial
  Synthetic oligonucleotide
cccactcccattgacctcgagaaaagaggtgtgggagactacgttactcaccggc

SEQ ID NO: 357938 - DNA, 54 bp, Artificial
  Synthetic oligonucleotide
cccactccgggagtgagggagtagaaattggtgatgtgttcttcgagtgtgaag

SEQ ID NO: 357939 - DNA, 50 bp, Artificial
  Synthetic oligonucleotide
cccactccgttaaaccttgtctcatctccaccattggaaaacaatcaccc

SEQ ID NO: 357940 - DNA, 55 bp, Artificial
  Synthetic oligonucleotide
cccactcctaagatcattgaggaatgcgaacatctggaggatgggatttatggca

SEQ ID NO: 357941 - DNA, 55 bp, Artificial
  Synthetic oligonucleotide
cccactcctaggattggtcgtaaggaactatctagttgaattgctaggttttgta

SEQ ID NO: 357942 - DNA, 55 bp, Artificial
  Synthetic oligonucleotide
cccactcctgataatccaattcaggacacctacagatatattgactctttggcta

SEQ ID NO: 357943 - DNA, 55 bp, Artificial
  Synthetic oligonucleotide
cccactccttttcagcaaggaggactgatttgtgctatggttcctggtgaccaga

SEQ ID NO: 357944 - DNA, 60 bp, Artificial
  Synthetic oligonucleotide
cccactcgaccactcgcagaaaacgtacacaagcaattgtcgcaggcaccatttcatcag

SEQ ID NO: 357945 - DNA, 55 bp, Artificial
  Synthetic oligonucleotide
cccactcggccgcccgtgttactagcggtcgtcgtgttgtcatcgatgaagcacc

SEQ ID NO: 357946 - DNA, 52 bp, Artificial
  Synthetic oligonucleotide
cccactctcatggcatttgagcgggtgcctgaacccgtgcctgcctcagaca

SEQ ID NO: 357947 - DNA, 55 bp, Artificial
  Synthetic oligonucleotide
cccactctctcgcacatcctgaatgtggaaaaccctcctgtccacttcaccagtg

SEQ ID NO: 357948 - DNA, 60 bp, Artificial
  Synthetic oligonucleotide
cccactctgctgcatacagttgtgtgttgtgagttcatcatcgacttatcagtgtatctc

SEQ ID NO: 357949 - DNA, 59 bp, Artificial
  Synthetic oligonucleotide
cccactctgttaggagcgccaccttcccgaattctcagccgggtgctcagtgcggctac

SEQ ID NO: 357950 - DNA, 60 bp, Artificial
  Synthetic oligonucleotide
cccactcttatgtaatgatgactgctgttcttggtgcatgataagggcatggtcatgttt

SEQ ID NO: 357951 - DNA, 53 bp, Artificial
  Synthetic oligonucleotide
cccactcttcctacgaaacgcgtgacagcggtgatcccgggacttccacttac

SEQ ID NO: 357952 - DNA, 59 bp, Artificial
  Synthetic oligonucleotide
cccactgacacaatgggtccttgagtatgtactctcttaccctgtctaccgatttagca

SEQ ID NO: 357953 - DNA, 59 bp, Artificial
  Synthetic oligonucleotide
cccactgaccagaaatcaatgtcgttcatggtgaattccttggtctgtatttctatctt

SEQ ID NO: 357954 - DNA, 58 bp, Artificial
  Synthetic oligonucleotide
cccactgacctttgggtggtgctacaaactagtaccaatggatccagcagacgtagag

SEQ ID NO: 357955 - DNA, 60 bp, Artificial
  Synthetic oligonucleotide
cccactgactttaaatcaaaatgcctaagcgtgatgccccatggcgctcgttcgcggcaa

SEQ ID NO: 357956 - DNA, 60 bp, Artificial
  Synthetic oligonucleotide
cccactgatcagacatgagaacagaatggtactagccagtactacagccaaagccatgga

SEQ ID NO: 357957 - DNA, 55 bp, Artificial
  Synthetic oligonucleotide
cccactgcaagcctttgaaccaccacttctgaacttgacttgcattccactacca

SEQ ID NO: 357958 - DNA, 55 bp, Artificial
  Synthetic oligonucleotide
cccactgcattagttagctaccttgctgccagtcataactggcccctcgcaccgg

SEQ ID NO: 357959 - DNA, 58 bp, Artificial
  Synthetic oligonucleotide
cccactgccgggctactgagtacataatgaagggagtgtacataaatacagcgttgct

SEQ ID NO: 357960 - DNA, 57 bp, Artificial
  Synthetic oligonucleotide
cccactgctaatgcttctaaaaaaacagcacaaactagtgctatctcaacaaaactg

SEQ ID NO: 357961 - DNA, 55 bp, Artificial
  Synthetic oligonucleotide
cccactggagcacgacagacttatctcagagccctaatcccaaagtcccctgatc

SEQ ID NO: 357962 - DNA, 55 bp, Artificial
  Synthetic oligonucleotide
cccactggaggagactccactacttcaactttaggggcagtatggaatatgaatg

SEQ ID NO: 357963 - DNA, 60 bp, Artificial
  Synthetic oligonucleotide
cccactggcgacagtgttctagcctgcgtggctgcctgcacaccctcacgggtgtgaagc

SEQ ID NO: 357964 - DNA, 58 bp, Artificial
  Synthetic oligonucleotide
cccactgtcctcgtcacaaacagaaggcgggcttggacgtacaggcccatgtatcgga

SEQ ID NO: 357965 - DNA, 58 bp, Artificial
  Synthetic oligonucleotide
cccactgtgacagatttgatgttagatcagggcttacttccaaatcaaggtttaggta

SEQ ID NO: 357966 - DNA, 58 bp, Artificial
  Synthetic oligonucleotide
cccactgtgcaaacattggcgcagaagggggacacgttagccgtgaagttggtgacaa

SEQ ID NO: 357967 - DNA, 55 bp, Artificial
  Synthetic oligonucleotide
cccactgttcaaggtcttccttgtgaatcgaaactgcgtggtcaagttcgaatgg

SEQ ID NO: 357968 - DNA, 55 bp, Artificial
  Synthetic oligonucleotide
cccactgtttctgagcatgcatctttagttggtcttcttttgagtctgtatcggc

SEQ ID NO: 357969 - DNA, 55 bp, Artificial
  Synthetic oligonucleotide
cccacttacatgctttcatcaggcctcaacaatgaggggcttaggtatgagctgg

SEQ ID NO: 357970 - DNA, 57 bp, Artificial
  Synthetic oligonucleotide
cccacttactaattcacaacgaaattttgcacaattactaatcaataatcacatagg

SEQ ID NO: 357971 - DNA, 55 bp, Artificial
  Synthetic oligonucleotide
cccacttacttacgctgtattgaggttcctgaattttgtaggaacaaattgacac

SEQ ID NO: 357972 - DNA, 55 bp, Artificial
  Synthetic oligonucleotide
cccacttagtgggcttcacatggccaatgcgctcgcattaattaaccaacgcctg

SEQ ID NO: 357973 - DNA, 58 bp, Artificial
  Synthetic oligonucleotide
cccacttcaagctgggtacttctgtcctaaggatgacagttatctgtctagggaagga

SEQ ID NO: 357974 - DNA, 60 bp, Artificial
  Synthetic oligonucleotide
cccacttctaccaccgctggtaagatcacatgtgacatgaagtctgttgtcgcttttatc

SEQ ID NO: 357975 - DNA, 59 bp, Artificial
  Synthetic oligonucleotide
cccacttctgttttctacgacagagttggccatcctaccctgctccttcacgaccatgc

SEQ ID NO: 357976 - DNA, 56 bp, Artificial
  Synthetic oligonucleotide
cccacttgaatcacagggtacggaaggtgtggttcctataactgtatccataagtc

SEQ ID NO: 357977 - DNA, 55 bp, Artificial
  Synthetic oligonucleotide
cccacttgagcccgacaggatgtcttcatacatttgatgagttattcggtgcaag

SEQ ID NO: 357978 - DNA, 55 bp, Artificial
  Synthetic oligonucleotide
cccacttgaggaatgataccgatgtggtaaattatgtaagtatggaattctccct

SEQ ID NO: 357979 - DNA, 55 bp, Artificial
  Synthetic oligonucleotide
cccacttgctgtcatttcagagggcggagaaacacccaagggctctgataaactc

SEQ ID NO: 357980 - DNA, 59 bp, Artificial
  Synthetic oligonucleotide
cccacttggaatgcagaaccttcttcttgactcaaggggccctgctgaatgacaaacat

SEQ ID NO: 357981 - DNA, 55 bp, Artificial
  Synthetic oligonucleotide
cccacttggccgtaagtttattttccagactgcagtaaggcgccctgtgtccttg

SEQ ID NO: 357982 - DNA, 60 bp, Artificial
  Synthetic oligonucleotide
cccacttgtgatgccgatggaccaggatctattgcggattcatctaatccgctgaggttc

SEQ ID NO: 357983 - DNA, 55 bp, Artificial
  Synthetic oligonucleotide
cccacttgttcgactgggtcaccagtgacccgtttggacggtgctatctgctgga

SEQ ID NO: 357984 - DNA, 55 bp, Artificial
  Synthetic oligonucleotide
cccacttgttttggtcggccagtcatattcacgcgtgaaagtctagatatgtgtc

SEQ ID NO: 357985 - DNA, 54 bp, Artificial
  Synthetic oligonucleotide
cccactttacaccgtaaggttttataagtctatctctctctgcaaatggtaaac

SEQ ID NO: 357986 - DNA, 57 bp, Artificial
  Synthetic oligonucleotide
cccactttagacaagatcttggaatcctccataggctcggaatccttaccgaatcta

SEQ ID NO: 357987 - DNA, 52 bp, Artificial
  Synthetic oligonucleotide
cccactttccaggtcccggggtccgagcagttcgtgactacccttcggaatc

SEQ ID NO: 357988 - DNA, 55 bp, Artificial
  Synthetic oligonucleotide
cccactttccaggtttagggcgcatgactaaatgtctgtctccgttgactgcctt

SEQ ID NO: 357989 - DNA, 55 bp, Artificial
  Synthetic oligonucleotide
cccactttccattcctttctcgtgctgtccgatgcttatctcctctagctgctca

SEQ ID NO: 357990 - DNA, 55 bp, Artificial
  Synthetic oligonucleotide
cccactttgacaattcagtctctggtgttgcaacaatctcgacaacgctgtcacc

SEQ ID NO: 357991 - DNA, 54 bp, Artificial
  Synthetic oligonucleotide
cccactttgcgggcccctaaacgttccgcggcttctacctcttctgcaagccca

SEQ ID NO: 357992 - DNA, 55 bp, Artificial
  Synthetic oligonucleotide
cccacttttgaggaaagagagggctatttacgtgttagcagatttggaagacgtg

SEQ ID NO: 357993 - DNA, 51 bp, Artificial
  Synthetic oligonucleotide
cccactttttagccccatcaaaattagctaggggatcatcctgtaggccag

SEQ ID NO: 357994 - DNA, 55 bp, Artificial
  Synthetic oligonucleotide
cccagaaaagtctaagcaatggatgacagcaaccatagaactcatagaccctaag

SEQ ID NO: 357995 - DNA, 54 bp, Artificial
  Synthetic oligonucleotide
cccagaaacactcaggatcatgttcgctcgttatgcctattggcttggcataac

SEQ ID NO: 357996 - DNA, 59 bp, Artificial
  Synthetic oligonucleotide
cccagaaacatgtaatcagagtaccattacctatgaaaataatacctgggtcaatcaga

SEQ ID NO: 357997 - DNA, 50 bp, Artificial
  Synthetic oligonucleotide
cccagaaacttggcaaacgccctcggggtttactccgagacgcccgggga

SEQ ID NO: 357998 - DNA, 54 bp, Artificial
  Synthetic oligonucleotide
cccagaaagctacacacagacatacccttctacccctgggcaccaaaaccccaa

SEQ ID NO: 357999 - DNA, 55 bp, Artificial
  Synthetic oligonucleotide
cccagaaaggcgtgtagtaacacagggaccagaggaggaatttgggatgtcttta

SEQ ID NO: 358000 - DNA, 55 bp, Artificial
  Synthetic oligonucleotide
cccagaaatattaacttgtgattcttcttgggtgattattttgagagagggatgc

SEQ ID NO: 358001 - DNA, 55 bp, Artificial
  Synthetic oligonucleotide
cccagaaatcggtcctactatagcaaaggagtatgctgagcgataccctggcatg

SEQ ID NO: 358002 - DNA, 58 bp, Artificial
  Synthetic oligonucleotide
cccagaaattgcggcaagacctgctgtgaacggactaagaggtagaattgattactac

SEQ ID NO: 358003 - DNA, 50 bp, Artificial
  Synthetic oligonucleotide
cccagaacatacaattcatcaatgggcgcatttaacatatttaccggtgg

SEQ ID NO: 358004 - DNA, 54 bp, Artificial
  Synthetic oligonucleotide
cccagaactaattttactgaactcaaaaacgtatggatgtacccaaatcaggcg

SEQ ID NO: 358005 - DNA, 55 bp, Artificial
  Synthetic oligonucleotide
cccagaactcactatcgggaacaccacaatgccaggcacagtaaaacaggcttgc

SEQ ID NO: 358006 - DNA, 56 bp, Artificial
  Synthetic oligonucleotide
cccagaactctctctaggttcccagagagaaccgagagaaaactggctctccctta

SEQ ID NO: 358007 - DNA, 60 bp, Artificial
  Synthetic oligonucleotide
cccagaagaacttcactatgaagttgtgtaaggatgctagtgatatcctacagacaggca

SEQ ID NO: 358008 - DNA, 55 bp, Artificial
  Synthetic oligonucleotide
cccagaagaatgttggagttccgctcagccaatgcagtcgccttcaatatcttgg

SEQ ID NO: 358009 - DNA, 55 bp, Artificial
  Synthetic oligonucleotide
cccagaagagatgttaagtttgtaaatgcaggcccaactgatctatatgtgcacg

SEQ ID NO: 358010 - DNA, 55 bp, Artificial
  Synthetic oligonucleotide
cccagaagctgtcgtccaagtcgtccagacttggaagttcaggtaggctttgtgg

SEQ ID NO: 358011 - DNA, 55 bp, Artificial
  Synthetic oligonucleotide
cccagaagtcgccgtcaaatagtggtagagcgtcagatccaggaagcacttgtgc

SEQ ID NO: 358012 - DNA, 57 bp, Artificial
  Synthetic oligonucleotide
cccagaatatgaaggcacactccgacaaacaggaacagctttacaaatacctgttaa

SEQ ID NO: 358013 - DNA, 60 bp, Artificial
  Synthetic oligonucleotide
cccagaatgcgaatcactgttttctaaggaatcatggtcctacattgcagaaacaccaaa

SEQ ID NO: 358014 - DNA, 51 bp, Artificial
  Synthetic oligonucleotide
cccagaatgtaatttggcattagtggcaaatcaaccagaaccaaccataat

SEQ ID NO: 358015 - DNA, 54 bp, Artificial
  Synthetic oligonucleotide
cccagaattaccgatccagtttcgatgtgaactggatcgagcctcgctcctagg

SEQ ID NO: 358016 - DNA, 59 bp, Artificial
  Synthetic oligonucleotide
cccagaatttgtgttttccccaggtataatacctgaatctaatcacagtgtatgtgata

SEQ ID NO: 358017 - DNA, 56 bp, Artificial
  Synthetic oligonucleotide
cccagacaaatacagcaatttgaggtcaacatgcgcttcgatcctaatttcagggt

SEQ ID NO: 358018 - DNA, 60 bp, Artificial
  Synthetic oligonucleotide
cccagacaacaactacccccacatctgttgatatgaactctatcacctctactgatgtcc

SEQ ID NO: 358019 - DNA, 53 bp, Artificial
  Synthetic oligonucleotide
cccagacacagaaactacagctacgtagtgttcatcaccagagggccaaacga

SEQ ID NO: 358020 - DNA, 55 bp, Artificial
  Synthetic oligonucleotide
cccagacacaggcagtctaacaaggaggtgatgtgtgactcggaacaacacccgc

SEQ ID NO: 358021 - DNA, 55 bp, Artificial
  Synthetic oligonucleotide
cccagacacccaatacgaccaggcgctcctcatgtggaaacagtactttgtcatg

SEQ ID NO: 358022 - DNA, 56 bp, Artificial
  Synthetic oligonucleotide
cccagacactctgggatacgatctaattagggatttaatttcagttattagggctc

SEQ ID NO: 358023 - DNA, 55 bp, Artificial
  Synthetic oligonucleotide
cccagacactttgtattgtccggattcacaatagtcaccatctttggtgatgtag

SEQ ID NO: 358024 - DNA, 55 bp, Artificial
  Synthetic oligonucleotide
cccagacagccataaagcatggttgtccacccagtctagcatgggtgtccatagc

SEQ ID NO: 358025 - DNA, 57 bp, Artificial
  Synthetic oligonucleotide
cccagacatatcagcattcagacccttggggaaaggtcctagcctggaagtttaatc

SEQ ID NO: 358026 - DNA, 55 bp, Artificial
  Synthetic oligonucleotide
cccagaccaggtagagaaggacaatgaaggagagaccaacaacttgctgcaccct

SEQ ID NO: 358027 - DNA, 55 bp, Artificial
  Synthetic oligonucleotide
cccagaccagtggatggcaccggatcgtgtagtggaccaatcaacaatgggaagg

SEQ ID NO: 358028 - DNA, 58 bp, Artificial
  Synthetic oligonucleotide
cccagaccattagtaagaggacagcaaggaagaatggattactattggggcattctga

SEQ ID NO: 358029 - DNA, 60 bp, Artificial
  Synthetic oligonucleotide
cccagaccgctgcagccacgatgacgactaccttacgctggttagcggccatatggttcg

SEQ ID NO: 358030 - DNA, 60 bp, Artificial
  Synthetic oligonucleotide
cccagacctccgatgggccccaagctggttgatacagtacaccggagacgcatcaactga

SEQ ID NO: 358031 - DNA, 55 bp, Artificial
  Synthetic oligonucleotide
cccagacctcgctatcccaccagcaagatgctgcattatcattgaaagcgatggc

SEQ ID NO: 358032 - DNA, 57 bp, Artificial
  Synthetic oligonucleotide
cccagacgaaactggtcctatatatacaaaatatcgtgaagactacgcaacaacaaa

SEQ ID NO: 358033 - DNA, 52 bp, Artificial
  Synthetic oligonucleotide
cccagacgacattgtggctcgtgcgtcacgtctgacggctactgtagaactt

SEQ ID NO: 358034 - DNA, 52 bp, Artificial
  Synthetic oligonucleotide
cccagacgcagactgtacagacgttacagacgcaaaaaacgtaggagacgag

SEQ ID NO: 358035 - DNA, 55 bp, Artificial
  Synthetic oligonucleotide
cccagacgctaggttatcatcaccaattgtattggaccaatgtgacctagtcact

SEQ ID NO: 358036 - DNA, 59 bp, Artificial
  Synthetic oligonucleotide
cccagacggctaagaacctctacaaagctactgcgtacggcttaggctacgatcttgca

SEQ ID NO: 358037 - DNA, 55 bp, Artificial
  Synthetic oligonucleotide
cccagacggctgcagtgaagcgtttggagtaccgatcgctgaagtggccgtcacc

SEQ ID NO: 358038 - DNA, 60 bp, Artificial
  Synthetic oligonucleotide
cccagacggctgtagtcttgtgtggacctccaaacactcttaagtgctacagatatagac

SEQ ID NO: 358039 - DNA, 52 bp, Artificial
  Synthetic oligonucleotide
cccagacggggtagaggggtgcttccatagaacgcccttgagatcggatgcg

SEQ ID NO: 358040 - DNA, 55 bp, Artificial
  Synthetic oligonucleotide
cccagacggtgaaggagtaattcatgcgtcaggcttaggcatctcaaagcgcagg

SEQ ID NO: 358041 - DNA, 55 bp, Artificial
  Synthetic oligonucleotide
cccagacgtgttctcggaaggctcgcgcctgatcatgtgcctgcggctgtttgat

SEQ ID NO: 358042 - DNA, 55 bp, Artificial
  Synthetic oligonucleotide
cccagactaaaccaacataacatcggctcttatacctgaacaccccgagtgtacg

SEQ ID NO: 358043 - DNA, 55 bp, Artificial
  Synthetic oligonucleotide
cccagactaagcagagcggggagaactttccttacctggtagcgtaccaagccac

SEQ ID NO: 358044 - DNA, 55 bp, Artificial
  Synthetic oligonucleotide
cccagactctcacgacaccattgttcccctgttggggtctcctcatcccaaccat

SEQ ID NO: 358045 - DNA, 51 bp, Artificial
  Synthetic oligonucleotide
cccagactctgacgctgagtcctactcttccatgccccccctagaggggga

SEQ ID NO: 358046 - DNA, 54 bp, Artificial
  Synthetic oligonucleotide
cccagacttcacaggagaaatacagattgttctcttcaatcataatactgctcc

SEQ ID NO: 358047 - DNA, 51 bp, Artificial
  Synthetic oligonucleotide
cccagactttcgcggaccgattggcctttgactcacatctatttgttaatc

SEQ ID NO: 358048 - DNA, 55 bp, Artificial
  Synthetic oligonucleotide
cccagagaaactgcagagtatcatggcagattcatttggcgccgaagtgaccggt

SEQ ID NO: 358049 - DNA, 55 bp, Artificial
  Synthetic oligonucleotide
cccagagaacgggcccatacagttttgccggtccgactgtcaccctctaagacta

SEQ ID NO: 358050 - DNA, 55 bp, Artificial
  Synthetic oligonucleotide
cccagagatcaatggactcagcacacgacaattggtgtcactcaggcctgtgcag

SEQ ID NO: 358051 - DNA, 55 bp, Artificial
  Synthetic oligonucleotide
cccagagatcaatggactcagcacacgacgaccggtggttctcgggcctgtgcag

SEQ ID NO: 358052 - DNA, 55 bp, Artificial
  Synthetic oligonucleotide
cccagagcaaattgaaggaactgctgacgccactctcgtcatcaacactgaagcc

SEQ ID NO: 358053 - DNA, 55 bp, Artificial
  Synthetic oligonucleotide
cccagagcccctagagcactaccatatgaagcaataggaaagacaaattatccta

SEQ ID NO: 358054 - DNA, 55 bp, Artificial
  Synthetic oligonucleotide
cccagagccggagtggacataccctcgtttatcttgccagggctcaacctttcag

SEQ ID NO: 358055 - DNA, 53 bp, Artificial
  Synthetic oligonucleotide
cccagagctaccacgcaaccgcctatgaggttggcatcacccaaaccatctac

SEQ ID NO: 358056 - DNA, 59 bp, Artificial
  Synthetic oligonucleotide
cccagagctctttaacaaggactaaaactgctgacctgaagattgctgacactgcggga

SEQ ID NO: 358057 - DNA, 55 bp, Artificial
  Synthetic oligonucleotide
cccagagctttccgtaggttgtagtcgaaatggatcctgagtgttcttatgtcca

SEQ ID NO: 358058 - DNA, 55 bp, Artificial
  Synthetic oligonucleotide
cccagaggcaactacagagagtcaggaggactctaacagggagacaagggtaccg

SEQ ID NO: 358059 - DNA, 55 bp, Artificial
  Synthetic oligonucleotide
cccagaggcactgcacaactgtacgctggagacgattgcgccctcaactgcgaac

SEQ ID NO: 358060 - DNA, 55 bp, Artificial
  Synthetic oligonucleotide
cccagaggcatttcgcttacgtgtgtgcacggtcccctgattggaacgtggataa

SEQ ID NO: 358061 - DNA, 59 bp, Artificial
  Synthetic oligonucleotide
cccagaggcgaaggtgctcacttttggggaaagcacgggattaaccttcatgcatggca

SEQ ID NO: 358062 - DNA, 55 bp, Artificial
  Synthetic oligonucleotide
cccagaggctgtgaagggccatgcaaagtccagtcttatgaacagcgccacgata

SEQ ID NO: 358063 - DNA, 55 bp, Artificial
  Synthetic oligonucleotide
cccagagggacctgaagagaaggagggatatagaggagatggtcagcaagagggc

SEQ ID NO: 358064 - DNA, 54 bp, Artificial
  Synthetic oligonucleotide
cccagaggtcagccagtttcctttaaacctgaacgcctccaggccctaatagac

SEQ ID NO: 358065 - DNA, 55 bp, Artificial
  Synthetic oligonucleotide
cccagagtactacttgtactacaccattcgtgcccaagaaggatacactactcgc

SEQ ID NO: 358066 - DNA, 55 bp, Artificial
  Synthetic oligonucleotide
cccagagtatctgtaagtatcctgactatgtgaaaatggcttcagaccaatatgg

SEQ ID NO: 358067 - DNA, 55 bp, Artificial
  Synthetic oligonucleotide
cccagataaagacgccattcatcgcctgagctgcagtgataagttcccctgtgcg

SEQ ID NO: 358068 - DNA, 60 bp, Artificial
  Synthetic oligonucleotide
cccagatacagcagcagtaagcctccatggaggccctgcaacaaacagggattacctacg

SEQ ID NO: 358069 - DNA, 55 bp, Artificial
  Synthetic oligonucleotide
cccagatacagggaagtccacattctccatgtccctattgaaagccctaaagggc

SEQ ID NO: 358070 - DNA, 55 bp, Artificial
  Synthetic oligonucleotide
cccagatacatagaactcctggggagagtccagtatctgtggaaactcatagacg

SEQ ID NO: 358071 - DNA, 55 bp, Artificial
  Synthetic oligonucleotide
cccagataggaaagtacgacgggcccaggcttggctcaggcttggttcaactatg

SEQ ID NO: 358072 - DNA, 60 bp, Artificial
  Synthetic oligonucleotide
cccagataggcgaatgtttgacattaaggttcagccaataagagatgcaatcgattacaa

SEQ ID NO: 358073 - DNA, 60 bp, Artificial
  Synthetic oligonucleotide
cccagatatacacgccattctctgcctgatgtgcagtgatgagttcccctgtgcgtgaat

SEQ ID NO: 358074 - DNA, 55 bp, Artificial
  Synthetic oligonucleotide
cccagatatagacgccattccttgcttgagctgcaacgatgctttcccctgtgcc

SEQ ID NO: 358075 - DNA, 51 bp, Artificial
  Synthetic oligonucleotide
cccagatatgctggtgctctaaacctaaatacaaatcttgccccctctgtt

SEQ ID NO: 358076 - DNA, 55 bp, Artificial
  Synthetic oligonucleotide
cccagatcagacaaacacacaacaattgatccttttgatggatcccttgcaatgg

SEQ ID NO: 358077 - DNA, 55 bp, Artificial
  Synthetic oligonucleotide
cccagatctatatgactacaagggaaacagattcattgagattggagtgacaagg

SEQ ID NO: 358078 - DNA, 60 bp, Artificial
  Synthetic oligonucleotide
cccagatctggcaaaaacatggagtgagcaatgactcagtgttaatcttgctcaataagc

SEQ ID NO: 358079 - DNA, 59 bp, Artificial
  Synthetic oligonucleotide
cccagatctgtcttacaaagttgggtatttgtgtgcaggtattcccagtgatactccaa

SEQ ID NO: 358080 - DNA, 60 bp, Artificial
  Synthetic oligonucleotide
cccagatgacgatagtaagatgacctctcataggatccacgaaaaccaatatgggcctga

SEQ ID NO: 358081 - DNA, 60 bp, Artificial
  Synthetic oligonucleotide
cccagatgagggcacagctggagtggagtctgctgttctgagaggattcctcattttggg

SEQ ID NO: 358082 - DNA, 55 bp, Artificial
  Synthetic oligonucleotide
cccagatggcatatataactggttccaccacaggacatctcacacactgtgcagg

SEQ ID NO: 358083 - DNA, 52 bp, Artificial
  Synthetic oligonucleotide
cccagatggttttcggagctactgggcggacttttcaccaaaccgaattccc

SEQ ID NO: 358084 - DNA, 55 bp, Artificial
  Synthetic oligonucleotide
cccagatgtgttgcacgctcaatgttgacccgatggtagcagctaaggttatggt

SEQ ID NO: 358085 - DNA, 55 bp, Artificial
  Synthetic oligonucleotide
cccagattacacagattatatgtctgtgaaagtttttgacagattgtacgagaag

SEQ ID NO: 358086 - DNA, 60 bp, Artificial
  Synthetic oligonucleotide
cccagattagatgcaatctccctaaacagaaagtcagagaaagcgaagagacgcttattc

SEQ ID NO: 358087 - DNA, 55 bp, Artificial
  Synthetic oligonucleotide
cccagattataaggcattgaggaacctgtctagggcattcccagaggtaacaggg

SEQ ID NO: 358088 - DNA, 60 bp, Artificial
  Synthetic oligonucleotide
cccagattatactatccttattctggttgtcttacgtcggcgtgattcatcaacagaaca

SEQ ID NO: 358089 - DNA, 51 bp, Artificial
  Synthetic oligonucleotide
cccagattcattcgttaattatagcaactactgttcttaagaggggtggga

SEQ ID NO: 358090 - DNA, 55 bp, Artificial
  Synthetic oligonucleotide
cccagattcttacaatgccatctctaggtggctccctacccagtggaccacctcc

SEQ ID NO: 358091 - DNA, 55 bp, Artificial
  Synthetic oligonucleotide
cccagattgcaggacaatcttgaaggctttgggacctaatcctactctagaggag

SEQ ID NO: 358092 - DNA, 55 bp, Artificial
  Synthetic oligonucleotide
cccagattggaggtggaattcctgaagcgtaaacctggttatttcccagagtcca

SEQ ID NO: 358093 - DNA, 59 bp, Artificial
  Synthetic oligonucleotide
cccagattgtaaatccatcttgagggcattaggaccaggggctacattagaagaaatga

SEQ ID NO: 358094 - DNA, 58 bp, Artificial
  Synthetic oligonucleotide
cccagattgtaatttggccttatctgctaatcaaccagaaacgactataattaatgta

SEQ ID NO: 358095 - DNA, 59 bp, Artificial
  Synthetic oligonucleotide
cccagatttcaaataccgagatgtacataatgtatgccatggccattcgacaggccatt

SEQ ID NO: 358096 - DNA, 55 bp, Artificial
  Synthetic oligonucleotide
cccagatttcgagaagattagtcaggatagagtccatgtaatcccgtgtatacca

SEQ ID NO: 358097 - DNA, 55 bp, Artificial
  Synthetic oligonucleotide
cccagatttgagactactagaagtagttcctattatgttcaagacacagatggtt

SEQ ID NO: 358098 - DNA, 55 bp, Artificial
  Synthetic oligonucleotide
cccagcaaacaaagcacaggtactagaggtgagtttctacgtaaacattatacgg

SEQ ID NO: 358099 - DNA, 57 bp, Artificial
  Synthetic oligonucleotide
cccagcaaatcaacccgcttgcttttaaaccctccaccatgtctacttccagctcac

SEQ ID NO: 358100 - DNA, 55 bp, Artificial
  Synthetic oligonucleotide
cccagcaacatatcgggatgtgtaggtaaagcctatgacatctggtaaaacgagt

SEQ ID NO: 358101 - DNA, 55 bp, Artificial
  Synthetic oligonucleotide
cccagcacaaagagaaaaaaactaacgtcccgcgcgctataaaacttgctggcga

SEQ ID NO: 358102 - DNA, 51 bp, Artificial
  Synthetic oligonucleotide
cccagcacaaagtcaacgagggctccatcttcggcccatggaaagcctgcc

SEQ ID NO: 358103 - DNA, 53 bp, Artificial
  Synthetic oligonucleotide
cccagcactgctactgtaaaaaacgacttaagggatcgtttccaagtccggcg

SEQ ID NO: 358104 - DNA, 59 bp, Artificial
  Synthetic oligonucleotide
cccagcaggagtttgctccccacggcctagctggtgccctccgcttgtgtgaaactctc

SEQ ID NO: 358105 - DNA, 55 bp, Artificial
  Synthetic oligonucleotide
cccagcagggcatcaacaggtagggtcattacaatatttagccctaagagcctgg

SEQ ID NO: 358106 - DNA, 53 bp, Artificial
  Synthetic oligonucleotide
cccagcagtggaagggacttcccagatactttaaaattaccctgagaaagcgg

SEQ ID NO: 358107 - DNA, 55 bp, Artificial
  Synthetic oligonucleotide
cccagcatatagccgtgcgcttgtggttactcagtccttgttcaatacgcttgat

SEQ ID NO: 358108 - DNA, 55 bp, Artificial
  Synthetic oligonucleotide
cccagcatattcatctgtacaaatcccacactctgtgacagaatccacgcgttac

SEQ ID NO: 358109 - DNA, 52 bp, Artificial
  Synthetic oligonucleotide
cccagcatatttaggtaccgaaggacctgcgttctaaaaaccctcaagaaaa

SEQ ID NO: 358110 - DNA, 60 bp, Artificial
  Synthetic oligonucleotide
cccagcatcctcgactccgccgtagcttgaccaagcgagacatgacaatggtactaagaa

SEQ ID NO: 358111 - DNA, 60 bp, Artificial
  Synthetic oligonucleotide
cccagcatccttgactccgccgtagcttgaccaagtgaacacaagcgacatagcaatgga

SEQ ID NO: 358112 - DNA, 60 bp, Artificial
  Synthetic oligonucleotide
cccagcatgggatgttgctgtgtcggtttttcattctatttttcggatcgctgaatgctt

SEQ ID NO: 358113 - DNA, 55 bp, Artificial
  Synthetic oligonucleotide
cccagcattcatacacctagcaaaactaaactgcaacccagtgtgttttatgatg

SEQ ID NO: 358114 - DNA, 54 bp, Artificial
  Synthetic oligonucleotide
cccagccactgctttgaagacacattcgcccccgttaaaccggagaaactgcgt

SEQ ID NO: 358115 - DNA, 58 bp, Artificial
  Synthetic oligonucleotide
cccagccactttttctgggattctaatcgtacgtcacaattgtgtgtgtatcgttgac

SEQ ID NO: 358116 - DNA, 54 bp, Artificial
  Synthetic oligonucleotide
cccagccagagctagggatttattagatcctaacaatccaaatttttcttacgg

SEQ ID NO: 358117 - DNA, 55 bp, Artificial
  Synthetic oligonucleotide
cccagccagaggtggctggtcaaataatacctactgtaactaaacatctaagaaa

SEQ ID NO: 358118 - DNA, 57 bp, Artificial
  Synthetic oligonucleotide
cccagccagggattttcatcctcgagtttcttgatggttctcttggtcttccggagc

SEQ ID NO: 358119 - DNA, 53 bp, Artificial
  Synthetic oligonucleotide
cccagccatggtatatatgaattcggtgcaagttcccgaaacttctgagtcat

SEQ ID NO: 358120 - DNA, 55 bp, Artificial
  Synthetic oligonucleotide
cccagccatttagcctatatcacttccatgttcaagtattggacgggttcgctcg

SEQ ID NO: 358121 - DNA, 58 bp, Artificial
  Synthetic oligonucleotide
cccagccccggaacgggacatctgaatagtattgggctcattatatataatgggccga

SEQ ID NO: 358122 - DNA, 55 bp, Artificial
  Synthetic oligonucleotide
cccagcccctgacactgctccggtccccgacgtggactcccgtggtgctatattg

SEQ ID NO: 358123 - DNA, 57 bp, Artificial
  Synthetic oligonucleotide
cccagcccgccgttggaaaacacgcttcgaacaaatcgcatgcgaattgggcgacgc

SEQ ID NO: 358124 - DNA, 59 bp, Artificial
  Synthetic oligonucleotide
cccagccgacgaaatcccgagtgagtccgttgcagttcaatatctcatgtccaatgcag

SEQ ID NO: 358125 - DNA, 54 bp, Artificial
  Synthetic oligonucleotide
cccagccggtttcggagctgctgggaggaccttttcacactccgaattccccac

SEQ ID NO: 358126 - DNA, 60 bp, Artificial
  Synthetic oligonucleotide
cccagcctaatgagacgcagacgtaaaagacatatattttgactcttttacagatgtcat

SEQ ID NO: 358127 - DNA, 55 bp, Artificial
  Synthetic oligonucleotide
cccagcctactcagatctggtttagtcaaaatagagatggctgatgagactgcgg

SEQ ID NO: 358128 - DNA, 55 bp, Artificial
  Synthetic oligonucleotide
cccagcctacttaggtgcctgtaaggatgcaactcgttttccacctcggagtccg

SEQ ID NO: 358129 - DNA, 55 bp, Artificial
  Synthetic oligonucleotide
cccagcctcaaaggaactcgactcccaaaacgtcgctgtaatcctagcagacgat

SEQ ID NO: 358130 - DNA, 55 bp, Artificial
  Synthetic oligonucleotide
cccagcgcactcgctatgctaatgcgcgggacagcatattatccaacccactgag

SEQ ID NO: 358131 - DNA, 60 bp, Artificial
  Synthetic oligonucleotide
cccagcgctctgagattcaaggacttaaggctcaactggacgtcatctctgaagagctta

SEQ ID NO: 358132 - DNA, 55 bp, Artificial
  Synthetic oligonucleotide
cccagcgtgcgtttgtggaatttgtacgaaagcgaattcccggactgcgcgaagc

SEQ ID NO: 358133 - DNA, 55 bp, Artificial
  Synthetic oligonucleotide
cccagcgtttttggggagaacgatcctcatgcaaaaaaccacttgtacgatggaa

SEQ ID NO: 358134 - DNA, 58 bp, Artificial
  Synthetic oligonucleotide
cccagctaaacccgatcgatggaccactacctgaggacaatgaaccaagcgggtatgc

SEQ ID NO: 358135 - DNA, 55 bp, Artificial
  Synthetic oligonucleotide
cccagctaacataggagggttcaactatatgtctacagctagatgttttgtcaga

SEQ ID NO: 358136 - DNA, 55 bp, Artificial
  Synthetic oligonucleotide
cccagctaactgccgtcatatcgcctgtacgtgccaaatcaagacctatataaac

SEQ ID NO: 358137 - DNA, 50 bp, Artificial
  Synthetic oligonucleotide
cccagctaacttgagagtggtaacatcacagtccccatacgtcgtagtag

SEQ ID NO: 358138 - DNA, 50 bp, Artificial
  Synthetic oligonucleotide
cccagctaatgacctctgttacccagggagtttaaacgactatgaagaac

SEQ ID NO: 358139 - DNA, 56 bp, Artificial
  Synthetic oligonucleotide
cccagctatgatactaaacctaagggcaaaagctatgtaaaagtaactatagcacc

SEQ ID NO: 358140 - DNA, 60 bp, Artificial
  Synthetic oligonucleotide
cccagctcaacccaattgatggacccttacctgaggacaacgagccaagcggatatgcac

SEQ ID NO: 358141 - DNA, 59 bp, Artificial
  Synthetic oligonucleotide
cccagctcaatcgcatgggcattcaagtctccggactaacctcaactcctcacccccac

SEQ ID NO: 358142 - DNA, 58 bp, Artificial
  Synthetic oligonucleotide
cccagctcctaaggcggttgcaccagtggataacctcggagtgtaccaccccatgctc

SEQ ID NO: 358143 - DNA, 55 bp, Artificial
  Synthetic oligonucleotide
cccagctcctgagacgactgcacgactgggtgagctcggagtgcaccactccatg

SEQ ID NO: 358144 - DNA, 55 bp, Artificial
  Synthetic oligonucleotide
cccagctctcatcctttaataaggtcttactttccagacgctgttgataatgagg

SEQ ID NO: 358145 - DNA, 60 bp, Artificial
  Synthetic oligonucleotide
cccagctgacatttgacatgtcttacctaccaatagatatgtgctcgtggacgctgatta

SEQ ID NO: 358146 - DNA, 60 bp, Artificial
  Synthetic oligonucleotide
cccagctgagctcaaaaactcaagccactattgtagccaatgcatctcgatcagaccctg

SEQ ID NO: 358147 - DNA, 60 bp, Artificial
  Synthetic oligonucleotide
cccagctggactcatatgcaagctccacgccgtacggcaagctgaacaaaagtagtgacc

SEQ ID NO: 358148 - DNA, 59 bp, Artificial
  Synthetic oligonucleotide
cccagctggttggggagctcgggagcctctatgggcccttatcggtgtctgcctatgtg

SEQ ID NO: 358149 - DNA, 55 bp, Artificial
  Synthetic oligonucleotide
cccagctgtaccatactttatagcaaaatggcagcacttacaatgtctgagtgtc

SEQ ID NO: 358150 - DNA, 55 bp, Artificial
  Synthetic oligonucleotide
cccagcttcgacactaggcccgggggtcgcagaagagtaaaagtgactatccgcc

SEQ ID NO: 358151 - DNA, 60 bp, Artificial
  Synthetic oligonucleotide
cccagcttcgacagcttgaagactgcgtcatagcagcatcatcggcggtgtctaactaca

SEQ ID NO: 358152 - DNA, 55 bp, Artificial
  Synthetic oligonucleotide
cccagcttgagagtttccttatggtgcacagaccaaagaatttatgggccactct

SEQ ID NO: 358153 - DNA, 53 bp, Artificial
  Synthetic oligonucleotide
cccagcttgggtaagtccgaacccaaccggagtaggtcgtacatcaagttgaa

SEQ ID NO: 358154 - DNA, 55 bp, Artificial
  Synthetic oligonucleotide
cccagcttgtgctacgcacttttccatctaggattcgaatacggtgtcgaaaaca

SEQ ID NO: 358155 - DNA, 55 bp, Artificial
  Synthetic oligonucleotide
cccagctttccctcaaaagttgcacttccgcggacctagggctaatgaacgagta

SEQ ID NO: 358156 - DNA, 55 bp, Artificial
  Synthetic oligonucleotide
cccagctttcggaatacgatgcctgcattattagaactgacgccattcccatgaa

SEQ ID NO: 358157 - DNA, 55 bp, Artificial
  Synthetic oligonucleotide
cccaggaacaagcttcgaaccaggatgagagttctaacccgagcacctctaatgc

SEQ ID NO: 358158 - DNA, 54 bp, Artificial
  Synthetic oligonucleotide
cccaggacaccgagcaagaccaagtacccactattaaacctactgaccacggac

SEQ ID NO: 358159 - DNA, 55 bp, Artificial
  Synthetic oligonucleotide
cccaggaccaattcacccacctgttcaggaatataaacaacagattaaatgtcct

SEQ ID NO: 358160 - DNA, 50 bp, Artificial
  Synthetic oligonucleotide
cccaggacctgacgatgacccgtctgagcgccctgcagaggtcgaagaca

SEQ ID NO: 358161 - DNA, 55 bp, Artificial
  Synthetic oligonucleotide
cccaggacggaatgtcgggtgcgcctgtttgtgacaagtatggcagggtattggc

SEQ ID NO: 358162 - DNA, 55 bp, Artificial
  Synthetic oligonucleotide
cccaggagacatagactatggaccaccaatcgataatgaattactaaccctcatc

SEQ ID NO: 358163 - DNA, 54 bp, Artificial
  Synthetic oligonucleotide
cccaggagacatggcaaatacatttaagacttcaggaggacaacatcctgatgc

SEQ ID NO: 358164 - DNA, 55 bp, Artificial
  Synthetic oligonucleotide
cccaggagaggatgacgcgtgctctttctgttgagcatgagcgttggtataccgg

SEQ ID NO: 358165 - DNA, 55 bp, Artificial
  Synthetic oligonucleotide
cccaggagcaactactagtcctaagagttttgcagaagcattaactaccaggcct

SEQ ID NO: 358166 - DNA, 58 bp, Artificial
  Synthetic oligonucleotide
cccaggagcaacttgagaaagccctagattgccagatctacggggcctgttactccat

SEQ ID NO: 358167 - DNA, 55 bp, Artificial
  Synthetic oligonucleotide
cccaggaggattagacaaggcgcagaggtcctcttcaactagcagcttagatact

SEQ ID NO: 358168 - DNA, 59 bp, Artificial
  Synthetic oligonucleotide
cccaggagggaataaactaactgaatctaggtctcaatcaatgattgtagcttgtagaa

SEQ ID NO: 358169 - DNA, 60 bp, Artificial
  Synthetic oligonucleotide
cccaggataggacttggcacgatccggtgaatcaattcatcatgggctcacaatacgtca

SEQ ID NO: 358170 - DNA, 60 bp, Artificial
  Synthetic oligonucleotide
cccaggatatatcgcacgttgactagtcccgatgtgcccagaggatgtgaaggcccatgc

SEQ ID NO: 358171 - DNA, 60 bp, Artificial
  Synthetic oligonucleotide
cccaggatatatcggacgatcagaacgcctgatgttcctagaggctgtgaagggccctgt

SEQ ID NO: 358172 - DNA, 51 bp, Artificial
  Synthetic oligonucleotide
cccaggatatctcatgcacaggcctgggacccaccttatcctcagcagaca

SEQ ID NO: 358173 - DNA, 55 bp, Artificial
  Synthetic oligonucleotide
cccaggatccatctaaatttactcaaccccttgtagacacactcacaaacccagc

SEQ ID NO: 358174 - DNA, 54 bp, Artificial
  Synthetic oligonucleotide
cccaggatcgaagatgttagctcccaacctgtttagttccttgtatggaagcag

SEQ ID NO: 358175 - DNA, 55 bp, Artificial
  Synthetic oligonucleotide
cccaggatctcgagggctatgcggtgtcctatccagaacaaaggcagttccctga

SEQ ID NO: 358176 - DNA, 55 bp, Artificial
  Synthetic oligonucleotide
cccaggatctgccttttatgctggttctggaagagatgtatggccaaccctcacc

SEQ ID NO: 358177 - DNA, 60 bp, Artificial
  Synthetic oligonucleotide
cccaggatgtttgcacggcacatttaagtgtatgaatgggtacatttccatatctagagc

SEQ ID NO: 358178 - DNA, 55 bp, Artificial
  Synthetic oligonucleotide
cccaggatttgtactaaggggaagaaagcaattgatcttggtcagtgtgggttgc

SEQ ID NO: 358179 - DNA, 55 bp, Artificial
  Synthetic oligonucleotide
cccaggcactgcaatcgtataccactgtgcacagtctccatgggacagcaaagca

SEQ ID NO: 358180 - DNA, 55 bp, Artificial
  Synthetic oligonucleotide
cccaggcagtttcaatgattatgaagaactgaagcatctcatcagcagcgtgaca

SEQ ID NO: 358181 - DNA, 59 bp, Artificial
  Synthetic oligonucleotide
cccaggcatgtcatacaaaagacgtgcttggacaggtcggccgatgtatcggaaaccca

SEQ ID NO: 358182 - DNA, 55 bp, Artificial
  Synthetic oligonucleotide
cccaggccaactttgacgttccaatccgtatagtcgtctctctgatgcacatcgc

SEQ ID NO: 358183 - DNA, 60 bp, Artificial
  Synthetic oligonucleotide
cccaggccagctgacccttcaataatgtcatgtgactccccaagcaatgtcaatggagga

SEQ ID NO: 358184 - DNA, 57 bp, Artificial
  Synthetic oligonucleotide
cccaggccatttagtgcaaaacttatgtagttcaaaacatatattcaggtccaagta

SEQ ID NO: 358185 - DNA, 50 bp, Artificial
  Synthetic oligonucleotide
cccaggccccgccaggttcgtgggcatcacagatacgaagtcgcacccgt

SEQ ID NO: 358186 - DNA, 56 bp, Artificial
  Synthetic oligonucleotide
cccaggcgaaatgaattcactattcaacgtaactggttctacagttgcttttactc

SEQ ID NO: 358187 - DNA, 55 bp, Artificial
  Synthetic oligonucleotide
cccaggcgatcagggcattgacttgagtacagctgaggtgcaatttggacctgct

SEQ ID NO: 358188 - DNA, 59 bp, Artificial
  Synthetic oligonucleotide
cccaggcgccattggacaacgcaagactgcaactgttctatctaccccggccatataac

SEQ ID NO: 358189 - DNA, 55 bp, Artificial
  Synthetic oligonucleotide
cccaggcggtgaagtgtacctgcacccgactcttaacacggtcgagcggtataag

SEQ ID NO: 358190 - DNA, 55 bp, Artificial
  Synthetic oligonucleotide
cccaggctaaacacctaaaggactgtgcaaccatggtcagacactataagagagc

SEQ ID NO: 358191 - DNA, 51 bp, Artificial
  Synthetic oligonucleotide
cccaggctacccctatattacccagggtgtatcccgtaggtcccttttcac

SEQ ID NO: 358192 - DNA, 55 bp, Artificial
  Synthetic oligonucleotide
cccaggctctaaagaacagactggagtctgccaactacgaggaagtcgagcttcc

SEQ ID NO: 358193 - DNA, 52 bp, Artificial
  Synthetic oligonucleotide
cccaggctggcgcatgatgacgtaggtatcccccgattggagctctcttcaa

SEQ ID NO: 358194 - DNA, 58 bp, Artificial
  Synthetic oligonucleotide
cccaggctggggtatccatggcccctattgctcaggggactatggttcgcttacgtga

SEQ ID NO: 358195 - DNA, 60 bp, Artificial
  Synthetic oligonucleotide
cccagggacagctacttccagcaatatatgcttaagggtgagtatcagtactggtttgac

SEQ ID NO: 358196 - DNA, 60 bp, Artificial
  Synthetic oligonucleotide
cccagggagcggcagtgtcatcaatggctcaaaccctactgccgaacgacctagccagca

SEQ ID NO: 358197 - DNA, 55 bp, Artificial
  Synthetic oligonucleotide
cccagggaggccatgcgccacggaagctgtacgcgtggtttattggactagcggt

SEQ ID NO: 358198 - DNA, 60 bp, Artificial
  Synthetic oligonucleotide
cccagggaggcgttgatcgttgctgatcagcacattctggttcgtgcggtgcagcgcatt

SEQ ID NO: 358199 - DNA, 54 bp, Artificial
  Synthetic oligonucleotide
cccagggcacgatttgaagttagtaatgtaggtactggtactaatactagagta

SEQ ID NO: 358200 - DNA, 60 bp, Artificial
  Synthetic oligonucleotide
cccagggcctgagggtgaccactggggccgtgcttctgcggacggtgatacacatgcgcg

SEQ ID NO: 358201 - DNA, 57 bp, Artificial
  Synthetic oligonucleotide
cccagggcgcatgtagccgacttggaggactttgccgccttttatcgcaccctctcg

SEQ ID NO: 358202 - DNA, 52 bp, Artificial
  Synthetic oligonucleotide
cccagggctcatctttgggatccgacttaaaattacagacttggggccccgg

SEQ ID NO: 358203 - DNA, 54 bp, Artificial
  Synthetic oligonucleotide
cccaggggtggggggagttcatctgttgcaacaaccaggaaacgtatgggtcac

SEQ ID NO: 358204 - DNA, 55 bp, Artificial
  Synthetic oligonucleotide
cccagggtgctacctttacggagaccacaattatagctacggctgacgccagggg

SEQ ID NO: 358205 - DNA, 55 bp, Artificial
  Synthetic oligonucleotide
cccagggttatatctcacacgcggtccactcgggctctataataactcccagggt

SEQ ID NO: 358206 - DNA, 57 bp, Artificial
  Synthetic oligonucleotide
cccagggttttgagcagttagatatcgttatggagctcaaatatgagggcatgcctt

SEQ ID NO: 358207 - DNA, 60 bp, Artificial
  Synthetic oligonucleotide
cccaggtaagattattgaagtggatgtcactatcgaagctcagattcgtcaagagtttct

SEQ ID NO: 358208 - DNA, 55 bp, Artificial
  Synthetic oligonucleotide
cccaggtactagcccaagggaggggactagtggcgcagcctgttttctggatagg

SEQ ID NO: 358209 - DNA, 54 bp, Artificial
  Synthetic oligonucleotide
cccaggtagctttagaaagaagtgtaattttgccacaacccctgtttgtgaata

SEQ ID NO: 358210 - DNA, 51 bp, Artificial
  Synthetic oligonucleotide
cccaggtagtgggtcagtgcttaagcatacgctattaggagagatcttgaa

SEQ ID NO: 358211 - DNA, 54 bp, Artificial
  Synthetic oligonucleotide
cccaggtagttttgccggtccgtgttgggccgacgatgtagaggctgcgttttc

SEQ ID NO: 358212 - DNA, 55 bp, Artificial
  Synthetic oligonucleotide
cccaggtatattaaggagctcgtgaggtgtttggtagaatacctgaccagacgac

SEQ ID NO: 358213 - DNA, 59 bp, Artificial
  Synthetic oligonucleotide
cccaggtcatcggtaccttcgagctgcaaggtccgcaggagtccaccgctccgctgaaa

SEQ ID NO: 358214 - DNA, 55 bp, Artificial
  Synthetic oligonucleotide
cccaggtcattgttactgatcagcttgtcgtgggcgagccgcgtagggtatccgc

SEQ ID NO: 358215 - DNA, 51 bp, Artificial
  Synthetic oligonucleotide
cccaggtgcttcactcaccggggtcaaacaaggacctgacgagccattcgc

SEQ ID NO: 358216 - DNA, 58 bp, Artificial
  Synthetic oligonucleotide
cccaggtgtggtaacaggatcagctgttggttgtgacccagacttgttttggagcaag

SEQ ID NO: 358217 - DNA, 55 bp, Artificial
  Synthetic oligonucleotide
cccaggttagagatggcgtgaaaattgccccggatttaatctccaagttggcagt

SEQ ID NO: 358218 - DNA, 55 bp, Artificial
  Synthetic oligonucleotide
cccaggttcgacgatttcatcagtgctctggtctccacgatggcgctcatgggaa

SEQ ID NO: 358219 - DNA, 55 bp, Artificial
  Synthetic oligonucleotide
cccagtaatagacctggcagatggggctagaagttccccactggcgacagtgttc

SEQ ID NO: 358220 - DNA, 59 bp, Artificial
  Synthetic oligonucleotide
cccagtaatcgcattcttaatattaaccagcacatgcgtacaggctgataggatatgtg

SEQ ID NO: 358221 - DNA, 55 bp, Artificial
  Synthetic oligonucleotide
cccagtacacctcctacccaacagatattgatgttgatgtcagctggcagtgact

SEQ ID NO: 358222 - DNA, 54 bp, Artificial
  Synthetic oligonucleotide
cccagtaccttttagaaacctgaacacatttaaagtcatattagatggacaatt

SEQ ID NO: 358223 - DNA, 55 bp, Artificial
  Synthetic oligonucleotide
cccagtacgtcacaataactgccaatgtgagcgatgatgcgtatttgcacaacgc

SEQ ID NO: 358224 - DNA, 55 bp, Artificial
  Synthetic oligonucleotide
cccagtactacacacagtacagtggcaccctcaacttgcacttcatgtacacagg

SEQ ID NO: 358225 - DNA, 55 bp, Artificial
  Synthetic oligonucleotide
cccagtactatacgcgaggatcagtacaaaagtttctatcagaacaagactacca

SEQ ID NO: 358226 - DNA, 60 bp, Artificial
  Synthetic oligonucleotide
cccagtactgctacagttaagcaggattatcgagaccgttttcaggtcatgagacgatgg

SEQ ID NO: 358227 - DNA, 59 bp, Artificial
  Synthetic oligonucleotide
cccagtactgctactgtgaagaacgatcttcgtgatcgttatcaggtcgtgcgtaagtt

SEQ ID NO: 358228 - DNA, 59 bp, Artificial
  Synthetic oligonucleotide
cccagtagaggaatacatagatggagtcttgaatgaggttcttgtggttccgaacatta

SEQ ID NO: 358229 - DNA, 55 bp, Artificial
  Synthetic oligonucleotide
cccagtagagttagtagaaggctggttcagtagctggaagagcacattggcatcg

SEQ ID NO: 358230 - DNA, 53 bp, Artificial
  Synthetic oligonucleotide
cccagtagagtttccaggggcgttcttcactccaaatgctaggaaaccgacgg

SEQ ID NO: 358231 - DNA, 55 bp, Artificial
  Synthetic oligonucleotide
cccagtagcacaatcacaatgcagaatggtcccgtgcatgtagacgggcaggaca

SEQ ID NO: 358232 - DNA, 55 bp, Artificial
  Synthetic oligonucleotide
cccagtaggacaagtcacagattacgggttcctaaatctgggcggcacacccacc

SEQ ID NO: 358233 - DNA, 60 bp, Artificial
  Synthetic oligonucleotide
cccagtagtcgtcacagggcagggatgcgtcattagccgcgctcccgattgtgcccagtt

SEQ ID NO: 358234 - DNA, 60 bp, Artificial
  Synthetic oligonucleotide
cccagtataattaatcattcgcacatagactctcgactcgactcgatcagcacatacacc

SEQ ID NO: 358235 - DNA, 56 bp, Artificial
  Synthetic oligonucleotide
cccagtatccttcgttggcccaacgttccaatacatggaggctaatgactattacc

SEQ ID NO: 358236 - DNA, 60 bp, Artificial
  Synthetic oligonucleotide
cccagtatctgtgggcatagcagttatgctaggcgtgggggccgtagcggcccacaatgc

SEQ ID NO: 358237 - DNA, 59 bp, Artificial
  Synthetic oligonucleotide
cccagtatgaggaagatgtcaacttgggaagtggaacgcgagcagtagggaagcctctc

SEQ ID NO: 358238 - DNA, 55 bp, Artificial
  Synthetic oligonucleotide
cccagtatggtttacctgtctagagagagtactcttgaaattaggatttgaacac

SEQ ID NO: 358239 - DNA, 60 bp, Artificial
  Synthetic oligonucleotide
cccagtatgtttgaaccagagcgcgaaaaagtggatgccattgatggcgagtaccgcttg

SEQ ID NO: 358240 - DNA, 55 bp, Artificial
  Synthetic oligonucleotide
cccagtatttcgttcagacacatcgtaatgcagtcaagagatcgagtcttacgag

SEQ ID NO: 358241 - DNA, 60 bp, Artificial
  Synthetic oligonucleotide
cccagtcaaccatgaaggcagaagaactcacaccaggtagatttcgtacaatagtatgtg

SEQ ID NO: 358242 - DNA, 54 bp, Artificial
  Synthetic oligonucleotide
cccagtcaagagtaaggcttggtagggctcctttggtagggctctaaaaagaga

SEQ ID NO: 358243 - DNA, 60 bp, Artificial
  Synthetic oligonucleotide
cccagtcaatagccctagtaggtgaaagagctttttatgacccgcgaacagctggcagca

SEQ ID NO: 358244 - DNA, 52 bp, Artificial
  Synthetic oligonucleotide
cccagtcagccgtgagcatgtggagtggtgtagggaatttatcaaaggcaag

SEQ ID NO: 358245 - DNA, 58 bp, Artificial
  Synthetic oligonucleotide
cccagtcatgaaggagtcgaacacccttttaatcgacatgaacatactaagaatggac

SEQ ID NO: 358246 - DNA, 55 bp, Artificial
  Synthetic oligonucleotide
cccagtcatgagtgtgattggattcctagcactggcaaaagactggagtgaccgc

SEQ ID NO: 358247 - DNA, 53 bp, Artificial
  Synthetic oligonucleotide
cccagtccatagtcaagaggtgccggcactaacagcagtagaaactggagcga

SEQ ID NO: 358248 - DNA, 58 bp, Artificial
  Synthetic oligonucleotide
cccagtccatgattgtaatacgacttgtcaaacacccaaaggtgctataaacaccagc

SEQ ID NO: 358249 - DNA, 55 bp, Artificial
  Synthetic oligonucleotide
cccagtccttcattcgggagactacgatgacggtccctactatgaggattacgac

SEQ ID NO: 358250 - DNA, 55 bp, Artificial
  Synthetic oligonucleotide
cccagtcgagggtgtctcccgtccttctccaggtaggacttgacgtccgagcttg

SEQ ID NO: 358251 - DNA, 60 bp, Artificial
  Synthetic oligonucleotide
cccagtctatgtaattgtctgtatggatgcatcgcgttctctatatctgagcccgcctct

SEQ ID NO: 358252 - DNA, 60 bp, Artificial
  Synthetic oligonucleotide
cccagtgaaatagaaactattgctgaggtgcatcctgtccctacagataatgtgccagta

SEQ ID NO: 358253 - DNA, 55 bp, Artificial
  Synthetic oligonucleotide
cccagtgaactggaccatctggaagcagatgatgcactacccgccggatggtcgg

SEQ ID NO: 358254 - DNA, 55 bp, Artificial
  Synthetic oligonucleotide
cccagtgacaacatttagattgcagcaaaattggtctagtgtccgaatcccgttt

SEQ ID NO: 358255 - DNA, 52 bp, Artificial
  Synthetic oligonucleotide
cccagtgagtgtcagggttgggaatatgtgcaggttctttgacagttttttg

SEQ ID NO: 358256 - DNA, 60 bp, Artificial
  Synthetic oligonucleotide
cccagtgatctggcccacattgttttgcccgatcgactatcaccttctatcacaatactg

SEQ ID NO: 358257 - DNA, 60 bp, Artificial
  Synthetic oligonucleotide
cccagtgccactgttggcgcgcttatgcctgctgtacagggcatggtgagttccgacgaa

SEQ ID NO: 358258 - DNA, 53 bp, Artificial
  Synthetic oligonucleotide
cccagtgcgggaaaggacccgaagaaaactggaggtccaatctacagaaggag

SEQ ID NO: 358259 - DNA, 55 bp, Artificial
  Synthetic oligonucleotide
cccagtgcgtgagttgcagctgttggcctgtgctaccgaatgcatccgctctcac

SEQ ID NO: 358260 - DNA, 55 bp, Artificial
  Synthetic oligonucleotide
cccagtgctaaatgcatattatggtgtgtttaagagagcttatggtgccgcgggg

SEQ ID NO: 358261 - DNA, 51 bp, Artificial
  Synthetic oligonucleotide
cccagtgctgtaacacaatttgcatatgaggatgagcagtgtcaagagcaa

SEQ ID NO: 358262 - DNA, 55 bp, Artificial
  Synthetic oligonucleotide
cccagtggacctgtacaagggagacttctcgcacttgcgcttgtcagttagaccg

SEQ ID NO: 358263 - DNA, 55 bp, Artificial
  Synthetic oligonucleotide
cccagtggactccaggccgcctccgagcgtcgaaaatacggaagtaggactagcg

SEQ ID NO: 358264 - DNA, 60 bp, Artificial
  Synthetic oligonucleotide
cccagtggacttgttctcatttgagacggaattgcctatttgatggcgtatgtgcaaaac

SEQ ID NO: 358265 - DNA, 50 bp, Artificial
  Synthetic oligonucleotide
cccagtgtacgggaaagtgttcaaccctccccggacaaatcttcccgggc

SEQ ID NO: 358266 - DNA, 55 bp, Artificial
  Synthetic oligonucleotide
cccagtgtcaagtcttacacctgcccactcaagaggcaggagttaatcccagagg

SEQ ID NO: 358267 - DNA, 58 bp, Artificial
  Synthetic oligonucleotide
cccagtgtccatcgttgggtgtggctgggaggcgtcatacgctaagaaagctcgttcc

SEQ ID NO: 358268 - DNA, 55 bp, Artificial
  Synthetic oligonucleotide
cccagtgtcttctggtgtagcgtgtactagcgtcgagccaatggacggacggcac

SEQ ID NO: 358269 - DNA, 50 bp, Artificial
  Synthetic oligonucleotide
cccagtgtcttctttgatatctttccaggagagaaagaaccagccgtcct

SEQ ID NO: 358270 - DNA, 55 bp, Artificial
  Synthetic oligonucleotide
cccagtgtggttagcttacaaagtagcctctaatggacacagttaccaagaccgc

SEQ ID NO: 358271 - DNA, 55 bp, Artificial
  Synthetic oligonucleotide
cccagtgttgccgcgcgtaacattattgttaataccatcctcggagcccacctta

SEQ ID NO: 358272 - DNA, 59 bp, Artificial
  Synthetic oligonucleotide
cccagttaacacagaacaaggagttcaattacatatagagattgaagagcaaggaattg

SEQ ID NO: 358273 - DNA, 55 bp, Artificial
  Synthetic oligonucleotide
cccagttatttaacaagccctattggctgcacaaggcacagggacacaacaatgg

SEQ ID NO: 358274 - DNA, 52 bp, Artificial
  Synthetic oligonucleotide
cccagttcggggcccaagcggaattgaaatccttgcggctacaagccgccag

SEQ ID NO: 358275 - DNA, 55 bp, Artificial
  Synthetic oligonucleotide
cccagttctggggagaattccccgaggctgttattaacacctttcagcgcctgca

SEQ ID NO: 358276 - DNA, 53 bp, Artificial
  Synthetic oligonucleotide
cccagttgaccaaccgaccgaacccgatgtggctgcgtgccgcttttacacac

SEQ ID NO: 358277 - DNA, 55 bp, Artificial
  Synthetic oligonucleotide
cccagttgagctttggacaaaatcgggtgagaagaagatactgcgacctaggttg

SEQ ID NO: 358278 - DNA, 60 bp, Artificial
  Synthetic oligonucleotide
cccagttgcatttataggcacttgctgtctgtattcaatgacacaatggtcgattttcat

SEQ ID NO: 358279 - DNA, 55 bp, Artificial
  Synthetic oligonucleotide
cccagttgtatagcattcataggtgaaggagctggtaacttattattacgtacag

SEQ ID NO: 358280 - DNA, 54 bp, Artificial
  Synthetic oligonucleotide
cccagttgtctaaactgcaaatttagacgtaaatcaccagccggaagggatttc

SEQ ID NO: 358281 - DNA, 54 bp, Artificial
  Synthetic oligonucleotide
cccagttgtggtatcggagtcggcgcccgaaccaccagctcgtttagtggtaaa

SEQ ID NO: 358282 - DNA, 60 bp, Artificial
  Synthetic oligonucleotide
cccagtttccgcttatgaggtgcgcaatgtgtccggagtgtaccatgtcacgaacgactg

SEQ ID NO: 358283 - DNA, 55 bp, Artificial
  Synthetic oligonucleotide
cccagtttcctgggagggcatgtcctttgggcaatgcagtagggccttgacgctg

SEQ ID NO: 358284 - DNA, 53 bp, Artificial
  Synthetic oligonucleotide
cccagtttgaatccgtgttttcccagaatcctccctccggtcctgtggcggga

SEQ ID NO: 358285 - DNA, 55 bp, Artificial
  Synthetic oligonucleotide
cccagtttgatcttcgtggaggccagcgagtattatccagctagataccagtcac

SEQ ID NO: 358286 - DNA, 55 bp, Artificial
  Synthetic oligonucleotide
cccagtttggaagctcccattatcgtgcatggctatttcggtcattatcgcactc

SEQ ID NO: 358287 - DNA, 55 bp, Artificial
  Synthetic oligonucleotide
cccagtttggttcacgtcggtgccaatgactactaccctgagagatatcagtcac

SEQ ID NO: 358288 - DNA, 55 bp, Artificial
  Synthetic oligonucleotide
cccataaacgatatacatctccccgtgcattatactgattgcggtgtgaaacacc

SEQ ID NO: 358289 - DNA, 56 bp, Artificial
  Synthetic oligonucleotide
cccataacacagctatctccacgtttatcagtttccctaaccttggtaagactgaa

SEQ ID NO: 358290 - DNA, 60 bp, Artificial
  Synthetic oligonucleotide
cccataacaccagtcctcaacgtattccgtggcattcagcaacaggtctcaacatatagc

SEQ ID NO: 358291 - DNA, 56 bp, Artificial
  Synthetic oligonucleotide
cccataacatctgtgttaaaaaccccatatcactcatgttatgaggggggtaacac

SEQ ID NO: 358292 - DNA, 55 bp, Artificial
  Synthetic oligonucleotide
cccataaccaaactggcctccctctatcgtcatgctcagcttgtcgaatgccacg

SEQ ID NO: 358293 - DNA, 55 bp, Artificial
  Synthetic oligonucleotide
cccataaccccatagtcgcaatagtcgtacgctatggatcccagttgcattgccg

SEQ ID NO: 358294 - DNA, 55 bp, Artificial
  Synthetic oligonucleotide
cccataactcagctctttcaacttttattaatttcccagtacttgggaagctcga

SEQ ID NO: 358295 - DNA, 54 bp, Artificial
  Synthetic oligonucleotide
cccataagaaatacatggcagtacccctgtagggggtgggttgtaggtcgttga

SEQ ID NO: 358296 - DNA, 60 bp, Artificial
  Synthetic oligonucleotide
cccataagagacatgccactgtgggcagctctgtttggatacgcagaatatgcatctaag

SEQ ID NO: 358297 - DNA, 54 bp, Artificial
  Synthetic oligonucleotide
cccataagggcccagctgccctttccactggagaacataactagagccccgggg

SEQ ID NO: 358298 - DNA, 58 bp, Artificial
  Synthetic oligonucleotide
cccataagtagcacacctgtcccaggcgtgcgcagggttgctgggccccgcctttata

SEQ ID NO: 358299 - DNA, 56 bp, Artificial
  Synthetic oligonucleotide
cccataatgttctcgaataaaatggcaaggctaggaaaaggatacatgttcgaaag

SEQ ID NO: 358300 - DNA, 60 bp, Artificial
  Synthetic oligonucleotide
cccataattctgccattccaacctatatctcatatcctaatctgggtaagacgcaaccca

SEQ ID NO: 358301 - DNA, 60 bp, Artificial
  Synthetic oligonucleotide
cccatacagtctggccagctatccgagacacgggaagctacggtacagctacctccattc

SEQ ID NO: 358302 - DNA, 60 bp, Artificial
  Synthetic oligonucleotide
cccatacatgctgcattattacgacccgcgccaatacgctaacgcatggaacctgacatc

SEQ ID NO: 358303 - DNA, 60 bp, Artificial
  Synthetic oligonucleotide
cccatacatggttgacattcacggattcacatgccctcgctgcacctcagacgaattcac

SEQ ID NO: 358304 - DNA, 60 bp, Artificial
  Synthetic oligonucleotide
cccataccagtgacaatcagagagcatgctggaacattctactccaccactccggacact

SEQ ID NO: 358305 - DNA, 55 bp, Artificial
  Synthetic oligonucleotide
cccatacccatgacttcatttcttattgacataatggccgcgcagcggaacaccc

SEQ ID NO: 358306 - DNA, 57 bp, Artificial
  Synthetic oligonucleotide
cccataccgtacggatcgagtactcatccatccggattcgcccttcgttctgccgcc

SEQ ID NO: 358307 - DNA, 55 bp, Artificial
  Synthetic oligonucleotide
cccatacctgccatcctccttgatcagctttaccgttttgccactcttgcctttg

SEQ ID NO: 358308 - DNA, 55 bp, Artificial
  Synthetic oligonucleotide
cccataccttgacaccaaggttgaagcctcagtgcttccagccgccaccttcact

SEQ ID NO: 358309 - DNA, 55 bp, Artificial
  Synthetic oligonucleotide
cccatacgcccactccgagtccaccgctgacttattagaggatttaggtatagca

SEQ ID NO: 358310 - DNA, 59 bp, Artificial
  Synthetic oligonucleotide
cccatactaaatatgttagggaaaataccaggatctatacttgcaagagtacattgtga

SEQ ID NO: 358311 - DNA, 57 bp, Artificial
  Synthetic oligonucleotide
cccatactgttttgcctattctgcttgggccttcaataacaatggatatgggtctat

SEQ ID NO: 358312 - DNA, 55 bp, Artificial
  Synthetic oligonucleotide
cccatacttttacagaaccctatgaaacctgaggccacagatgactgaaatgctg

SEQ ID NO: 358313 - DNA, 54 bp, Artificial
  Synthetic oligonucleotide
cccatagacataaaagagaaccagtgtccttaaccttggccttattattaggtg

SEQ ID NO: 358314 - DNA, 55 bp, Artificial
  Synthetic oligonucleotide
cccatagagagaaccatctaccggatggtcgacctgcccgtgatacagccgcggc

SEQ ID NO: 358315 - DNA, 52 bp, Artificial
  Synthetic oligonucleotide
cccatagagttggtaagcgtttttgtgttaagtccgtctatgtattgggtaa

SEQ ID NO: 358316 - DNA, 55 bp, Artificial
  Synthetic oligonucleotide
cccatagatgcgtctgtgacaaacccaagtgatagcctggatttggctgaccagg

SEQ ID NO: 358317 - DNA, 55 bp, Artificial
  Synthetic oligonucleotide
cccatagattcacataaaggatatgttgtgtcaagacgtggtgatctagaaacac

SEQ ID NO: 358318 - DNA, 57 bp, Artificial
  Synthetic oligonucleotide
cccataggaccatgatgtacaattttcctacaaaagctggacagtgcgggggcgtag

SEQ ID NO: 358319 - DNA, 57 bp, Artificial
  Synthetic oligonucleotide
cccatagggagttgatcactaccattgccaactcggctacataccaggcgaacgggg

SEQ ID NO: 358320 - DNA, 55 bp, Artificial
  Synthetic oligonucleotide
cccataggtgcaccgtttggtgccccgaggattgcgggtggtatgtgggtcgttg

SEQ ID NO: 358321 - DNA, 59 bp, Artificial
  Synthetic oligonucleotide
cccatagtagcaaaagaaatagtagctagttgtgataaatgtcagctaaaaggagaagc

SEQ ID NO: 358322 - DNA, 55 bp, Artificial
  Synthetic oligonucleotide
cccatagttaaacacaggtgtgtatgtaaccgaaatgtgttttgttaatgcatgc

SEQ ID NO: 358323 - DNA, 57 bp, Artificial
  Synthetic oligonucleotide
cccatagttgcttgtaaaagattagattcaaaagaggttaaggatgctatagatact

SEQ ID NO: 358324 - DNA, 60 bp, Artificial
  Synthetic oligonucleotide
cccatagtttggctggagctctgcgaatagcggagcattatgactgtctttcaagttttc

SEQ ID NO: 358325 - DNA, 53 bp, Artificial
  Synthetic oligonucleotide
cccatatactcacaacgttctggtattggatcagtgcaccaattacaacttaa

SEQ ID NO: 358326 - DNA, 55 bp, Artificial
  Synthetic oligonucleotide
cccatatagacggacatttcctatcccagaccaagcaagcgggcgagaacttccc

SEQ ID NO: 358327 - DNA, 55 bp, Artificial
  Synthetic oligonucleotide
cccatatattacaggcccaatccaaaagcttcaggtcatattttaaaacgacctc

SEQ ID NO: 358328 - DNA, 55 bp, Artificial
  Synthetic oligonucleotide
cccatatcgccaatcagctgggccacttcaatcaatgacagcatggccctcctcg

SEQ ID NO: 358329 - DNA, 52 bp, Artificial
  Synthetic oligonucleotide
cccatatgacaactcccttcactcgagggtcttccctagcggaaagtgctca

SEQ ID NO: 358330 - DNA, 60 bp, Artificial
  Synthetic oligonucleotide
cccatatgacctaaccagtgcatcatgaccatatcaattgagtcaatcatctcctcttgc

SEQ ID NO: 358331 - DNA, 56 bp, Artificial
  Synthetic oligonucleotide
cccatatgagggtatccccgtccttatcaacgtaggacttgacatcggacgaggat

SEQ ID NO: 358332 - DNA, 60 bp, Artificial
  Synthetic oligonucleotide
cccatatgcaatctgtccgtttacaccgagatggcggtgcgatccctgctgttagacata

SEQ ID NO: 358333 - DNA, 60 bp, Artificial
  Synthetic oligonucleotide
cccatatgctacgtcgtgcacttcctgggcggagtttatgtcctgatataactagctgca

SEQ ID NO: 358334 - DNA, 55 bp, Artificial
  Synthetic oligonucleotide
cccatatggccagagtacgagcgtcgttggagaagatccgggacccatctgtaca

SEQ ID NO: 358335 - DNA, 54 bp, Artificial
  Synthetic oligonucleotide
cccatatgggcgagacccgactataacccacctttactggagacttggaaagcc

SEQ ID NO: 358336 - DNA, 55 bp, Artificial
  Synthetic oligonucleotide
cccatattatggcaaccgaggcgtctaattacgcccagtatcgggttgttcgggc

SEQ ID NO: 358337 - DNA, 55 bp, Artificial
  Synthetic oligonucleotide
cccatattcagcatcctttacactgaatagatcgcagccagcccacgataatttg

SEQ ID NO: 358338 - DNA, 60 bp, Artificial
  Synthetic oligonucleotide
cccatattcatgaagtgcatagcactctcttatggattgcctactatgattacatgaatg

SEQ ID NO: 358339 - DNA, 60 bp, Artificial
  Synthetic oligonucleotide
cccatattcccacccaaatcactgagacaaatgatggagtgttgatcgtgaacactagta

SEQ ID NO: 358340 - DNA, 53 bp, Artificial
  Synthetic oligonucleotide
cccatcaaacgcggtattcgatctcaccccagtcggagccgacacatacggct

SEQ ID NO: 358341 - DNA, 55 bp, Artificial
  Synthetic oligonucleotide
cccatcaaatcatgtatgtgccacctggaggcccaatccctaacaaggtcgacga

SEQ ID NO: 358342 - DNA, 60 bp, Artificial
  Synthetic oligonucleotide
cccatcaactcatatacatacttgtgagtcttggctcttccatctacacatagaaacatg

SEQ ID NO: 358343 - DNA, 55 bp, Artificial
  Synthetic oligonucleotide
cccatcaactcgatcggctgaattaccgagaatcttggtcgaccacaagactaag

SEQ ID NO: 358344 - DNA, 60 bp, Artificial
  Synthetic oligonucleotide
cccatcaatgttgcacccagccatctcttacctcgaaagttgtggtctcgtgcctcgtct

SEQ ID NO: 358345 - DNA, 55 bp, Artificial
  Synthetic oligonucleotide
cccatcaccaagactaatggaaacataggcttacaactggccagtaacccaggcc

SEQ ID NO: 358346 - DNA, 60 bp, Artificial
  Synthetic oligonucleotide
cccatcactacagccatcactaaaactcgtattagaggaggaggcatgggccgctgcaaa

SEQ ID NO: 358347 - DNA, 55 bp, Artificial
  Synthetic oligonucleotide
cccatcactgcgggtctcgtctgtcctcttccaggccacaagctcacatgcatac

SEQ ID NO: 358348 - DNA, 55 bp, Artificial
  Synthetic oligonucleotide
cccatcagaagtcaacgacattacaagattaaactctggcggcaatatccagtgg

SEQ ID NO: 358349 - DNA, 55 bp, Artificial
  Synthetic oligonucleotide
cccatcaggctaagtgagataattagaatctgcacagactcttccttaagaacaa

SEQ ID NO: 358350 - DNA, 60 bp, Artificial
  Synthetic oligonucleotide
cccatcagtccaaactgcactctcggaggcagcttacactcatgtccgtcctgtcctaaa

SEQ ID NO: 358351 - DNA, 57 bp, Artificial
  Synthetic oligonucleotide
cccatcagtttccaaagacgaactggtgacgcattcacttattttggtaacaccata

SEQ ID NO: 358352 - DNA, 59 bp, Artificial
  Synthetic oligonucleotide
cccatcatacttgatgatcgctggtgacctggtggatactagactcatgtgaatgaaga

SEQ ID NO: 358353 - DNA, 60 bp, Artificial
  Synthetic oligonucleotide
cccatcatggccgtatgggatcatgaaggtcttcttcgccagggctggtgattgtgttga

SEQ ID NO: 358354 - DNA, 55 bp, Artificial
  Synthetic oligonucleotide
cccatcatgtttgcttcaacatttggatttaacattgtccgacgcctgggtgccc

SEQ ID NO: 358355 - DNA, 55 bp, Artificial
  Synthetic oligonucleotide
cccatccaacctgagggtagttacatcgcagtccccatacgtggttgtagcgacc

SEQ ID NO: 358356 - DNA, 59 bp, Artificial
  Synthetic oligonucleotide
cccatccactcaggaaagttcggactggcaggttgaggctgatttcatcggtatccctg

SEQ ID NO: 358357 - DNA, 55 bp, Artificial
  Synthetic oligonucleotide
cccatccagcggttccatgggaccaacgttcaacggatgtgggattcggcaaccc

SEQ ID NO: 358358 - DNA, 55 bp, Artificial
  Synthetic oligonucleotide
cccatccagtattcttttggagcccaacaactcaagctcaagagaatcaccaagt

SEQ ID NO: 358359 - DNA, 56 bp, Artificial
  Synthetic oligonucleotide
cccatccattatccttaattgggagcgcagcgaaacgaacaaacgaaacttgacga

SEQ ID NO: 358360 - DNA, 55 bp, Artificial
  Synthetic oligonucleotide
cccatccattcggtaactctggtacctagagatccctcagaccacttgggctgag

SEQ ID NO: 358361 - DNA, 60 bp, Artificial
  Synthetic oligonucleotide
cccatcccaactcatccaatactacagcgcttgcttcgatctcttttgtcgcaagtgccc

SEQ ID NO: 358362 - DNA, 56 bp, Artificial
  Synthetic oligonucleotide
cccatcccatcatcttgggctttaggaaaatacctatgggagtgggcctcagcccg

SEQ ID NO: 358363 - DNA, 58 bp, Artificial
  Synthetic oligonucleotide
cccatcccatttgaagagttgtgggaactagctgcccgggaaatccaacacacatatc

SEQ ID NO: 358364 - DNA, 55 bp, Artificial
  Synthetic oligonucleotide
cccatccccggagcgttcaaccagatgtcccggttcagtgaccgactgagtatcc

SEQ ID NO: 358365 - DNA, 55 bp, Artificial
  Synthetic oligonucleotide
cccatcgaacaaaatgaactggaagggagctctagtccgcttgaaattcgacgta

SEQ ID NO: 358366 - DNA, 54 bp, Artificial
  Synthetic oligonucleotide
cccatcgaatgcttgcctaatgtgtgcactaatgtaaccaatgtacatcctacg

SEQ ID NO: 358367 - DNA, 55 bp, Artificial
  Synthetic oligonucleotide
cccatcgagcactcatgctgtcacttggggtcctaatgtgttccacactgattgg

SEQ ID NO: 358368 - DNA, 59 bp, Artificial
  Synthetic oligonucleotide
cccatcgcaggacaaattaagtgttcatcaaatattacagggttgctgttaacaagaga

SEQ ID NO: 358369 - DNA, 55 bp, Artificial
  Synthetic oligonucleotide
cccatcgcctaccggtcgaccacatgtacacctgacgattaacgaacgagccggc

SEQ ID NO: 358370 - DNA, 57 bp, Artificial
  Synthetic oligonucleotide
cccatcgcgaagcaaaggttgtgcagtagcggaatctacttaagccccttctcttac

SEQ ID NO: 358371 - DNA, 59 bp, Artificial
  Synthetic oligonucleotide
cccatcgcgatgttcctctctggcgacacggatgtacgtcggtttgacgatcgaccaag

SEQ ID NO: 358372 - DNA, 60 bp, Artificial
  Synthetic oligonucleotide
cccatcgcgatgttcctctcttgcgactctgatatacgtcggtttgacgactgaccaaga

SEQ ID NO: 358373 - DNA, 55 bp, Artificial
  Synthetic oligonucleotide
cccatcgctggggctgtctccgcttctggttctggtggagactatgactctggcg

SEQ ID NO: 358374 - DNA, 55 bp, Artificial
  Synthetic oligonucleotide
cccatcggatcacgaactgtaccatcggagtctagaaacgcgattggcagactcc

SEQ ID NO: 358375 - DNA, 59 bp, Artificial
  Synthetic oligonucleotide
cccatcggatggccgctcctgtaaaagaaagtggtccccgcgcatgtgttgctgtcggc

SEQ ID NO: 358376 - DNA, 53 bp, Artificial
  Synthetic oligonucleotide
cccatcgtatttgttcagacatctacacgtgctgcacgaattgttccacacac

SEQ ID NO: 358377 - DNA, 54 bp, Artificial
  Synthetic oligonucleotide
cccatcgtgtagggaaacgtttttgcgtgaagtccgtctacattttgggcaaga

SEQ ID NO: 358378 - DNA, 60 bp, Artificial
  Synthetic oligonucleotide
cccatctactatcactcaagcttacctagtgtataataataacagcgtgttcttgtcagc

SEQ ID NO: 358379 - DNA, 54 bp, Artificial
  Synthetic oligonucleotide
cccatctattattctaaaaatgggagcgcagcgaaacgaaaaaccgaaattgac

SEQ ID NO: 358380 - DNA, 60 bp, Artificial
  Synthetic oligonucleotide
cccatctcatcatgcgtcagttcaagaggaacgtactctcggaaccagtaagtactcaaa

SEQ ID NO: 358381 - DNA, 60 bp, Artificial
  Synthetic oligonucleotide
cccatctcatgttcagtccacagatgttgtttccttgtgctggtgggtctgtgtactgag

SEQ ID NO: 358382 - DNA, 55 bp, Artificial
  Synthetic oligonucleotide
cccatctccccagatactgttcttcaatctgccaattcctatctgtctggtacca

SEQ ID NO: 358383 - DNA, 60 bp, Artificial
  Synthetic oligonucleotide
cccatctctcctagtcgccgcctggtcactcggtgctcaactgagataaagaccctggtc

SEQ ID NO: 358384 - DNA, 55 bp, Artificial
  Synthetic oligonucleotide
cccatctgaagttcaaggactcgagttcgaagaagtcactctcgtgtatcactcc

SEQ ID NO: 358385 - DNA, 55 bp, Artificial
  Synthetic oligonucleotide
cccatctgccagcatggaatggaggataatgaaagagaagtgctggtatggaaat

SEQ ID NO: 358386 - DNA, 51 bp, Artificial
  Synthetic oligonucleotide
cccatcttccagttaatctatgggggcgtgatatattaagcaaaatgggtg

SEQ ID NO: 358387 - DNA, 60 bp, Artificial
  Synthetic oligonucleotide
cccatcttgagaaacagcgagctcgtaagacagacgatgctcgcccctactgtatgaaac

SEQ ID NO: 358388 - DNA, 60 bp, Artificial
  Synthetic oligonucleotide
cccatcttgccttgtctgcgccagaattctctcttgctgcgtgttttccaccaacagcag

SEQ ID NO: 358389 - DNA, 60 bp, Artificial
  Synthetic oligonucleotide
cccatcttggatgtcgcaatttgctggtcggtcccgtgagattattcacacccttggcgc

SEQ ID NO: 358390 - DNA, 55 bp, Artificial
  Synthetic oligonucleotide
cccatgaacactttcactatacagtaaccgacacaaaggatttgaccaaactagg

SEQ ID NO: 358391 - DNA, 56 bp, Artificial
  Synthetic oligonucleotide
cccatgaagaaatgtagctcggaaccttgttaaatgactccagtgtaaaaggcgac

SEQ ID NO: 358392 - DNA, 57 bp, Artificial
  Synthetic oligonucleotide
cccatgaagagccatttttccactggttttaaacagaaaccccactatgtctgcaca

SEQ ID NO: 358393 - DNA, 60 bp, Artificial
  Synthetic oligonucleotide
cccatgacagttgatactgagataatatgagcagccgcagtctaagtcaatacgtctcct

SEQ ID NO: 358394 - DNA, 58 bp, Artificial
  Synthetic oligonucleotide
cccatgactggtattatgaccagcctagggtaaggatatgccaaaggtgttttcagaa

SEQ ID NO: 358395 - DNA, 55 bp, Artificial
  Synthetic oligonucleotide
cccatgagcgccctctggtgaaagccactatttcttgcaccaacctcccgccgga

SEQ ID NO: 358396 - DNA, 59 bp, Artificial
  Synthetic oligonucleotide
cccatgagtatcgtctttcttggtgctaaaagtgaacccgttgctgacatgttatatcg

SEQ ID NO: 358397 - DNA, 56 bp, Artificial
  Synthetic oligonucleotide
cccatgagtatgaccatgaattttagggaactattaaaaactttaggagccacaga

SEQ ID NO: 358398 - DNA, 59 bp, Artificial
  Synthetic oligonucleotide
cccatgataataaaacaacaccttatggaatcaatgtgttaaatcatatgggttctata

SEQ ID NO: 358399 - DNA, 51 bp, Artificial
  Synthetic oligonucleotide
cccatgatagtgaggagaatactaggtttagtattctctgaaactagtcct

SEQ ID NO: 358400 - DNA, 55 bp, Artificial
  Synthetic oligonucleotide
cccatgatggaaagggcctacaaatattataggctagtacaaaaggctctctttg

SEQ ID NO: 358401 - DNA, 60 bp, Artificial
  Synthetic oligonucleotide
cccatgattctgaagagcgccattgacaaacgattaagaacagctgtcttggctccgact

SEQ ID NO: 358402 - DNA, 59 bp, Artificial
  Synthetic oligonucleotide
cccatgatttgtgcttggttggtaaagaatggttaccaatctaccatggcaagctactg

SEQ ID NO: 358403 - DNA, 60 bp, Artificial
  Synthetic oligonucleotide
cccatgcaaatatgcttcccccctctgataattacaaccaatgttgatgttgcaaaggac

SEQ ID NO: 358404 - DNA, 55 bp, Artificial
  Synthetic oligonucleotide
cccatgcactactgttctgaattcattatgcaacctgatgatgtgtatctatacc

SEQ ID NO: 358405 - DNA, 55 bp, Artificial
  Synthetic oligonucleotide
cccatgcatataattttgtaccatctggtaaaatcttcctaggttcaaccatcag

SEQ ID NO: 358406 - DNA, 54 bp, Artificial
  Synthetic oligonucleotide
cccatgcccgaccccgctatttactcctgtgcctactcctactatccgtagggg

SEQ ID NO: 358407 - DNA, 59 bp, Artificial
  Synthetic oligonucleotide
cccatgcctgggttaacaggcctatgtacaggaagcccaggatatatcgggcttggaga

SEQ ID NO: 358408 - DNA, 60 bp, Artificial
  Synthetic oligonucleotide
cccatgcgaagaccaagaatggagatgtgccgtcgagtgatggaggcggtcgggacatgt

SEQ ID NO: 358409 - DNA, 60 bp, Artificial
  Synthetic oligonucleotide
cccatgcgtaaaccaaagccagggcttctttgcatcgcttatggcgatgacgtcaatgta

SEQ ID NO: 358410 - DNA, 51 bp, Artificial
  Synthetic oligonucleotide
cccatgcgtacacggtgtctcgactgtagggactgggctacccacaacggc

SEQ ID NO: 358411 - DNA, 60 bp, Artificial
  Synthetic oligonucleotide
cccatgcgtttagcgcatgataagggtttagtcttacacacaatggtaggccagtgatag

SEQ ID NO: 358412 - DNA, 55 bp, Artificial
  Synthetic oligonucleotide
cccatgctaaacgcaatatgatggaagaagaaatatccttagagaatagggcagt

SEQ ID NO: 358413 - DNA, 55 bp, Artificial
  Synthetic oligonucleotide
cccatgctaattgagcgggtcagggccataggttgccattttgtgctgttgtgca

SEQ ID NO: 358414 - DNA, 55 bp, Artificial
  Synthetic oligonucleotide
cccatgctctaatgaagatgaactaatgaaatgtaagattgccgctgctatttgc

SEQ ID NO: 358415 - DNA, 60 bp, Artificial
  Synthetic oligonucleotide
cccatggaaagcatggattccacttctgaatgcacacggcttcaagggagaccaacttca

SEQ ID NO: 358416 - DNA, 59 bp, Artificial
  Synthetic oligonucleotide
cccatggaatcagaggattgctcgatcgtggctctataattaggcaattctactacatc

SEQ ID NO: 358417 - DNA, 58 bp, Artificial
  Synthetic oligonucleotide
cccatggaatcctacctgaagattataactcaggcttggtcactctggaaccaataaa

SEQ ID NO: 358418 - DNA, 57 bp, Artificial
  Synthetic oligonucleotide
cccatggagaagcaaggtaactttgtagtgggccagaattgctctttgattataccg

SEQ ID NO: 358419 - DNA, 57 bp, Artificial
  Synthetic oligonucleotide
cccatggaggccgctacagggacggaaccaagtctatcacctattgcccgccacaac

SEQ ID NO: 358420 - DNA, 55 bp, Artificial
  Synthetic oligonucleotide
cccatggagtgttggaatgacaaaattctacactggatggaacacactccttagg

SEQ ID NO: 358421 - DNA, 55 bp, Artificial
  Synthetic oligonucleotide
cccatggataagaacacctctcccgggctcccttacactgcgttaggaatgcgca

SEQ ID NO: 358422 - DNA, 55 bp, Artificial
  Synthetic oligonucleotide
cccatggatcctacccattgcccgtcgctcatacaatgtgcaagcctcagaagcc

SEQ ID NO: 358423 - DNA, 55 bp, Artificial
  Synthetic oligonucleotide
cccatggatgagagatactctccgtcatcacttgccagattgtttaccatgggca

SEQ ID NO: 358424 - DNA, 51 bp, Artificial
  Synthetic oligonucleotide
cccatggattttgggcaagtgtttaatatgtttgacaatgagcctagtact

SEQ ID NO: 358425 - DNA, 55 bp, Artificial
  Synthetic oligonucleotide
cccatggccatattcaatcgagggtccttgccacaagttcgggatggaatgacat

SEQ ID NO: 358426 - DNA, 58 bp, Artificial
  Synthetic oligonucleotide
cccatggctcataactaagctccctactgttgaggactttaattaagaagactggata

SEQ ID NO: 358427 - DNA, 60 bp, Artificial
  Synthetic oligonucleotide
cccatgggacacgctgccggcatattccgtgcggcggtgtgcactcgaggggtggccaaa

SEQ ID NO: 358428 - DNA, 52 bp, Artificial
  Synthetic oligonucleotide
cccatggggtaatactactgttcctctttcactaccaggtgatatatttata

SEQ ID NO: 358429 - DNA, 60 bp, Artificial
  Synthetic oligonucleotide
cccatgggtgtttgcctgtgcacctgatagatgccctcctacatgcatttacattgctgg

SEQ ID NO: 358430 - DNA, 60 bp, Artificial
  Synthetic oligonucleotide
cccatggtcactgacatatactctatagaagaccatagactggaagacacaacccaccta

SEQ ID NO: 358431 - DNA, 60 bp, Artificial
  Synthetic oligonucleotide
cccatgtaaaataagacaaattgtaagaatgtggcaaaaagtagcacgagctatgtatgc

SEQ ID NO: 358432 - DNA, 52 bp, Artificial
  Synthetic oligonucleotide
cccatgtaacttagaagctattaaataaagttcaatagaagggggtacaaac

SEQ ID NO: 358433 - DNA, 56 bp, Artificial
  Synthetic oligonucleotide
cccatgtaaggtccagtcctttgaagcccgtcatgacctggcccatactggtaagg

SEQ ID NO: 358434 - DNA, 52 bp, Artificial
  Synthetic oligonucleotide
cccatgtatatgatgttaacactaatgctggctacactatcaaggatacagc

SEQ ID NO: 358435 - DNA, 60 bp, Artificial
  Synthetic oligonucleotide
cccatgtatcgcaagccaaggttgtaccgaatgtacagaagccctgatgtgccttatggc

SEQ ID NO: 358436 - DNA, 55 bp, Artificial
  Synthetic oligonucleotide
cccatgtcagagcatgcgttgattgtgtcattcggtatatttccaacggttccag

SEQ ID NO: 358437 - DNA, 59 bp, Artificial
  Synthetic oligonucleotide
cccatgtcagtcaaaacctgtgatgaagagtgctgcccagttaactttaagaagtgttg

SEQ ID NO: 358438 - DNA, 58 bp, Artificial
  Synthetic oligonucleotide
cccatgtcatagaccggcagcaagatttccggtttattgaagaacagtcctaccgcac

SEQ ID NO: 358439 - DNA, 55 bp, Artificial
  Synthetic oligonucleotide
cccatgtcatcaaactgcctatcaaggttggcatgaatgctatagaagatggccc

SEQ ID NO: 358440 - DNA, 57 bp, Artificial
  Synthetic oligonucleotide
cccatgtgaaccaggtgattgtggtggtaaattgttgtgtaagcacggtgtaatagg

SEQ ID NO: 358441 - DNA, 55 bp, Artificial
  Synthetic oligonucleotide
cccatgtgatgaggtggcgcttcaagaatatcgtacagtagcccggtctttgccg

SEQ ID NO: 358442 - DNA, 55 bp, Artificial
  Synthetic oligonucleotide
cccatgtgcataaactctaggggttggatgtacttgagggttaaggttgacggta

SEQ ID NO: 358443 - DNA, 60 bp, Artificial
  Synthetic oligonucleotide
cccatgtgcatccacaatcgtgcaactgtacagaatccagaaatctggctttgatctaga

SEQ ID NO: 358444 - DNA, 57 bp, Artificial
  Synthetic oligonucleotide
cccatgtggcatcaacgtccgacgaggttaacggtagtgctttcaaaataacacgca

SEQ ID NO: 358445 - DNA, 53 bp, Artificial
  Synthetic oligonucleotide
cccatgtgtcagtccttcaggaaagacctcctctagaaaaaagggtaattacc

SEQ ID NO: 358446 - DNA, 60 bp, Artificial
  Synthetic oligonucleotide
cccatgttattaaatcttttcgattgcgtctgtgggacaggaatacagtggactgtagca

SEQ ID NO: 358447 - DNA, 55 bp, Artificial
  Synthetic oligonucleotide
cccatgttcactataaagaagttttgggatcacatcgcgcagttgtttgcactgc

SEQ ID NO: 358448 - DNA, 55 bp, Artificial
  Synthetic oligonucleotide
cccatgttcatggctctgtcagaaggagccacccctcaagatctaaacaccatgc

SEQ ID NO: 358449 - DNA, 55 bp, Artificial
  Synthetic oligonucleotide
cccatgttttacttcccagttcccgctggtagctggtcagtcgacataacctgtg

SEQ ID NO: 358450 - DNA, 55 bp, Artificial
  Synthetic oligonucleotide
cccattaagactgaggcagccttcaagttggcgatcgacgcttacaagaatttcg

SEQ ID NO: 358451 - DNA, 59 bp, Artificial
  Synthetic oligonucleotide
cccattacactcacgagctcatatccgaaccgtctgttaggaatttttccgtcacagca

SEQ ID NO: 358452 - DNA, 56 bp, Artificial
  Synthetic oligonucleotide
cccattaccgcgcttgggctcgaccttattacaggttggcgggaatccctcatata

SEQ ID NO: 358453 - DNA, 60 bp, Artificial
  Synthetic oligonucleotide
cccattacgcggacctcaaccgcgtgactgagggcgaacgagaagtgcggtatatgcgca

SEQ ID NO: 358454 - DNA, 55 bp, Artificial
  Synthetic oligonucleotide
cccattagaaccaactgtgaatcctctaaatgcatagttccaaagtctcaagatc

SEQ ID NO: 358455 - DNA, 54 bp, Artificial
  Synthetic oligonucleotide
cccattagaatatcaaagggtaataggtgatttaaatagggtaatagatggtgg

SEQ ID NO: 358456 - DNA, 60 bp, Artificial
  Synthetic oligonucleotide
cccattagcatctctcttggaaatgtgccacagcacacagattggaggaataaggatggt

SEQ ID NO: 358457 - DNA, 52 bp, Artificial
  Synthetic oligonucleotide
cccattaggaagaagagacgttccgggacgacgtaccagaataatttttata

SEQ ID NO: 358458 - DNA, 55 bp, Artificial
  Synthetic oligonucleotide
cccattagtaaaattatggtatagtttagagacagaccctataccaacggcagac

SEQ ID NO: 358459 - DNA, 55 bp, Artificial
  Synthetic oligonucleotide
cccattataagtgacccaatacatgaggctactcaagctcacaccctacatcacc

SEQ ID NO: 358460 - DNA, 55 bp, Artificial
  Synthetic oligonucleotide
cccattatacgatacatggaacgtcaatggcagaggcgatgatgctaaaagaggc

SEQ ID NO: 358461 - DNA, 53 bp, Artificial
  Synthetic oligonucleotide
cccattatgagaacaccccccaaggaataccaacactgtaactattacctgtt

SEQ ID NO: 358462 - DNA, 55 bp, Artificial
  Synthetic oligonucleotide
cccattattcttaaggctttatacatgctttcaacgcgtgggagacagactgtga

SEQ ID NO: 358463 - DNA, 60 bp, Artificial
  Synthetic oligonucleotide
cccattattgagagcgagggggagatgaacgatactcctcaagacgacgaggcagagaag

SEQ ID NO: 358464 - DNA, 51 bp, Artificial
  Synthetic oligonucleotide
cccattatttcctttcccaaaatacccctgtccctctgtctggtaggcgcg

SEQ ID NO: 358465 - DNA, 51 bp, Artificial
  Synthetic oligonucleotide
cccattcaaaatggcgggcgggacacaaaatggcggagggactaagggggg

SEQ ID NO: 358466 - DNA, 53 bp, Artificial
  Synthetic oligonucleotide
cccattcatttccccgacacactaccgccaaacttcttatacaaccccctcaa

SEQ ID NO: 358467 - DNA, 59 bp, Artificial
  Synthetic oligonucleotide
cccattccagtgtgtccccgtccttatcaatatatgacttgacgtcggagctggattta

SEQ ID NO: 358468 - DNA, 59 bp, Artificial
  Synthetic oligonucleotide
cccattccatacacttgtgcctttatgattaacagtctccacagaaactcttgtaagct

SEQ ID NO: 358469 - DNA, 59 bp, Artificial
  Synthetic oligonucleotide
cccattccatagggccagcatcctgatccattttaaaaatgcgatcgtttgttgtggta

SEQ ID NO: 358470 - DNA, 57 bp, Artificial
  Synthetic oligonucleotide
cccattccctgtttgagccgcagcgatgggttcccctgtgggtgaatccatggtcgt

SEQ ID NO: 358471 - DNA, 59 bp, Artificial
  Synthetic oligonucleotide
cccattcctggccctcggtcgtctgcacgcctggggttatattctagagcaacgcaaca

SEQ ID NO: 358472 - DNA, 50 bp, Artificial
  Synthetic oligonucleotide
cccattcgccgcacatatccatacacgcgtgccacgccgttagctggccc

SEQ ID NO: 358473 - DNA, 60 bp, Artificial
  Synthetic oligonucleotide
cccattcggcctaaagcaagcaccaagcatatttcaaagacatatgcagacagccttaaa

SEQ ID NO: 358474 - DNA, 60 bp, Artificial
  Synthetic oligonucleotide
cccattctcgagcaggctgcggtcattgactccgacgctttaggagactctcttcgtccc

SEQ ID NO: 358475 - DNA, 60 bp, Artificial
  Synthetic oligonucleotide
cccattctctcgttgcactcgacgtcccagacgccgctctcccgtcgatgccacgcgctt

SEQ ID NO: 358476 - DNA, 57 bp, Artificial
  Synthetic oligonucleotide
cccattcttgagggaaacgccacgccctctcagattacctgatggaccaccctgttc

SEQ ID NO: 358477 - DNA, 53 bp, Artificial
  Synthetic oligonucleotide
cccattgaaaccaactaccagtagttctatccaactagcacctccacctaacc

SEQ ID NO: 358478 - DNA, 55 bp, Artificial
  Synthetic oligonucleotide
cccattgaaccatgtaaattgtttcggtctgttgcggggcagactgggaacatac

SEQ ID NO: 358479 - DNA, 55 bp, Artificial
  Synthetic oligonucleotide
cccattgacaactgcaattctgaatgcgtcactccaaatggaagcattcccaatg

SEQ ID NO: 358480 - DNA, 55 bp, Artificial
  Synthetic oligonucleotide
cccattgacatatcaaccgaactgagtaaggttaatgcatccctccaaaatgccg

SEQ ID NO: 358481 - DNA, 59 bp, Artificial
  Synthetic oligonucleotide
cccattgacggtgtggtgctggaacgattggaattctccggccgctatttgtggatgtc

SEQ ID NO: 358482 - DNA, 60 bp, Artificial
  Synthetic oligonucleotide
cccattgatctcaggcctgagagtggttcagtgggcgacaggggctcattacaagctcaa

SEQ ID NO: 358483 - DNA, 55 bp, Artificial
  Synthetic oligonucleotide
cccattgcacacagagatatggtcataatccaattacccaaagacttcccaccat

SEQ ID NO: 358484 - DNA, 60 bp, Artificial
  Synthetic oligonucleotide
cccattgcagagccactgaatacataatgaagggggtatacattaatactgccttgctta

SEQ ID NO: 358485 - DNA, 59 bp, Artificial
  Synthetic oligonucleotide
cccattgcatttgggtaaatgtaacattgctggatggctcctagggaacccagagtgtg

SEQ ID NO: 358486 - DNA, 58 bp, Artificial
  Synthetic oligonucleotide
cccattgccacactagtgttgacagcccacaacttggcctacttgaacacccgtgaaa

SEQ ID NO: 358487 - DNA, 55 bp, Artificial
  Synthetic oligonucleotide
cccattgcgagaaacttcaaggttgttcagcagcttcatttggataacttcattg

SEQ ID NO: 358488 - DNA, 60 bp, Artificial
  Synthetic oligonucleotide
cccattggcacgctctaggcgcagcgcaagaagctaaaggacgcactttgaatgaggcat

SEQ ID NO: 358489 - DNA, 60 bp, Artificial
  Synthetic oligonucleotide
cccatttaatgaacctaggggatggtcagatattatgcggtttgatgatgtcgttcagta

SEQ ID NO: 358490 - DNA, 52 bp, Artificial
  Synthetic oligonucleotide
cccatttaatgccctcccttcggcccctctattccccgggcccagcgttgag

SEQ ID NO: 358491 - DNA, 60 bp, Artificial
  Synthetic oligonucleotide
cccatttacgactgaggctgcaaatgagatagcgcgtgtgactggcgagacgacaacatg

SEQ ID NO: 358492 - DNA, 55 bp, Artificial
  Synthetic oligonucleotide
cccatttattgttcatgctcgaatgaatggtggactccgaaggatcatgcgcaac

SEQ ID NO: 358493 - DNA, 57 bp, Artificial
  Synthetic oligonucleotide
cccatttatttgggatcgctccattacgatgtgtctttcgcagacttacgtggaaac

SEQ ID NO: 358494 - DNA, 60 bp, Artificial
  Synthetic oligonucleotide
cccatttcagaattgggtgtccacatagcagaataggcattactcgacagaggagtgcaa

SEQ ID NO: 358495 - DNA, 60 bp, Artificial
  Synthetic oligonucleotide
cccatttcagatgcatgtgttaaggagcttgtagctgaactgaggtggcaatataatagg

SEQ ID NO: 358496 - DNA, 55 bp, Artificial
  Synthetic oligonucleotide
cccatttcagtgacgtagctgaagcgtacattgaaaagcgtaaccaagaccgacc

SEQ ID NO: 358497 - DNA, 50 bp, Artificial
  Synthetic oligonucleotide
cccatttcgagaggctggaatgacagcggcccagaaggaagaattggcta

SEQ ID NO: 358498 - DNA, 59 bp, Artificial
  Synthetic oligonucleotide
cccatttcttatgccaacgtgtccggtccgtctgaagacaagccttactgctggcacta

SEQ ID NO: 358499 - DNA, 55 bp, Artificial
  Synthetic oligonucleotide
cccatttgagctgcaaccagaactactagcttctgctggtaagaaatacggcttg

SEQ ID NO: 358500 - DNA, 57 bp, Artificial
  Synthetic oligonucleotide
cccatttgcaatgtttaacatgtgacagaggcgtgcttatactgctgctaattaggt

SEQ ID NO: 358501 - DNA, 55 bp, Artificial
  Synthetic oligonucleotide
cccatttgcagcagggttgggaggcttcagatttaacctgttcaaggcaatcact

SEQ ID NO: 358502 - DNA, 55 bp, Artificial
  Synthetic oligonucleotide
cccatttgcggcacaaaattgtaaagctcgtcgggtccgtgtagagtgaacgcga

SEQ ID NO: 358503 - DNA, 55 bp, Artificial
  Synthetic oligonucleotide
cccatttggggaaatgtatattagtgcggatatagcccgttttggctcagataag

SEQ ID NO: 358504 - DNA, 55 bp, Artificial
  Synthetic oligonucleotide
cccatttgtgtacgaccctaatcctttagcagactacgaaatagcacacctcgat

SEQ ID NO: 358505 - DNA, 56 bp, Artificial
  Synthetic oligonucleotide
cccattttaaagtgtgtaagctcacatcaaggtttcaggacaatttaagaaagtca

SEQ ID NO: 358506 - DNA, 56 bp, Artificial
  Synthetic oligonucleotide
cccattttctgtgttaacttgtaagaaatgtgcttacctgtctggattacaaagct

SEQ ID NO: 358507 - DNA, 58 bp, Artificial
  Synthetic oligonucleotide
ccccaaaaatggtcttacactcaggcctgtgcctctctggataaaacaacatccagtg

SEQ ID NO: 358508 - DNA, 55 bp, Artificial
  Synthetic oligonucleotide
ccccaaaaccagcgtagtgccccccgcattacatttggtggaccctcagattcaa

SEQ ID NO: 358509 - DNA, 52 bp, Artificial
  Synthetic oligonucleotide
ccccaaaaccagctcaaactttcgaaatcaaacctgggccaataatagttcc

SEQ ID NO: 358510 - DNA, 54 bp, Artificial
  Synthetic oligonucleotide
ccccaaaaccttgtggtatcgtgtccgcgttgagcgtgtgtggcccggtatatt

SEQ ID NO: 358511 - DNA, 50 bp, Artificial
  Synthetic oligonucleotide
ccccaaaactcacccgtacgctctacccggggtccatactcagcaccggg

SEQ ID NO: 358512 - DNA, 54 bp, Artificial
  Synthetic oligonucleotide
ccccaaaagtattagccggtaactcctccctttgccccatcagtggatgggcca

SEQ ID NO: 358513 - DNA, 58 bp, Artificial
  Synthetic oligonucleotide
ccccaaaagtgcagtgtggaggctcctcgaccagaggaccaaactacgcgtgagcacc

SEQ ID NO: 358514 - DNA, 53 bp, Artificial
  Synthetic oligonucleotide
ccccaaaagtggaaggagtgttctctctggtggttgttgtggatcgtaaaccc

SEQ ID NO: 358515 - DNA, 49 bp, Artificial
  Synthetic oligonucleotide
ccccaaaatacccagaggttaagaacccacagtccgcctccaaccccgt

SEQ ID NO: 358516 - DNA, 54 bp, Artificial
  Synthetic oligonucleotide
ccccaaaatcgtagggttctacacattgtatggtttgattaggttctagttcgc

SEQ ID NO: 358517 - DNA, 57 bp, Artificial
  Synthetic oligonucleotide
ccccaaacaatcaagtaatgccatgtgaaccaatgataatagaaaggaacataacag

SEQ ID NO: 358518 - DNA, 58 bp, Artificial
  Synthetic oligonucleotide
ccccaaacactacctagatacatggattgggatgcttaatccttgcgttcgttggctg

SEQ ID NO: 358519 - DNA, 59 bp, Artificial
  Synthetic oligonucleotide
ccccaaactacacacttcttctggtgcatttgcttataaacatgatgttgaaggcctat

SEQ ID NO: 358520 - DNA, 58 bp, Artificial
  Synthetic oligonucleotide
ccccaaagacatgatgtttgtcatatttggagtgtgtccacgttacgttcttatggga

SEQ ID NO: 358521 - DNA, 50 bp, Artificial
  Synthetic oligonucleotide
ccccaaagattactggaagactgttacacaatcactacagcgcgggaggc

SEQ ID NO: 358522 - DNA, 53 bp, Artificial
  Synthetic oligonucleotide
ccccaaagcccattacaaacttaggttcaagctcatttaattcgaacccatta

SEQ ID NO: 358523 - DNA, 51 bp, Artificial
  Synthetic oligonucleotide
ccccaaagcggcttgaaccccgccggaggttctggtttatgtaggggtggc

SEQ ID NO: 358524 - DNA, 55 bp, Artificial
  Synthetic oligonucleotide
ccccaaagctacagaggccaatcgactcatggtgcaacacttcctgctccgaagg

SEQ ID NO: 358525 - DNA, 56 bp, Artificial
  Synthetic oligonucleotide
ccccaaaggcatattcagctacaaaatataatcgtaatcgaggaataattaacgaa

SEQ ID NO: 358526 - DNA, 49 bp, Artificial
  Synthetic oligonucleotide
ccccaaagggccgctccaacccccccgctaaaacggccgataaccactc

SEQ ID NO: 358527 - DNA, 54 bp, Artificial
  Synthetic oligonucleotide
ccccaaaggggtgctttaaaaaaggagggttcactgttgatgtgctctttgaca

SEQ ID NO: 358528 - DNA, 56 bp, Artificial
  Synthetic oligonucleotide
ccccaaaggtgaggatcatgatcctgatcaggatgggcagggactgatgaggatta

SEQ ID NO: 358529 - DNA, 52 bp, Artificial
  Synthetic oligonucleotide
ccccaaagtacactatctacaggtgccgccataattgttgcccttagattat

SEQ ID NO: 358530 - DNA, 55 bp, Artificial
  Synthetic oligonucleotide
ccccaaagtataatgcacagaaaccaattactaagacgaaagcaaactcgtggat

SEQ ID NO: 358531 - DNA, 56 bp, Artificial
  Synthetic oligonucleotide
ccccaaatatattggagtgaagagtctcaaactggcagtcggtttaaggaatgtac

SEQ ID NO: 358532 - DNA, 56 bp, Artificial
  Synthetic oligonucleotide
ccccaaatcgtgacacagtaaaattacaccgtgaactctctagcacaagttgtccg

SEQ ID NO: 358533 - DNA, 55 bp, Artificial
  Synthetic oligonucleotide
ccccaaatgccaacgccatcacatacacgccccaaccagacagaattgtgaccac

SEQ ID NO: 358534 - DNA, 55 bp, Artificial
  Synthetic oligonucleotide
ccccaaatgccacgaccaaaagatacattgtgacgaagtatgcatcagttgaggt

SEQ ID NO: 358535 - DNA, 58 bp, Artificial
  Synthetic oligonucleotide
ccccaaatgcttgcaaggttaacggcacatattttctcctgaggggcccttatgatgc

SEQ ID NO: 358536 - DNA, 55 bp, Artificial
  Synthetic oligonucleotide
ccccaaattcctgccgctcctgacgcgattgacctggaaccgtttacagaagatg

SEQ ID NO: 358537 - DNA, 54 bp, Artificial
  Synthetic oligonucleotide
ccccaacaaagtgctcaaatgcttaagtgggaggactctgaaggcaataatggt

SEQ ID NO: 358538 - DNA, 52 bp, Artificial
  Synthetic oligonucleotide
ccccaacaaccttttgcggggacaacaatccgtggacactactacacgggga

SEQ ID NO: 358539 - DNA, 59 bp, Artificial
  Synthetic oligonucleotide
ccccaacaatgcaatgtgacatgctccagctgaaacctggaagatattcagtaagaagc

SEQ ID NO: 358540 - DNA, 55 bp, Artificial
  Synthetic oligonucleotide
ccccaacaccaagaacccaactctcatggacggtctactgaccattacgcctatc

SEQ ID NO: 358541 - DNA, 58 bp, Artificial
  Synthetic oligonucleotide
ccccaacactcaaatgtgaggtgcgtttgcagggacaactggaagggctctaataggc

SEQ ID NO: 358542 - DNA, 51 bp, Artificial
  Synthetic oligonucleotide
ccccaacagacagaaagcaggcgatgctaggaacgcacattatttgggact

SEQ ID NO: 358543 - DNA, 55 bp, Artificial
  Synthetic oligonucleotide
ccccaacaggcagttagataacagccttccacccgccaagatggaatgattgaga

SEQ ID NO: 358544 - DNA, 55 bp, Artificial
  Synthetic oligonucleotide
ccccaacatgtatgttcctgtcggtgctgtaactgaacagggatatctcaatctc

SEQ ID NO: 358545 - DNA, 51 bp, Artificial
  Synthetic oligonucleotide
ccccaaccaaagggaccaccagggaaggctctgccgacccagcacagaccc

SEQ ID NO: 358546 - DNA, 51 bp, Artificial
  Synthetic oligonucleotide
ccccaaccgacctggagccttggtactccgtccgggatggtggtttaggta

SEQ ID NO: 358547 - DNA, 54 bp, Artificial
  Synthetic oligonucleotide
ccccaaccggaggagctgaatcaactagtcattccccgtaagtgggttaggtca

SEQ ID NO: 358548 - DNA, 51 bp, Artificial
  Synthetic oligonucleotide
ccccaacctcccatcgaatccaaagttacctttgcccaacccattgagagt

SEQ ID NO: 358549 - DNA, 55 bp, Artificial
  Synthetic oligonucleotide
ccccaacctgctccttataagatagtgcaaattttaatcttccagagtcaggacc

SEQ ID NO: 358550 - DNA, 53 bp, Artificial
  Synthetic oligonucleotide
ccccaacgagccattaaaggtggagttaacctcactagcagaaaaccaatggg

SEQ ID NO: 358551 - DNA, 56 bp, Artificial
  Synthetic oligonucleotide
ccccaacgctttcctcaggttgcgattgaaccgcacttggactgttatgatgtcgt

SEQ ID NO: 358552 - DNA, 55 bp, Artificial
  Synthetic oligonucleotide
ccccaacgctttcctcaggttgtaattgaactgtatttgtacggtgatgatgtcc

SEQ ID NO: 358553 - DNA, 55 bp, Artificial
  Synthetic oligonucleotide
ccccaacgctttcctcaggttgtagttgaattggacctgtaatgtgattatgtcg

SEQ ID NO: 358554 - DNA, 53 bp, Artificial
  Synthetic oligonucleotide
ccccaacggatgccccttgctgtcaaccaaatcaagccccaaggaaactctgt

SEQ ID NO: 358555 - DNA, 57 bp, Artificial
  Synthetic oligonucleotide
ccccaacgtctcaagacagtccctcgcgagacaacttgacgcagtcttcctcacccc

SEQ ID NO: 358556 - DNA, 57 bp, Artificial
  Synthetic oligonucleotide
ccccaacgtgcgggctcccctctcccacgtagttcgagcagccaccacagatctccc

SEQ ID NO: 358557 - DNA, 55 bp, Artificial
  Synthetic oligonucleotide
ccccaactaccacgaaaggatcctcattgatgactttcctgaaggagctaccgca

SEQ ID NO: 358558 - DNA, 52 bp, Artificial
  Synthetic oligonucleotide
ccccaactccgtacatctgctcgaagtttctactcacagatgagttgggcca

SEQ ID NO: 358559 - DNA, 55 bp, Artificial
  Synthetic oligonucleotide
ccccaactctgatgactgatgattggatcgcccatgtcagtaagcaggcctatcg

SEQ ID NO: 358560 - DNA, 60 bp, Artificial
  Synthetic oligonucleotide
ccccaactgaggagcgggagcacgttatagagagatgctgtcgggcataccaagcagcca

SEQ ID NO: 358561 - DNA, 55 bp, Artificial
  Synthetic oligonucleotide
ccccaactgctcctgtggccaaagtgcagagtacggatgaatacgtgattccaac

SEQ ID NO: 358562 - DNA, 55 bp, Artificial
  Synthetic oligonucleotide
ccccaacttgaatgttagttgcttacttcaggctggtttaccaaagtcttgcttg

SEQ ID NO: 358563 - DNA, 55 bp, Artificial
  Synthetic oligonucleotide
ccccaacttgtaacggtacaatccacagctgcaaattatgaagaccctctccaac

SEQ ID NO: 358564 - DNA, 53 bp, Artificial
  Synthetic oligonucleotide
ccccaagaaatacgactatgaagtgggttacaacgattcgggcttaggtccga

SEQ ID NO: 358565 - DNA, 58 bp, Artificial
  Synthetic oligonucleotide
ccccaagaacacatggcaaggagtagatactagtagcggagtttcgagtgcttgcccc

SEQ ID NO: 358566 - DNA, 55 bp, Artificial
  Synthetic oligonucleotide
ccccaagaactttggtcgtcgcacctaacgcaggacagctgcaacgggcactttt

SEQ ID NO: 358567 - DNA, 57 bp, Artificial
  Synthetic oligonucleotide
ccccaagaattcttctggcgagcggactaccactaatgtcaaccactttcgccattg

SEQ ID NO: 358568 - DNA, 51 bp, Artificial
  Synthetic oligonucleotide
ccccaagacaaccaactcgcatatgtcgtgataggcatacttacactggct

SEQ ID NO: 358569 - DNA, 55 bp, Artificial
  Synthetic oligonucleotide
ccccaagacccgtgcttagtgcatggctgcatagtgtgtgctcatggcctgataa

SEQ ID NO: 358570 - DNA, 55 bp, Artificial
  Synthetic oligonucleotide
ccccaagaccttgtggtattgtgccagcaaagagcgtctgcggcccggtatattg

SEQ ID NO: 358571 - DNA, 53 bp, Artificial
  Synthetic oligonucleotide
ccccaagataacttcctccaagtggagacaagatgcccctgtggttacaagat

SEQ ID NO: 358572 - DNA, 52 bp, Artificial
  Synthetic oligonucleotide
ccccaagattaaagttcccaacattaaggtccctattgccttttcctctaca

SEQ ID NO: 358573 - DNA, 55 bp, Artificial
  Synthetic oligonucleotide
ccccaagcaaactctcaagaaaccagttctccgtacagcaacagtgcagggacct

SEQ ID NO: 358574 - DNA, 51 bp, Artificial
  Synthetic oligonucleotide
ccccaagcaacgttaatggaggacccggagtcaagggatttggtttcaaag

SEQ ID NO: 358575 - DNA, 55 bp, Artificial
  Synthetic oligonucleotide
ccccaagcaagtactcaagagacctgttctccgcacggcgacagtgcagggtccg

SEQ ID NO: 358576 - DNA, 55 bp, Artificial
  Synthetic oligonucleotide
ccccaagcacccctaaatatgctgacatcatatgttttgtttcaggatgtaagga

SEQ ID NO: 358577 - DNA, 52 bp, Artificial
  Synthetic oligonucleotide
ccccaagcccgtgtggccatcaagtccctcactgagaggctttacgttgggg

SEQ ID NO: 358578 - DNA, 53 bp, Artificial
  Synthetic oligonucleotide
ccccaagcctccaaacgtcaacagaccagttaacaccggtggactaaaggcag

SEQ ID NO: 358579 - DNA, 54 bp, Artificial
  Synthetic oligonucleotide
ccccaagcgattagaagaactcctctacaaactttatctacacaccggcgccat

SEQ ID NO: 358580 - DNA, 52 bp, Artificial
  Synthetic oligonucleotide
ccccaagcgtcagccaaacggcacgtgcgagcccaaccctcgcctcaacttc

SEQ ID NO: 358581 - DNA, 55 bp, Artificial
  Synthetic oligonucleotide
ccccaagctattggagtgccatgtacacaggtgatgccaattacacgacgtccag

SEQ ID NO: 358582 - DNA, 55 bp, Artificial
  Synthetic oligonucleotide
ccccaagctcaggaacgcctgcaacatataaagcagttggagggcatcgatcagg

SEQ ID NO: 358583 - DNA, 55 bp, Artificial
  Synthetic oligonucleotide
ccccaaggaaagatcatggcccaaacacaacgtaaccagaggcgtaacggcatca

SEQ ID NO: 358584 - DNA, 58 bp, Artificial
  Synthetic oligonucleotide
ccccaaggactgcttttagaaggtcctcactgttgcttggcttgattagaatggactc

SEQ ID NO: 358585 - DNA, 55 bp, Artificial
  Synthetic oligonucleotide
ccccaaggagacgccggacagtgggtctgagtgagagctccatagcagatgccct

SEQ ID NO: 358586 - DNA, 53 bp, Artificial
  Synthetic oligonucleotide
ccccaaggagcaaccttagagataatcccttctatccttgggcccccccttca

SEQ ID NO: 358587 - DNA, 60 bp, Artificial
  Synthetic oligonucleotide
ccccaaggcgcactctatgattccaagctatacatctgaagaccctgaaagcatttttgt

SEQ ID NO: 358588 - DNA, 55 bp, Artificial
  Synthetic oligonucleotide
ccccaaggctgcagaatgtatgctttgagccaaggcacaacactcagagggagac

SEQ ID NO: 358589 - DNA, 52 bp, Artificial
  Synthetic oligonucleotide
ccccaagggcccacgtggcggctagtactctggtacttcggtacctttgtac

SEQ ID NO: 358590 - DNA, 50 bp, Artificial
  Synthetic oligonucleotide
ccccaaggggtaccccggtcgggtgaccgagatcgttaatatcctcctcc

SEQ ID NO: 358591 - DNA, 56 bp, Artificial
  Synthetic oligonucleotide
ccccaagggtgacacttcaccaggagtataccgtatcatgagccgttacattttgg

SEQ ID NO: 358592 - DNA, 52 bp, Artificial
  Synthetic oligonucleotide
ccccaaggttacagcagatatcgactggagcttattaaaagatgaccagacc

SEQ ID NO: 358593 - DNA, 53 bp, Artificial
  Synthetic oligonucleotide
ccccaaggttaccgtacagagcgtatcttctcgtcaaattgtgggaaagaatt

SEQ ID NO: 358594 - DNA, 54 bp, Artificial
  Synthetic oligonucleotide
ccccaaggttgctcagccggtccccacctgcgaaattaccacctattctccacc

SEQ ID NO: 358595 - DNA, 52 bp, Artificial
  Synthetic oligonucleotide
ccccaaggtttctgggtatcaatacagggtgtttagggtccatttacctgac

SEQ ID NO: 358596 - DNA, 52 bp, Artificial
  Synthetic oligonucleotide
ccccaagtaatgtcaatggaggacccggagttaaggggtttggcttcaaatc

SEQ ID NO: 358597 - DNA, 53 bp, Artificial
  Synthetic oligonucleotide
ccccaagtaccctgaagtcaagaacccacagaccgcctccaatcccgttgttg

SEQ ID NO: 358598 - DNA, 55 bp, Artificial
  Synthetic oligonucleotide
ccccaagtccagaggtagaggaacaacgcacactacgcgtcctagagatgacgtc

SEQ ID NO: 358599 - DNA, 56 bp, Artificial
  Synthetic oligonucleotide
ccccaagtccgggagcacggccacaagtaaatggacagtcagggagaatcgacttc

SEQ ID NO: 358600 - DNA, 55 bp, Artificial
  Synthetic oligonucleotide
ccccaagtttgttgtcttgcaatatgtgggatccacttcttaatgaatttcctga

SEQ ID NO: 358601 - DNA, 60 bp, Artificial
  Synthetic oligonucleotide
ccccaataacgatgtatgagctacgaaatctcatgcgtttggacggattttcacatgtcg

SEQ ID NO: 358602 - DNA, 53 bp, Artificial
  Synthetic oligonucleotide
ccccaataacttgccgtgtaaacacctgtttagatgttaagagcgggaaacca

SEQ ID NO: 358603 - DNA, 55 bp, Artificial
  Synthetic oligonucleotide
ccccaataagaaatgttgggcctcaatcactattcctgatagggatggataatta

SEQ ID NO: 358604 - DNA, 50 bp, Artificial
  Synthetic oligonucleotide
ccccaatacgaacctatgggcctctactaattgcatccccgatgatgaac

SEQ ID NO: 358605 - DNA, 55 bp, Artificial
  Synthetic oligonucleotide
ccccaatactggcccctggtaaagcgccgaagcttagcacaaagaccaaattctg

SEQ ID NO: 358606 - DNA, 50 bp, Artificial
  Synthetic oligonucleotide
ccccaatactttagtttaaaagagtcggccattacgggtcacctcacggg

SEQ ID NO: 358607 - DNA, 54 bp, Artificial
  Synthetic oligonucleotide
ccccaatagagcttaaatctgtgctaattcaagacggctttatgtgtgatatag

SEQ ID NO: 358608 - DNA, 55 bp, Artificial
  Synthetic oligonucleotide
ccccaatagagtactgggtaggctggcgccctgttggggcaccagaaccttctgc

SEQ ID NO: 358609 - DNA, 51 bp, Artificial
  Synthetic oligonucleotide
ccccaataggggaacactgggcaaagggtactgtgtgttccggtgtgtccc

SEQ ID NO: 358610 - DNA, 54 bp, Artificial
  Synthetic oligonucleotide
ccccaataggtaaatgagcccccaattgagtccccaatatatcggggacgcgga

SEQ ID NO: 358611 - DNA, 60 bp, Artificial
  Synthetic oligonucleotide
ccccaataggtaaattgatctccgatatattggagatcaattggtgcctcataattggtg

SEQ ID NO: 358612 - DNA, 56 bp, Artificial
  Synthetic oligonucleotide
ccccaatatagagttctctatttcccccaacctgttctttatatgataatgcaaac

SEQ ID NO: 358613 - DNA, 55 bp, Artificial
  Synthetic oligonucleotide
ccccaatatgcatacactgcttggggtcagaaatacttaatctgaagaccgctcc

SEQ ID NO: 358614 - DNA, 56 bp, Artificial
  Synthetic oligonucleotide
ccccaatatgttcccccaatagctctggctctcaaaactcctatgaattgggggaa

SEQ ID NO: 358615 - DNA, 51 bp, Artificial
  Synthetic oligonucleotide
ccccaatcaaggtggccaaacccggggtggtagaggatacccaaatgggcc

SEQ ID NO: 358616 - DNA, 55 bp, Artificial
  Synthetic oligonucleotide
ccccaatcagctcctacagtccccttgtaggggctctataaatcagcccgtttgc

SEQ ID NO: 358617 - DNA, 56 bp, Artificial
  Synthetic oligonucleotide
ccccaatccgactcgtcggattggaatgacgttgtggctaccgagctcggtcttac

SEQ ID NO: 358618 - DNA, 55 bp, Artificial
  Synthetic oligonucleotide
ccccaatcgtagaggtgttgacaactgcacaacaaacaagtatgatggacgcacc

SEQ ID NO: 358619 - DNA, 54 bp, Artificial
  Synthetic oligonucleotide
ccccaatctaaagaaaccaacagtttggcgcagaggacactaagacctcccgag

SEQ ID NO: 358620 - DNA, 51 bp, Artificial
  Synthetic oligonucleotide
ccccaatctcaagtacggtttatgggtccccgacctatttatggaaatact

SEQ ID NO: 358621 - DNA, 60 bp, Artificial
  Synthetic oligonucleotide
ccccaatctcaatgcccttactgttttactcattgtgagcctacagaggcagcatttcaa

SEQ ID NO: 358622 - DNA, 55 bp, Artificial
  Synthetic oligonucleotide
ccccaatctgaacatcccgaacgtcagtccacatatcgcccgagtgagacggcag

SEQ ID NO: 358623 - DNA, 55 bp, Artificial
  Synthetic oligonucleotide
ccccaatctgtttaggtctctatatggatctagttgatcgttgccccgttcagag

SEQ ID NO: 358624 - DNA, 59 bp, Artificial
  Synthetic oligonucleotide
ccccaatgacctagcccacattgtcttacctgtcctactgtcaccttctatcacaatac

SEQ ID NO: 358625 - DNA, 55 bp, Artificial
  Synthetic oligonucleotide
ccccaatgatggggcaggcagttgcggtccggtgtcctctaacggggcatatgga

SEQ ID NO: 358626 - DNA, 55 bp, Artificial
  Synthetic oligonucleotide
ccccaatgcgtccgttgtgtacgagacggagaacctgatcatgcatctgcccggg

SEQ ID NO: 358627 - DNA, 55 bp, Artificial
  Synthetic oligonucleotide
ccccaatggcaaacctggacaataaaggtatgttgttcaccagcaactttgtatt

SEQ ID NO: 358628 - DNA, 55 bp, Artificial
  Synthetic oligonucleotide
ccccaatggcatattgaacatccgacggacgcaattggtgtaggactcagagccc

SEQ ID NO: 358629 - DNA, 55 bp, Artificial
  Synthetic oligonucleotide
ccccaatggtggtcccaatacagaacggaatcgataggctacgcagtagagcggg

SEQ ID NO: 358630 - DNA, 59 bp, Artificial
  Synthetic oligonucleotide
ccccaatggtggtccctatacagaatggagtcgatagattacgcagtagagcaggttta

SEQ ID NO: 358631 - DNA, 55 bp, Artificial
  Synthetic oligonucleotide
ccccaatggtggtcgcaatacagaacggaatcgacagattacgtagtagagcagg

SEQ ID NO: 358632 - DNA, 60 bp, Artificial
  Synthetic oligonucleotide
ccccaatgtggcagctgctcactccagcttcctgtacacttctgcaatcttcttgaccac

SEQ ID NO: 358633 - DNA, 50 bp, Artificial
  Synthetic oligonucleotide
ccccaatgtggttcactattctagtggaagaaacttgtgcccaataaagg

SEQ ID NO: 358634 - DNA, 50 bp, Artificial
  Synthetic oligonucleotide
ccccaattaagacagggctcctcgaccttactgaattgatgaaatcccag

SEQ ID NO: 358635 - DNA, 55 bp, Artificial
  Synthetic oligonucleotide
ccccaattcgagtattgtgtacgagacggctgatgccatcctacacactccgggg

SEQ ID NO: 358636 - DNA, 58 bp, Artificial
  Synthetic oligonucleotide
ccccaattctgacgcgccggtcatcaggtcaaaaacctccgccaggtacatggagctg

SEQ ID NO: 358637 - DNA, 58 bp, Artificial
  Synthetic oligonucleotide
ccccaattgaatatgttgcaagtatgaggaggaactattttacagcggaagtgtccca

SEQ ID NO: 358638 - DNA, 60 bp, Artificial
  Synthetic oligonucleotide
ccccaattgagcatattgcgagcatgagaaggaattatttcacagcggaagtatcccatt

SEQ ID NO: 358639 - DNA, 57 bp, Artificial
  Synthetic oligonucleotide
ccccaattgggcaagatcgaacctaatcgatgtaggtcgtatatcaagttgaaacga

SEQ ID NO: 358640 - DNA, 55 bp, Artificial
  Synthetic oligonucleotide
ccccaattgtcttagaccaatgtgacctagtgacaagagcatgtggactttactc

SEQ ID NO: 358641 - DNA, 54 bp, Artificial
  Synthetic oligonucleotide
ccccaatttattgctaagtacgattgtaagggcttaggtcttgaacacgtacta

SEQ ID NO: 358642 - DNA, 51 bp, Artificial
  Synthetic oligonucleotide
ccccacaaaatataaacgtgggtggtcgtctactaaccgtcgagttaatta

SEQ ID NO: 358643 - DNA, 60 bp, Artificial
  Synthetic oligonucleotide
ccccacaaatgggagaaatattgtgtccttgaaataggggacatgctcctgcggactgca

SEQ ID NO: 358644 - DNA, 60 bp, Artificial
  Synthetic oligonucleotide
ccccacaacgcagctccgacgtcacatcgatctacttgtcgggagcgctaccctatgctc

SEQ ID NO: 358645 - DNA, 55 bp, Artificial
  Synthetic oligonucleotide
ccccacaacggggacacctgcttgcttcaacgcgatgctttccctttgttccgat

SEQ ID NO: 358646 - DNA, 55 bp, Artificial
  Synthetic oligonucleotide
ccccacaactcgcacaatcttgggaactaacattggaagctgaacagatgccttg

SEQ ID NO: 358647 - DNA, 55 bp, Artificial
  Synthetic oligonucleotide
ccccacaagctcgtgcagtttgctgaaattcaggggcgtaccactataacgttca

SEQ ID NO: 358648 - DNA, 53 bp, Artificial
  Synthetic oligonucleotide
ccccacaatccaactccgattcaacgacagctgggcttccggttaacgcccgt

SEQ ID NO: 358649 - DNA, 60 bp, Artificial
  Synthetic oligonucleotide
ccccacaatggctttcactcacgaagaaatgtcagccaaccatgtgcaagactgggagac

SEQ ID NO: 358650 - DNA, 59 bp, Artificial
  Synthetic oligonucleotide
ccccacaattagaactgcaaaagtgcaaggtccaggctttgattacgctgtggccatgg

SEQ ID NO: 358651 - DNA, 57 bp, Artificial
  Synthetic oligonucleotide
ccccacaattgaaaacaacggaggtggcttcatagagatgcagctacccccagggga

SEQ ID NO: 358652 - DNA, 59 bp, Artificial
  Synthetic oligonucleotide
ccccacacacgtaaggaatacgtatggcctttccattagcggtcgtggcgcagacagca

SEQ ID NO: 358653 - DNA, 58 bp, Artificial
  Synthetic oligonucleotide
ccccacaccgacagtccaaacaagtccacctagcactcccgacgcatctaccatacca

SEQ ID NO: 358654 - DNA, 50 bp, Artificial
  Synthetic oligonucleotide
ccccacacctatcttgctttcgagcagatagagagtgagtacttcccaca

SEQ ID NO: 358655 - DNA, 51 bp, Artificial
  Synthetic oligonucleotide
ccccacacctggaaaacccccgaacaagcgcccctcttgccgcgaccccta

SEQ ID NO: 358656 - DNA, 55 bp, Artificial
  Synthetic oligonucleotide
ccccacacgccaggagtagttgccgtgccaaccaaacatttgcgggtgtgtcccg

SEQ ID NO: 358657 - DNA, 52 bp, Artificial
  Synthetic oligonucleotide
ccccacactaacctaatctgcccgggaaccgcttatgtaaagcggttgggcc

SEQ ID NO: 358658 - DNA, 51 bp, Artificial
  Synthetic oligonucleotide
ccccacactgtgggtgaggatgatactgttgacccatttctttagcgtcct

SEQ ID NO: 358659 - DNA, 52 bp, Artificial
  Synthetic oligonucleotide
ccccacagcgacatttcggaccgaccccaacacagtttctaaattcggtcgt

SEQ ID NO: 358660 - DNA, 57 bp, Artificial
  Synthetic oligonucleotide
ccccacagcggtacactctatcgcggaagcatcgactccaaagccggactggtaacc

SEQ ID NO: 358661 - DNA, 60 bp, Artificial
  Synthetic oligonucleotide
ccccacaggacgctaattcatggacatggtgcgaagagcctattgagctagtgagtagtc

SEQ ID NO: 358662 - DNA, 57 bp, Artificial
  Synthetic oligonucleotide
ccccacagtaccagcgactgggaccctcacaacaatctatgaagggaacgccgacat

SEQ ID NO: 358663 - DNA, 55 bp, Artificial
  Synthetic oligonucleotide
ccccacagtggcccctacgcactaagtaatgtcggccaattatgttcaagaccgg

SEQ ID NO: 358664 - DNA, 55 bp, Artificial
  Synthetic oligonucleotide
ccccacagttgaagagtgtggatatagtgatagagtgaggtctattactctgggt

SEQ ID NO: 358665 - DNA, 60 bp, Artificial
  Synthetic oligonucleotide
ccccacatgaaaaagcagccaatcagaagagctgctccgatcctaatagtcaaaagttgg

SEQ ID NO: 358666 - DNA, 55 bp, Artificial
  Synthetic oligonucleotide
ccccacatgacaatccctatacatgaccttcaatatattatgtatcccttcctcc

SEQ ID NO: 358667 - DNA, 52 bp, Artificial
  Synthetic oligonucleotide
ccccacattaccgaagtggaacccgaagatattgactgctggtgcaacctta

SEQ ID NO: 358668 - DNA, 55 bp, Artificial
  Synthetic oligonucleotide
ccccaccaaagtcgttgacgacaaagagtattgggtcgtcgagtgcctcgtgccc

SEQ ID NO: 358669 - DNA, 56 bp, Artificial
  Synthetic oligonucleotide
ccccaccaacggtccacttctctaactactggagtactagatgttgtcgatcctac

SEQ ID NO: 358670 - DNA, 55 bp, Artificial
  Synthetic oligonucleotide
ccccaccactcatcaccgtaatacagctcttttctgctgtgccatctcatcagcc

SEQ ID NO: 358671 - DNA, 55 bp, Artificial
  Synthetic oligonucleotide
ccccaccactctgagtgaggcccaacattgtataactctggaatgggataccgga

SEQ ID NO: 358672 - DNA, 58 bp, Artificial
  Synthetic oligonucleotide
ccccaccactggtcagactagcatttaacctagtaaaagatcccataccaggcacaga

SEQ ID NO: 358673 - DNA, 54 bp, Artificial
  Synthetic oligonucleotide
ccccaccagcccatgaccctcacttggcaggtactgtcccaaactggagacgtt

SEQ ID NO: 358674 - DNA, 55 bp, Artificial
  Synthetic oligonucleotide
ccccaccagtgctatactggaggtgcagcccactgcatcaacacctaaaagggtc

SEQ ID NO: 358675 - DNA, 55 bp, Artificial
  Synthetic oligonucleotide
ccccaccagtggataaatttgagaactaacaacagcgcaaccattatagttccat

SEQ ID NO: 358676 - DNA, 55 bp, Artificial
  Synthetic oligonucleotide
ccccaccataattcgccctggggtcacacctgaacttattggtccagcggatgta

SEQ ID NO: 358677 - DNA, 53 bp, Artificial
  Synthetic oligonucleotide
ccccaccatacagcccctaaacccatccaaccgcactccctcacctaccccaa

SEQ ID NO: 358678 - DNA, 51 bp, Artificial
  Synthetic oligonucleotide
ccccaccattaacttgaacaggtttaggtttacccatgctactaaacccaa

SEQ ID NO: 358679 - DNA, 55 bp, Artificial
  Synthetic oligonucleotide
ccccacccggccactagtctgcgcctttggggacaattattggccaatgccatca

SEQ ID NO: 358680 - DNA, 51 bp, Artificial
  Synthetic oligonucleotide
ccccacccgggagcttcgcaatagttggcgtcgccggggttttgcggcctt

SEQ ID NO: 358681 - DNA, 48 bp, Artificial
  Synthetic oligonucleotide
ccccacccgttattcgcccaacccctgtaacgttagaagtttggaact

SEQ ID NO: 358682 - DNA, 55 bp, Artificial
  Synthetic oligonucleotide
ccccaccctatgaagaagagactccaatggaatattctccaagtgcaccttatga

SEQ ID NO: 358683 - DNA, 51 bp, Artificial
  Synthetic oligonucleotide
ccccacccttagtaaaattatggtaccaactggagaaagaacccgtagcag

SEQ ID NO: 358684 - DNA, 55 bp, Artificial
  Synthetic oligonucleotide
ccccaccgatgcttatgagaagcacgtaacacgcttcaatccaaatggtcaacgc

SEQ ID NO: 358685 - DNA, 55 bp, Artificial
  Synthetic oligonucleotide
ccccaccgctcaagtctccaagcgctgaggcatgtggttacagtgatcgtgtggc

SEQ ID NO: 358686 - DNA, 54 bp, Artificial
  Synthetic oligonucleotide
ccccaccgtcaaaagctcttaaccgttatccgccaatcaactacgtgacgactg

SEQ ID NO: 358687 - DNA, 56 bp, Artificial
  Synthetic oligonucleotide
ccccacctcagacatgagactaaaaatgggccttctgtagcaattgggccttaaaa

SEQ ID NO: 358688 - DNA, 55 bp, Artificial
  Synthetic oligonucleotide
ccccaccttggatagtcatgcaagcaattgtgagagctggcatggagccaaactg

SEQ ID NO: 358689 - DNA, 53 bp, Artificial
  Synthetic oligonucleotide
ccccacgagtatctggagctagatgtcctcggtgaacagtcagggacctttga

SEQ ID NO: 358690 - DNA, 52 bp, Artificial
  Synthetic oligonucleotide
ccccacgagtatcttggactttgtatggcccaataacaattgggcttgaaag

SEQ ID NO: 358691 - DNA, 53 bp, Artificial
  Synthetic oligonucleotide
ccccacgatattgatcttggtgagtcccgagttgtcatccaggactatgataa

SEQ ID NO: 358692 - DNA, 56 bp, Artificial
  Synthetic oligonucleotide
ccccacgatgctgtacaataagatggagtttgaaccgttccaatccttggtaccta

SEQ ID NO: 358693 - DNA, 58 bp, Artificial
  Synthetic oligonucleotide
ccccacgcacgttgaggataatgatggagtcctgccaatagaaactaatttaccatta

SEQ ID NO: 358694 - DNA, 55 bp, Artificial
  Synthetic oligonucleotide
ccccacggagcactttgtttatcaacgcttcacacctgagaggaaagtgctagcc

SEQ ID NO: 358695 - DNA, 55 bp, Artificial
  Synthetic oligonucleotide
ccccacggatagcggtcatgacacagtggttatggaggtgagctattccggggcc

SEQ ID NO: 358696 - DNA, 54 bp, Artificial
  Synthetic oligonucleotide
ccccacgggcagctccgtattcggggactgctcaaatcggggcactttagcggg

SEQ ID NO: 358697 - DNA, 54 bp, Artificial
  Synthetic oligonucleotide
ccccacgggggatccccgggggtgttgggctgcgtcactcgatgtcctccactc

SEQ ID NO: 358698 - DNA, 55 bp, Artificial
  Synthetic oligonucleotide
ccccacggtgcacctttgctattctacgaatattcatacctccatagattcaagc

SEQ ID NO: 358699 - DNA, 52 bp, Artificial
  Synthetic oligonucleotide
ccccacggtggctaccaaggatggcaagctccccacgaagcagcttcgacgg

SEQ ID NO: 358700 - DNA, 55 bp, Artificial
  Synthetic oligonucleotide
ccccacgtcccactatgaccaccaaaacacttctagactactttagcgacgatgc

SEQ ID NO: 358701 - DNA, 55 bp, Artificial
  Synthetic oligonucleotide
ccccactaaatatggtggatagcaaagcgttaaccggcatagggaaagcgacacc

SEQ ID NO: 358702 - DNA, 55 bp, Artificial
  Synthetic oligonucleotide
ccccactaactcatcttgaaagcacggagtcaagatatatggatcaaccaatgcc

SEQ ID NO: 358703 - DNA, 60 bp, Artificial
  Synthetic oligonucleotide
ccccactacatctcatgacattacgcgtgctctgtccttagagttctttccttcattcta

SEQ ID NO: 358704 - DNA, 55 bp, Artificial
  Synthetic oligonucleotide
ccccactacgtggattaaggcagtgcgcaggttgcttcgcttgctggctgtagtt

SEQ ID NO: 358705 - DNA, 55 bp, Artificial
  Synthetic oligonucleotide
ccccactactactctagtcgcactcaccgctacggtcccaagctcaccagcctac

SEQ ID NO: 358706 - DNA, 55 bp, Artificial
  Synthetic oligonucleotide
ccccactaggctggcagaaatactgaaattgtgctgtgagtcatctttaaggacc

SEQ ID NO: 358707 - DNA, 55 bp, Artificial
  Synthetic oligonucleotide
ccccactaggtgatcagaataacccgcactttattggcccaatgtatcagtcaca

SEQ ID NO: 358708 - DNA, 51 bp, Artificial
  Synthetic oligonucleotide
ccccactatagttcgccctggggtgatacctgaaataattggcccaactga

SEQ ID NO: 358709 - DNA, 55 bp, Artificial
  Synthetic oligonucleotide
ccccactcaaagtttgacacgcgtagcagggcggaggacactcaacatcgtgcta

SEQ ID NO: 358710 - DNA, 52 bp, Artificial
  Synthetic oligonucleotide
ccccactcagaacgctccctcaaagttaaattattaagtggtcccctattta

SEQ ID NO: 358711 - DNA, 50 bp, Artificial
  Synthetic oligonucleotide
ccccactccttacatatgttcaaagtttctattgacggatgagttgggta

SEQ ID NO: 358712 - DNA, 55 bp, Artificial
  Synthetic oligonucleotide
ccccactcgagagtgtctccgtccttgtcgatgtagtccttgacatctgagcttg

SEQ ID NO: 358713 - DNA, 55 bp, Artificial
  Synthetic oligonucleotide
ccccactctactagtagataagtggtactttcagcacgacatttgcgacatgacc

SEQ ID NO: 358714 - DNA, 55 bp, Artificial
  Synthetic oligonucleotide
ccccactctagaacgtctccgtctttgtcgatgtatgttttgacatctgacgctg

SEQ ID NO: 358715 - DNA, 55 bp, Artificial
  Synthetic oligonucleotide
ccccactctcgaccccgcctcagtcctccctctatccggctctcacttctccttt

SEQ ID NO: 358716 - DNA, 55 bp, Artificial
  Synthetic oligonucleotide
ccccactctgtgtcactttaaactgtagtaatgtggcagtaagtaatactgggac

SEQ ID NO: 358717 - DNA, 55 bp, Artificial
  Synthetic oligonucleotide
ccccactctgtgtcactttaaagtgtgcaacagttaatgataccagtaatagtac

SEQ ID NO: 358718 - DNA, 55 bp, Artificial
  Synthetic oligonucleotide
ccccactctgtgtcactttaaattgcactgatgttaatactaataccactgatac

SEQ ID NO: 358719 - DNA, 55 bp, Artificial
  Synthetic oligonucleotide
ccccactctgtgtcactttgcactgtacaaaggttaatagtactaatgataccag

SEQ ID NO: 358720 - DNA, 55 bp, Artificial
  Synthetic oligonucleotide
ccccactctgttctggctgttttggaggacacggccgattatccagcccgtgccc

SEQ ID NO: 358721 - DNA, 55 bp, Artificial
  Synthetic oligonucleotide
ccccactgcgacgatcttgaatcctttgatctgcgtagggaactgtgcgtactcg

SEQ ID NO: 358722 - DNA, 54 bp, Artificial
  Synthetic oligonucleotide
ccccactgctatgagcagcttcttcttgtcttctctggtgaagaaccgtccact

SEQ ID NO: 358723 - DNA, 60 bp, Artificial
  Synthetic oligonucleotide
ccccactggctggggcttggcaataggccatcagcgcatgcgtggaacctttcaggctcc

SEQ ID NO: 358724 - DNA, 55 bp, Artificial
  Synthetic oligonucleotide
ccccactggttctgcaacatactgccctggagcgattgcgaatgcgatttcccgt

SEQ ID NO: 358725 - DNA, 55 bp, Artificial
  Synthetic oligonucleotide
ccccactgtccgcgtcacaaagtcacgagcatgggccaacaggcccatgaatcgg

SEQ ID NO: 358726 - DNA, 59 bp, Artificial
  Synthetic oligonucleotide
ccccactgtccgcgtcacaagaaggcggacatgggtgaatcggcccatgtacagaaagc

SEQ ID NO: 358727 - DNA, 59 bp, Artificial
  Synthetic oligonucleotide
ccccactgtcctaggcataagccgaaagagaacatgggtgcaacgtcccatgtatcgga

SEQ ID NO: 358728 - DNA, 60 bp, Artificial
  Synthetic oligonucleotide
ccccactgttttctacaggcgtgcctatgaataactcactgctggataagaagagcgtgg

SEQ ID NO: 358729 - DNA, 55 bp, Artificial
  Synthetic oligonucleotide
ccccacttaaatctgagttctcaggcgcaatggaaacacggtttcagggtttgcc

SEQ ID NO: 358730 - DNA, 55 bp, Artificial
  Synthetic oligonucleotide
ccccacttaacatcccgggagaggtgcgcaacctcatggaaattgctgaagtgga

SEQ ID NO: 358731 - DNA, 60 bp, Artificial
  Synthetic oligonucleotide
ccccacttcaagcgcgtgtgcctccagtcgccctagctactcatctaccaccttctcgga

SEQ ID NO: 358732 - DNA, 55 bp, Artificial
  Synthetic oligonucleotide
ccccacttctccagtgtagtattaggcaatgctgctggcttaggcataatgggag

SEQ ID NO: 358733 - DNA, 56 bp, Artificial
  Synthetic oligonucleotide
ccccacttctgacatttatattaaagactatggaaacttttctgggattgttgcac

SEQ ID NO: 358734 - DNA, 55 bp, Artificial
  Synthetic oligonucleotide
ccccacttgacttcctctgtcacgcagcgtccttcaccagtcgcaggtaccccgg

SEQ ID NO: 358735 - DNA, 60 bp, Artificial
  Synthetic oligonucleotide
ccccacttgggtgcgtctggatgcctgcatacattcgacgagctgttcggtgcaaggatc

SEQ ID NO: 358736 - DNA, 58 bp, Artificial
  Synthetic oligonucleotide
ccccacttgtacgcacttttgcatgactctgctacttcaactattgaaggaaattttg

SEQ ID NO: 358737 - DNA, 54 bp, Artificial
  Synthetic oligonucleotide
ccccagaaaggtaagtctgattcacctagccgggtttccaggctgcggaaagac

SEQ ID NO: 358738 - DNA, 55 bp, Artificial
  Synthetic oligonucleotide
ccccagaacccgaggcaccaaggcatccagtgattccagatgccagaggcacagg

SEQ ID NO: 358739 - DNA, 60 bp, Artificial
  Synthetic oligonucleotide
ccccagaagccaagtcaactgatgttgtccagtttgcaatagatcttgttggagttggga

SEQ ID NO: 358740 - DNA, 55 bp, Artificial
  Synthetic oligonucleotide
ccccagaaggtttagcaggccagctgctagggtggtcttccctgtattcacaggc

SEQ ID NO: 358741 - DNA, 60 bp, Artificial
  Synthetic oligonucleotide
ccccagacacaagcagtaattgctcagagtgctgcagtcatctaccagaaattggaggaa

SEQ ID NO: 358742 - DNA, 55 bp, Artificial
  Synthetic oligonucleotide
ccccagacaccagggtgcaagataccctgtatggctctggtgatagatacgttag

SEQ ID NO: 358743 - DNA, 54 bp, Artificial
  Synthetic oligonucleotide
ccccagacccagaccactttgacggttacaaacagcaggctgtcgtgattatgg

SEQ ID NO: 358744 - DNA, 50 bp, Artificial
  Synthetic oligonucleotide
ccccagaccccagaaaatgcttgggaagttgcctagagttctacgaagcg

SEQ ID NO: 358745 - DNA, 53 bp, Artificial
  Synthetic oligonucleotide
ccccagaccttactagcctaccgcaggaccttccacatctccgaaccattgac

SEQ ID NO: 358746 - DNA, 55 bp, Artificial
  Synthetic oligonucleotide
ccccagactatgcagactccctaatacatggcacttatttcgcttgctttacagc

SEQ ID NO: 358747 - DNA, 55 bp, Artificial
  Synthetic oligonucleotide
ccccagacttgaagaaccaattgagtgcctaattaagaaatctgcagcaaagtat

SEQ ID NO: 358748 - DNA, 55 bp, Artificial
  Synthetic oligonucleotide
ccccagagaagtcaaatgcaggtgcagcaatctgtacttccaactgctcctccgt

SEQ ID NO: 358749 - DNA, 53 bp, Artificial
  Synthetic oligonucleotide
ccccagagactactaatactacgaaccccgaagatattgttaatcaaaccgaa

SEQ ID NO: 358750 - DNA, 57 bp, Artificial
  Synthetic oligonucleotide
ccccagagacttccacactgcttatagaaaattcaacaccctatacccatgaacatt

SEQ ID NO: 358751 - DNA, 59 bp, Artificial
  Synthetic oligonucleotide
ccccagagaggcgcaccgaggaaccttggaggtgctcgcagaggccaaatttgcactag

SEQ ID NO: 358752 - DNA, 56 bp, Artificial
  Synthetic oligonucleotide
ccccagaggagtggcatttgaattacccaagcgacaaacttcctagtgttttggca

SEQ ID NO: 358753 - DNA, 55 bp, Artificial
  Synthetic oligonucleotide
ccccagagggacactccgccggttcatacaaccagcccataacagccctctcctg

SEQ ID NO: 358754 - DNA, 57 bp, Artificial
  Synthetic oligonucleotide
ccccagaggggtccgaagagtggtccgccccgctgattactgccatgtgtgtcctta

SEQ ID NO: 358755 - DNA, 59 bp, Artificial
  Synthetic oligonucleotide
ccccagagtcaagggtggcccttcattgcaacaagttatgagggaccagctgagaccat

SEQ ID NO: 358756 - DNA, 55 bp, Artificial
  Synthetic oligonucleotide
ccccagagtcgggcgggcctgccatactagatattagcctgtccacctccacaca

SEQ ID NO: 358757 - DNA, 54 bp, Artificial
  Synthetic oligonucleotide
ccccagatgaagcgagcaatgtaataatggaaatattattccctaaagaagcag

SEQ ID NO: 358758 - DNA, 55 bp, Artificial
  Synthetic oligonucleotide
ccccagatgatgtgctgcaaggtctaccctttagttatgatactaacgaaagagg

SEQ ID NO: 358759 - DNA, 55 bp, Artificial
  Synthetic oligonucleotide
ccccagattgaggacttcgatttgataattgtttcatacattgcactagacatgt

SEQ ID NO: 358760 - DNA, 53 bp, Artificial
  Synthetic oligonucleotide
ccccagcaagatatgatgcgtttacacccagtcagattcactctgaacacaca

SEQ ID NO: 358761 - DNA, 53 bp, Artificial
  Synthetic oligonucleotide
ccccagcaatttaagtaacaagaaggaagtgacgtccgtcgctaagactgcct

SEQ ID NO: 358762 - DNA, 55 bp, Artificial
  Synthetic oligonucleotide
ccccagcacacactgaggacttcgaggagtgttcgcaccaacctgcatcccttgg

SEQ ID NO: 358763 - DNA, 54 bp, Artificial
  Synthetic oligonucleotide
ccccagcacattctgatcgattctagacgcctccaggagactgatacacgatca

SEQ ID NO: 358764 - DNA, 53 bp, Artificial
  Synthetic oligonucleotide
ccccagcacggagatgtcactgagaggggtgagagtcagcaaaatgggagtgg

SEQ ID NO: 358765 - DNA, 55 bp, Artificial
  Synthetic oligonucleotide
ccccagcatctcagatccataaatgaatgcggggctctgaatcaagtccctctgg

SEQ ID NO: 358766 - DNA, 59 bp, Artificial
  Synthetic oligonucleotide
ccccagccacgaacgtttgaacgaggagtggcgtgagatgttcatttgaatagctacag

SEQ ID NO: 358767 - DNA, 50 bp, Artificial
  Synthetic oligonucleotide
ccccagcccaaatggaggacttttctacagatgaaagtgtggatgacaca

SEQ ID NO: 358768 - DNA, 55 bp, Artificial
  Synthetic oligonucleotide
ccccagcccatcactagaatcctgtccactgatgaatatgtaaccagaaccaatc

SEQ ID NO: 358769 - DNA, 58 bp, Artificial
  Synthetic oligonucleotide
ccccagcccccaggagctctacatcgccctaacccgccaccgcaaggagctccatgtc

SEQ ID NO: 358770 - DNA, 54 bp, Artificial
  Synthetic oligonucleotide
ccccagccccgggacgggacatcttgcatctataaatagattgcctcctcgcac

SEQ ID NO: 358771 - DNA, 52 bp, Artificial
  Synthetic oligonucleotide
ccccagccccgtggtagtgggtacgaccgataggtcgggcgcgcctacctac

SEQ ID NO: 358772 - DNA, 54 bp, Artificial
  Synthetic oligonucleotide
ccccagccgacgggccggctattcttcttgatctttcctcgtcctccctggcca

SEQ ID NO: 358773 - DNA, 50 bp, Artificial
  Synthetic oligonucleotide
ccccagccgcaatgtactggccatggactattctgggtttgatgcttctc

SEQ ID NO: 358774 - DNA, 55 bp, Artificial
  Synthetic oligonucleotide
ccccagcctgttcataacatcaacccatgtcataccccagggcgcacaggagttc

SEQ ID NO: 358775 - DNA, 52 bp, Artificial
  Synthetic oligonucleotide
ccccagcgctccccatatgggcacgcccggactacaacccaccactgctaga

SEQ ID NO: 358776 - DNA, 55 bp, Artificial
  Synthetic oligonucleotide
ccccagcgctgggaaagatcctaagaaaactggggggcccatatacaggagagta

SEQ ID NO: 358777 - DNA, 54 bp, Artificial
  Synthetic oligonucleotide
ccccagctaaaaggaaaacaaggtgacttggagcaggaggttccagacaaggag

SEQ ID NO: 358778 - DNA, 54 bp, Artificial
  Synthetic oligonucleotide
ccccagctaagacaccttttgttacataacaattttatttgtctgtgttggtta

SEQ ID NO: 358779 - DNA, 53 bp, Artificial
  Synthetic oligonucleotide
ccccagctaatggatttggaaatattgtggtaaagagtaacactttggctgac

SEQ ID NO: 358780 - DNA, 51 bp, Artificial
  Synthetic oligonucleotide
ccccagctacgactcagagacgacaactcctggagctctgtcaacttatcg

SEQ ID NO: 358781 - DNA, 50 bp, Artificial
  Synthetic oligonucleotide
ccccagctcttaccgtccctgtttttctgggttgcgcacctccatccggg

SEQ ID NO: 358782 - DNA, 52 bp, Artificial
  Synthetic oligonucleotide
ccccagctgccgagtgaggcttatcccggggatcggtgaatcgtcccgggat

SEQ ID NO: 358783 - DNA, 53 bp, Artificial
  Synthetic oligonucleotide
ccccagcttacacttccgatacacatgcaacgcataacgtcccgatggaaacg

SEQ ID NO: 358784 - DNA, 55 bp, Artificial
  Synthetic oligonucleotide
ccccagcttttcatttaacaatagcggtgactttgtacttcacccttctctaaga

SEQ ID NO: 358785 - DNA, 55 bp, Artificial
  Synthetic oligonucleotide
ccccaggaataagataccagtacaatgtccttccgcagggatggaaaggttcacc

SEQ ID NO: 358786 - DNA, 55 bp, Artificial
  Synthetic oligonucleotide
ccccaggagacgccccgcagccagcatatgacctggaactaataacatcatgttc

SEQ ID NO: 358787 - DNA, 57 bp, Artificial
  Synthetic oligonucleotide
ccccaggatacttagacactgtatgtggccttttgagtgacggttgtgaaatctttg

SEQ ID NO: 358788 - DNA, 55 bp, Artificial
  Synthetic oligonucleotide
ccccaggatgaactaatagggagagcgaggatctctcaaggagcaggatggagcc

SEQ ID NO: 358789 - DNA, 55 bp, Artificial
  Synthetic oligonucleotide
ccccaggcacgattccggtcgccctgtgggtctagcatggaagccgtcattaagg

SEQ ID NO: 358790 - DNA, 52 bp, Artificial
  Synthetic oligonucleotide
ccccaggcaggacgcatcagagacctgctcagggcccgtggactgaccgctg

SEQ ID NO: 358791 - DNA, 55 bp, Artificial
  Synthetic oligonucleotide
ccccaggcataggcaagacaaaggcagctgagtaccttgctaagagattggccaa

SEQ ID NO: 358792 - DNA, 55 bp, Artificial
  Synthetic oligonucleotide
ccccaggccactactggcggtggaagtgtcagcccctgacaggcacaaacagaag

SEQ ID NO: 358793 - DNA, 53 bp, Artificial
  Synthetic oligonucleotide
ccccaggccagttgacccctcaacaatatcgtgtgactctccaagcaatgtca

SEQ ID NO: 358794 - DNA, 50 bp, Artificial
  Synthetic oligonucleotide
ccccaggccctggtacagtaggtaaattaggattcagcacctataacctg

SEQ ID NO: 358795 - DNA, 54 bp, Artificial
  Synthetic oligonucleotide
ccccaggcgcctggaacactgaaaccccgcgctctagtacgcccatccccggga

SEQ ID NO: 358796 - DNA, 53 bp, Artificial
  Synthetic oligonucleotide
ccccaggcggaggtcccgcaacttgggtaaagtcatcgacacccttacttgcg

SEQ ID NO: 358797 - DNA, 56 bp, Artificial
  Synthetic oligonucleotide
ccccagggaggcttcgactgcatgggtaacaccccctacggcaagggtgctatgtc

SEQ ID NO: 358798 - DNA, 59 bp, Artificial
  Synthetic oligonucleotide
ccccagggcaaatgagagaccctagaggaagtgatatagcagggacaactagtactctg

SEQ ID NO: 358799 - DNA, 54 bp, Artificial
  Synthetic oligonucleotide
ccccagggcgggtttgataagaatggcaacaccccacatggtaaaggcaccatg

SEQ ID NO: 358800 - DNA, 55 bp, Artificial
  Synthetic oligonucleotide
ccccaggggcgggcctcctcgtttgacaccttgcagttgtgacggtaaggtgaga

SEQ ID NO: 358801 - DNA, 50 bp, Artificial
  Synthetic oligonucleotide
ccccaggtaggtttaccttagttggggaggatcgtctccgtttctctaaa

SEQ ID NO: 358802 - DNA, 55 bp, Artificial
  Synthetic oligonucleotide
ccccaggtctcttcagtataaaatctacaagagattatcgaacttagttcagcag

SEQ ID NO: 358803 - DNA, 55 bp, Artificial
  Synthetic oligonucleotide
ccccaggtgtagactctccagcaaggagcaatgacaaaaggtgggatggggcatc

SEQ ID NO: 358804 - DNA, 55 bp, Artificial
  Synthetic oligonucleotide
ccccagtaattgtgctacgtggagatgctaacaaattgaaatgctttcgcttcag

SEQ ID NO: 358805 - DNA, 55 bp, Artificial
  Synthetic oligonucleotide
ccccagtaccttcctgatattgtgattgaatcttatctgaatggaaatgatgtcg

SEQ ID NO: 358806 - DNA, 55 bp, Artificial
  Synthetic oligonucleotide
ccccagtaccttcctgatgttgtgattgaaccggatctgtattgaaatgatgtcg

SEQ ID NO: 358807 - DNA, 60 bp, Artificial
  Synthetic oligonucleotide
ccccagtatacacaggagctctgaaagatgagctagtcaagactgataagatctatggga

SEQ ID NO: 358808 - DNA, 59 bp, Artificial
  Synthetic oligonucleotide
ccccagtatgtgtagttaatgttgcagaggtagatggggaccaacgtatattgataaga

SEQ ID NO: 358809 - DNA, 57 bp, Artificial
  Synthetic oligonucleotide
ccccagtcaagctcctcagacgagtccccccgtgggaagactcgcagcaggaggaaa

SEQ ID NO: 358810 - DNA, 55 bp, Artificial
  Synthetic oligonucleotide
ccccagtcacattccgtagtgggactgattgctggtatgccatggaaattagacc

SEQ ID NO: 358811 - DNA, 55 bp, Artificial
  Synthetic oligonucleotide
ccccagtcataatttcagtcaccatggaagaatcagctgaaccttggcagatatg

SEQ ID NO: 358812 - DNA, 59 bp, Artificial
  Synthetic oligonucleotide
ccccagtccttcgcagtagaacgcggtaatggatggactctggcatatgccccaggtaa

SEQ ID NO: 358813 - DNA, 55 bp, Artificial
  Synthetic oligonucleotide
ccccagtcgacgtaatcaccgtccttggtgatgtaggatttgacatcagatgagc

SEQ ID NO: 358814 - DNA, 56 bp, Artificial
  Synthetic oligonucleotide
ccccagtcgatgcaccctgttcataggggcctcttcctaccactccgacccctgcg

SEQ ID NO: 358815 - DNA, 55 bp, Artificial
  Synthetic oligonucleotide
ccccagtcgattgtgtccccgtccttgctgatgtaggacttgacgtcggacgctg

SEQ ID NO: 358816 - DNA, 55 bp, Artificial
  Synthetic oligonucleotide
ccccagtctgtttataacatcaacccatgtcataccccaaggtacaaaagagttc

SEQ ID NO: 358817 - DNA, 54 bp, Artificial
  Synthetic oligonucleotide
ccccagtcttcagtaaatgttgatacctatacctttaactgtcccttcgaatta

SEQ ID NO: 358818 - DNA, 60 bp, Artificial
  Synthetic oligonucleotide
ccccagtgaaacttagaagcagcaaaccacgatcaatagcaggcatgacgctccagttat

SEQ ID NO: 358819 - DNA, 55 bp, Artificial
  Synthetic oligonucleotide
ccccagtgaccctgttatccaatttgccaagcttcaccagttcatattccccaag

SEQ ID NO: 358820 - DNA, 55 bp, Artificial
  Synthetic oligonucleotide
ccccagtgagccgtgttgaactgtagcttatacgttaatcgttcaggctaccagc

SEQ ID NO: 358821 - DNA, 50 bp, Artificial
  Synthetic oligonucleotide
ccccagtggcagaatggtagagtacatgttgatgggactcttcttggtac

SEQ ID NO: 358822 - DNA, 58 bp, Artificial
  Synthetic oligonucleotide
ccccagtggcttattcggctgtaccatttagtcaggtcagcctggaccctgcaggccc

SEQ ID NO: 358823 - DNA, 55 bp, Artificial
  Synthetic oligonucleotide
ccccagtgggatccaaatgaaagagaggatatgcaaaggctaaaccgagacaggg

SEQ ID NO: 358824 - DNA, 55 bp, Artificial
  Synthetic oligonucleotide
ccccagtggtctgaagatgacgagctagaatggaatgacgcaagagcgttgggac

SEQ ID NO: 358825 - DNA, 55 bp, Artificial
  Synthetic oligonucleotide
ccccagtgtattatcaactttccagaatttatctcaatgcgtaaattacggttcg

SEQ ID NO: 358826 - DNA, 53 bp, Artificial
  Synthetic oligonucleotide
ccccagtgtcaaattacagggttcgtccctttctccaaggacaactcaattag

SEQ ID NO: 358827 - DNA, 53 bp, Artificial
  Synthetic oligonucleotide
ccccagtgtgcgtaaccttcttccgtctccggacggtagtgattggttaagat

SEQ ID NO: 358828 - DNA, 55 bp, Artificial
  Synthetic oligonucleotide
ccccagtgtggtcagggaaacttttagcacttataccaacgtcacctggaccaca

SEQ ID NO: 358829 - DNA, 55 bp, Artificial
  Synthetic oligonucleotide
ccccagttctcgtcagcggtgacgactccctcattgaccgtgtccctctcccaca

SEQ ID NO: 358830 - DNA, 55 bp, Artificial
  Synthetic oligonucleotide
ccccagttgcgttatagaggatcttgacgttgagacctgaatcacccacaaagcc

SEQ ID NO: 358831 - DNA, 55 bp, Artificial
  Synthetic oligonucleotide
ccccagttgtctcatacattacagtgttctttgacctgctgaagcagagcctaca

SEQ ID NO: 358832 - DNA, 53 bp, Artificial
  Synthetic oligonucleotide
ccccagtttgccctaatgttttgcaacctcaggggcctctacgtgaggccaat

SEQ ID NO: 358833 - DNA, 55 bp, Artificial
  Synthetic oligonucleotide
ccccataaactctttaaagtgctttaaataatgcgggtcgacgtcatcaatgacg

SEQ ID NO: 358834 - DNA, 55 bp, Artificial
  Synthetic oligonucleotide
ccccataaattccttcatatgctttagatagtgcgggtcgacgtcatcaatgacg

SEQ ID NO: 358835 - DNA, 54 bp, Artificial
  Synthetic oligonucleotide
ccccataaattctttgaaatgctttaggtagtgcggatcaacgtcatcaattac

SEQ ID NO: 358836 - DNA, 54 bp, Artificial
  Synthetic oligonucleotide
ccccatacatagctgagacagcgttaaagaagctctacacagatgtcaacacac

SEQ ID NO: 358837 - DNA, 59 bp, Artificial
  Synthetic oligonucleotide
ccccatacattattgtgctccagctggttatgcgattctaaagtgtaaggataaagagt

SEQ ID NO: 358838 - DNA, 55 bp, Artificial
  Synthetic oligonucleotide
ccccataccaggaatagaaaccttttatgtagatggggcagcaaacagagagact

SEQ ID NO: 358839 - DNA, 55 bp, Artificial
  Synthetic oligonucleotide
ccccataccatttaacccagacctatggaccctttgcagacaggaaattgagaac

SEQ ID NO: 358840 - DNA, 55 bp, Artificial
  Synthetic oligonucleotide
ccccatacgtatggtgtagagtttgtgataatacatgctccaccaagcctactga

SEQ ID NO: 358841 - DNA, 55 bp, Artificial
  Synthetic oligonucleotide
ccccatacttgtcccacactttgtcctcaaattgcctagcttgttcagcagtaag

SEQ ID NO: 358842 - DNA, 60 bp, Artificial
  Synthetic oligonucleotide
ccccatagaggagcagctatggcaggatatgactagtttgtacaaacagtcattcaaacc

SEQ ID NO: 358843 - DNA, 51 bp, Artificial
  Synthetic oligonucleotide
ccccatagatatcacgcataatcctaagggcctcgcgttctaatttctttt

SEQ ID NO: 358844 - DNA, 55 bp, Artificial
  Synthetic oligonucleotide
ccccatagctaatggttcagatggtttgagtgtcccttgcactataccacaagag

SEQ ID NO: 358845 - DNA, 60 bp, Artificial
  Synthetic oligonucleotide
ccccatagggatcgggctagatgcgagtagattcgatcagcattgtagcgtggatgccct

SEQ ID NO: 358846 - DNA, 55 bp, Artificial
  Synthetic oligonucleotide
ccccatagtagggttttatgttttaaaaccctcactatataatggagccatgtca

SEQ ID NO: 358847 - DNA, 60 bp, Artificial
  Synthetic oligonucleotide
ccccatagtctaacatatgagctcacccctgctggtttgcaggttaggatatcctccaac

SEQ ID NO: 358848 - DNA, 59 bp, Artificial
  Synthetic oligonucleotide
ccccatagtggaccaaatcacccgtatgagggtagttaatgccttagtagcatctcatc

SEQ ID NO: 358849 - DNA, 51 bp, Artificial
  Synthetic oligonucleotide
ccccatataaatggatgggatatgaactccacccaaatggatggaagattc

SEQ ID NO: 358850 - DNA, 60 bp, Artificial
  Synthetic oligonucleotide
ccccatataactcgaggtttgagtctgttgcttggtcggcaagcgcttgtcatgatggca

SEQ ID NO: 358851 - DNA, 53 bp, Artificial
  Synthetic oligonucleotide
ccccatatcccgctattgggtaaaatggccatttacatctgcagaatgtcaaa

SEQ ID NO: 358852 - DNA, 55 bp, Artificial
  Synthetic oligonucleotide
ccccatatgagttaacgagtgcatcatcaccatatctattgaatcaatcatctct

SEQ ID NO: 358853 - DNA, 50 bp, Artificial
  Synthetic oligonucleotide
ccccatatgttttgctggtgatgacatgtgcgctctgaggaacctaaaag

SEQ ID NO: 358854 - DNA, 50 bp, Artificial
  Synthetic oligonucleotide
ccccatattcctaacgcgcgatcttgttaactccgacggctctgtagcaa

SEQ ID NO: 358855 - DNA, 55 bp, Artificial
  Synthetic oligonucleotide
ccccatcaaaattcatgtgtaattcagatggttcggatatggcaactaatttggg

SEQ ID NO: 358856 - DNA, 55 bp, Artificial
  Synthetic oligonucleotide
ccccatcaagaagagagagcgtcagcatttgactccggtcgttctagtgacgaac

SEQ ID NO: 358857 - DNA, 50 bp, Artificial
  Synthetic oligonucleotide
ccccatcatggaatgggctgtgtatctgatcatcttcatcgttgcggcat

SEQ ID NO: 358858 - DNA, 55 bp, Artificial
  Synthetic oligonucleotide
ccccatcatgtagagtagtgggtcgtaaagaacccatctgtcctccgagagcttg

SEQ ID NO: 358859 - DNA, 55 bp, Artificial
  Synthetic oligonucleotide
ccccatccatgatacttatcgatatatagactcccttgcaactcgttgccccgat

SEQ ID NO: 358860 - DNA, 58 bp, Artificial
  Synthetic oligonucleotide
ccccatcgacgctacgccatctcacaaacagccccaacctcaagcactcgacaataaa

SEQ ID NO: 358861 - DNA, 56 bp, Artificial
  Synthetic oligonucleotide
ccccatcggtatttgaccaaagccgctgattatctgatcctcgccacagctttttg

SEQ ID NO: 358862 - DNA, 55 bp, Artificial
  Synthetic oligonucleotide
ccccatctaggcactatccactataccaacgctaactatgatgccaatgttagcc

SEQ ID NO: 358863 - DNA, 55 bp, Artificial
  Synthetic oligonucleotide
ccccatctatctaggttctatgcattatgacatatctttctcagatctgcgtgga

SEQ ID NO: 358864 - DNA, 55 bp, Artificial
  Synthetic oligonucleotide
ccccatctctatgtccacgccggaaagactccgcaccaactctcctcctggtgcc

SEQ ID NO: 358865 - DNA, 55 bp, Artificial
  Synthetic oligonucleotide
ccccatctcttacttaccccaatttaggccttggcttattctcagatatatgttc

SEQ ID NO: 358866 - DNA, 55 bp, Artificial
  Synthetic oligonucleotide
ccccatctgggaagatgagttgagcagaaagcagatcctcgaaaggggtgccgat

SEQ ID NO: 358867 - DNA, 60 bp, Artificial
  Synthetic oligonucleotide
ccccatcttcacagcgccgggcctgaccaacctggtgtgacgtgggacaggctccattca

SEQ ID NO: 358868 - DNA, 55 bp, Artificial
  Synthetic oligonucleotide
ccccatgaactccttaaagtgctttaggcagtgcgggtctacgtcatcaatgacg

SEQ ID NO: 358869 - DNA, 55 bp, Artificial
  Synthetic oligonucleotide
ccccatgaactctttaaaatgctttaggtagtgggggtcaacgtcatcgatgacg

SEQ ID NO: 358870 - DNA, 54 bp, Artificial
  Synthetic oligonucleotide
ccccatgaactctttaaagtgtttgaggaaatgcgctctgagtcgagtcatcat

SEQ ID NO: 358871 - DNA, 55 bp, Artificial
  Synthetic oligonucleotide
ccccatgaattccttaaagtgctttagataatgcggatctacgtcatcaattacg

SEQ ID NO: 358872 - DNA, 56 bp, Artificial
  Synthetic oligonucleotide
ccccatgacaaaagagttcatggacctcgaggaaaggacggggatcaacttcaaga

SEQ ID NO: 358873 - DNA, 60 bp, Artificial
  Synthetic oligonucleotide
ccccatgaccatacttgacgccatgatcgtgcaaaccaagcgtggccttccgagtggcat

SEQ ID NO: 358874 - DNA, 54 bp, Artificial
  Synthetic oligonucleotide
ccccatgacttcatctgttggcgattcggcagcggactctgtacacctctccac

SEQ ID NO: 358875 - DNA, 55 bp, Artificial
  Synthetic oligonucleotide
ccccatgagccaacatggaatagatgatgcggacagagaagtactgcagtggaag

SEQ ID NO: 358876 - DNA, 55 bp, Artificial
  Synthetic oligonucleotide
ccccatgatatcctgcgtgtgatattactgagccctttatagaccatgtgtgtcg

SEQ ID NO: 358877 - DNA, 55 bp, Artificial
  Synthetic oligonucleotide
ccccatgcagatctatcaaggcctaataaatccataagctccatggattcctccc

SEQ ID NO: 358878 - DNA, 55 bp, Artificial
  Synthetic oligonucleotide
ccccatgcagtaaaggctaggtaaactagtcacagttagcatttcgcgtcgtcta

SEQ ID NO: 358879 - DNA, 58 bp, Artificial
  Synthetic oligonucleotide
ccccatgcccatctggtgatagatgaggaggccccgtgtgttttccccctggcctatc

SEQ ID NO: 358880 - DNA, 59 bp, Artificial
  Synthetic oligonucleotide
ccccatgcctggtctccactagttgaaggcaacttgcaataaaatgagtggaaacaaga

SEQ ID NO: 358881 - DNA, 55 bp, Artificial
  Synthetic oligonucleotide
ccccatgcgcataataaggttgagattcctgttttccgcgcatcaatgatcggta

SEQ ID NO: 358882 - DNA, 58 bp, Artificial
  Synthetic oligonucleotide
ccccatgcgctattaaaagaagtgcaataattcaaaatgcactgacaacgtctctttt

SEQ ID NO: 358883 - DNA, 56 bp, Artificial
  Synthetic oligonucleotide
ccccatgctcaaggattcagtcctctacactgacaccccaaagcttctagcatatt

SEQ ID NO: 358884 - DNA, 55 bp, Artificial
  Synthetic oligonucleotide
ccccatggaagccacgggtcacattgtgctgtccagtgacactgttagcgcacat

SEQ ID NO: 358885 - DNA, 56 bp, Artificial
  Synthetic oligonucleotide
ccccatggagaaggacacctctcccggactgccctacacgcaacaaggacttagac

SEQ ID NO: 358886 - DNA, 52 bp, Artificial
  Synthetic oligonucleotide
ccccatggaggatattgtatccagtttcgaaccagcaatgcaatcagctatt

SEQ ID NO: 358887 - DNA, 55 bp, Artificial
  Synthetic oligonucleotide
ccccatggcaacgatttccatcatcaatgactccattgacagcgccaggtatcgt

SEQ ID NO: 358888 - DNA, 55 bp, Artificial
  Synthetic oligonucleotide
ccccatggcgattaatggcggggacccccaaggtttcgcgctctgtcaattattc

SEQ ID NO: 358889 - DNA, 50 bp, Artificial
  Synthetic oligonucleotide
ccccatggctcaagatacttcatcggctcggagcatggatgatacgcaca

SEQ ID NO: 358890 - DNA, 56 bp, Artificial
  Synthetic oligonucleotide
ccccatgggaaatggaacggggcgtagacgtgcagtataatggctggagctttctt

SEQ ID NO: 358891 - DNA, 54 bp, Artificial
  Synthetic oligonucleotide
ccccatgggatctggacaggggcgtagaagggcccagtaatggctggcgccttc

SEQ ID NO: 358892 - DNA, 51 bp, Artificial
  Synthetic oligonucleotide
ccccatggttgcaggagcttcatagctaaagatatgcatattacggcaaat

SEQ ID NO: 358893 - DNA, 58 bp, Artificial
  Synthetic oligonucleotide
ccccatgtaagaaatagaattggccagggtctatatcggttcaatacagatgaggaag

SEQ ID NO: 358894 - DNA, 54 bp, Artificial
  Synthetic oligonucleotide
ccccatgtacaacaagacaaatcccgccatggggtacgtgttttatgacagaaa

SEQ ID NO: 358895 - DNA, 55 bp, Artificial
  Synthetic oligonucleotide
ccccatgtactaccgtggtcaattctattgtgaatcagcttgcgtgctacaccat

SEQ ID NO: 358896 - DNA, 55 bp, Artificial
  Synthetic oligonucleotide
ccccatgtacttgtggctctagtgacctctacttggttacgagggaggccgacgt

SEQ ID NO: 358897 - DNA, 52 bp, Artificial
  Synthetic oligonucleotide
ccccatgtctcctggtatttattcctgtctgagcggcaatacgtcagcttgt

SEQ ID NO: 358898 - DNA, 54 bp, Artificial
  Synthetic oligonucleotide
ccccatgtgcttccatataaggctgtgacagcgcatggttattgtggttctgtt

SEQ ID NO: 358899 - DNA, 57 bp, Artificial
  Synthetic oligonucleotide
ccccatgttcgcagaatacaacggtctgagattggccgggccacagggactacctgt

SEQ ID NO: 358900 - DNA, 53 bp, Artificial
  Synthetic oligonucleotide
ccccattagtagatgttaaaagcaagcacatagtcggaattcatagtcttgcg

SEQ ID NO: 358901 - DNA, 51 bp, Artificial
  Synthetic oligonucleotide
ccccattcacgtgctgtgccgtgtcgttggttcgcgtgtaaaaagccaccc

SEQ ID NO: 358902 - DNA, 60 bp, Artificial
  Synthetic oligonucleotide
ccccattcagttctgtgagaatacaccatctatcgatctagcccacgttgttagtaaaga

SEQ ID NO: 358903 - DNA, 57 bp, Artificial
  Synthetic oligonucleotide
ccccattcatgtccagctattaagtaccgccctacctgtgagggtaagacagtatcc

SEQ ID NO: 358904 - DNA, 58 bp, Artificial
  Synthetic oligonucleotide
ccccattccgatgtgtctccatccttatcgacgtaggacttgacgtcggagctggatt

SEQ ID NO: 358905 - DNA, 55 bp, Artificial
  Synthetic oligonucleotide
ccccattccgtcgacggtagatggcacaagttctcggcatcgatcgtggtactgg

SEQ ID NO: 358906 - DNA, 55 bp, Artificial
  Synthetic oligonucleotide
ccccattcgaagcagagcatgcctctcacatttgccgaacctttggatctctggt

SEQ ID NO: 358907 - DNA, 55 bp, Artificial
  Synthetic oligonucleotide
ccccattcgacggtgtctccgtccttatccagataggacttgacatctgagcttg

SEQ ID NO: 358908 - DNA, 54 bp, Artificial
  Synthetic oligonucleotide
ccccattcgagctaccattagatttataccccggttttcttggagtcattcttg

SEQ ID NO: 358909 - DNA, 57 bp, Artificial
  Synthetic oligonucleotide
ccccattctaaggttaaccgctcctgatgagagagtaatgatagaaagagggaattg

SEQ ID NO: 358910 - DNA, 54 bp, Artificial
  Synthetic oligonucleotide
ccccattctgagtctggggagactccgatggggtggtctcgggtttattcccta

SEQ ID NO: 358911 - DNA, 55 bp, Artificial
  Synthetic oligonucleotide
ccccattgaagccttctgctgaaatgcgtgttgacccgaccaacatctacagtcg

SEQ ID NO: 358912 - DNA, 55 bp, Artificial
  Synthetic oligonucleotide
ccccattgaatggtcacgtacgtagcaacggtgcgactacaacacgtacttgcgc

SEQ ID NO: 358913 - DNA, 53 bp, Artificial
  Synthetic oligonucleotide
ccccattgaattcatgctcgcgtttgctccggggcaagacccggtaaaggtgc

SEQ ID NO: 358914 - DNA, 51 bp, Artificial
  Synthetic oligonucleotide
ccccattgcaaagtatcatccctccagtcctacgtcaaccagttccaaatt

SEQ ID NO: 358915 - DNA, 52 bp, Artificial
  Synthetic oligonucleotide
ccccattgccatttttggcgacccctgccaaggcactgcaccgtgtatccca

SEQ ID NO: 358916 - DNA, 55 bp, Artificial
  Synthetic oligonucleotide
ccccattgcggcttaacacctgtttatggccacaccgttggaatctgtgatatga

SEQ ID NO: 358917 - DNA, 55 bp, Artificial
  Synthetic oligonucleotide
ccccattggatggtgtctccgtccttgtccatataggattggacgtcggagctgg

SEQ ID NO: 358918 - DNA, 54 bp, Artificial
  Synthetic oligonucleotide
ccccattggattactaaaccgaatcgtcaaggccttggttattactctgcctcc

SEQ ID NO: 358919 - DNA, 51 bp, Artificial
  Synthetic oligonucleotide
ccccattgtacatgacactcgccacataggttatttcatccggcctgcccg

SEQ ID NO: 358920 - DNA, 52 bp, Artificial
  Synthetic oligonucleotide
ccccattgtgctaactcctgctgctctcacaatgttcccagataccatcaag

SEQ ID NO: 358921 - DNA, 55 bp, Artificial
  Synthetic oligonucleotide
ccccattgtgtgttactatgacttgtcttaaccccgatagtaatagtagtgctgt

SEQ ID NO: 358922 - DNA, 51 bp, Artificial
  Synthetic oligonucleotide
ccccatttccaattttctggggcttgttgtcttgctcaaggtccaccacag

SEQ ID NO: 358923 - DNA, 55 bp, Artificial
  Synthetic oligonucleotide
ccccatttcgattgagcacctttataaggtctactcttatctgctttgcctcaaa

SEQ ID NO: 358924 - DNA, 50 bp, Artificial
  Synthetic oligonucleotide
ccccatttgacctacaatcagatgattcatacggtactttggcaacctgg

SEQ ID NO: 358925 - DNA, 55 bp, Artificial
  Synthetic oligonucleotide
ccccatttgcaaggctacctccattttaaaactaagaagcgactgagcgcgctta

SEQ ID NO: 358926 - DNA, 55 bp, Artificial
  Synthetic oligonucleotide
ccccatttgctgtgatccatgctgtagtttaacaacccttctctcacattgatag

SEQ ID NO: 358927 - DNA, 54 bp, Artificial
  Synthetic oligonucleotide
ccccatttggtttgaagcccttaaacgagtattgatggacttgtcttttgatcc

SEQ ID NO: 358928 - DNA, 53 bp, Artificial
  Synthetic oligonucleotide
ccccatttgtaccccgattcaatcggggtacaactatccgtacatctttattg

SEQ ID NO: 358929 - DNA, 56 bp, Artificial
  Synthetic oligonucleotide
cccccaaagggattcgaagctaaagagtggagacacacgagaaagagagcgtccca

SEQ ID NO: 358930 - DNA, 52 bp, Artificial
  Synthetic oligonucleotide
cccccaaatatatcggggacgcggagagagaaataattcccggattccccaa

SEQ ID NO: 358931 - DNA, 54 bp, Artificial
  Synthetic oligonucleotide
cccccaacaagaccaaattacaacccagtgtattccatgatattttcccaggta

SEQ ID NO: 358932 - DNA, 55 bp, Artificial
  Synthetic oligonucleotide
cccccaacatcaacgaaacaaactccacaaccacgataatcaattacaataccca

SEQ ID NO: 358933 - DNA, 55 bp, Artificial
  Synthetic oligonucleotide
cccccaacttcagccgcttgtctgccacatggaggtaccccaatgcttgacatct

SEQ ID NO: 358934 - DNA, 60 bp, Artificial
  Synthetic oligonucleotide
cccccaagctacagcgctcctgcccaccaggtctatccagctgtatccgcccttatcgct

SEQ ID NO: 358935 - DNA, 59 bp, Artificial
  Synthetic oligonucleotide
cccccaatatgtctatgggtctgtttcagtcacttgcgtgtggggctccgcatcttggt

SEQ ID NO: 358936 - DNA, 52 bp, Artificial
  Synthetic oligonucleotide
cccccaatctgtcttaggcaaagactcacctaacaatcaccccgtgtattcc

SEQ ID NO: 358937 - DNA, 59 bp, Artificial
  Synthetic oligonucleotide
cccccacaagggcggcgccggtttggagccagggccatggtcacatatgattgcgagcc

SEQ ID NO: 358938 - DNA, 51 bp, Artificial
  Synthetic oligonucleotide
cccccacaattttactatgaccaactagtaacctgggagggaatagttaaa

SEQ ID NO: 358939 - DNA, 58 bp, Artificial
  Synthetic oligonucleotide
cccccacacaggcctatgaggcctgcagcaactgtagttttcccacagtttacaggcc

SEQ ID NO: 358940 - DNA, 54 bp, Artificial
  Synthetic oligonucleotide
cccccaccaacttattaacctaaggactaatactactgcctccatccgcgtgcc

SEQ ID NO: 358941 - DNA, 59 bp, Artificial
  Synthetic oligonucleotide
cccccacccactacgtgacggagtcggatgcgtcgcagcgcgtgacccaactgcttggc

SEQ ID NO: 358942 - DNA, 57 bp, Artificial
  Synthetic oligonucleotide
cccccaccgtgtgggcaaccgcctacgcagccgcagccgtcagcggcgaatattccc

SEQ ID NO: 358943 - DNA, 54 bp, Artificial
  Synthetic oligonucleotide
cccccacggtggccactagggatggcagactccccacgacgcagcttcgacgtc

SEQ ID NO: 358944 - DNA, 56 bp, Artificial
  Synthetic oligonucleotide
cccccacgtcaccccccgcactacactcggagagcgtcgccagtctgacaaaatac

SEQ ID NO: 358945 - DNA, 57 bp, Artificial
  Synthetic oligonucleotide
cccccactgtcctcgtcacaaacaaaaggaggacatgggtcaatcggcccatgtaca

SEQ ID NO: 358946 - DNA, 60 bp, Artificial
  Synthetic oligonucleotide
cccccactgtggcacacagtgatgcattagccaggcgctttgcgtttgacatggacattc

SEQ ID NO: 358947 - DNA, 57 bp, Artificial
  Synthetic oligonucleotide
cccccagcagtattccaccatgtgtgatagtaccttgtcgggcatgtctcgtacttg

SEQ ID NO: 358948 - DNA, 60 bp, Artificial
  Synthetic oligonucleotide
cccccagcgctcaggacgggacatcacgtgcatctaacaaatgcacgtgagaaggaagta

SEQ ID NO: 358949 - DNA, 60 bp, Artificial
  Synthetic oligonucleotide
cccccagctggatatgcgattctacaatgtaatgataagaagttcaatgggacgggtcca

SEQ ID NO: 358950 - DNA, 56 bp, Artificial
  Synthetic oligonucleotide
cccccaggacaaagtcaacaaccagctggtgaccaaaggagtcaccgtcctgaatc

SEQ ID NO: 358951 - DNA, 56 bp, Artificial
  Synthetic oligonucleotide
cccccaggtacgtcctgaatctggtgattcacctcccgaagacaggcgcgttctac

SEQ ID NO: 358952 - DNA, 58 bp, Artificial
  Synthetic oligonucleotide
cccccaggtggtgcaggccagagacatgcccctgactggttgctccctttgcttttag

SEQ ID NO: 358953 - DNA, 54 bp, Artificial
  Synthetic oligonucleotide
cccccagtatacaaactaccctccccaccagtgtaaatcttactcagcttccac

SEQ ID NO: 358954 - DNA, 57 bp, Artificial
  Synthetic oligonucleotide
cccccatcaggtctttaatgtaacctggagagtcaccaacctgatgactgggcgtac

SEQ ID NO: 358955 - DNA, 60 bp, Artificial
  Synthetic oligonucleotide
cccccatctgcggcctaaggaggataagcctgatgcgccctcccatgcggaggacgctat

SEQ ID NO: 358956 - DNA, 55 bp, Artificial
  Synthetic oligonucleotide
cccccatgaattccttaagtgtttgaggtagtggggggtcgacgtcatcaatgac

SEQ ID NO: 358957 - DNA, 47 bp, Artificial
  Synthetic oligonucleotide
ccccccaaaagtgtacactttataaagggtacaccccccgctttagt

SEQ ID NO: 358958 - DNA, 58 bp, Artificial
  Synthetic oligonucleotide
ccccccaaagaccgtgcattcaaacataacacgtaatatgacatgggccgagacactc

SEQ ID NO: 358959 - DNA, 53 bp, Artificial
  Synthetic oligonucleotide
ccccccacggtgtccatttcacaaggggttatgtcattgtaatttacagtggt

SEQ ID NO: 358960 - DNA, 53 bp, Artificial
  Synthetic oligonucleotide
ccccccactagtttggtcgatgaggctaggagttccccacgggcgaccgtgtc

SEQ ID NO: 358961 - DNA, 48 bp, Artificial
  Synthetic oligonucleotide
ccccccactttacccctggttacctccagaacccagagttaactttaa

SEQ ID NO: 358962 - DNA, 52 bp, Artificial
  Synthetic oligonucleotide
ccccccagtaatattgctgcgcggcggtgcaaatacattaaaatgctatcgc

SEQ ID NO: 358963 - DNA, 48 bp, Artificial
  Synthetic oligonucleotide
ccccccatactacccctggttaccccctacaccaaaagtacaatttaa

SEQ ID NO: 358964 - DNA, 57 bp, Artificial
  Synthetic oligonucleotide
ccccccatagtggcaaaagaaatagtagccagctgtgacaaatgccagctaaaaggg

SEQ ID NO: 358965 - DNA, 58 bp, Artificial
  Synthetic oligonucleotide
ccccccatatgctaccttgaccaccactgccacttcaacatccatggaattaaacacc

SEQ ID NO: 358966 - DNA, 58 bp, Artificial
  Synthetic oligonucleotide
cccccccaaatacacctacaactgcagacatgttgtgctttgtatcgggatgtaagga

SEQ ID NO: 358967 - DNA, 54 bp, Artificial
  Synthetic oligonucleotide
cccccccaataccacctccacggaggaagaggacggttgtcctgacagagtcca

SEQ ID NO: 358968 - DNA, 54 bp, Artificial
  Synthetic oligonucleotide
cccccccaatatccaagcccaacagcaaaacgccttaaaccgatcaagcgctaa

SEQ ID NO: 358969 - DNA, 58 bp, Artificial
  Synthetic oligonucleotide
cccccccacactctggtaggagcgctccttcgtactgccacttactacttcgctgatc

SEQ ID NO: 358970 - DNA, 55 bp, Artificial
  Synthetic oligonucleotide
ccccccccagacctctttgtagacaagtggtacactcaagaggatctgtgttccg

SEQ ID NO: 358971 - DNA, 51 bp, Artificial
  Synthetic oligonucleotide
cccccccccaactttgaatttgtccaggtttagtccctcacattatttata

SEQ ID NO: 358972 - DNA, 52 bp, Artificial
  Synthetic oligonucleotide
cccccccccttggcgcgcgttctcctcacgctggaatttagtttagcgcttt

SEQ ID NO: 358973 - DNA, 60 bp, Artificial
  Synthetic oligonucleotide
ccccccccgtggttgtgtgctactcgtgcaacatgaagatggatctcatgccgggtacgc

SEQ ID NO: 358974 - DNA, 57 bp, Artificial
  Synthetic oligonucleotide
cccccccctcatgggacactatgtggaaatgccttatacggctaaagcccatgctaa

SEQ ID NO: 358975 - DNA, 53 bp, Artificial
  Synthetic oligonucleotide
cccccccgaacagttccggacattcgaaagggctttcgtcagctccagaggac

SEQ ID NO: 358976 - DNA, 53 bp, Artificial
  Synthetic oligonucleotide
cccccccgcacgttgtttcaatctcgtccgcttgtttttgttagttctcgcgc

SEQ ID NO: 358977 - DNA, 52 bp, Artificial
  Synthetic oligonucleotide
cccccccgcagaaccgtaccgccgcctggttgttgacgaatgctttaagttg

SEQ ID NO: 358978 - DNA, 55 bp, Artificial
  Synthetic oligonucleotide
cccccccgcgggagtagagccgtagcgatgggaggggatgctaggaggtgggaga

SEQ ID NO: 358979 - DNA, 54 bp, Artificial
  Synthetic oligonucleotide
ccccccctagtccccaaccgtgacaggattctcgcggcccttgcctcccatatg

SEQ ID NO: 358980 - DNA, 58 bp, Artificial
  Synthetic oligonucleotide
ccccccctcctgggatgtgatgtggaaatgtctcatacggcttaagcctgtacttaca

SEQ ID NO: 358981 - DNA, 55 bp, Artificial
  Synthetic oligonucleotide
ccccccctgagaaatgtgacccccttttgtgtgatatcggtgagtcctctccaaa

SEQ ID NO: 358982 - DNA, 51 bp, Artificial
  Synthetic oligonucleotide
ccccccctgtaacttagaagttttgaacaaggaccaataggcagtaaccac

SEQ ID NO: 358983 - DNA, 56 bp, Artificial
  Synthetic oligonucleotide
ccccccgaagccacactcaggcttaaaagtctatacccagaaatctacacgttgca

SEQ ID NO: 358984 - DNA, 57 bp, Artificial
  Synthetic oligonucleotide
ccccccgaagcgctctatagactacgcagcctctacccagaggtctacacgcttacc

SEQ ID NO: 358985 - DNA, 53 bp, Artificial
  Synthetic oligonucleotide
ccccccgcatggctcctgcagtaccgcggcttcgagaaacacatggtcaccat

SEQ ID NO: 358986 - DNA, 56 bp, Artificial
  Synthetic oligonucleotide
ccccccgcctctaaaattgtaagtttgttggcatgcgcagtagattaatcgatacc

SEQ ID NO: 358987 - DNA, 56 bp, Artificial
  Synthetic oligonucleotide
ccccccggtaaatatctgagacaccaataggtaaatgagataccaattgaggcacc

SEQ ID NO: 358988 - DNA, 52 bp, Artificial
  Synthetic oligonucleotide
cccccctagcggggcccccccataagatggcgagaaatccactcgtgggtcc

SEQ ID NO: 358989 - DNA, 56 bp, Artificial
  Synthetic oligonucleotide
cccccctcaacgttcggggggggcgtgacgctgtcatcctactcatgtgtgttgta

SEQ ID NO: 358990 - DNA, 51 bp, Artificial
  Synthetic oligonucleotide
cccccctcaattcaacgtacccccttcactctcccacctccccgtgtactc

SEQ ID NO: 358991 - DNA, 52 bp, Artificial
  Synthetic oligonucleotide
cccccctcagcaatcatgagtgggggagatgacatcgtttccagggtgatag

SEQ ID NO: 358992 - DNA, 59 bp, Artificial
  Synthetic oligonucleotide
cccccctcagtggcgaaggttgtcaatacagatgattacgtaacacgcactggcattta

SEQ ID NO: 358993 - DNA, 48 bp, Artificial
  Synthetic oligonucleotide
cccccctcgcgcccctcggtcccccctcgcgcccctcggtcccccctc

SEQ ID NO: 358994 - DNA, 57 bp, Artificial
  Synthetic oligonucleotide
cccccctggtctcgtctgggattcatgttgtgcaagaccactataacagagtagcct

SEQ ID NO: 358995 - DNA, 54 bp, Artificial
  Synthetic oligonucleotide
cccccctggtgattccccgtcacgccctcctgggcgcagcccggatcgagttct

SEQ ID NO: 358996 - DNA, 58 bp, Artificial
  Synthetic oligonucleotide
cccccctgtaaccgtggagcctgtgggtccctctgatccatctatcgtgtctcttgta

SEQ ID NO: 358997 - DNA, 56 bp, Artificial
  Synthetic oligonucleotide
cccccctgtagttattgatccagtgggtgctgccgatccctctatagttacccttg

SEQ ID NO: 358998 - DNA, 55 bp, Artificial
  Synthetic oligonucleotide
ccccccttactcgctctcggggagtttctcctcctgctcacgtggtcccctcaca

SEQ ID NO: 358999 - DNA, 56 bp, Artificial
  Synthetic oligonucleotide
ccccccttgctattcgccatactacccatgtcccctacaatccaaccagttcagga

SEQ ID NO: 359000 - DNA, 59 bp, Artificial
  Synthetic oligonucleotide
cccccgaagacgcactccctctcctcgcaggagaaggtctcaatcaccgcgtcgcagac

SEQ ID NO: 359001 - DNA, 50 bp, Artificial
  Synthetic oligonucleotide
cccccgaagggacaaggacgggagagcgggaacactccgaggaaagaccc

SEQ ID NO: 359002 - DNA, 53 bp, Artificial
  Synthetic oligonucleotide
cccccgaatataataggatgtattggcataaaatgagggtggaaaaaggtaaa

SEQ ID NO: 359003 - DNA, 47 bp, Artificial
  Synthetic oligonucleotide
cccccgacccttaccctggaaccggcccccatgttgggggaccccca

SEQ ID NO: 359004 - DNA, 54 bp, Artificial
  Synthetic oligonucleotide
cccccgaggaggcaaaaccaacaatcgaagaacgcctccgaaagctagagctaa

SEQ ID NO: 359005 - DNA, 51 bp, Artificial
  Synthetic oligonucleotide
cccccgagggaaacaccacaaagacccccacgaccacctactccagaactg

SEQ ID NO: 359006 - DNA, 49 bp, Artificial
  Synthetic oligonucleotide
cccccgaggttcccgtccctcttggggccctactgacccccggcatagg

SEQ ID NO: 359007 - DNA, 57 bp, Artificial
  Synthetic oligonucleotide
cccccgatacccaaacgtcagatgtgtctgcagggacaactggaagggctctaatag

SEQ ID NO: 359008 - DNA, 58 bp, Artificial
  Synthetic oligonucleotide
cccccgatccctctgtcgccaggacataaaaacatgccgtggagaccgccggtgcata

SEQ ID NO: 359009 - DNA, 51 bp, Artificial
  Synthetic oligonucleotide
cccccgatccgaggggcccgactaccaagtttggaaagcactccgggccga

SEQ ID NO: 359010 - DNA, 60 bp, Artificial
  Synthetic oligonucleotide
cccccgatgttcccaaagggtgtgaaggcccatgcaaggtccagtcatatgagcagcgtc

SEQ ID NO: 359011 - DNA, 55 bp, Artificial
  Synthetic oligonucleotide
cccccgcattctcactagccaatcttttgaacggtagttacggtgtcgacactcc

SEQ ID NO: 359012 - DNA, 53 bp, Artificial
  Synthetic oligonucleotide
cccccgccaaatattacgccggttatctctccactcaccaacttgacggtatt

SEQ ID NO: 359013 - DNA, 53 bp, Artificial
  Synthetic oligonucleotide
cccccgccccatgacaaggccgaacatggagcattaaagggaggcccccggaa

SEQ ID NO: 359014 - DNA, 58 bp, Artificial
  Synthetic oligonucleotide
cccccgccgtcatgggacgtgatgtggaaatgtctcaccagacttaagccgaccctca

SEQ ID NO: 359015 - DNA, 52 bp, Artificial
  Synthetic oligonucleotide
cccccgcgaatgcaaaccgggggcgggggcactgccccgcgccccgagctgg

SEQ ID NO: 359016 - DNA, 50 bp, Artificial
  Synthetic oligonucleotide
cccccgcggtagaagtagctaccatggcagagcaaaacgagggtttacta

SEQ ID NO: 359017 - DNA, 60 bp, Artificial
  Synthetic oligonucleotide
cccccgcttgacagaataacatcattgatagatgtagaatagatttaacgactccaacca

SEQ ID NO: 359018 - DNA, 57 bp, Artificial
  Synthetic oligonucleotide
cccccgcttttatgtctaataggcgcgtcggagtgcgctgataaagttaacattctc

SEQ ID NO: 359019 - DNA, 56 bp, Artificial
  Synthetic oligonucleotide
cccccggccctgacagcgccgacggggcggctgaagatggctcctcgacaagtggt

SEQ ID NO: 359020 - DNA, 55 bp, Artificial
  Synthetic oligonucleotide
cccccgggaagtgggacgttttcaacactcatgcttgatccgttcgcacttaaca

SEQ ID NO: 359021 - DNA, 58 bp, Artificial
  Synthetic oligonucleotide
cccccgggcatgtttgggagtcggctaatccattctgtggcgagagcacactttacac

SEQ ID NO: 359022 - DNA, 57 bp, Artificial
  Synthetic oligonucleotide
cccccgggggcaaggtcgctcaccccatgtacttgtggctctagtgacctctatctg

SEQ ID NO: 359023 - DNA, 51 bp, Artificial
  Synthetic oligonucleotide
cccccgtgcggaggacgggcggggtgtgtatcggactgttctcggccctga

SEQ ID NO: 359024 - DNA, 54 bp, Artificial
  Synthetic oligonucleotide
cccccgtggtaaccctgatcagaacctcgagactctacacgccttcccgccgtc

SEQ ID NO: 359025 - DNA, 52 bp, Artificial
  Synthetic oligonucleotide
cccccgttctactccattccctcgttaccggagatcgtataatgccggtaag

SEQ ID NO: 359026 - DNA, 57 bp, Artificial
  Synthetic oligonucleotide
ccccctaacgtcacctcctcgtgtagttatccatgcaacttgtgttttacatagcca

SEQ ID NO: 359027 - DNA, 55 bp, Artificial
  Synthetic oligonucleotide
ccccctactacacctccaaatgaaacgtggtggggagacaacagtacagagccaa

SEQ ID NO: 359028 - DNA, 50 bp, Artificial
  Synthetic oligonucleotide
ccccctatctcaagactttcctatcagtggtgagagaacaagcactcaag

SEQ ID NO: 359029 - DNA, 58 bp, Artificial
  Synthetic oligonucleotide
ccccctcaacgtccgaggggggcgcgacgctatcatcctactcatgtgtgttgtccac

SEQ ID NO: 359030 - DNA, 51 bp, Artificial
  Synthetic oligonucleotide
ccccctcaagatgagctgccatagtttgatgtttgtcaggttccatagctt

SEQ ID NO: 359031 - DNA, 56 bp, Artificial
  Synthetic oligonucleotide
ccccctcaccaggtcccgctcaaggtcgcgatcccgtacacgagagtctgttgacg

SEQ ID NO: 359032 - DNA, 60 bp, Artificial
  Synthetic oligonucleotide
ccccctcacggcggccagagacgttgtgcaggcttgccctcactgcaattccgccccagc
